United States Patent Application Publication US 2023/0212319 A1 - sequence listing, part 10

SEQ ID NO: 16276 - protein, 1163 aa, Artificial Sequence
  Synthetic Polypeptide
MALPVTALLLPLALLLHAARPEVQLLESGGGLVQPGGSLRLSCAASGFTFSSYAMSWVRQAPGKGLEWVSSISGSGDYIYYADSVKGRFTISRDISKNTLYLQMNSLRAEDTAVYYCAKEGTGANSSLADYRGQGTLVTVSSGGGSGGGSEVQLVESGGGSVQAGGSLRLSCTTSGRALNMYVMGWFRQAPGNEREFVAATSSSGGSTSYPDSVKGRFTISRDNAKNTVYLQMNSLKPEDTAAYRCAASPYVSTPTMNILEEYRYWGLGTQVTVSSGTGGGGSGGGGSGGGGSEFDIQMTQSPSSLSASVGDRVTITCKASDHINNWLAWYQQKPGQAPKLLIYGATTLETGVPSRFSGSGSGTDYTLTISSLQPEDFATYYCQQSWNTPWTFGQGTKLEIKRLEGKPIPNPLLGLDSTGSGEDLKNVFPPEVAVFEPSEAEISHTQKATLVCLATGFYPDHVELSWWVNGKEVHSGVSTDPQPLKEQPALNDSRYCLSSRLRVSATFWQNPRNHFRCQVQFYGLSENDEWTQDRAKPVTQIVSAEAWGRADCGSQSFGLLDPKLCYLLDGILFIYGVILTALFLRVKFSRSADAPAYQQGQNQLYNELNLGRREEYDVLDKRRGRDPEMGGKPQRRKNPQEGLYNELQKDKMAEAYSEIGMKGERRRGKGHDGLYQGLSTATKDTYDALHMQALPPRRAKRSGSGATNFSLLKQAGDVEENPGPTSMDWIWRILFLVGAATGAHSFEQVQLQQPGAELVKPGASVKMSCKASGYAFSSYWINWMKQKPGQGLEWIGQIYPGDGDTNYNGKFKGRATLTADTSSSTAYMQLSSLTSEDSAVYFCARSITTVVGCAMDYWGQGTSVTVSSTREQKLISEEDGSGIQNPDPAVYQLRDSKSSDKSVCLFTDFDSQTNVSQSKDSDVYITDKTVLDMRSMDFKSNSAVAWSNKSDFACANAFNNSIIPEDTFFPSPESSCGTQSFGLLDPKLCYLLDGILFIYGVILTALFLRSKRSRLLHSDYMNMTPRRPGPTRKHYQPYAPPRDFAAYRSRVKFSRSADAPAYQQGQNQLYNELNLGRREEYDVLDKRRGRDPEMGGKPQRRKNPQEGLYNELQKDKMAEAYSEIGMKGERRRGKGHDGLYQGLSTATKDTYDALHMQALPPR

SEQ ID NO: 16277 - protein, 1204 aa, Artificial Sequence
  Synthetic Polypeptide
MALPVTALLLPLALLLHAARPEVQLLESGGGLVQPGGSLRLSCAASGFTFSSYAMSWVRQAPGKGLEWVSSISGSGDYIYYADSVKGRFTISRDISKNTLYLQMNSLRAEDTAVYYCAKEGTGANSSLADYRGQGTLVTVSSGGGSGGGSEVQLVESGGGSVQAGGSLRLSCTTSGRALNMYVMGWFRQAPGNEREFVAATSSSGGSTSYPDSVKGRFTISRDNAKNTVYLQMNSLKPEDTAAYRCAASPYVSTPTMNILEEYRYWGLGTQVTVSSGTGGGGSGGGGSGGGGSEFDIQMTQSPSSLSASVGDRVTITCKASDHINNWLAWYQQKPGQAPKLLIYGATTLETGVPSRFSGSGSGTDYTLTISSLQPEDFATYYCQQSWNTPWTFGQGTKLEIKRLEGKPIPNPLLGLDSTGSGEDLKNVFPPEVAVFEPSEAEISHTQKATLVCLATGFYPDHVELSWWVNGKEVHSGVSTDPQPLKEQPALNDSRYCLSSRLRVSATFWQNPRNHFRCQVQFYGLSENDEWTQDRAKPVTQIVSAEAWGRADCGSQSFGLLDPKLCYLLDGILFIYGVILTALFLRSKRSRLLHSDYMNMTPRRPGPTRKHYQPYAPPRDFAAYRSRVKFSRSADAPAYQQGQNQLYNELNLGRREEYDVLDKRRGRDPEMGGKPQRRKNPQEGLYNELQKDKMAEAYSEIGMKGERRRGKGHDGLYQGLSTATKDTYDALHMQALPPRRAKRSGSGATNFSLLKQAGDVEENPGPTSMDWIWRILFLVGAATGAHSFEQVQLQQPGAELVKPGASVKMSCKASGYAFSSYWINWMKQKPGQGLEWIGQIYPGDGDTNYNGKFKGRATLTADTSSSTAYMQLSSLTSEDSAVYFCARSITTVVGCAMDYWGQGTSVTVSSTREQKLISEEDGSGIQNPDPAVYQLRDSKSSDKSVCLFTDFDSQTNVSQSKDSDVYITDKTVLDMRSMDFKSNSAVAWSNKSDFACANAFNNSIIPEDTFFPSPESSCGTQSFGLLDPKLCYLLDGILFIYGVILTALFLRSKRSRLLHSDYMNMTPRRPGPTRKHYQPYAPPRDFAAYRSRVKFSRSADAPAYQQGQNQLYNELNLGRREEYDVLDKRRGRDPEMGGKPQRRKNPQEGLYNELQKDKMAEAYSEIGMKGERRRGKGHDGLYQGLSTATKDTYDALHMQALPPR

SEQ ID NO: 16278 - protein, 1165 aa, Artificial Sequence
  Synthetic Polypeptide
MALPVTALLLPLALLLHAARPEVQLLESGGGLVQPGGSLRLSCAASGFTFSSYAMSWVRQAPGKGLEWVSSISGSGDYIYYADSVKGRFTISRDISKNTLYLQMNSLRAEDTAVYYCAKEGTGANSSLADYRGQGTLVTVSSGGGSGGGSEVQLVESGGGSVQAGGSLRLSCTTSGRALNMYVMGWFRQAPGNEREFVAATSSSGGSTSYPDSVKGRFTISRDNAKNTVYLQMNSLKPEDTAAYRCAASPYVSTPTMNILEEYRYWGLGTQVTVSSGTGGGGSGGGGSGGGGSEFDIQMTQSPSSLSASVGDRVTITCKASDHINNWLAWYQQKPGQAPKLLIYGATTLETGVPSRFSGSGSGTDYTLTISSLQPEDFATYYCQQSWNTPWTFGQGTKLEIKRLEGKPIPNPLLGLDSTGSGEDLKNVFPPEVAVFEPSEAEISHTQKATLVCLATGFYPDHVELSWWVNGKEVHSGVSTDPQPLKEQPALNDSRYCLSSRLRVSATFWQNPRNHFRCQVQFYGLSENDEWTQDRAKPVTQIVSAEAWGRADCGSQSFGLLDPKLCYLLDGILFIYGVILTALFLRVKFSRSADAPAYQQGQNQLYNELNLGRREEYDVLDKRRGRDPEMGGKPQRRKNPQEGLYNELQKDKMAEAYSEIGMKGERRRGKGHDGLYQGLSTATKDTYDALHMQALPPRRAKRSGSGATNFSLLKQAGDVEENPGPTSMDWIWRILFLVGAATGAHSFEQVQLQQPGAELVKPGASVKMSCKASGYAFSSYWINWMKQKPGQGLEWIGQIYPGDGDTNYNGKFKGRATLTADTSSSTAYMQLSSLTSEDSAVYFCARSITTVVGCAMDYWGQGTSVTVSSTREQKLISEEDLGSGIQNPDPAVYQLRDSKSSDKSVCLFTDFDSQTNVSQSKDSDVYITDKTVLDMRSMDFKSNSAVAWSNKSDFACANAFNNSIIPEDTFFPSPESSCGTQSFGLLDPKLCYLLDGILFIYGVILTALFLKRGRKKLLYIFKQPFMRPVQTTQEEDGCSCRFPEEEEGGCELRVKFSRSADAPAYQQGQNQLYNELNLGRREEYDVLDKRRGRDPEMGGKPQRRKNPQEGLYNELQKDKMAEAYSEIGMKGERRRGKGHDGLYQGLSTATKDTYDALHMQALPPR

SEQ ID NO: 16279 - protein, 1207 aa, Artificial Sequence
  Synthetic Polypeptide
MALPVTALLLPLALLLHAARPEVQLLESGGGLVQPGGSLRLSCAASGFTFSSYAMSWVRQAPGKGLEWVSSISGSGDYIYYADSVKGRFTISRDISKNTLYLQMNSLRAEDTAVYYCAKEGTGANSSLADYRGQGTLVTVSSGGGSGGGSEVQLVESGGGSVQAGGSLRLSCTTSGRALNMYVMGWFRQAPGNEREFVAATSSSGGSTSYPDSVKGRFTISRDNAKNTVYLQMNSLKPEDTAAYRCAASPYVSTPTMNILEEYRYWGLGTQVTVSSGTGGGGSGGGGSGGGGSEFDIQMTQSPSSLSASVGDRVTITCKASDHINNWLAWYQQKPGQAPKLLIYGATTLETGVPSRFSGSGSGTDYTLTISSLQPEDFATYYCQQSWNTPWTFGQGTKLEIKRLEGKPIPNPLLGLDSTGSGEDLKNVFPPEVAVFEPSEAEISHTQKATLVCLATGFYPDHVELSWWVNGKEVHSGVSTDPQPLKEQPALNDSRYCLSSRLRVSATFWQNPRNHFRCQVQFYGLSENDEWTQDRAKPVTQIVSAEAWGRADCGSQSFGLLDPKLCYLLDGILFIYGVILTALFLKRGRKKLLYIFKQPFMRPVQTTQEEDGCSCRFPEEEEGGCELRVKFSRSADAPAYQQGQNQLYNELNLGRREEYDVLDKRRGRDPEMGGKPQRRKNPQEGLYNELQKDKMAEAYSEIGMKGERRRGKGHDGLYQGLSTATKDTYDALHMQALPPRRAKRSGSGATNFSLLKQAGDVEENPGPTSMDWIWRILFLVGAATGAHSFEQVQLQQPGAELVKPGASVKMSCKASGYAFSSYWINWMKQKPGQGLEWIGQIYPGDGDTNYNGKFKGRATLTADTSSSTAYMQLSSLTSEDSAVYFCARSITTVVGCAMDYWGQGTSVTVSSTREQKLISEEDLGSGIQNPDPAVYQLRDSKSSDKSVCLFTDFDSQTNVSQSKDSDVYITDKTVLDMRSMDFKSNSAVAWSNKSDFACANAFNNSIIPEDTFFPSPESSCGTQSFGLLDPKLCYLLDGILFIYGVILTALFLKRGRKKLLYIFKQPFMRPVQTTQEEDGCSCRFPEEEEGGCELRVKFSRSADAPAYQQGQNQLYNELNLGRREEYDVLDKRRGRDPEMGGKPQRRKNPQEGLYNELQKDKMAEAYSEIGMKGERRRGKGHDGLYQGLSTATKDTYDALHMQALPPR

SEQ ID NO: 16280 - protein, 1097 aa, Artificial Sequence
  Synthetic Polypeptide
MALPVTALLLPLALLLHAARPEVQLLESGGGLVQPGGSLRLSCAASGFTFSSYAMSWVRQAPGKGLEWVSSISGSGDYIYYADSVKGRFTISRDISKNTLYLQMNSLRAEDTAVYYCAKEGTGANSSLADYRGQGTLVTVSSGGGSGGGSEVQLVESGGGSVQAGGSLRLSCTTSGRALNMYVMGWFRQAPGNEREFVAATSSSGGSTSYPDSVKGRFTISRDNAKNTVYLQMNSLKPEDTAAYRCAASPYVSTPTMNILEEYRYWGLGTQVTVSSGTGGGGSGGGGSGGGGSEFDIQMTQSPSSLSASVGDRVTITCKASDHINNWLAWYQQKPGQAPKLLIYGATTLETGVPSRFSGSGSGTDYTLTISSLQPEDFATYYCQQSWNTPWTFGQGTKLEIKRLEQSFGLLDPKLCYLLDGILFIYGVILTALFLRVKFSRSADAPAYQQGQNQLYNELNLGRREEYDVLDKRRGRDPEMGGKPQRRKNPQEGLYNELQKDKMAEAYSEIGMKGERRRGKGHDGLYQGLSTATKDTYDALHMQALPPRRAKRSGSGATNFSLLKQAGDVEENPGPTSMDWIWRILFLVGAATGAHSFEQVQLQQPGAELVKPGASVKMSCKASGYAFSSYWINWMKQKPGQGLEWIGQIYPGDGDTNYNGKFKGRATLTADTSSSTAYMQLSSLTSEDSAVYFCARSITTVVGCAMDYWGQGTSVTVSSTRQSFGLLDPKLCYLLDGILFIYGVILTALFLRVKFSRSADAPAYQQGQNQLYNELNLGRREEYDVLDKRRGRDPEMGGKPQRRKNPQEGLYNELQKDKMAEAYSEIGMKGERRRGKGHDGLYQGLSTATKDTYDALHMQALPPRRAKRSGSGVKQTLNFDLLKLAGDVESNPGPSRGHMTEYKPTVRLATRDDVPRAVRTLAAAFADYPATRHTVDPDRHIERVTELQELFLTRVGLDIGKVWVADDGAAVAVWTTPESVEAGAVFAEIGPRMAELSGSRLAAQQQMEGLLAPHRPKEPAWFLATVGVSPDHQGKGLGSAVVLPGVEAAERAGVPAFLETSAPRNLPFYERLGFTVTADVEVPEGPRTWCMTRKPGA

SEQ ID NO: 16281 - protein, 922 aa, Artificial Sequence
  Synthetic Polypeptide
MALPVTALLLPLALLLHAARPEVQLLESGGGLVQPGGSLRLSCAASGFTFSSYAMSWVRQAPGKGLEWVSSISGSGDYIYYADSVKGRFTISRDISKNTLYLQMNSLRAEDTAVYYCAKEGTGANSSLADYRGQGTLVTVSSGGGSGGGSEVQLVESGGGSVQAGGSLRLSCTTSGRALNMYVMGWFRQAPGNEREFVAATSSSGGSTSYPDSVKGRFTISRDNAKNTVYLQMNSLKPEDTAAYRCAASPYVSTPTMNILEEYRYWGLGTQVTVSSGTGGGGSGGGGSGGGGSEFDIQMTQSPSSLSASVGDRVTITCKASDHINNWLAWYQQKPGQAPKLLIYGATTLETGVPSRFSGSGSGTDYTLTISSLQPEDFATYYCQQSWNTPWTFGQGTKLEIKRLEGQPKANPTVTLFPPSSEELQANKATLVCLISDFYPGAVTVAWKADGSPVKAGVETTKPSKQSNNKYAASSYLSLTPEQWKSHRSYSCQVTHEGSTVEKTVAPTECSPIKTDVITMDPKDNCSKDANDTLLLQLTNTSAYYMYLLLLLKSVVYFAIITCCLLRRTAFCCNGEKSRAKRSGSGATNFSLLKQAGDVEENPGPTSMDWIWRILFLVGAATGAHSFEQVQLQQPGAELVKPGASVKMSCKASGYAFSSYWINWMKQKPGQGLEWIGQIYPGDGDTNYNGKFKGRATLTADTSSSTAYMQLSSLTSEDSAVYFCARSITTVVGCAMDYWGQGTSVTVSSTRASTKGPSVFPLAPSSKSTSGGTAALGCLVKDYFPEPVTVSWNSGALTSGVHTFPAVLQSSGLYSLSSVVTVPSSSLGTQTYICNVNHKPSNTKVDKRVEPKSCEVKTDSTDHVKPKETENTKQPSKSCHKPKAIVHTEKVNMMSLTVLGLRMLFAKTVAVNFLLTAKLFFL

SEQ ID NO: 16282 - protein, 900 aa, Artificial Sequence
  Synthetic Polypeptide
MALPVTALLLPLALLLHAARPEVQLLESGGGLVQPGGSLRLSCAASGFTFSSYAMSWVRQAPGKGLEWVSSISGSGDYIYYADSVKGRFTISRDISKNTLYLQMNSLRAEDTAVYYCAKEGTGANSSLADYRGQGTLVTVSSGGGSGGGSEVQLVESGGGSVQAGGSLRLSCTTSGRALNMYVMGWFRQAPGNEREFVAATSSSGGSTSYPDSVKGRFTISRDNAKNTVYLQMNSLKPEDTAAYRCAASPYVSTPTMNILEEYRYWGLGTQVTVSSGTGGGGSGGGGSGGGGSEFDIQMTQSPSSLSASVGDRVTITCKASDHINNWLAWYQQKPGQAPKLLIYGATTLETGVPSRFSGSGSGTDYTLTISSLQPEDFATYYCQQSWNTPWTFGQGTKLEIKRLEGQPKANPTVTLFPPSSEELQANKATLVCLISDFYPGAVTVAWKADGSPVKAGVETTKPSKQSNNKYAASSYLSLTPEQWKSHRSYSCQVTHEGSTVEKTVAPTECSGRADCGITSASYHQGVLSATILYEILLGKATLYAVLVSALVLMAMVKRKDSRGRAKRSGSGATNFSLLKQAGDVEENPGPTSMDWIWRILFLVGAATGAHSFEQVQLQQPGAELVKPGASVKMSCKASGYAFSSYWINWMKQKPGQGLEWIGQIYPGDGDTNYNGKFKGRATLTADTSSSTAYMQLSSLTSEDSAVYFCARSITTVVGCAMDYWGQGTSVTVSSTRASTKGPSVFPLAPSSKSTSGGTAALGCLVKDYFPEPVTVSWNSGALTSGVHTFPAVLQSSGLYSLSSVVTVPSSSLGTQTYICNVNHKPSNTKVDKRVEPKSCIPEDTFFPSSDVPCDVKLVEKSFETDTNLNFQNLSVIGFRILLLKVAGFNLLMTLRLWSS

SEQ ID NO: 16283 - protein, 900 aa, Artificial Sequence
  Synthetic Polypeptide
MALPVTALLLPLALLLHAARPEVQLLESGGGLVQPGGSLRLSCAASGFTFSSYAMSWVRQAPGKGLEWVSSISGSGDYIYYADSVKGRFTISRDISKNTLYLQMNSLRAEDTAVYYCAKEGTGANSSLADYRGQGTLVTVSSGGGSGGGSEVQLVESGGGSVQAGGSLRLSCTTSGRALNMYVMGWFRQAPGNEREFVAATSSSGGSTSYPDSVKGRFTISRDNAKNTVYLQMNSLKPEDTAAYRCAASPYVSTPTMNILEEYRYWGLGTQVTVSSGTGGGGSGGGGSGGGGSEFDIQMTQSPSSLSASVGDRVTITCKASDHINNWLAWYQQKPGQAPKLLIYGATTLETGVPSRFSGSGSGTDYTLTISSLQPEDFATYYCQQSWNTPWTFGQGTKLEIKRLEGQPKANPTVTLFPPSSEELQANKATLVCLISDFYPGAVTVAWKADGSPVKAGVETTKPSKQSNNKYAASSYLSLTPEQWKSHRSYSCQVTHEGSTVEKTVAPTECSGRADCGFTSESYQQGVLSATILYEILLGKATLYAVLVSALVLMAMVKRKDSRGRAKRSGSGATNFSLLKQAGDVEENPGPTSMDWIWRILFLVGAATGAHSFEQVQLQQPGAELVKPGASVKMSCKASGYAFSSYWINWMKQKPGQGLEWIGQIYPGDGDTNYNGKFKGRATLTADTSSSTAYMQLSSLTSEDSAVYFCARSITTVVGCAMDYWGQGTSVTVSSTRASTKGPSVFPLAPSSKSTSGGTAALGCLVKDYFPEPVTVSWNSGALTSGVHTFPAVLQSSGLYSLSSVVTVPSSSLGTQTYICNVNHKPSNTKVDKRVEPKSCIPEDTFFPSPESSCDVKLVEKSFETDTNLNFQNLSVIGFRILLLKVAGFNLLMTLRLWSS

SEQ ID NO: 16284 - protein, 726 aa, Artificial Sequence
  Synthetic Polypeptide
MALPVTALLLPLALLLHAARPEVQLLESGGGLVQPGGSLRLSCAASGFTFSSYAMSWVRQAPGKGLEWVSSISGSGDYIYYADSVKGRFTISRDISKNTLYLQMNSLRAEDTAVYYCAKEGTGANSSLADYRGQGTLVTVSSGGGSGGGSEVQLVESGGGSVQAGGSLRLSCTTSGRALNMYVMGWFRQAPGNEREFVAATSSSGGSTSYPDSVKGRFTISRDNAKNTVYLQMNSLKPEDTAAYRCAASPYVSTPTMNILEEYRYWGLGTQVTVSSGTGGGGSGGGGSGGGGSEFDIQMTQSPSSLSASVGDRVTITCKASDHINNWLAWYQQKPGQAPKLLIYGATTLETGVPSRFSGSGSGTDYTLTISSLQPEDFATYYCQQSWNTPWTFGQGTKLEIKRGGGGSGGGGSGGGGSQVQLQQPGAELVKPGASVKMSCKASGYAFSSYWINWMKQKPGQGLEWIGQIYPGDGDTNYNGKFKGRATLTADTSSSTAYMQLSSLTSEDSAVYFCARSITTVVGCAMDYWGQGTSVTVSSTRDGNEEMGGITQTPYKVSISGTTVILTCPQYPGSEILWQHNDKNIGGDEDDKNIGSDEDHLSLKEFSELEQSGYYVCYPRGSKPEDANFYLYLRARVCENCMEMDVMSVATIVIVDICITGGLLLLVYYWSKNRKAKAKPVTRGAGAGGRQRGQNKERPPPVPNPDYEPIRKGQRDLYSGLNQRRI

SEQ ID NO: 16285 - protein, 691 aa, Artificial Sequence
  Synthetic Polypeptide
MALPVTALLLPLALLLHAARPEVQLLESGGGLVQPGGSLRLSCAASGFTFSSYAMSWVRQAPGKGLEWVSSISGSGDYIYYADSVKGRFTISRDISKNTLYLQMNSLRAEDTAVYYCAKEGTGANSSLADYRGQGTLVTVSSGGGSGGGSEVQLVESGGGSVQAGGSLRLSCTTSGRALNMYVMGWFRQAPGNEREFVAATSSSGGSTSYPDSVKGRFTISRDNAKNTVYLQMNSLKPEDTAAYRCAASPYVSTPTMNILEEYRYWGLGTQVTVSSGTGGGGSGGGGSGGGGSEFDIQMTQSPSSLSASVGDRVTITCKASDHINNWLAWYQQKPGQAPKLLIYGATTLETGVPSRFSGSGSGTDYTLTISSLQPEDFATYYCQQSWNTPWTFGQGTKLEIKRGGGGSGGGGSGGGGSQVQLQQPGAELVKPGASVKMSCKASGYAFSSYWINWMKQKPGQGLEWIGQIYPGDGDTNYNGKFKGRATLTADTSSSTAYMQLSSLTSEDSAVYFCARSITTVVGCAMDYWGQGTSVTVSSTRFKIPIEELEDRVFVNCNTSITWVEGTVGTLLSDITRLDLGKRILDPRGIYRCNGTDIYKDKESTVQVHYRMCQSCVELDPATVAGIIVTDVIATLLLALGVFCFAGHETGRLSGAADTQALLRNDQVYQPLRDRDDAQYSHLGGNWARNK

SEQ ID NO: 16286 - protein, 701 aa, Artificial Sequence
  Synthetic Polypeptide
MALPVTALLLPLALLLHAARPEVQLLESGGGLVQPGGSLRLSCAASGFTFSSYAMSWVRQAPGKGLEWVSSISGSGDYIYYADSVKGRFTISRDISKNTLYLQMNSLRAEDTAVYYCAKEGTGANSSLADYRGQGTLVTVSSGGGSGGGSEVQLVESGGGSVQAGGSLRLSCTTSGRALNMYVMGWFRQAPGNEREFVAATSSSGGSTSYPDSVKGRFTISRDNAKNTVYLQMNSLKPEDTAAYRCAASPYVSTPTMNILEEYRYWGLGTQVTVSSGTGGGGSGGGGSGGGGSEFDIQMTQSPSSLSASVGDRVTITCKASDHINNWLAWYQQKPGQAPKLLIYGATTLETGVPSRFSGSGSGTDYTLTISSLQPEDFATYYCQQSWNTPWTFGQGTKLEIKRGGGGSGGGGSGGGGSQVQLQQPGAELVKPGASVKMSCKASGYAFSSYWINWMKQKPGQGLEWIGQIYPGDGDTNYNGKFKGRATLTADTSSSTAYMQLSSLTSEDSAVYFCARSITTVVGCAMDYWGQGTSVTVSSTRQSIKGNHLVKVYDYQEDGSVLLTCDAEAKNITWFKDGKMIGFLTEDKKKWNLGSNAKDPRGMYQCKGSQNKSKPLQVYYRMCQNCIELNAATISGFLFAEIVSIFVLAVGVYFIAGQDGVRQSRASDKQTLLPNDQLYQPLKDREDDQYSHLQGNQLRRN

SEQ ID NO: 16287 - protein, 684 aa, Artificial Sequence
  Synthetic Polypeptide
MALPVTALLLPLALLLHAARPEVQLLESGGGLVQPGGSLRLSCAASGFTFSSYAMSWVRQAPGKGLEWVSSISGSGDYIYYADSVKGRFTISRDISKNTLYLQMNSLRAEDTAVYYCAKEGTGANSSLADYRGQGTLVTVSSGGGSGGGSEVQLVESGGGSVQAGGSLRLSCTTSGRALNMYVMGWFRQAPGNEREFVAATSSSGGSTSYPDSVKGRFTISRDNAKNTVYLQMNSLKPEDTAAYRCAASPYVSTPTMNILEEYRYWGLGTQVTVSSGTGGGGSGGGGSGGGGSEFDIQMTQSPSSLSASVGDRVTITCKASDHINNWLAWYQQKPGQAPKLLIYGATTLETGVPSRFSGSGSGTDYTLTISSLQPEDFATYYCQQSWNTPWTFGQGTKLEIKRGGGGSGGGGSGGGGSQVQLQQPGAELVKPGASVKMSCKASGYAFSSYWINWMKQKPGQGLEWIGQIYPGDGDTNYNGKFKGRATLTADTSSSTAYMQLSSLTSEDSAVYFCARSITTVVGCAMDYWGQGTSVTVSSTRQSFGLLDPKLCYLLDGILFIYGVILTALFLRVKFSRSADAPAYQQGQNQLYNELNLGRREEYDVLDKRRGRDPEMGGKPQRRKNPQEGLYNELQKDKMAEAYSEIGMKGERRRGKGHDGLYQGLSTATKDTYDALHMQALPPR

SEQ ID NO: 16288 - protein, 917 aa, Artificial Sequence
  Synthetic Polypeptide
MALPVTALLLPLALLLHAARPEVQLLESGGGLVQPGGSLRLSCAASGFTFSSYAMSWVRQAPGKGLEWVSSISGSGDYIYYADSVKGRFTISRDISKNTLYLQMNSLRAEDTAVYYCAKEGTGANSSLADYRGQGTLVTVSSGGGSGGGSEVQLVESGGGSVQAGGSLRLSCTTSGRALNMYVMGWFRQAPGNEREFVAATSSSGGSTSYPDSVKGRFTISRDNAKNTVYLQMNSLKPEDTAAYRCAASPYVSTPTMNILEEYRYWGLGTQVTVSSGTGGGGSGGGGSGGGGSEFDIQMTQSPSSLSASVGDRVTITCKASDHINNWLAWYQQKPGQAPKLLIYGATTLETGVPSRFSGSGSGTDYTLTISSLQPEDFATYYCQQSWNTPWTFGQGTKLEIKRGGGGSGGGGSGGGGSQVQLQQPGAELVKPGASVKMSCKASGYAFSSYWINWMKQKPGQGLEWIGQIYPGDGDTNYNGKFKGRATLTADTSSSTAYMQLSSLTSEDSAVYFCARSITTVVGCAMDYWGQGTSVTVSSTRGSGIQNPDPAVYQLRDSKSSDKSVCLFTDFDSQTNVSQSKDSDVYITDKTVLDMRSMDFKSNSAVAWSNKSDFACANAFNNSIIPEDTFFPSPESSCDVKLVEKSFETDTNLNFQNLSVIGFRILLLKVAGFNLLMTLRLWSSRAKRSGSGVKQTLNFDLLKLAGDVESNPGPSRGHMTEYKPTVRLATRDDVPRAVRTLAAAFADYPATRHTVDPDRHIERVTELQELFLTRVGLDIGKVWVADDGAAVAVWTTPESVEAGAVFAEIGPRMAELSGSRLAAQQQMEGLLAPHRPKEPAWFLATVGVSPDHQGKGLGSAVVLPGVEAAERAGVPAFLETSAPRNLPFYERLGFTVTADVEVPEGPRTWCMTRKPGA

SEQ ID NO: 16289 - protein, 949 aa, Artificial Sequence
  Synthetic Polypeptide
MALPVTALLLPLALLLHAARPEVQLLESGGGLVQPGGSLRLSCAASGFTFSSYAMSWVRQAPGKGLEWVSSISGSGDYIYYADSVKGRFTISRDISKNTLYLQMNSLRAEDTAVYYCAKEGTGANSSLADYRGQGTLVTVSSGGGSGGGSEVQLVESGGGSVQAGGSLRLSCTTSGRALNMYVMGWFRQAPGNEREFVAATSSSGGSTSYPDSVKGRFTISRDNAKNTVYLQMNSLKPEDTAAYRCAASPYVSTPTMNILEEYRYWGLGTQVTVSSGTGGGGSGGGGSGGGGSEFDIQMTQSPSSLSASVGDRVTITCKASDHINNWLAWYQQKPGQAPKLLIYGATTLETGVPSRFSGSGSGTDYTLTISSLQPEDFATYYCQQSWNTPWTFGQGTKLEIKRGGGGSGGGGSGGGGSQVQLQQPGAELVKPGASVKMSCKASGYAFSSYWINWMKQKPGQGLEWIGQIYPGDGDTNYNGKFKGRATLTADTSSSTAYMQLSSLTSEDSAVYFCARSITTVVGCAMDYWGQGTSVTVSSLEDLKNVFPPEVAVFEPSEAEISHTQKATLVCLATGFYPDHVELSWWVNGKEVHSGVSTDPQPLKEQPALNDSRYCLSSRLRVSATFWQNPRNHFRCQVQFYGLSENDEWTQDRAKPVTQIVSAEAWGRADCGFTSESYQQGVLSATILYEILLGKATLYAVLVSALVLMAMVKRKDSRGRAKRSGSGATNFSLLKQAGDVEENPGPTRGHMTEYKPTVRLATRDDVPRAVRTLAAAFADYPATRHTVDPDRHIERVTELQELFLTRVGLDIGKVWVADDGAAVAVWTTPESVEAGAVFAEIGPRMAELSGSRLAAQQQMEGLLAPHRPKEPAWFLATVGVSPDHQGKGLGSAVVLPGVEAAERAGVPAFLETSAPRNLPFYERLGFTVTADVEVPEGPRTWCMTRKPGA

SEQ ID NO: 16290 - protein, 999 aa, Artificial Sequence
  Synthetic Polypeptide
MALPVTALLLPLALLLHAARPEVQLLESGGGLVQPGGSLRLSCAASGFTFSSYAMSWVRQAPGKGLEWVSSISGSGDYIYYADSVKGRFTISRDISKNTLYLQMNSLRAEDTAVYYCAKEGTGANSSLADYRGQGTLVTVSSGGGSGGGSEVQLVESGGGSVQAGGSLRLSCTTSGRALNMYVMGWFRQAPGNEREFVAATSSSGGSTSYPDSVKGRFTISRDNAKNTVYLQMNSLKPEDTAAYRCAASPYVSTPTMNILEEYRYWGLGTQVTVSSGTGGGGSGGGGSGGGGSEFDIQMTQSPSSLSASVGDRVTITCKASDHINNWLAWYQQKPGQAPKLLIYGATTLETGVPSRFSGSGSGTDYTLTISSLQPEDFATYYCQQSWNTPWTFGQGTKLEIKRGGGGSGGGGSGGGGSQVQLQQPGAELVKPGASVKMSCKASGYAFSSYWINWMKQKPGQGLEWIGQIYPGDGDTNYNGKFKGRATLTADTSSSTAYMQLSSLTSEDSAVYFCARSITTVVGCAMDYWGQGTSVTVSSTREQKLISEEDLGSGTPFPSLAPPIMLLVDGKQQMVVVCLVLDVAPPGLDSPIWFSAGNGSALDAFTYGPSPATDGTWTNLAHLSLPSEELASWEPLVCHTGPGAEGHSRSTQPMHLSGEASTARTCPQEPLRGTPGGALWLGVLRLLLFKLLLFDLLLTCSCLCDPAGPLPSPATTTRLRALGSHRLHPATETGGREATSSPRPQPRDRRWGDTPPGRKPGSPVRAKRSGSGVKQTLNFDLLKLAGDVESNPGPSRSRGHMTEYKPTVRLATRDDVPRAVRTLAAAFADYPATRHTVDPDRHIERVTELQELFLTRVGLDIGKVWVADDGAAVAVWTTPESVEAGAVFAEIGPRMAELSGSRLAAQQQMEGLLAPHRPKEPAWFLATVGVSPDHQGKGLGSAVVLPGVEAAERAGVPAFLETSAPRNLPFYERLGFTVTADVEVPEGPRTWCMTRKPGA

SEQ ID NO: 16291 - protein, 813 aa, Artificial Sequence
  Synthetic Polypeptide
MALPVTALLLPLALLLHAARPEVQLLESGGGLVQPGGSLRLSCAASGFTFSSYAMSWVRQAPGKGLEWVSSISGSGDYIYYADSVKGRFTISRDISKNTLYLQMNSLRAEDTAVYYCAKEGTGANSSLADYRGQGTLVTVSSGGGSGGGSEVQLVESGGGSVQAGGSLRLSCTTSGRALNMYVMGWFRQAPGNEREFVAATSSSGGSTSYPDSVKGRFTISRDNAKNTVYLQMNSLKPEDTAAYRCAASPYVSTPTMNILEEYRYWGLGTQVTVSSGTGGGGSGGGGSGGGGSEFDIQMTQSPSSLSASVGDRVTITCKASDHINNWLAWYQQKPGQAPKLLIYGATTLETGVPSRFSGSGSGTDYTLTISSLQPEDFATYYCQQSWNTPWTFGQGTKLEIKRLEDLKNVFPPEVAVFEPSEAEISHTQKATLVCLATGFYPDHVELSWWVNGKEVHSGVSTDPQPLKEQPALNDSRYCLSSRLRVSATFWQNPRNHFRCQVQFYGLSENDEWTQDRAKPVTQIVSAEAWGRADCGFTSESYQQGVLSATILYEILLGKATLYAVLVSALVLMAMVKRKDSRGRAKRSGSGATNFSLLKQAGDVEENPGPTRGHMTEYKPTVRLATRDDVPRAVRTLAAAFADYPATRHTVDPDRHIERVTELQELFLTRVGLDIGKVWVADDGAAVAVWTTPESVEAGAVFAEIGPRMAELSGSRLAAQQQMEGLLAPHRPKEPAWFLATVGVSPDHQGKGLGSAVVLPGVEAAERAGVPAFLETSAPRNLPFYERLGFTVTADVEVPEGPRTWCMTRKPGA

SEQ ID NO: 16292 - protein, 583 aa, Artificial Sequence
  Synthetic Polypeptide
MALPVTALLLPLALLLHAARPEVQLLESGGGLVQPGGSLRLSCAASGFTFSSYAMSWVRQAPGKGLEWVSSISGSGDYIYYADSVKGRFTISRDISKNTLYLQMNSLRAEDTAVYYCAKEGTGANSSLADYRGQGTLVTVSSGGGSGGGSEVQLVESGGGSVQAGGSLRLSCTTSGRALNMYVMGWFRQAPGNEREFVAATSSSGGSTSYPDSVKGRFTISRDNAKNTVYLQMNSLKPEDTAAYRCAASPYVSTPTMNILEEYRYWGLGTQVTVSSGTGGGGSGGGGSGGGGSEFDIQMTQSPSSLSASVGDRVTITCKASDHINNWLAWYQQKPGQAPKLLIYGATTLETGVPSRFSGSGSGTDYTLTISSLQPEDFATYYCQQSWNTPWTFGQGTKLEIKRLEDLKNVFPPEVAVFEPSEAEISHTQKATLVCLATGFYPDHVELSWWVNGKEVHSGVSTDPQPLKEQPALNDSRYCLSSRLRVSATFWQNPRNHFRCQVQFYGLSENDEWTQDRAKPVTQIVSAEAWGRADCGFTSESYQQGVLSATILYEILLGKATLYAVLVSALVLMAMVKRKDSRG

SEQ ID NO: 16293 - protein, 831 aa, Artificial Sequence
  Synthetic Polypeptide
MALPVTALLLPLALLLHAARPEVQLLESGGGLVQPGGSLRLSCAASGFTFSSYAMSWVRQAPGKGLEWVSSISGSGDYIYYADSVKGRFTISRDISKNTLYLQMNSLRAEDTAVYYCAKEGTGANSSLADYRGQGTLVTVSSGGGSGGGSEVQLVESGGGSVQAGGSLRLSCTTSGRALNMYVMGWFRQAPGNEREFVAATSSSGGSTSYPDSVKGRFTISRDNAKNTVYLQMNSLKPEDTAAYRCAASPYVSTPTMNILEEYRYWGLGTQVTVSSGTGGGGSGGGGSGGGGSEFDIQMTQSPSSLSASVGDRVTITCKASDHINNWLAWYQQKPGQAPKLLIYGATTLETGVPSRFSGSGSGTDYTLTISSLQPEDFATYYCQQSWNTPWTFGQGTKLEIKRLEGKPIPNPLLGLDSTGSGEDLKNVFPPEVAVFEPSEAEISHTQKATLVCLATGFYPDHVELSWWVNGKEVHSGVCTDPQPLKEQPALNDSRYCLSSRLRVSATFWQNPRNHFRCQVQFYGLSENDEWTQDRAKPVTQIVSAEAWGRADCGFTSESYQQGVLSATILYEILLGKATLYAVLVSALVLMAMVKRKDSRGRAKRSGSGATNFSLLKQAGDVEENPGPTRGHMTEYKPTVRLATRDDVPRAVRTLAAAFADYPATRHTVDPDRHIERVTELQELFLTRVGLDIGKVWVADDGAAVAVWTTPESVEAGAVFAEIGPRMAELSGSRLAAQQQMEGLLAPHRPKEPAWFLATVGVSPDHQGKGLGSAVVLPGVEAAERAGVPAFLETSAPRNLPFYERLGFTVTADVEVPEGPRTWCMTRKPGA

SEQ ID NO: 16294 - protein, 601 aa, Artificial Sequence
  Synthetic Polypeptide
MALPVTALLLPLALLLHAARPEVQLLESGGGLVQPGGSLRLSCAASGFTFSSYAMSWVRQAPGKGLEWVSSISGSGDYIYYADSVKGRFTISRDISKNTLYLQMNSLRAEDTAVYYCAKEGTGANSSLADYRGQGTLVTVSSGGGSGGGSEVQLVESGGGSVQAGGSLRLSCTTSGRALNMYVMGWFRQAPGNEREFVAATSSSGGSTSYPDSVKGRFTISRDNAKNTVYLQMNSLKPEDTAAYRCAASPYVSTPTMNILEEYRYWGLGTQVTVSSGTGGGGSGGGGSGGGGSEFDIQMTQSPSSLSASVGDRVTITCKASDHINNWLAWYQQKPGQAPKLLIYGATTLETGVPSRFSGSGSGTDYTLTISSLQPEDFATYYCQQSWNTPWTFGQGTKLEIKRLEGKPIPNPLLGLDSTGSGEDLKNVFPPEVAVFEPSEAEISHTQKATLVCLATGFYPDHVELSWWVNGKEVHSGVCTDPQPLKEQPALNDSRYCLSSRLRVSATFWQNPRNHFRCQVQFYGLSENDEWTQDRAKPVTQIVSAEAWGRADCGFTSESYQQGVLSATILYEILLGKATLYAVLVSALVLMAMVKRKDSRG

SEQ ID NO: 16295 - protein, 917 aa, Artificial Sequence
  Synthetic Polypeptide
MALPVTALLLPLALLLHAARPEVQLLESGGGLVQPGGSLRLSCAASGFTFSSYAMSWVRQAPGKGLEWVSSISGSGDYIYYADSVKGRFTISRDISKNTLYLQMNSLRAEDTAVYYCAKEGTGANSSLADYRGQGTLVTVSSGGGSGGGSEVQLVESGGGSVQAGGSLRLSCTTSGRALNMYVMGWFRQAPGNEREFVAATSSSGGSTSYPDSVKGRFTISRDNAKNTVYLQMNSLKPEDTAAYRCAASPYVSTPTMNILEEYRYWGLGTQVTVSSGTGGGGSGGGGSGGGGSEFDIQMTQSPSSLSASVGDRVTITCKASDHINNWLAWYQQKPGQAPKLLIYGATTLETGVPSRFSGSGSGTDYTLTISSLQPEDFATYYCQQSWNTPWTFGQGTKLEIKRGGGGSGGGGSGGGGSQVQLQQPGAELVKPGASVKMSCKASGYAFSSYWINWMKQKPGQGLEWIGQIYPGDGDTNYNGKFKGRATLTADTSSSTAYMQLSSLTSEDSAVYFCARSITTVVGCAMDYWGQGTSVTVSSTRGSGIQNPDPAVYQLRDSKSSDKSVCLFTDFDSQTNVSQSKDSDVYITDKTVLDMRSMDFKSNSAVAWSNKSDFACANAFNNSIIPEDTFFPSSDVPCDVKLVEKSFETDTNLNFQNLSVIGFRILLLKVAGFNLLMTLRLWSSRAKRSGSGVKQTLNFDLLKLAGDVESNPGPSRGHMTEYKPTVRLATRDDVPRAVRTLAAAFADYPATRHTVDPDRHIERVTELQELFLTRVGLDIGKVWVADDGAAVAVWTTPESVEAGAVFAEIGPRMAELSGSRLAAQQQMEGLLAPHRPKEPAWFLATVGVSPDHQGKGLGSAVVLPGVEAAERAGVPAFLETSAPRNLPFYERLGFTVTADVEVPEGPRTWCMTRKPGA

SEQ ID NO: 16296 - protein, 949 aa, Artificial Sequence
  Synthetic Polypeptide
MALPVTALLLPLALLLHAARPEVQLLESGGGLVQPGGSLRLSCAASGFTFSSYAMSWVRQAPGKGLEWVSSISGSGDYIYYADSVKGRFTISRDISKNTLYLQMNSLRAEDTAVYYCAKEGTGANSSLADYRGQGTLVTVSSGGGSGGGSEVQLVESGGGSVQAGGSLRLSCTTSGRALNMYVMGWFRQAPGNEREFVAATSSSGGSTSYPDSVKGRFTISRDNAKNTVYLQMNSLKPEDTAAYRCAASPYVSTPTMNILEEYRYWGLGTQVTVSSGTGGGGSGGGGSGGGGSEFDIQMTQSPSSLSASVGDRVTITCKASDHINNWLAWYQQKPGQAPKLLIYGATTLETGVPSRFSGSGSGTDYTLTISSLQPEDFATYYCQQSWNTPWTFGQGTKLEIKRGGGGSGGGGSGGGGSQVQLQQPGAELVKPGASVKMSCKASGYAFSSYWINWMKQKPGQGLEWIGQIYPGDGDTNYNGKFKGRATLTADTSSSTAYMQLSSLTSEDSAVYFCARSITTVVGCAMDYWGQGTSVTVSSLEDLKNVFPPEVAVFEPSKAEIAHTQKATLVCLATGFYPDHVELSWWVNGKEVHSGVSTDPQPLKEQPALNDSRYCLSSRLRVSATFWQNPRNHFRCQVQFYGLSENDEWTQDRAKPVTQIVSAEAWGRADCGITSASYHQGVLSATILYEILLGKATLYAVLVSALVLMAMVKRKDSRGRAKRSGSGATNFSLLKQAGDVEENPGPTRGHMTEYKPTVRLATRDDVPRAVRTLAAAFADYPATRHTVDPDRHIERVTELQELFLTRVGLDIGKVWVADDGAAVAVWTTPESVEAGAVFAEIGPRMAELSGSRLAAQQQMEGLLAPHRPKEPAWFLATVGVSPDHQGKGLGSAVVLPGVEAAERAGVPAFLETSAPRNLPFYERLGFTVTADVEVPEGPRTWCMTRKPGA

SEQ ID NO: 16297 - protein, 1267 aa, Artificial Sequence
  Synthetic Polypeptide
MALPVTALLLPLALLLHAARPEVQLLESGGGLVQPGGSLRLSCAASGFTFSSYAMSWVRQAPGKGLEWVSSISGSGDYIYYADSVKGRFTISRDISKNTLYLQMNSLRAEDTAVYYCAKEGTGANSSLADYRGQGTLVTVSSGGGSGGGSEVQLVESGGGSVQAGGSLRLSCTTSGRALNMYVMGWFRQAPGNEREFVAATSSSGGSTSYPDSVKGRFTISRDNAKNTVYLQMNSLKPEDTAAYRCAASPYVSTPTMNILEEYRYWGLGTQVTVSSGTGGGGSGGGGSGGGGSEFDIQMTQSPSSLSASVGDRVTITCKASDHINNWLAWYQQKPGQAPKLLIYGATTLETGVPSRFSGSGSGTDYTLTISSLQPEDFATYYCQQSWNTPWTFGQGTKLEIKRLEIQNPDPAVYQLRDSKSSDKSVCLFTDFDSQTNVSQSKDSDVYITDKCVLDMRSMDFKSNSAVAWSNKSDFACANAFNNSIIPEDTFFPSSDVPCDVKLVEKSFETDTNLNFQNLSVIGFRILLLKVAGFNLLMTLRLWSSRAKRSGSGVKQTLNFDLLKLAGDVESNPGPTSMDWIWRILFLVGAATGAHSGPQVQLQESGGGLAQAGGSLRLSCAASGRTFSMGWFRQAPGKEREFVAAITYSGGSPYYASSVRGRFTISRDNAKNTVYLQMNSLKPEDTAVYYCAANPTYGSDWNAENWGQGTQVTVSSGSGGGGSGGGGSGGGGSFEQVQLQQPGAELVKPGASVKMSCKASGYAFSSYWINWMKQKPGQGLEWIGQIYPGDGDTNYNGKFKGRATLTADTSSSTAYMQLSSLTSEDSAVYFCARSITTVVGCAMDYWGQGTSVTVSSTREDLKNVFPPEVAVFEPSKAEIAHTQKATLVCLATGFYPDHVELSWWVNGKEVHSGVCTDPQPLKEQPALNDSRYCLSSRLRVSATFWQNPRNHFRCQVQFYGLSENDEWTQDRAKPVTQIVSAEAWGRADCGITSASYHQGVLSATILYEILLGKATLYAVLVSALVLMAMVKRKDSRGRAKRSGSGATNFSLLKQAGDVEENPGPSRGHMTEYKPTVRLATRDDVPRAVRTLAAAFADYPATRHTVDPDRHIERVTELQELFLTRVGLDIGKVWVADDGAAVAVWTTPESVEAGAVFAEIGPRMAELSGSRLAAQQQMEGLLAPHRPKEPAWFLATVGVSPDHQGKGLGSAVVLPGVEAAERAGVPAFLETSAPRNLPFYERLGFTVTADVEVPEGPRTWCMTRKPGA

SEQ ID NO: 16298 - protein, 1266 aa, Artificial Sequence
  Synthetic Polypeptide
MALPVTALLLPLALLLHAARPEVQLLESGGGLVQPGGSLRLSCAASGFTFSSYAMSWVRQAPGKGLEWVSSISGSGDYIYYADSVKGRFTISRDISKNTLYLQMNSLRAEDTAVYYCAKEGTGANSSLADYRGQGTLVTVSSGGGSGGGSEVQLVESGGGSVQAGGSLRLSCTTSGRALNMYVMGWFRQAPGNEREFVAATSSSGGSTSYPDSVKGRFTISRDNAKNTVYLQMNSLKPEDTAAYRCAASPYVSTPTMNILEEYRYWGLGTQVTVSSGTGGGGSGGGGSGGGGSEFDIQMTQSPSSLSASVGDRVTITCKASDHINNWLAWYQQKPGQAPKLLIYGATTLETGVPSRFSGSGSGTDYTLTISSLQPEDFATYYCQQSWNTPWTFGQGTKLEIKRLEDLKNVFPPEVAVFEPSKAEIAHTQKATLVCLATGFYPDHVELSWWVNGKEVHSGVCTDPQPLKEQPALNDSRYCLSSRLRVSATFWQNPRNHFRCQVQFYGLSENDEWTQDRAKPVTQIVSAEAWGRADCGITSASYHQGVLSATILYEILLGKATLYAVLVSALVLMAMVKRKDSRGRAKRSGSGATNFSLLKQAGDVEENPGPTSMDWIWRILFLVGAATGAHSGPQVQLQESGGGLAQAGGSLRLSCAASGRTFSMGWFRQAPGKEREFVAAITYSGGSPYYASSVRGRFTISRDNAKNTVYLQMNSLKPEDTAVYYCAANPTYGSDWNAENWGQGTQVTVSSGSGGGGSGGGGSGGGGSFEQVQLQQPGAELVKPGASVKMSCKASGYAFSSYWINWMKQKPGQGLEWIGQIYPGDGDTNYNGKFKGRATLTADTSSSTAYMQLSSLTSEDSAVYFCARSITTVVGCAMDYWGQGTSVTVSSTRIQNPDPAVYQLRDSKSSDKSVCLFTDFDSQTNVSQSKDSDVYITDKCVLDMRSMDFKSNSAVAWSNKSDFACANAFNNSIIPEDTFFPSSDVPCDVKLVEKSFETDTNLNFQNLSVIGFRILLLKVAGFNLLMTLRLWSSRAKRSGSGVKQTLNFDLLKLAGDVESNPGPSRGHMTEYKPTVRLATRDDVPRAVRTLAAAFADYPATRHTVDPDRHIERVTELQELFLTRVGLDIGKVWVADDGAAVAVWTTPESVEAGAVFAEIGPRMAELSGSRLAAQQQMEGLLAPHRPKEPAWFLATVGVSPDHQGKGLGSAVVLPGVEAAERAGVPAFLETSAPRNLPFYERLGFTVTADVEVPEGPRTWCMTRKPGA

SEQ ID NO: 16299 - protein, 1266 aa, Artificial Sequence
  Synthetic Polypeptide
MALPVTALLLPLALLLHAARPEVQLLESGGGLVQPGGSLRLSCAASGFTFSSYAMSWVRQAPGKGLEWVSSISGSGDYIYYADSVKGRFTISRDISKNTLYLQMNSLRAEDTAVYYCAKEGTGANSSLADYRGQGTLVTVSSGGGSGGGSEVQLVESGGGSVQAGGSLRLSCTTSGRALNMYVMGWFRQAPGNEREFVAATSSSGGSTSYPDSVKGRFTISRDNAKNTVYLQMNSLKPEDTAAYRCAASPYVSTPTMNILEEYRYWGLGTQVTVSSGTGGGGSGGGGSGGGGSEFDIQMTQSPSSLSASVGDRVTITCKASDHINNWLAWYQQKPGQAPKLLIYGATTLETGVPSRFSGSGSGTDYTLTISSLQPEDFATYYCQQSWNTPWTFGQGTKLEIKRLEDLKNVFPPEVAVFEPSEAEISHTQKATLVCLATGFYPDHVELSWWVNGKEVHSGVCTDPQPLKEQPALNDSRYCLSSRLRVSATFWQNPRNHFRCQVQFYGLSENDEWTQDRAKPVTQIVSAEAWGRADCGFTSESYQQGVLSATILYEILLGKATLYAVLVSALVLMAMVKRKDSRGRAKRSGSGATNFSLLKQAGDVEENPGPTSMDWIWRILFLVGAATGAHSGPQVQLQESGGGLAQAGGSLRLSCAASGRTFSMGWFRQAPGKEREFVAAITYSGGSPYYASSVRGRFTISRDNAKNTVYLQMNSLKPEDTAVYYCAANPTYGSDWNAENWGQGTQVTVSSGSGGGGSGGGGSGGGGSFEQVQLQQPGAELVKPGASVKMSCKASGYAFSSYWINWMKQKPGQGLEWIGQIYPGDGDTNYNGKFKGRATLTADTSSSTAYMQLSSLTSEDSAVYFCARSITTVVGCAMDYWGQGTSVTVSSTRIQNPDPAVYQLRDSKSSDKSVCLFTDFDSQTNVSQSKDSDVYITDKCVLDMRSMDFKSNSAVAWSNKSDFACANAFNNSIIPEDTFFPSPESSCDVKLVEKSFETDTNLNFQNLSVIGFRILLLKVAGFNLLMTLRLWSSRAKRSGSGVKQTLNFDLLKLAGDVESNPGPSRGHMTEYKPTVRLATRDDVPRAVRTLAAAFADYPATRHTVDPDRHIERVTELQELFLTRVGLDIGKVWVADDGAAVAVWTTPESVEAGAVFAEIGPRMAELSGSRLAAQQQMEGLLAPHRPKEPAWFLATVGVSPDHQGKGLGSAVVLPGVEAAERAGVPAFLETSAPRNLPFYERLGFTVTADVEVPEGPRTWCMTRKPGA

SEQ ID NO: 16300 - protein, 1033 aa, Artificial Sequence
  Synthetic Polypeptide
MALPVTALLLPLALLLHAARPEVQLLESGGGLVQPGGSLRLSCAASGFTFSSYAMSWVRQAPGKGLEWVSSISGSGDYIYYADSVKGRFTISRDISKNTLYLQMNSLRAEDTAVYYCAKEGTGANSSLADYRGQGTLVTVSSGGGSGGGSEVQLVESGGGSVQAGGSLRLSCTTSGRALNMYVMGWFRQAPGNEREFVAATSSSGGSTSYPDSVKGRFTISRDNAKNTVYLQMNSLKPEDTAAYRCAASPYVSTPTMNILEEYRYWGLGTQVTVSSGTGGGGSGGGGSGGGGSEFDIQMTQSPSSLSASVGDRVTITCKASDHINNWLAWYQQKPGQAPKLLIYGATTLETGVPSRFSGSGSGTDYTLTISSLQPEDFATYYCQQSWNTPWTFGQGTKLEIKRLEDLKNVFPPEVAVFEPSEAEISHTQKATLVCLATGFYPDHVELSWWVNGKEVHSGVCTDPQPLKEQPALNDSRYCLSSRLRVSATFWQNPRNHFRCQVQFYGLSENDEWTQDRAKPVTQIVSAEAWGRADCGFTSESYQQGVLSATILYEILLGKATLYAVLVSALVLMAMVKRKDSRGRAKRSGSGATNFSLLKQAGDVEENPGPTSMDWIWRILFLVGAATGAHSGPQVQLQESGGGLAQAGGSLRLSCAASGRTFSMGWFRQAPGKEREFVAAITYSGGSPYYASSVRGRFTISRDNAKNTVYLQMNSLKPEDTAVYYCAANPTYGSDWNAENWGQGTQVTVSSGSGGGGSGGGGSGGGGSFEQVQLQQPGAELVKPGASVKMSCKASGYAFSSYWINWMKQKPGQGLEWIGQIYPGDGDTNYNGKFKGRATLTADTSSSTAYMQLSSLTSEDSAVYFCARSITTVVGCAMDYWGQGTSVTVSSTRIQNPDPAVYQLRDSKSSDKSVCLFTDFDSQTNVSQSKDSDVYITDKCVLDMRSMDFKSNSAVAWSNKSDFACANAFNNSIIPEDTFFPSPESSCDVKLVEKSFETDTNLNFQNLSVIGFRILLLKVAGFNLLMTLRLWSS

SEQ ID NO: 16301 - protein, 1258 aa, Artificial Sequence
  Synthetic Polypeptide
MALPVTALLLPLALLLHAARPEVQLLESGGGLVQPGGSLRLSCAASGFTFSSYAMSWVRQAPGKGLEWVSSISGSGDYIYYADSVKGRFTISRDISKNTLYLQMNSLRAEDTAVYYCAKEGTGANSSLADYRGQGTLVTVSSGGGSGGGSEVQLVESGGGSVQAGGSLRLSCTTSGRALNMYVMGWFRQAPGNEREFVAATSSSGGSTSYPDSVKGRFTISRDNAKNTVYLQMNSLKPEDTAAYRCAASPYVSTPTMNILEEYRYWGLGTQVTVSSGTGGGGSGGGGSGGGGSEFDIQMTQSPSSLSASVGDRVTITCKASDHINNWLAWYQQKPGQAPKLLIYGATTLETGVPSRFSGSGSGTDYTLTISSLQPEDFATYYCQQSWNTPWTFGQGTKLEIKRLEDLKNVFPPEVAVFEPSEAEISHTQKATLVCLATGFYPDHVELSWWVNGKEVHSGVCTDPQPLKEQPALNDSRYCLSSRLRVSATFWQNPRNHFRCQVQFYGLSENDEWTQDRAKPVTQIVSAEAWGRADCGFTSESYQQGVLSATILYEILLGKATLYAVLVSALVLMAMVKRKDSRGRAKRSGSGATNFSLLKQAGDVEENPGPTSMDWIWRILFLVGAATGAHSGPQVQLQESGGGLAQAGGSLRLSCAASGRTFSMGWFRQAPGKEREFVAAITYSGGSPYYASSVRGRFTISRDNAKNTVYLQMNSLKPEDTAVYYCAANPTYGSDWNAENWGQGTQVTVSSGSGGGGSGGGGSGGGGSFEQVQLQQPGAELVKPGASVKMSCKASGYAFSSYWINWMKQKPGQGLEWIGQIYPGDGDTNYNGKFKGRATLTADTSSSTAYMQLSSLTSEDSAVYFCARSITTVVGCAMDYWGQGTSVTVSSTRIQNPDPAVYQLRDSKSSDKSVCLFTDFDSQTNVSQSKDSDVYITDKCVLDMRSMDFKSNSAVAWSNKSDFACANAFNNSIIPEDTFFPSPESSCDVKLVEKSFETDTNLNFQNLSVIGFRILLLKVAGFNLLMTLRLWSSRAKRSGSGVKQTLNFDLLKLAGDVESNPGPSRGGIHTMATYEVLCEVARKLGTDDREVVLFLLNVFIPQPTLAQLIGALRALKEEGRLTFPLLAECLFRAGRRDLLRDLLHLDPRFLERHLAGTMSYFSPYQLTVLHVDGELCARDIRSLIFLSKDTIGSRSTPQTFLHWVYCMENLDLLGPTDVDALMSMLRSLSRVDLQRQVQTLMGLHLSGPSHSQHYRHTP

SEQ ID NO: 16302 - protein, 1037 aa, Artificial Sequence
  Synthetic Polypeptide
MALPVTALLLPLALLLHAARPEVQLLESGGGLVQPGGSLRLSCAASGFTFSSYAMSWVRQAPGKGLEWVSSISGSGDYIYYADSVKGRFTISRDISKNTLYLQMNSLRAEDTAVYYCAKEGTGANSSLADYRGQGTLVTVSSGGGSGGGSEVQLVESGGGSVQAGGSLRLSCTTSGRALNMYVMGWFRQAPGNEREFVAATSSSGGSTSYPDSVKGRFTISRDNAKNTVYLQMNSLKPEDTAAYRCAASPYVSTPTMNILEEYRYWGLGTQVTVSSGTGGGGSGGGGSGGGGSEFDIQMTQSPSSLSASVGDRVTITCKASDHINNWLAWYQQKPGQAPKLLIYGATTLETGVPSRFSGSGSGTDYTLTISSLQPEDFATYYCQQSWNTPWTFGQGTKLEIKRLEIQNPDPAVYQLRDSKSSDKSVCLFTDFDSQTNVSQSKDSDVYITDKCVLDMRSMDFKSNSAVAWSNKSDFACANAFNNSIIPEDTFFPSPESSCDVKLVEKSFETDTNLNFQNLSVIGFRILLLKVAGFNLLMTLRLWSSRAKRSGSGVKQTLNFDLLKLAGDVESNPGPTSMDWIWRILFLVGAATGAHSGPQVQLQESGGGLAQAGGSLRLSCAASGRTFSMGWFRQAPGKEREFVAAITYSGGSPYYASSVRGRFTISRDNAKNTVYLQMNSLKPEDTAVYYCAANPTYGSDWNAENWGQGTQVTVSSGSGGGGSGGGGSGGGGSFEQVQLQQPGAELVKPGASVKMSCKASGYAFSSYWINWMKQKPGQGLEWIGQIYPGDGDTNYNGKFKGRATLTADTSSSTAYMQLSSLTSEDSAVYFCARSITTVVGCAMDYWGQGTSVTVSSTREDLKNVFPPEVAVFEPSEAEISHTQKATLVCLATGFYPDHVELSWWVNGKEVHSGVCTDPQPLKEQPALNDSRYCLSSRLRVSATFWQNPRNHFRCQVQFYGLSENDEWTQDRAKPVTQIVSAEAWGRADCGFTSESYQQGVLSATILYEILLGKATLYAVLVSALVLMAMVKRKDSRG

SEQ ID NO: 16303 - protein, 1259 aa, Artificial Sequence
  Synthetic Polypeptide
MALPVTALLLPLALLLHAARPEVQLLESGGGLVQPGGSLRLSCAASGFTFSSYAMSWVRQAPGKGLEWVSSISGSGDYIYYADSVKGRFTISRDISKNTLYLQMNSLRAEDTAVYYCAKEGTGANSSLADYRGQGTLVTVSSGGGSGGGSEVQLVESGGGSVQAGGSLRLSCTTSGRALNMYVMGWFRQAPGNEREFVAATSSSGGSTSYPDSVKGRFTISRDNAKNTVYLQMNSLKPEDTAAYRCAASPYVSTPTMNILEEYRYWGLGTQVTVSSGTGGGGSGGGGSGGGGSEFDIQMTQSPSSLSASVGDRVTITCKASDHINNWLAWYQQKPGQAPKLLIYGATTLETGVPSRFSGSGSGTDYTLTISSLQPEDFATYYCQQSWNTPWTFGQGTKLEIKRLEIQNPDPAVYQLRDSKSSDKSVCLFTDFDSQTNVSQSKDSDVYITDKCVLDMRSMDFKSNSAVAWSNKSDFACANAFNNSIIPEDTFFPSPESSCDVKLVEKSFETDTNLNFQNLSVIGFRILLLKVAGFNLLMTLRLWSSRAKRSGSGVKQTLNFDLLKLAGDVESNPGPTSMDWIWRILFLVGAATGAHSGPQVQLQESGGGLAQAGGSLRLSCAASGRTFSMGWFRQAPGKEREFVAAITYSGGSPYYASSVRGRFTISRDNAKNTVYLQMNSLKPEDTAVYYCAANPTYGSDWNAENWGQGTQVTVSSGSGGGGSGGGGSGGGGSFEQVQLQQPGAELVKPGASVKMSCKASGYAFSSYWINWMKQKPGQGLEWIGQIYPGDGDTNYNGKFKGRATLTADTSSSTAYMQLSSLTSEDSAVYFCARSITTVVGCAMDYWGQGTSVTVSSTREDLKNVFPPEVAVFEPSEAEISHTQKATLVCLATGFYPDHVELSWWVNGKEVHSGVCTDPQPLKEQPALNDSRYCLSSRLRVSATFWQNPRNHFRCQVQFYGLSENDEWTQDRAKPVTQIVSAEAWGRADCGFTSESYQQGVLSATILYEILLGKATLYAVLVSALVLMAMVKRKDSRGRAKRSGSGATNFSLLKQAGDVEENPGPSRGGIHTMATYEVLCEVARKLGTDDREVVLFLLNVFIPQPTLAQLIGALRALKEEGRLTFPLLAECLFRAGRRDLLRDLLHLDPRFLERHLAGTMSYFSPYQLTVLHVDGELCARDIRSLIFLSKDTIGSRSTPQTFLHWVYCMENLDLLGPTDVDALMSMLRSLSRVDLQRQVQTLMGLHLSGPSHSQHYRHTP

SEQ ID NO: 16304 - protein, 1266 aa, Artificial Sequence
  Synthetic Polypeptide
MALPVTALLLPLALLLHAARPEVQLLESGGGLVQPGGSLRLSCAASGFTFSSYAMSWVRQAPGKGLEWVSSISGSGDYIYYADSVKGRFTISRDISKNTLYLQMNSLRAEDTAVYYCAKEGTGANSSLADYRGQGTLVTVSSGGGSGGGSEVQLVESGGGSVQAGGSLRLSCTTSGRALNMYVMGWFRQAPGNEREFVAATSSSGGSTSYPDSVKGRFTISRDNAKNTVYLQMNSLKPEDTAAYRCAASPYVSTPTMNILEEYRYWGLGTQVTVSSGTGGGGSGGGGSGGGGSEFDIQMTQSPSSLSASVGDRVTITCKASDHINNWLAWYQQKPGQAPKLLIYGATTLETGVPSRFSGSGSGTDYTLTISSLQPEDFATYYCQQSWNTPWTFGQGTKLEIKRLEDLKNVFPPEVAVFEPSEAEISHTQKATLVCLATGFYPDHVELSWWVNGKEVHSGVSTDPQPLKEQPALNDSRYCLSSRLRVSATFWQNPRNHFRCQVQFYGLSENDEWTQDRAKPVTQIVSAEAWGRADCGFTSESYQQGVLSATILYEILLGKATLYAVLVSALVLMAMVKRKDSRGRAKRSGSGATNFSLLKQAGDVEENPGPTSMDWIWRILFLVGAATGAHSGPQVQLQESGGGLAQAGGSLRLSCAASGRTFSMGWFRQAPGKEREFVAAITYSGGSPYYASSVRGRFTISRDNAKNTVYLQMNSLKPEDTAVYYCAANPTYGSDWNAENWGQGTQVTVSSGSGGGGSGGGGSGGGGSFEQVQLQQPGAELVKPGASVKMSCKASGYAFSSYWINWMKQKPGQGLEWIGQIYPGDGDTNYNGKFKGRATLTADTSSSTAYMQLSSLTSEDSAVYFCARSITTVVGCAMDYWGQGTSVTVSSTRIQNPDPAVYQLRDSKSSDKSVCLFTDFDSQTNVSQSKDSDVYITDKTVLDMRSMDFKSNSAVAWSNKSDFACANAFNNSIIPEDTFFPSPESSCDVKLVEKSFETDTNLNFQNLSVIGFRILLLKVAGFNLLMTLRLWSSRAKRSGSGVKQTLNFDLLKLAGDVESNPGPSRGHMTEYKPTVRLATRDDVPRAVRTLAAAFADYPATRHTVDPDRHIERVTELQELFLTRVGLDIGKVWVADDGAAVAVWTTPESVEAGAVFAEIGPRMAELSGSRLAAQQQMEGLLAPHRPKEPAWFLATVGVSPDHQGKGLGSAVVLPGVEAAERAGVPAFLETSAPRNLPFYERLGFTVTADVEVPEGPRTWCMTRKPGA

SEQ ID NO: 16305 - protein, 1348 aa, Artificial Sequence
  Synthetic Polypeptide
MALPVTALLLPLALLLHAARPEVQLLESGGGLVQPGGSLRLSCAASGFTFSSYAMSWVRQAPGKGLEWVSSISGSGDYIYYADSVKGRFTISRDISKNTLYLQMNSLRAEDTAVYYCAKEGTGANSSLADYRGQGTLVTVSSGGGSGGGSEVQLVESGGGSVQAGGSLRLSCTTSGRALNMYVMGWFRQAPGNEREFVAATSSSGGSTSYPDSVKGRFTISRDNAKNTVYLQMNSLKPEDTAAYRCAASPYVSTPTMNILEEYRYWGLGTQVTVSSGTGGGGSGGGGSGGGGSEFDIQMTQSPSSLSASVGDRVTITCKASDHINNWLAWYQQKPGQAPKLLIYGATTLETGVPSRFSGSGSGTDYTLTISSLQPEDFATYYCQQSWNTPWTFGQGTKLEIKRLEDLKNVFPPEVAVFEPSEAEISHTQKATLVCLATGFYPDHVELSWWVNGKEVHSGVSTDPQPLKEQPALNDSRYCLSSRLRVSATFWQNPRNHFRCQVQFYGLSENDEWTQDRAKPVTQIVSAEAWGRADCGFTSESYQQGVLSATILYEILLGKATLYAVLVSALVLMAMVKRKDSRGRAKRSGSGATNFSLLKQAGDVEENPGPTSMDWIWRILFLVGAATGAHSGPQVQLQESGGGLAQAGGSLRLSCAASGRTFSMGWFRQAPGKEREFVAAITYSGGSPYYASSVRGRFTISRDNAKNTVYLQMNSLKPEDTAVYYCAANPTYGSDWNAENWGQGTQVTVSSGSGGGGSGGGGSGGGGSFEQVQLQQPGAELVKPGASVKMSCKASGYAFSSYWINWMKQKPGQGLEWIGQIYPGDGDTNYNGKFKGRATLTADTSSSTAYMQLSSLTSEDSAVYFCARSITTVVGCAMDYWGQGTSVTVSSTREQKLISEEDGSGTPFPSLAPPIMLLVDGKQQMVVVCLVLDVAPPGLDSPIWFSAGNGSALDAFTYGPSPATDGTWTNLAHLSLPSEELASWEPLVCHTGPGAEGHSRSTQPMHLSGEASTARTCPQEPLRGTPGGALWLGVLRLLLFKLLLFDLLLTCSCLCDPAGPLPSPATTTRLRALGSHRLHPATETGGREATSSPRPQPRDRRWGDTPPGRKPGSPVRAKRSGSGVKQTLNFDLLKLAGDVESNPGPSRGHMTEYKPTVRLATRDDVPRAVRTLAAAFADYPATRHTVDPDRHIERVTELQELFLTRVGLDIGKVWVADDGAAVAVWTTPESVEAGAVFAEIGPRMAELSGSRLAAQQQMEGLLAPHRPKEPAWFLATVGVSPDHQGKGLGSAVVLPGVEAAERAGVPAFLETSAPRNLPFYERLGFTVTADVEVPEGPRTWCMTRKPGA

SEQ ID NO: 16306 - protein, 1303 aa, Artificial Sequence
  Synthetic Polypeptide
MALPVTALLLPLALLLHAARPEVQLLESGGGLVQPGGSLRLSCAASGFTFSSYAMSWVRQAPGKGLEWVSSISGSGDYIYYADSVKGRFTISRDISKNTLYLQMNSLRAEDTAVYYCAKEGTGANSSLADYRGQGTLVTVSSGGGSGGGSEVQLVESGGGSVQAGGSLRLSCTTSGRALNMYVMGWFRQAPGNEREFVAATSSSGGSTSYPDSVKGRFTISRDNAKNTVYLQMNSLKPEDTAAYRCAASPYVSTPTMNILEEYRYWGLGTQVTVSSGTGGGGSGGGGSGGGGSEFDIQMTQSPSSLSASVGDRVTITCKASDHINNWLAWYQQKPGQAPKLLIYGATTLETGVPSRFSGSGSGTDYTLTISSLQPEDFATYYCQQSWNTPWTFGQGTKLEIKRLEGKPIPNPLLGLDSTGSGDKQLDADVSPKPTIFLPSIAETKLQKAGTYLCLLEKFFPDVIKIHWQEKKSNTILGSQEGNTMKTNDTYMKFSWLTVPEKSLDKEHRCIVRHENNKNGVDQEIIFPPIKTDVITMDPKDNCSKDANDTLLLQLTNTSAYYMYLLLLLKSVVYFAIITCCLLRRTAFCCNGEKSRAKRSGSGATNFSLLKQAGDVEENPGPTSMDWIWRILFLVGAATGAHSGPQVQLQESGGGLAQAGGSLRLSCAASGRTFSMGWFRQAPGKEREFVAAITYSGGSPYYASSVRGRFTISRDNAKNTVYLQMNSLKPEDTAVYYCAANPTYGSDWNAENWGQGTQVTVSSGSGGGGSGGGGSGGGGSFEQVQLQQPGAELVKPGASVKMSCKASGYAFSSYWINWMKQKPGQGLEWIGQIYPGDGDTNYNGKFKGRATLTADTSSSTAYMQLSSLTSEDSAVYFCARSITTVVGCAMDYWGQGTSVTVSSTREQKLISEEDGSGSQPHTKPSVFVMKNGTNVACLVKEFYPKDIRINLVSSKKITEFDPAIVISPSGKYNAVKLGKYEDSNSVTCSVQHDNKTVHSTDFEVKTDSTDHVKPKETENTKQPSKSCHKPKAIVHTEKVNMMSLTVLGLRMLFAKTVAVNFLLTAKLFFLRAKRSGSGVKQTLNFDLLKLAGDVESNPGPSRGHMTEYKPTVRLATRDDVPRAVRTLAAAFADYPATRHTVDPDRHIERVTELQELFLTRVGLDIGKVWVADDGAAVAVWTTPESVEAGAVFAEIGPRMAELSGSRLAAQQQMEGLLAPHRPKEPAWFLATVGVSPDHQGKGLGSAVVLPGVEAAERAGVPAFLETSAPRNLPFYERLGFTVTADVEVPEGPRTWCMTRKPGA

SEQ ID NO: 16307 - protein, 1041 aa, Artificial Sequence
  Synthetic Polypeptide
MALPVTALLLPLALLLHAARPEVQLLESGGGLVQPGGSLRLSCAASGFTFSSYAMSWVRQAPGKGLEWVSSISGSGDYIYYADSVKGRFTISRDISKNTLYLQMNSLRAEDTAVYYCAKEGTGANSSLADYRGQGTLVTVSSGGGSGGGSEVQLVESGGGSVQAGGSLRLSCTTSGRALNMYVMGWFRQAPGNEREFVAATSSSGGSTSYPDSVKGRFTISRDNAKNTVYLQMNSLKPEDTAAYRCAASPYVSTPTMNILEEYRYWGLGTQVTVSSGTGGGGSGGGGSGGGGSEFDIQMTQSPSSLSASVGDRVTITCKASDHINNWLAWYQQKPGQAPKLLIYGATTLETGVPSRFSGSGSGTDYTLTISSLQPEDFATYYCQQSWNTPWTFGQGTKLEIKRLESQPHTKPSVFVMKNGTNVACLVKEFYPKDIRINLVSSKKITEFDPAIVISPSGKYNAVKLGKYEDSNSVTCSVQHDNKTVHSTDFEVKTDSTDHVKPKETENTKQPSKSCHKPKAIVHTEKVNMMSLTVLGLRMLFAKTVAVNFLLTAKLFFLRAKRSGSGATNFSLLKQAGDVEENPGPTSMDWIWRILFLVGAATGAHSGPQVQLQESGGGLAQAGGSLRLSCAASGRTFSMGWFRQAPGKEREFVAAITYSGGSPYYASSVRGRFTISRDNAKNTVYLQMNSLKPEDTAVYYCAANPTYGSDWNAENWGQGTQVTVSSGSGGGGSGGGGSGGGGSFEQVQLQQPGAELVKPGASVKMSCKASGYAFSSYWINWMKQKPGQGLEWIGQIYPGDGDTNYNGKFKGRATLTADTSSSTAYMQLSSLTSEDSAVYFCARSITTVVGCAMDYWGQGTSVTVSSTRDKQLDADVSPKPTIFLPSIAETKLQKAGTYLCLLEKFFPDVIKIHWQEKKSNTILGSQEGNTMKTNDTYMKFSWLTVPEKSLDKEHRCIVRHENNKNGVDQEIIFPPIKTDVITMDPKDNCSKDANDTLLLQLTNTSAYYMYLLLLLKSVVYFAIITCCLLRRTAFCCNGEKS

SEQ ID NO: 16308 - protein, 1443 aa, Artificial Sequence
  Synthetic Polypeptide
MALPVTALLLPLALLLHAARPEVQLLESGGGLVQPGGSLRLSCAASGFTFSSYAMSWVRQAPGKGLEWVSSISGSGDYIYYADSVKGRFTISRDISKNTLYLQMNSLRAEDTAVYYCAKEGTGANSSLADYRGQGTLVTVSSGGGSGGGSEVQLVESGGGSVQAGGSLRLSCTTSGRALNMYVMGWFRQAPGNEREFVAATSSSGGSTSYPDSVKGRFTISRDNAKNTVYLQMNSLKPEDTAAYRCAASPYVSTPTMNILEEYRYWGLGTQVTVSSGTGGGGSGGGGSGGGGSEFDIQMTQSPSSLSASVGDRVTITCKASDHINNWLAWYQQKPGQAPKLLIYGATTLETGVPSRFSGSGSGTDYTLTISSLQPEDFATYYCQQSWNTPWTFGQGTKLEIKRGQPKANPTVTLFPPSSEELQANKATLVCLISDFYPGAVTVAWKADGSPVKAGVETTKPSKQSNNKYAASSYLSLTPEQWKSHRSYSCQVTHEGSTVEKTVAPTECSGSQSFGLLDPKLCYLLDGILFIYGVILTALFLRVKFSRSADAPAYQQGQNQLYNELNLGRREEYDVLDKRRGRDPEMGGKPQRRKNPQEGLYNELQKDKMAEAYSEIGMKGERRRGKGHDGLYQGLSTATKDTYDALHMQALPPRRAKRSGSGATNFSLLKQAGDVEENPGPTSMDWIWRILFLVGAATGAHSGPQVQLQESGGGLAQAGGSLRLSCAASGRTFSMGWFRQAPGKEREFVAAITYSGGSPYYASSVRGRFTISRDNAKNTVYLQMNSLKPEDTAVYYCAANPTYGSDWNAENWGQGTQVTVSSGSGGGGSGGGGSGGGGSFEQVQLQQPGAELVKPGASVKMSCKASGYAFSSYWINWMKQKPGQGLEWIGQIYPGDGDTNYNGKFKGRATLTADTSSSTAYMQLSSLTSEDSAVYFCARSITTVVGCAMDYWGQGTSVTVSSASTKGPSVFPLAPSSKSTSGGTAALGCLVKDYFPEPVTVSWNSGALTSGVHTFPAVLQSSGLYSLSSVVTVPSSSLGTQTYICNVNHKPSNTKVDKRVEPKSCGTQSFGLLDPKLCYLLDGILFIYGVILTALFLRVKFSRSADAPAYQQGQNQLYNELNLGRREEYDVLDKRRGRDPEMGGKPQRRKNPQEGLYNELQKDKMAEAYSEIGMKGERRRGKGHDGLYQGLSTATKDTYDALHMQALPPRRAKRSGSGVKQTLNFDLLKLAGDVESNPGPSRGHMTEYKPTVRLATRDDVPRAVRTLAAAFADYPATRHTVDPDRHIERVTELQELFLTRVGLDIGKVWVADDGAAVAVWTTPESVEAGAVFAEIGPRMAELSGSRLAAQQQMEGLLAPHRPKEPAWFLATVGVSPDHQGKGLGSAVVLPGVEAAERAGVPAFLETSAPRNLPFYERLGFTVTADVEVPEGPRTWCMTRKPGA

SEQ ID NO: 16309 - protein, 1229 aa, Artificial Sequence
  Synthetic Polypeptide
MALPVTALLLPLALLLHAARPEVQLLESGGGLVQPGGSLRLSCAASGFTFSSYAMSWVRQAPGKGLEWVSSISGSGDYIYYADSVKGRFTISRDISKNTLYLQMNSLRAEDTAVYYCAKEGTGANSSLADYRGQGTLVTVSSGGGSGGGSEVQLVESGGGSVQAGGSLRLSCTTSGRALNMYVMGWFRQAPGNEREFVAATSSSGGSTSYPDSVKGRFTISRDNAKNTVYLQMNSLKPEDTAAYRCAASPYVSTPTMNILEEYRYWGLGTQVTVSSGTGGGGSGGGGSGGGGSEFDIQMTQSPSSLSASVGDRVTITCKASDHINNWLAWYQQKPGQAPKLLIYGATTLETGVPSRFSGSGSGTDYTLTISSLQPEDFATYYCQQSWNTPWTFGQGTKLEIKRLEDLKNVFPPEVAVFEPSEAEISHTQKATLVCLATGFYPDHVELSWWVNGKEVHSGVSTDPQPLKEQPALNDSRYCLSSRLRVSATFWQNPRNHFRCQVQFYGLSENDEWTQDRAKPVTQIVSAEAWGRADCGSQSFGLLDPKLCYLLDGILFIYGVILTALFLRVKFSRSADAPAYQQGQNQLYNELNLGRREEYDVLDKRRGRDPEMGGKPQRRKNPQEGLYNELQKDKMAEAYSEIGMKGERRRGKGHDGLYQGLSTATKDTYDALHMQALPPRRAKRSGSGATNFSLLKQAGDVEENPGPTSMDWIWRILFLVGAATGAHSGPQVQLQESGGGLAQAGGSLRLSCAASGRTFSMGWFRQAPGKEREFVAAITYSGGSPYYASSVRGRFTISRDNAKNTVYLQMNSLKPEDTAVYYCAANPTYGSDWNAENWGQGTQVTVSSGSGGGGSGGGGSGGGGSFEQVQLQQPGAELVKPGASVKMSCKASGYAFSSYWINWMKQKPGQGLEWIGQIYPGDGDTNYNGKFKGRATLTADTSSSTAYMQLSSLTSEDSAVYFCARSITTVVGCAMDYWGQGTSVTVSSTRIQNPDPAVYQLRDSKSSDKSVCLFTDFDSQTNVSQSKDSDVYITDKTVLDMRSMDFKSNSAVAWSNKSDFACANAFNNSIIPEDTFFPSPESSCGTQSFGLLDPKLCYLLDGILFIYGVILTALFLRVKFSRSADAPAYQQGQNQLYNELNLGRREEYDVLDKRRGRDPEMGGKPQRRKNPQEGLYNELQKDKMAEAYSEIGMKGERRRGKGHDGLYQGLSTATKDTYDALHMQALPPR

SEQ ID NO: 16310 - protein, 1229 aa, Artificial Sequence
  Synthetic Polypeptide
MALPVTALLLPLALLLHAARPEVQLLESGGGLVQPGGSLRLSCAASGFTFSSYAMSWVRQAPGKGLEWVSSISGSGDYIYYADSVKGRFTISRDISKNTLYLQMNSLRAEDTAVYYCAKEGTGANSSLADYRGQGTLVTVSSGGGSGGGSEVQLVESGGGSVQAGGSLRLSCTTSGRALNMYVMGWFRQAPGNEREFVAATSSSGGSTSYPDSVKGRFTISRDNAKNTVYLQMNSLKPEDTAAYRCAASPYVSTPTMNILEEYRYWGLGTQVTVSSGTGGGGSGGGGSGGGGSEFDIQMTQSPSSLSASVGDRVTITCKASDHINNWLAWYQQKPGQAPKLLIYGATTLETGVPSRFSGSGSGTDYTLTISSLQPEDFATYYCQQSWNTPWTFGQGTKLEIKRLEDLKNVFPPEVAVFEPSKAEIAHTQKATLVCLATGFYPDHVELSWWVNGKEVHSGVCTDPQPLKEQPALNDSRYCLSSRLRVSATFWQNPRNHFRCQVQFYGLSENDEWTQDRAKPVTQIVSAEAWGRADCGSQSFGLLDPKLCYLLDGILFIYGVILTALFLRVKFSRSADAPAYQQGQNQLYNELNLGRREEYDVLDKRRGRDPEMGGKPQRRKNPQEGLYNELQKDKMAEAYSEIGMKGERRRGKGHDGLYQGLSTATKDTYDALHMQALPPRRAKRSGSGATNFSLLKQAGDVEENPGPTSMDWIWRILFLVGAATGAHSGPQVQLQESGGGLAQAGGSLRLSCAASGRTFSMGWFRQAPGKEREFVAAITYSGGSPYYASSVRGRFTISRDNAKNTVYLQMNSLKPEDTAVYYCAANPTYGSDWNAENWGQGTQVTVSSGSGGGGSGGGGSGGGGSFEQVQLQQPGAELVKPGASVKMSCKASGYAFSSYWINWMKQKPGQGLEWIGQIYPGDGDTNYNGKFKGRATLTADTSSSTAYMQLSSLTSEDSAVYFCARSITTVVGCAMDYWGQGTSVTVSSTRIQNPDPAVYQLRDSKSSDKSVCLFTDFDSQTNVSQSKDSDVYITDKCVLDMRSMDFKSNSAVAWSNKSDFACANAFNNSIIPEDTFFPSSDVPCGTQSFGLLDPKLCYLLDGILFIYGVILTALFLRVKFSRSADAPAYQQGQNQLYNELNLGRREEYDVLDKRRGRDPEMGGKPQRRKNPQEGLYNELQKDKMAEAYSEIGMKGERRRGKGHDGLYQGLSTATKDTYDALHMQALPPR

SEQ ID NO: 16311 - protein, 1300 aa, Artificial Sequence
  Synthetic Polypeptide
MALPVTALLLPLALLLHAARPEVQLLESGGGLVQPGGSLRLSCAASGFTFSSYAMSWVRQAPGKGLEWVSSISGSGDYIYYADSVKGRFTISRDISKNTLYLQMNSLRAEDTAVYYCAKEGTGANSSLADYRGQGTLVTVSSGGGSGGGSEVQLVESGGGSVQAGGSLRLSCTTSGRALNMYVMGWFRQAPGNEREFVAATSSSGGSTSYPDSVKGRFTISRDNAKNTVYLQMNSLKPEDTAAYRCAASPYVSTPTMNILEEYRYWGLGTQVTVSSGTGGGGSGGGGSGGGGSEFDIQMTQSPSSLSASVGDRVTITCKASDHINNWLAWYQQKPGQAPKLLIYGATTLETGVPSRFSGSGSGTDYTLTISSLQPEDFATYYCQQSWNTPWTFGQGTKLEIKRLEGKPIPNPLLGLDSTGSGEDLKNVFPPEVAVFEPSEAEISHTQKATLVCLATGFYPDHVELSWWVNGKEVHSGVSTDPQPLKEQPALNDSRYCLSSRLRVSATFWQNPRNHFRCQVQFYGLSENDEWTQDRAKPVTQIVSAEAWGRADCGSQSFGLLDPKLCYLLDGILFIYGVILTALFLRVKFSRSADAPAYQQGQNQLYNELNLGRREEYDVLDKRRGRDPEMGGKPQRRKNPQEGLYNELQKDKMAEAYSEIGMKGERRRGKGHDGLYQGLSTATKDTYDALHMQALPPRRAKRSGSGATNFSLLKQAGDVEENPGPTSMDWIWRILFLVGAATGAHSGPQVQLQESGGGLAQAGGSLRLSCAASGRTFSMGWFRQAPGKEREFVAAITYSGGSPYYASSVRGRFTISRDNAKNTVYLQMNSLKPEDTAVYYCAANPTYGSDWNAENWGQGTQVTVSSGSGGGGSGGGGSGGGGSFEQVQLQQPGAELVKPGASVKMSCKASGYAFSSYWINWMKQKPGQGLEWIGQIYPGDGDTNYNGKFKGRATLTADTSSSTAYMQLSSLTSEDSAVYFCARSITTVVGCAMDYWGQGTSVTVSSTREQKLISEEDGSGIQNPDPAVYQLRDSKSSDKSVCLFTDFDSQTNVSQSKDSDVYITDKTVLDMRSMDFKSNSAVAWSNKSDFACANAFNNSIIPEDTFFPSPESSCGTQSFGLLDPKLCYLLDGILFIYGVILTALFLRSKRSRLLHSDYMNMTPRRPGPTRKHYQPYAPPRDFAAYRSRVKFSRSADAPAYQQGQNQLYNELNLGRREEYDVLDKRRGRDPEMGGKPQRRKNPQEGLYNELQKDKMAEAYSEIGMKGERRRGKGHDGLYQGLSTATKDTYDALHMQALPPR

SEQ ID NO: 16312 - protein, 1341 aa, Artificial Sequence
  Synthetic Polypeptide
MALPVTALLLPLALLLHAARPEVQLLESGGGLVQPGGSLRLSCAASGFTFSSYAMSWVRQAPGKGLEWVSSISGSGDYIYYADSVKGRFTISRDISKNTLYLQMNSLRAEDTAVYYCAKEGTGANSSLADYRGQGTLVTVSSGGGSGGGSEVQLVESGGGSVQAGGSLRLSCTTSGRALNMYVMGWFRQAPGNEREFVAATSSSGGSTSYPDSVKGRFTISRDNAKNTVYLQMNSLKPEDTAAYRCAASPYVSTPTMNILEEYRYWGLGTQVTVSSGTGGGGSGGGGSGGGGSEFDIQMTQSPSSLSASVGDRVTITCKASDHINNWLAWYQQKPGQAPKLLIYGATTLETGVPSRFSGSGSGTDYTLTISSLQPEDFATYYCQQSWNTPWTFGQGTKLEIKRLEGKPIPNPLLGLDSTGSGEDLKNVFPPEVAVFEPSEAEISHTQKATLVCLATGFYPDHVELSWWVNGKEVHSGVSTDPQPLKEQPALNDSRYCLSSRLRVSATFWQNPRNHFRCQVQFYGLSENDEWTQDRAKPVTQIVSAEAWGRADCGSQSFGLLDPKLCYLLDGILFIYGVILTALFLRSKRSRLLHSDYMNMTPRRPGPTRKHYQPYAPPRDFAAYRSRVKFSRSADAPAYQQGQNQLYNELNLGRREEYDVLDKRRGRDPEMGGKPQRRKNPQEGLYNELQKDKMAEAYSEIGMKGERRRGKGHDGLYQGLSTATKDTYDALHMQALPPRRAKRSGSGATNFSLLKQAGDVEENPGPTSMDWIWRILFLVGAATGAHSGPQVQLQESGGGLAQAGGSLRLSCAASGRTFSMGWFRQAPGKEREFVAAITYSGGSPYYASSVRGRFTISRDNAKNTVYLQMNSLKPEDTAVYYCAANPTYGSDWNAENWGQGTQVTVSSGSGGGGSGGGGSGGGGSFEQVQLQQPGAELVKPGASVKMSCKASGYAFSSYWINWMKQKPGQGLEWIGQIYPGDGDTNYNGKFKGRATLTADTSSSTAYMQLSSLTSEDSAVYFCARSITTVVGCAMDYWGQGTSVTVSSTREQKLISEEDGSGIQNPDPAVYQLRDSKSSDKSVCLFTDFDSQTNVSQSKDSDVYITDKTVLDMRSMDFKSNSAVAWSNKSDFACANAFNNSIIPEDTFFPSPESSCGTQSFGLLDPKLCYLLDGILFIYGVILTALFLRSKRSRLLHSDYMNMTPRRPGPTRKHYQPYAPPRDFAAYRSRVKFSRSADAPAYQQGQNQLYNELNLGRREEYDVLDKRRGRDPEMGGKPQRRKNPQEGLYNELQKDKMAEAYSEIGMKGERRRGKGHDGLYQGLSTATKDTYDALHMQALPPR

SEQ ID NO: 16313 - protein, 1302 aa, Artificial Sequence
  Synthetic Polypeptide
MALPVTALLLPLALLLHAARPEVQLLESGGGLVQPGGSLRLSCAASGFTFSSYAMSWVRQAPGKGLEWVSSISGSGDYIYYADSVKGRFTISRDISKNTLYLQMNSLRAEDTAVYYCAKEGTGANSSLADYRGQGTLVTVSSGGGSGGGSEVQLVESGGGSVQAGGSLRLSCTTSGRALNMYVMGWFRQAPGNEREFVAATSSSGGSTSYPDSVKGRFTISRDNAKNTVYLQMNSLKPEDTAAYRCAASPYVSTPTMNILEEYRYWGLGTQVTVSSGTGGGGSGGGGSGGGGSEFDIQMTQSPSSLSASVGDRVTITCKASDHINNWLAWYQQKPGQAPKLLIYGATTLETGVPSRFSGSGSGTDYTLTISSLQPEDFATYYCQQSWNTPWTFGQGTKLEIKRLEGKPIPNPLLGLDSTGSGEDLKNVFPPEVAVFEPSEAEISHTQKATLVCLATGFYPDHVELSWWVNGKEVHSGVSTDPQPLKEQPALNDSRYCLSSRLRVSATFWQNPRNHFRCQVQFYGLSENDEWTQDRAKPVTQIVSAEAWGRADCGSQSFGLLDPKLCYLLDGILFIYGVILTALFLRVKFSRSADAPAYQQGQNQLYNELNLGRREEYDVLDKRRGRDPEMGGKPQRRKNPQEGLYNELQKDKMAEAYSEIGMKGERRRGKGHDGLYQGLSTATKDTYDALHMQALPPRRAKRSGSGATNFSLLKQAGDVEENPGPTSMDWIWRILFLVGAATGAHSGPQVQLQESGGGLAQAGGSLRLSCAASGRTFSMGWFRQAPGKEREFVAAITYSGGSPYYASSVRGRFTISRDNAKNTVYLQMNSLKPEDTAVYYCAANPTYGSDWNAENWGQGTQVTVSSGSGGGGSGGGGSGGGGSFEQVQLQQPGAELVKPGASVKMSCKASGYAFSSYWINWMKQKPGQGLEWIGQIYPGDGDTNYNGKFKGRATLTADTSSSTAYMQLSSLTSEDSAVYFCARSITTVVGCAMDYWGQGTSVTVSSTREQKLISEEDLGSGIQNPDPAVYQLRDSKSSDKSVCLFTDFDSQTNVSQSKDSDVYITDKTVLDMRSMDFKSNSAVAWSNKSDFACANAFNNSIIPEDTFFPSPESSCGTQSFGLLDPKLCYLLDGILFIYGVILTALFLKRGRKKLLYIFKQPFMRPVQTTQEEDGCSCRFPEEEEGGCELRVKFSRSADAPAYQQGQNQLYNELNLGRREEYDVLDKRRGRDPEMGGKPQRRKNPQEGLYNELQKDKMAEAYSEIGMKGERRRGKGHDGLYQGLSTATKDTYDALHMQALPPR

SEQ ID NO: 16314 - protein, 1344 aa, Artificial Sequence
  Synthetic Polypeptide
MALPVTALLLPLALLLHAARPEVQLLESGGGLVQPGGSLRLSCAASGFTFSSYAMSWVRQAPGKGLEWVSSISGSGDYIYYADSVKGRFTISRDISKNTLYLQMNSLRAEDTAVYYCAKEGTGANSSLADYRGQGTLVTVSSGGGSGGGSEVQLVESGGGSVQAGGSLRLSCTTSGRALNMYVMGWFRQAPGNEREFVAATSSSGGSTSYPDSVKGRFTISRDNAKNTVYLQMNSLKPEDTAAYRCAASPYVSTPTMNILEEYRYWGLGTQVTVSSGTGGGGSGGGGSGGGGSEFDIQMTQSPSSLSASVGDRVTITCKASDHINNWLAWYQQKPGQAPKLLIYGATTLETGVPSRFSGSGSGTDYTLTISSLQPEDFATYYCQQSWNTPWTFGQGTKLEIKRLEGKPIPNPLLGLDSTGSGEDLKNVFPPEVAVFEPSEAEISHTQKATLVCLATGFYPDHVELSWWVNGKEVHSGVSTDPQPLKEQPALNDSRYCLSSRLRVSATFWQNPRNHFRCQVQFYGLSENDEWTQDRAKPVTQIVSAEAWGRADCGSQSFGLLDPKLCYLLDGILFIYGVILTALFLKRGRKKLLYIFKQPFMRPVQTTQEEDGCSCRFPEEEEGGCELRVKFSRSADAPAYQQGQNQLYNELNLGRREEYDVLDKRRGRDPEMGGKPQRRKNPQEGLYNELQKDKMAEAYSEIGMKGERRRGKGHDGLYQGLSTATKDTYDALHMQALPPRRAKRSGSGATNFSLLKQAGDVEENPGPTSMDWIWRILFLVGAATGAHSGPQVQLQESGGGLAQAGGSLRLSCAASGRTFSMGWFRQAPGKEREFVAAITYSGGSPYYASSVRGRFTISRDNAKNTVYLQMNSLKPEDTAVYYCAANPTYGSDWNAENWGQGTQVTVSSGSGGGGSGGGGSGGGGSFEQVQLQQPGAELVKPGASVKMSCKASGYAFSSYWINWMKQKPGQGLEWIGQIYPGDGDTNYNGKFKGRATLTADTSSSTAYMQLSSLTSEDSAVYFCARSITTVVGCAMDYWGQGTSVTVSSTREQKLISEEDLGSGIQNPDPAVYQLRDSKSSDKSVCLFTDFDSQTNVSQSKDSDVYITDKTVLDMRSMDFKSNSAVAWSNKSDFACANAFNNSIIPEDTFFPSPESSCGTQSFGLLDPKLCYLLDGILFIYGVILTALFLKRGRKKLLYIFKQPFMRPVQTTQEEDGCSCRFPEEEEGGCELRVKFSRSADAPAYQQGQNQLYNELNLGRREEYDVLDKRRGRDPEMGGKPQRRKNPQEGLYNELQKDKMAEAYSEIGMKGERRRGKGHDGLYQGLSTATKDTYDALHMQALPPR

SEQ ID NO: 16315 - protein, 1234 aa, Artificial Sequence
  Synthetic Polypeptide
MALPVTALLLPLALLLHAARPEVQLLESGGGLVQPGGSLRLSCAASGFTFSSYAMSWVRQAPGKGLEWVSSISGSGDYIYYADSVKGRFTISRDISKNTLYLQMNSLRAEDTAVYYCAKEGTGANSSLADYRGQGTLVTVSSGGGSGGGSEVQLVESGGGSVQAGGSLRLSCTTSGRALNMYVMGWFRQAPGNEREFVAATSSSGGSTSYPDSVKGRFTISRDNAKNTVYLQMNSLKPEDTAAYRCAASPYVSTPTMNILEEYRYWGLGTQVTVSSGTGGGGSGGGGSGGGGSEFDIQMTQSPSSLSASVGDRVTITCKASDHINNWLAWYQQKPGQAPKLLIYGATTLETGVPSRFSGSGSGTDYTLTISSLQPEDFATYYCQQSWNTPWTFGQGTKLEIKRLEQSFGLLDPKLCYLLDGILFIYGVILTALFLRVKFSRSADAPAYQQGQNQLYNELNLGRREEYDVLDKRRGRDPEMGGKPQRRKNPQEGLYNELQKDKMAEAYSEIGMKGERRRGKGHDGLYQGLSTATKDTYDALHMQALPPRRAKRSGSGATNFSLLKQAGDVEENPGPTSMDWIWRILFLVGAATGAHSGPQVQLQESGGGLAQAGGSLRLSCAASGRTFSMGWFRQAPGKEREFVAAITYSGGSPYYASSVRGRFTISRDNAKNTVYLQMNSLKPEDTAVYYCAANPTYGSDWNAENWGQGTQVTVSSGSGGGGSGGGGSGGGGSFEQVQLQQPGAELVKPGASVKMSCKASGYAFSSYWINWMKQKPGQGLEWIGQIYPGDGDTNYNGKFKGRATLTADTSSSTAYMQLSSLTSEDSAVYFCARSITTVVGCAMDYWGQGTSVTVSSTRQSFGLLDPKLCYLLDGILFIYGVILTALFLRVKFSRSADAPAYQQGQNQLYNELNLGRREEYDVLDKRRGRDPEMGGKPQRRKNPQEGLYNELQKDKMAEAYSEIGMKGERRRGKGHDGLYQGLSTATKDTYDALHMQALPPRRAKRSGSGVKQTLNFDLLKLAGDVESNPGPSRGHMTEYKPTVRLATRDDVPRAVRTLAAAFADYPATRHTVDPDRHIERVTELQELFLTRVGLDIGKVWVADDGAAVAVWTTPESVEAGAVFAEIGPRMAELSGSRLAAQQQMEGLLAPHRPKEPAWFLATVGVSPDHQGKGLGSAVVLPGVEAAERAGVPAFLETSAPRNLPFYERLGFTVTADVEVPEGPRTWCMTRKPGA

SEQ ID NO: 16316 - protein, 1059 aa, Artificial Sequence
  Synthetic Polypeptide
MALPVTALLLPLALLLHAARPEVQLLESGGGLVQPGGSLRLSCAASGFTFSSYAMSWVRQAPGKGLEWVSSISGSGDYIYYADSVKGRFTISRDISKNTLYLQMNSLRAEDTAVYYCAKEGTGANSSLADYRGQGTLVTVSSGGGSGGGSEVQLVESGGGSVQAGGSLRLSCTTSGRALNMYVMGWFRQAPGNEREFVAATSSSGGSTSYPDSVKGRFTISRDNAKNTVYLQMNSLKPEDTAAYRCAASPYVSTPTMNILEEYRYWGLGTQVTVSSGTGGGGSGGGGSGGGGSEFDIQMTQSPSSLSASVGDRVTITCKASDHINNWLAWYQQKPGQAPKLLIYGATTLETGVPSRFSGSGSGTDYTLTISSLQPEDFATYYCQQSWNTPWTFGQGTKLEIKRLEGQPKANPTVTLFPPSSEELQANKATLVCLISDFYPGAVTVAWKADGSPVKAGVETTKPSKQSNNKYAASSYLSLTPEQWKSHRSYSCQVTHEGSTVEKTVAPTECSPIKTDVITMDPKDNCSKDANDTLLLQLTNTSAYYMYLLLLLKSVVYFAIITCCLLRRTAFCCNGEKSRAKRSGSGATNFSLLKQAGDVEENPGPTSMDWIWRILFLVGAATGAHSGPQVQLQESGGGLAQAGGSLRLSCAASGRTFSMGWFRQAPGKEREFVAAITYSGGSPYYASSVRGRFTISRDNAKNTVYLQMNSLKPEDTAVYYCAANPTYGSDWNAENWGQGTQVTVSSGSGGGGSGGGGSGGGGSFEQVQLQQPGAELVKPGASVKMSCKASGYAFSSYWINWMKQKPGQGLEWIGQIYPGDGDTNYNGKFKGRATLTADTSSSTAYMQLSSLTSEDSAVYFCARSITTVVGCAMDYWGQGTSVTVSSTRASTKGPSVFPLAPSSKSTSGGTAALGCLVKDYFPEPVTVSWNSGALTSGVHTFPAVLQSSGLYSLSSVVTVPSSSLGTQTYICNVNHKPSNTKVDKRVEPKSCEVKTDSTDHVKPKETENTKQPSKSCHKPKAIVHTEKVNMMSLTVLGLRMLFAKTVAVNFLLTAKLFFL

SEQ ID NO: 16317 - protein, 1037 aa, Artificial Sequence
  Synthetic Polypeptide
MALPVTALLLPLALLLHAARPEVQLLESGGGLVQPGGSLRLSCAASGFTFSSYAMSWVRQAPGKGLEWVSSISGSGDYIYYADSVKGRFTISRDISKNTLYLQMNSLRAEDTAVYYCAKEGTGANSSLADYRGQGTLVTVSSGGGSGGGSEVQLVESGGGSVQAGGSLRLSCTTSGRALNMYVMGWFRQAPGNEREFVAATSSSGGSTSYPDSVKGRFTISRDNAKNTVYLQMNSLKPEDTAAYRCAASPYVSTPTMNILEEYRYWGLGTQVTVSSGTGGGGSGGGGSGGGGSEFDIQMTQSPSSLSASVGDRVTITCKASDHINNWLAWYQQKPGQAPKLLIYGATTLETGVPSRFSGSGSGTDYTLTISSLQPEDFATYYCQQSWNTPWTFGQGTKLEIKRLEGQPKANPTVTLFPPSSEELQANKATLVCLISDFYPGAVTVAWKADGSPVKAGVETTKPSKQSNNKYAASSYLSLTPEQWKSHRSYSCQVTHEGSTVEKTVAPTECSGRADCGITSASYHQGVLSATILYEILLGKATLYAVLVSALVLMAMVKRKDSRGRAKRSGSGATNFSLLKQAGDVEENPGPTSMDWIWRILFLVGAATGAHSGPQVQLQESGGGLAQAGGSLRLSCAASGRTFSMGWFRQAPGKEREFVAAITYSGGSPYYASSVRGRFTISRDNAKNTVYLQMNSLKPEDTAVYYCAANPTYGSDWNAENWGQGTQVTVSSGSGGGGSGGGGSGGGGSFEQVQLQQPGAELVKPGASVKMSCKASGYAFSSYWINWMKQKPGQGLEWIGQIYPGDGDTNYNGKFKGRATLTADTSSSTAYMQLSSLTSEDSAVYFCARSITTVVGCAMDYWGQGTSVTVSSTRASTKGPSVFPLAPSSKSTSGGTAALGCLVKDYFPEPVTVSWNSGALTSGVHTFPAVLQSSGLYSLSSVVTVPSSSLGTQTYICNVNHKPSNTKVDKRVEPKSCIPEDTFFPSSDVPCDVKLVEKSFETDTNLNFQNLSVIGFRILLLKVAGFNLLMTLRLWSS

SEQ ID NO: 16318 - protein, 1037 aa, Artificial Sequence
  Synthetic Polypeptide
MALPVTALLLPLALLLHAARPEVQLLESGGGLVQPGGSLRLSCAASGFTFSSYAMSWVRQAPGKGLEWVSSISGSGDYIYYADSVKGRFTISRDISKNTLYLQMNSLRAEDTAVYYCAKEGTGANSSLADYRGQGTLVTVSSGGGSGGGSEVQLVESGGGSVQAGGSLRLSCTTSGRALNMYVMGWFRQAPGNEREFVAATSSSGGSTSYPDSVKGRFTISRDNAKNTVYLQMNSLKPEDTAAYRCAASPYVSTPTMNILEEYRYWGLGTQVTVSSGTGGGGSGGGGSGGGGSEFDIQMTQSPSSLSASVGDRVTITCKASDHINNWLAWYQQKPGQAPKLLIYGATTLETGVPSRFSGSGSGTDYTLTISSLQPEDFATYYCQQSWNTPWTFGQGTKLEIKRLEGQPKANPTVTLFPPSSEELQANKATLVCLISDFYPGAVTVAWKADGSPVKAGVETTKPSKQSNNKYAASSYLSLTPEQWKSHRSYSCQVTHEGSTVEKTVAPTECSGRADCGFTSESYQQGVLSATILYEILLGKATLYAVLVSALVLMAMVKRKDSRGRAKRSGSGATNFSLLKQAGDVEENPGPTSMDWIWRILFLVGAATGAHSGPQVQLQESGGGLAQAGGSLRLSCAASGRTFSMGWFRQAPGKEREFVAAITYSGGSPYYASSVRGRFTISRDNAKNTVYLQMNSLKPEDTAVYYCAANPTYGSDWNAENWGQGTQVTVSSGSGGGGSGGGGSGGGGSFEQVQLQQPGAELVKPGASVKMSCKASGYAFSSYWINWMKQKPGQGLEWIGQIYPGDGDTNYNGKFKGRATLTADTSSSTAYMQLSSLTSEDSAVYFCARSITTVVGCAMDYWGQGTSVTVSSTRASTKGPSVFPLAPSSKSTSGGTAALGCLVKDYFPEPVTVSWNSGALTSGVHTFPAVLQSSGLYSLSSVVTVPSSSLGTQTYICNVNHKPSNTKVDKRVEPKSCIPEDTFFPSPESSCDVKLVEKSFETDTNLNFQNLSVIGFRILLLKVAGFNLLMTLRLWSS

SEQ ID NO: 16319 - protein, 1003 aa, Artificial Sequence
  Synthetic Polypeptide
MALPVTALLLPLALLLHAARPEVQLLESGGGLVQPGGSLRLSCAASGFTFSSYAMSWVRQAPGKGLEWVSSISGSGDYIYYADSVKGRFTISRDISKNTLYLQMNSLRAEDTAVYYCAKEGTGANSSLADYRGQGTLVTVSSGGGSGGGSEVQLVESGGGSVQAGGSLRLSCTTSGRALNMYVMGWFRQAPGNEREFVAATSSSGGSTSYPDSVKGRFTISRDNAKNTVYLQMNSLKPEDTAAYRCAASPYVSTPTMNILEEYRYWGLGTQVTVSSLEGQPKANPTVTLFPPSSEELQANKATLVCLISDFYPGAVTVAWKADGSPVKAGVETTKPSKQSNNKYAASSYLSLTPEQWKSHRSYSCQVTHEGSTVEKTVAPTECSGRADCGFTSESYQQGVLSATILYEILLGKATLYAVLVSALVLMAMVKRKDSRGRAKRSGSGATNFSLLKQAGDVEENPGPTSMDWIWRILFLVGAATGAHSGPQVQLQESGGGLAQAGGSLRLSCAASGRTFSMGWFRQAPGKEREFVAAITYSGGSPYYASSVRGRFTISRDNAKNTVYLQMNSLKPEDTAVYYCAANPTYGSDWNAENWGQGTQVTVSSTRASTKGPSVFPLAPSSKSTSGGTAALGCLVKDYFPEPVTVSWNSGALTSGVHTFPAVLQSSGLYSLSSVVTVPSSSLGTQTYICNVNHKPSNTKVDKRVEPKSCIPEDTFFPSPESSCDVKLVEKSFETDTNLNFQNLSVIGFRILLLKVAGFNLLMTLRLWSSRAKRSGSGVKQTLNFDLLKLAGDVESNPGPSRGHMTEYKPTVRLATRDDVPRAVRTLAAAFADYPATRHTVDPDRHIERVTELQELFLTRVGLDIGKVWVADDGAAVAVWTTPESVEAGAVFAEIGPRMAELSGSRLAAQQQMEGLLAPHRPKEPAWFLATVGVSPDHQGKGLGSAVVLPGVEAAERAGVPAFLETSAPRNLPFYERLGFTVTADVEVPEGPRTWCMTRKPGA

SEQ ID NO: 16320 - protein, 770 aa, Artificial Sequence
  Synthetic Polypeptide
MALPVTALLLPLALLLHAARPEVQLLESGGGLVQPGGSLRLSCAASGFTFSSYAMSWVRQAPGKGLEWVSSISGSGDYIYYADSVKGRFTISRDISKNTLYLQMNSLRAEDTAVYYCAKEGTGANSSLADYRGQGTLVTVSSGGGSGGGSEVQLVESGGGSVQAGGSLRLSCTTSGRALNMYVMGWFRQAPGNEREFVAATSSSGGSTSYPDSVKGRFTISRDNAKNTVYLQMNSLKPEDTAAYRCAASPYVSTPTMNILEEYRYWGLGTQVTVSSLEGQPKANPTVTLFPPSSEELQANKATLVCLISDFYPGAVTVAWKADGSPVKAGVETTKPSKQSNNKYAASSYLSLTPEQWKSHRSYSCQVTHEGSTVEKTVAPTECSGRADCGFTSESYQQGVLSATILYEILLGKATLYAVLVSALVLMAMVKRKDSRGRAKRSGSGATNFSLLKQAGDVEENPGPTSMDWIWRILFLVGAATGAHSGPQVQLQESGGGLAQAGGSLRLSCAASGRTFSMGWFRQAPGKEREFVAAITYSGGSPYYASSVRGRFTISRDNAKNTVYLQMNSLKPEDTAVYYCAANPTYGSDWNAENWGQGTQVTVSSTRASTKGPSVFPLAPSSKSTSGGTAALGCLVKDYFPEPVTVSWNSGALTSGVHTFPAVLQSSGLYSLSSVVTVPSSSLGTQTYICNVNHKPSNTKVDKRVEPKSCIPEDTFFPSPESSCDVKLVEKSFETDTNLNFQNLSVIGFRILLLKVAGFNLLMTLRLWSS

SEQ ID NO: 16321 - protein, 798 aa, Artificial Sequence
  Synthetic Polypeptide
MALPVTALLLPLALLLHAARPEVQLLESGGGLVQPGGSLRLSCAASGFTFSSYAMSWVRQAPGKGLEWVSSISGSGDYIYYADSVKGRFTISRDISKNTLYLQMNSLRAEDTAVYYCAKEGTGANSSLADYRGQGTLVTVSSGGGSGGGSEVQLVESGGGSVQAGGSLRLSCTTSGRALNMYVMGWFRQAPGNEREFVAATSSSGGSTSYPDSVKGRFTISRDNAKNTVYLQMNSLKPEDTAAYRCAASPYVSTPTMNILEEYRYWGLGTQVTVSSLEGSGRADCGFTSESYQQGVLSATILYEILLGKATLYAVLVSALVLMAMVKRKDSRGRAKRSGSGATNFSLLKQAGDVEENPGPTSMDWIWRILFLVGAATGAHSGPQVQLQESGGGLAQAGGSLRLSCAASGRTFSMGWFRQAPGKEREFVAAITYSGGSPYYASSVRGRFTISRDNAKNTVYLQMNSLKPEDTAVYYCAANPTYGSDWNAENWGQGTQVTVSSTRGSIPEDTFFPSPESSCDVKLVEKSFETDTNLNFQNLSVIGFRILLLKVAGFNLLMTLRLWSSRAKRSGSGVKQTLNFDLLKLAGDVESNPGPSRGHMTEYKPTVRLATRDDVPRAVRTLAAAFADYPATRHTVDPDRHIERVTELQELFLTRVGLDIGKVWVADDGAAVAVWTTPESVEAGAVFAEIGPRMAELSGSRLAAQQQMEGLLAPHRPKEPAWFLATVGVSPDHQGKGLGSAVVLPGVEAAERAGVPAFLETSAPRNLPFYERLGFTVTADVEVPEGPRTWCMTRKPGA

SEQ ID NO: 16322 - protein, 565 aa, Artificial Sequence
  Synthetic Polypeptide
MALPVTALLLPLALLLHAARPEVQLLESGGGLVQPGGSLRLSCAASGFTFSSYAMSWVRQAPGKGLEWVSSISGSGDYIYYADSVKGRFTISRDISKNTLYLQMNSLRAEDTAVYYCAKEGTGANSSLADYRGQGTLVTVSSGGGSGGGSEVQLVESGGGSVQAGGSLRLSCTTSGRALNMYVMGWFRQAPGNEREFVAATSSSGGSTSYPDSVKGRFTISRDNAKNTVYLQMNSLKPEDTAAYRCAASPYVSTPTMNILEEYRYWGLGTQVTVSSLEGSGRADCGFTSESYQQGVLSATILYEILLGKATLYAVLVSALVLMAMVKRKDSRGRAKRSGSGATNFSLLKQAGDVEENPGPTSMDWIWRILFLVGAATGAHSGPQVQLQESGGGLAQAGGSLRLSCAASGRTFSMGWFRQAPGKEREFVAAITYSGGSPYYASSVRGRFTISRDNAKNTVYLQMNSLKPEDTAVYYCAANPTYGSDWNAENWGQGTQVTVSSTRGSIPEDTFFPSPESSCDVKLVEKSFETDTNLNFQNLSVIGFRILLLKVAGFNLLMTLRLWSS

SEQ ID NO: 16323 - protein, 807 aa, Artificial Sequence
  Synthetic Polypeptide
MALPVTALLLPLALLLHAARPEVQLLESGGGLVQPGGSLRLSCAASGFTFSSYAMSWVRQAPGKGLEWVSSISGSGDYIYYADSVKGRFTISRDISKNTLYLQMNSLRAEDTAVYYCAKEGTGANSSLADYRGQGTLVTVSSGGGSGGGSEVQLVESGGGSVQAGGSLRLSCTTSGRALNMYVMGWFRQAPGNEREFVAATSSSGGSTSYPDSVKGRFTISRDNAKNTVYLQMNSLKPEDTAAYRCAASPYVSTPTMNILEEYRYWGLGTQVTVSSLEDKTHTCPPCPAGRADCGFTSESYQQGVLSATILYEILLGKATLYAVLVSALVLMAMVKRKDSRGRAKRSGSGATNFSLLKQAGDVEENPGPTSMDWIWRILFLVGAATGAHSGPQVQLQESGGGLAQAGGSLRLSCAASGRTFSMGWFRQAPGKEREFVAAITYSGGSPYYASSVRGRFTISRDNAKNTVYLQMNSLKPEDTAVYYCAANPTYGSDWNAENWGQGTQVTVSSTRGSIPEDTFFPSPESSCDVKLVEKSFETDTNLNFQNLSVIGFRILLLKVAGFNLLMTLRLWSSRAKRSGSGVKQTLNFDLLKLAGDVESNPGPSRGHMTEYKPTVRLATRDDVPRAVRTLAAAFADYPATRHTVDPDRHIERVTELQELFLTRVGLDIGKVWVADDGAAVAVWTTPESVEAGAVFAEIGPRMAELSGSRLAAQQQMEGLLAPHRPKEPAWFLATVGVSPDHQGKGLGSAVVLPGVEAAERAGVPAFLETSAPRNLPFYERLGFTVTADVEVPEGPRTWCMTRKPGA

SEQ ID NO: 16324 - protein, 807 aa, Artificial Sequence
  Synthetic Polypeptide
MALPVTALLLPLALLLHAARPEVQLLESGGGLVQPGGSLRLSCAASGFTFSSYAMSWVRQAPGKGLEWVSSISGSGDYIYYADSVKGRFTISRDISKNTLYLQMNSLRAEDTAVYYCAKEGTGANSSLADYRGQGTLVTVSSGGGSGGGSEVQLVESGGGSVQAGGSLRLSCTTSGRALNMYVMGWFRQAPGNEREFVAATSSSGGSTSYPDSVKGRFTISRDNAKNTVYLQMNSLKPEDTAAYRCAASPYVSTPTMNILEEYRYWGLGTQVTVSSLEGSGRADCGFTSESYQQGVLSATILYEILLGKATLYAVLVSALVLMAMVKRKDSRGRAKRSGSGATNFSLLKQAGDVEENPGPTSMDWIWRILFLVGAATGAHSGPQVQLQESGGGLAQAGGSLRLSCAASGRTFSMGWFRQAPGKEREFVAAITYSGGSPYYASSVRGRFTISRDNAKNTVYLQMNSLKPEDTAVYYCAANPTYGSDWNAENWGQGTQVTVSSTRDKTHTCPPCPAIPEDTFFPSPESSCDVKLVEKSFETDTNLNFQNLSVIGFRILLLKVAGFNLLMTLRLWSSRAKRSGSGVKQTLNFDLLKLAGDVESNPGPSRGHMTEYKPTVRLATRDDVPRAVRTLAAAFADYPATRHTVDPDRHIERVTELQELFLTRVGLDIGKVWVADDGAAVAVWTTPESVEAGAVFAEIGPRMAELSGSRLAAQQQMEGLLAPHRPKEPAWFLATVGVSPDHQGKGLGSAVVLPGVEAAERAGVPAFLETSAPRNLPFYERLGFTVTADVEVPEGPRTWCMTRKPGA

SEQ ID NO: 16325 - protein, 816 aa, Artificial Sequence
  Synthetic Polypeptide
MALPVTALLLPLALLLHAARPEVQLLESGGGLVQPGGSLRLSCAASGFTFSSYAMSWVRQAPGKGLEWVSSISGSGDYIYYADSVKGRFTISRDISKNTLYLQMNSLRAEDTAVYYCAKEGTGANSSLADYRGQGTLVTVSSGGGSGGGSEVQLVESGGGSVQAGGSLRLSCTTSGRALNMYVMGWFRQAPGNEREFVAATSSSGGSTSYPDSVKGRFTISRDNAKNTVYLQMNSLKPEDTAAYRCAASPYVSTPTMNILEEYRYWGLGTQVTVSSLEDKTHTCPPCPAGRADCGFTSESYQQGVLSATILYEILLGKATLYAVLVSALVLMAMVKRKDSRGRAKRSGSGATNFSLLKQAGDVEENPGPTSMDWIWRILFLVGAATGAHSGPQVQLQESGGGLAQAGGSLRLSCAASGRTFSMGWFRQAPGKEREFVAAITYSGGSPYYASSVRGRFTISRDNAKNTVYLQMNSLKPEDTAVYYCAANPTYGSDWNAENWGQGTQVTVSSTRDKTHTCPPCPAIPEDTFFPSPESSCDVKLVEKSFETDTNLNFQNLSVIGFRILLLKVAGFNLLMTLRLWSSRAKRSGSGVKQTLNFDLLKLAGDVESNPGPSRGHMTEYKPTVRLATRDDVPRAVRTLAAAFADYPATRHTVDPDRHIERVTELQELFLTRVGLDIGKVWVADDGAAVAVWTTPESVEAGAVFAEIGPRMAELSGSRLAAQQQMEGLLAPHRPKEPAWFLATVGVSPDHQGKGLGSAVVLPGVEAAERAGVPAFLETSAPRNLPFYERLGFTVTADVEVPEGPRTWCMTRKPGA

SEQ ID NO: 16326 - protein, 583 aa, Artificial Sequence
  Synthetic Polypeptide
MALPVTALLLPLALLLHAARPEVQLLESGGGLVQPGGSLRLSCAASGFTFSSYAMSWVRQAPGKGLEWVSSISGSGDYIYYADSVKGRFTISRDISKNTLYLQMNSLRAEDTAVYYCAKEGTGANSSLADYRGQGTLVTVSSGGGSGGGSEVQLVESGGGSVQAGGSLRLSCTTSGRALNMYVMGWFRQAPGNEREFVAATSSSGGSTSYPDSVKGRFTISRDNAKNTVYLQMNSLKPEDTAAYRCAASPYVSTPTMNILEEYRYWGLGTQVTVSSLEDKTHTCPPCPAGRADCGFTSESYQQGVLSATILYEILLGKATLYAVLVSALVLMAMVKRKDSRGRAKRSGSGATNFSLLKQAGDVEENPGPTSMDWIWRILFLVGAATGAHSGPQVQLQESGGGLAQAGGSLRLSCAASGRTFSMGWFRQAPGKEREFVAAITYSGGSPYYASSVRGRFTISRDNAKNTVYLQMNSLKPEDTAVYYCAANPTYGSDWNAENWGQGTQVTVSSTRDKTHTCPPCPAIPEDTFFPSPESSCDVKLVEKSFETDTNLNFQNLSVIGFRILLLKVAGFNLLMTLRLWSS

SEQ ID NO: 16327 - protein, 574 aa, Artificial Sequence
  Synthetic Polypeptide
MALPVTALLLPLALLLHAARPEVQLLESGGGLVQPGGSLRLSCAASGFTFSSYAMSWVRQAPGKGLEWVSSISGSGDYIYYADSVKGRFTISRDISKNTLYLQMNSLRAEDTAVYYCAKEGTGANSSLADYRGQGTLVTVSSGGGSGGGSEVQLVESGGGSVQAGGSLRLSCTTSGRALNMYVMGWFRQAPGNEREFVAATSSSGGSTSYPDSVKGRFTISRDNAKNTVYLQMNSLKPEDTAAYRCAASPYVSTPTMNILEEYRYWGLGTQVTVSSLEGSGRADCGFTSESYQQGVLSATILYEILLGKATLYAVLVSALVLMAMVKRKDSRGRAKRSGSGATNFSLLKQAGDVEENPGPTSMDWIWRILFLVGAATGAHSGPQVQLQESGGGLAQAGGSLRLSCAASGRTFSMGWFRQAPGKEREFVAAITYSGGSPYYASSVRGRFTISRDNAKNTVYLQMNSLKPEDTAVYYCAANPTYGSDWNAENWGQGTQVTVSSTRDKTHTCPPCPAIPEDTFFPSPESSCDVKLVEKSFETDTNLNFQNLSVIGFRILLLKVAGFNLLMTLRLWSS

SEQ ID NO: 16328 - protein, 1025 aa, Artificial Sequence
  Synthetic Polypeptide
MALPVTALLLPLALLLHAARPEVQLLESGGGLVQPGGSLRLSCAASGFTFSSYAMSWVRQAPGKGLEWVSSISGSGDYIYYADSVKGRFTISRDISKNTLYLQMNSLRAEDTAVYYCAKEGTGANSSLADYRGQGTLVTVSSGGGSGGGSEVQLVESGGGSVQAGGSLRLSCTTSGRALNMYVMGWFRQAPGNEREFVAATSSSGGSTSYPDSVKGRFTISRDNAKNTVYLQMNSLKPEDTAAYRCAASPYVSTPTMNILEEYRYWGLGTQVTVSSLEGQPKANPTVTLFPPSSEELQANKATLVCLISDFYPGAVTVAWKADGSPVKAGVETTKPSKQSNNKYAASSYLSLTPEQWKSHRSYSCQVTHEGSTVEKTVAPTECSPIKTDVITMDPKDNCSKDANDTLLLQLTNTSAYYMYLLLLLKSVVYFAIITCCLLRRTAFCCNGEKSRAKRSGSGATNFSLLKQAGDVEENPGPTSMDWIWRILFLVGAATGAHSGPQVQLQESGGGLAQAGGSLRLSCAASGRTFSMGWFRQAPGKEREFVAAITYSGGSPYYASSVRGRFTISRDNAKNTVYLQMNSLKPEDTAVYYCAANPTYGSDWNAENWGQGTQVTVSSTRASTKGPSVFPLAPSSKSTSGGTAALGCLVKDYFPEPVTVSWNSGALTSGVHTFPAVLQSSGLYSLSSVVTVPSSSLGTQTYICNVNHKPSNTKVDKRVEPKSCEVKTDSTDHVKPKETENTKQPSKSCHKPKAIVHTEKVNMMSLTVLGLRMLFAKTVAVNFLLTAKLFFLRAKRSGSGVKQTLNFDLLKLAGDVESNPGPSRGHMTEYKPTVRLATRDDVPRAVRTLAAAFADYPATRHTVDPDRHIERVTELQELFLTRVGLDIGKVWVADDGAAVAVWTTPESVEAGAVFAEIGPRMAELSGSRLAAQQQMEGLLAPHRPKEPAWFLATVGVSPDHQGKGLGSAVVLPGVEAAERAGVPAFLETSAPRNLPFYERLGFTVTADVEVPEGPRTWCMTRKPGA

SEQ ID NO: 16329 - protein, 792 aa, Artificial Sequence
  Synthetic Polypeptide
MALPVTALLLPLALLLHAARPEVQLLESGGGLVQPGGSLRLSCAASGFTFSSYAMSWVRQAPGKGLEWVSSISGSGDYIYYADSVKGRFTISRDISKNTLYLQMNSLRAEDTAVYYCAKEGTGANSSLADYRGQGTLVTVSSGGGSGGGSEVQLVESGGGSVQAGGSLRLSCTTSGRALNMYVMGWFRQAPGNEREFVAATSSSGGSTSYPDSVKGRFTISRDNAKNTVYLQMNSLKPEDTAAYRCAASPYVSTPTMNILEEYRYWGLGTQVTVSSLEGQPKANPTVTLFPPSSEELQANKATLVCLISDFYPGAVTVAWKADGSPVKAGVETTKPSKQSNNKYAASSYLSLTPEQWKSHRSYSCQVTHEGSTVEKTVAPTECSPIKTDVITMDPKDNCSKDANDTLLLQLTNTSAYYMYLLLLLKSVVYFAIITCCLLRRTAFCCNGEKSRAKRSGSGATNFSLLKQAGDVEENPGPTSMDWIWRILFLVGAATGAHSGPQVQLQESGGGLAQAGGSLRLSCAASGRTFSMGWFRQAPGKEREFVAAITYSGGSPYYASSVRGRFTISRDNAKNTVYLQMNSLKPEDTAVYYCAANPTYGSDWNAENWGQGTQVTVSSTRASTKGPSVFPLAPSSKSTSGGTAALGCLVKDYFPEPVTVSWNSGALTSGVHTFPAVLQSSGLYSLSSVVTVPSSSLGTQTYICNVNHKPSNTKVDKRVEPKSCEVKTDSTDHVKPKETENTKQPSKSCHKPKAIVHTEKVNMMSLTVLGLRMLFAKTVAVNFLLTAKLFFL

SEQ ID NO: 16330 - protein, 820 aa, Artificial Sequence
  Synthetic Polypeptide
MALPVTALLLPLALLLHAARPEVQLLESGGGLVQPGGSLRLSCAASGFTFSSYAMSWVRQAPGKGLEWVSSISGSGDYIYYADSVKGRFTISRDISKNTLYLQMNSLRAEDTAVYYCAKEGTGANSSLADYRGQGTLVTVSSGGGSGGGSEVQLVESGGGSVQAGGSLRLSCTTSGRALNMYVMGWFRQAPGNEREFVAATSSSGGSTSYPDSVKGRFTISRDNAKNTVYLQMNSLKPEDTAAYRCAASPYVSTPTMNILEEYRYWGLGTQVTVSSLEGSPIKTDVITMDPKDNCSKDANDTLLLQLTNTSAYYMYLLLLLKSVVYFAIITCCLLRRTAFCCNGEKSRAKRSGSGATNFSLLKQAGDVEENPGPTSMDWIWRILFLVGAATGAHSGPQVQLQESGGGLAQAGGSLRLSCAASGRTFSMGWFRQAPGKEREFVAAITYSGGSPYYASSVRGRFTISRDNAKNTVYLQMNSLKPEDTAVYYCAANPTYGSDWNAENWGQGTQVTVSSTRGSEVKTDSTDHVKPKETENTKQPSKSCHKPKAIVHTEKVNMMSLTVLGLRMLFAKTVAVNFLLTAKLFFLRAKRSGSGVKQTLNFDLLKLAGDVESNPGPSRGHMTEYKPTVRLATRDDVPRAVRTLAAAFADYPATRHTVDPDRHIERVTELQELFLTRVGLDIGKVWVADDGAAVAVWTTPESVEAGAVFAEIGPRMAELSGSRLAAQQQMEGLLAPHRPKEPAWFLATVGVSPDHQGKGLGSAVVLPGVEAAERAGVPAFLETSAPRNLPFYERLGFTVTADVEVPEGPRTWCMTRKPGA

SEQ ID NO: 16331 - protein, 587 aa, Artificial Sequence
  Synthetic Polypeptide
MALPVTALLLPLALLLHAARPEVQLLESGGGLVQPGGSLRLSCAASGFTFSSYAMSWVRQAPGKGLEWVSSISGSGDYIYYADSVKGRFTISRDISKNTLYLQMNSLRAEDTAVYYCAKEGTGANSSLADYRGQGTLVTVSSGGGSGGGSEVQLVESGGGSVQAGGSLRLSCTTSGRALNMYVMGWFRQAPGNEREFVAATSSSGGSTSYPDSVKGRFTISRDNAKNTVYLQMNSLKPEDTAAYRCAASPYVSTPTMNILEEYRYWGLGTQVTVSSLEGSPIKTDVITMDPKDNCSKDANDTLLLQLTNTSAYYMYLLLLLKSVVYFAIITCCLLRRTAFCCNGEKSRAKRSGSGATNFSLLKQAGDVEENPGPTSMDWIWRILFLVGAATGAHSGPQVQLQESGGGLAQAGGSLRLSCAASGRTFSMGWFRQAPGKEREFVAAITYSGGSPYYASSVRGRFTISRDNAKNTVYLQMNSLKPEDTAVYYCAANPTYGSDWNAENWGQGTQVTVSSTRGSEVKTDSTDHVKPKETENTKQPSKSCHKPKAIVHTEKVNMMSLTVLGLRMLFAKTVAVNFLLTAKLFFL

SEQ ID NO: 16332 - protein, 829 aa, Artificial Sequence
  Synthetic Polypeptide
MALPVTALLLPLALLLHAARPEVQLLESGGGLVQPGGSLRLSCAASGFTFSSYAMSWVRQAPGKGLEWVSSISGSGDYIYYADSVKGRFTISRDISKNTLYLQMNSLRAEDTAVYYCAKEGTGANSSLADYRGQGTLVTVSSGGGSGGGSEVQLVESGGGSVQAGGSLRLSCTTSGRALNMYVMGWFRQAPGNEREFVAATSSSGGSTSYPDSVKGRFTISRDNAKNTVYLQMNSLKPEDTAAYRCAASPYVSTPTMNILEEYRYWGLGTQVTVSSLEDKTHTCPPCPAPIKTDVITMDPKDNCSKDANDTLLLQLTNTSAYYMYLLLLLKSVVYFAIITCCLLRRTAFCCNGEKSRAKRSGSGATNFSLLKQAGDVEENPGPTSMDWIWRILFLVGAATGAHSGPQVQLQESGGGLAQAGGSLRLSCAASGRTFSMGWFRQAPGKEREFVAAITYSGGSPYYASSVRGRFTISRDNAKNTVYLQMNSLKPEDTAVYYCAANPTYGSDWNAENWGQGTQVTVSSTRGSEVKTDSTDHVKPKETENTKQPSKSCHKPKAIVHTEKVNMMSLTVLGLRMLFAKTVAVNFLLTAKLFFLRAKRSGSGVKQTLNFDLLKLAGDVESNPGPSRGHMTEYKPTVRLATRDDVPRAVRTLAAAFADYPATRHTVDPDRHIERVTELQELFLTRVGLDIGKVWVADDGAAVAVWTTPESVEAGAVFAEIGPRMAELSGSRLAAQQQMEGLLAPHRPKEPAWFLATVGVSPDHQGKGLGSAVVLPGVEAAERAGVPAFLETSAPRNLPFYERLGFTVTADVEVPEGPRTWCMTRKPGA

SEQ ID NO: 16333 - protein, 829 aa, Artificial Sequence
  Synthetic Polypeptide
MALPVTALLLPLALLLHAARPEVQLLESGGGLVQPGGSLRLSCAASGFTFSSYAMSWVRQAPGKGLEWVSSISGSGDYIYYADSVKGRFTISRDISKNTLYLQMNSLRAEDTAVYYCAKEGTGANSSLADYRGQGTLVTVSSGGGSGGGSEVQLVESGGGSVQAGGSLRLSCTTSGRALNMYVMGWFRQAPGNEREFVAATSSSGGSTSYPDSVKGRFTISRDNAKNTVYLQMNSLKPEDTAAYRCAASPYVSTPTMNILEEYRYWGLGTQVTVSSLEGSPIKTDVITMDPKDNCSKDANDTLLLQLTNTSAYYMYLLLLLKSVVYFAIITCCLLRRTAFCCNGEKSRAKRSGSGATNFSLLKQAGDVEENPGPTSMDWIWRILFLVGAATGAHSGPQVQLQESGGGLAQAGGSLRLSCAASGRTFSMGWFRQAPGKEREFVAAITYSGGSPYYASSVRGRFTISRDNAKNTVYLQMNSLKPEDTAVYYCAANPTYGSDWNAENWGQGTQVTVSSTRDKTHTCPPCPAEVKTDSTDHVKPKETENTKQPSKSCHKPKAIVHTEKVNMMSLTVLGLRMLFAKTVAVNFLLTAKLFFLRAKRSGSGVKQTLNFDLLKLAGDVESNPGPSRGHMTEYKPTVRLATRDDVPRAVRTLAAAFADYPATRHTVDPDRHIERVTELQELFLTRVGLDIGKVWVADDGAAVAVWTTPESVEAGAVFAEIGPRMAELSGSRLAAQQQMEGLLAPHRPKEPAWFLATVGVSPDHQGKGLGSAVVLPGVEAAERAGVPAFLETSAPRNLPFYERLGFTVTADVEVPEGPRTWCMTRKPGA

SEQ ID NO: 16334 - protein, 838 aa, Artificial Sequence
  Synthetic Polypeptide
MALPVTALLLPLALLLHAARPEVQLLESGGGLVQPGGSLRLSCAASGFTFSSYAMSWVRQAPGKGLEWVSSISGSGDYIYYADSVKGRFTISRDISKNTLYLQMNSLRAEDTAVYYCAKEGTGANSSLADYRGQGTLVTVSSGGGSGGGSEVQLVESGGGSVQAGGSLRLSCTTSGRALNMYVMGWFRQAPGNEREFVAATSSSGGSTSYPDSVKGRFTISRDNAKNTVYLQMNSLKPEDTAAYRCAASPYVSTPTMNILEEYRYWGLGTQVTVSSLEDKTHTCPPCPAPIKTDVITMDPKDNCSKDANDTLLLQLTNTSAYYMYLLLLLKSVVYFAIITCCLLRRTAFCCNGEKSRAKRSGSGATNFSLLKQAGDVEENPGPTSMDWIWRILFLVGAATGAHSGPQVQLQESGGGLAQAGGSLRLSCAASGRTFSMGWFRQAPGKEREFVAAITYSGGSPYYASSVRGRFTISRDNAKNTVYLQMNSLKPEDTAVYYCAANPTYGSDWNAENWGQGTQVTVSSTRDKTHTCPPCPAEVKTDSTDHVKPKETENTKQPSKSCHKPKAIVHTEKVNMMSLTVLGLRMLFAKTVAVNFLLTAKLFFLRAKRSGSGVKQTLNFDLLKLAGDVESNPGPSRGHMTEYKPTVRLATRDDVPRAVRTLAAAFADYPATRHTVDPDRHIERVTELQELFLTRVGLDIGKVWVADDGAAVAVWTTPESVEAGAVFAEIGPRMAELSGSRLAAQQQMEGLLAPHRPKEPAWFLATVGVSPDHQGKGLGSAVVLPGVEAAERAGVPAFLETSAPRNLPFYERLGFTVTADVEVPEGPRTWCMTRKPGA

SEQ ID NO: 16335 - protein, 605 aa, Artificial Sequence
  Synthetic Polypeptide
MALPVTALLLPLALLLHAARPEVQLLESGGGLVQPGGSLRLSCAASGFTFSSYAMSWVRQAPGKGLEWVSSISGSGDYIYYADSVKGRFTISRDISKNTLYLQMNSLRAEDTAVYYCAKEGTGANSSLADYRGQGTLVTVSSGGGSGGGSEVQLVESGGGSVQAGGSLRLSCTTSGRALNMYVMGWFRQAPGNEREFVAATSSSGGSTSYPDSVKGRFTISRDNAKNTVYLQMNSLKPEDTAAYRCAASPYVSTPTMNILEEYRYWGLGTQVTVSSLEDKTHTCPPCPAPIKTDVITMDPKDNCSKDANDTLLLQLTNTSAYYMYLLLLLKSVVYFAIITCCLLRRTAFCCNGEKSRAKRSGSGATNFSLLKQAGDVEENPGPTSMDWIWRILFLVGAATGAHSGPQVQLQESGGGLAQAGGSLRLSCAASGRTFSMGWFRQAPGKEREFVAAITYSGGSPYYASSVRGRFTISRDNAKNTVYLQMNSLKPEDTAVYYCAANPTYGSDWNAENWGQGTQVTVSSTRDKTHTCPPCPAEVKTDSTDHVKPKETENTKQPSKSCHKPKAIVHTEKVNMMSLTVLGLRMLFAKTVAVNFLLTAKLFFL

SEQ ID NO: 16336 - protein, 596 aa, Artificial Sequence
  Synthetic Polypeptide
MALPVTALLLPLALLLHAARPEVQLLESGGGLVQPGGSLRLSCAASGFTFSSYAMSWVRQAPGKGLEWVSSISGSGDYIYYADSVKGRFTISRDISKNTLYLQMNSLRAEDTAVYYCAKEGTGANSSLADYRGQGTLVTVSSGGGSGGGSEVQLVESGGGSVQAGGSLRLSCTTSGRALNMYVMGWFRQAPGNEREFVAATSSSGGSTSYPDSVKGRFTISRDNAKNTVYLQMNSLKPEDTAAYRCAASPYVSTPTMNILEEYRYWGLGTQVTVSSLEGSPIKTDVITMDPKDNCSKDANDTLLLQLTNTSAYYMYLLLLLKSVVYFAIITCCLLRRTAFCCNGEKSRAKRSGSGATNFSLLKQAGDVEENPGPTSMDWIWRILFLVGAATGAHSGPQVQLQESGGGLAQAGGSLRLSCAASGRTFSMGWFRQAPGKEREFVAAITYSGGSPYYASSVRGRFTISRDNAKNTVYLQMNSLKPEDTAVYYCAANPTYGSDWNAENWGQGTQVTVSSTRDKTHTCPPCPAEVKTDSTDHVKPKETENTKQPSKSCHKPKAIVHTEKVNMMSLTVLGLRMLFAKTVAVNFLLTAKLFFL

SEQ ID NO: 16337 - protein, 812 aa, Artificial Sequence
  Synthetic Polypeptide
MALPVTALLLPLALLLHAARPEVQLLESGGGLVQPGGSLRLSCAASGFTFSSYAMSWVRQAPGKGLEWVSSISGSGDYIYYADSVKGRFTISRDISKNTLYLQMNSLRAEDTAVYYCAKEGTGANSSLADYRGQGTLVTVSSGGGSGGGSEVQLVESGGGSVQAGGSLRLSCTTSGRALNMYVMGWFRQAPGNEREFVAATSSSGGSTSYPDSVKGRFTISRDNAKNTVYLQMNSLKPEDTAAYRCAASPYVSTPTMNILEEYRYWGLGTQVTVSSLEGSMDPKDNCSKDANDTLLLQLTNTSAYYMYLLLLLKSVVYFAIITCCLLRRTAFCCNGEKSRAKRSGSGATNFSLLKQAGDVEENPGPTSMDWIWRILFLVGAATGAHSGPQVQLQESGGGLAQAGGSLRLSCAASGRTFSMGWFRQAPGKEREFVAAITYSGGSPYYASSVRGRFTISRDNAKNTVYLQMNSLKPEDTAVYYCAANPTYGSDWNAENWGQGTQVTVSSTRGSEVKTDSTDHVKPKETENTKQPSKSCHKPKAIVHTEKVNMMSLTVLGLRMLFAKTVAVNFLLTAKLFFLRAKRSGSGVKQTLNFDLLKLAGDVESNPGPSRGHMTEYKPTVRLATRDDVPRAVRTLAAAFADYPATRHTVDPDRHIERVTELQELFLTRVGLDIGKVWVADDGAAVAVWTTPESVEAGAVFAEIGPRMAELSGSRLAAQQQMEGLLAPHRPKEPAWFLATVGVSPDHQGKGLGSAVVLPGVEAAERAGVPAFLETSAPRNLPFYERLGFTVTADVEVPEGPRTWCMTRKPGA

SEQ ID NO: 16338 - protein, 813 aa, Artificial Sequence
  Synthetic Polypeptide
MALPVTALLLPLALLLHAARPEVQLLESGGGLVQPGGSLRLSCAASGFTFSSYAMSWVRQAPGKGLEWVSSISGSGDYIYYADSVKGRFTISRDISKNTLYLQMNSLRAEDTAVYYCAKEGTGANSSLADYRGQGTLVTVSSGGGSGGGSEVQLVESGGGSVQAGGSLRLSCTTSGRALNMYVMGWFRQAPGNEREFVAATSSSGGSTSYPDSVKGRFTISRDNAKNTVYLQMNSLKPEDTAAYRCAASPYVSTPTMNILEEYRYWGLGTQVTVSSLEGSPIKTDVITMDPKDNCSKDANDTLLLQLTNTSAYYMYLLLLLKSVVYFAIITCCLLRRTAFCCNGEKSRAKRSGSGATNFSLLKQAGDVEENPGPTSMDWIWRILFLVGAATGAHSGPQVQLQESGGGLAQAGGSLRLSCAASGRTFSMGWFRQAPGKEREFVAAITYSGGSPYYASSVRGRFTISRDNAKNTVYLQMNSLKPEDTAVYYCAANPTYGSDWNAENWGQGTQVTVSSTRGSDHVKPKETENTKQPSKSCHKPKAIVHTEKVNMMSLTVLGLRMLFAKTVAVNFLLTAKLFFLRAKRSGSGVKQTLNFDLLKLAGDVESNPGPSRGHMTEYKPTVRLATRDDVPRAVRTLAAAFADYPATRHTVDPDRHIERVTELQELFLTRVGLDIGKVWVADDGAAVAVWTTPESVEAGAVFAEIGPRMAELSGSRLAAQQQMEGLLAPHRPKEPAWFLATVGVSPDHQGKGLGSAVVLPGVEAAERAGVPAFLETSAPRNLPFYERLGFTVTADVEVPEGPRTWCMTRKPGA

SEQ ID NO: 16339 - protein, 437 aa, Artificial Sequence
  Synthetic Polypeptide
MALPVTALLLPLALLLHAARPEVQLLESGGGLVQPGGSLRLSCAASGFTFSSYAMSWVRQAPGKGLEWVSSISGSGDYIYYADSVKGRFTISRDISKNTLYLQMNSLRAEDTAVYYCAKEGTGANSSLADYRGQGTLVTVSSGGGSGGGSEVQLVESGGGSVQAGGSLRLSCTTSGRALNMYVMGWFRQAPGNEREFVAATSSSGGSTSYPDSVKGRFTISRDNAKNTVYLQMNSLKPEDTAAYRCAASPYVSTPTMNILEEYRYWGLGTQVTVSSLEGQPKANPTVTLFPPSSEELQANKATLVCLISDFYPGAVTVAWKADGSPVKAGVETTKPSKQSNNKYAASSYLSLTPEQWKSHRSYSCQVTHEGSTVEKTVAPTECSGRADCGFTSESYQQGVLSATILYEILLGKATLYAVLVSALVLMAMVKRKDSRG

SEQ ID NO: 16340 - protein, 451 aa, Artificial Sequence
  Synthetic Polypeptide
MALPVTALLLPLALLLHAARPEVQLLESGGGLVQPGGSLRLSCAASGFTFSSYAMSWVRQAPGKGLEWVSSISGSGDYIYYADSVKGRFTISRDISKNTLYLQMNSLRAEDTAVYYCAKEGTGANSSLADYRGQGTLVTVSSGGGSGGGSEVQLVESGGGSVQAGGSLRLSCTTSGRALNMYVMGWFRQAPGNEREFVAATSSSGGSTSYPDSVKGRFTISRDNAKNTVYLQMNSLKPEDTAAYRCAASPYVSTPTMNILEEYRYWGLGTQVTVSSLEGQPKANPTVTLFPPSSEELQANKATLVCLISDFYPGAVTVAWKADGSPVKAGVETTKPSKQSNNKYAASSYLSLTPEQWKSHRSYSCQVTHEGSTVEKTVAPTECSPIKTDVITMDPKDNCSKDANDTLLLQLTNTSAYYMYLLLLLKSVVYFAIITCCLLRRTAFCCNGEKS

SEQ ID NO: 16341 - protein, 767 aa, Artificial Sequence; identical to SEQ ID NO: 15845
  Synthetic Polypeptide

SEQ ID NO: 16342 - protein, 1120 aa, Artificial Sequence; identical to SEQ ID NO: 15846
  Synthetic Polypeptide

SEQ ID NO: 16343 - protein, 1119 aa, Artificial Sequence; identical to SEQ ID NO: 15847
  Synthetic Polypeptide

SEQ ID NO: 16344 - protein, 1119 aa, Artificial Sequence; identical to SEQ ID NO: 15848
  Synthetic Polypeptide

SEQ ID NO: 16345 - protein, 886 aa, Artificial Sequence; identical to SEQ ID NO: 15849
  Synthetic Polypeptide

SEQ ID NO: 16346 - protein, 1111 aa, Artificial Sequence; identical to SEQ ID NO: 15850
  Synthetic Polypeptide

SEQ ID NO: 16347 - protein, 890 aa, Artificial Sequence; identical to SEQ ID NO: 15851
  Synthetic Polypeptide

SEQ ID NO: 16348 - protein, 1112 aa, Artificial Sequence; identical to SEQ ID NO: 15852
  Synthetic Polypeptide

SEQ ID NO: 16349 - protein, 1119 aa, Artificial Sequence; identical to SEQ ID NO: 15853
  Synthetic Polypeptide

SEQ ID NO: 16350 - protein, 1201 aa, Artificial Sequence; identical to SEQ ID NO: 15854
  Synthetic Polypeptide

SEQ ID NO: 16351 - protein, 1156 aa, Artificial Sequence; identical to SEQ ID NO: 15855
  Synthetic Polypeptide

SEQ ID NO: 16352 - protein, 894 aa, Artificial Sequence; identical to SEQ ID NO: 15856
  Synthetic Polypeptide

SEQ ID NO: 16353 - protein, 1296 aa, Artificial Sequence; identical to SEQ ID NO: 15857
  Synthetic Polypeptide

SEQ ID NO: 16354 - protein, 1082 aa, Artificial Sequence; identical to SEQ ID NO: 15858
  Synthetic Polypeptide

SEQ ID NO: 16355 - protein, 1082 aa, Artificial Sequence; identical to SEQ ID NO: 15859
  Synthetic Polypeptide

SEQ ID NO: 16356 - protein, 1153 aa, Artificial Sequence; identical to SEQ ID NO: 15860
  Synthetic Polypeptide

SEQ ID NO: 16357 - protein, 1194 aa, Artificial Sequence; identical to SEQ ID NO: 15861
  Synthetic Polypeptide

SEQ ID NO: 16358 - protein, 1155 aa, Artificial Sequence; identical to SEQ ID NO: 15862
  Synthetic Polypeptide

SEQ ID NO: 16359 - protein, 1197 aa, Artificial Sequence; identical to SEQ ID NO: 15863
  Synthetic Polypeptide

SEQ ID NO: 16360 - protein, 1087 aa, Artificial Sequence; identical to SEQ ID NO: 15864
  Synthetic Polypeptide

SEQ ID NO: 16361 - protein, 912 aa, Artificial Sequence; identical to SEQ ID NO: 15865
  Synthetic Polypeptide

SEQ ID NO: 16362 - protein, 890 aa, Artificial Sequence; identical to SEQ ID NO: 15866
  Synthetic Polypeptide

SEQ ID NO: 16363 - protein, 890 aa, Artificial Sequence; identical to SEQ ID NO: 15867
  Synthetic Polypeptide

SEQ ID NO: 16364 - protein, 720 aa, Artificial Sequence; identical to SEQ ID NO: 15868
  Synthetic Polypeptide

SEQ ID NO: 16365 - protein, 685 aa, Artificial Sequence; identical to SEQ ID NO: 15869
  Synthetic Polypeptide

SEQ ID NO: 16366 - protein, 695 aa, Artificial Sequence; identical to SEQ ID NO: 15870
  Synthetic Polypeptide

SEQ ID NO: 16367 - protein, 678 aa, Artificial Sequence; identical to SEQ ID NO: 15871
  Synthetic Polypeptide

SEQ ID NO: 16368 - protein, 714 aa, Artificial Sequence; identical to SEQ ID NO: 15872
  Synthetic Polypeptide

SEQ ID NO: 16369 - protein, 548 aa, Artificial Sequence; identical to SEQ ID NO: 15873
  Synthetic Polypeptide

SEQ ID NO: 16370 - protein, 726 aa, Artificial Sequence; identical to SEQ ID NO: 15874
  Synthetic Polypeptide

SEQ ID NO: 16371 - protein, 560 aa, Artificial Sequence; identical to SEQ ID NO: 15875
  Synthetic Polypeptide

SEQ ID NO: 16372 - protein, 1394 aa, Artificial Sequence
  Synthetic Polypeptide
MALPVTALLLPLALLLHAARPEVQLLESGGGLVQPGGSLRLSCAASGFTFSSYAMSWVRQAPGKGLEWVSSISGSGDYIYYADSVKGRFTISRDISKNTLYLQMNSLRAEDTAVYYCAKEGTGANSSLADYRGQGTLVTVSSGGGSGGGSEVQLVESGGGSVQAGGSLRLSCTTSGRALNMYVMGWFRQAPGNEREFVAATSSSGGSTSYPDSVKGRFTISRDNAKNTVYLQMNSLKPEDTAAYRCAASPYVSTPTMNILEEYRYWGLGTQVTVSSGTGGGGSGGGGSGGGGSEFDIQMTQSPSSLSASVGDRVTITCKASDHINNWLAWYQQKPGQAPKLLIYGATTLETGVPSRFSGSGSGTDYTLTISSLQPEDFATYYCQQSWNTPWTFGQGTKLEIKRLEIQNPDPAVYQLRDSKSSDKSVCLFTDFDSQTNVSQSKDSDVYITDKCVLDMRSMDFKSNSAVAWSNKSDFACANAFNNSIIPEDTFFPSSDVPCDVKLVEKSFETDTNLNFQNLSVIGFRILLLKVAGFNLLMTLRLWSSRAKRSGSGVKQTLNFDLLKLAGDVESNPGPTSMDWIWRILFLVGAATGAHSQLQLQESGPGLVKPSETLSLTCTVSGGSISSGDYYWGWIRQPPGKGLEWIGHIYYSGATYYNPSLKSRVTISVDTSRNQFSLKLSSVTAADTAVYYCTRDDSSNWRSRGQGTLVTVSSSGGGGSGGGGSQVQLQESGGGLAQAGGSLRLSCAASGRTFSMGWFRQAPGKEREFVAAITYSGGSPYYASSVRGRFTISRDNAKNTVYLQMNSLKPEDTAVYYCAANPTYGSDWNAENWGQGTQVTVSSGSGGGGSGGGGSGGGGSFEQVQLQQPGAELVKPGASVKMSCKASGYAFSSYWINWMKQKPGQGLEWIGQIYPGDGDTNYNGKFKGRATLTADTSSSTAYMQLSSLTSEDSAVYFCARSITTVVGCAMDYWGQGTSVTVSSTREDLKNVFPPEVAVFEPSKAEIAHTQKATLVCLATGFYPDHVELSWWVNGKEVHSGVCTDPQPLKEQPALNDSRYCLSSRLRVSATFWQNPRNHFRCQVQFYGLSENDEWTQDRAKPVTQIVSAEAWGRADCGITSASYHQGVLSATILYEILLGKATLYAVLVSALVLMAMVKRKDSRGRAKRSGSGATNFSLLKQAGDVEENPGPSRGHMTEYKPTVRLATRDDVPRAVRTLAAAFADYPATRHTVDPDRHIERVTELQELFLTRVGLDIGKVWVADDGAAVAVWTTPESVEAGAVFAEIGPRMAELSGSRLAAQQQMEGLLAPHRPKEPAWFLATVGVSPDHQGKGLGSAVVLPGVEAAERAGVPAFLETSAPRNLPFYERLGFTVTADVEVPEGPRTWCMTRKPGA

SEQ ID NO: 16373 - protein, 1393 aa, Artificial Sequence
  Synthetic Polypeptide
MALPVTALLLPLALLLHAARPEVQLLESGGGLVQPGGSLRLSCAASGFTFSSYAMSWVRQAPGKGLEWVSSISGSGDYIYYADSVKGRFTISRDISKNTLYLQMNSLRAEDTAVYYCAKEGTGANSSLADYRGQGTLVTVSSGGGSGGGSEVQLVESGGGSVQAGGSLRLSCTTSGRALNMYVMGWFRQAPGNEREFVAATSSSGGSTSYPDSVKGRFTISRDNAKNTVYLQMNSLKPEDTAAYRCAASPYVSTPTMNILEEYRYWGLGTQVTVSSGTGGGGSGGGGSGGGGSEFDIQMTQSPSSLSASVGDRVTITCKASDHINNWLAWYQQKPGQAPKLLIYGATTLETGVPSRFSGSGSGTDYTLTISSLQPEDFATYYCQQSWNTPWTFGQGTKLEIKRLEDLKNVFPPEVAVFEPSKAEIAHTQKATLVCLATGFYPDHVELSWWVNGKEVHSGVCTDPQPLKEQPALNDSRYCLSSRLRVSATFWQNPRNHFRCQVQFYGLSENDEWTQDRAKPVTQIVSAEAWGRADCGITSASYHQGVLSATILYEILLGKATLYAVLVSALVLMAMVKRKDSRGRAKRSGSGATNFSLLKQAGDVEENPGPTSMDWIWRILFLVGAATGAHSQLQLQESGPGLVKPSETLSLTCTVSGGSISSGDYYWGWIRQPPGKGLEWIGHIYYSGATYYNPSLKSRVTISVDTSRNQFSLKLSSVTAADTAVYYCTRDDSSNWRSRGQGTLVTVSSSGGGGSGGGGSQVQLQESGGGLAQAGGSLRLSCAASGRTFSMGWFRQAPGKEREFVAAITYSGGSPYYASSVRGRFTISRDNAKNTVYLQMNSLKPEDTAVYYCAANPTYGSDWNAENWGQGTQVTVSSGSGGGGSGGGGSGGGGSFEQVQLQQPGAELVKPGASVKMSCKASGYAFSSYWINWMKQKPGQGLEWIGQIYPGDGDTNYNGKFKGRATLTADTSSSTAYMQLSSLTSEDSAVYFCARSITTVVGCAMDYWGQGTSVTVSSTRIQNPDPAVYQLRDSKSSDKSVCLFTDFDSQTNVSQSKDSDVYITDKCVLDMRSMDFKSNSAVAWSNKSDFACANAFNNSIIPEDTFFPSSDVPCDVKLVEKSFETDTNLNFQNLSVIGFRILLLKVAGFNLLMTLRLWSSRAKRSGSGVKQTLNFDLLKLAGDVESNPGPSRGHMTEYKPTVRLATRDDVPRAVRTLAAAFADYPATRHTVDPDRHIERVTELQELFLTRVGLDIGKVWVADDGAAVAVWTTPESVEAGAVFAEIGPRMAELSGSRLAAQQQMEGLLAPHRPKEPAWFLATVGVSPDHQGKGLGSAVVLPGVEAAERAGVPAFLETSAPRNLPFYERLGFTVTADVEVPEGPRTWCMTRKPGA

SEQ ID NO: 16374 - protein, 1393 aa, Artificial Sequence
  Synthetic Polypeptide
MALPVTALLLPLALLLHAARPEVQLLESGGGLVQPGGSLRLSCAASGFTFSSYAMSWVRQAPGKGLEWVSSISGSGDYIYYADSVKGRFTISRDISKNTLYLQMNSLRAEDTAVYYCAKEGTGANSSLADYRGQGTLVTVSSGGGSGGGSEVQLVESGGGSVQAGGSLRLSCTTSGRALNMYVMGWFRQAPGNEREFVAATSSSGGSTSYPDSVKGRFTISRDNAKNTVYLQMNSLKPEDTAAYRCAASPYVSTPTMNILEEYRYWGLGTQVTVSSGTGGGGSGGGGSGGGGSEFDIQMTQSPSSLSASVGDRVTITCKASDHINNWLAWYQQKPGQAPKLLIYGATTLETGVPSRFSGSGSGTDYTLTISSLQPEDFATYYCQQSWNTPWTFGQGTKLEIKRLEDLKNVFPPEVAVFEPSEAEISHTQKATLVCLATGFYPDHVELSWWVNGKEVHSGVCTDPQPLKEQPALNDSRYCLSSRLRVSATFWQNPRNHFRCQVQFYGLSENDEWTQDRAKPVTQIVSAEAWGRADCGFTSESYQQGVLSATILYEILLGKATLYAVLVSALVLMAMVKRKDSRGRAKRSGSGATNFSLLKQAGDVEENPGPTSMDWIWRILFLVGAATGAHSQLQLQESGPGLVKPSETLSLTCTVSGGSISSGDYYWGWIRQPPGKGLEWIGHIYYSGATYYNPSLKSRVTISVDTSRNQFSLKLSSVTAADTAVYYCTRDDSSNWRSRGQGTLVTVSSSGGGGSGGGGSQVQLQESGGGLAQAGGSLRLSCAASGRTFSMGWFRQAPGKEREFVAAITYSGGSPYYASSVRGRFTISRDNAKNTVYLQMNSLKPEDTAVYYCAANPTYGSDWNAENWGQGTQVTVSSGSGGGGSGGGGSGGGGSFEQVQLQQPGAELVKPGASVKMSCKASGYAFSSYWINWMKQKPGQGLEWIGQIYPGDGDTNYNGKFKGRATLTADTSSSTAYMQLSSLTSEDSAVYFCARSITTVVGCAMDYWGQGTSVTVSSTRIQNPDPAVYQLRDSKSSDKSVCLFTDFDSQTNVSQSKDSDVYITDKCVLDMRSMDFKSNSAVAWSNKSDFACANAFNNSIIPEDTFFPSPESSCDVKLVEKSFETDTNLNFQNLSVIGFRILLLKVAGFNLLMTLRLWSSRAKRSGSGVKQTLNFDLLKLAGDVESNPGPSRGHMTEYKPTVRLATRDDVPRAVRTLAAAFADYPATRHTVDPDRHIERVTELQELFLTRVGLDIGKVWVADDGAAVAVWTTPESVEAGAVFAEIGPRMAELSGSRLAAQQQMEGLLAPHRPKEPAWFLATVGVSPDHQGKGLGSAVVLPGVEAAERAGVPAFLETSAPRNLPFYERLGFTVTADVEVPEGPRTWCMTRKPGA

SEQ ID NO: 16375 - protein, 1160 aa, Artificial Sequence
  Synthetic Polypeptide
MALPVTALLLPLALLLHAARPEVQLLESGGGLVQPGGSLRLSCAASGFTFSSYAMSWVRQAPGKGLEWVSSISGSGDYIYYADSVKGRFTISRDISKNTLYLQMNSLRAEDTAVYYCAKEGTGANSSLADYRGQGTLVTVSSGGGSGGGSEVQLVESGGGSVQAGGSLRLSCTTSGRALNMYVMGWFRQAPGNEREFVAATSSSGGSTSYPDSVKGRFTISRDNAKNTVYLQMNSLKPEDTAAYRCAASPYVSTPTMNILEEYRYWGLGTQVTVSSGTGGGGSGGGGSGGGGSEFDIQMTQSPSSLSASVGDRVTITCKASDHINNWLAWYQQKPGQAPKLLIYGATTLETGVPSRFSGSGSGTDYTLTISSLQPEDFATYYCQQSWNTPWTFGQGTKLEIKRLEDLKNVFPPEVAVFEPSEAEISHTQKATLVCLATGFYPDHVELSWWVNGKEVHSGVCTDPQPLKEQPALNDSRYCLSSRLRVSATFWQNPRNHFRCQVQFYGLSENDEWTQDRAKPVTQIVSAEAWGRADCGFTSESYQQGVLSATILYEILLGKATLYAVLVSALVLMAMVKRKDSRGRAKRSGSGATNFSLLKQAGDVEENPGPTSMDWIWRILFLVGAATGAHSQLQLQESGPGLVKPSETLSLTCTVSGGSISSGDYYWGWIRQPPGKGLEWIGHIYYSGATYYNPSLKSRVTISVDTSRNQFSLKLSSVTAADTAVYYCTRDDSSNWRSRGQGTLVTVSSSGGGGSGGGGSQVQLQESGGGLAQAGGSLRLSCAASGRTFSMGWFRQAPGKEREFVAAITYSGGSPYYASSVRGRFTISRDNAKNTVYLQMNSLKPEDTAVYYCAANPTYGSDWNAENWGQGTQVTVSSGSGGGGSGGGGSGGGGSFEQVQLQQPGAELVKPGASVKMSCKASGYAFSSYWINWMKQKPGQGLEWIGQIYPGDGDTNYNGKFKGRATLTADTSSSTAYMQLSSLTSEDSAVYFCARSITTVVGCAMDYWGQGTSVTVSSTRIQNPDPAVYQLRDSKSSDKSVCLFTDFDSQTNVSQSKDSDVYITDKCVLDMRSMDFKSNSAVAWSNKSDFACANAFNNSIIPEDTFFPSPESSCDVKLVEKSFETDTNLNFQNLSVIGFRILLLKVAGFNLLMTLRLWSS

SEQ ID NO: 16376 - protein, 1385 aa, Artificial Sequence
  Synthetic Polypeptide
MALPVTALLLPLALLLHAARPEVQLLESGGGLVQPGGSLRLSCAASGFTFSSYAMSWVRQAPGKGLEWVSSISGSGDYIYYADSVKGRFTISRDISKNTLYLQMNSLRAEDTAVYYCAKEGTGANSSLADYRGQGTLVTVSSGGGSGGGSEVQLVESGGGSVQAGGSLRLSCTTSGRALNMYVMGWFRQAPGNEREFVAATSSSGGSTSYPDSVKGRFTISRDNAKNTVYLQMNSLKPEDTAAYRCAASPYVSTPTMNILEEYRYWGLGTQVTVSSGTGGGGSGGGGSGGGGSEFDIQMTQSPSSLSASVGDRVTITCKASDHINNWLAWYQQKPGQAPKLLIYGATTLETGVPSRFSGSGSGTDYTLTISSLQPEDFATYYCQQSWNTPWTFGQGTKLEIKRLEDLKNVFPPEVAVFEPSEAEISHTQKATLVCLATGFYPDHVELSWWVNGKEVHSGVCTDPQPLKEQPALNDSRYCLSSRLRVSATFWQNPRNHFRCQVQFYGLSENDEWTQDRAKPVTQIVSAEAWGRADCGFTSESYQQGVLSATILYEILLGKATLYAVLVSALVLMAMVKRKDSRGRAKRSGSGATNFSLLKQAGDVEENPGPTSMDWIWRILFLVGAATGAHSQLQLQESGPGLVKPSETLSLTCTVSGGSISSGDYYWGWIRQPPGKGLEWIGHIYYSGATYYNPSLKSRVTISVDTSRNQFSLKLSSVTAADTAVYYCTRDDSSNWRSRGQGTLVTVSSSGGGGSGGGGSQVQLQESGGGLAQAGGSLRLSCAASGRTFSMGWFRQAPGKEREFVAAITYSGGSPYYASSVRGRFTISRDNAKNTVYLQMNSLKPEDTAVYYCAANPTYGSDWNAENWGQGTQVTVSSGSGGGGSGGGGSGGGGSFEQVQLQQPGAELVKPGASVKMSCKASGYAFSSYWINWMKQKPGQGLEWIGQIYPGDGDTNYNGKFKGRATLTADTSSSTAYMQLSSLTSEDSAVYFCARSITTVVGCAMDYWGQGTSVTVSSTRIQNPDPAVYQLRDSKSSDKSVCLFTDFDSQTNVSQSKDSDVYITDKCVLDMRSMDFKSNSAVAWSNKSDFACANAFNNSIIPEDTFFPSPESSCDVKLVEKSFETDTNLNFQNLSVIGFRILLLKVAGFNLLMTLRLWSSRAKRSGSGVKQTLNFDLLKLAGDVESNPGPSRGGIHTMATYEVLCEVARKLGTDDREVVLFLLNVFIPQPTLAQLIGALRALKEEGRLTFPLLAECLFRAGRRDLLRDLLHLDPRFLERHLAGTMSYFSPYQLTVLHVDGELCARDIRSLIFLSKDTIGSRSTPQTFLHWVYCMENLDLLGPTDVDALMSMLRSLSRVDLQRQVQTLMGLHLSGPSHSQHYRHTP

SEQ ID NO: 16377 - protein, 1164 aa, Artificial Sequence
  Synthetic Polypeptide
MALPVTALLLPLALLLHAARPEVQLLESGGGLVQPGGSLRLSCAASGFTFSSYAMSWVRQAPGKGLEWVSSISGSGDYIYYADSVKGRFTISRDISKNTLYLQMNSLRAEDTAVYYCAKEGTGANSSLADYRGQGTLVTVSSGGGSGGGSEVQLVESGGGSVQAGGSLRLSCTTSGRALNMYVMGWFRQAPGNEREFVAATSSSGGSTSYPDSVKGRFTISRDNAKNTVYLQMNSLKPEDTAAYRCAASPYVSTPTMNILEEYRYWGLGTQVTVSSGTGGGGSGGGGSGGGGSEFDIQMTQSPSSLSASVGDRVTITCKASDHINNWLAWYQQKPGQAPKLLIYGATTLETGVPSRFSGSGSGTDYTLTISSLQPEDFATYYCQQSWNTPWTFGQGTKLEIKRLEIQNPDPAVYQLRDSKSSDKSVCLFTDFDSQTNVSQSKDSDVYITDKCVLDMRSMDFKSNSAVAWSNKSDFACANAFNNSIIPEDTFFPSPESSCDVKLVEKSFETDTNLNFQNLSVIGFRILLLKVAGFNLLMTLRLWSSRAKRSGSGVKQTLNFDLLKLAGDVESNPGPTSMDWIWRILFLVGAATGAHSQLQLQESGPGLVKPSETLSLTCTVSGGSISSGDYYWGWIRQPPGKGLEWIGHIYYSGATYYNPSLKSRVTISVDTSRNQFSLKLSSVTAADTAVYYCTRDDSSNWRSRGQGTLVTVSSSGGGGSGGGGSQVQLQESGGGLAQAGGSLRLSCAASGRTFSMGWFRQAPGKEREFVAAITYSGGSPYYASSVRGRFTISRDNAKNTVYLQMNSLKPEDTAVYYCAANPTYGSDWNAENWGQGTQVTVSSGSGGGGSGGGGSGGGGSFEQVQLQQPGAELVKPGASVKMSCKASGYAFSSYWINWMKQKPGQGLEWIGQIYPGDGDTNYNGKFKGRATLTADTSSSTAYMQLSSLTSEDSAVYFCARSITTVVGCAMDYWGQGTSVTVSSTREDLKNVFPPEVAVFEPSEAEISHTQKATLVCLATGFYPDHVELSWWVNGKEVHSGVCTDPQPLKEQPALNDSRYCLSSRLRVSATFWQNPRNHFRCQVQFYGLSENDEWTQDRAKPVTQIVSAEAWGRADCGFTSESYQQGVLSATILYEILLGKATLYAVLVSALVLMAMVKRKDSRG

SEQ ID NO: 16378 - protein, 1386 aa, Artificial Sequence
  Synthetic Polypeptide
MALPVTALLLPLALLLHAARPEVQLLESGGGLVQPGGSLRLSCAASGFTFSSYAMSWVRQAPGKGLEWVSSISGSGDYIYYADSVKGRFTISRDISKNTLYLQMNSLRAEDTAVYYCAKEGTGANSSLADYRGQGTLVTVSSGGGSGGGSEVQLVESGGGSVQAGGSLRLSCTTSGRALNMYVMGWFRQAPGNEREFVAATSSSGGSTSYPDSVKGRFTISRDNAKNTVYLQMNSLKPEDTAAYRCAASPYVSTPTMNILEEYRYWGLGTQVTVSSGTGGGGSGGGGSGGGGSEFDIQMTQSPSSLSASVGDRVTITCKASDHINNWLAWYQQKPGQAPKLLIYGATTLETGVPSRFSGSGSGTDYTLTISSLQPEDFATYYCQQSWNTPWTFGQGTKLEIKRLEIQNPDPAVYQLRDSKSSDKSVCLFTDFDSQTNVSQSKDSDVYITDKCVLDMRSMDFKSNSAVAWSNKSDFACANAFNNSIIPEDTFFPSPESSCDVKLVEKSFETDTNLNFQNLSVIGFRILLLKVAGFNLLMTLRLWSSRAKRSGSGVKQTLNFDLLKLAGDVESNPGPTSMDWIWRILFLVGAATGAHSQLQLQESGPGLVKPSETLSLTCTVSGGSISSGDYYWGWIRQPPGKGLEWIGHIYYSGATYYNPSLKSRVTISVDTSRNQFSLKLSSVTAADTAVYYCTRDDSSNWRSRGQGTLVTVSSSGGGGSGGGGSQVQLQESGGGLAQAGGSLRLSCAASGRTFSMGWFRQAPGKEREFVAAITYSGGSPYYASSVRGRFTISRDNAKNTVYLQMNSLKPEDTAVYYCAANPTYGSDWNAENWGQGTQVTVSSGSGGGGSGGGGSGGGGSFEQVQLQQPGAELVKPGASVKMSCKASGYAFSSYWINWMKQKPGQGLEWIGQIYPGDGDTNYNGKFKGRATLTADTSSSTAYMQLSSLTSEDSAVYFCARSITTVVGCAMDYWGQGTSVTVSSTREDLKNVFPPEVAVFEPSEAEISHTQKATLVCLATGFYPDHVELSWWVNGKEVHSGVCTDPQPLKEQPALNDSRYCLSSRLRVSATFWQNPRNHFRCQVQFYGLSENDEWTQDRAKPVTQIVSAEAWGRADCGFTSESYQQGVLSATILYEILLGKATLYAVLVSALVLMAMVKRKDSRGRAKRSGSGATNFSLLKQAGDVEENPGPSRGGIHTMATYEVLCEVARKLGTDDREVVLFLLNVFIPQPTLAQLIGALRALKEEGRLTFPLLAECLFRAGRRDLLRDLLHLDPRFLERHLAGTMSYFSPYQLTVLHVDGELCARDIRSLIFLSKDTIGSRSTPQTFLHWVYCMENLDLLGPTDVDALMSMLRSLSRVDLQRQVQTLMGLHLSGPSHSQHYRHTP

SEQ ID NO: 16379 - protein, 1393 aa, Artificial Sequence
  Synthetic Polypeptide
MALPVTALLLPLALLLHAARPEVQLLESGGGLVQPGGSLRLSCAASGFTFSSYAMSWVRQAPGKGLEWVSSISGSGDYIYYADSVKGRFTISRDISKNTLYLQMNSLRAEDTAVYYCAKEGTGANSSLADYRGQGTLVTVSSGGGSGGGSEVQLVESGGGSVQAGGSLRLSCTTSGRALNMYVMGWFRQAPGNEREFVAATSSSGGSTSYPDSVKGRFTISRDNAKNTVYLQMNSLKPEDTAAYRCAASPYVSTPTMNILEEYRYWGLGTQVTVSSGTGGGGSGGGGSGGGGSEFDIQMTQSPSSLSASVGDRVTITCKASDHINNWLAWYQQKPGQAPKLLIYGATTLETGVPSRFSGSGSGTDYTLTISSLQPEDFATYYCQQSWNTPWTFGQGTKLEIKRLEDLKNVFPPEVAVFEPSEAEISHTQKATLVCLATGFYPDHVELSWWVNGKEVHSGVSTDPQPLKEQPALNDSRYCLSSRLRVSATFWQNPRNHFRCQVQFYGLSENDEWTQDRAKPVTQIVSAEAWGRADCGFTSESYQQGVLSATILYEILLGKATLYAVLVSALVLMAMVKRKDSRGRAKRSGSGATNFSLLKQAGDVEENPGPTSMDWIWRILFLVGAATGAHSQLQLQESGPGLVKPSETLSLTCTVSGGSISSGDYYWGWIRQPPGKGLEWIGHIYYSGATYYNPSLKSRVTISVDTSRNQFSLKLSSVTAADTAVYYCTRDDSSNWRSRGQGTLVTVSSSGGGGSGGGGSQVQLQESGGGLAQAGGSLRLSCAASGRTFSMGWFRQAPGKEREFVAAITYSGGSPYYASSVRGRFTISRDNAKNTVYLQMNSLKPEDTAVYYCAANPTYGSDWNAENWGQGTQVTVSSGSGGGGSGGGGSGGGGSFEQVQLQQPGAELVKPGASVKMSCKASGYAFSSYWINWMKQKPGQGLEWIGQIYPGDGDTNYNGKFKGRATLTADTSSSTAYMQLSSLTSEDSAVYFCARSITTVVGCAMDYWGQGTSVTVSSTRIQNPDPAVYQLRDSKSSDKSVCLFTDFDSQTNVSQSKDSDVYITDKTVLDMRSMDFKSNSAVAWSNKSDFACANAFNNSIIPEDTFFPSPESSCDVKLVEKSFETDTNLNFQNLSVIGFRILLLKVAGFNLLMTLRLWSSRAKRSGSGVKQTLNFDLLKLAGDVESNPGPSRGHMTEYKPTVRLATRDDVPRAVRTLAAAFADYPATRHTVDPDRHIERVTELQELFLTRVGLDIGKVWVADDGAAVAVWTTPESVEAGAVFAEIGPRMAELSGSRLAAQQQMEGLLAPHRPKEPAWFLATVGVSPDHQGKGLGSAVVLPGVEAAERAGVPAFLETSAPRNLPFYERLGFTVTADVEVPEGPRTWCMTRKPGA

SEQ ID NO: 16380 - protein, 1475 aa, Artificial Sequence
  Synthetic Polypeptide
MALPVTALLLPLALLLHAARPEVQLLESGGGLVQPGGSLRLSCAASGFTFSSYAMSWVRQAPGKGLEWVSSISGSGDYIYYADSVKGRFTISRDISKNTLYLQMNSLRAEDTAVYYCAKEGTGANSSLADYRGQGTLVTVSSGGGSGGGSEVQLVESGGGSVQAGGSLRLSCTTSGRALNMYVMGWFRQAPGNEREFVAATSSSGGSTSYPDSVKGRFTISRDNAKNTVYLQMNSLKPEDTAAYRCAASPYVSTPTMNILEEYRYWGLGTQVTVSSGTGGGGSGGGGSGGGGSEFDIQMTQSPSSLSASVGDRVTITCKASDHINNWLAWYQQKPGQAPKLLIYGATTLETGVPSRFSGSGSGTDYTLTISSLQPEDFATYYCQQSWNTPWTFGQGTKLEIKRLEDLKNVFPPEVAVFEPSEAEISHTQKATLVCLATGFYPDHVELSWWVNGKEVHSGVSTDPQPLKEQPALNDSRYCLSSRLRVSATFWQNPRNHFRCQVQFYGLSENDEWTQDRAKPVTQIVSAEAWGRADCGFTSESYQQGVLSATILYEILLGKATLYAVLVSALVLMAMVKRKDSRGRAKRSGSGATNFSLLKQAGDVEENPGPTSMDWIWRILFLVGAATGAHSQLQLQESGPGLVKPSETLSLTCTVSGGSISSGDYYWGWIRQPPGKGLEWIGHIYYSGATYYNPSLKSRVTISVDTSRNQFSLKLSSVTAADTAVYYCTRDDSSNWRSRGQGTLVTVSSSGGGGSGGGGSQVQLQESGGGLAQAGGSLRLSCAASGRTFSMGWFRQAPGKEREFVAAITYSGGSPYYASSVRGRFTISRDNAKNTVYLQMNSLKPEDTAVYYCAANPTYGSDWNAENWGQGTQVTVSSGSGGGGSGGGGSGGGGSFEQVQLQQPGAELVKPGASVKMSCKASGYAFSSYWINWMKQKPGQGLEWIGQIYPGDGDTNYNGKFKGRATLTADTSSSTAYMQLSSLTSEDSAVYFCARSITTVVGCAMDYWGQGTSVTVSSTREQKLISEEDGSGTPFPSLAPPIMLLVDGKQQMVVVCLVLDVAPPGLDSPIWFSAGNGSALDAFTYGPSPATDGTWTNLAHLSLPSEELASWEPLVCHTGPGAEGHSRSTQPMHLSGEASTARTCPQEPLRGTPGGALWLGVLRLLLFKLLLFDLLLTCSCLCDPAGPLPSPATTTRLRALGSHRLHPATETGGREATSSPRPQPRDRRWGDTPPGRKPGSPVRAKRSGSGVKQTLNFDLLKLAGDVESNPGPSRGHMTEYKPTVRLATRDDVPRAVRTLAAAFADYPATRHTVDPDRHIERVTELQELFLTRVGLDIGKVWVADDGAAVAVWTTPESVEAGAVFAEIGPRMAELSGSRLAAQQQMEGLLAPHRPKEPAWFLATVGVSPDHQGKGLGSAVVLPGVEAAERAGVPAFLETSAPRNLPFYERLGFTVTADVEVPEGPRTWCMTRKPGA

SEQ ID NO: 16381 - protein, 1430 aa, Artificial Sequence
  Synthetic Polypeptide
MALPVTALLLPLALLLHAARPEVQLLESGGGLVQPGGSLRLSCAASGFTFSSYAMSWVRQAPGKGLEWVSSISGSGDYIYYADSVKGRFTISRDISKNTLYLQMNSLRAEDTAVYYCAKEGTGANSSLADYRGQGTLVTVSSGGGSGGGSEVQLVESGGGSVQAGGSLRLSCTTSGRALNMYVMGWFRQAPGNEREFVAATSSSGGSTSYPDSVKGRFTISRDNAKNTVYLQMNSLKPEDTAAYRCAASPYVSTPTMNILEEYRYWGLGTQVTVSSGTGGGGSGGGGSGGGGSEFDIQMTQSPSSLSASVGDRVTITCKASDHINNWLAWYQQKPGQAPKLLIYGATTLETGVPSRFSGSGSGTDYTLTISSLQPEDFATYYCQQSWNTPWTFGQGTKLEIKRLEGKPIPNPLLGLDSTGSGDKQLDADVSPKPTIFLPSIAETKLQKAGTYLCLLEKFFPDVIKIHWQEKKSNTILGSQEGNTMKTNDTYMKFSWLTVPEKSLDKEHRCIVRHENNKNGVDQEIIFPPIKTDVITMDPKDNCSKDANDTLLLQLTNTSAYYMYLLLLLKSVVYFAIITCCLLRRTAFCCNGEKSRAKRSGSGATNFSLLKQAGDVEENPGPTSMDWIWRILFLVGAATGAHSQLQLQESGPGLVKPSETLSLTCTVSGGSISSGDYYWGWIRQPPGKGLEWIGHIYYSGATYYNPSLKSRVTISVDTSRNQFSLKLSSVTAADTAVYYCTRDDSSNWRSRGQGTLVTVSSSGGGGSGGGGSQVQLQESGGGLAQAGGSLRLSCAASGRTFSMGWFRQAPGKEREFVAAITYSGGSPYYASSVRGRFTISRDNAKNTVYLQMNSLKPEDTAVYYCAANPTYGSDWNAENWGQGTQVTVSSGSGGGGSGGGGSGGGGSFEQVQLQQPGAELVKPGASVKMSCKASGYAFSSYWINWMKQKPGQGLEWIGQIYPGDGDTNYNGKFKGRATLTADTSSSTAYMQLSSLTSEDSAVYFCARSITTVVGCAMDYWGQGTSVTVSSTREQKLISEEDGSGSQPHTKPSVFVMKNGTNVACLVKEFYPKDIRINLVSSKKITEFDPAIVISPSGKYNAVKLGKYEDSNSVTCSVQHDNKTVHSTDFEVKTDSTDHVKPKETENTKQPSKSCHKPKAIVHTEKVNMMSLTVLGLRMLFAKTVAVNFLLTAKLFFLRAKRSGSGVKQTLNFDLLKLAGDVESNPGPSRGHMTEYKPTVRLATRDDVPRAVRTLAAAFADYPATRHTVDPDRHIERVTELQELFLTRVGLDIGKVWVADDGAAVAVWTTPESVEAGAVFAEIGPRMAELSGSRLAAQQQMEGLLAPHRPKEPAWFLATVGVSPDHQGKGLGSAVVLPGVEAAERAGVPAFLETSAPRNLPFYERLGFTVTADVEVPEGPRTWCMTRKPGA

SEQ ID NO: 16382 - protein, 1168 aa, Artificial Sequence
  Synthetic Polypeptide
MALPVTALLLPLALLLHAARPEVQLLESGGGLVQPGGSLRLSCAASGFTFSSYAMSWVRQAPGKGLEWVSSISGSGDYIYYADSVKGRFTISRDISKNTLYLQMNSLRAEDTAVYYCAKEGTGANSSLADYRGQGTLVTVSSGGGSGGGSEVQLVESGGGSVQAGGSLRLSCTTSGRALNMYVMGWFRQAPGNEREFVAATSSSGGSTSYPDSVKGRFTISRDNAKNTVYLQMNSLKPEDTAAYRCAASPYVSTPTMNILEEYRYWGLGTQVTVSSGTGGGGSGGGGSGGGGSEFDIQMTQSPSSLSASVGDRVTITCKASDHINNWLAWYQQKPGQAPKLLIYGATTLETGVPSRFSGSGSGTDYTLTISSLQPEDFATYYCQQSWNTPWTFGQGTKLEIKRLESQPHTKPSVFVMKNGTNVACLVKEFYPKDIRINLVSSKKITEFDPAIVISPSGKYNAVKLGKYEDSNSVTCSVQHDNKTVHSTDFEVKTDSTDHVKPKETENTKQPSKSCHKPKAIVHTEKVNMMSLTVLGLRMLFAKTVAVNFLLTAKLFFLRAKRSGSGATNFSLLKQAGDVEENPGPTSMDWIWRILFLVGAATGAHSQLQLQESGPGLVKPSETLSLTCTVSGGSISSGDYYWGWIRQPPGKGLEWIGHIYYSGATYYNPSLKSRVTISVDTSRNQFSLKLSSVTAADTAVYYCTRDDSSNWRSRGQGTLVTVSSSGGGGSGGGGSQVQLQESGGGLAQAGGSLRLSCAASGRTFSMGWFRQAPGKEREFVAAITYSGGSPYYASSVRGRFTISRDNAKNTVYLQMNSLKPEDTAVYYCAANPTYGSDWNAENWGQGTQVTVSSGSGGGGSGGGGSGGGGSFEQVQLQQPGAELVKPGASVKMSCKASGYAFSSYWINWMKQKPGQGLEWIGQIYPGDGDTNYNGKFKGRATLTADTSSSTAYMQLSSLTSEDSAVYFCARSITTVVGCAMDYWGQGTSVTVSSTRDKQLDADVSPKPTIFLPSIAETKLQKAGTYLCLLEKFFPDVIKIHWQEKKSNTILGSQEGNTMKTNDTYMKFSWLTVPEKSLDKEHRCIVRHENNKNGVDQEIIFPPIKTDVITMDPKDNCSKDANDTLLLQLTNTSAYYMYLLLLLKSVVYFAIITCCLLRRTAFCCNGEKS

SEQ ID NO: 16383 - protein, 1570 aa, Artificial Sequence
  Synthetic Polypeptide
MALPVTALLLPLALLLHAARPEVQLLESGGGLVQPGGSLRLSCAASGFTFSSYAMSWVRQAPGKGLEWVSSISGSGDYIYYADSVKGRFTISRDISKNTLYLQMNSLRAEDTAVYYCAKEGTGANSSLADYRGQGTLVTVSSGGGSGGGSEVQLVESGGGSVQAGGSLRLSCTTSGRALNMYVMGWFRQAPGNEREFVAATSSSGGSTSYPDSVKGRFTISRDNAKNTVYLQMNSLKPEDTAAYRCAASPYVSTPTMNILEEYRYWGLGTQVTVSSGTGGGGSGGGGSGGGGSEFDIQMTQSPSSLSASVGDRVTITCKASDHINNWLAWYQQKPGQAPKLLIYGATTLETGVPSRFSGSGSGTDYTLTISSLQPEDFATYYCQQSWNTPWTFGQGTKLEIKRGQPKANPTVTLFPPSSEELQANKATLVCLISDFYPGAVTVAWKADGSPVKAGVETTKPSKQSNNKYAASSYLSLTPEQWKSHRSYSCQVTHEGSTVEKTVAPTECSGSQSFGLLDPKLCYLLDGILFIYGVILTALFLRVKFSRSADAPAYQQGQNQLYNELNLGRREEYDVLDKRRGRDPEMGGKPQRRKNPQEGLYNELQKDKMAEAYSEIGMKGERRRGKGHDGLYQGLSTATKDTYDALHMQALPPRRAKRSGSGATNFSLLKQAGDVEENPGPTSMDWIWRILFLVGAATGAHSQLQLQESGPGLVKPSETLSLTCTVSGGSISSGDYYWGWIRQPPGKGLEWIGHIYYSGATYYNPSLKSRVTISVDTSRNQFSLKLSSVTAADTAVYYCTRDDSSNWRSRGQGTLVTVSSSGGGGSGGGGSQVQLQESGGGLAQAGGSLRLSCAASGRTFSMGWFRQAPGKEREFVAAITYSGGSPYYASSVRGRFTISRDNAKNTVYLQMNSLKPEDTAVYYCAANPTYGSDWNAENWGQGTQVTVSSGSGGGGSGGGGSGGGGSFEQVQLQQPGAELVKPGASVKMSCKASGYAFSSYWINWMKQKPGQGLEWIGQIYPGDGDTNYNGKFKGRATLTADTSSSTAYMQLSSLTSEDSAVYFCARSITTVVGCAMDYWGQGTSVTVSSASTKGPSVFPLAPSSKSTSGGTAALGCLVKDYFPEPVTVSWNSGALTSGVHTFPAVLQSSGLYSLSSVVTVPSSSLGTQTYICNVNHKPSNTKVDKRVEPKSCGTQSFGLLDPKLCYLLDGILFIYGVILTALFLRVKFSRSADAPAYQQGQNQLYNELNLGRREEYDVLDKRRGRDPEMGGKPQRRKNPQEGLYNELQKDKMAEAYSEIGMKGERRRGKGHDGLYQGLSTATKDTYDALHMQALPPRRAKRSGSGVKQTLNFDLLKLAGDVESNPGPSRGHMTEYKPTVRLATRDDVPRAVRTLAAAFADYPATRHTVDPDRHIERVTELQELFLTRVGLDIGKVWVADDGAAVAVWTTPESVEAGAVFAEIGPRMAELSGSRLAAQQQMEGLLAPHRPKEPAWFLATVGVSPDHQGKGLGSAVVLPGVEAAERAGVPAFLETSAPRNLPFYERLGFTVTADVEVPEGPRTWCMTRKPGA

SEQ ID NO: 16384 - protein, 1356 aa, Artificial Sequence
  Synthetic Polypeptide
MALPVTALLLPLALLLHAARPEVQLLESGGGLVQPGGSLRLSCAASGFTFSSYAMSWVRQAPGKGLEWVSSISGSGDYIYYADSVKGRFTISRDISKNTLYLQMNSLRAEDTAVYYCAKEGTGANSSLADYRGQGTLVTVSSGGGSGGGSEVQLVESGGGSVQAGGSLRLSCTTSGRALNMYVMGWFRQAPGNEREFVAATSSSGGSTSYPDSVKGRFTISRDNAKNTVYLQMNSLKPEDTAAYRCAASPYVSTPTMNILEEYRYWGLGTQVTVSSGTGGGGSGGGGSGGGGSEFDIQMTQSPSSLSASVGDRVTITCKASDHINNWLAWYQQKPGQAPKLLIYGATTLETGVPSRFSGSGSGTDYTLTISSLQPEDFATYYCQQSWNTPWTFGQGTKLEIKRLEDLKNVFPPEVAVFEPSEAEISHTQKATLVCLATGFYPDHVELSWWVNGKEVHSGVSTDPQPLKEQPALNDSRYCLSSRLRVSATFWQNPRNHFRCQVQFYGLSENDEWTQDRAKPVTQIVSAEAWGRADCGSQSFGLLDPKLCYLLDGILFIYGVILTALFLRVKFSRSADAPAYQQGQNQLYNELNLGRREEYDVLDKRRGRDPEMGGKPQRRKNPQEGLYNELQKDKMAEAYSEIGMKGERRRGKGHDGLYQGLSTATKDTYDALHMQALPPRRAKRSGSGATNFSLLKQAGDVEENPGPTSMDWIWRILFLVGAATGAHSQLQLQESGPGLVKPSETLSLTCTVSGGSISSGDYYWGWIRQPPGKGLEWIGHIYYSGATYYNPSLKSRVTISVDTSRNQFSLKLSSVTAADTAVYYCTRDDSSNWRSRGQGTLVTVSSSGGGGSGGGGSQVQLQESGGGLAQAGGSLRLSCAASGRTFSMGWFRQAPGKEREFVAAITYSGGSPYYASSVRGRFTISRDNAKNTVYLQMNSLKPEDTAVYYCAANPTYGSDWNAENWGQGTQVTVSSGSGGGGSGGGGSGGGGSFEQVQLQQPGAELVKPGASVKMSCKASGYAFSSYWINWMKQKPGQGLEWIGQIYPGDGDTNYNGKFKGRATLTADTSSSTAYMQLSSLTSEDSAVYFCARSITTVVGCAMDYWGQGTSVTVSSTRIQNPDPAVYQLRDSKSSDKSVCLFTDFDSQTNVSQSKDSDVYITDKTVLDMRSMDFKSNSAVAWSNKSDFACANAFNNSIIPEDTFFPSPESSCGTQSFGLLDPKLCYLLDGILFIYGVILTALFLRVKFSRSADAPAYQQGQNQLYNELNLGRREEYDVLDKRRGRDPEMGGKPQRRKNPQEGLYNELQKDKMAEAYSEIGMKGERRRGKGHDGLYQGLSTATKDTYDALHMQALPPR

SEQ ID NO: 16385 - protein, 1356 aa, Artificial Sequence
  Synthetic Polypeptide
MALPVTALLLPLALLLHAARPEVQLLESGGGLVQPGGSLRLSCAASGFTFSSYAMSWVRQAPGKGLEWVSSISGSGDYIYYADSVKGRFTISRDISKNTLYLQMNSLRAEDTAVYYCAKEGTGANSSLADYRGQGTLVTVSSGGGSGGGSEVQLVESGGGSVQAGGSLRLSCTTSGRALNMYVMGWFRQAPGNEREFVAATSSSGGSTSYPDSVKGRFTISRDNAKNTVYLQMNSLKPEDTAAYRCAASPYVSTPTMNILEEYRYWGLGTQVTVSSGTGGGGSGGGGSGGGGSEFDIQMTQSPSSLSASVGDRVTITCKASDHINNWLAWYQQKPGQAPKLLIYGATTLETGVPSRFSGSGSGTDYTLTISSLQPEDFATYYCQQSWNTPWTFGQGTKLEIKRLEDLKNVFPPEVAVFEPSKAEIAHTQKATLVCLATGFYPDHVELSWWVNGKEVHSGVCTDPQPLKEQPALNDSRYCLSSRLRVSATFWQNPRNHFRCQVQFYGLSENDEWTQDRAKPVTQIVSAEAWGRADCGSQSFGLLDPKLCYLLDGILFIYGVILTALFLRVKFSRSADAPAYQQGQNQLYNELNLGRREEYDVLDKRRGRDPEMGGKPQRRKNPQEGLYNELQKDKMAEAYSEIGMKGERRRGKGHDGLYQGLSTATKDTYDALHMQALPPRRAKRSGSGATNFSLLKQAGDVEENPGPTSMDWIWRILFLVGAATGAHSQLQLQESGPGLVKPSETLSLTCTVSGGSISSGDYYWGWIRQPPGKGLEWIGHIYYSGATYYNPSLKSRVTISVDTSRNQFSLKLSSVTAADTAVYYCTRDDSSNWRSRGQGTLVTVSSSGGGGSGGGGSQVQLQESGGGLAQAGGSLRLSCAASGRTFSMGWFRQAPGKEREFVAAITYSGGSPYYASSVRGRFTISRDNAKNTVYLQMNSLKPEDTAVYYCAANPTYGSDWNAENWGQGTQVTVSSGSGGGGSGGGGSGGGGSFEQVQLQQPGAELVKPGASVKMSCKASGYAFSSYWINWMKQKPGQGLEWIGQIYPGDGDTNYNGKFKGRATLTADTSSSTAYMQLSSLTSEDSAVYFCARSITTVVGCAMDYWGQGTSVTVSSTRIQNPDPAVYQLRDSKSSDKSVCLFTDFDSQTNVSQSKDSDVYITDKCVLDMRSMDFKSNSAVAWSNKSDFACANAFNNSIIPEDTFFPSSDVPCGTQSFGLLDPKLCYLLDGILFIYGVILTALFLRVKFSRSADAPAYQQGQNQLYNELNLGRREEYDVLDKRRGRDPEMGGKPQRRKNPQEGLYNELQKDKMAEAYSEIGMKGERRRGKGHDGLYQGLSTATKDTYDALHMQALPPR

SEQ ID NO: 16386 - protein, 1427 aa, Artificial Sequence
  Synthetic Polypeptide
MALPVTALLLPLALLLHAARPEVQLLESGGGLVQPGGSLRLSCAASGFTFSSYAMSWVRQAPGKGLEWVSSISGSGDYIYYADSVKGRFTISRDISKNTLYLQMNSLRAEDTAVYYCAKEGTGANSSLADYRGQGTLVTVSSGGGSGGGSEVQLVESGGGSVQAGGSLRLSCTTSGRALNMYVMGWFRQAPGNEREFVAATSSSGGSTSYPDSVKGRFTISRDNAKNTVYLQMNSLKPEDTAAYRCAASPYVSTPTMNILEEYRYWGLGTQVTVSSGTGGGGSGGGGSGGGGSEFDIQMTQSPSSLSASVGDRVTITCKASDHINNWLAWYQQKPGQAPKLLIYGATTLETGVPSRFSGSGSGTDYTLTISSLQPEDFATYYCQQSWNTPWTFGQGTKLEIKRLEGKPIPNPLLGLDSTGSGEDLKNVFPPEVAVFEPSEAEISHTQKATLVCLATGFYPDHVELSWWVNGKEVHSGVSTDPQPLKEQPALNDSRYCLSSRLRVSATFWQNPRNHFRCQVQFYGLSENDEWTQDRAKPVTQIVSAEAWGRADCGSQSFGLLDPKLCYLLDGILFIYGVILTALFLRVKFSRSADAPAYQQGQNQLYNELNLGRREEYDVLDKRRGRDPEMGGKPQRRKNPQEGLYNELQKDKMAEAYSEIGMKGERRRGKGHDGLYQGLSTATKDTYDALHMQALPPRRAKRSGSGATNFSLLKQAGDVEENPGPTSMDWIWRILFLVGAATGAHSQLQLQESGPGLVKPSETLSLTCTVSGGSISSGDYYWGWIRQPPGKGLEWIGHIYYSGATYYNPSLKSRVTISVDTSRNQFSLKLSSVTAADTAVYYCTRDDSSNWRSRGQGTLVTVSSSGGGGSGGGGSQVQLQESGGGLAQAGGSLRLSCAASGRTFSMGWFRQAPGKEREFVAAITYSGGSPYYASSVRGRFTISRDNAKNTVYLQMNSLKPEDTAVYYCAANPTYGSDWNAENWGQGTQVTVSSGSGGGGSGGGGSGGGGSFEQVQLQQPGAELVKPGASVKMSCKASGYAFSSYWINWMKQKPGQGLEWIGQIYPGDGDTNYNGKFKGRATLTADTSSSTAYMQLSSLTSEDSAVYFCARSITTVVGCAMDYWGQGTSVTVSSTREQKLISEEDGSGIQNPDPAVYQLRDSKSSDKSVCLFTDFDSQTNVSQSKDSDVYITDKTVLDMRSMDFKSNSAVAWSNKSDFACANAFNNSIIPEDTFFPSPESSCGTQSFGLLDPKLCYLLDGILFIYGVILTALFLRSKRSRLLHSDYMNMTPRRPGPTRKHYQPYAPPRDFAAYRSRVKFSRSADAPAYQQGQNQLYNELNLGRREEYDVLDKRRGRDPEMGGKPQRRKNPQEGLYNELQKDKMAEAYSEIGMKGERRRGKGHDGLYQGLSTATKDTYDALHMQALPPR

SEQ ID NO: 16387 - protein, 1468 aa, Artificial Sequence
  Synthetic Polypeptide
MALPVTALLLPLALLLHAARPEVQLLESGGGLVQPGGSLRLSCAASGFTFSSYAMSWVRQAPGKGLEWVSSISGSGDYIYYADSVKGRFTISRDISKNTLYLQMNSLRAEDTAVYYCAKEGTGANSSLADYRGQGTLVTVSSGGGSGGGSEVQLVESGGGSVQAGGSLRLSCTTSGRALNMYVMGWFRQAPGNEREFVAATSSSGGSTSYPDSVKGRFTISRDNAKNTVYLQMNSLKPEDTAAYRCAASPYVSTPTMNILEEYRYWGLGTQVTVSSGTGGGGSGGGGSGGGGSEFDIQMTQSPSSLSASVGDRVTITCKASDHINNWLAWYQQKPGQAPKLLIYGATTLETGVPSRFSGSGSGTDYTLTISSLQPEDFATYYCQQSWNTPWTFGQGTKLEIKRLEGKPIPNPLLGLDSTGSGEDLKNVFPPEVAVFEPSEAEISHTQKATLVCLATGFYPDHVELSWWVNGKEVHSGVSTDPQPLKEQPALNDSRYCLSSRLRVSATFWQNPRNHFRCQVQFYGLSENDEWTQDRAKPVTQIVSAEAWGRADCGSQSFGLLDPKLCYLLDGILFIYGVILTALFLRSKRSRLLHSDYMNMTPRRPGPTRKHYQPYAPPRDFAAYRSRVKFSRSADAPAYQQGQNQLYNELNLGRREEYDVLDKRRGRDPEMGGKPQRRKNPQEGLYNELQKDKMAEAYSEIGMKGERRRGKGHDGLYQGLSTATKDTYDALHMQALPPRRAKRSGSGATNFSLLKQAGDVEENPGPTSMDWIWRILFLVGAATGAHSQLQLQESGPGLVKPSETLSLTCTVSGGSISSGDYYWGWIRQPPGKGLEWIGHIYYSGATYYNPSLKSRVTISVDTSRNQFSLKLSSVTAADTAVYYCTRDDSSNWRSRGQGTLVTVSSSGGGGSGGGGSQVQLQESGGGLAQAGGSLRLSCAASGRTFSMGWFRQAPGKEREFVAAITYSGGSPYYASSVRGRFTISRDNAKNTVYLQMNSLKPEDTAVYYCAANPTYGSDWNAENWGQGTQVTVSSGSGGGGSGGGGSGGGGSFEQVQLQQPGAELVKPGASVKMSCKASGYAFSSYWINWMKQKPGQGLEWIGQIYPGDGDTNYNGKFKGRATLTADTSSSTAYMQLSSLTSEDSAVYFCARSITTVVGCAMDYWGQGTSVTVSSTREQKLISEEDGSGIQNPDPAVYQLRDSKSSDKSVCLFTDFDSQTNVSQSKDSDVYITDKTVLDMRSMDFKSNSAVAWSNKSDFACANAFNNSIIPEDTFFPSPESSCGTQSFGLLDPKLCYLLDGILFIYGVILTALFLRSKRSRLLHSDYMNMTPRRPGPTRKHYQPYAPPRDFAAYRSRVKFSRSADAPAYQQGQNQLYNELNLGRREEYDVLDKRRGRDPEMGGKPQRRKNPQEGLYNELQKDKMAEAYSEIGMKGERRRGKGHDGLYQGLSTATKDTYDALHMQALPPR

SEQ ID NO: 16388 - protein, 1429 aa, Artificial Sequence
  Synthetic Polypeptide
MALPVTALLLPLALLLHAARPEVQLLESGGGLVQPGGSLRLSCAASGFTFSSYAMSWVRQAPGKGLEWVSSISGSGDYIYYADSVKGRFTISRDISKNTLYLQMNSLRAEDTAVYYCAKEGTGANSSLADYRGQGTLVTVSSGGGSGGGSEVQLVESGGGSVQAGGSLRLSCTTSGRALNMYVMGWFRQAPGNEREFVAATSSSGGSTSYPDSVKGRFTISRDNAKNTVYLQMNSLKPEDTAAYRCAASPYVSTPTMNILEEYRYWGLGTQVTVSSGTGGGGSGGGGSGGGGSEFDIQMTQSPSSLSASVGDRVTITCKASDHINNWLAWYQQKPGQAPKLLIYGATTLETGVPSRFSGSGSGTDYTLTISSLQPEDFATYYCQQSWNTPWTFGQGTKLEIKRLEGKPIPNPLLGLDSTGSGEDLKNVFPPEVAVFEPSEAEISHTQKATLVCLATGFYPDHVELSWWVNGKEVHSGVSTDPQPLKEQPALNDSRYCLSSRLRVSATFWQNPRNHFRCQVQFYGLSENDEWTQDRAKPVTQIVSAEAWGRADCGSQSFGLLDPKLCYLLDGILFIYGVILTALFLRVKFSRSADAPAYQQGQNQLYNELNLGRREEYDVLDKRRGRDPEMGGKPQRRKNPQEGLYNELQKDKMAEAYSEIGMKGERRRGKGHDGLYQGLSTATKDTYDALHMQALPPRRAKRSGSGATNFSLLKQAGDVEENPGPTSMDWIWRILFLVGAATGAHSQLQLQESGPGLVKPSETLSLTCTVSGGSISSGDYYWGWIRQPPGKGLEWIGHIYYSGATYYNPSLKSRVTISVDTSRNQFSLKLSSVTAADTAVYYCTRDDSSNWRSRGQGTLVTVSSSGGGGSGGGGSQVQLQESGGGLAQAGGSLRLSCAASGRTFSMGWFRQAPGKEREFVAAITYSGGSPYYASSVRGRFTISRDNAKNTVYLQMNSLKPEDTAVYYCAANPTYGSDWNAENWGQGTQVTVSSGSGGGGSGGGGSGGGGSFEQVQLQQPGAELVKPGASVKMSCKASGYAFSSYWINWMKQKPGQGLEWIGQIYPGDGDTNYNGKFKGRATLTADTSSSTAYMQLSSLTSEDSAVYFCARSITTVVGCAMDYWGQGTSVTVSSTREQKLISEEDLGSGIQNPDPAVYQLRDSKSSDKSVCLFTDFDSQTNVSQSKDSDVYITDKTVLDMRSMDFKSNSAVAWSNKSDFACANAFNNSIIPEDTFFPSPESSCGTQSFGLLDPKLCYLLDGILFIYGVILTALFLKRGRKKLLYIFKQPFMRPVQTTQEEDGCSCRFPEEEEGGCELRVKFSRSADAPAYQQGQNQLYNELNLGRREEYDVLDKRRGRDPEMGGKPQRRKNPQEGLYNELQKDKMAEAYSEIGMKGERRRGKGHDGLYQGLSTATKDTYDALHMQALPPR

SEQ ID NO: 16389 - protein, 1471 aa, Artificial Sequence
  Synthetic Polypeptide
MALPVTALLLPLALLLHAARPEVQLLESGGGLVQPGGSLRLSCAASGFTFSSYAMSWVRQAPGKGLEWVSSISGSGDYIYYADSVKGRFTISRDISKNTLYLQMNSLRAEDTAVYYCAKEGTGANSSLADYRGQGTLVTVSSGGGSGGGSEVQLVESGGGSVQAGGSLRLSCTTSGRALNMYVMGWFRQAPGNEREFVAATSSSGGSTSYPDSVKGRFTISRDNAKNTVYLQMNSLKPEDTAAYRCAASPYVSTPTMNILEEYRYWGLGTQVTVSSGTGGGGSGGGGSGGGGSEFDIQMTQSPSSLSASVGDRVTITCKASDHINNWLAWYQQKPGQAPKLLIYGATTLETGVPSRFSGSGSGTDYTLTISSLQPEDFATYYCQQSWNTPWTFGQGTKLEIKRLEGKPIPNPLLGLDSTGSGEDLKNVFPPEVAVFEPSEAEISHTQKATLVCLATGFYPDHVELSWWVNGKEVHSGVSTDPQPLKEQPALNDSRYCLSSRLRVSATFWQNPRNHFRCQVQFYGLSENDEWTQDRAKPVTQIVSAEAWGRADCGSQSFGLLDPKLCYLLDGILFIYGVILTALFLKRGRKKLLYIFKQPFMRPVQTTQEEDGCSCRFPEEEEGGCELRVKFSRSADAPAYQQGQNQLYNELNLGRREEYDVLDKRRGRDPEMGGKPQRRKNPQEGLYNELQKDKMAEAYSEIGMKGERRRGKGHDGLYQGLSTATKDTYDALHMQALPPRRAKRSGSGATNFSLLKQAGDVEENPGPTSMDWIWRILFLVGAATGAHSQLQLQESGPGLVKPSETLSLTCTVSGGSISSGDYYWGWIRQPPGKGLEWIGHIYYSGATYYNPSLKSRVTISVDTSRNQFSLKLSSVTAADTAVYYCTRDDSSNWRSRGQGTLVTVSSSGGGGSGGGGSQVQLQESGGGLAQAGGSLRLSCAASGRTFSMGWFRQAPGKEREFVAAITYSGGSPYYASSVRGRFTISRDNAKNTVYLQMNSLKPEDTAVYYCAANPTYGSDWNAENWGQGTQVTVSSGSGGGGSGGGGSGGGGSFEQVQLQQPGAELVKPGASVKMSCKASGYAFSSYWINWMKQKPGQGLEWIGQIYPGDGDTNYNGKFKGRATLTADTSSSTAYMQLSSLTSEDSAVYFCARSITTVVGCAMDYWGQGTSVTVSSTREQKLISEEDLGSGIQNPDPAVYQLRDSKSSDKSVCLFTDFDSQTNVSQSKDSDVYITDKTVLDMRSMDFKSNSAVAWSNKSDFACANAFNNSIIPEDTFFPSPESSCGTQSFGLLDPKLCYLLDGILFIYGVILTALFLKRGRKKLLYIFKQPFMRPVQTTQEEDGCSCRFPEEEEGGCELRVKFSRSADAPAYQQGQNQLYNELNLGRREEYDVLDKRRGRDPEMGGKPQRRKNPQEGLYNELQKDKMAEAYSEIGMKGERRRGKGHDGLYQGLSTATKDTYDALHMQALPPR

SEQ ID NO: 16390 - protein, 1361 aa, Artificial Sequence
  Synthetic Polypeptide
MALPVTALLLPLALLLHAARPEVQLLESGGGLVQPGGSLRLSCAASGFTFSSYAMSWVRQAPGKGLEWVSSISGSGDYIYYADSVKGRFTISRDISKNTLYLQMNSLRAEDTAVYYCAKEGTGANSSLADYRGQGTLVTVSSGGGSGGGSEVQLVESGGGSVQAGGSLRLSCTTSGRALNMYVMGWFRQAPGNEREFVAATSSSGGSTSYPDSVKGRFTISRDNAKNTVYLQMNSLKPEDTAAYRCAASPYVSTPTMNILEEYRYWGLGTQVTVSSGTGGGGSGGGGSGGGGSEFDIQMTQSPSSLSASVGDRVTITCKASDHINNWLAWYQQKPGQAPKLLIYGATTLETGVPSRFSGSGSGTDYTLTISSLQPEDFATYYCQQSWNTPWTFGQGTKLEIKRLEQSFGLLDPKLCYLLDGILFIYGVILTALFLRVKFSRSADAPAYQQGQNQLYNELNLGRREEYDVLDKRRGRDPEMGGKPQRRKNPQEGLYNELQKDKMAEAYSEIGMKGERRRGKGHDGLYQGLSTATKDTYDALHMQALPPRRAKRSGSGATNFSLLKQAGDVEENPGPTSMDWIWRILFLVGAATGAHSQLQLQESGPGLVKPSETLSLTCTVSGGSISSGDYYWGWIRQPPGKGLEWIGHIYYSGATYYNPSLKSRVTISVDTSRNQFSLKLSSVTAADTAVYYCTRDDSSNWRSRGQGTLVTVSSSGGGGSGGGGSQVQLQESGGGLAQAGGSLRLSCAASGRTFSMGWFRQAPGKEREFVAAITYSGGSPYYASSVRGRFTISRDNAKNTVYLQMNSLKPEDTAVYYCAANPTYGSDWNAENWGQGTQVTVSSGSGGGGSGGGGSGGGGSFEQVQLQQPGAELVKPGASVKMSCKASGYAFSSYWINWMKQKPGQGLEWIGQIYPGDGDTNYNGKFKGRATLTADTSSSTAYMQLSSLTSEDSAVYFCARSITTVVGCAMDYWGQGTSVTVSSTRQSFGLLDPKLCYLLDGILFIYGVILTALFLRVKFSRSADAPAYQQGQNQLYNELNLGRREEYDVLDKRRGRDPEMGGKPQRRKNPQEGLYNELQKDKMAEAYSEIGMKGERRRGKGHDGLYQGLSTATKDTYDALHMQALPPRRAKRSGSGVKQTLNFDLLKLAGDVESNPGPSRGHMTEYKPTVRLATRDDVPRAVRTLAAAFADYPATRHTVDPDRHIERVTELQELFLTRVGLDIGKVWVADDGAAVAVWTTPESVEAGAVFAEIGPRMAELSGSRLAAQQQMEGLLAPHRPKEPAWFLATVGVSPDHQGKGLGSAVVLPGVEAAERAGVPAFLETSAPRNLPFYERLGFTVTADVEVPEGPRTWCMTRKPGA

SEQ ID NO: 16391 - protein, 1186 aa, Artificial Sequence
  Synthetic Polypeptide
MALPVTALLLPLALLLHAARPEVQLLESGGGLVQPGGSLRLSCAASGFTFSSYAMSWVRQAPGKGLEWVSSISGSGDYIYYADSVKGRFTISRDISKNTLYLQMNSLRAEDTAVYYCAKEGTGANSSLADYRGQGTLVTVSSGGGSGGGSEVQLVESGGGSVQAGGSLRLSCTTSGRALNMYVMGWFRQAPGNEREFVAATSSSGGSTSYPDSVKGRFTISRDNAKNTVYLQMNSLKPEDTAAYRCAASPYVSTPTMNILEEYRYWGLGTQVTVSSGTGGGGSGGGGSGGGGSEFDIQMTQSPSSLSASVGDRVTITCKASDHINNWLAWYQQKPGQAPKLLIYGATTLETGVPSRFSGSGSGTDYTLTISSLQPEDFATYYCQQSWNTPWTFGQGTKLEIKRLEGQPKANPTVTLFPPSSEELQANKATLVCLISDFYPGAVTVAWKADGSPVKAGVETTKPSKQSNNKYAASSYLSLTPEQWKSHRSYSCQVTHEGSTVEKTVAPTECSPIKTDVITMDPKDNCSKDANDTLLLQLTNTSAYYMYLLLLLKSVVYFAIITCCLLRRTAFCCNGEKSRAKRSGSGATNFSLLKQAGDVEENPGPTSMDWIWRILFLVGAATGAHSQLQLQESGPGLVKPSETLSLTCTVSGGSISSGDYYWGWIRQPPGKGLEWIGHIYYSGATYYNPSLKSRVTISVDTSRNQFSLKLSSVTAADTAVYYCTRDDSSNWRSRGQGTLVTVSSSGGGGSGGGGSQVQLQESGGGLAQAGGSLRLSCAASGRTFSMGWFRQAPGKEREFVAAITYSGGSPYYASSVRGRFTISRDNAKNTVYLQMNSLKPEDTAVYYCAANPTYGSDWNAENWGQGTQVTVSSGSGGGGSGGGGSGGGGSFEQVQLQQPGAELVKPGASVKMSCKASGYAFSSYWINWMKQKPGQGLEWIGQIYPGDGDTNYNGKFKGRATLTADTSSSTAYMQLSSLTSEDSAVYFCARSITTVVGCAMDYWGQGTSVTVSSTRASTKGPSVFPLAPSSKSTSGGTAALGCLVKDYFPEPVTVSWNSGALTSGVHTFPAVLQSSGLYSLSSVVTVPSSSLGTQTYICNVNHKPSNTKVDKRVEPKSCEVKTDSTDHVKPKETENTKQPSKSCHKPKAIVHTEKVNMMSLTVLGLRMLFAKTVAVNFLLTAKLFFL

SEQ ID NO: 16392 - protein, 1164 aa, Artificial Sequence
  Synthetic Polypeptide
MALPVTALLLPLALLLHAARPEVQLLESGGGLVQPGGSLRLSCAASGFTFSSYAMSWVRQAPGKGLEWVSSISGSGDYIYYADSVKGRFTISRDISKNTLYLQMNSLRAEDTAVYYCAKEGTGANSSLADYRGQGTLVTVSSGGGSGGGSEVQLVESGGGSVQAGGSLRLSCTTSGRALNMYVMGWFRQAPGNEREFVAATSSSGGSTSYPDSVKGRFTISRDNAKNTVYLQMNSLKPEDTAAYRCAASPYVSTPTMNILEEYRYWGLGTQVTVSSGTGGGGSGGGGSGGGGSEFDIQMTQSPSSLSASVGDRVTITCKASDHINNWLAWYQQKPGQAPKLLIYGATTLETGVPSRFSGSGSGTDYTLTISSLQPEDFATYYCQQSWNTPWTFGQGTKLEIKRLEGQPKANPTVTLFPPSSEELQANKATLVCLISDFYPGAVTVAWKADGSPVKAGVETTKPSKQSNNKYAASSYLSLTPEQWKSHRSYSCQVTHEGSTVEKTVAPTECSGRADCGITSASYHQGVLSATILYEILLGKATLYAVLVSALVLMAMVKRKDSRGRAKRSGSGATNFSLLKQAGDVEENPGPTSMDWIWRILFLVGAATGAHSQLQLQESGPGLVKPSETLSLTCTVSGGSISSGDYYWGWIRQPPGKGLEWIGHIYYSGATYYNPSLKSRVTISVDTSRNQFSLKLSSVTAADTAVYYCTRDDSSNWRSRGQGTLVTVSSSGGGGSGGGGSQVQLQESGGGLAQAGGSLRLSCAASGRTFSMGWFRQAPGKEREFVAAITYSGGSPYYASSVRGRFTISRDNAKNTVYLQMNSLKPEDTAVYYCAANPTYGSDWNAENWGQGTQVTVSSGSGGGGSGGGGSGGGGSFEQVQLQQPGAELVKPGASVKMSCKASGYAFSSYWINWMKQKPGQGLEWIGQIYPGDGDTNYNGKFKGRATLTADTSSSTAYMQLSSLTSEDSAVYFCARSITTVVGCAMDYWGQGTSVTVSSTRASTKGPSVFPLAPSSKSTSGGTAALGCLVKDYFPEPVTVSWNSGALTSGVHTFPAVLQSSGLYSLSSVVTVPSSSLGTQTYICNVNHKPSNTKVDKRVEPKSCIPEDTFFPSSDVPCDVKLVEKSFETDTNLNFQNLSVIGFRILLLKVAGFNLLMTLRLWSS

SEQ ID NO: 16393 - protein, 1164 aa, Artificial Sequence
  Synthetic Polypeptide
MALPVTALLLPLALLLHAARPEVQLLESGGGLVQPGGSLRLSCAASGFTFSSYAMSWVRQAPGKGLEWVSSISGSGDYIYYADSVKGRFTISRDISKNTLYLQMNSLRAEDTAVYYCAKEGTGANSSLADYRGQGTLVTVSSGGGSGGGSEVQLVESGGGSVQAGGSLRLSCTTSGRALNMYVMGWFRQAPGNEREFVAATSSSGGSTSYPDSVKGRFTISRDNAKNTVYLQMNSLKPEDTAAYRCAASPYVSTPTMNILEEYRYWGLGTQVTVSSGTGGGGSGGGGSGGGGSEFDIQMTQSPSSLSASVGDRVTITCKASDHINNWLAWYQQKPGQAPKLLIYGATTLETGVPSRFSGSGSGTDYTLTISSLQPEDFATYYCQQSWNTPWTFGQGTKLEIKRLEGQPKANPTVTLFPPSSEELQANKATLVCLISDFYPGAVTVAWKADGSPVKAGVETTKPSKQSNNKYAASSYLSLTPEQWKSHRSYSCQVTHEGSTVEKTVAPTECSGRADCGFTSESYQQGVLSATILYEILLGKATLYAVLVSALVLMAMVKRKDSRGRAKRSGSGATNFSLLKQAGDVEENPGPTSMDWIWRILFLVGAATGAHSQLQLQESGPGLVKPSETLSLTCTVSGGSISSGDYYWGWIRQPPGKGLEWIGHIYYSGATYYNPSLKSRVTISVDTSRNQFSLKLSSVTAADTAVYYCTRDDSSNWRSRGQGTLVTVSSSGGGGSGGGGSQVQLQESGGGLAQAGGSLRLSCAASGRTFSMGWFRQAPGKEREFVAAITYSGGSPYYASSVRGRFTISRDNAKNTVYLQMNSLKPEDTAVYYCAANPTYGSDWNAENWGQGTQVTVSSGSGGGGSGGGGSGGGGSFEQVQLQQPGAELVKPGASVKMSCKASGYAFSSYWINWMKQKPGQGLEWIGQIYPGDGDTNYNGKFKGRATLTADTSSSTAYMQLSSLTSEDSAVYFCARSITTVVGCAMDYWGQGTSVTVSSTRASTKGPSVFPLAPSSKSTSGGTAALGCLVKDYFPEPVTVSWNSGALTSGVHTFPAVLQSSGLYSLSSVVTVPSSSLGTQTYICNVNHKPSNTKVDKRVEPKSCIPEDTFFPSPESSCDVKLVEKSFETDTNLNFQNLSVIGFRILLLKVAGFNLLMTLRLWSS

SEQ ID NO: 16394 - protein, 1130 aa, Artificial Sequence
  Synthetic Polypeptide
MALPVTALLLPLALLLHAARPEVQLLESGGGLVQPGGSLRLSCAASGFTFSSYAMSWVRQAPGKGLEWVSSISGSGDYIYYADSVKGRFTISRDISKNTLYLQMNSLRAEDTAVYYCAKEGTGANSSLADYRGQGTLVTVSSGGGSGGGSEVQLVESGGGSVQAGGSLRLSCTTSGRALNMYVMGWFRQAPGNEREFVAATSSSGGSTSYPDSVKGRFTISRDNAKNTVYLQMNSLKPEDTAAYRCAASPYVSTPTMNILEEYRYWGLGTQVTVSSLEGQPKANPTVTLFPPSSEELQANKATLVCLISDFYPGAVTVAWKADGSPVKAGVETTKPSKQSNNKYAASSYLSLTPEQWKSHRSYSCQVTHEGSTVEKTVAPTECSGRADCGFTSESYQQGVLSATILYEILLGKATLYAVLVSALVLMAMVKRKDSRGRAKRSGSGATNFSLLKQAGDVEENPGPTSMDWIWRILFLVGAATGAHSQLQLQESGPGLVKPSETLSLTCTVSGGSISSGDYYWGWIRQPPGKGLEWIGHIYYSGATYYNPSLKSRVTISVDTSRNQFSLKLSSVTAADTAVYYCTRDDSSNWRSRGQGTLVTVSSSGGGGSGGGGSQVQLQESGGGLAQAGGSLRLSCAASGRTFSMGWFRQAPGKEREFVAAITYSGGSPYYASSVRGRFTISRDNAKNTVYLQMNSLKPEDTAVYYCAANPTYGSDWNAENWGQGTQVTVSSTRASTKGPSVFPLAPSSKSTSGGTAALGCLVKDYFPEPVTVSWNSGALTSGVHTFPAVLQSSGLYSLSSVVTVPSSSLGTQTYICNVNHKPSNTKVDKRVEPKSCIPEDTFFPSPESSCDVKLVEKSFETDTNLNFQNLSVIGFRILLLKVAGFNLLMTLRLWSSRAKRSGSGVKQTLNFDLLKLAGDVESNPGPSRGHMTEYKPTVRLATRDDVPRAVRTLAAAFADYPATRHTVDPDRHIERVTELQELFLTRVGLDIGKVWVADDGAAVAVWTTPESVEAGAVFAEIGPRMAELSGSRLAAQQQMEGLLAPHRPKEPAWFLATVGVSPDHQGKGLGSAVVLPGVEAAERAGVPAFLETSAPRNLPFYERLGFTVTADVEVPEGPRTWCMTRKPGA

SEQ ID NO: 16395 - protein, 897 aa, Artificial Sequence
  Synthetic Polypeptide
MALPVTALLLPLALLLHAARPEVQLLESGGGLVQPGGSLRLSCAASGFTFSSYAMSWVRQAPGKGLEWVSSISGSGDYIYYADSVKGRFTISRDISKNTLYLQMNSLRAEDTAVYYCAKEGTGANSSLADYRGQGTLVTVSSGGGSGGGSEVQLVESGGGSVQAGGSLRLSCTTSGRALNMYVMGWFRQAPGNEREFVAATSSSGGSTSYPDSVKGRFTISRDNAKNTVYLQMNSLKPEDTAAYRCAASPYVSTPTMNILEEYRYWGLGTQVTVSSLEGQPKANPTVTLFPPSSEELQANKATLVCLISDFYPGAVTVAWKADGSPVKAGVETTKPSKQSNNKYAASSYLSLTPEQWKSHRSYSCQVTHEGSTVEKTVAPTECSGRADCGFTSESYQQGVLSATILYEILLGKATLYAVLVSALVLMAMVKRKDSRGRAKRSGSGATNFSLLKQAGDVEENPGPTSMDWIWRILFLVGAATGAHSQLQLQESGPGLVKPSETLSLTCTVSGGSISSGDYYWGWIRQPPGKGLEWIGHIYYSGATYYNPSLKSRVTISVDTSRNQFSLKLSSVTAADTAVYYCTRDDSSNWRSRGQGTLVTVSSSGGGGSGGGGSQVQLQESGGGLAQAGGSLRLSCAASGRTFSMGWFRQAPGKEREFVAAITYSGGSPYYASSVRGRFTISRDNAKNTVYLQMNSLKPEDTAVYYCAANPTYGSDWNAENWGQGTQVTVSSTRASTKGPSVFPLAPSSKSTSGGTAALGCLVKDYFPEPVTVSWNSGALTSGVHTFPAVLQSSGLYSLSSVVTVPSSSLGTQTYICNVNHKPSNTKVDKRVEPKSCIPEDTFFPSPESSCDVKLVEKSFETDTNLNFQNLSVIGFRILLLKVAGFNLLMTLRLWSS

SEQ ID NO: 16396 - protein, 925 aa, Artificial Sequence
  Synthetic Polypeptide
MALPVTALLLPLALLLHAARPEVQLLESGGGLVQPGGSLRLSCAASGFTFSSYAMSWVRQAPGKGLEWVSSISGSGDYIYYADSVKGRFTISRDISKNTLYLQMNSLRAEDTAVYYCAKEGTGANSSLADYRGQGTLVTVSSGGGSGGGSEVQLVESGGGSVQAGGSLRLSCTTSGRALNMYVMGWFRQAPGNEREFVAATSSSGGSTSYPDSVKGRFTISRDNAKNTVYLQMNSLKPEDTAAYRCAASPYVSTPTMNILEEYRYWGLGTQVTVSSLEGSGRADCGFTSESYQQGVLSATILYEILLGKATLYAVLVSALVLMAMVKRKDSRGRAKRSGSGATNFSLLKQAGDVEENPGPTSMDWIWRILFLVGAATGAHSQLQLQESGPGLVKPSETLSLTCTVSGGSISSGDYYWGWIRQPPGKGLEWIGHIYYSGATYYNPSLKSRVTISVDTSRNQFSLKLSSVTAADTAVYYCTRDDSSNWRSRGQGTLVTVSSSGGGGSGGGGSQVQLQESGGGLAQAGGSLRLSCAASGRTFSMGWFRQAPGKEREFVAAITYSGGSPYYASSVRGRFTISRDNAKNTVYLQMNSLKPEDTAVYYCAANPTYGSDWNAENWGQGTQVTVSSTRGSIPEDTFFPSPESSCDVKLVEKSFETDTNLNFQNLSVIGFRILLLKVAGFNLLMTLRLWSSRAKRSGSGVKQTLNFDLLKLAGDVESNPGPSRGHMTEYKPTVRLATRDDVPRAVRTLAAAFADYPATRHTVDPDRHIERVTELQELFLTRVGLDIGKVWVADDGAAVAVWTTPESVEAGAVFAEIGPRMAELSGSRLAAQQQMEGLLAPHRPKEPAWFLATVGVSPDHQGKGLGSAVVLPGVEAAERAGVPAFLETSAPRNLPFYERLGFTVTADVEVPEGPRTWCMTRKPGA

SEQ ID NO: 16397 - protein, 692 aa, Artificial Sequence
  Synthetic Polypeptide
MALPVTALLLPLALLLHAARPEVQLLESGGGLVQPGGSLRLSCAASGFTFSSYAMSWVRQAPGKGLEWVSSISGSGDYIYYADSVKGRFTISRDISKNTLYLQMNSLRAEDTAVYYCAKEGTGANSSLADYRGQGTLVTVSSGGGSGGGSEVQLVESGGGSVQAGGSLRLSCTTSGRALNMYVMGWFRQAPGNEREFVAATSSSGGSTSYPDSVKGRFTISRDNAKNTVYLQMNSLKPEDTAAYRCAASPYVSTPTMNILEEYRYWGLGTQVTVSSLEGSGRADCGFTSESYQQGVLSATILYEILLGKATLYAVLVSALVLMAMVKRKDSRGRAKRSGSGATNFSLLKQAGDVEENPGPTSMDWIWRILFLVGAATGAHSQLQLQESGPGLVKPSETLSLTCTVSGGSISSGDYYWGWIRQPPGKGLEWIGHIYYSGATYYNPSLKSRVTISVDTSRNQFSLKLSSVTAADTAVYYCTRDDSSNWRSRGQGTLVTVSSSGGGGSGGGGSQVQLQESGGGLAQAGGSLRLSCAASGRTFSMGWFRQAPGKEREFVAAITYSGGSPYYASSVRGRFTISRDNAKNTVYLQMNSLKPEDTAVYYCAANPTYGSDWNAENWGQGTQVTVSSTRGSIPEDTFFPSPESSCDVKLVEKSFETDTNLNFQNLSVIGFRILLLKVAGFNLLMTLRLWSS

SEQ ID NO: 16398 - protein, 934 aa, Artificial Sequence
  Synthetic Polypeptide
MALPVTALLLPLALLLHAARPEVQLLESGGGLVQPGGSLRLSCAASGFTFSSYAMSWVRQAPGKGLEWVSSISGSGDYIYYADSVKGRFTISRDISKNTLYLQMNSLRAEDTAVYYCAKEGTGANSSLADYRGQGTLVTVSSGGGSGGGSEVQLVESGGGSVQAGGSLRLSCTTSGRALNMYVMGWFRQAPGNEREFVAATSSSGGSTSYPDSVKGRFTISRDNAKNTVYLQMNSLKPEDTAAYRCAASPYVSTPTMNILEEYRYWGLGTQVTVSSLEDKTHTCPPCPAGRADCGFTSESYQQGVLSATILYEILLGKATLYAVLVSALVLMAMVKRKDSRGRAKRSGSGATNFSLLKQAGDVEENPGPTSMDWIWRILFLVGAATGAHSQLQLQESGPGLVKPSETLSLTCTVSGGSISSGDYYWGWIRQPPGKGLEWIGHIYYSGATYYNPSLKSRVTISVDTSRNQFSLKLSSVTAADTAVYYCTRDDSSNWRSRGQGTLVTVSSSGGGGSGGGGSQVQLQESGGGLAQAGGSLRLSCAASGRTFSMGWFRQAPGKEREFVAAITYSGGSPYYASSVRGRFTISRDNAKNTVYLQMNSLKPEDTAVYYCAANPTYGSDWNAENWGQGTQVTVSSTRGSIPEDTFFPSPESSCDVKLVEKSFETDTNLNFQNLSVIGFRILLLKVAGFNLLMTLRLWSSRAKRSGSGVKQTLNFDLLKLAGDVESNPGPSRGHMTEYKPTVRLATRDDVPRAVRTLAAAFADYPATRHTVDPDRHIERVTELQELFLTRVGLDIGKVWVADDGAAVAVWTTPESVEAGAVFAEIGPRMAELSGSRLAAQQQMEGLLAPHRPKEPAWFLATVGVSPDHQGKGLGSAVVLPGVEAAERAGVPAFLETSAPRNLPFYERLGFTVTADVEVPEGPRTWCMTRKPGA

SEQ ID NO: 16399 - protein, 934 aa, Artificial Sequence
  Synthetic Polypeptide
MALPVTALLLPLALLLHAARPEVQLLESGGGLVQPGGSLRLSCAASGFTFSSYAMSWVRQAPGKGLEWVSSISGSGDYIYYADSVKGRFTISRDISKNTLYLQMNSLRAEDTAVYYCAKEGTGANSSLADYRGQGTLVTVSSGGGSGGGSEVQLVESGGGSVQAGGSLRLSCTTSGRALNMYVMGWFRQAPGNEREFVAATSSSGGSTSYPDSVKGRFTISRDNAKNTVYLQMNSLKPEDTAAYRCAASPYVSTPTMNILEEYRYWGLGTQVTVSSLEGSGRADCGFTSESYQQGVLSATILYEILLGKATLYAVLVSALVLMAMVKRKDSRGRAKRSGSGATNFSLLKQAGDVEENPGPTSMDWIWRILFLVGAATGAHSQLQLQESGPGLVKPSETLSLTCTVSGGSISSGDYYWGWIRQPPGKGLEWIGHIYYSGATYYNPSLKSRVTISVDTSRNQFSLKLSSVTAADTAVYYCTRDDSSNWRSRGQGTLVTVSSSGGGGSGGGGSQVQLQESGGGLAQAGGSLRLSCAASGRTFSMGWFRQAPGKEREFVAAITYSGGSPYYASSVRGRFTISRDNAKNTVYLQMNSLKPEDTAVYYCAANPTYGSDWNAENWGQGTQVTVSSTRDKTHTCPPCPAIPEDTFFPSPESSCDVKLVEKSFETDTNLNFQNLSVIGFRILLLKVAGFNLLMTLRLWSSRAKRSGSGVKQTLNFDLLKLAGDVESNPGPSRGHMTEYKPTVRLATRDDVPRAVRTLAAAFADYPATRHTVDPDRHIERVTELQELFLTRVGLDIGKVWVADDGAAVAVWTTPESVEAGAVFAEIGPRMAELSGSRLAAQQQMEGLLAPHRPKEPAWFLATVGVSPDHQGKGLGSAVVLPGVEAAERAGVPAFLETSAPRNLPFYERLGFTVTADVEVPEGPRTWCMTRKPGA

SEQ ID NO: 16400 - protein, 943 aa, Artificial Sequence
  Synthetic Polypeptide
MALPVTALLLPLALLLHAARPEVQLLESGGGLVQPGGSLRLSCAASGFTFSSYAMSWVRQAPGKGLEWVSSISGSGDYIYYADSVKGRFTISRDISKNTLYLQMNSLRAEDTAVYYCAKEGTGANSSLADYRGQGTLVTVSSGGGSGGGSEVQLVESGGGSVQAGGSLRLSCTTSGRALNMYVMGWFRQAPGNEREFVAATSSSGGSTSYPDSVKGRFTISRDNAKNTVYLQMNSLKPEDTAAYRCAASPYVSTPTMNILEEYRYWGLGTQVTVSSLEDKTHTCPPCPAGRADCGFTSESYQQGVLSATILYEILLGKATLYAVLVSALVLMAMVKRKDSRGRAKRSGSGATNFSLLKQAGDVEENPGPTSMDWIWRILFLVGAATGAHSQLQLQESGPGLVKPSETLSLTCTVSGGSISSGDYYWGWIRQPPGKGLEWIGHIYYSGATYYNPSLKSRVTISVDTSRNQFSLKLSSVTAADTAVYYCTRDDSSNWRSRGQGTLVTVSSSGGGGSGGGGSQVQLQESGGGLAQAGGSLRLSCAASGRTFSMGWFRQAPGKEREFVAAITYSGGSPYYASSVRGRFTISRDNAKNTVYLQMNSLKPEDTAVYYCAANPTYGSDWNAENWGQGTQVTVSSTRDKTHTCPPCPAIPEDTFFPSPESSCDVKLVEKSFETDTNLNFQNLSVIGFRILLLKVAGFNLLMTLRLWSSRAKRSGSGVKQTLNFDLLKLAGDVESNPGPSRGHMTEYKPTVRLATRDDVPRAVRTLAAAFADYPATRHTVDPDRHIERVTELQELFLTRVGLDIGKVWVADDGAAVAVWTTPESVEAGAVFAEIGPRMAELSGSRLAAQQQMEGLLAPHRPKEPAWFLATVGVSPDHQGKGLGSAVVLPGVEAAERAGVPAFLETSAPRNLPFYERLGFTVTADVEVPEGPRTWCMTRKPGA

SEQ ID NO: 16401 - protein, 710 aa, Artificial Sequence
  Synthetic Polypeptide
MALPVTALLLPLALLLHAARPEVQLLESGGGLVQPGGSLRLSCAASGFTFSSYAMSWVRQAPGKGLEWVSSISGSGDYIYYADSVKGRFTISRDISKNTLYLQMNSLRAEDTAVYYCAKEGTGANSSLADYRGQGTLVTVSSGGGSGGGSEVQLVESGGGSVQAGGSLRLSCTTSGRALNMYVMGWFRQAPGNEREFVAATSSSGGSTSYPDSVKGRFTISRDNAKNTVYLQMNSLKPEDTAAYRCAASPYVSTPTMNILEEYRYWGLGTQVTVSSLEDKTHTCPPCPAGRADCGFTSESYQQGVLSATILYEILLGKATLYAVLVSALVLMAMVKRKDSRGRAKRSGSGATNFSLLKQAGDVEENPGPTSMDWIWRILFLVGAATGAHSQLQLQESGPGLVKPSETLSLTCTVSGGSISSGDYYWGWIRQPPGKGLEWIGHIYYSGATYYNPSLKSRVTISVDTSRNQFSLKLSSVTAADTAVYYCTRDDSSNWRSRGQGTLVTVSSSGGGGSGGGGSQVQLQESGGGLAQAGGSLRLSCAASGRTFSMGWFRQAPGKEREFVAAITYSGGSPYYASSVRGRFTISRDNAKNTVYLQMNSLKPEDTAVYYCAANPTYGSDWNAENWGQGTQVTVSSTRDKTHTCPPCPAIPEDTFFPSPESSCDVKLVEKSFETDTNLNFQNLSVIGFRILLLKVAGFNLLMTLRLWSS

SEQ ID NO: 16402 - protein, 701 aa, Artificial Sequence
  Synthetic Polypeptide
MALPVTALLLPLALLLHAARPEVQLLESGGGLVQPGGSLRLSCAASGFTFSSYAMSWVRQAPGKGLEWVSSISGSGDYIYYADSVKGRFTISRDISKNTLYLQMNSLRAEDTAVYYCAKEGTGANSSLADYRGQGTLVTVSSGGGSGGGSEVQLVESGGGSVQAGGSLRLSCTTSGRALNMYVMGWFRQAPGNEREFVAATSSSGGSTSYPDSVKGRFTISRDNAKNTVYLQMNSLKPEDTAAYRCAASPYVSTPTMNILEEYRYWGLGTQVTVSSLEGSGRADCGFTSESYQQGVLSATILYEILLGKATLYAVLVSALVLMAMVKRKDSRGRAKRSGSGATNFSLLKQAGDVEENPGPTSMDWIWRILFLVGAATGAHSQLQLQESGPGLVKPSETLSLTCTVSGGSISSGDYYWGWIRQPPGKGLEWIGHIYYSGATYYNPSLKSRVTISVDTSRNQFSLKLSSVTAADTAVYYCTRDDSSNWRSRGQGTLVTVSSSGGGGSGGGGSQVQLQESGGGLAQAGGSLRLSCAASGRTFSMGWFRQAPGKEREFVAAITYSGGSPYYASSVRGRFTISRDNAKNTVYLQMNSLKPEDTAVYYCAANPTYGSDWNAENWGQGTQVTVSSTRDKTHTCPPCPAIPEDTFFPSPESSCDVKLVEKSFETDTNLNFQNLSVIGFRILLLKVAGFNLLMTLRLWSS

SEQ ID NO: 16403 - protein, 1152 aa, Artificial Sequence
  Synthetic Polypeptide
MALPVTALLLPLALLLHAARPEVQLLESGGGLVQPGGSLRLSCAASGFTFSSYAMSWVRQAPGKGLEWVSSISGSGDYIYYADSVKGRFTISRDISKNTLYLQMNSLRAEDTAVYYCAKEGTGANSSLADYRGQGTLVTVSSGGGSGGGSEVQLVESGGGSVQAGGSLRLSCTTSGRALNMYVMGWFRQAPGNEREFVAATSSSGGSTSYPDSVKGRFTISRDNAKNTVYLQMNSLKPEDTAAYRCAASPYVSTPTMNILEEYRYWGLGTQVTVSSLEGQPKANPTVTLFPPSSEELQANKATLVCLISDFYPGAVTVAWKADGSPVKAGVETTKPSKQSNNKYAASSYLSLTPEQWKSHRSYSCQVTHEGSTVEKTVAPTECSPIKTDVITMDPKDNCSKDANDTLLLQLTNTSAYYMYLLLLLKSVVYFAIITCCLLRRTAFCCNGEKSRAKRSGSGATNFSLLKQAGDVEENPGPTSMDWIWRILFLVGAATGAHSQLQLQESGPGLVKPSETLSLTCTVSGGSISSGDYYWGWIRQPPGKGLEWIGHIYYSGATYYNPSLKSRVTISVDTSRNQFSLKLSSVTAADTAVYYCTRDDSSNWRSRGQGTLVTVSSSGGGGSGGGGSQVQLQESGGGLAQAGGSLRLSCAASGRTFSMGWFRQAPGKEREFVAAITYSGGSPYYASSVRGRFTISRDNAKNTVYLQMNSLKPEDTAVYYCAANPTYGSDWNAENWGQGTQVTVSSTRASTKGPSVFPLAPSSKSTSGGTAALGCLVKDYFPEPVTVSWNSGALTSGVHTFPAVLQSSGLYSLSSVVTVPSSSLGTQTYICNVNHKPSNTKVDKRVEPKSCEVKTDSTDHVKPKETENTKQPSKSCHKPKAIVHTEKVNMMSLTVLGLRMLFAKTVAVNFLLTAKLFFLRAKRSGSGVKQTLNFDLLKLAGDVESNPGPSRGHMTEYKPTVRLATRDDVPRAVRTLAAAFADYPATRHTVDPDRHIERVTELQELFLTRVGLDIGKVWVADDGAAVAVWTTPESVEAGAVFAEIGPRMAELSGSRLAAQQQMEGLLAPHRPKEPAWFLATVGVSPDHQGKGLGSAVVLPGVEAAERAGVPAFLETSAPRNLPFYERLGFTVTADVEVPEGPRTWCMTRKPGA

SEQ ID NO: 16404 - protein, 919 aa, Artificial Sequence
  Synthetic Polypeptide
MALPVTALLLPLALLLHAARPEVQLLESGGGLVQPGGSLRLSCAASGFTFSSYAMSWVRQAPGKGLEWVSSISGSGDYIYYADSVKGRFTISRDISKNTLYLQMNSLRAEDTAVYYCAKEGTGANSSLADYRGQGTLVTVSSGGGSGGGSEVQLVESGGGSVQAGGSLRLSCTTSGRALNMYVMGWFRQAPGNEREFVAATSSSGGSTSYPDSVKGRFTISRDNAKNTVYLQMNSLKPEDTAAYRCAASPYVSTPTMNILEEYRYWGLGTQVTVSSLEGQPKANPTVTLFPPSSEELQANKATLVCLISDFYPGAVTVAWKADGSPVKAGVETTKPSKQSNNKYAASSYLSLTPEQWKSHRSYSCQVTHEGSTVEKTVAPTECSPIKTDVITMDPKDNCSKDANDTLLLQLTNTSAYYMYLLLLLKSVVYFAIITCCLLRRTAFCCNGEKSRAKRSGSGATNFSLLKQAGDVEENPGPTSMDWIWRILFLVGAATGAHSQLQLQESGPGLVKPSETLSLTCTVSGGSISSGDYYWGWIRQPPGKGLEWIGHIYYSGATYYNPSLKSRVTISVDTSRNQFSLKLSSVTAADTAVYYCTRDDSSNWRSRGQGTLVTVSSSGGGGSGGGGSQVQLQESGGGLAQAGGSLRLSCAASGRTFSMGWFRQAPGKEREFVAAITYSGGSPYYASSVRGRFTISRDNAKNTVYLQMNSLKPEDTAVYYCAANPTYGSDWNAENWGQGTQVTVSSTRASTKGPSVFPLAPSSKSTSGGTAALGCLVKDYFPEPVTVSWNSGALTSGVHTFPAVLQSSGLYSLSSVVTVPSSSLGTQTYICNVNHKPSNTKVDKRVEPKSCEVKTDSTDHVKPKETENTKQPSKSCHKPKAIVHTEKVNMMSLTVLGLRMLFAKTVAVNFLLTAKLFFL

SEQ ID NO: 16405 - protein, 947 aa, Artificial Sequence
  Synthetic Polypeptide
MALPVTALLLPLALLLHAARPEVQLLESGGGLVQPGGSLRLSCAASGFTFSSYAMSWVRQAPGKGLEWVSSISGSGDYIYYADSVKGRFTISRDISKNTLYLQMNSLRAEDTAVYYCAKEGTGANSSLADYRGQGTLVTVSSGGGSGGGSEVQLVESGGGSVQAGGSLRLSCTTSGRALNMYVMGWFRQAPGNEREFVAATSSSGGSTSYPDSVKGRFTISRDNAKNTVYLQMNSLKPEDTAAYRCAASPYVSTPTMNILEEYRYWGLGTQVTVSSLEGSPIKTDVITMDPKDNCSKDANDTLLLQLTNTSAYYMYLLLLLKSVVYFAIITCCLLRRTAFCCNGEKSRAKRSGSGATNFSLLKQAGDVEENPGPTSMDWIWRILFLVGAATGAHSQLQLQESGPGLVKPSETLSLTCTVSGGSISSGDYYWGWIRQPPGKGLEWIGHIYYSGATYYNPSLKSRVTISVDTSRNQFSLKLSSVTAADTAVYYCTRDDSSNWRSRGQGTLVTVSSSGGGGSGGGGSQVQLQESGGGLAQAGGSLRLSCAASGRTFSMGWFRQAPGKEREFVAAITYSGGSPYYASSVRGRFTISRDNAKNTVYLQMNSLKPEDTAVYYCAANPTYGSDWNAENWGQGTQVTVSSTRGSEVKTDSTDHVKPKETENTKQPSKSCHKPKAIVHTEKVNMMSLTVLGLRMLFAKTVAVNFLLTAKLFFLRAKRSGSGVKQTLNFDLLKLAGDVESNPGPSRGHMTEYKPTVRLATRDDVPRAVRTLAAAFADYPATRHTVDPDRHIERVTELQELFLTRVGLDIGKVWVADDGAAVAVWTTPESVEAGAVFAEIGPRMAELSGSRLAAQQQMEGLLAPHRPKEPAWFLATVGVSPDHQGKGLGSAVVLPGVEAAERAGVPAFLETSAPRNLPFYERLGFTVTADVEVPEGPRTWCMTRKPGA

SEQ ID NO: 16406 - protein, 714 aa, Artificial Sequence
  Synthetic Polypeptide
MALPVTALLLPLALLLHAARPEVQLLESGGGLVQPGGSLRLSCAASGFTFSSYAMSWVRQAPGKGLEWVSSISGSGDYIYYADSVKGRFTISRDISKNTLYLQMNSLRAEDTAVYYCAKEGTGANSSLADYRGQGTLVTVSSGGGSGGGSEVQLVESGGGSVQAGGSLRLSCTTSGRALNMYVMGWFRQAPGNEREFVAATSSSGGSTSYPDSVKGRFTISRDNAKNTVYLQMNSLKPEDTAAYRCAASPYVSTPTMNILEEYRYWGLGTQVTVSSLEGSPIKTDVITMDPKDNCSKDANDTLLLQLTNTSAYYMYLLLLLKSVVYFAIITCCLLRRTAFCCNGEKSRAKRSGSGATNFSLLKQAGDVEENPGPTSMDWIWRILFLVGAATGAHSQLQLQESGPGLVKPSETLSLTCTVSGGSISSGDYYWGWIRQPPGKGLEWIGHIYYSGATYYNPSLKSRVTISVDTSRNQFSLKLSSVTAADTAVYYCTRDDSSNWRSRGQGTLVTVSSSGGGGSGGGGSQVQLQESGGGLAQAGGSLRLSCAASGRTFSMGWFRQAPGKEREFVAAITYSGGSPYYASSVRGRFTISRDNAKNTVYLQMNSLKPEDTAVYYCAANPTYGSDWNAENWGQGTQVTVSSTRGSEVKTDSTDHVKPKETENTKQPSKSCHKPKAIVHTEKVNMMSLTVLGLRMLFAKTVAVNFLLTAKLFFL

SEQ ID NO: 16407 - protein, 732 aa, Artificial Sequence
  Synthetic Polypeptide
MALPVTALLLPLALLLHAARPEVQLLESGGGLVQPGGSLRLSCAASGFTFSSYAMSWVRQAPGKGLEWVSSISGSGDYIYYADSVKGRFTISRDISKNTLYLQMNSLRAEDTAVYYCAKEGTGANSSLADYRGQGTLVTVSSGGGSGGGSEVQLVESGGGSVQAGGSLRLSCTTSGRALNMYVMGWFRQAPGNEREFVAATSSSGGSTSYPDSVKGRFTISRDNAKNTVYLQMNSLKPEDTAAYRCAASPYVSTPTMNILEEYRYWGLGTQVTVSSLEDKTHTCPPCPAPIKTDVITMDPKDNCSKDANDTLLLQLTNTSAYYMYLLLLLKSVVYFAIITCCLLRRTAFCCNGEKSRAKRSGSGATNFSLLKQAGDVEENPGPTSMDWIWRILFLVGAATGAHSQLQLQESGPGLVKPSETLSLTCTVSGGSISSGDYYWGWIRQPPGKGLEWIGHIYYSGATYYNPSLKSRVTISVDTSRNQFSLKLSSVTAADTAVYYCTRDDSSNWRSRGQGTLVTVSSSGGGGSGGGGSQVQLQESGGGLAQAGGSLRLSCAASGRTFSMGWFRQAPGKEREFVAAITYSGGSPYYASSVRGRFTISRDNAKNTVYLQMNSLKPEDTAVYYCAANPTYGSDWNAENWGQGTQVTVSSTRDKTHTCPPCPAEVKTDSTDHVKPKETENTKQPSKSCHKPKAIVHTEKVNMMSLTVLGLRMLFAKTVAVNFLLTAKLFFL

SEQ ID NO: 16408 - protein, 431 aa, Artificial Sequence; identical to SEQ ID NO: 15912
  Synthetic Polypeptide

SEQ ID NO: 16409 - protein, 439 aa, Artificial Sequence; identical to SEQ ID NO: 15913
  Synthetic Polypeptide

SEQ ID NO: 16410 - protein, 640 aa, Artificial Sequence
  Synthetic Polypeptide
MALPVTALLLPLALLLHAARPEVQLVESGGSLVQPGGSLRLSCAASGFTFDDYAMSWVRQVPGKGLEWVSSINWSGTHTDYADSVKGRFTISRNNANNTLYLQMNSLKSEDTAVYYCAKNWRDAGTTWFEKSGSAGQGTQVTVSSGTGGGGSGGGGSGGGGSEFDIQMTQSPSSLSASVGDRVTITCKASDHINNWLAWYQQKPGQAPKLLIYGATTLETGVPSRFSGSGSGTDYTLTISSLQPEDFATYYCQQSWNTPWTFGQGTKLEIKRGGGGSGGGGSGGGGSQVQLQQPGAELVKPGASVKMSCKASGYAFSSYWINWMKQKPGQGLEWIGQIYPGDGDTNYNGKFKGRATLTADTSSSTAYMQLSSLTSEDSAVYFCARSITTVVGCAMDYWGQGTSVTVSSTREQKLISEEDLKIEVMYPPPYLDNEKSNGTIIHVKGKHLCPSPLFPGPSKPFWVLVVVGGVLACYSLLVTVAFIIFWVRSKRSRLLHSDYMNMTPRRPGPTRKHYQPYAPPRDFAAYRSRVKFSRSADAPAYQQGQNQLYNELNLGRREEYDVLDKRRGRDPEMGGKPRRKNPQEGLYNELQKDKMAEAYSEIGMKGERRRGKGHDGLYQGLSTATKDTYDALHMQALPPR

SEQ ID NO: 16411 - protein, 646 aa, Artificial Sequence
  Synthetic Polypeptide
MALPVTALLLPLALLLHAARPEVQLVESGGSLVQPGGSLRLSCAASGFTFDDYAMSWVRQVPGKGLEWVSSINWSGTHTDYADSVKGRFTISRNNANNTLYLQMNSLKSEDTAVYYCAKNWRDAGTTWFEKSGSAGQGTQVTVSSGTGGGGSGGGGSGGGGSEFDIQMTQSPSSLSASVGDRVTITCKASDHINNWLAWYQQKPGQAPKLLIYGATTLETGVPSRFSGSGSGTDYTLTISSLQPEDFATYYCQQSWNTPWTFGQGTKLEIKRGGGGSGGGGSGGGGSQVQLQQPGAELVKPGASVKMSCKASGYAFSSYWINWMKQKPGQGLEWIGQIYPGDGDTNYNGKFKGRATLTADTSSSTAYMQLSSLTSEDSAVYFCARSITTVVGCAMDYWGQGTSVTVSSTREQKLISEEDLAKPTTTPAPRPPTPAPTIASQPLSLRPEACRPAAGGAVHTRGLDFACDIYIWAPLAGTCGVLLLSLVITLYCKRGRKKLLYIFKQPFMRPVQTTQEEDGCSCRFPEEEEGGCELRVKFSRSADAPAYQQGQNQLYNELNLGRREEYDVLDKRRGRDPEMGGKPRRKNPQEGLYNELQKDKMAEAYSEIGMKGERRRGKGHDGLYQGLSTATKDTYDALHMQALPPR

SEQ ID NO: 16412 - protein, 1059 aa, Artificial Sequence
  Synthetic Polypeptide
MALPVTALLLPLALLLHAARPEVQLVESGGSLVQPGGSLRLSCAASGFTFDDYAMSWVRQVPGKGLEWVSSINWSGTHTDYADSVKGRFTISRNNANNTLYLQMNSLKSEDTAVYYCAKNWRDAGTTWFEKSGSAGQGTQVTVSSGTGGGGSGGGGSGGGGSEFDIQMTQSPSSLSASVGDRVTITCKASDHINNWLAWYQQKPGQAPKLLIYGATTLETGVPSRFSGSGSGTDYTLTISSLQPEDFATYYCQQSWNTPWTFGQGTKLEIKRGGGGSGGGGSGGGGSQVQLQQPGAELVKPGASVKMSCKASGYAFSSYWINWMKQKPGQGLEWIGQIYPGDGDTNYNGKFKGRATLTADTSSSTAYMQLSSLTSEDSAVYFCARSITTVVGCAMDYWGQGTSVTVSSTREQKLISEEDLAKPTTTPAPRPPTPAPTIASQPLSLRPEACRPAAGGAVHTRGLDFACDIYIWAPLAGTCGVLLLSLVITLYCGRARVKFSRSADAPAYQQGQNQLYNELNLGRREEYDVLDKRRGRDPEMGGKPRRKNPQEGLYNELQKDKMAEAYSEIGMKGERRRGKGHDGLYQGLSTATKDTYDALHMQALPPRSRGSGATNFSLLKQAGDVEENPGPGIHMATYEVLCEVARKLGTDDREVVLFLLNVFIPQPTLAQLIGALRALKEEGRLTFPLLAECLFRAGRRDLLRDLLHLDPRFLERHLAGTMSYFSPYQLTVLHVDGELCARDIRSLIFLSKDTIGSRSTPQTFLHWVYCMENLDLLGPTDVDALMSMLRSLSRVDLQRQVQTLMGLHLSGPSHSQHYRHTPLETDFYDYKDDDDKTSGSGEGRGSLLTCGDVEENPGPHMTEYKPTVRLATRDDVPRAVRTLAAAFADYPATRHTVDPDRHIERVTELQELFLTRVGLDIGKVWVADDGAAVAVWTTPESVEAGAVFAEIGPRMAELSGSRLAAQQQMEGLLAPHRPKEPAWFLATVGVSPDHQGKGLGSAVVLPGVEAAERAGVPAFLETSAPRNLPFYERLGFTVTADVEVPEGPRTWCMTRKPGA

SEQ ID NO: 16413 - protein, 999 aa, Artificial Sequence
  Synthetic Polypeptide
MALPVTALLLPLALLLHAARPEVQLVESGGSLVQPGGSLRLSCAASGFTFDDYAMSWVRQVPGKGLEWVSSINWSGTHTDYADSVKGRFTISRNNANNTLYLQMNSLKSEDTAVYYCAKNWRDAGTTWFEKSGSAGQGTQVTVSSGTGGGGSGGGGSGGGGSEFDIQMTQSPSSLSASVGDRVTITCKASDHINNWLAWYQQKPGQAPKLLIYGATTLETGVPSRFSGSGSGTDYTLTISSLQPEDFATYYCQQSWNTPWTFGQGTKLEIKRLEIQNPDPAVYQLRDSKSSDKSVCLFTDFDSQTNVSQSKDSDVYITDKCVLDMRSMDFKSNSAVAWSNKSDFACANAFNNSIIPEDTFFPSSDVPCDVKLVEKSFETDTNLNFQNLSVIGFRILLLKVAGFNLLMTLRLWSSRAKRSGSGVKQTLNFDLLKLAGDVESNPGPTSMDWIWRILFLVGAATGAHSFEQVQLQQPGAELVKPGASVKMSCKASGYAFSSYWINWMKQKPGQGLEWIGQIYPGDGDTNYNGKFKGRATLTADTSSSTAYMQLSSLTSEDSAVYFCARSITTVVGCAMDYWGQGTSVTVSSTREDLKNVFPPEVAVFEPSKAEIAHTQKATLVCLATGFYPDHVELSWWVNGKEVHSGVCTDPQPLKEQPALNDSRYCLSSRLRVSATFWQNPRNHFRCQVQFYGLSENDEWTQDRAKPVTQIVSAEAWGRADCGITSASYHQGVLSATILYEILLGKATLYAVLVSALVLMAMVKRKDSRGRAKRSGSGATNFSLLKQAGDVEENPGPSRGHMTEYKPTVRLATRDDVPRAVRTLAAAFADYPATRHTVDPDRHIERVTELQELFLTRVGLDIGKVWVADDGAAVAVWTTPESVEAGAVFAEIGPRMAELSGSRLAAQQQMEGLLAPHRPKEPAWFLATVGVSPDHQGKGLGSAVVLPGVEAAERAGVPAFLETSAPRNLPFYERLGFTVTADVEVPEGPRTWCMTRKPGA

SEQ ID NO: 16414 - protein, 998 aa, Artificial Sequence
  Synthetic Polypeptide
MALPVTALLLPLALLLHAARPEVQLVESGGSLVQPGGSLRLSCAASGFTFDDYAMSWVRQVPGKGLEWVSSINWSGTHTDYADSVKGRFTISRNNANNTLYLQMNSLKSEDTAVYYCAKNWRDAGTTWFEKSGSAGQGTQVTVSSGTGGGGSGGGGSGGGGSEFDIQMTQSPSSLSASVGDRVTITCKASDHINNWLAWYQQKPGQAPKLLIYGATTLETGVPSRFSGSGSGTDYTLTISSLQPEDFATYYCQQSWNTPWTFGQGTKLEIKRLEDLKNVFPPEVAVFEPSKAEIAHTQKATLVCLATGFYPDHVELSWWVNGKEVHSGVCTDPQPLKEQPALNDSRYCLSSRLRVSATFWQNPRNHFRCQVQFYGLSENDEWTQDRAKPVTQIVSAEAWGRADCGITSASYHQGVLSATILYEILLGKATLYAVLVSALVLMAMVKRKDSRGRAKRSGSGATNFSLLKQAGDVEENPGPTSMDWIWRILFLVGAATGAHSFEQVQLQQPGAELVKPGASVKMSCKASGYAFSSYWINWMKQKPGQGLEWIGQIYPGDGDTNYNGKFKGRATLTADTSSSTAYMQLSSLTSEDSAVYFCARSITTVVGCAMDYWGQGTSVTVSSTRIQNPDPAVYQLRDSKSSDKSVCLFTDFDSQTNVSQSKDSDVYITDKCVLDMRSMDFKSNSAVAWSNKSDFACANAFNNSIIPEDTFFPSSDVPCDVKLVEKSFETDTNLNFQNLSVIGFRILLLKVAGFNLLMTLRLWSSRAKRSGSGVKQTLNFDLLKLAGDVESNPGPSRGHMTEYKPTVRLATRDDVPRAVRTLAAAFADYPATRHTVDPDRHIERVTELQELFLTRVGLDIGKVWVADDGAAVAVWTTPESVEAGAVFAEIGPRMAELSGSRLAAQQQMEGLLAPHRPKEPAWFLATVGVSPDHQGKGLGSAVVLPGVEAAERAGVPAFLETSAPRNLPFYERLGFTVTADVEVPEGPRTWCMTRKPGA

SEQ ID NO: 16415 - protein, 765 aa, Artificial Sequence
  Synthetic Polypeptide
MALPVTALLLPLALLLHAARPEVQLVESGGSLVQPGGSLRLSCAASGFTFDDYAMSWVRQVPGKGLEWVSSINWSGTHTDYADSVKGRFTISRNNANNTLYLQMNSLKSEDTAVYYCAKNWRDAGTTWFEKSGSAGQGTQVTVSSGTGGGGSGGGGSGGGGSEFDIQMTQSPSSLSASVGDRVTITCKASDHINNWLAWYQQKPGQAPKLLIYGATTLETGVPSRFSGSGSGTDYTLTISSLQPEDFATYYCQQSWNTPWTFGQGTKLEIKRLEDLKNVFPPEVAVFEPSEAEISHTQKATLVCLATGFYPDHVELSWWVNGKEVHSGVCTDPQPLKEQPALNDSRYCLSSRLRVSATFWQNPRNHFRCQVQFYGLSENDEWTQDRAKPVTQIVSAEAWGRADCGFTSESYQQGVLSATILYEILLGKATLYAVLVSALVLMAMVKRKDSRGRAKRSGSGATNFSLLKQAGDVEENPGPTSMDWIWRILFLVGAATGAHSFEQVQLQQPGAELVKPGASVKMSCKASGYAFSSYWINWMKQKPGQGLEWIGQIYPGDGDTNYNGKFKGRATLTADTSSSTAYMQLSSLTSEDSAVYFCARSITTVVGCAMDYWGQGTSVTVSSTRIQNPDPAVYQLRDSKSSDKSVCLFTDFDSQTNVSQSKDSDVYITDKCVLDMRSMDFKSNSAVAWSNKSDFACANAFNNSIIPEDTFFPSPESSCDVKLVEKSFETDTNLNFQNLSVIGFRILLLKVAGFNLLMTLRLWSS

SEQ ID NO: 16416 - protein, 990 aa, Artificial Sequence
  Synthetic Polypeptide
MALPVTALLLPLALLLHAARPEVQLVESGGSLVQPGGSLRLSCAASGFTFDDYAMSWVRQVPGKGLEWVSSINWSGTHTDYADSVKGRFTISRNNANNTLYLQMNSLKSEDTAVYYCAKNWRDAGTTWFEKSGSAGQGTQVTVSSGTGGGGSGGGGSGGGGSEFDIQMTQSPSSLSASVGDRVTITCKASDHINNWLAWYQQKPGQAPKLLIYGATTLETGVPSRFSGSGSGTDYTLTISSLQPEDFATYYCQQSWNTPWTFGQGTKLEIKRLEDLKNVFPPEVAVFEPSEAEISHTQKATLVCLATGFYPDHVELSWWVNGKEVHSGVCTDPQPLKEQPALNDSRYCLSSRLRVSATFWQNPRNHFRCQVQFYGLSENDEWTQDRAKPVTQIVSAEAWGRADCGFTSESYQQGVLSATILYEILLGKATLYAVLVSALVLMAMVKRKDSRGRAKRSGSGATNFSLLKQAGDVEENPGPTSMDWIWRILFLVGAATGAHSFEQVQLQQPGAELVKPGASVKMSCKASGYAFSSYWINWMKQKPGQGLEWIGQIYPGDGDTNYNGKFKGRATLTADTSSSTAYMQLSSLTSEDSAVYFCARSITTVVGCAMDYWGQGTSVTVSSTRIQNPDPAVYQLRDSKSSDKSVCLFTDFDSQTNVSQSKDSDVYITDKCVLDMRSMDFKSNSAVAWSNKSDFACANAFNNSIIPEDTFFPSPESSCDVKLVEKSFETDTNLNFQNLSVIGFRILLLKVAGFNLLMTLRLWSSRAKRSGSGVKQTLNFDLLKLAGDVESNPGPSRGGIHTMATYEVLCEVARKLGTDDREVVLFLLNVFIPQPTLAQLIGALRALKEEGRLTFPLLAECLFRAGRRDLLRDLLHLDPRFLERHLAGTMSYFSPYQLTVLHVDGELCARDIRSLIFLSKDTIGSRSTPQTFLHWVYCMENLDLLGPTDVDALMSMLRSLSRVDLQRQVQTLMGLHLSGPSHSQHYRHTP

SEQ ID NO: 16417 - protein, 769 aa, Artificial Sequence
  Synthetic Polypeptide
MALPVTALLLPLALLLHAARPEVQLVESGGSLVQPGGSLRLSCAASGFTFDDYAMSWVRQVPGKGLEWVSSINWSGTHTDYADSVKGRFTISRNNANNTLYLQMNSLKSEDTAVYYCAKNWRDAGTTWFEKSGSAGQGTQVTVSSGTGGGGSGGGGSGGGGSEFDIQMTQSPSSLSASVGDRVTITCKASDHINNWLAWYQQKPGQAPKLLIYGATTLETGVPSRFSGSGSGTDYTLTISSLQPEDFATYYCQQSWNTPWTFGQGTKLEIKRLEIQNPDPAVYQLRDSKSSDKSVCLFTDFDSQTNVSQSKDSDVYITDKCVLDMRSMDFKSNSAVAWSNKSDFACANAFNNSIIPEDTFFPSPESSCDVKLVEKSFETDTNLNFQNLSVIGFRILLLKVAGFNLLMTLRLWSSRAKRSGSGVKQTLNFDLLKLAGDVESNPGPTSMDWIWRILFLVGAATGAHSFEQVQLQQPGAELVKPGASVKMSCKASGYAFSSYWINWMKQKPGQGLEWIGQIYPGDGDTNYNGKFKGRATLTADTSSSTAYMQLSSLTSEDSAVYFCARSITTVVGCAMDYWGQGTSVTVSSTREDLKNVFPPEVAVFEPSEAEISHTQKATLVCLATGFYPDHVELSWWVNGKEVHSGVCTDPQPLKEQPALNDSRYCLSSRLRVSATFWQNPRNHFRCQVQFYGLSENDEWTQDRAKPVTQIVSAEAWGRADCGFTSESYQQGVLSATILYEILLGKATLYAVLVSALVLMAMVKRKDSRG

SEQ ID NO: 16418 - protein, 991 aa, Artificial Sequence
  Synthetic Polypeptide
MALPVTALLLPLALLLHAARPEVQLVESGGSLVQPGGSLRLSCAASGFTFDDYAMSWVRQVPGKGLEWVSSINWSGTHTDYADSVKGRFTISRNNANNTLYLQMNSLKSEDTAVYYCAKNWRDAGTTWFEKSGSAGQGTQVTVSSGTGGGGSGGGGSGGGGSEFDIQMTQSPSSLSASVGDRVTITCKASDHINNWLAWYQQKPGQAPKLLIYGATTLETGVPSRFSGSGSGTDYTLTISSLQPEDFATYYCQQSWNTPWTFGQGTKLEIKRLEIQNPDPAVYQLRDSKSSDKSVCLFTDFDSQTNVSQSKDSDVYITDKCVLDMRSMDFKSNSAVAWSNKSDFACANAFNNSIIPEDTFFPSPESSCDVKLVEKSFETDTNLNFQNLSVIGFRILLLKVAGFNLLMTLRLWSSRAKRSGSGVKQTLNFDLLKLAGDVESNPGPTSMDWIWRILFLVGAATGAHSFEQVQLQQPGAELVKPGASVKMSCKASGYAFSSYWINWMKQKPGQGLEWIGQIYPGDGDTNYNGKFKGRATLTADTSSSTAYMQLSSLTSEDSAVYFCARSITTVVGCAMDYWGQGTSVTVSSTREDLKNVFPPEVAVFEPSEAEISHTQKATLVCLATGFYPDHVELSWWVNGKEVHSGVCTDPQPLKEQPALNDSRYCLSSRLRVSATFWQNPRNHFRCQVQFYGLSENDEWTQDRAKPVTQIVSAEAWGRADCGFTSESYQQGVLSATILYEILLGKATLYAVLVSALVLMAMVKRKDSRGRAKRSGSGATNFSLLKQAGDVEENPGPSRGGIHTMATYEVLCEVARKLGTDDREVVLFLLNVFIPQPTLAQLIGALRALKEEGRLTFPLLAECLFRAGRRDLLRDLLHLDPRFLERHLAGTMSYFSPYQLTVLHVDGELCARDIRSLIFLSKDTIGSRSTPQTFLHWVYCMENLDLLGPTDVDALMSMLRSLSRVDLQRQVQTLMGLHLSGPSHSQHYRHTP

SEQ ID NO: 16419 - protein, 1043 aa, Artificial Sequence
  Synthetic Polypeptide
MALPVTALLLPLALLLHAARPLEGKPIPNPLLGLDSTGSGEDLKNVFPPEVAVFEPSKAEIAHTQKATLVCLATGFYPDHVELSWWVNGKEVHSGVCTDPQPLKEQPALNDSRYCLSSRLRVSATFWQNPRNHFRCQVQFYGLSENDEWTQDRAKPVTQIVSAEAWGRADCGITSASYHQGVLSATILYEILLGKATLYAVLVSALVLMAMVKRKDSRGRAKRSGSGATNFSLLKQAGDVEENPGPTSMALPVTALLLPLALLLHAARPEVQLVESGGSLVQPGGSLRLSCAASGFTFDDYAMSWVRQVPGKGLEWVSSINWSGTHTDYADSVKGRFTISRNNANNTLYLQMNSLKSEDTAVYYCAKNWRDAGTTWFEKSGSAGQGTQVTVSSGTGGGGSGGGGSGGGGSEFDIQMTQSPSSLSASVGDRVTITCKASDHINNWLAWYQQKPGQAPKLLIYGATTLETGVPSRFSGSGSGTDYTLTISSLQPEDFATYYCQQSWNTPWTFGQGTKLEIKRGGGGSGGGGSGGGGSQVQLQQPGAELVKPGASVKMSCKASGYAFSSYWINWMKQKPGQGLEWIGQIYPGDGDTNYNGKFKGRATLTADTSSSTAYMQLSSLTSEDSAVYFCARSITTVVGCAMDYWGQGTSVTVSSTREQKLISEEDGSGIQNPDPAVYQLRDSKSSDKSVCLFTDFDSQTNVSQSKDSDVYITDKCVLDMRSMDFKSNSAVAWSNKSDFACANAFNNSIIPEDTFFPSSDVPCDVKLVEKSFETDTNLNFQNLSVIGFRILLLKVAGFNLLMTLRLWSSRAKRSGSGVKQTLNFDLLKLAGDVESNPGPSRGHMTEYKPTVRLATRDDVPRAVRTLAAAFADYPATRHTVDPDRHIERVTELQELFLTRVGLDIGKVWVADDGAAVAVWTTPESVEAGAVFAEIGPRMAELSGSRLAAQQQMEGLLAPHRPKEPAWFLATVGVSPDHQGKGLGSAVVLPGVEAAERAGVPAFLETSAPRNLPFYERLGFTVTADVEVPEGPRTWCMTRKPGA

SEQ ID NO: 16420 - protein, 1044 aa, Artificial Sequence
  Synthetic Polypeptide
MALPVTALLLPLALLLHAARPLEQKLISEEDLGSGDRPDPAVYQLRDSKSSDKSVCLFTDFDSQTNVSQSKDSDVYITDKCVLDMRSMDFKSNSAVAWSNKSDFACANAFNNSIIPEDTFFPSPESSCDVKLVEKSFETDTNLNFQNLSVIGFRILLLKVAGFNLLMTLRLWSSSSRAKRSGSGVKQTLNFDLLKLAGDVESNPGPTSMALPVTALLLPLALLLHAARPEVQLVESGGSLVQPGGSLRLSCAASGFTFDDYAMSWVRQVPGKGLEWVSSINWSGTHTDYADSVKGRFTISRNNANNTLYLQMNSLKSEDTAVYYCAKNWRDAGTTWFEKSGSAGQGTQVTVSSGTGGGGSGGGGSGGGGSEFDIQMTQSPSSLSASVGDRVTITCKASDHINNWLAWYQQKPGQAPKLLIYGATTLETGVPSRFSGSGSGTDYTLTISSLQPEDFATYYCQQSWNTPWTFGQGTKLEIKRGGGGSGGGGSGGGGSQVQLQQPGAELVKPGASVKMSCKASGYAFSSYWINWMKQKPGQGLEWIGQIYPGDGDTNYNGKFKGRATLTADTSSSTAYMQLSSLTSEDSAVYFCARSITTVVGCAMDYWGQGTSVTVSSTRGKPIPNPLLGLDSTGSGEDLKNVFPPEVAVFEPSEAEISHTQKATLVCLATGFYPDHVELSWWVNGKEVHSGVCTDPQPLKEQPALNDSRYCLSSRLRVSATFWQNPRNHFRCQVQFYGLSENDEWTQDRAKPVTQIVSAEAWGRADCGFTSESYQQGVLSATILYEILLGKATLYAVLVSALVLMAMVKRKDSRGRAKRSGSGATNFSLLKQAGDVEENPGPSRGHMTEYKPTVRLATRDDVPRAVRTLAAAFADYPATRHTVDPDRHIERVTELQELFLTRVGLDIGKVWVADDGAAVAVWTTPESVEAGAVFAEIGPRMAELSGSRLAAQQQMEGLLAPHRPKEPAWFLATVGVSPDHQGKGLGSAVVLPGVEAAERAGVPAFLETSAPRNLPFYERLGFTVTADVEVPEGPRTWCMTRKPGA

SEQ ID NO: 16421 - protein, 998 aa, Artificial Sequence
  Synthetic Polypeptide
MALPVTALLLPLALLLHAARPEVQLVESGGSLVQPGGSLRLSCAASGFTFDDYAMSWVRQVPGKGLEWVSSINWSGTHTDYADSVKGRFTISRNNANNTLYLQMNSLKSEDTAVYYCAKNWRDAGTTWFEKSGSAGQGTQVTVSSGTGGGGSGGGGSGGGGSEFDIQMTQSPSSLSASVGDRVTITCKASDHINNWLAWYQQKPGQAPKLLIYGATTLETGVPSRFSGSGSGTDYTLTISSLQPEDFATYYCQQSWNTPWTFGQGTKLEIKRLEDLKNVFPPEVAVFEPSEAEISHTQKATLVCLATGFYPDHVELSWWVNGKEVHSGVSTDPQPLKEQPALNDSRYCLSSRLRVSATFWQNPRNHFRCQVQFYGLSENDEWTQDRAKPVTQIVSAEAWGRADCGFTSESYQQGVLSATILYEILLGKATLYAVLVSALVLMAMVKRKDSRGRAKRSGSGATNFSLLKQAGDVEENPGPTSMDWIWRILFLVGAATGAHSFEQVQLQQPGAELVKPGASVKMSCKASGYAFSSYWINWMKQKPGQGLEWIGQIYPGDGDTNYNGKFKGRATLTADTSSSTAYMQLSSLTSEDSAVYFCARSITTVVGCAMDYWGQGTSVTVSSTRIQNPDPAVYQLRDSKSSDKSVCLFTDFDSQTNVSQSKDSDVYITDKTVLDMRSMDFKSNSAVAWSNKSDFACANAFNNSIIPEDTFFPSPESSCDVKLVEKSFETDTNLNFQNLSVIGFRILLLKVAGFNLLMTLRLWSSRAKRSGSGVKQTLNFDLLKLAGDVESNPGPSRGHMTEYKPTVRLATRDDVPRAVRTLAAAFADYPATRHTVDPDRHIERVTELQELFLTRVGLDIGKVWVADDGAAVAVWTTPESVEAGAVFAEIGPRMAELSGSRLAAQQQMEGLLAPHRPKEPAWFLATVGVSPDHQGKGLGSAVVLPGVEAAERAGVPAFLETSAPRNLPFYERLGFTVTADVEVPEGPRTWCMTRKPGA

SEQ ID NO: 16422 - protein, 1080 aa, Artificial Sequence
  Synthetic Polypeptide
MALPVTALLLPLALLLHAARPEVQLVESGGSLVQPGGSLRLSCAASGFTFDDYAMSWVRQVPGKGLEWVSSINWSGTHTDYADSVKGRFTISRNNANNTLYLQMNSLKSEDTAVYYCAKNWRDAGTTWFEKSGSAGQGTQVTVSSGTGGGGSGGGGSGGGGSEFDIQMTQSPSSLSASVGDRVTITCKASDHINNWLAWYQQKPGQAPKLLIYGATTLETGVPSRFSGSGSGTDYTLTISSLQPEDFATYYCQQSWNTPWTFGQGTKLEIKRLEDLKNVFPPEVAVFEPSEAEISHTQKATLVCLATGFYPDHVELSWWVNGKEVHSGVSTDPQPLKEQPALNDSRYCLSSRLRVSATFWQNPRNHFRCQVQFYGLSENDEWTQDRAKPVTQIVSAEAWGRADCGFTSESYQQGVLSATILYEILLGKATLYAVLVSALVLMAMVKRKDSRGRAKRSGSGATNFSLLKQAGDVEENPGPTSMDWIWRILFLVGAATGAHSFEQVQLQQPGAELVKPGASVKMSCKASGYAFSSYWINWMKQKPGQGLEWIGQIYPGDGDTNYNGKFKGRATLTADTSSSTAYMQLSSLTSEDSAVYFCARSITTVVGCAMDYWGQGTSVTVSSTREQKLISEEDGSGTPFPSLAPPIMLLVDGKQQMVVVCLVLDVAPPGLDSPIWFSAGNGSALDAFTYGPSPATDGTWTNLAHLSLPSEELASWEPLVCHTGPGAEGHSRSTQPMHLSGEASTARTCPQEPLRGTPGGALWLGVLRLLLFKLLLFDLLLTCSCLCDPAGPLPSPATTTRLRALGSHRLHPATETGGREATSSPRPQPRDRRWGDTPPGRKPGSPVRAKRSGSGVKQTLNFDLLKLAGDVESNPGPSRGHMTEYKPTVRLATRDDVPRAVRTLAAAFADYPATRHTVDPDRHIERVTELQELFLTRVGLDIGKVWVADDGAAVAVWTTPESVEAGAVFAEIGPRMAELSGSRLAAQQQMEGLLAPHRPKEPAWFLATVGVSPDHQGKGLGSAVVLPGVEAAERAGVPAFLETSAPRNLPFYERLGFTVTADVEVPEGPRTWCMTRKPGA

SEQ ID NO: 16423 - protein, 1098 aa, Artificial Sequence
  Synthetic Polypeptide
MALPVTALLLPLALLLHAARPLEDLKNVFPPEVAVFEPSEAEISHTQKATLVCLATGFYPDHVELSWWVNGKEVHSGVSTDPQPLKEQPALNDSRYCLSSRLRVSATFWQNPRNHFRCQVQFYGLSENDEWTQDRAKPVTQIVSAEAWGRADCGFTSESYQQGVLSATILYEILLGKATLYAVLVSALVLMAMVKRKDSRGRAKRSGSGATNFSLLKQAGDVEENPGPTSMALPVTALLLPLALLLHAARPEVQLVESGGSLVQPGGSLRLSCAASGFTFDDYAMSWVRQVPGKGLEWVSSINWSGTHTDYADSVKGRFTISRNNANNTLYLQMNSLKSEDTAVYYCAKNWRDAGTTWFEKSGSAGQGTQVTVSSGTGGGGSGGGGSGGGGSEFDIQMTQSPSSLSASVGDRVTITCKASDHINNWLAWYQQKPGQAPKLLIYGATTLETGVPSRFSGSGSGTDYTLTISSLQPEDFATYYCQQSWNTPWTFGQGTKLEIKRGGGGSGGGGSGGGGSQVQLQQPGAELVKPGASVKMSCKASGYAFSSYWINWMKQKPGQGLEWIGQIYPGDGDTNYNGKFKGRATLTADTSSSTAYMQLSSLTSEDSAVYFCARSITTVVGCAMDYWGQGTSVTVSSTREQKLISEEDLGSGTPFPSLAPPIMLLVDGKQQMVVVCLVLDVAPPGLDSPIWFSAGNGSALDAFTYGPSPATDGTWTNLAHLSLPSEELASWEPLVCHTGPGAEGHSRSTQPMHLSGEASTARTCPQEPLRGTPGGALWLGVLRLLLFKLLLFDLLLTCSCLCDPAGPLPSPATTTRLRALGSHRLHPATETGGREATSSPRPQPRDRRWGDTPPGRKPGSPVRAKRSGSGVKQTLNFDLLKLAGDVESNPGPSRSRGHMTEYKPTVRLATRDDVPRAVRTLAAAFADYPATRHTVDPDRHIERVTELQELFLTRVGLDIGKVWVADDGAAVAVWTTPESVEAGAVFAEIGPRMAELSGSRLAAQQQMEGLLAPHRPKEPAWFLATVGVSPDHQGKGLGSAVVLPGVEAAERAGVPAFLETSAPRNLPFYERLGFTVTADVEVPEGPRTWCMTRKPGA

SEQ ID NO: 16424 - protein, 1035 aa, Artificial Sequence
  Synthetic Polypeptide
MALPVTALLLPLALLLHAARPEVQLVESGGSLVQPGGSLRLSCAASGFTFDDYAMSWVRQVPGKGLEWVSSINWSGTHTDYADSVKGRFTISRNNANNTLYLQMNSLKSEDTAVYYCAKNWRDAGTTWFEKSGSAGQGTQVTVSSGTGGGGSGGGGSGGGGSEFDIQMTQSPSSLSASVGDRVTITCKASDHINNWLAWYQQKPGQAPKLLIYGATTLETGVPSRFSGSGSGTDYTLTISSLQPEDFATYYCQQSWNTPWTFGQGTKLEIKRLEGKPIPNPLLGLDSTGSGDKQLDADVSPKPTIFLPSIAETKLQKAGTYLCLLEKFFPDVIKIHWQEKKSNTILGSQEGNTMKTNDTYMKFSWLTVPEKSLDKEHRCIVRHENNKNGVDQEIIFPPIKTDVITMDPKDNCSKDANDTLLLQLTNTSAYYMYLLLLLKSVVYFAIITCCLLRRTAFCCNGEKSRAKRSGSGATNFSLLKQAGDVEENPGPTSMDWIWRILFLVGAATGAHSFEQVQLQQPGAELVKPGASVKMSCKASGYAFSSYWINWMKQKPGQGLEWIGQIYPGDGDTNYNGKFKGRATLTADTSSSTAYMQLSSLTSEDSAVYFCARSITTVVGCAMDYWGQGTSVTVSSTREQKLISEEDGSGSQPHTKPSVFVMKNGTNVACLVKEFYPKDIRINLVSSKKITEFDPAIVISPSGKYNAVKLGKYEDSNSVTCSVQHDNKTVHSTDFEVKTDSTDHVKPKETENTKQPSKSCHKPKAIVHTEKVNMMSLTVLGLRMLFAKTVAVNFLLTAKLFFLRAKRSGSGVKQTLNFDLLKLAGDVESNPGPSRGHMTEYKPTVRLATRDDVPRAVRTLAAAFADYPATRHTVDPDRHIERVTELQELFLTRVGLDIGKVWVADDGAAVAVWTTPESVEAGAVFAEIGPRMAELSGSRLAAQQQMEGLLAPHRPKEPAWFLATVGVSPDHQGKGLGSAVVLPGVEAAERAGVPAFLETSAPRNLPFYERLGFTVTADVEVPEGPRTWCMTRKPGA

SEQ ID NO: 16425 - protein, 773 aa, Artificial Sequence
  Synthetic Polypeptide
MALPVTALLLPLALLLHAARPEVQLVESGGSLVQPGGSLRLSCAASGFTFDDYAMSWVRQVPGKGLEWVSSINWSGTHTDYADSVKGRFTISRNNANNTLYLQMNSLKSEDTAVYYCAKNWRDAGTTWFEKSGSAGQGTQVTVSSGTGGGGSGGGGSGGGGSEFDIQMTQSPSSLSASVGDRVTITCKASDHINNWLAWYQQKPGQAPKLLIYGATTLETGVPSRFSGSGSGTDYTLTISSLQPEDFATYYCQQSWNTPWTFGQGTKLEIKRLESQPHTKPSVFVMKNGTNVACLVKEFYPKDIRINLVSSKKITEFDPAIVISPSGKYNAVKLGKYEDSNSVTCSVQHDNKTVHSTDFEVKTDSTDHVKPKETENTKQPSKSCHKPKAIVHTEKVNMMSLTVLGLRMLFAKTVAVNFLLTAKLFFLRAKRSGSGATNFSLLKQAGDVEENPGPTSMDWIWRILFLVGAATGAHSFEQVQLQQPGAELVKPGASVKMSCKASGYAFSSYWINWMKQKPGQGLEWIGQIYPGDGDTNYNGKFKGRATLTADTSSSTAYMQLSSLTSEDSAVYFCARSITTVVGCAMDYWGQGTSVTVSSTRDKQLDADVSPKPTIFLPSIAETKLQKAGTYLCLLEKFFPDVIKIHWQEKKSNTILGSQEGNTMKTNDTYMKFSWLTVPEKSLDKEHRCIVRHENNKNGVDQEIIFPPIKTDVITMDPKDNCSKDANDTLLLQLTNTSAYYMYLLLLLKSVVYFAIITCCLLRRTAFCCNGEKS

SEQ ID NO: 16426 - protein, 1050 aa, Artificial Sequence
  Synthetic Polypeptide
MALPVTALLLPLALLLHAARPLEGKPIPNPLLGLDSTGSGDKQLDADVSPKPTIFLPSIAETKLQKAGTYLCLLEKFFPDVIKIHWQEKKSNTILGSQEGNTMKTNDTYMKFSWLTVPEKSLDKEHRCIVRHENNKNGVDQEIIFPPIKTDVITMDPKDNCSKDANDTLLLQLTNTSAYYMYLLLLLKSVVYFAIITCCLLRRTAFCCNGEKSRAKRSGSGATNFSLLKQAGDVEENPGPTSMALPVTALLLPLALLLHAARPEVQLVESGGSLVQPGGSLRLSCAASGFTFDDYAMSWVRQVPGKGLEWVSSINWSGTHTDYADSVKGRFTISRNNANNTLYLQMNSLKSEDTAVYYCAKNWRDAGTTWFEKSGSAGQGTQVTVSSGTGGGGSGGGGSGGGGSEFDIQMTQSPSSLSASVGDRVTITCKASDHINNWLAWYQQKPGQAPKLLIYGATTLETGVPSRFSGSGSGTDYTLTISSLQPEDFATYYCQQSWNTPWTFGQGTKLEIKRGGGGSGGGGSGGGGSQVQLQQPGAELVKPGASVKMSCKASGYAFSSYWINWMKQKPGQGLEWIGQIYPGDGDTNYNGKFKGRATLTADTSSSTAYMQLSSLTSEDSAVYFCARSITTVVGCAMDYWGQGTSVTVSSTREQKLISEEDGSGSQPHTKPSVFVMKNGTNVACLVKEFYPKDIRINLVSSKKITEFDPAIVISPSGKYNAVKLGKYEDSNSVTCSVQHDNKTVHSTDFEVKTDSTDHVKPKETENTKQPSKSCHKPKAIVHTEKVNMMSLTVLGLRMLFAKTVAVNFLLTAKLFFLRAKRSGSGVKQTLNFDLLKLAGDVESNPGPSRGHMTEYKPTVRLATRDDVPRAVRTLAAAFADYPATRHTVDPDRHIERVTELQELFLTRVGLDIGKVWVADDGAAVAVWTTPESVEAGAVFAEIGPRMAELSGSRLAAQQQMEGLLAPHRPKEPAWFLATVGVSPDHQGKGLGSAVVLPGVEAAERAGVPAFLETSAPRNLPFYERLGFTVTADVEVPEGPRTWCMTRKPGA

SEQ ID NO: 16427 - protein, 1175 aa, Artificial Sequence
  Synthetic Polypeptide
MALPVTALLLPLALLLHAARPEVQLVESGGSLVQPGGSLRLSCAASGFTFDDYAMSWVRQVPGKGLEWVSSINWSGTHTDYADSVKGRFTISRNNANNTLYLQMNSLKSEDTAVYYCAKNWRDAGTTWFEKSGSAGQGTQVTVSSGTGGGGSGGGGSGGGGSEFDIQMTQSPSSLSASVGDRVTITCKASDHINNWLAWYQQKPGQAPKLLIYGATTLETGVPSRFSGSGSGTDYTLTISSLQPEDFATYYCQQSWNTPWTFGQGTKLEIKRGQPKANPTVTLFPPSSEELQANKATLVCLISDFYPGAVTVAWKADGSPVKAGVETTKPSKQSNNKYAASSYLSLTPEQWKSHRSYSCQVTHEGSTVEKTVAPTECSGSQSFGLLDPKLCYLLDGILFIYGVILTALFLRVKFSRSADAPAYQQGQNQLYNELNLGRREEYDVLDKRRGRDPEMGGKPQRRKNPQEGLYNELQKDKMAEAYSEIGMKGERRRGKGHDGLYQGLSTATKDTYDALHMQALPPRRAKRSGSGATNFSLLKQAGDVEENPGPTSMDWIWRILFLVGAATGAHSFEQVQLQQPGAELVKPGASVKMSCKASGYAFSSYWINWMKQKPGQGLEWIGQIYPGDGDTNYNGKFKGRATLTADTSSSTAYMQLSSLTSEDSAVYFCARSITTVVGCAMDYWGQGTSVTVSSASTKGPSVFPLAPSSKSTSGGTAALGCLVKDYFPEPVTVSWNSGALTSGVHTFPAVLQSSGLYSLSSVVTVPSSSLGTQTYICNVNHKPSNTKVDKRVEPKSCGTQSFGLLDPKLCYLLDGILFIYGVILTALFLRVKFSRSADAPAYQQGQNQLYNELNLGRREEYDVLDKRRGRDPEMGGKPQRRKNPQEGLYNELQKDKMAEAYSEIGMKGERRRGKGHDGLYQGLSTATKDTYDALHMQALPPRRAKRSGSGVKQTLNFDLLKLAGDVESNPGPSRGHMTEYKPTVRLATRDDVPRAVRTLAAAFADYPATRHTVDPDRHIERVTELQELFLTRVGLDIGKVWVADDGAAVAVWTTPESVEAGAVFAEIGPRMAELSGSRLAAQQQMEGLLAPHRPKEPAWFLATVGVSPDHQGKGLGSAVVLPGVEAAERAGVPAFLETSAPRNLPFYERLGFTVTADVEVPEGPRTWCMTRKPGA

SEQ ID NO: 16428 - protein, 961 aa, Artificial Sequence
  Synthetic Polypeptide
MALPVTALLLPLALLLHAARPEVQLVESGGSLVQPGGSLRLSCAASGFTFDDYAMSWVRQVPGKGLEWVSSINWSGTHTDYADSVKGRFTISRNNANNTLYLQMNSLKSEDTAVYYCAKNWRDAGTTWFEKSGSAGQGTQVTVSSGTGGGGSGGGGSGGGGSEFDIQMTQSPSSLSASVGDRVTITCKASDHINNWLAWYQQKPGQAPKLLIYGATTLETGVPSRFSGSGSGTDYTLTISSLQPEDFATYYCQQSWNTPWTFGQGTKLEIKRLEDLKNVFPPEVAVFEPSEAEISHTQKATLVCLATGFYPDHVELSWWVNGKEVHSGVSTDPQPLKEQPALNDSRYCLSSRLRVSATFWQNPRNHFRCQVQFYGLSENDEWTQDRAKPVTQIVSAEAWGRADCGSQSFGLLDPKLCYLLDGILFIYGVILTALFLRVKFSRSADAPAYQQGQNQLYNELNLGRREEYDVLDKRRGRDPEMGGKPQRRKNPQEGLYNELQKDKMAEAYSEIGMKGERRRGKGHDGLYQGLSTATKDTYDALHMQALPPRRAKRSGSGATNFSLLKQAGDVEENPGPTSMDWIWRILFLVGAATGAHSFEQVQLQQPGAELVKPGASVKMSCKASGYAFSSYWINWMKQKPGQGLEWIGQIYPGDGDTNYNGKFKGRATLTADTSSSTAYMQLSSLTSEDSAVYFCARSITTVVGCAMDYWGQGTSVTVSSTRIQNPDPAVYQLRDSKSSDKSVCLFTDFDSQTNVSQSKDSDVYITDKTVLDMRSMDFKSNSAVAWSNKSDFACANAFNNSIIPEDTFFPSPESSCGTQSFGLLDPKLCYLLDGILFIYGVILTALFLRVKFSRSADAPAYQQGQNQLYNELNLGRREEYDVLDKRRGRDPEMGGKPQRRKNPQEGLYNELQKDKMAEAYSEIGMKGERRRGKGHDGLYQGLSTATKDTYDALHMQALPPR

SEQ ID NO: 16429 - protein, 961 aa, Artificial Sequence
  Synthetic Polypeptide
MALPVTALLLPLALLLHAARPEVQLVESGGSLVQPGGSLRLSCAASGFTFDDYAMSWVRQVPGKGLEWVSSINWSGTHTDYADSVKGRFTISRNNANNTLYLQMNSLKSEDTAVYYCAKNWRDAGTTWFEKSGSAGQGTQVTVSSGTGGGGSGGGGSGGGGSEFDIQMTQSPSSLSASVGDRVTITCKASDHINNWLAWYQQKPGQAPKLLIYGATTLETGVPSRFSGSGSGTDYTLTISSLQPEDFATYYCQQSWNTPWTFGQGTKLEIKRLEDLKNVFPPEVAVFEPSKAEIAHTQKATLVCLATGFYPDHVELSWWVNGKEVHSGVCTDPQPLKEQPALNDSRYCLSSRLRVSATFWQNPRNHFRCQVQFYGLSENDEWTQDRAKPVTQIVSAEAWGRADCGSQSFGLLDPKLCYLLDGILFIYGVILTALFLRVKFSRSADAPAYQQGQNQLYNELNLGRREEYDVLDKRRGRDPEMGGKPQRRKNPQEGLYNELQKDKMAEAYSEIGMKGERRRGKGHDGLYQGLSTATKDTYDALHMQALPPRRAKRSGSGATNFSLLKQAGDVEENPGPTSMDWIWRILFLVGAATGAHSFEQVQLQQPGAELVKPGASVKMSCKASGYAFSSYWINWMKQKPGQGLEWIGQIYPGDGDTNYNGKFKGRATLTADTSSSTAYMQLSSLTSEDSAVYFCARSITTVVGCAMDYWGQGTSVTVSSTRIQNPDPAVYQLRDSKSSDKSVCLFTDFDSQTNVSQSKDSDVYITDKCVLDMRSMDFKSNSAVAWSNKSDFACANAFNNSIIPEDTFFPSSDVPCGTQSFGLLDPKLCYLLDGILFIYGVILTALFLRVKFSRSADAPAYQQGQNQLYNELNLGRREEYDVLDKRRGRDPEMGGKPQRRKNPQEGLYNELQKDKMAEAYSEIGMKGERRRGKGHDGLYQGLSTATKDTYDALHMQALPPR

SEQ ID NO: 16430 - protein, 1032 aa, Artificial Sequence
  Synthetic Polypeptide
MALPVTALLLPLALLLHAARPEVQLVESGGSLVQPGGSLRLSCAASGFTFDDYAMSWVRQVPGKGLEWVSSINWSGTHTDYADSVKGRFTISRNNANNTLYLQMNSLKSEDTAVYYCAKNWRDAGTTWFEKSGSAGQGTQVTVSSGTGGGGSGGGGSGGGGSEFDIQMTQSPSSLSASVGDRVTITCKASDHINNWLAWYQQKPGQAPKLLIYGATTLETGVPSRFSGSGSGTDYTLTISSLQPEDFATYYCQQSWNTPWTFGQGTKLEIKRLEGKPIPNPLLGLDSTGSGEDLKNVFPPEVAVFEPSEAEISHTQKATLVCLATGFYPDHVELSWWVNGKEVHSGVSTDPQPLKEQPALNDSRYCLSSRLRVSATFWQNPRNHFRCQVQFYGLSENDEWTQDRAKPVTQIVSAEAWGRADCGSQSFGLLDPKLCYLLDGILFIYGVILTALFLRVKFSRSADAPAYQQGQNQLYNELNLGRREEYDVLDKRRGRDPEMGGKPQRRKNPQEGLYNELQKDKMAEAYSEIGMKGERRRGKGHDGLYQGLSTATKDTYDALHMQALPPRRAKRSGSGATNFSLLKQAGDVEENPGPTSMDWIWRILFLVGAATGAHSFEQVQLQQPGAELVKPGASVKMSCKASGYAFSSYWINWMKQKPGQGLEWIGQIYPGDGDTNYNGKFKGRATLTADTSSSTAYMQLSSLTSEDSAVYFCARSITTVVGCAMDYWGQGTSVTVSSTREQKLISEEDGSGIQNPDPAVYQLRDSKSSDKSVCLFTDFDSQTNVSQSKDSDVYITDKTVLDMRSMDFKSNSAVAWSNKSDFACANAFNNSIIPEDTFFPSPESSCGTQSFGLLDPKLCYLLDGILFIYGVILTALFLRSKRSRLLHSDYMNMTPRRPGPTRKHYQPYAPPRDFAAYRSRVKFSRSADAPAYQQGQNQLYNELNLGRREEYDVLDKRRGRDPEMGGKPQRRKNPQEGLYNELQKDKMAEAYSEIGMKGERRRGKGHDGLYQGLSTATKDTYDALHMQALPPR

SEQ ID NO: 16431 - protein, 1073 aa, Artificial Sequence
  Synthetic Polypeptide
MALPVTALLLPLALLLHAARPEVQLVESGGSLVQPGGSLRLSCAASGFTFDDYAMSWVRQVPGKGLEWVSSINWSGTHTDYADSVKGRFTISRNNANNTLYLQMNSLKSEDTAVYYCAKNWRDAGTTWFEKSGSAGQGTQVTVSSGTGGGGSGGGGSGGGGSEFDIQMTQSPSSLSASVGDRVTITCKASDHINNWLAWYQQKPGQAPKLLIYGATTLETGVPSRFSGSGSGTDYTLTISSLQPEDFATYYCQQSWNTPWTFGQGTKLEIKRLEGKPIPNPLLGLDSTGSGEDLKNVFPPEVAVFEPSEAEISHTQKATLVCLATGFYPDHVELSWWVNGKEVHSGVSTDPQPLKEQPALNDSRYCLSSRLRVSATFWQNPRNHFRCQVQFYGLSENDEWTQDRAKPVTQIVSAEAWGRADCGSQSFGLLDPKLCYLLDGILFIYGVILTALFLRSKRSRLLHSDYMNMTPRRPGPTRKHYQPYAPPRDFAAYRSRVKFSRSADAPAYQQGQNQLYNELNLGRREEYDVLDKRRGRDPEMGGKPQRRKNPQEGLYNELQKDKMAEAYSEIGMKGERRRGKGHDGLYQGLSTATKDTYDALHMQALPPRRAKRSGSGATNFSLLKQAGDVEENPGPTSMDWIWRILFLVGAATGAHSFEQVQLQQPGAELVKPGASVKMSCKASGYAFSSYWINWMKQKPGQGLEWIGQIYPGDGDTNYNGKFKGRATLTADTSSSTAYMQLSSLTSEDSAVYFCARSITTVVGCAMDYWGQGTSVTVSSTREQKLISEEDGSGIQNPDPAVYQLRDSKSSDKSVCLFTDFDSQTNVSQSKDSDVYITDKTVLDMRSMDFKSNSAVAWSNKSDFACANAFNNSIIPEDTFFPSPESSCGTQSFGLLDPKLCYLLDGILFIYGVILTALFLRSKRSRLLHSDYMNMTPRRPGPTRKHYQPYAPPRDFAAYRSRVKFSRSADAPAYQQGQNQLYNELNLGRREEYDVLDKRRGRDPEMGGKPQRRKNPQEGLYNELQKDKMAEAYSEIGMKGERRRGKGHDGLYQGLSTATKDTYDALHMQALPPR

SEQ ID NO: 16432 - protein, 1034 aa, Artificial Sequence
  Synthetic Polypeptide
MALPVTALLLPLALLLHAARPEVQLVESGGSLVQPGGSLRLSCAASGFTFDDYAMSWVRQVPGKGLEWVSSINWSGTHTDYADSVKGRFTISRNNANNTLYLQMNSLKSEDTAVYYCAKNWRDAGTTWFEKSGSAGQGTQVTVSSGTGGGGSGGGGSGGGGSEFDIQMTQSPSSLSASVGDRVTITCKASDHINNWLAWYQQKPGQAPKLLIYGATTLETGVPSRFSGSGSGTDYTLTISSLQPEDFATYYCQQSWNTPWTFGQGTKLEIKRLEGKPIPNPLLGLDSTGSGEDLKNVFPPEVAVFEPSEAEISHTQKATLVCLATGFYPDHVELSWWVNGKEVHSGVSTDPQPLKEQPALNDSRYCLSSRLRVSATFWQNPRNHFRCQVQFYGLSENDEWTQDRAKPVTQIVSAEAWGRADCGSQSFGLLDPKLCYLLDGILFIYGVILTALFLRVKFSRSADAPAYQQGQNQLYNELNLGRREEYDVLDKRRGRDPEMGGKPQRRKNPQEGLYNELQKDKMAEAYSEIGMKGERRRGKGHDGLYQGLSTATKDTYDALHMQALPPRRAKRSGSGATNFSLLKQAGDVEENPGPTSMDWIWRILFLVGAATGAHSFEQVQLQQPGAELVKPGASVKMSCKASGYAFSSYWINWMKQKPGQGLEWIGQIYPGDGDTNYNGKFKGRATLTADTSSSTAYMQLSSLTSEDSAVYFCARSITTVVGCAMDYWGQGTSVTVSSTREQKLISEEDLGSGIQNPDPAVYQLRDSKSSDKSVCLFTDFDSQTNVSQSKDSDVYITDKTVLDMRSMDFKSNSAVAWSNKSDFACANAFNNSIIPEDTFFPSPESSCGTQSFGLLDPKLCYLLDGILFIYGVILTALFLKRGRKKLLYIFKQPFMRPVQTTQEEDGCSCRFPEEEEGGCELRVKFSRSADAPAYQQGQNQLYNELNLGRREEYDVLDKRRGRDPEMGGKPQRRKNPQEGLYNELQKDKMAEAYSEIGMKGERRRGKGHDGLYQGLSTATKDTYDALHMQALPPR

SEQ ID NO: 16433 - protein, 1076 aa, Artificial Sequence
  Synthetic Polypeptide
MALPVTALLLPLALLLHAARPEVQLVESGGSLVQPGGSLRLSCAASGFTFDDYAMSWVRQVPGKGLEWVSSINWSGTHTDYADSVKGRFTISRNNANNTLYLQMNSLKSEDTAVYYCAKNWRDAGTTWFEKSGSAGQGTQVTVSSGTGGGGSGGGGSGGGGSEFDIQMTQSPSSLSASVGDRVTITCKASDHINNWLAWYQQKPGQAPKLLIYGATTLETGVPSRFSGSGSGTDYTLTISSLQPEDFATYYCQQSWNTPWTFGQGTKLEIKRLEGKPIPNPLLGLDSTGSGEDLKNVFPPEVAVFEPSEAEISHTQKATLVCLATGFYPDHVELSWWVNGKEVHSGVSTDPQPLKEQPALNDSRYCLSSRLRVSATFWQNPRNHFRCQVQFYGLSENDEWTQDRAKPVTQIVSAEAWGRADCGSQSFGLLDPKLCYLLDGILFIYGVILTALFLKRGRKKLLYIFKQPFMRPVQTTQEEDGCSCRFPEEEEGGCELRVKFSRSADAPAYQQGQNQLYNELNLGRREEYDVLDKRRGRDPEMGGKPQRRKNPQEGLYNELQKDKMAEAYSEIGMKGERRRGKGHDGLYQGLSTATKDTYDALHMQALPPRRAKRSGSGATNFSLLKQAGDVEENPGPTSMDWIWRILFLVGAATGAHSFEQVQLQQPGAELVKPGASVKMSCKASGYAFSSYWINWMKQKPGQGLEWIGQIYPGDGDTNYNGKFKGRATLTADTSSSTAYMQLSSLTSEDSAVYFCARSITTVVGCAMDYWGQGTSVTVSSTREQKLISEEDLGSGIQNPDPAVYQLRDSKSSDKSVCLFTDFDSQTNVSQSKDSDVYITDKTVLDMRSMDFKSNSAVAWSNKSDFACANAFNNSIIPEDTFFPSPESSCGTQSFGLLDPKLCYLLDGILFIYGVILTALFLKRGRKKLLYIFKQPFMRPVQTTQEEDGCSCRFPEEEEGGCELRVKFSRSADAPAYQQGQNQLYNELNLGRREEYDVLDKRRGRDPEMGGKPQRRKNPQEGLYNELQKDKMAEAYSEIGMKGERRRGKGHDGLYQGLSTATKDTYDALHMQALPPR

SEQ ID NO: 16434 - protein, 966 aa, Artificial Sequence
  Synthetic Polypeptide
MALPVTALLLPLALLLHAARPEVQLVESGGSLVQPGGSLRLSCAASGFTFDDYAMSWVRQVPGKGLEWVSSINWSGTHTDYADSVKGRFTISRNNANNTLYLQMNSLKSEDTAVYYCAKNWRDAGTTWFEKSGSAGQGTQVTVSSGTGGGGSGGGGSGGGGSEFDIQMTQSPSSLSASVGDRVTITCKASDHINNWLAWYQQKPGQAPKLLIYGATTLETGVPSRFSGSGSGTDYTLTISSLQPEDFATYYCQQSWNTPWTFGQGTKLEIKRLEQSFGLLDPKLCYLLDGILFIYGVILTALFLRVKFSRSADAPAYQQGQNQLYNELNLGRREEYDVLDKRRGRDPEMGGKPQRRKNPQEGLYNELQKDKMAEAYSEIGMKGERRRGKGHDGLYQGLSTATKDTYDALHMQALPPRRAKRSGSGATNFSLLKQAGDVEENPGPTSMDWIWRILFLVGAATGAHSFEQVQLQQPGAELVKPGASVKMSCKASGYAFSSYWINWMKQKPGQGLEWIGQIYPGDGDTNYNGKFKGRATLTADTSSSTAYMQLSSLTSEDSAVYFCARSITTVVGCAMDYWGQGTSVTVSSTRQSFGLLDPKLCYLLDGILFIYGVILTALFLRVKFSRSADAPAYQQGQNQLYNELNLGRREEYDVLDKRRGRDPEMGGKPQRRKNPQEGLYNELQKDKMAEAYSEIGMKGERRRGKGHDGLYQGLSTATKDTYDALHMQALPPRRAKRSGSGVKQTLNFDLLKLAGDVESNPGPSRGHMTEYKPTVRLATRDDVPRAVRTLAAAFADYPATRHTVDPDRHIERVTELQELFLTRVGLDIGKVWVADDGAAVAVWTTPESVEAGAVFAEIGPRMAELSGSRLAAQQQMEGLLAPHRPKEPAWFLATVGVSPDHQGKGLGSAVVLPGVEAAERAGVPAFLETSAPRNLPFYERLGFTVTADVEVPEGPRTWCMTRKPGA

SEQ ID NO: 16435 - protein, 791 aa, Artificial Sequence
  Synthetic Polypeptide
MALPVTALLLPLALLLHAARPEVQLVESGGSLVQPGGSLRLSCAASGFTFDDYAMSWVRQVPGKGLEWVSSINWSGTHTDYADSVKGRFTISRNNANNTLYLQMNSLKSEDTAVYYCAKNWRDAGTTWFEKSGSAGQGTQVTVSSGTGGGGSGGGGSGGGGSEFDIQMTQSPSSLSASVGDRVTITCKASDHINNWLAWYQQKPGQAPKLLIYGATTLETGVPSRFSGSGSGTDYTLTISSLQPEDFATYYCQQSWNTPWTFGQGTKLEIKRLEGQPKANPTVTLFPPSSEELQANKATLVCLISDFYPGAVTVAWKADGSPVKAGVETTKPSKQSNNKYAASSYLSLTPEQWKSHRSYSCQVTHEGSTVEKTVAPTECSPIKTDVITMDPKDNCSKDANDTLLLQLTNTSAYYMYLLLLLKSVVYFAIITCCLLRRTAFCCNGEKSRAKRSGSGATNFSLLKQAGDVEENPGPTSMDWIWRILFLVGAATGAHSFEQVQLQQPGAELVKPGASVKMSCKASGYAFSSYWINWMKQKPGQGLEWIGQIYPGDGDTNYNGKFKGRATLTADTSSSTAYMQLSSLTSEDSAVYFCARSITTVVGCAMDYWGQGTSVTVSSTRASTKGPSVFPLAPSSKSTSGGTAALGCLVKDYFPEPVTVSWNSGALTSGVHTFPAVLQSSGLYSLSSVVTVPSSSLGTQTYICNVNHKPSNTKVDKRVEPKSCEVKTDSTDHVKPKETENTKQPSKSCHKPKAIVHTEKVNMMSLTVLGLRMLFAKTVAVNFLLTAKLFFL

SEQ ID NO: 16436 - protein, 769 aa, Artificial Sequence
  Synthetic Polypeptide
MALPVTALLLPLALLLHAARPEVQLVESGGSLVQPGGSLRLSCAASGFTFDDYAMSWVRQVPGKGLEWVSSINWSGTHTDYADSVKGRFTISRNNANNTLYLQMNSLKSEDTAVYYCAKNWRDAGTTWFEKSGSAGQGTQVTVSSGTGGGGSGGGGSGGGGSEFDIQMTQSPSSLSASVGDRVTITCKASDHINNWLAWYQQKPGQAPKLLIYGATTLETGVPSRFSGSGSGTDYTLTISSLQPEDFATYYCQQSWNTPWTFGQGTKLEIKRLEGQPKANPTVTLFPPSSEELQANKATLVCLISDFYPGAVTVAWKADGSPVKAGVETTKPSKQSNNKYAASSYLSLTPEQWKSHRSYSCQVTHEGSTVEKTVAPTECSGRADCGITSASYHQGVLSATILYEILLGKATLYAVLVSALVLMAMVKRKDSRGRAKRSGSGATNFSLLKQAGDVEENPGPTSMDWIWRILFLVGAATGAHSFEQVQLQQPGAELVKPGASVKMSCKASGYAFSSYWINWMKQKPGQGLEWIGQIYPGDGDTNYNGKFKGRATLTADTSSSTAYMQLSSLTSEDSAVYFCARSITTVVGCAMDYWGQGTSVTVSSTRASTKGPSVFPLAPSSKSTSGGTAALGCLVKDYFPEPVTVSWNSGALTSGVHTFPAVLQSSGLYSLSSVVTVPSSSLGTQTYICNVNHKPSNTKVDKRVEPKSCIPEDTFFPSSDVPCDVKLVEKSFETDTNLNFQNLSVIGFRILLLKVAGFNLLMTLRLWSS

SEQ ID NO: 16437 - protein, 769 aa, Artificial Sequence
  Synthetic Polypeptide
MALPVTALLLPLALLLHAARPEVQLVESGGSLVQPGGSLRLSCAASGFTFDDYAMSWVRQVPGKGLEWVSSINWSGTHTDYADSVKGRFTISRNNANNTLYLQMNSLKSEDTAVYYCAKNWRDAGTTWFEKSGSAGQGTQVTVSSGTGGGGSGGGGSGGGGSEFDIQMTQSPSSLSASVGDRVTITCKASDHINNWLAWYQQKPGQAPKLLIYGATTLETGVPSRFSGSGSGTDYTLTISSLQPEDFATYYCQQSWNTPWTFGQGTKLEIKRLEGQPKANPTVTLFPPSSEELQANKATLVCLISDFYPGAVTVAWKADGSPVKAGVETTKPSKQSNNKYAASSYLSLTPEQWKSHRSYSCQVTHEGSTVEKTVAPTECSGRADCGFTSESYQQGVLSATILYEILLGKATLYAVLVSALVLMAMVKRKDSRGRAKRSGSGATNFSLLKQAGDVEENPGPTSMDWIWRILFLVGAATGAHSFEQVQLQQPGAELVKPGASVKMSCKASGYAFSSYWINWMKQKPGQGLEWIGQIYPGDGDTNYNGKFKGRATLTADTSSSTAYMQLSSLTSEDSAVYFCARSITTVVGCAMDYWGQGTSVTVSSTRASTKGPSVFPLAPSSKSTSGGTAALGCLVKDYFPEPVTVSWNSGALTSGVHTFPAVLQSSGLYSLSSVVTVPSSSLGTQTYICNVNHKPSNTKVDKRVEPKSCIPEDTFFPSPESSCDVKLVEKSFETDTNLNFQNLSVIGFRILLLKVAGFNLLMTLRLWSS

SEQ ID NO: 16438 - protein, 595 aa, Artificial Sequence
  Synthetic Polypeptide
MALPVTALLLPLALLLHAARPEVQLVESGGSLVQPGGSLRLSCAASGFTFDDYAMSWVRQVPGKGLEWVSSINWSGTHTDYADSVKGRFTISRNNANNTLYLQMNSLKSEDTAVYYCAKNWRDAGTTWFEKSGSAGQGTQVTVSSGTGGGGSGGGGSGGGGSEFDIQMTQSPSSLSASVGDRVTITCKASDHINNWLAWYQQKPGQAPKLLIYGATTLETGVPSRFSGSGSGTDYTLTISSLQPEDFATYYCQQSWNTPWTFGQGTKLEIKRGGGGSGGGGSGGGGSQVQLQQPGAELVKPGASVKMSCKASGYAFSSYWINWMKQKPGQGLEWIGQIYPGDGDTNYNGKFKGRATLTADTSSSTAYMQLSSLTSEDSAVYFCARSITTVVGCAMDYWGQGTSVTVSSTRDGNEEMGGITQTPYKVSISGTTVILTCPQYPGSEILWQHNDKNIGGDEDDKNIGSDEDHLSLKEFSELEQSGYYVCYPRGSKPEDANFYLYLRARVCENCMEMDVMSVATIVIVDICITGGLLLLVYYWSKNRKAKAKPVTRGAGAGGRQRGQNKERPPPVPNPDYEPIRKGQRDLYSGLNQRRI

SEQ ID NO: 16439 - protein, 560 aa, Artificial Sequence
  Synthetic Polypeptide
MALPVTALLLPLALLLHAARPEVQLVESGGSLVQPGGSLRLSCAASGFTFDDYAMSWVRQVPGKGLEWVSSINWSGTHTDYADSVKGRFTISRNNANNTLYLQMNSLKSEDTAVYYCAKNWRDAGTTWFEKSGSAGQGTQVTVSSGTGGGGSGGGGSGGGGSEFDIQMTQSPSSLSASVGDRVTITCKASDHINNWLAWYQQKPGQAPKLLIYGATTLETGVPSRFSGSGSGTDYTLTISSLQPEDFATYYCQQSWNTPWTFGQGTKLEIKRGGGGSGGGGSGGGGSQVQLQQPGAELVKPGASVKMSCKASGYAFSSYWINWMKQKPGQGLEWIGQIYPGDGDTNYNGKFKGRATLTADTSSSTAYMQLSSLTSEDSAVYFCARSITTVVGCAMDYWGQGTSVTVSSTRFKIPIEELEDRVFVNCNTSITWVEGTVGTLLSDITRLDLGKRILDPRGIYRCNGTDIYKDKESTVQVHYRMCQSCVELDPATVAGIIVTDVIATLLLALGVFCFAGHETGRLSGAADTQALLRNDQVYQPLRDRDDAQYSHLGGNWARNK

SEQ ID NO: 16440 - protein, 570 aa, Artificial Sequence
  Synthetic Polypeptide
MALPVTALLLPLALLLHAARPEVQLVESGGSLVQPGGSLRLSCAASGFTFDDYAMSWVRQVPGKGLEWVSSINWSGTHTDYADSVKGRFTISRNNANNTLYLQMNSLKSEDTAVYYCAKNWRDAGTTWFEKSGSAGQGTQVTVSSGTGGGGSGGGGSGGGGSEFDIQMTQSPSSLSASVGDRVTITCKASDHINNWLAWYQQKPGQAPKLLIYGATTLETGVPSRFSGSGSGTDYTLTISSLQPEDFATYYCQQSWNTPWTFGQGTKLEIKRGGGGSGGGGSGGGGSQVQLQQPGAELVKPGASVKMSCKASGYAFSSYWINWMKQKPGQGLEWIGQIYPGDGDTNYNGKFKGRATLTADTSSSTAYMQLSSLTSEDSAVYFCARSITTVVGCAMDYWGQGTSVTVSSTRQSIKGNHLVKVYDYQEDGSVLLTCDAEAKNITWFKDGKMIGFLTEDKKKWNLGSNAKDPRGMYQCKGSQNKSKPLQVYYRMCQNCIELNAATISGFLFAEIVSIFVLAVGVYFIAGQDGVRQSRASDKQTLLPNDQLYQPLKDREDDQYSHLQGNQLRRN

SEQ ID NO: 16441 - protein, 553 aa, Artificial Sequence
  Synthetic Polypeptide
MALPVTALLLPLALLLHAARPEVQLVESGGSLVQPGGSLRLSCAASGFTFDDYAMSWVRQVPGKGLEWVSSINWSGTHTDYADSVKGRFTISRNNANNTLYLQMNSLKSEDTAVYYCAKNWRDAGTTWFEKSGSAGQGTQVTVSSGTGGGGSGGGGSGGGGSEFDIQMTQSPSSLSASVGDRVTITCKASDHINNWLAWYQQKPGQAPKLLIYGATTLETGVPSRFSGSGSGTDYTLTISSLQPEDFATYYCQQSWNTPWTFGQGTKLEIKRGGGGSGGGGSGGGGSQVQLQQPGAELVKPGASVKMSCKASGYAFSSYWINWMKQKPGQGLEWIGQIYPGDGDTNYNGKFKGRATLTADTSSSTAYMQLSSLTSEDSAVYFCARSITTVVGCAMDYWGQGTSVTVSSTRQSFGLLDPKLCYLLDGILFIYGVILTALFLRVKFSRSADAPAYQQGQNQLYNELNLGRREEYDVLDKRRGRDPEMGGKPQRRKNPQEGLYNELQKDKMAEAYSEIGMKGERRRGKGHDGLYQGLSTATKDTYDALHMQALPPR

SEQ ID NO: 16442 - protein, 786 aa, Artificial Sequence
  Synthetic Polypeptide
MALPVTALLLPLALLLHAARPEVQLVESGGSLVQPGGSLRLSCAASGFTFDDYAMSWVRQVPGKGLEWVSSINWSGTHTDYADSVKGRFTISRNNANNTLYLQMNSLKSEDTAVYYCAKNWRDAGTTWFEKSGSAGQGTQVTVSSGTGGGGSGGGGSGGGGSEFDIQMTQSPSSLSASVGDRVTITCKASDHINNWLAWYQQKPGQAPKLLIYGATTLETGVPSRFSGSGSGTDYTLTISSLQPEDFATYYCQQSWNTPWTFGQGTKLEIKRGGGGSGGGGSGGGGSQVQLQQPGAELVKPGASVKMSCKASGYAFSSYWINWMKQKPGQGLEWIGQIYPGDGDTNYNGKFKGRATLTADTSSSTAYMQLSSLTSEDSAVYFCARSITTVVGCAMDYWGQGTSVTVSSTRGSGIQNPDPAVYQLRDSKSSDKSVCLFTDFDSQTNVSQSKDSDVYITDKTVLDMRSMDFKSNSAVAWSNKSDFACANAFNNSIIPEDTFFPSPESSCDVKLVEKSFETDTNLNFQNLSVIGFRILLLKVAGFNLLMTLRLWSSRAKRSGSGVKQTLNFDLLKLAGDVESNPGPSRGHMTEYKPTVRLATRDDVPRAVRTLAAAFADYPATRHTVDPDRHIERVTELQELFLTRVGLDIGKVWVADDGAAVAVWTTPESVEAGAVFAEIGPRMAELSGSRLAAQQQMEGLLAPHRPKEPAWFLATVGVSPDHQGKGLGSAVVLPGVEAAERAGVPAFLETSAPRNLPFYERLGFTVTADVEVPEGPRTWCMTRKPGA

SEQ ID NO: 16443 - protein, 818 aa, Artificial Sequence
  Synthetic Polypeptide
MALPVTALLLPLALLLHAARPEVQLVESGGSLVQPGGSLRLSCAASGFTFDDYAMSWVRQVPGKGLEWVSSINWSGTHTDYADSVKGRFTISRNNANNTLYLQMNSLKSEDTAVYYCAKNWRDAGTTWFEKSGSAGQGTQVTVSSGTGGGGSGGGGSGGGGSEFDIQMTQSPSSLSASVGDRVTITCKASDHINNWLAWYQQKPGQAPKLLIYGATTLETGVPSRFSGSGSGTDYTLTISSLQPEDFATYYCQQSWNTPWTFGQGTKLEIKRGGGGSGGGGSGGGGSQVQLQQPGAELVKPGASVKMSCKASGYAFSSYWINWMKQKPGQGLEWIGQIYPGDGDTNYNGKFKGRATLTADTSSSTAYMQLSSLTSEDSAVYFCARSITTVVGCAMDYWGQGTSVTVSSLEDLKNVFPPEVAVFEPSEAEISHTQKATLVCLATGFYPDHVELSWWVNGKEVHSGVSTDPQPLKEQPALNDSRYCLSSRLRVSATFWQNPRNHFRCQVQFYGLSENDEWTQDRAKPVTQIVSAEAWGRADCGFTSESYQQGVLSATILYEILLGKATLYAVLVSALVLMAMVKRKDSRGRAKRSGSGATNFSLLKQAGDVEENPGPTRGHMTEYKPTVRLATRDDVPRAVRTLAAAFADYPATRHTVDPDRHIERVTELQELFLTRVGLDIGKVWVADDGAAVAVWTTPESVEAGAVFAEIGPRMAELSGSRLAAQQQMEGLLAPHRPKEPAWFLATVGVSPDHQGKGLGSAVVLPGVEAAERAGVPAFLETSAPRNLPFYERLGFTVTADVEVPEGPRTWCMTRKPGA

SEQ ID NO: 16444 - protein, 868 aa, Artificial Sequence
  Synthetic Polypeptide
MALPVTALLLPLALLLHAARPEVQLVESGGSLVQPGGSLRLSCAASGFTFDDYAMSWVRQVPGKGLEWVSSINWSGTHTDYADSVKGRFTISRNNANNTLYLQMNSLKSEDTAVYYCAKNWRDAGTTWFEKSGSAGQGTQVTVSSGTGGGGSGGGGSGGGGSEFDIQMTQSPSSLSASVGDRVTITCKASDHINNWLAWYQQKPGQAPKLLIYGATTLETGVPSRFSGSGSGTDYTLTISSLQPEDFATYYCQQSWNTPWTFGQGTKLEIKRGGGGSGGGGSGGGGSQVQLQQPGAELVKPGASVKMSCKASGYAFSSYWINWMKQKPGQGLEWIGQIYPGDGDTNYNGKFKGRATLTADTSSSTAYMQLSSLTSEDSAVYFCARSITTVVGCAMDYWGQGTSVTVSSTREQKLISEEDLGSGTPFPSLAPPIMLLVDGKQQMVVVCLVLDVAPPGLDSPIWFSAGNGSALDAFTYGPSPATDGTWTNLAHLSLPSEELASWEPLVCHTGPGAEGHSRSTQPMHLSGEASTARTCPQEPLRGTPGGALWLGVLRLLLFKLLLFDLLLTCSCLCDPAGPLPSPATTTRLRALGSHRLHPATETGGREATSSPRPQPRDRRWGDTPPGRKPGSPVRAKRSGSGVKQTLNFDLLKLAGDVESNPGPSRSRGHMTEYKPTVRLATRDDVPRAVRTLAAAFADYPATRHTVDPDRHIERVTELQELFLTRVGLDIGKVWVADDGAAVAVWTTPESVEAGAVFAEIGPRMAELSGSRLAAQQQMEGLLAPHRPKEPAWFLATVGVSPDHQGKGLGSAVVLPGVEAAERAGVPAFLETSAPRNLPFYERLGFTVTADVEVPEGPRTWCMTRKPGA

SEQ ID NO: 16445 - protein, 682 aa, Artificial Sequence
  Synthetic Polypeptide
MALPVTALLLPLALLLHAARPEVQLVESGGSLVQPGGSLRLSCAASGFTFDDYAMSWVRQVPGKGLEWVSSINWSGTHTDYADSVKGRFTISRNNANNTLYLQMNSLKSEDTAVYYCAKNWRDAGTTWFEKSGSAGQGTQVTVSSGTGGGGSGGGGSGGGGSEFDIQMTQSPSSLSASVGDRVTITCKASDHINNWLAWYQQKPGQAPKLLIYGATTLETGVPSRFSGSGSGTDYTLTISSLQPEDFATYYCQQSWNTPWTFGQGTKLEIKRLEDLKNVFPPEVAVFEPSEAEISHTQKATLVCLATGFYPDHVELSWWVNGKEVHSGVSTDPQPLKEQPALNDSRYCLSSRLRVSATFWQNPRNHFRCQVQFYGLSENDEWTQDRAKPVTQIVSAEAWGRADCGFTSESYQQGVLSATILYEILLGKATLYAVLVSALVLMAMVKRKDSRGRAKRSGSGATNFSLLKQAGDVEENPGPTRGHMTEYKPTVRLATRDDVPRAVRTLAAAFADYPATRHTVDPDRHIERVTELQELFLTRVGLDIGKVWVADDGAAVAVWTTPESVEAGAVFAEIGPRMAELSGSRLAAQQQMEGLLAPHRPKEPAWFLATVGVSPDHQGKGLGSAVVLPGVEAAERAGVPAFLETSAPRNLPFYERLGFTVTADVEVPEGPRTWCMTRKPGA

SEQ ID NO: 16446 - protein, 452 aa, Artificial Sequence
  Synthetic Polypeptide
MALPVTALLLPLALLLHAARPEVQLVESGGSLVQPGGSLRLSCAASGFTFDDYAMSWVRQVPGKGLEWVSSINWSGTHTDYADSVKGRFTISRNNANNTLYLQMNSLKSEDTAVYYCAKNWRDAGTTWFEKSGSAGQGTQVTVSSGTGGGGSGGGGSGGGGSEFDIQMTQSPSSLSASVGDRVTITCKASDHINNWLAWYQQKPGQAPKLLIYGATTLETGVPSRFSGSGSGTDYTLTISSLQPEDFATYYCQQSWNTPWTFGQGTKLEIKRLEDLKNVFPPEVAVFEPSEAEISHTQKATLVCLATGFYPDHVELSWWVNGKEVHSGVSTDPQPLKEQPALNDSRYCLSSRLRVSATFWQNPRNHFRCQVQFYGLSENDEWTQDRAKPVTQIVSAEAWGRADCGFTSESYQQGVLSATILYEILLGKATLYAVLVSALVLMAMVKRKDSRG

SEQ ID NO: 16447 - protein, 700 aa, Artificial Sequence
  Synthetic Polypeptide
MALPVTALLLPLALLLHAARPEVQLVESGGSLVQPGGSLRLSCAASGFTFDDYAMSWVRQVPGKGLEWVSSINWSGTHTDYADSVKGRFTISRNNANNTLYLQMNSLKSEDTAVYYCAKNWRDAGTTWFEKSGSAGQGTQVTVSSGTGGGGSGGGGSGGGGSEFDIQMTQSPSSLSASVGDRVTITCKASDHINNWLAWYQQKPGQAPKLLIYGATTLETGVPSRFSGSGSGTDYTLTISSLQPEDFATYYCQQSWNTPWTFGQGTKLEIKRLEGKPIPNPLLGLDSTGSGEDLKNVFPPEVAVFEPSEAEISHTQKATLVCLATGFYPDHVELSWWVNGKEVHSGVCTDPQPLKEQPALNDSRYCLSSRLRVSATFWQNPRNHFRCQVQFYGLSENDEWTQDRAKPVTQIVSAEAWGRADCGFTSESYQQGVLSATILYEILLGKATLYAVLVSALVLMAMVKRKDSRGRAKRSGSGATNFSLLKQAGDVEENPGPTRGHMTEYKPTVRLATRDDVPRAVRTLAAAFADYPATRHTVDPDRHIERVTELQELFLTRVGLDIGKVWVADDGAAVAVWTTPESVEAGAVFAEIGPRMAELSGSRLAAQQQMEGLLAPHRPKEPAWFLATVGVSPDHQGKGLGSAVVLPGVEAAERAGVPAFLETSAPRNLPFYERLGFTVTADVEVPEGPRTWCMTRKPGA

SEQ ID NO: 16448 - protein, 470 aa, Artificial Sequence
  Synthetic Polypeptide
MALPVTALLLPLALLLHAARPEVQLVESGGSLVQPGGSLRLSCAASGFTFDDYAMSWVRQVPGKGLEWVSSINWSGTHTDYADSVKGRFTISRNNANNTLYLQMNSLKSEDTAVYYCAKNWRDAGTTWFEKSGSAGQGTQVTVSSGTGGGGSGGGGSGGGGSEFDIQMTQSPSSLSASVGDRVTITCKASDHINNWLAWYQQKPGQAPKLLIYGATTLETGVPSRFSGSGSGTDYTLTISSLQPEDFATYYCQQSWNTPWTFGQGTKLEIKRLEGKPIPNPLLGLDSTGSGEDLKNVFPPEVAVFEPSEAEISHTQKATLVCLATGFYPDHVELSWWVNGKEVHSGVCTDPQPLKEQPALNDSRYCLSSRLRVSATFWQNPRNHFRCQVQFYGLSENDEWTQDRAKPVTQIVSAEAWGRADCGFTSESYQQGVLSATILYEILLGKATLYAVLVSALVLMAMVKRKDSRG

SEQ ID NO: 16449 - protein, 786 aa, Artificial Sequence
  Synthetic Polypeptide
MALPVTALLLPLALLLHAARPEVQLVESGGSLVQPGGSLRLSCAASGFTFDDYAMSWVRQVPGKGLEWVSSINWSGTHTDYADSVKGRFTISRNNANNTLYLQMNSLKSEDTAVYYCAKNWRDAGTTWFEKSGSAGQGTQVTVSSGTGGGGSGGGGSGGGGSEFDIQMTQSPSSLSASVGDRVTITCKASDHINNWLAWYQQKPGQAPKLLIYGATTLETGVPSRFSGSGSGTDYTLTISSLQPEDFATYYCQQSWNTPWTFGQGTKLEIKRGGGGSGGGGSGGGGSQVQLQQPGAELVKPGASVKMSCKASGYAFSSYWINWMKQKPGQGLEWIGQIYPGDGDTNYNGKFKGRATLTADTSSSTAYMQLSSLTSEDSAVYFCARSITTVVGCAMDYWGQGTSVTVSSTRGSGIQNPDPAVYQLRDSKSSDKSVCLFTDFDSQTNVSQSKDSDVYITDKTVLDMRSMDFKSNSAVAWSNKSDFACANAFNNSIIPEDTFFPSSDVPCDVKLVEKSFETDTNLNFQNLSVIGFRILLLKVAGFNLLMTLRLWSSRAKRSGSGVKQTLNFDLLKLAGDVESNPGPSRGHMTEYKPTVRLATRDDVPRAVRTLAAAFADYPATRHTVDPDRHIERVTELQELFLTRVGLDIGKVWVADDGAAVAVWTTPESVEAGAVFAEIGPRMAELSGSRLAAQQQMEGLLAPHRPKEPAWFLATVGVSPDHQGKGLGSAVVLPGVEAAERAGVPAFLETSAPRNLPFYERLGFTVTADVEVPEGPRTWCMTRKPGA

SEQ ID NO: 16450 - protein, 818 aa, Artificial Sequence
  Synthetic Polypeptide
MALPVTALLLPLALLLHAARPEVQLVESGGSLVQPGGSLRLSCAASGFTFDDYAMSWVRQVPGKGLEWVSSINWSGTHTDYADSVKGRFTISRNNANNTLYLQMNSLKSEDTAVYYCAKNWRDAGTTWFEKSGSAGQGTQVTVSSGTGGGGSGGGGSGGGGSEFDIQMTQSPSSLSASVGDRVTITCKASDHINNWLAWYQQKPGQAPKLLIYGATTLETGVPSRFSGSGSGTDYTLTISSLQPEDFATYYCQQSWNTPWTFGQGTKLEIKRGGGGSGGGGSGGGGSQVQLQQPGAELVKPGASVKMSCKASGYAFSSYWINWMKQKPGQGLEWIGQIYPGDGDTNYNGKFKGRATLTADTSSSTAYMQLSSLTSEDSAVYFCARSITTVVGCAMDYWGQGTSVTVSSLEDLKNVFPPEVAVFEPSKAEIAHTQKATLVCLATGFYPDHVELSWWVNGKEVHSGVSTDPQPLKEQPALNDSRYCLSSRLRVSATFWQNPRNHFRCQVQFYGLSENDEWTQDRAKPVTQIVSAEAWGRADCGITSASYHQGVLSATILYEILLGKATLYAVLVSALVLMAMVKRKDSRGRAKRSGSGATNFSLLKQAGDVEENPGPTRGHMTEYKPTVRLATRDDVPRAVRTLAAAFADYPATRHTVDPDRHIERVTELQELFLTRVGLDIGKVWVADDGAAVAVWTTPESVEAGAVFAEIGPRMAELSGSRLAAQQQMEGLLAPHRPKEPAWFLATVGVSPDHQGKGLGSAVVLPGVEAAERAGVPAFLETSAPRNLPFYERLGFTVTADVEVPEGPRTWCMTRKPGA

SEQ ID NO: 16451 - protein, 580 aa, Artificial Sequence
  Synthetic Polypeptide
MDWIWRILFLVGAATGAHSGPVDNKFNKERYSAYYEIWQLPNLNVRQKAAFIGSLQDDPSQSANLLAEAKKLNDAQAPKGSGGGGSGGGGSGGGGSFEQVQLQQPGAELVKPGASVKMSCKASGYAFSSYWINWMKQKPGQGLEWIGQIYPGDGDTNYNGKFKGRATLTADTSSSTAYMQLSSLTSEDSAVYFCARSITTVVGCAMDYWGQGTSVTVSSGGGGSGGGGSGGGGSDIQMTQSPSSLSASVGDRVTITCKASDHINNWLAWYQQKPGQAPKLLIYGATTLETGVPSRFSGSGSGTDYTLTISSLQPEDFATYYCQQSWNTPWTFGQGTKLEIKRTREQKLISEEDLAKPTTTPAPRPPTPAPTIASQPLSLRPEACRPAAGGAVHTRGLDFACDIYIWAPLAGTCGVLLLSLVITLYCKRGRKKLLYIFKQPFMRPVQTTQEEDGCSCRFPEEEEGGCELRVKFSRSADAPAYQQGQNQLYNELNLGRREEYDVLDKRRGRDPEMGGKPRRKNPQEGLYNELQKDKMAEAYSEIGMKGERRRGKGHDGLYQGLSTATKDTYDALHMQALPPR

SEQ ID NO: 16452 - protein, 933 aa, Artificial Sequence
  Synthetic Polypeptide
MALPVTALLLPLALLLHAARPDIQMTQSPSSLSASVGDRVTITCKASDHINNWLAWYQQKPGQAPKLLIYGATTLETGVPSRFSGSGSGTDYTLTISSLQPEDFATYYCQQSWNTPWTFGQGTKLEIKRLEIQNPDPAVYQLRDSKSSDKSVCLFTDFDSQTNVSQSKDSDVYITDKCVLDMRSMDFKSNSAVAWSNKSDFACANAFNNSIIPEDTFFPSSDVPCDVKLVEKSFETDTNLNFQNLSVIGFRILLLKVAGFNLLMTLRLWSSRAKRSGSGVKQTLNFDLLKLAGDVESNPGPTSMDWIWRILFLVGAATGAHSGPVDNKFNKERYSAYYEIWQLPNLNVRQKAAFIGSLQDDPSQSANLLAEAKKLNDAQAPKGSGGGGSGGGGSGGGGSFEQVQLQQPGAELVKPGASVKMSCKASGYAFSSYWINWMKQKPGQGLEWIGQIYPGDGDTNYNGKFKGRATLTADTSSSTAYMQLSSLTSEDSAVYFCARSITTVVGCAMDYWGQGTSVTVSSTREDLKNVFPPEVAVFEPSKAEIAHTQKATLVCLATGFYPDHVELSWWVNGKEVHSGVCTDPQPLKEQPALNDSRYCLSSRLRVSATFWQNPRNHFRCQVQFYGLSENDEWTQDRAKPVTQIVSAEAWGRADCGITSASYHQGVLSATILYEILLGKATLYAVLVSALVLMAMVKRKDSRGRAKRSGSGATNFSLLKQAGDVEENPGPSRGHMTEYKPTVRLATRDDVPRAVRTLAAAFADYPATRHTVDPDRHIERVTELQELFLTRVGLDIGKVWVADDGAAVAVWTTPESVEAGAVFAEIGPRMAELSGSRLAAQQQMEGLLAPHRPKEPAWFLATVGVSPDHQGKGLGSAVVLPGVEAAERAGVPAFLETSAPRNLPFYERLGFTVTADVEVPEGPRTWCMTRKPGA

SEQ ID NO: 16453 - protein, 932 aa, Artificial Sequence
  Synthetic Polypeptide
MALPVTALLLPLALLLHAARPDIQMTQSPSSLSASVGDRVTITCKASDHINNWLAWYQQKPGQAPKLLIYGATTLETGVPSRFSGSGSGTDYTLTISSLQPEDFATYYCQQSWNTPWTFGQGTKLEIKRLEDLKNVFPPEVAVFEPSKAEIAHTQKATLVCLATGFYPDHVELSWWVNGKEVHSGVCTDPQPLKEQPALNDSRYCLSSRLRVSATFWQNPRNHFRCQVQFYGLSENDEWTQDRAKPVTQIVSAEAWGRADCGITSASYHQGVLSATILYEILLGKATLYAVLVSALVLMAMVKRKDSRGRAKRSGSGATNFSLLKQAGDVEENPGPTSMDWIWRILFLVGAATGAHSGPVDNKFNKERYSAYYEIWQLPNLNVRQKAAFIGSLQDDPSQSANLLAEAKKLNDAQAPKGSGGGGSGGGGSGGGGSFEQVQLQQPGAELVKPGASVKMSCKASGYAFSSYWINWMKQKPGQGLEWIGQIYPGDGDTNYNGKFKGRATLTADTSSSTAYMQLSSLTSEDSAVYFCARSITTVVGCAMDYWGQGTSVTVSSTRIQNPDPAVYQLRDSKSSDKSVCLFTDFDSQTNVSQSKDSDVYITDKCVLDMRSMDFKSNSAVAWSNKSDFACANAFNNSIIPEDTFFPSSDVPCDVKLVEKSFETDTNLNFQNLSVIGFRILLLKVAGFNLLMTLRLWSSRAKRSGSGVKQTLNFDLLKLAGDVESNPGPSRGHMTEYKPTVRLATRDDVPRAVRTLAAAFADYPATRHTVDPDRHIERVTELQELFLTRVGLDIGKVWVADDGAAVAVWTTPESVEAGAVFAEIGPRMAELSGSRLAAQQQMEGLLAPHRPKEPAWFLATVGVSPDHQGKGLGSAVVLPGVEAAERAGVPAFLETSAPRNLPFYERLGFTVTADVEVPEGPRTWCMTRKPGA

SEQ ID NO: 16454 - protein, 932 aa, Artificial Sequence
  Synthetic Polypeptide
MALPVTALLLPLALLLHAARPDIQMTQSPSSLSASVGDRVTITCKASDHINNWLAWYQQKPGQAPKLLIYGATTLETGVPSRFSGSGSGTDYTLTISSLQPEDFATYYCQQSWNTPWTFGQGTKLEIKRLEDLKNVFPPEVAVFEPSEAEISHTQKATLVCLATGFYPDHVELSWWVNGKEVHSGVCTDPQPLKEQPALNDSRYCLSSRLRVSATFWQNPRNHFRCQVQFYGLSENDEWTQDRAKPVTQIVSAEAWGRADCGFTSESYQQGVLSATILYEILLGKATLYAVLVSALVLMAMVKRKDSRGRAKRSGSGATNFSLLKQAGDVEENPGPTSMDWIWRILFLVGAATGAHSGPVDNKFNKERYSAYYEIWQLPNLNVRQKAAFIGSLQDDPSQSANLLAEAKKLNDAQAPKGSGGGGSGGGGSGGGGSFEQVQLQQPGAELVKPGASVKMSCKASGYAFSSYWINWMKQKPGQGLEWIGQIYPGDGDTNYNGKFKGRATLTADTSSSTAYMQLSSLTSEDSAVYFCARSITTVVGCAMDYWGQGTSVTVSSTRIQNPDPAVYQLRDSKSSDKSVCLFTDFDSQTNVSQSKDSDVYITDKCVLDMRSMDFKSNSAVAWSNKSDFACANAFNNSIIPEDTFFPSPESSCDVKLVEKSFETDTNLNFQNLSVIGFRILLLKVAGFNLLMTLRLWSSRAKRSGSGVKQTLNFDLLKLAGDVESNPGPSRGHMTEYKPTVRLATRDDVPRAVRTLAAAFADYPATRHTVDPDRHIERVTELQELFLTRVGLDIGKVWVADDGAAVAVWTTPESVEAGAVFAEIGPRMAELSGSRLAAQQQMEGLLAPHRPKEPAWFLATVGVSPDHQGKGLGSAVVLPGVEAAERAGVPAFLETSAPRNLPFYERLGFTVTADVEVPEGPRTWCMTRKPGA

SEQ ID NO: 16455 - protein, 699 aa, Artificial Sequence
  Synthetic Polypeptide
MALPVTALLLPLALLLHAARPDIQMTQSPSSLSASVGDRVTITCKASDHINNWLAWYQQKPGQAPKLLIYGATTLETGVPSRFSGSGSGTDYTLTISSLQPEDFATYYCQQSWNTPWTFGQGTKLEIKRLEDLKNVFPPEVAVFEPSEAEISHTQKATLVCLATGFYPDHVELSWWVNGKEVHSGVCTDPQPLKEQPALNDSRYCLSSRLRVSATFWQNPRNHFRCQVQFYGLSENDEWTQDRAKPVTQIVSAEAWGRADCGFTSESYQQGVLSATILYEILLGKATLYAVLVSALVLMAMVKRKDSRGRAKRSGSGATNFSLLKQAGDVEENPGPTSMDWIWRILFLVGAATGAHSGPVDNKFNKERYSAYYEIWQLPNLNVRQKAAFIGSLQDDPSQSANLLAEAKKLNDAQAPKGSGGGGSGGGGSGGGGSFEQVQLQQPGAELVKPGASVKMSCKASGYAFSSYWINWMKQKPGQGLEWIGQIYPGDGDTNYNGKFKGRATLTADTSSSTAYMQLSSLTSEDSAVYFCARSITTVVGCAMDYWGQGTSVTVSSTRIQNPDPAVYQLRDSKSSDKSVCLFTDFDSQTNVSQSKDSDVYITDKCVLDMRSMDFKSNSAVAWSNKSDFACANAFNNSIIPEDTFFPSPESSCDVKLVEKSFETDTNLNFQNLSVIGFRILLLKVAGFNLLMTLRLWSS

SEQ ID NO: 16456 - protein, 924 aa, Artificial Sequence
  Synthetic Polypeptide
MALPVTALLLPLALLLHAARPDIQMTQSPSSLSASVGDRVTITCKASDHINNWLAWYQQKPGQAPKLLIYGATTLETGVPSRFSGSGSGTDYTLTISSLQPEDFATYYCQQSWNTPWTFGQGTKLEIKRLEDLKNVFPPEVAVFEPSEAEISHTQKATLVCLATGFYPDHVELSWWVNGKEVHSGVCTDPQPLKEQPALNDSRYCLSSRLRVSATFWQNPRNHFRCQVQFYGLSENDEWTQDRAKPVTQIVSAEAWGRADCGFTSESYQQGVLSATILYEILLGKATLYAVLVSALVLMAMVKRKDSRGRAKRSGSGATNFSLLKQAGDVEENPGPTSMDWIWRILFLVGAATGAHSGPVDNKFNKERYSAYYEIWQLPNLNVRQKAAFIGSLQDDPSQSANLLAEAKKLNDAQAPKGSGGGGSGGGGSGGGGSFEQVQLQQPGAELVKPGASVKMSCKASGYAFSSYWINWMKQKPGQGLEWIGQIYPGDGDTNYNGKFKGRATLTADTSSSTAYMQLSSLTSEDSAVYFCARSITTVVGCAMDYWGQGTSVTVSSTRIQNPDPAVYQLRDSKSSDKSVCLFTDFDSQTNVSQSKDSDVYITDKCVLDMRSMDFKSNSAVAWSNKSDFACANAFNNSIIPEDTFFPSPESSCDVKLVEKSFETDTNLNFQNLSVIGFRILLLKVAGFNLLMTLRLWSSRAKRSGSGVKQTLNFDLLKLAGDVESNPGPSRGGIHTMATYEVLCEVARKLGTDDREVVLFLLNVFIPQPTLAQLIGALRALKEEGRLTFPLLAECLFRAGRRDLLRDLLHLDPRFLERHLAGTMSYFSPYQLTVLHVDGELCARDIRSLIFLSKDTIGSRSTPQTFLHWVYCMENLDLLGPTDVDALMSMLRSLSRVDLQRQVQTLMGLHLSGPSHSQHYRHTP

SEQ ID NO: 16457 - protein, 703 aa, Artificial Sequence
  Synthetic Polypeptide
MALPVTALLLPLALLLHAARPDIQMTQSPSSLSASVGDRVTITCKASDHINNWLAWYQQKPGQAPKLLIYGATTLETGVPSRFSGSGSGTDYTLTISSLQPEDFATYYCQQSWNTPWTFGQGTKLEIKRLEIQNPDPAVYQLRDSKSSDKSVCLFTDFDSQTNVSQSKDSDVYITDKCVLDMRSMDFKSNSAVAWSNKSDFACANAFNNSIIPEDTFFPSPESSCDVKLVEKSFETDTNLNFQNLSVIGFRILLLKVAGFNLLMTLRLWSSRAKRSGSGVKQTLNFDLLKLAGDVESNPGPTSMDWIWRILFLVGAATGAHSGPVDNKFNKERYSAYYEIWQLPNLNVRQKAAFIGSLQDDPSQSANLLAEAKKLNDAQAPKGSGGGGSGGGGSGGGGSFEQVQLQQPGAELVKPGASVKMSCKASGYAFSSYWINWMKQKPGQGLEWIGQIYPGDGDTNYNGKFKGRATLTADTSSSTAYMQLSSLTSEDSAVYFCARSITTVVGCAMDYWGQGTSVTVSSTREDLKNVFPPEVAVFEPSEAEISHTQKATLVCLATGFYPDHVELSWWVNGKEVHSGVCTDPQPLKEQPALNDSRYCLSSRLRVSATFWQNPRNHFRCQVQFYGLSENDEWTQDRAKPVTQIVSAEAWGRADCGFTSESYQQGVLSATILYEILLGKATLYAVLVSALVLMAMVKRKDSRG

SEQ ID NO: 16458 - protein, 925 aa, Artificial Sequence
  Synthetic Polypeptide
MALPVTALLLPLALLLHAARPDIQMTQSPSSLSASVGDRVTITCKASDHINNWLAWYQQKPGQAPKLLIYGATTLETGVPSRFSGSGSGTDYTLTISSLQPEDFATYYCQQSWNTPWTFGQGTKLEIKRLEIQNPDPAVYQLRDSKSSDKSVCLFTDFDSQTNVSQSKDSDVYITDKCVLDMRSMDFKSNSAVAWSNKSDFACANAFNNSIIPEDTFFPSPESSCDVKLVEKSFETDTNLNFQNLSVIGFRILLLKVAGFNLLMTLRLWSSRAKRSGSGVKQTLNFDLLKLAGDVESNPGPTSMDWIWRILFLVGAATGAHSGPVDNKFNKERYSAYYEIWQLPNLNVRQKAAFIGSLQDDPSQSANLLAEAKKLNDAQAPKGSGGGGSGGGGSGGGGSFEQVQLQQPGAELVKPGASVKMSCKASGYAFSSYWINWMKQKPGQGLEWIGQIYPGDGDTNYNGKFKGRATLTADTSSSTAYMQLSSLTSEDSAVYFCARSITTVVGCAMDYWGQGTSVTVSSTREDLKNVFPPEVAVFEPSEAEISHTQKATLVCLATGFYPDHVELSWWVNGKEVHSGVCTDPQPLKEQPALNDSRYCLSSRLRVSATFWQNPRNHFRCQVQFYGLSENDEWTQDRAKPVTQIVSAEAWGRADCGFTSESYQQGVLSATILYEILLGKATLYAVLVSALVLMAMVKRKDSRGRAKRSGSGATNFSLLKQAGDVEENPGPSRGGIHTMATYEVLCEVARKLGTDDREVVLFLLNVFIPQPTLAQLIGALRALKEEGRLTFPLLAECLFRAGRRDLLRDLLHLDPRFLERHLAGTMSYFSPYQLTVLHVDGELCARDIRSLIFLSKDTIGSRSTPQTFLHWVYCMENLDLLGPTDVDALMSMLRSLSRVDLQRQVQTLMGLHLSGPSHSQHYRHTP

SEQ ID NO: 16459 - protein, 932 aa, Artificial Sequence
  Synthetic Polypeptide
MALPVTALLLPLALLLHAARPDIQMTQSPSSLSASVGDRVTITCKASDHINNWLAWYQQKPGQAPKLLIYGATTLETGVPSRFSGSGSGTDYTLTISSLQPEDFATYYCQQSWNTPWTFGQGTKLEIKRLEDLKNVFPPEVAVFEPSEAEISHTQKATLVCLATGFYPDHVELSWWVNGKEVHSGVSTDPQPLKEQPALNDSRYCLSSRLRVSATFWQNPRNHFRCQVQFYGLSENDEWTQDRAKPVTQIVSAEAWGRADCGFTSESYQQGVLSATILYEILLGKATLYAVLVSALVLMAMVKRKDSRGRAKRSGSGATNFSLLKQAGDVEENPGPTSMDWIWRILFLVGAATGAHSGPVDNKFNKERYSAYYEIWQLPNLNVRQKAAFIGSLQDDPSQSANLLAEAKKLNDAQAPKGSGGGGSGGGGSGGGGSFEQVQLQQPGAELVKPGASVKMSCKASGYAFSSYWINWMKQKPGQGLEWIGQIYPGDGDTNYNGKFKGRATLTADTSSSTAYMQLSSLTSEDSAVYFCARSITTVVGCAMDYWGQGTSVTVSSTRIQNPDPAVYQLRDSKSSDKSVCLFTDFDSQTNVSQSKDSDVYITDKTVLDMRSMDFKSNSAVAWSNKSDFACANAFNNSIIPEDTFFPSPESSCDVKLVEKSFETDTNLNFQNLSVIGFRILLLKVAGFNLLMTLRLWSSRAKRSGSGVKQTLNFDLLKLAGDVESNPGPSRGHMTEYKPTVRLATRDDVPRAVRTLAAAFADYPATRHTVDPDRHIERVTELQELFLTRVGLDIGKVWVADDGAAVAVWTTPESVEAGAVFAEIGPRMAELSGSRLAAQQQMEGLLAPHRPKEPAWFLATVGVSPDHQGKGLGSAVVLPGVEAAERAGVPAFLETSAPRNLPFYERLGFTVTADVEVPEGPRTWCMTRKPGA

SEQ ID NO: 16460 - protein, 1014 aa, Artificial Sequence
  Synthetic Polypeptide
MALPVTALLLPLALLLHAARPDIQMTQSPSSLSASVGDRVTITCKASDHINNWLAWYQQKPGQAPKLLIYGATTLETGVPSRFSGSGSGTDYTLTISSLQPEDFATYYCQQSWNTPWTFGQGTKLEIKRLEDLKNVFPPEVAVFEPSEAEISHTQKATLVCLATGFYPDHVELSWWVNGKEVHSGVSTDPQPLKEQPALNDSRYCLSSRLRVSATFWQNPRNHFRCQVQFYGLSENDEWTQDRAKPVTQIVSAEAWGRADCGFTSESYQQGVLSATILYEILLGKATLYAVLVSALVLMAMVKRKDSRGRAKRSGSGATNFSLLKQAGDVEENPGPTSMDWIWRILFLVGAATGAHSGPVDNKFNKERYSAYYEIWQLPNLNVRQKAAFIGSLQDDPSQSANLLAEAKKLNDAQAPKGSGGGGSGGGGSGGGGSFEQVQLQQPGAELVKPGASVKMSCKASGYAFSSYWINWMKQKPGQGLEWIGQIYPGDGDTNYNGKFKGRATLTADTSSSTAYMQLSSLTSEDSAVYFCARSITTVVGCAMDYWGQGTSVTVSSTREQKLISEEDGSGTPFPSLAPPIMLLVDGKQQMVVVCLVLDVAPPGLDSPIWFSAGNGSALDAFTYGPSPATDGTWTNLAHLSLPSEELASWEPLVCHTGPGAEGHSRSTQPMHLSGEASTARTCPQEPLRGTPGGALWLGVLRLLLFKLLLFDLLLTCSCLCDPAGPLPSPATTTRLRALGSHRLHPATETGGREATSSPRPQPRDRRWGDTPPGRKPGSPVRAKRSGSGVKQTLNFDLLKLAGDVESNPGPSRGHMTEYKPTVRLATRDDVPRAVRTLAAAFADYPATRHTVDPDRHIERVTELQELFLTRVGLDIGKVWVADDGAAVAVWTTPESVEAGAVFAEIGPRMAELSGSRLAAQQQMEGLLAPHRPKEPAWFLATVGVSPDHQGKGLGSAVVLPGVEAAERAGVPAFLETSAPRNLPFYERLGFTVTADVEVPEGPRTWCMTRKPGA

SEQ ID NO: 16461 - protein, 969 aa, Artificial Sequence
  Synthetic Polypeptide
MALPVTALLLPLALLLHAARPDIQMTQSPSSLSASVGDRVTITCKASDHINNWLAWYQQKPGQAPKLLIYGATTLETGVPSRFSGSGSGTDYTLTISSLQPEDFATYYCQQSWNTPWTFGQGTKLEIKRLEGKPIPNPLLGLDSTGSGDKQLDADVSPKPTIFLPSIAETKLQKAGTYLCLLEKFFPDVIKIHWQEKKSNTILGSQEGNTMKTNDTYMKFSWLTVPEKSLDKEHRCIVRHENNKNGVDQEIIFPPIKTDVITMDPKDNCSKDANDTLLLQLTNTSAYYMYLLLLLKSVVYFAIITCCLLRRTAFCCNGEKSRAKRSGSGATNFSLLKQAGDVEENPGPTSMDWIWRILFLVGAATGAHSGPVDNKFNKERYSAYYEIWQLPNLNVRQKAAFIGSLQDDPSQSANLLAEAKKLNDAQAPKGSGGGGSGGGGSGGGGSFEQVQLQQPGAELVKPGASVKMSCKASGYAFSSYWINWMKQKPGQGLEWIGQIYPGDGDTNYNGKFKGRATLTADTSSSTAYMQLSSLTSEDSAVYFCARSITTVVGCAMDYWGQGTSVTVSSTREQKLISEEDGSGSQPHTKPSVFVMKNGTNVACLVKEFYPKDIRINLVSSKKITEFDPAIVISPSGKYNAVKLGKYEDSNSVTCSVQHDNKTVHSTDFEVKTDSTDHVKPKETENTKQPSKSCHKPKAIVHTEKVNMMSLTVLGLRMLFAKTVAVNFLLTAKLFFLRAKRSGSGVKQTLNFDLLKLAGDVESNPGPSRGHMTEYKPTVRLATRDDVPRAVRTLAAAFADYPATRHTVDPDRHIERVTELQELFLTRVGLDIGKVWVADDGAAVAVWTTPESVEAGAVFAEIGPRMAELSGSRLAAQQQMEGLLAPHRPKEPAWFLATVGVSPDHQGKGLGSAVVLPGVEAAERAGVPAFLETSAPRNLPFYERLGFTVTADVEVPEGPRTWCMTRKPGA

SEQ ID NO: 16462 - protein, 707 aa, Artificial Sequence
  Synthetic Polypeptide
MALPVTALLLPLALLLHAARPDIQMTQSPSSLSASVGDRVTITCKASDHINNWLAWYQQKPGQAPKLLIYGATTLETGVPSRFSGSGSGTDYTLTISSLQPEDFATYYCQQSWNTPWTFGQGTKLEIKRLESQPHTKPSVFVMKNGTNVACLVKEFYPKDIRINLVSSKKITEFDPAIVISPSGKYNAVKLGKYEDSNSVTCSVQHDNKTVHSTDFEVKTDSTDHVKPKETENTKQPSKSCHKPKAIVHTEKVNMMSLTVLGLRMLFAKTVAVNFLLTAKLFFLRAKRSGSGATNFSLLKQAGDVEENPGPTSMDWIWRILFLVGAATGAHSGPVDNKFNKERYSAYYEIWQLPNLNVRQKAAFIGSLQDDPSQSANLLAEAKKLNDAQAPKGSGGGGSGGGGSGGGGSFEQVQLQQPGAELVKPGASVKMSCKASGYAFSSYWINWMKQKPGQGLEWIGQIYPGDGDTNYNGKFKGRATLTADTSSSTAYMQLSSLTSEDSAVYFCARSITTVVGCAMDYWGQGTSVTVSSTRDKQLDADVSPKPTIFLPSIAETKLQKAGTYLCLLEKFFPDVIKIHWQEKKSNTILGSQEGNTMKTNDTYMKFSWLTVPEKSLDKEHRCIVRHENNKNGVDQEIIFPPIKTDVITMDPKDNCSKDANDTLLLQLTNTSAYYMYLLLLLKSVVYFAIITCCLLRRTAFCCNGEKS

SEQ ID NO: 16463 - protein, 1109 aa, Artificial Sequence
  Synthetic Polypeptide
MALPVTALLLPLALLLHAARPDIQMTQSPSSLSASVGDRVTITCKASDHINNWLAWYQQKPGQAPKLLIYGATTLETGVPSRFSGSGSGTDYTLTISSLQPEDFATYYCQQSWNTPWTFGQGTKLEIKRGQPKANPTVTLFPPSSEELQANKATLVCLISDFYPGAVTVAWKADGSPVKAGVETTKPSKQSNNKYAASSYLSLTPEQWKSHRSYSCQVTHEGSTVEKTVAPTECSGSQSFGLLDPKLCYLLDGILFIYGVILTALFLRVKFSRSADAPAYQQGQNQLYNELNLGRREEYDVLDKRRGRDPEMGGKPQRRKNPQEGLYNELQKDKMAEAYSEIGMKGERRRGKGHDGLYQGLSTATKDTYDALHMQALPPRRAKRSGSGATNFSLLKQAGDVEENPGPTSMDWIWRILFLVGAATGAHSGPVDNKFNKERYSAYYEIWQLPNLNVRQKAAFIGSLQDDPSQSANLLAEAKKLNDAQAPKGSGGGGSGGGGSGGGGSFEQVQLQQPGAELVKPGASVKMSCKASGYAFSSYWINWMKQKPGQGLEWIGQIYPGDGDTNYNGKFKGRATLTADTSSSTAYMQLSSLTSEDSAVYFCARSITTVVGCAMDYWGQGTSVTVSSASTKGPSVFPLAPSSKSTSGGTAALGCLVKDYFPEPVTVSWNSGALTSGVHTFPAVLQSSGLYSLSSVVTVPSSSLGTQTYICNVNHKPSNTKVDKRVEPKSCGTQSFGLLDPKLCYLLDGILFIYGVILTALFLRVKFSRSADAPAYQQGQNQLYNELNLGRREEYDVLDKRRGRDPEMGGKPQRRKNPQEGLYNELQKDKMAEAYSEIGMKGERRRGKGHDGLYQGLSTATKDTYDALHMQALPPRRAKRSGSGVKQTLNFDLLKLAGDVESNPGPSRGHMTEYKPTVRLATRDDVPRAVRTLAAAFADYPATRHTVDPDRHIERVTELQELFLTRVGLDIGKVWVADDGAAVAVWTTPESVEAGAVFAEIGPRMAELSGSRLAAQQQMEGLLAPHRPKEPAWFLATVGVSPDHQGKGLGSAVVLPGVEAAERAGVPAFLETSAPRNLPFYERLGFTVTADVEVPEGPRTWCMTRKPGA

SEQ ID NO: 16464 - protein, 895 aa, Artificial Sequence
  Synthetic Polypeptide
MALPVTALLLPLALLLHAARPDIQMTQSPSSLSASVGDRVTITCKASDHINNWLAWYQQKPGQAPKLLIYGATTLETGVPSRFSGSGSGTDYTLTISSLQPEDFATYYCQQSWNTPWTFGQGTKLEIKRLEDLKNVFPPEVAVFEPSEAEISHTQKATLVCLATGFYPDHVELSWWVNGKEVHSGVSTDPQPLKEQPALNDSRYCLSSRLRVSATFWQNPRNHFRCQVQFYGLSENDEWTQDRAKPVTQIVSAEAWGRADCGSQSFGLLDPKLCYLLDGILFIYGVILTALFLRVKFSRSADAPAYQQGQNQLYNELNLGRREEYDVLDKRRGRDPEMGGKPQRRKNPQEGLYNELQKDKMAEAYSEIGMKGERRRGKGHDGLYQGLSTATKDTYDALHMQALPPRRAKRSGSGATNFSLLKQAGDVEENPGPTSMDWIWRILFLVGAATGAHSGPVDNKFNKERYSAYYEIWQLPNLNVRQKAAFIGSLQDDPSQSANLLAEAKKLNDAQAPKGSGGGGSGGGGSGGGGSFEQVQLQQPGAELVKPGASVKMSCKASGYAFSSYWINWMKQKPGQGLEWIGQIYPGDGDTNYNGKFKGRATLTADTSSSTAYMQLSSLTSEDSAVYFCARSITTVVGCAMDYWGQGTSVTVSSTRIQNPDPAVYQLRDSKSSDKSVCLFTDFDSQTNVSQSKDSDVYITDKTVLDMRSMDFKSNSAVAWSNKSDFACANAFNNSIIPEDTFFPSPESSCGTQSFGLLDPKLCYLLDGILFIYGVILTALFLRVKFSRSADAPAYQQGQNQLYNELNLGRREEYDVLDKRRGRDPEMGGKPQRRKNPQEGLYNELQKDKMAEAYSEIGMKGERRRGKGHDGLYQGLSTATKDTYDALHMQALPPR

SEQ ID NO: 16465 - protein, 895 aa, Artificial Sequence
  Synthetic Polypeptide
MALPVTALLLPLALLLHAARPDIQMTQSPSSLSASVGDRVTITCKASDHINNWLAWYQQKPGQAPKLLIYGATTLETGVPSRFSGSGSGTDYTLTISSLQPEDFATYYCQQSWNTPWTFGQGTKLEIKRLEDLKNVFPPEVAVFEPSKAEIAHTQKATLVCLATGFYPDHVELSWWVNGKEVHSGVCTDPQPLKEQPALNDSRYCLSSRLRVSATFWQNPRNHFRCQVQFYGLSENDEWTQDRAKPVTQIVSAEAWGRADCGSQSFGLLDPKLCYLLDGILFIYGVILTALFLRVKFSRSADAPAYQQGQNQLYNELNLGRREEYDVLDKRRGRDPEMGGKPQRRKNPQEGLYNELQKDKMAEAYSEIGMKGERRRGKGHDGLYQGLSTATKDTYDALHMQALPPRRAKRSGSGATNFSLLKQAGDVEENPGPTSMDWIWRILFLVGAATGAHSGPVDNKFNKERYSAYYEIWQLPNLNVRQKAAFIGSLQDDPSQSANLLAEAKKLNDAQAPKGSGGGGSGGGGSGGGGSFEQVQLQQPGAELVKPGASVKMSCKASGYAFSSYWINWMKQKPGQGLEWIGQIYPGDGDTNYNGKFKGRATLTADTSSSTAYMQLSSLTSEDSAVYFCARSITTVVGCAMDYWGQGTSVTVSSTRIQNPDPAVYQLRDSKSSDKSVCLFTDFDSQTNVSQSKDSDVYITDKCVLDMRSMDFKSNSAVAWSNKSDFACANAFNNSIIPEDTFFPSSDVPCGTQSFGLLDPKLCYLLDGILFIYGVILTALFLRVKFSRSADAPAYQQGQNQLYNELNLGRREEYDVLDKRRGRDPEMGGKPQRRKNPQEGLYNELQKDKMAEAYSEIGMKGERRRGKGHDGLYQGLSTATKDTYDALHMQALPPR

SEQ ID NO: 16466 - protein, 966 aa, Artificial Sequence
  Synthetic Polypeptide
MALPVTALLLPLALLLHAARPDIQMTQSPSSLSASVGDRVTITCKASDHINNWLAWYQQKPGQAPKLLIYGATTLETGVPSRFSGSGSGTDYTLTISSLQPEDFATYYCQQSWNTPWTFGQGTKLEIKRLEGKPIPNPLLGLDSTGSGEDLKNVFPPEVAVFEPSEAEISHTQKATLVCLATGFYPDHVELSWWVNGKEVHSGVSTDPQPLKEQPALNDSRYCLSSRLRVSATFWQNPRNHFRCQVQFYGLSENDEWTQDRAKPVTQIVSAEAWGRADCGSQSFGLLDPKLCYLLDGILFIYGVILTALFLRVKFSRSADAPAYQQGQNQLYNELNLGRREEYDVLDKRRGRDPEMGGKPQRRKNPQEGLYNELQKDKMAEAYSEIGMKGERRRGKGHDGLYQGLSTATKDTYDALHMQALPPRRAKRSGSGATNFSLLKQAGDVEENPGPTSMDWIWRILFLVGAATGAHSGPVDNKFNKERYSAYYEIWQLPNLNVRQKAAFIGSLQDDPSQSANLLAEAKKLNDAQAPKGSGGGGSGGGGSGGGGSFEQVQLQQPGAELVKPGASVKMSCKASGYAFSSYWINWMKQKPGQGLEWIGQIYPGDGDTNYNGKFKGRATLTADTSSSTAYMQLSSLTSEDSAVYFCARSITTVVGCAMDYWGQGTSVTVSSTREQKLISEEDGSGIQNPDPAVYQLRDSKSSDKSVCLFTDFDSQTNVSQSKDSDVYITDKTVLDMRSMDFKSNSAVAWSNKSDFACANAFNNSIIPEDTFFPSPESSCGTQSFGLLDPKLCYLLDGILFIYGVILTALFLRSKRSRLLHSDYMNMTPRRPGPTRKHYQPYAPPRDFAAYRSRVKFSRSADAPAYQQGQNQLYNELNLGRREEYDVLDKRRGRDPEMGGKPQRRKNPQEGLYNELQKDKMAEAYSEIGMKGERRRGKGHDGLYQGLSTATKDTYDALHMQALPPR

SEQ ID NO: 16467 - protein, 1007 aa, Artificial Sequence
  Synthetic Polypeptide
MALPVTALLLPLALLLHAARPDIQMTQSPSSLSASVGDRVTITCKASDHINNWLAWYQQKPGQAPKLLIYGATTLETGVPSRFSGSGSGTDYTLTISSLQPEDFATYYCQQSWNTPWTFGQGTKLEIKRLEGKPIPNPLLGLDSTGSGEDLKNVFPPEVAVFEPSEAEISHTQKATLVCLATGFYPDHVELSWWVNGKEVHSGVSTDPQPLKEQPALNDSRYCLSSRLRVSATFWQNPRNHFRCQVQFYGLSENDEWTQDRAKPVTQIVSAEAWGRADCGSQSFGLLDPKLCYLLDGILFIYGVILTALFLRSKRSRLLHSDYMNMTPRRPGPTRKHYQPYAPPRDFAAYRSRVKFSRSADAPAYQQGQNQLYNELNLGRREEYDVLDKRRGRDPEMGGKPQRRKNPQEGLYNELQKDKMAEAYSEIGMKGERRRGKGHDGLYQGLSTATKDTYDALHMQALPPRRAKRSGSGATNFSLLKQAGDVEENPGPTSMDWIWRILFLVGAATGAHSGPVDNKFNKERYSAYYEIWQLPNLNVRQKAAFIGSLQDDPSQSANLLAEAKKLNDAQAPKGSGGGGSGGGGSGGGGSFEQVQLQQPGAELVKPGASVKMSCKASGYAFSSYWINWMKQKPGQGLEWIGQIYPGDGDTNYNGKFKGRATLTADTSSSTAYMQLSSLTSEDSAVYFCARSITTVVGCAMDYWGQGTSVTVSSTREQKLISEEDGSGIQNPDPAVYQLRDSKSSDKSVCLFTDFDSQTNVSQSKDSDVYITDKTVLDMRSMDFKSNSAVAWSNKSDFACANAFNNSIIPEDTFFPSPESSCGTQSFGLLDPKLCYLLDGILFIYGVILTALFLRSKRSRLLHSDYMNMTPRRPGPTRKHYQPYAPPRDFAAYRSRVKFSRSADAPAYQQGQNQLYNELNLGRREEYDVLDKRRGRDPEMGGKPQRRKNPQEGLYNELQKDKMAEAYSEIGMKGERRRGKGHDGLYQGLSTATKDTYDALHMQALPPR

SEQ ID NO: 16468 - protein, 968 aa, Artificial Sequence
  Synthetic Polypeptide
MALPVTALLLPLALLLHAARPDIQMTQSPSSLSASVGDRVTITCKASDHINNWLAWYQQKPGQAPKLLIYGATTLETGVPSRFSGSGSGTDYTLTISSLQPEDFATYYCQQSWNTPWTFGQGTKLEIKRLEGKPIPNPLLGLDSTGSGEDLKNVFPPEVAVFEPSEAEISHTQKATLVCLATGFYPDHVELSWWVNGKEVHSGVSTDPQPLKEQPALNDSRYCLSSRLRVSATFWQNPRNHFRCQVQFYGLSENDEWTQDRAKPVTQIVSAEAWGRADCGSQSFGLLDPKLCYLLDGILFIYGVILTALFLRVKFSRSADAPAYQQGQNQLYNELNLGRREEYDVLDKRRGRDPEMGGKPQRRKNPQEGLYNELQKDKMAEAYSEIGMKGERRRGKGHDGLYQGLSTATKDTYDALHMQALPPRRAKRSGSGATNFSLLKQAGDVEENPGPTSMDWIWRILFLVGAATGAHSGPVDNKFNKERYSAYYEIWQLPNLNVRQKAAFIGSLQDDPSQSANLLAEAKKLNDAQAPKGSGGGGSGGGGSGGGGSFEQVQLQQPGAELVKPGASVKMSCKASGYAFSSYWINWMKQKPGQGLEWIGQIYPGDGDTNYNGKFKGRATLTADTSSSTAYMQLSSLTSEDSAVYFCARSITTVVGCAMDYWGQGTSVTVSSTREQKLISEEDLGSGIQNPDPAVYQLRDSKSSDKSVCLFTDFDSQTNVSQSKDSDVYITDKTVLDMRSMDFKSNSAVAWSNKSDFACANAFNNSIIPEDTFFPSPESSCGTQSFGLLDPKLCYLLDGILFIYGVILTALFLKRGRKKLLYIFKQPFMRPVQTTQEEDGCSCRFPEEEEGGCELRVKFSRSADAPAYQQGQNQLYNELNLGRREEYDVLDKRRGRDPEMGGKPQRRKNPQEGLYNELQKDKMAEAYSEIGMKGERRRGKGHDGLYQGLSTATKDTYDALHMQALPPR

SEQ ID NO: 16469 - protein, 1010 aa, Artificial Sequence
  Synthetic Polypeptide
MALPVTALLLPLALLLHAARPDIQMTQSPSSLSASVGDRVTITCKASDHINNWLAWYQQKPGQAPKLLIYGATTLETGVPSRFSGSGSGTDYTLTISSLQPEDFATYYCQQSWNTPWTFGQGTKLEIKRLEGKPIPNPLLGLDSTGSGEDLKNVFPPEVAVFEPSEAEISHTQKATLVCLATGFYPDHVELSWWVNGKEVHSGVSTDPQPLKEQPALNDSRYCLSSRLRVSATFWQNPRNHFRCQVQFYGLSENDEWTQDRAKPVTQIVSAEAWGRADCGSQSFGLLDPKLCYLLDGILFIYGVILTALFLKRGRKKLLYIFKQPFMRPVQTTQEEDGCSCRFPEEEEGGCELRVKFSRSADAPAYQQGQNQLYNELNLGRREEYDVLDKRRGRDPEMGGKPQRRKNPQEGLYNELQKDKMAEAYSEIGMKGERRRGKGHDGLYQGLSTATKDTYDALHMQALPPRRAKRSGSGATNFSLLKQAGDVEENPGPTSMDWIWRILFLVGAATGAHSGPVDNKFNKERYSAYYEIWQLPNLNVRQKAAFIGSLQDDPSQSANLLAEAKKLNDAQAPKGSGGGGSGGGGSGGGGSFEQVQLQQPGAELVKPGASVKMSCKASGYAFSSYWINWMKQKPGQGLEWIGQIYPGDGDTNYNGKFKGRATLTADTSSSTAYMQLSSLTSEDSAVYFCARSITTVVGCAMDYWGQGTSVTVSSTREQKLISEEDLGSGIQNPDPAVYQLRDSKSSDKSVCLFTDFDSQTNVSQSKDSDVYITDKTVLDMRSMDFKSNSAVAWSNKSDFACANAFNNSIIPEDTFFPSPESSCGTQSFGLLDPKLCYLLDGILFIYGVILTALFLKRGRKKLLYIFKQPFMRPVQTTQEEDGCSCRFPEEEEGGCELRVKFSRSADAPAYQQGQNQLYNELNLGRREEYDVLDKRRGRDPEMGGKPQRRKNPQEGLYNELQKDKMAEAYSEIGMKGERRRGKGHDGLYQGLSTATKDTYDALHMQALPPR

SEQ ID NO: 16470 - protein, 900 aa, Artificial Sequence
  Synthetic Polypeptide
MALPVTALLLPLALLLHAARPDIQMTQSPSSLSASVGDRVTITCKASDHINNWLAWYQQKPGQAPKLLIYGATTLETGVPSRFSGSGSGTDYTLTISSLQPEDFATYYCQQSWNTPWTFGQGTKLEIKRLEQSFGLLDPKLCYLLDGILFIYGVILTALFLRVKFSRSADAPAYQQGQNQLYNELNLGRREEYDVLDKRRGRDPEMGGKPQRRKNPQEGLYNELQKDKMAEAYSEIGMKGERRRGKGHDGLYQGLSTATKDTYDALHMQALPPRRAKRSGSGATNFSLLKQAGDVEENPGPTSMDWIWRILFLVGAATGAHSGPVDNKFNKERYSAYYEIWQLPNLNVRQKAAFIGSLQDDPSQSANLLAEAKKLNDAQAPKGSGGGGSGGGGSGGGGSFEQVQLQQPGAELVKPGASVKMSCKASGYAFSSYWINWMKQKPGQGLEWIGQIYPGDGDTNYNGKFKGRATLTADTSSSTAYMQLSSLTSEDSAVYFCARSITTVVGCAMDYWGQGTSVTVSSTRQSFGLLDPKLCYLLDGILFIYGVILTALFLRVKFSRSADAPAYQQGQNQLYNELNLGRREEYDVLDKRRGRDPEMGGKPQRRKNPQEGLYNELQKDKMAEAYSEIGMKGERRRGKGHDGLYQGLSTATKDTYDALHMQALPPRRAKRSGSGVKQTLNFDLLKLAGDVESNPGPSRGHMTEYKPTVRLATRDDVPRAVRTLAAAFADYPATRHTVDPDRHIERVTELQELFLTRVGLDIGKVWVADDGAAVAVWTTPESVEAGAVFAEIGPRMAELSGSRLAAQQQMEGLLAPHRPKEPAWFLATVGVSPDHQGKGLGSAVVLPGVEAAERAGVPAFLETSAPRNLPFYERLGFTVTADVEVPEGPRTWCMTRKPGA

SEQ ID NO: 16471 - protein, 725 aa, Artificial Sequence
  Synthetic Polypeptide
MALPVTALLLPLALLLHAARPDIQMTQSPSSLSASVGDRVTITCKASDHINNWLAWYQQKPGQAPKLLIYGATTLETGVPSRFSGSGSGTDYTLTISSLQPEDFATYYCQQSWNTPWTFGQGTKLEIKRLEGQPKANPTVTLFPPSSEELQANKATLVCLISDFYPGAVTVAWKADGSPVKAGVETTKPSKQSNNKYAASSYLSLTPEQWKSHRSYSCQVTHEGSTVEKTVAPTECSPIKTDVITMDPKDNCSKDANDTLLLQLTNTSAYYMYLLLLLKSVVYFAIITCCLLRRTAFCCNGEKSRAKRSGSGATNFSLLKQAGDVEENPGPTSMDWIWRILFLVGAATGAHSGPVDNKFNKERYSAYYEIWQLPNLNVRQKAAFIGSLQDDPSQSANLLAEAKKLNDAQAPKGSGGGGSGGGGSGGGGSFEQVQLQQPGAELVKPGASVKMSCKASGYAFSSYWINWMKQKPGQGLEWIGQIYPGDGDTNYNGKFKGRATLTADTSSSTAYMQLSSLTSEDSAVYFCARSITTVVGCAMDYWGQGTSVTVSSTRASTKGPSVFPLAPSSKSTSGGTAALGCLVKDYFPEPVTVSWNSGALTSGVHTFPAVLQSSGLYSLSSVVTVPSSSLGTQTYICNVNHKPSNTKVDKRVEPKSCEVKTDSTDHVKPKETENTKQPSKSCHKPKAIVHTEKVNMMSLTVLGLRMLFAKTVAVNFLLTAKLFFL

SEQ ID NO: 16472 - protein, 703 aa, Artificial Sequence
  Synthetic Polypeptide
MALPVTALLLPLALLLHAARPDIQMTQSPSSLSASVGDRVTITCKASDHINNWLAWYQQKPGQAPKLLIYGATTLETGVPSRFSGSGSGTDYTLTISSLQPEDFATYYCQQSWNTPWTFGQGTKLEIKRLEGQPKANPTVTLFPPSSEELQANKATLVCLISDFYPGAVTVAWKADGSPVKAGVETTKPSKQSNNKYAASSYLSLTPEQWKSHRSYSCQVTHEGSTVEKTVAPTECSGRADCGITSASYHQGVLSATILYEILLGKATLYAVLVSALVLMAMVKRKDSRGRAKRSGSGATNFSLLKQAGDVEENPGPTSMDWIWRILFLVGAATGAHSGPVDNKFNKERYSAYYEIWQLPNLNVRQKAAFIGSLQDDPSQSANLLAEAKKLNDAQAPKGSGGGGSGGGGSGGGGSFEQVQLQQPGAELVKPGASVKMSCKASGYAFSSYWINWMKQKPGQGLEWIGQIYPGDGDTNYNGKFKGRATLTADTSSSTAYMQLSSLTSEDSAVYFCARSITTVVGCAMDYWGQGTSVTVSSTRASTKGPSVFPLAPSSKSTSGGTAALGCLVKDYFPEPVTVSWNSGALTSGVHTFPAVLQSSGLYSLSSVVTVPSSSLGTQTYICNVNHKPSNTKVDKRVEPKSCIPEDTFFPSSDVPCDVKLVEKSFETDTNLNFQNLSVIGFRILLLKVAGFNLLMTLRLWSS

SEQ ID NO: 16473 - protein, 703 aa, Artificial Sequence
  Synthetic Polypeptide
MALPVTALLLPLALLLHAARPDIQMTQSPSSLSASVGDRVTITCKASDHINNWLAWYQQKPGQAPKLLIYGATTLETGVPSRFSGSGSGTDYTLTISSLQPEDFATYYCQQSWNTPWTFGQGTKLEIKRLEGQPKANPTVTLFPPSSEELQANKATLVCLISDFYPGAVTVAWKADGSPVKAGVETTKPSKQSNNKYAASSYLSLTPEQWKSHRSYSCQVTHEGSTVEKTVAPTECSGRADCGFTSESYQQGVLSATILYEILLGKATLYAVLVSALVLMAMVKRKDSRGRAKRSGSGATNFSLLKQAGDVEENPGPTSMDWIWRILFLVGAATGAHSGPVDNKFNKERYSAYYEIWQLPNLNVRQKAAFIGSLQDDPSQSANLLAEAKKLNDAQAPKGSGGGGSGGGGSGGGGSFEQVQLQQPGAELVKPGASVKMSCKASGYAFSSYWINWMKQKPGQGLEWIGQIYPGDGDTNYNGKFKGRATLTADTSSSTAYMQLSSLTSEDSAVYFCARSITTVVGCAMDYWGQGTSVTVSSTRASTKGPSVFPLAPSSKSTSGGTAALGCLVKDYFPEPVTVSWNSGALTSGVHTFPAVLQSSGLYSLSSVVTVPSSSLGTQTYICNVNHKPSNTKVDKRVEPKSCIPEDTFFPSPESSCDVKLVEKSFETDTNLNFQNLSVIGFRILLLKVAGFNLLMTLRLWSS

SEQ ID NO: 16474 - protein, 533 aa, Artificial Sequence
  Synthetic Polypeptide
MDWIWRILFLVGAATGAHSGPVDNKFNKERYSAYYEIWQLPNLNVRQKAAFIGSLQDDPSQSANLLAEAKKLNDAQAPKGSGGGGSGGGGSGGGGSFEQVQLQQPGAELVKPGASVKMSCKASGYAFSSYWINWMKQKPGQGLEWIGQIYPGDGDTNYNGKFKGRATLTADTSSSTAYMQLSSLTSEDSAVYFCARSITTVVGCAMDYWGQGTSVTVSSGGGGSGGGGSGGGGSDIQMTQSPSSLSASVGDRVTITCKASDHINNWLAWYQQKPGQAPKLLIYGATTLETGVPSRFSGSGSGTDYTLTISSLQPEDFATYYCQQSWNTPWTFGQGTKLEIKRTRGGGSDGNEEMGGITQTPYKVSISGTTVILTCPQYPGSEILWQHNDKNIGGDEDDKNIGSDEDHLSLKEFSELEQSGYYVCYPRGSKPEDANFYLYLRARVCENCMEMDVMSVATIVIVDICITGGLLLLVYYWSKNRKAKAKPVTRGAGAGGRQRGQNKERPPPVPNPDYEPIRKGQRDLYSGLNQRRI

SEQ ID NO: 16475 - protein, 498 aa, Artificial Sequence
  Synthetic Polypeptide
MDWIWRILFLVGAATGAHSGPVDNKFNKERYSAYYEIWQLPNLNVRQKAAFIGSLQDDPSQSANLLAEAKKLNDAQAPKGSGGGGSGGGGSGGGGSFEQVQLQQPGAELVKPGASVKMSCKASGYAFSSYWINWMKQKPGQGLEWIGQIYPGDGDTNYNGKFKGRATLTADTSSSTAYMQLSSLTSEDSAVYFCARSITTVVGCAMDYWGQGTSVTVSSGGGGSGGGGSGGGGSDIQMTQSPSSLSASVGDRVTITCKASDHINNWLAWYQQKPGQAPKLLIYGATTLETGVPSRFSGSGSGTDYTLTISSLQPEDFATYYCQQSWNTPWTFGQGTKLEIKRTRGGGSFKIPIEELEDRVFVNCNTSITWVEGTVGTLLSDITRLDLGKRILDPRGIYRCNGTDIYKDKESTVQVHYRMCQSCVELDPATVAGIIVTDVIATLLLALGVFCFAGHETGRLSGAADTQALLRNDQVYQPLRDRDDAQYSHLGGNWARNK

SEQ ID NO: 16476 - protein, 508 aa, Artificial Sequence
  Synthetic Polypeptide
MDWIWRILFLVGAATGAHSGPVDNKFNKERYSAYYEIWQLPNLNVRQKAAFIGSLQDDPSQSANLLAEAKKLNDAQAPKGSGGGGSGGGGSGGGGSFEQVQLQQPGAELVKPGASVKMSCKASGYAFSSYWINWMKQKPGQGLEWIGQIYPGDGDTNYNGKFKGRATLTADTSSSTAYMQLSSLTSEDSAVYFCARSITTVVGCAMDYWGQGTSVTVSSGGGGSGGGGSGGGGSDIQMTQSPSSLSASVGDRVTITCKASDHINNWLAWYQQKPGQAPKLLIYGATTLETGVPSRFSGSGSGTDYTLTISSLQPEDFATYYCQQSWNTPWTFGQGTKLEIKRTRGGGSQSIKGNHLVKVYDYQEDGSVLLTCDAEAKNITWFKDGKMIGFLTEDKKKWNLGSNAKDPRGMYQCKGSQNKSKPLQVYYRMCQNCIELNAATISGFLFAEIVSIFVLAVGVYFIAGQDGVRQSRASDKQTLLPNDQLYQPLKDREDDQYSHLQGNQLRRN

SEQ ID NO: 16477 - protein, 491 aa, Artificial Sequence
  Synthetic Polypeptide
MDWIWRILFLVGAATGAHSGPVDNKFNKERYSAYYEIWQLPNLNVRQKAAFIGSLQDDPSQSANLLAEAKKLNDAQAPKGSGGGGSGGGGSGGGGSFEQVQLQQPGAELVKPGASVKMSCKASGYAFSSYWINWMKQKPGQGLEWIGQIYPGDGDTNYNGKFKGRATLTADTSSSTAYMQLSSLTSEDSAVYFCARSITTVVGCAMDYWGQGTSVTVSSGGGGSGGGGSGGGGSDIQMTQSPSSLSASVGDRVTITCKASDHINNWLAWYQQKPGQAPKLLIYGATTLETGVPSRFSGSGSGTDYTLTISSLQPEDFATYYCQQSWNTPWTFGQGTKLEIKRTRGGGSQSFGLLDPKLCYLLDGILFIYGVILTALFLRVKFSRSADAPAYQQGQNQLYNELNLGRREEYDVLDKRRGRDPEMGGKPQRRKNPQEGLYNELQKDKMAEAYSEIGMKGERRRGKGHDGLYQGLSTATKDTYDALHMQALPPR

SEQ ID NO: 16478 - protein, 527 aa, Artificial Sequence
  Synthetic Polypeptide
MDWIWRILFLVGAATGAHSGPVDNKFNKERYSAYYEIWQLPNLNVRQKAAFIGSLQDDPSQSANLLAEAKKLNDAQAPKGSGGGGSGGGGSGGGGSFEQVQLQQPGAELVKPGASVKMSCKASGYAFSSYWINWMKQKPGQGLEWIGQIYPGDGDTNYNGKFKGRATLTADTSSSTAYMQLSSLTSEDSAVYFCARSITTVVGCAMDYWGQGTSVTVSSTRIQNPDPAVYQLRDSKSSDKSVCLFTDFDSQTNVSQSKDSDVYITDKTVLDMRSMDFKSNSAVAWSNKSDFACANAFNNSIIPEDTFFPSPESSCDVKLVEKSFETDTNLNFQNLSVIGFRILLLKVAGFNLLMTLRLWSSRAKRSGSGVKQTLNFDLLKLAGDVESNPGPSRGHMAKPLSQEESTLIERATATINSIPISEDYSVASAALSSDGRIFTGVNVYHFTGGPCAELVVLGTAAAAAAGNLTCIVAIGNENRGILSPCGRCRQVLLDLHPGIKAIVKDSDGQPTAVGIRELLPSGYVWEG

SEQ ID NO: 16479 - protein, 361 aa, Artificial Sequence
  Synthetic Polypeptide
MDWIWRILFLVGAATGAHSGPVDNKFNKERYSAYYEIWQLPNLNVRQKAAFIGSLQDDPSQSANLLAEAKKLNDAQAPKGSGGGGSGGGGSGGGGSFEQVQLQQPGAELVKPGASVKMSCKASGYAFSSYWINWMKQKPGQGLEWIGQIYPGDGDTNYNGKFKGRATLTADTSSSTAYMQLSSLTSEDSAVYFCARSITTVVGCAMDYWGQGTSVTVSSTRIQNPDPAVYQLRDSKSSDKSVCLFTDFDSQTNVSQSKDSDVYITDKTVLDMRSMDFKSNSAVAWSNKSDFACANAFNNSIIPEDTFFPSPESSCDVKLVEKSFETDTNLNFQNLSVIGFRILLLKVAGFNLLMTLRLWSS

SEQ ID NO: 16480 - protein, 539 aa, Artificial Sequence
  Synthetic Polypeptide
MDWIWRILFLVGAATGAHSGPVDNKFNKERYSAYYEIWQLPNLNVRQKAAFIGSLQDDPSQSANLLAEAKKLNDAQAPKGSGGGGSGGGGSGGGGSFEQVQLQQPGAELVKPGASVKMSCKASGYAFSSYWINWMKQKPGQGLEWIGQIYPGDGDTNYNGKFKGRATLTADTSSSTAYMQLSSLTSEDSAVYFCARSITTVVGCAMDYWGQGTSVTVSSTREQKLISEEDGSGIQNPDPAVYQLRDSKSSDKSVCLFTDFDSQTNVSQSKDSDVYITDKCVLDMRSMDFKSNSAVAWSNKSDFACANAFNNSIIPEDTFFPSPESSCDVKLVEKSFETDTNLNFQNLSVIGFRILLLKVAGFNLLMTLRLWSSRAKRSGSGVKQTLNFDLLKLAGDVESNPGPSRGHMAKPLSQEESTLIERATATINSIPISEDYSVASAALSSDGRIFTGVNVYHFTGGPCAELVVLGTAAAAAAGNLTCIVAIGNENRGILSPCGRCRQVLLDLHPGIKAIVKDSDGQPTAVGIRELLPSGYVWEG

SEQ ID NO: 16481 - protein, 373 aa, Artificial Sequence
  Synthetic Polypeptide
MDWIWRILFLVGAATGAHSGPVDNKFNKERYSAYYEIWQLPNLNVRQKAAFIGSLQDDPSQSANLLAEAKKLNDAQAPKGSGGGGSGGGGSGGGGSFEQVQLQQPGAELVKPGASVKMSCKASGYAFSSYWINWMKQKPGQGLEWIGQIYPGDGDTNYNGKFKGRATLTADTSSSTAYMQLSSLTSEDSAVYFCARSITTVVGCAMDYWGQGTSVTVSSTREQKLISEEDGSGIQNPDPAVYQLRDSKSSDKSVCLFTDFDSQTNVSQSKDSDVYITDKCVLDMRSMDFKSNSAVAWSNKSDFACANAFNNSIIPEDTFFPSPESSCDVKLVEKSFETDTNLNFQNLSVIGFRILLLKVAGFNLLMTLRLWSS

SEQ ID NO: 16482 - protein, 1076 aa, Artificial Sequence
  Synthetic Polypeptide
MALPVTALLLPLALLLHAARPEVQLVESGGSLVQPGGSLRLSCAASGFTFDDYAMSWVRQVPGKGLEWVSSINWSGTHTDYADSVKGRFTISRNNANNTLYLQMNSLKSEDTAVYYCAKNWRDAGTTWFEKSGSAGQGTQVTVSSGTGGGGSGGGGSGGGGSEFDIQMTQSPSSLSASVGDRVTITCKASDHINNWLAWYQQKPGQAPKLLIYGATTLETGVPSRFSGSGSGTDYTLTISSLQPEDFATYYCQQSWNTPWTFGQGTKLEIKRLEIQNPDPAVYQLRDSKSSDKSVCLFTDFDSQTNVSQSKDSDVYITDKCVLDMRSMDFKSNSAVAWSNKSDFACANAFNNSIIPEDTFFPSSDVPCDVKLVEKSFETDTNLNFQNLSVIGFRILLLKVAGFNLLMTLRLWSSRAKRSGSGVKQTLNFDLLKLAGDVESNPGPTSMDWIWRILFLVGAATGAHSGPVDNKFNKERYSAYYEIWQLPNLNVRQKAAFIGSLQDDPSQSANLLAEAKKLNDAQAPKGSGGGGSGGGGSGGGGSFEQVQLQQPGAELVKPGASVKMSCKASGYAFSSYWINWMKQKPGQGLEWIGQIYPGDGDTNYNGKFKGRATLTADTSSSTAYMQLSSLTSEDSAVYFCARSITTVVGCAMDYWGQGTSVTVSSTREDLKNVFPPEVAVFEPSKAEIAHTQKATLVCLATGFYPDHVELSWWVNGKEVHSGVCTDPQPLKEQPALNDSRYCLSSRLRVSATFWQNPRNHFRCQVQFYGLSENDEWTQDRAKPVTQIVSAEAWGRADCGITSASYHQGVLSATILYEILLGKATLYAVLVSALVLMAMVKRKDSRGRAKRSGSGATNFSLLKQAGDVEENPGPSRGHMTEYKPTVRLATRDDVPRAVRTLAAAFADYPATRHTVDPDRHIERVTELQELFLTRVGLDIGKVWVADDGAAVAVWTTPESVEAGAVFAEIGPRMAELSGSRLAAQQQMEGLLAPHRPKEPAWFLATVGVSPDHQGKGLGSAVVLPGVEAAERAGVPAFLETSAPRNLPFYERLGFTVTADVEVPEGPRTWCMTRKPGA

SEQ ID NO: 16483 - protein, 1075 aa, Artificial Sequence
  Synthetic Polypeptide
MALPVTALLLPLALLLHAARPEVQLVESGGSLVQPGGSLRLSCAASGFTFDDYAMSWVRQVPGKGLEWVSSINWSGTHTDYADSVKGRFTISRNNANNTLYLQMNSLKSEDTAVYYCAKNWRDAGTTWFEKSGSAGQGTQVTVSSGTGGGGSGGGGSGGGGSEFDIQMTQSPSSLSASVGDRVTITCKASDHINNWLAWYQQKPGQAPKLLIYGATTLETGVPSRFSGSGSGTDYTLTISSLQPEDFATYYCQQSWNTPWTFGQGTKLEIKRLEDLKNVFPPEVAVFEPSKAEIAHTQKATLVCLATGFYPDHVELSWWVNGKEVHSGVCTDPQPLKEQPALNDSRYCLSSRLRVSATFWQNPRNHFRCQVQFYGLSENDEWTQDRAKPVTQIVSAEAWGRADCGITSASYHQGVLSATILYEILLGKATLYAVLVSALVLMAMVKRKDSRGRAKRSGSGATNFSLLKQAGDVEENPGPTSMDWIWRILFLVGAATGAHSGPVDNKFNKERYSAYYEIWQLPNLNVRQKAAFIGSLQDDPSQSANLLAEAKKLNDAQAPKGSGGGGSGGGGSGGGGSFEQVQLQQPGAELVKPGASVKMSCKASGYAFSSYWINWMKQKPGQGLEWIGQIYPGDGDTNYNGKFKGRATLTADTSSSTAYMQLSSLTSEDSAVYFCARSITTVVGCAMDYWGQGTSVTVSSTRIQNPDPAVYQLRDSKSSDKSVCLFTDFDSQTNVSQSKDSDVYITDKCVLDMRSMDFKSNSAVAWSNKSDFACANAFNNSIIPEDTFFPSSDVPCDVKLVEKSFETDTNLNFQNLSVIGFRILLLKVAGFNLLMTLRLWSSRAKRSGSGVKQTLNFDLLKLAGDVESNPGPSRGHMTEYKPTVRLATRDDVPRAVRTLAAAFADYPATRHTVDPDRHIERVTELQELFLTRVGLDIGKVWVADDGAAVAVWTTPESVEAGAVFAEIGPRMAELSGSRLAAQQQMEGLLAPHRPKEPAWFLATVGVSPDHQGKGLGSAVVLPGVEAAERAGVPAFLETSAPRNLPFYERLGFTVTADVEVPEGPRTWCMTRKPGA

SEQ ID NO: 16484 - protein, 1075 aa, Artificial Sequence
  Synthetic Polypeptide
MALPVTALLLPLALLLHAARPEVQLVESGGSLVQPGGSLRLSCAASGFTFDDYAMSWVRQVPGKGLEWVSSINWSGTHTDYADSVKGRFTISRNNANNTLYLQMNSLKSEDTAVYYCAKNWRDAGTTWFEKSGSAGQGTQVTVSSGTGGGGSGGGGSGGGGSEFDIQMTQSPSSLSASVGDRVTITCKASDHINNWLAWYQQKPGQAPKLLIYGATTLETGVPSRFSGSGSGTDYTLTISSLQPEDFATYYCQQSWNTPWTFGQGTKLEIKRLEDLKNVFPPEVAVFEPSEAEISHTQKATLVCLATGFYPDHVELSWWVNGKEVHSGVCTDPQPLKEQPALNDSRYCLSSRLRVSATFWQNPRNHFRCQVQFYGLSENDEWTQDRAKPVTQIVSAEAWGRADCGFTSESYQQGVLSATILYEILLGKATLYAVLVSALVLMAMVKRKDSRGRAKRSGSGATNFSLLKQAGDVEENPGPTSMDWIWRILFLVGAATGAHSGPVDNKFNKERYSAYYEIWQLPNLNVRQKAAFIGSLQDDPSQSANLLAEAKKLNDAQAPKGSGGGGSGGGGSGGGGSFEQVQLQQPGAELVKPGASVKMSCKASGYAFSSYWINWMKQKPGQGLEWIGQIYPGDGDTNYNGKFKGRATLTADTSSSTAYMQLSSLTSEDSAVYFCARSITTVVGCAMDYWGQGTSVTVSSTRIQNPDPAVYQLRDSKSSDKSVCLFTDFDSQTNVSQSKDSDVYITDKCVLDMRSMDFKSNSAVAWSNKSDFACANAFNNSIIPEDTFFPSPESSCDVKLVEKSFETDTNLNFQNLSVIGFRILLLKVAGFNLLMTLRLWSSRAKRSGSGVKQTLNFDLLKLAGDVESNPGPSRGHMTEYKPTVRLATRDDVPRAVRTLAAAFADYPATRHTVDPDRHIERVTELQELFLTRVGLDIGKVWVADDGAAVAVWTTPESVEAGAVFAEIGPRMAELSGSRLAAQQQMEGLLAPHRPKEPAWFLATVGVSPDHQGKGLGSAVVLPGVEAAERAGVPAFLETSAPRNLPFYERLGFTVTADVEVPEGPRTWCMTRKPGA

SEQ ID NO: 16485 - protein, 842 aa, Artificial Sequence
  Synthetic Polypeptide
MALPVTALLLPLALLLHAARPEVQLVESGGSLVQPGGSLRLSCAASGFTFDDYAMSWVRQVPGKGLEWVSSINWSGTHTDYADSVKGRFTISRNNANNTLYLQMNSLKSEDTAVYYCAKNWRDAGTTWFEKSGSAGQGTQVTVSSGTGGGGSGGGGSGGGGSEFDIQMTQSPSSLSASVGDRVTITCKASDHINNWLAWYQQKPGQAPKLLIYGATTLETGVPSRFSGSGSGTDYTLTISSLQPEDFATYYCQQSWNTPWTFGQGTKLEIKRLEDLKNVFPPEVAVFEPSEAEISHTQKATLVCLATGFYPDHVELSWWVNGKEVHSGVCTDPQPLKEQPALNDSRYCLSSRLRVSATFWQNPRNHFRCQVQFYGLSENDEWTQDRAKPVTQIVSAEAWGRADCGFTSESYQQGVLSATILYEILLGKATLYAVLVSALVLMAMVKRKDSRGRAKRSGSGATNFSLLKQAGDVEENPGPTSMDWIWRILFLVGAATGAHSGPVDNKFNKERYSAYYEIWQLPNLNVRQKAAFIGSLQDDPSQSANLLAEAKKLNDAQAPKGSGGGGSGGGGSGGGGSFEQVQLQQPGAELVKPGASVKMSCKASGYAFSSYWINWMKQKPGQGLEWIGQIYPGDGDTNYNGKFKGRATLTADTSSSTAYMQLSSLTSEDSAVYFCARSITTVVGCAMDYWGQGTSVTVSSTRIQNPDPAVYQLRDSKSSDKSVCLFTDFDSQTNVSQSKDSDVYITDKCVLDMRSMDFKSNSAVAWSNKSDFACANAFNNSIIPEDTFFPSPESSCDVKLVEKSFETDTNLNFQNLSVIGFRILLLKVAGFNLLMTLRLWSS

SEQ ID NO: 16486 - protein, 1067 aa, Artificial Sequence
  Synthetic Polypeptide
MALPVTALLLPLALLLHAARPEVQLVESGGSLVQPGGSLRLSCAASGFTFDDYAMSWVRQVPGKGLEWVSSINWSGTHTDYADSVKGRFTISRNNANNTLYLQMNSLKSEDTAVYYCAKNWRDAGTTWFEKSGSAGQGTQVTVSSGTGGGGSGGGGSGGGGSEFDIQMTQSPSSLSASVGDRVTITCKASDHINNWLAWYQQKPGQAPKLLIYGATTLETGVPSRFSGSGSGTDYTLTISSLQPEDFATYYCQQSWNTPWTFGQGTKLEIKRLEDLKNVFPPEVAVFEPSEAEISHTQKATLVCLATGFYPDHVELSWWVNGKEVHSGVCTDPQPLKEQPALNDSRYCLSSRLRVSATFWQNPRNHFRCQVQFYGLSENDEWTQDRAKPVTQIVSAEAWGRADCGFTSESYQQGVLSATILYEILLGKATLYAVLVSALVLMAMVKRKDSRGRAKRSGSGATNFSLLKQAGDVEENPGPTSMDWIWRILFLVGAATGAHSGPVDNKFNKERYSAYYEIWQLPNLNVRQKAAFIGSLQDDPSQSANLLAEAKKLNDAQAPKGSGGGGSGGGGSGGGGSFEQVQLQQPGAELVKPGASVKMSCKASGYAFSSYWINWMKQKPGQGLEWIGQIYPGDGDTNYNGKFKGRATLTADTSSSTAYMQLSSLTSEDSAVYFCARSITTVVGCAMDYWGQGTSVTVSSTRIQNPDPAVYQLRDSKSSDKSVCLFTDFDSQTNVSQSKDSDVYITDKCVLDMRSMDFKSNSAVAWSNKSDFACANAFNNSIIPEDTFFPSPESSCDVKLVEKSFETDTNLNFQNLSVIGFRILLLKVAGFNLLMTLRLWSSRAKRSGSGVKQTLNFDLLKLAGDVESNPGPSRGGIHTMATYEVLCEVARKLGTDDREVVLFLLNVFIPQPTLAQLIGALRALKEEGRLTFPLLAECLFRAGRRDLLRDLLHLDPRFLERHLAGTMSYFSPYQLTVLHVDGELCARDIRSLIFLSKDTIGSRSTPQTFLHWVYCMENLDLLGPTDVDALMSMLRSLSRVDLQRQVQTLMGLHLSGPSHSQHYRHTP

SEQ ID NO: 16487 - protein, 846 aa, Artificial Sequence
  Synthetic Polypeptide
MALPVTALLLPLALLLHAARPEVQLVESGGSLVQPGGSLRLSCAASGFTFDDYAMSWVRQVPGKGLEWVSSINWSGTHTDYADSVKGRFTISRNNANNTLYLQMNSLKSEDTAVYYCAKNWRDAGTTWFEKSGSAGQGTQVTVSSGTGGGGSGGGGSGGGGSEFDIQMTQSPSSLSASVGDRVTITCKASDHINNWLAWYQQKPGQAPKLLIYGATTLETGVPSRFSGSGSGTDYTLTISSLQPEDFATYYCQQSWNTPWTFGQGTKLEIKRLEIQNPDPAVYQLRDSKSSDKSVCLFTDFDSQTNVSQSKDSDVYITDKCVLDMRSMDFKSNSAVAWSNKSDFACANAFNNSIIPEDTFFPSPESSCDVKLVEKSFETDTNLNFQNLSVIGFRILLLKVAGFNLLMTLRLWSSRAKRSGSGVKQTLNFDLLKLAGDVESNPGPTSMDWIWRILFLVGAATGAHSGPVDNKFNKERYSAYYEIWQLPNLNVRQKAAFIGSLQDDPSQSANLLAEAKKLNDAQAPKGSGGGGSGGGGSGGGGSFEQVQLQQPGAELVKPGASVKMSCKASGYAFSSYWINWMKQKPGQGLEWIGQIYPGDGDTNYNGKFKGRATLTADTSSSTAYMQLSSLTSEDSAVYFCARSITTVVGCAMDYWGQGTSVTVSSTREDLKNVFPPEVAVFEPSEAEISHTQKATLVCLATGFYPDHVELSWWVNGKEVHSGVCTDPQPLKEQPALNDSRYCLSSRLRVSATFWQNPRNHFRCQVQFYGLSENDEWTQDRAKPVTQIVSAEAWGRADCGFTSESYQQGVLSATILYEILLGKATLYAVLVSALVLMAMVKRKDSRG

SEQ ID NO: 16488 - protein, 1068 aa, Artificial Sequence
  Synthetic Polypeptide
MALPVTALLLPLALLLHAARPEVQLVESGGSLVQPGGSLRLSCAASGFTFDDYAMSWVRQVPGKGLEWVSSINWSGTHTDYADSVKGRFTISRNNANNTLYLQMNSLKSEDTAVYYCAKNWRDAGTTWFEKSGSAGQGTQVTVSSGTGGGGSGGGGSGGGGSEFDIQMTQSPSSLSASVGDRVTITCKASDHINNWLAWYQQKPGQAPKLLIYGATTLETGVPSRFSGSGSGTDYTLTISSLQPEDFATYYCQQSWNTPWTFGQGTKLEIKRLEIQNPDPAVYQLRDSKSSDKSVCLFTDFDSQTNVSQSKDSDVYITDKCVLDMRSMDFKSNSAVAWSNKSDFACANAFNNSIIPEDTFFPSPESSCDVKLVEKSFETDTNLNFQNLSVIGFRILLLKVAGFNLLMTLRLWSSRAKRSGSGVKQTLNFDLLKLAGDVESNPGPTSMDWIWRILFLVGAATGAHSGPVDNKFNKERYSAYYEIWQLPNLNVRQKAAFIGSLQDDPSQSANLLAEAKKLNDAQAPKGSGGGGSGGGGSGGGGSFEQVQLQQPGAELVKPGASVKMSCKASGYAFSSYWINWMKQKPGQGLEWIGQIYPGDGDTNYNGKFKGRATLTADTSSSTAYMQLSSLTSEDSAVYFCARSITTVVGCAMDYWGQGTSVTVSSTREDLKNVFPPEVAVFEPSEAEISHTQKATLVCLATGFYPDHVELSWWVNGKEVHSGVCTDPQPLKEQPALNDSRYCLSSRLRVSATFWQNPRNHFRCQVQFYGLSENDEWTQDRAKPVTQIVSAEAWGRADCGFTSESYQQGVLSATILYEILLGKATLYAVLVSALVLMAMVKRKDSRGRAKRSGSGATNFSLLKQAGDVEENPGPSRGGIHTMATYEVLCEVARKLGTDDREVVLFLLNVFIPQPTLAQLIGALRALKEEGRLTFPLLAECLFRAGRRDLLRDLLHLDPRFLERHLAGTMSYFSPYQLTVLHVDGELCARDIRSLIFLSKDTIGSRSTPQTFLHWVYCMENLDLLGPTDVDALMSMLRSLSRVDLQRQVQTLMGLHLSGPSHSQHYRHTP

SEQ ID NO: 16489 - protein, 1075 aa, Artificial Sequence
  Synthetic Polypeptide
MALPVTALLLPLALLLHAARPEVQLVESGGSLVQPGGSLRLSCAASGFTFDDYAMSWVRQVPGKGLEWVSSINWSGTHTDYADSVKGRFTISRNNANNTLYLQMNSLKSEDTAVYYCAKNWRDAGTTWFEKSGSAGQGTQVTVSSGTGGGGSGGGGSGGGGSEFDIQMTQSPSSLSASVGDRVTITCKASDHINNWLAWYQQKPGQAPKLLIYGATTLETGVPSRFSGSGSGTDYTLTISSLQPEDFATYYCQQSWNTPWTFGQGTKLEIKRLEDLKNVFPPEVAVFEPSEAEISHTQKATLVCLATGFYPDHVELSWWVNGKEVHSGVSTDPQPLKEQPALNDSRYCLSSRLRVSATFWQNPRNHFRCQVQFYGLSENDEWTQDRAKPVTQIVSAEAWGRADCGFTSESYQQGVLSATILYEILLGKATLYAVLVSALVLMAMVKRKDSRGRAKRSGSGATNFSLLKQAGDVEENPGPTSMDWIWRILFLVGAATGAHSGPVDNKFNKERYSAYYEIWQLPNLNVRQKAAFIGSLQDDPSQSANLLAEAKKLNDAQAPKGSGGGGSGGGGSGGGGSFEQVQLQQPGAELVKPGASVKMSCKASGYAFSSYWINWMKQKPGQGLEWIGQIYPGDGDTNYNGKFKGRATLTADTSSSTAYMQLSSLTSEDSAVYFCARSITTVVGCAMDYWGQGTSVTVSSTRIQNPDPAVYQLRDSKSSDKSVCLFTDFDSQTNVSQSKDSDVYITDKTVLDMRSMDFKSNSAVAWSNKSDFACANAFNNSIIPEDTFFPSPESSCDVKLVEKSFETDTNLNFQNLSVIGFRILLLKVAGFNLLMTLRLWSSRAKRSGSGVKQTLNFDLLKLAGDVESNPGPSRGHMTEYKPTVRLATRDDVPRAVRTLAAAFADYPATRHTVDPDRHIERVTELQELFLTRVGLDIGKVWVADDGAAVAVWTTPESVEAGAVFAEIGPRMAELSGSRLAAQQQMEGLLAPHRPKEPAWFLATVGVSPDHQGKGLGSAVVLPGVEAAERAGVPAFLETSAPRNLPFYERLGFTVTADVEVPEGPRTWCMTRKPGA

SEQ ID NO: 16490 - protein, 1157 aa, Artificial Sequence
  Synthetic Polypeptide
MALPVTALLLPLALLLHAARPEVQLVESGGSLVQPGGSLRLSCAASGFTFDDYAMSWVRQVPGKGLEWVSSINWSGTHTDYADSVKGRFTISRNNANNTLYLQMNSLKSEDTAVYYCAKNWRDAGTTWFEKSGSAGQGTQVTVSSGTGGGGSGGGGSGGGGSEFDIQMTQSPSSLSASVGDRVTITCKASDHINNWLAWYQQKPGQAPKLLIYGATTLETGVPSRFSGSGSGTDYTLTISSLQPEDFATYYCQQSWNTPWTFGQGTKLEIKRLEDLKNVFPPEVAVFEPSEAEISHTQKATLVCLATGFYPDHVELSWWVNGKEVHSGVSTDPQPLKEQPALNDSRYCLSSRLRVSATFWQNPRNHFRCQVQFYGLSENDEWTQDRAKPVTQIVSAEAWGRADCGFTSESYQQGVLSATILYEILLGKATLYAVLVSALVLMAMVKRKDSRGRAKRSGSGATNFSLLKQAGDVEENPGPTSMDWIWRILFLVGAATGAHSGPVDNKFNKERYSAYYEIWQLPNLNVRQKAAFIGSLQDDPSQSANLLAEAKKLNDAQAPKGSGGGGSGGGGSGGGGSFEQVQLQQPGAELVKPGASVKMSCKASGYAFSSYWINWMKQKPGQGLEWIGQIYPGDGDTNYNGKFKGRATLTADTSSSTAYMQLSSLTSEDSAVYFCARSITTVVGCAMDYWGQGTSVTVSSTREQKLISEEDGSGTPFPSLAPPIMLLVDGKQQMVVVCLVLDVAPPGLDSPIWFSAGNGSALDAFTYGPSPATDGTWTNLAHLSLPSEELASWEPLVCHTGPGAEGHSRSTQPMHLSGEASTARTCPQEPLRGTPGGALWLGVLRLLLFKLLLFDLLLTCSCLCDPAGPLPSPATTTRLRALGSHRLHPATETGGREATSSPRPQPRDRRWGDTPPGRKPGSPVRAKRSGSGVKQTLNFDLLKLAGDVESNPGPSRGHMTEYKPTVRLATRDDVPRAVRTLAAAFADYPATRHTVDPDRHIERVTELQELFLTRVGLDIGKVWVADDGAAVAVWTTPESVEAGAVFAEIGPRMAELSGSRLAAQQQMEGLLAPHRPKEPAWFLATVGVSPDHQGKGLGSAVVLPGVEAAERAGVPAFLETSAPRNLPFYERLGFTVTADVEVPEGPRTWCMTRKPGA

SEQ ID NO: 16491 - protein, 1112 aa, Artificial Sequence
  Synthetic Polypeptide
MALPVTALLLPLALLLHAARPEVQLVESGGSLVQPGGSLRLSCAASGFTFDDYAMSWVRQVPGKGLEWVSSINWSGTHTDYADSVKGRFTISRNNANNTLYLQMNSLKSEDTAVYYCAKNWRDAGTTWFEKSGSAGQGTQVTVSSGTGGGGSGGGGSGGGGSEFDIQMTQSPSSLSASVGDRVTITCKASDHINNWLAWYQQKPGQAPKLLIYGATTLETGVPSRFSGSGSGTDYTLTISSLQPEDFATYYCQQSWNTPWTFGQGTKLEIKRLEGKPIPNPLLGLDSTGSGDKQLDADVSPKPTIFLPSIAETKLQKAGTYLCLLEKFFPDVIKIHWQEKKSNTILGSQEGNTMKTNDTYMKFSWLTVPEKSLDKEHRCIVRHENNKNGVDQEIIFPPIKTDVITMDPKDNCSKDANDTLLLQLTNTSAYYMYLLLLLKSVVYFAIITCCLLRRTAFCCNGEKSRAKRSGSGATNFSLLKQAGDVEENPGPTSMDWIWRILFLVGAATGAHSGPVDNKFNKERYSAYYEIWQLPNLNVRQKAAFIGSLQDDPSQSANLLAEAKKLNDAQAPKGSGGGGSGGGGSGGGGSFEQVQLQQPGAELVKPGASVKMSCKASGYAFSSYWINWMKQKPGQGLEWIGQIYPGDGDTNYNGKFKGRATLTADTSSSTAYMQLSSLTSEDSAVYFCARSITTVVGCAMDYWGQGTSVTVSSTREQKLISEEDGSGSQPHTKPSVFVMKNGTNVACLVKEFYPKDIRINLVSSKKITEFDPAIVISPSGKYNAVKLGKYEDSNSVTCSVQHDNKTVHSTDFEVKTDSTDHVKPKETENTKQPSKSCHKPKAIVHTEKVNMMSLTVLGLRMLFAKTVAVNFLLTAKLFFLRAKRSGSGVKQTLNFDLLKLAGDVESNPGPSRGHMTEYKPTVRLATRDDVPRAVRTLAAAFADYPATRHTVDPDRHIERVTELQELFLTRVGLDIGKVWVADDGAAVAVWTTPESVEAGAVFAEIGPRMAELSGSRLAAQQQMEGLLAPHRPKEPAWFLATVGVSPDHQGKGLGSAVVLPGVEAAERAGVPAFLETSAPRNLPFYERLGFTVTADVEVPEGPRTWCMTRKPGA

SEQ ID NO: 16492 - protein, 850 aa, Artificial Sequence
  Synthetic Polypeptide
MALPVTALLLPLALLLHAARPEVQLVESGGSLVQPGGSLRLSCAASGFTFDDYAMSWVRQVPGKGLEWVSSINWSGTHTDYADSVKGRFTISRNNANNTLYLQMNSLKSEDTAVYYCAKNWRDAGTTWFEKSGSAGQGTQVTVSSGTGGGGSGGGGSGGGGSEFDIQMTQSPSSLSASVGDRVTITCKASDHINNWLAWYQQKPGQAPKLLIYGATTLETGVPSRFSGSGSGTDYTLTISSLQPEDFATYYCQQSWNTPWTFGQGTKLEIKRLESQPHTKPSVFVMKNGTNVACLVKEFYPKDIRINLVSSKKITEFDPAIVISPSGKYNAVKLGKYEDSNSVTCSVQHDNKTVHSTDFEVKTDSTDHVKPKETENTKQPSKSCHKPKAIVHTEKVNMMSLTVLGLRMLFAKTVAVNFLLTAKLFFLRAKRSGSGATNFSLLKQAGDVEENPGPTSMDWIWRILFLVGAATGAHSGPVDNKFNKERYSAYYEIWQLPNLNVRQKAAFIGSLQDDPSQSANLLAEAKKLNDAQAPKGSGGGGSGGGGSGGGGSFEQVQLQQPGAELVKPGASVKMSCKASGYAFSSYWINWMKQKPGQGLEWIGQIYPGDGDTNYNGKFKGRATLTADTSSSTAYMQLSSLTSEDSAVYFCARSITTVVGCAMDYWGQGTSVTVSSTRDKQLDADVSPKPTIFLPSIAETKLQKAGTYLCLLEKFFPDVIKIHWQEKKSNTILGSQEGNTMKTNDTYMKFSWLTVPEKSLDKEHRCIVRHENNKNGVDQEIIFPPIKTDVITMDPKDNCSKDANDTLLLQLTNTSAYYMYLLLLLKSVVYFAIITCCLLRRTAFCCNGEKS

SEQ ID NO: 16493 - protein, 1252 aa, Artificial Sequence
  Synthetic Polypeptide
MALPVTALLLPLALLLHAARPEVQLVESGGSLVQPGGSLRLSCAASGFTFDDYAMSWVRQVPGKGLEWVSSINWSGTHTDYADSVKGRFTISRNNANNTLYLQMNSLKSEDTAVYYCAKNWRDAGTTWFEKSGSAGQGTQVTVSSGTGGGGSGGGGSGGGGSEFDIQMTQSPSSLSASVGDRVTITCKASDHINNWLAWYQQKPGQAPKLLIYGATTLETGVPSRFSGSGSGTDYTLTISSLQPEDFATYYCQQSWNTPWTFGQGTKLEIKRGQPKANPTVTLFPPSSEELQANKATLVCLISDFYPGAVTVAWKADGSPVKAGVETTKPSKQSNNKYAASSYLSLTPEQWKSHRSYSCQVTHEGSTVEKTVAPTECSGSQSFGLLDPKLCYLLDGILFIYGVILTALFLRVKFSRSADAPAYQQGQNQLYNELNLGRREEYDVLDKRRGRDPEMGGKPQRRKNPQEGLYNELQKDKMAEAYSEIGMKGERRRGKGHDGLYQGLSTATKDTYDALHMQALPPRRAKRSGSGATNFSLLKQAGDVEENPGPTSMDWIWRILFLVGAATGAHSGPVDNKFNKERYSAYYEIWQLPNLNVRQKAAFIGSLQDDPSQSANLLAEAKKLNDAQAPKGSGGGGSGGGGSGGGGSFEQVQLQQPGAELVKPGASVKMSCKASGYAFSSYWINWMKQKPGQGLEWIGQIYPGDGDTNYNGKFKGRATLTADTSSSTAYMQLSSLTSEDSAVYFCARSITTVVGCAMDYWGQGTSVTVSSASTKGPSVFPLAPSSKSTSGGTAALGCLVKDYFPEPVTVSWNSGALTSGVHTFPAVLQSSGLYSLSSVVTVPSSSLGTQTYICNVNHKPSNTKVDKRVEPKSCGTQSFGLLDPKLCYLLDGILFIYGVILTALFLRVKFSRSADAPAYQQGQNQLYNELNLGRREEYDVLDKRRGRDPEMGGKPQRRKNPQEGLYNELQKDKMAEAYSEIGMKGERRRGKGHDGLYQGLSTATKDTYDALHMQALPPRRAKRSGSGVKQTLNFDLLKLAGDVESNPGPSRGHMTEYKPTVRLATRDDVPRAVRTLAAAFADYPATRHTVDPDRHIERVTELQELFLTRVGLDIGKVWVADDGAAVAVWTTPESVEAGAVFAEIGPRMAELSGSRLAAQQQMEGLLAPHRPKEPAWFLATVGVSPDHQGKGLGSAVVLPGVEAAERAGVPAFLETSAPRNLPFYERLGFTVTADVEVPEGPRTWCMTRKPGA

SEQ ID NO: 16494 - protein, 1038 aa, Artificial Sequence
  Synthetic Polypeptide
MALPVTALLLPLALLLHAARPEVQLVESGGSLVQPGGSLRLSCAASGFTFDDYAMSWVRQVPGKGLEWVSSINWSGTHTDYADSVKGRFTISRNNANNTLYLQMNSLKSEDTAVYYCAKNWRDAGTTWFEKSGSAGQGTQVTVSSGTGGGGSGGGGSGGGGSEFDIQMTQSPSSLSASVGDRVTITCKASDHINNWLAWYQQKPGQAPKLLIYGATTLETGVPSRFSGSGSGTDYTLTISSLQPEDFATYYCQQSWNTPWTFGQGTKLEIKRLEDLKNVFPPEVAVFEPSEAEISHTQKATLVCLATGFYPDHVELSWWVNGKEVHSGVSTDPQPLKEQPALNDSRYCLSSRLRVSATFWQNPRNHFRCQVQFYGLSENDEWTQDRAKPVTQIVSAEAWGRADCGSQSFGLLDPKLCYLLDGILFIYGVILTALFLRVKFSRSADAPAYQQGQNQLYNELNLGRREEYDVLDKRRGRDPEMGGKPQRRKNPQEGLYNELQKDKMAEAYSEIGMKGERRRGKGHDGLYQGLSTATKDTYDALHMQALPPRRAKRSGSGATNFSLLKQAGDVEENPGPTSMDWIWRILFLVGAATGAHSGPVDNKFNKERYSAYYEIWQLPNLNVRQKAAFIGSLQDDPSQSANLLAEAKKLNDAQAPKGSGGGGSGGGGSGGGGSFEQVQLQQPGAELVKPGASVKMSCKASGYAFSSYWINWMKQKPGQGLEWIGQIYPGDGDTNYNGKFKGRATLTADTSSSTAYMQLSSLTSEDSAVYFCARSITTVVGCAMDYWGQGTSVTVSSTRIQNPDPAVYQLRDSKSSDKSVCLFTDFDSQTNVSQSKDSDVYITDKTVLDMRSMDFKSNSAVAWSNKSDFACANAFNNSIIPEDTFFPSPESSCGTQSFGLLDPKLCYLLDGILFIYGVILTALFLRVKFSRSADAPAYQQGQNQLYNELNLGRREEYDVLDKRRGRDPEMGGKPQRRKNPQEGLYNELQKDKMAEAYSEIGMKGERRRGKGHDGLYQGLSTATKDTYDALHMQALPPR

SEQ ID NO: 16495 - protein, 1038 aa, Artificial Sequence
  Synthetic Polypeptide
MALPVTALLLPLALLLHAARPEVQLVESGGSLVQPGGSLRLSCAASGFTFDDYAMSWVRQVPGKGLEWVSSINWSGTHTDYADSVKGRFTISRNNANNTLYLQMNSLKSEDTAVYYCAKNWRDAGTTWFEKSGSAGQGTQVTVSSGTGGGGSGGGGSGGGGSEFDIQMTQSPSSLSASVGDRVTITCKASDHINNWLAWYQQKPGQAPKLLIYGATTLETGVPSRFSGSGSGTDYTLTISSLQPEDFATYYCQQSWNTPWTFGQGTKLEIKRLEDLKNVFPPEVAVFEPSKAEIAHTQKATLVCLATGFYPDHVELSWWVNGKEVHSGVCTDPQPLKEQPALNDSRYCLSSRLRVSATFWQNPRNHFRCQVQFYGLSENDEWTQDRAKPVTQIVSAEAWGRADCGSQSFGLLDPKLCYLLDGILFIYGVILTALFLRVKFSRSADAPAYQQGQNQLYNELNLGRREEYDVLDKRRGRDPEMGGKPQRRKNPQEGLYNELQKDKMAEAYSEIGMKGERRRGKGHDGLYQGLSTATKDTYDALHMQALPPRRAKRSGSGATNFSLLKQAGDVEENPGPTSMDWIWRILFLVGAATGAHSGPVDNKFNKERYSAYYEIWQLPNLNVRQKAAFIGSLQDDPSQSANLLAEAKKLNDAQAPKGSGGGGSGGGGSGGGGSFEQVQLQQPGAELVKPGASVKMSCKASGYAFSSYWINWMKQKPGQGLEWIGQIYPGDGDTNYNGKFKGRATLTADTSSSTAYMQLSSLTSEDSAVYFCARSITTVVGCAMDYWGQGTSVTVSSTRIQNPDPAVYQLRDSKSSDKSVCLFTDFDSQTNVSQSKDSDVYITDKCVLDMRSMDFKSNSAVAWSNKSDFACANAFNNSIIPEDTFFPSSDVPCGTQSFGLLDPKLCYLLDGILFIYGVILTALFLRVKFSRSADAPAYQQGQNQLYNELNLGRREEYDVLDKRRGRDPEMGGKPQRRKNPQEGLYNELQKDKMAEAYSEIGMKGERRRGKGHDGLYQGLSTATKDTYDALHMQALPPR

SEQ ID NO: 16496 - protein, 1109 aa, Artificial Sequence
  Synthetic Polypeptide
MALPVTALLLPLALLLHAARPEVQLVESGGSLVQPGGSLRLSCAASGFTFDDYAMSWVRQVPGKGLEWVSSINWSGTHTDYADSVKGRFTISRNNANNTLYLQMNSLKSEDTAVYYCAKNWRDAGTTWFEKSGSAGQGTQVTVSSGTGGGGSGGGGSGGGGSEFDIQMTQSPSSLSASVGDRVTITCKASDHINNWLAWYQQKPGQAPKLLIYGATTLETGVPSRFSGSGSGTDYTLTISSLQPEDFATYYCQQSWNTPWTFGQGTKLEIKRLEGKPIPNPLLGLDSTGSGEDLKNVFPPEVAVFEPSEAEISHTQKATLVCLATGFYPDHVELSWWVNGKEVHSGVSTDPQPLKEQPALNDSRYCLSSRLRVSATFWQNPRNHFRCQVQFYGLSENDEWTQDRAKPVTQIVSAEAWGRADCGSQSFGLLDPKLCYLLDGILFIYGVILTALFLRVKFSRSADAPAYQQGQNQLYNELNLGRREEYDVLDKRRGRDPEMGGKPQRRKNPQEGLYNELQKDKMAEAYSEIGMKGERRRGKGHDGLYQGLSTATKDTYDALHMQALPPRRAKRSGSGATNFSLLKQAGDVEENPGPTSMDWIWRILFLVGAATGAHSGPVDNKFNKERYSAYYEIWQLPNLNVRQKAAFIGSLQDDPSQSANLLAEAKKLNDAQAPKGSGGGGSGGGGSGGGGSFEQVQLQQPGAELVKPGASVKMSCKASGYAFSSYWINWMKQKPGQGLEWIGQIYPGDGDTNYNGKFKGRATLTADTSSSTAYMQLSSLTSEDSAVYFCARSITTVVGCAMDYWGQGTSVTVSSTREQKLISEEDGSGIQNPDPAVYQLRDSKSSDKSVCLFTDFDSQTNVSQSKDSDVYITDKTVLDMRSMDFKSNSAVAWSNKSDFACANAFNNSIIPEDTFFPSPESSCGTQSFGLLDPKLCYLLDGILFIYGVILTALFLRSKRSRLLHSDYMNMTPRRPGPTRKHYQPYAPPRDFAAYRSRVKFSRSADAPAYQQGQNQLYNELNLGRREEYDVLDKRRGRDPEMGGKPQRRKNPQEGLYNELQKDKMAEAYSEIGMKGERRRGKGHDGLYQGLSTATKDTYDALHMQALPPR

SEQ ID NO: 16497 - protein, 1150 aa, Artificial Sequence
  Synthetic Polypeptide
MALPVTALLLPLALLLHAARPEVQLVESGGSLVQPGGSLRLSCAASGFTFDDYAMSWVRQVPGKGLEWVSSINWSGTHTDYADSVKGRFTISRNNANNTLYLQMNSLKSEDTAVYYCAKNWRDAGTTWFEKSGSAGQGTQVTVSSGTGGGGSGGGGSGGGGSEFDIQMTQSPSSLSASVGDRVTITCKASDHINNWLAWYQQKPGQAPKLLIYGATTLETGVPSRFSGSGSGTDYTLTISSLQPEDFATYYCQQSWNTPWTFGQGTKLEIKRLEGKPIPNPLLGLDSTGSGEDLKNVFPPEVAVFEPSEAEISHTQKATLVCLATGFYPDHVELSWWVNGKEVHSGVSTDPQPLKEQPALNDSRYCLSSRLRVSATFWQNPRNHFRCQVQFYGLSENDEWTQDRAKPVTQIVSAEAWGRADCGSQSFGLLDPKLCYLLDGILFIYGVILTALFLRSKRSRLLHSDYMNMTPRRPGPTRKHYQPYAPPRDFAAYRSRVKFSRSADAPAYQQGQNQLYNELNLGRREEYDVLDKRRGRDPEMGGKPQRRKNPQEGLYNELQKDKMAEAYSEIGMKGERRRGKGHDGLYQGLSTATKDTYDALHMQALPPRRAKRSGSGATNFSLLKQAGDVEENPGPTSMDWIWRILFLVGAATGAHSGPVDNKFNKERYSAYYEIWQLPNLNVRQKAAFIGSLQDDPSQSANLLAEAKKLNDAQAPKGSGGGGSGGGGSGGGGSFEQVQLQQPGAELVKPGASVKMSCKASGYAFSSYWINWMKQKPGQGLEWIGQIYPGDGDTNYNGKFKGRATLTADTSSSTAYMQLSSLTSEDSAVYFCARSITTVVGCAMDYWGQGTSVTVSSTREQKLISEEDGSGIQNPDPAVYQLRDSKSSDKSVCLFTDFDSQTNVSQSKDSDVYITDKTVLDMRSMDFKSNSAVAWSNKSDFACANAFNNSIIPEDTFFPSPESSCGTQSFGLLDPKLCYLLDGILFIYGVILTALFLRSKRSRLLHSDYMNMTPRRPGPTRKHYQPYAPPRDFAAYRSRVKFSRSADAPAYQQGQNQLYNELNLGRREEYDVLDKRRGRDPEMGGKPQRRKNPQEGLYNELQKDKMAEAYSEIGMKGERRRGKGHDGLYQGLSTATKDTYDALHMQALPPR

SEQ ID NO: 16498 - protein, 1111 aa, Artificial Sequence
  Synthetic Polypeptide
MALPVTALLLPLALLLHAARPEVQLVESGGSLVQPGGSLRLSCAASGFTFDDYAMSWVRQVPGKGLEWVSSINWSGTHTDYADSVKGRFTISRNNANNTLYLQMNSLKSEDTAVYYCAKNWRDAGTTWFEKSGSAGQGTQVTVSSGTGGGGSGGGGSGGGGSEFDIQMTQSPSSLSASVGDRVTITCKASDHINNWLAWYQQKPGQAPKLLIYGATTLETGVPSRFSGSGSGTDYTLTISSLQPEDFATYYCQQSWNTPWTFGQGTKLEIKRLEGKPIPNPLLGLDSTGSGEDLKNVFPPEVAVFEPSEAEISHTQKATLVCLATGFYPDHVELSWWVNGKEVHSGVSTDPQPLKEQPALNDSRYCLSSRLRVSATFWQNPRNHFRCQVQFYGLSENDEWTQDRAKPVTQIVSAEAWGRADCGSQSFGLLDPKLCYLLDGILFIYGVILTALFLRVKFSRSADAPAYQQGQNQLYNELNLGRREEYDVLDKRRGRDPEMGGKPQRRKNPQEGLYNELQKDKMAEAYSEIGMKGERRRGKGHDGLYQGLSTATKDTYDALHMQALPPRRAKRSGSGATNFSLLKQAGDVEENPGPTSMDWIWRILFLVGAATGAHSGPVDNKFNKERYSAYYEIWQLPNLNVRQKAAFIGSLQDDPSQSANLLAEAKKLNDAQAPKGSGGGGSGGGGSGGGGSFEQVQLQQPGAELVKPGASVKMSCKASGYAFSSYWINWMKQKPGQGLEWIGQIYPGDGDTNYNGKFKGRATLTADTSSSTAYMQLSSLTSEDSAVYFCARSITTVVGCAMDYWGQGTSVTVSSTREQKLISEEDLGSGIQNPDPAVYQLRDSKSSDKSVCLFTDFDSQTNVSQSKDSDVYITDKTVLDMRSMDFKSNSAVAWSNKSDFACANAFNNSIIPEDTFFPSPESSCGTQSFGLLDPKLCYLLDGILFIYGVILTALFLKRGRKKLLYIFKQPFMRPVQTTQEEDGCSCRFPEEEEGGCELRVKFSRSADAPAYQQGQNQLYNELNLGRREEYDVLDKRRGRDPEMGGKPQRRKNPQEGLYNELQKDKMAEAYSEIGMKGERRRGKGHDGLYQGLSTATKDTYDALHMQALPPR

SEQ ID NO: 16499 - protein, 1153 aa, Artificial Sequence
  Synthetic Polypeptide
MALPVTALLLPLALLLHAARPEVQLVESGGSLVQPGGSLRLSCAASGFTFDDYAMSWVRQVPGKGLEWVSSINWSGTHTDYADSVKGRFTISRNNANNTLYLQMNSLKSEDTAVYYCAKNWRDAGTTWFEKSGSAGQGTQVTVSSGTGGGGSGGGGSGGGGSEFDIQMTQSPSSLSASVGDRVTITCKASDHINNWLAWYQQKPGQAPKLLIYGATTLETGVPSRFSGSGSGTDYTLTISSLQPEDFATYYCQQSWNTPWTFGQGTKLEIKRLEGKPIPNPLLGLDSTGSGEDLKNVFPPEVAVFEPSEAEISHTQKATLVCLATGFYPDHVELSWWVNGKEVHSGVSTDPQPLKEQPALNDSRYCLSSRLRVSATFWQNPRNHFRCQVQFYGLSENDEWTQDRAKPVTQIVSAEAWGRADCGSQSFGLLDPKLCYLLDGILFIYGVILTALFLKRGRKKLLYIFKQPFMRPVQTTQEEDGCSCRFPEEEEGGCELRVKFSRSADAPAYQQGQNQLYNELNLGRREEYDVLDKRRGRDPEMGGKPQRRKNPQEGLYNELQKDKMAEAYSEIGMKGERRRGKGHDGLYQGLSTATKDTYDALHMQALPPRRAKRSGSGATNFSLLKQAGDVEENPGPTSMDWIWRILFLVGAATGAHSGPVDNKFNKERYSAYYEIWQLPNLNVRQKAAFIGSLQDDPSQSANLLAEAKKLNDAQAPKGSGGGGSGGGGSGGGGSFEQVQLQQPGAELVKPGASVKMSCKASGYAFSSYWINWMKQKPGQGLEWIGQIYPGDGDTNYNGKFKGRATLTADTSSSTAYMQLSSLTSEDSAVYFCARSITTVVGCAMDYWGQGTSVTVSSTREQKLISEEDLGSGIQNPDPAVYQLRDSKSSDKSVCLFTDFDSQTNVSQSKDSDVYITDKTVLDMRSMDFKSNSAVAWSNKSDFACANAFNNSIIPEDTFFPSPESSCGTQSFGLLDPKLCYLLDGILFIYGVILTALFLKRGRKKLLYIFKQPFMRPVQTTQEEDGCSCRFPEEEEGGCELRVKFSRSADAPAYQQGQNQLYNELNLGRREEYDVLDKRRGRDPEMGGKPQRRKNPQEGLYNELQKDKMAEAYSEIGMKGERRRGKGHDGLYQGLSTATKDTYDALHMQALPPR

SEQ ID NO: 16500 - protein, 1043 aa, Artificial Sequence
  Synthetic Polypeptide
MALPVTALLLPLALLLHAARPEVQLVESGGSLVQPGGSLRLSCAASGFTFDDYAMSWVRQVPGKGLEWVSSINWSGTHTDYADSVKGRFTISRNNANNTLYLQMNSLKSEDTAVYYCAKNWRDAGTTWFEKSGSAGQGTQVTVSSGTGGGGSGGGGSGGGGSEFDIQMTQSPSSLSASVGDRVTITCKASDHINNWLAWYQQKPGQAPKLLIYGATTLETGVPSRFSGSGSGTDYTLTISSLQPEDFATYYCQQSWNTPWTFGQGTKLEIKRLEQSFGLLDPKLCYLLDGILFIYGVILTALFLRVKFSRSADAPAYQQGQNQLYNELNLGRREEYDVLDKRRGRDPEMGGKPQRRKNPQEGLYNELQKDKMAEAYSEIGMKGERRRGKGHDGLYQGLSTATKDTYDALHMQALPPRRAKRSGSGATNFSLLKQAGDVEENPGPTSMDWIWRILFLVGAATGAHSGPVDNKFNKERYSAYYEIWQLPNLNVRQKAAFIGSLQDDPSQSANLLAEAKKLNDAQAPKGSGGGGSGGGGSGGGGSFEQVQLQQPGAELVKPGASVKMSCKASGYAFSSYWINWMKQKPGQGLEWIGQIYPGDGDTNYNGKFKGRATLTADTSSSTAYMQLSSLTSEDSAVYFCARSITTVVGCAMDYWGQGTSVTVSSTRQSFGLLDPKLCYLLDGILFIYGVILTALFLRVKFSRSADAPAYQQGQNQLYNELNLGRREEYDVLDKRRGRDPEMGGKPQRRKNPQEGLYNELQKDKMAEAYSEIGMKGERRRGKGHDGLYQGLSTATKDTYDALHMQALPPRRAKRSGSGVKQTLNFDLLKLAGDVESNPGPSRGHMTEYKPTVRLATRDDVPRAVRTLAAAFADYPATRHTVDPDRHIERVTELQELFLTRVGLDIGKVWVADDGAAVAVWTTPESVEAGAVFAEIGPRMAELSGSRLAAQQQMEGLLAPHRPKEPAWFLATVGVSPDHQGKGLGSAVVLPGVEAAERAGVPAFLETSAPRNLPFYERLGFTVTADVEVPEGPRTWCMTRKPGA

SEQ ID NO: 16501 - protein, 868 aa, Artificial Sequence
  Synthetic Polypeptide
MALPVTALLLPLALLLHAARPEVQLVESGGSLVQPGGSLRLSCAASGFTFDDYAMSWVRQVPGKGLEWVSSINWSGTHTDYADSVKGRFTISRNNANNTLYLQMNSLKSEDTAVYYCAKNWRDAGTTWFEKSGSAGQGTQVTVSSGTGGGGSGGGGSGGGGSEFDIQMTQSPSSLSASVGDRVTITCKASDHINNWLAWYQQKPGQAPKLLIYGATTLETGVPSRFSGSGSGTDYTLTISSLQPEDFATYYCQQSWNTPWTFGQGTKLEIKRLEGQPKANPTVTLFPPSSEELQANKATLVCLISDFYPGAVTVAWKADGSPVKAGVETTKPSKQSNNKYAASSYLSLTPEQWKSHRSYSCQVTHEGSTVEKTVAPTECSPIKTDVITMDPKDNCSKDANDTLLLQLTNTSAYYMYLLLLLKSVVYFAIITCCLLRRTAFCCNGEKSRAKRSGSGATNFSLLKQAGDVEENPGPTSMDWIWRILFLVGAATGAHSGPVDNKFNKERYSAYYEIWQLPNLNVRQKAAFIGSLQDDPSQSANLLAEAKKLNDAQAPKGSGGGGSGGGGSGGGGSFEQVQLQQPGAELVKPGASVKMSCKASGYAFSSYWINWMKQKPGQGLEWIGQIYPGDGDTNYNGKFKGRATLTADTSSSTAYMQLSSLTSEDSAVYFCARSITTVVGCAMDYWGQGTSVTVSSTRASTKGPSVFPLAPSSKSTSGGTAALGCLVKDYFPEPVTVSWNSGALTSGVHTFPAVLQSSGLYSLSSVVTVPSSSLGTQTYICNVNHKPSNTKVDKRVEPKSCEVKTDSTDHVKPKETENTKQPSKSCHKPKAIVHTEKVNMMSLTVLGLRMLFAKTVAVNFLLTAKLFFL

SEQ ID NO: 16502 - protein, 846 aa, Artificial Sequence
  Synthetic Polypeptide
MALPVTALLLPLALLLHAARPEVQLVESGGSLVQPGGSLRLSCAASGFTFDDYAMSWVRQVPGKGLEWVSSINWSGTHTDYADSVKGRFTISRNNANNTLYLQMNSLKSEDTAVYYCAKNWRDAGTTWFEKSGSAGQGTQVTVSSGTGGGGSGGGGSGGGGSEFDIQMTQSPSSLSASVGDRVTITCKASDHINNWLAWYQQKPGQAPKLLIYGATTLETGVPSRFSGSGSGTDYTLTISSLQPEDFATYYCQQSWNTPWTFGQGTKLEIKRLEGQPKANPTVTLFPPSSEELQANKATLVCLISDFYPGAVTVAWKADGSPVKAGVETTKPSKQSNNKYAASSYLSLTPEQWKSHRSYSCQVTHEGSTVEKTVAPTECSGRADCGITSASYHQGVLSATILYEILLGKATLYAVLVSALVLMAMVKRKDSRGRAKRSGSGATNFSLLKQAGDVEENPGPTSMDWIWRILFLVGAATGAHSGPVDNKFNKERYSAYYEIWQLPNLNVRQKAAFIGSLQDDPSQSANLLAEAKKLNDAQAPKGSGGGGSGGGGSGGGGSFEQVQLQQPGAELVKPGASVKMSCKASGYAFSSYWINWMKQKPGQGLEWIGQIYPGDGDTNYNGKFKGRATLTADTSSSTAYMQLSSLTSEDSAVYFCARSITTVVGCAMDYWGQGTSVTVSSTRASTKGPSVFPLAPSSKSTSGGTAALGCLVKDYFPEPVTVSWNSGALTSGVHTFPAVLQSSGLYSLSSVVTVPSSSLGTQTYICNVNHKPSNTKVDKRVEPKSCIPEDTFFPSSDVPCDVKLVEKSFETDTNLNFQNLSVIGFRILLLKVAGFNLLMTLRLWSS

SEQ ID NO: 16503 - protein, 846 aa, Artificial Sequence
  Synthetic Polypeptide
MALPVTALLLPLALLLHAARPEVQLVESGGSLVQPGGSLRLSCAASGFTFDDYAMSWVRQVPGKGLEWVSSINWSGTHTDYADSVKGRFTISRNNANNTLYLQMNSLKSEDTAVYYCAKNWRDAGTTWFEKSGSAGQGTQVTVSSGTGGGGSGGGGSGGGGSEFDIQMTQSPSSLSASVGDRVTITCKASDHINNWLAWYQQKPGQAPKLLIYGATTLETGVPSRFSGSGSGTDYTLTISSLQPEDFATYYCQQSWNTPWTFGQGTKLEIKRLEGQPKANPTVTLFPPSSEELQANKATLVCLISDFYPGAVTVAWKADGSPVKAGVETTKPSKQSNNKYAASSYLSLTPEQWKSHRSYSCQVTHEGSTVEKTVAPTECSGRADCGFTSESYQQGVLSATILYEILLGKATLYAVLVSALVLMAMVKRKDSRGRAKRSGSGATNFSLLKQAGDVEENPGPTSMDWIWRILFLVGAATGAHSGPVDNKFNKERYSAYYEIWQLPNLNVRQKAAFIGSLQDDPSQSANLLAEAKKLNDAQAPKGSGGGGSGGGGSGGGGSFEQVQLQQPGAELVKPGASVKMSCKASGYAFSSYWINWMKQKPGQGLEWIGQIYPGDGDTNYNGKFKGRATLTADTSSSTAYMQLSSLTSEDSAVYFCARSITTVVGCAMDYWGQGTSVTVSSTRASTKGPSVFPLAPSSKSTSGGTAALGCLVKDYFPEPVTVSWNSGALTSGVHTFPAVLQSSGLYSLSSVVTVPSSSLGTQTYICNVNHKPSNTKVDKRVEPKSCIPEDTFFPSPESSCDVKLVEKSFETDTNLNFQNLSVIGFRILLLKVAGFNLLMTLRLWSS

SEQ ID NO: 16504 - protein, 772 aa, Artificial Sequence
  Synthetic Polypeptide
MALPVTALLLPLALLLHAARPEVQLVESGGGSVQTGGSLRLTCAASGRTSRSYGMGWFRQAPGKEREFVSGISWRGDSTGYADSVKGRFTISRDNAKNTVDLQMNSLKPEDTAIYYCAAAAGSAWYGTLYEYDYWGQGTLVTVSSGGGSGGGSEVQLVESGGSLVQPGGSLRLSCAASGFTFDDYAMSWVRQVPGKGLEWVSSINWSGTHTDYADSVKGRFTISRNNANNTLYLQMNSLKSEDTAVYYCAKNWRDAGTTWFEKSGSAGQGTQVTVSSGTGGGGSGGGGSGGGGSEFDIQMTQSPSSLSASVGDRVTITCKASDHINNWLAWYQQKPGQAPKLLIYGATTLETGVPSRFSGSGSGTDYTLTISSLQPEDFATYYCQQSWNTPWTFGQGTKLEIKRGGGGSGGGGSGGGGSQVQLQQPGAELVKPGASVKMSCKASGYAFSSYWINWMKQKPGQGLEWIGQIYPGDGDTNYNGKFKGRATLTADTSSSTAYMQLSSLTSEDSAVYFCARSITTVVGCAMDYWGQGTSVTVSSTREQKLISEEDLKIEVMYPPPYLDNEKSNGTIIHVKGKHLCPSPLFPGPSKPFWVLVVVGGVLACYSLLVTVAFIIFWVRSKRSRLLHSDYMNMTPRRPGPTRKHYQPYAPPRDFAAYRSRVKFSRSADAPAYQQGQNQLYNELNLGRREEYDVLDKRRGRDPEMGGKPRRKNPQEGLYNELQKDKMAEAYSEIGMKGERRRGKGHDGLYQGLSTATKDTYDALHMQALPPR

SEQ ID NO: 16505 - protein, 778 aa, Artificial Sequence
  Synthetic Polypeptide
MALPVTALLLPLALLLHAARPEVQLVESGGGSVQTGGSLRLTCAASGRTSRSYGMGWFRQAPGKEREFVSGISWRGDSTGYADSVKGRFTISRDNAKNTVDLQMNSLKPEDTAIYYCAAAAGSAWYGTLYEYDYWGQGTLVTVSSGGGSGGGSEVQLVESGGSLVQPGGSLRLSCAASGFTFDDYAMSWVRQVPGKGLEWVSSINWSGTHTDYADSVKGRFTISRNNANNTLYLQMNSLKSEDTAVYYCAKNWRDAGTTWFEKSGSAGQGTQVTVSSGTGGGGSGGGGSGGGGSEFDIQMTQSPSSLSASVGDRVTITCKASDHINNWLAWYQQKPGQAPKLLIYGATTLETGVPSRFSGSGSGTDYTLTISSLQPEDFATYYCQQSWNTPWTFGQGTKLEIKRGGGGSGGGGSGGGGSQVQLQQPGAELVKPGASVKMSCKASGYAFSSYWINWMKQKPGQGLEWIGQIYPGDGDTNYNGKFKGRATLTADTSSSTAYMQLSSLTSEDSAVYFCARSITTVVGCAMDYWGQGTSVTVSSTREQKLISEEDLAKPTTTPAPRPPTPAPTIASQPLSLRPEACRPAAGGAVHTRGLDFACDIYIWAPLAGTCGVLLLSLVITLYCKRGRKKLLYIFKQPFMRPVQTTQEEDGCSCRFPEEEEGGCELRVKFSRSADAPAYQQGQNQLYNELNLGRREEYDVLDKRRGRDPEMGGKPRRKNPQEGLYNELQKDKMAEAYSEIGMKGERRRGKGHDGLYQGLSTATKDTYDALHMQALPPR

SEQ ID NO: 16506 - protein, 1191 aa, Artificial Sequence
  Synthetic Polypeptide
MALPVTALLLPLALLLHAARPEVQLVESGGGSVQTGGSLRLTCAASGRTSRSYGMGWFRQAPGKEREFVSGISWRGDSTGYADSVKGRFTISRDNAKNTVDLQMNSLKPEDTAIYYCAAAAGSAWYGTLYEYDYWGQGTLVTVSSGGGSGGGSEVQLVESGGSLVQPGGSLRLSCAASGFTFDDYAMSWVRQVPGKGLEWVSSINWSGTHTDYADSVKGRFTISRNNANNTLYLQMNSLKSEDTAVYYCAKNWRDAGTTWFEKSGSAGQGTQVTVSSGTGGGGSGGGGSGGGGSEFDIQMTQSPSSLSASVGDRVTITCKASDHINNWLAWYQQKPGQAPKLLIYGATTLETGVPSRFSGSGSGTDYTLTISSLQPEDFATYYCQQSWNTPWTFGQGTKLEIKRGGGGSGGGGSGGGGSQVQLQQPGAELVKPGASVKMSCKASGYAFSSYWINWMKQKPGQGLEWIGQIYPGDGDTNYNGKFKGRATLTADTSSSTAYMQLSSLTSEDSAVYFCARSITTVVGCAMDYWGQGTSVTVSSTREQKLISEEDLAKPTTTPAPRPPTPAPTIASQPLSLRPEACRPAAGGAVHTRGLDFACDIYIWAPLAGTCGVLLLSLVITLYCGRARVKFSRSADAPAYQQGQNQLYNELNLGRREEYDVLDKRRGRDPEMGGKPRRKNPQEGLYNELQKDKMAEAYSEIGMKGERRRGKGHDGLYQGLSTATKDTYDALHMQALPPRSRGSGATNFSLLKQAGDVEENPGPGIHMATYEVLCEVARKLGTDDREVVLFLLNVFIPQPTLAQLIGALRALKEEGRLTFPLLAECLFRAGRRDLLRDLLHLDPRFLERHLAGTMSYFSPYQLTVLHVDGELCARDIRSLIFLSKDTIGSRSTPQTFLHWVYCMENLDLLGPTDVDALMSMLRSLSRVDLQRQVQTLMGLHLSGPSHSQHYRHTPLETDFYDYKDDDDKTSGSGEGRGSLLTCGDVEENPGPHMTEYKPTVRLATRDDVPRAVRTLAAAFADYPATRHTVDPDRHIERVTELQELFLTRVGLDIGKVWVADDGAAVAVWTTPESVEAGAVFAEIGPRMAELSGSRLAAQQQMEGLLAPHRPKEPAWFLATVGVSPDHQGKGLGSAVVLPGVEAAERAGVPAFLETSAPRNLPFYERLGFTVTADVEVPEGPRTWCMTRKPGA

SEQ ID NO: 16507 - protein, 1131 aa, Artificial Sequence
  Synthetic Polypeptide
MALPVTALLLPLALLLHAARPEVQLVESGGGSVQTGGSLRLTCAASGRTSRSYGMGWFRQAPGKEREFVSGISWRGDSTGYADSVKGRFTISRDNAKNTVDLQMNSLKPEDTAIYYCAAAAGSAWYGTLYEYDYWGQGTLVTVSSGGGSGGGSEVQLVESGGSLVQPGGSLRLSCAASGFTFDDYAMSWVRQVPGKGLEWVSSINWSGTHTDYADSVKGRFTISRNNANNTLYLQMNSLKSEDTAVYYCAKNWRDAGTTWFEKSGSAGQGTQVTVSSGTGGGGSGGGGSGGGGSEFDIQMTQSPSSLSASVGDRVTITCKASDHINNWLAWYQQKPGQAPKLLIYGATTLETGVPSRFSGSGSGTDYTLTISSLQPEDFATYYCQQSWNTPWTFGQGTKLEIKRLEIQNPDPAVYQLRDSKSSDKSVCLFTDFDSQTNVSQSKDSDVYITDKCVLDMRSMDFKSNSAVAWSNKSDFACANAFNNSIIPEDTFFPSSDVPCDVKLVEKSFETDTNLNFQNLSVIGFRILLLKVAGFNLLMTLRLWSSRAKRSGSGVKQTLNFDLLKLAGDVESNPGPTSMDWIWRILFLVGAATGAHSFEQVQLQQPGAELVKPGASVKMSCKASGYAFSSYWINWMKQKPGQGLEWIGQIYPGDGDTNYNGKFKGRATLTADTSSSTAYMQLSSLTSEDSAVYFCARSITTVVGCAMDYWGQGTSVTVSSTREDLKNVFPPEVAVFEPSKAEIAHTQKATLVCLATGFYPDHVELSWWVNGKEVHSGVCTDPQPLKEQPALNDSRYCLSSRLRVSATFWQNPRNHFRCQVQFYGLSENDEWTQDRAKPVTQIVSAEAWGRADCGITSASYHQGVLSATILYEILLGKATLYAVLVSALVLMAMVKRKDSRGRAKRSGSGATNFSLLKQAGDVEENPGPSRGHMTEYKPTVRLATRDDVPRAVRTLAAAFADYPATRHTVDPDRHIERVTELQELFLTRVGLDIGKVWVADDGAAVAVWTTPESVEAGAVFAEIGPRMAELSGSRLAAQQQMEGLLAPHRPKEPAWFLATVGVSPDHQGKGLGSAVVLPGVEAAERAGVPAFLETSAPRNLPFYERLGFTVTADVEVPEGPRTWCMTRKPGA

SEQ ID NO: 16508 - protein, 1130 aa, Artificial Sequence
  Synthetic Polypeptide
MALPVTALLLPLALLLHAARPEVQLVESGGGSVQTGGSLRLTCAASGRTSRSYGMGWFRQAPGKEREFVSGISWRGDSTGYADSVKGRFTISRDNAKNTVDLQMNSLKPEDTAIYYCAAAAGSAWYGTLYEYDYWGQGTLVTVSSGGGSGGGSEVQLVESGGSLVQPGGSLRLSCAASGFTFDDYAMSWVRQVPGKGLEWVSSINWSGTHTDYADSVKGRFTISRNNANNTLYLQMNSLKSEDTAVYYCAKNWRDAGTTWFEKSGSAGQGTQVTVSSGTGGGGSGGGGSGGGGSEFDIQMTQSPSSLSASVGDRVTITCKASDHINNWLAWYQQKPGQAPKLLIYGATTLETGVPSRFSGSGSGTDYTLTISSLQPEDFATYYCQQSWNTPWTFGQGTKLEIKRLEDLKNVFPPEVAVFEPSKAEIAHTQKATLVCLATGFYPDHVELSWWVNGKEVHSGVCTDPQPLKEQPALNDSRYCLSSRLRVSATFWQNPRNHFRCQVQFYGLSENDEWTQDRAKPVTQIVSAEAWGRADCGITSASYHQGVLSATILYEILLGKATLYAVLVSALVLMAMVKRKDSRGRAKRSGSGATNFSLLKQAGDVEENPGPTSMDWIWRILFLVGAATGAHSFEQVQLQQPGAELVKPGASVKMSCKASGYAFSSYWINWMKQKPGQGLEWIGQIYPGDGDTNYNGKFKGRATLTADTSSSTAYMQLSSLTSEDSAVYFCARSITTVVGCAMDYWGQGTSVTVSSTRIQNPDPAVYQLRDSKSSDKSVCLFTDFDSQTNVSQSKDSDVYITDKCVLDMRSMDFKSNSAVAWSNKSDFACANAFNNSIIPEDTFFPSSDVPCDVKLVEKSFETDTNLNFQNLSVIGFRILLLKVAGFNLLMTLRLWSSRAKRSGSGVKQTLNFDLLKLAGDVESNPGPSRGHMTEYKPTVRLATRDDVPRAVRTLAAAFADYPATRHTVDPDRHIERVTELQELFLTRVGLDIGKVWVADDGAAVAVWTTPESVEAGAVFAEIGPRMAELSGSRLAAQQQMEGLLAPHRPKEPAWFLATVGVSPDHQGKGLGSAVVLPGVEAAERAGVPAFLETSAPRNLPFYERLGFTVTADVEVPEGPRTWCMTRKPGA

SEQ ID NO: 16509 - protein, 897 aa, Artificial Sequence
  Synthetic Polypeptide
MALPVTALLLPLALLLHAARPEVQLVESGGGSVQTGGSLRLTCAASGRTSRSYGMGWFRQAPGKEREFVSGISWRGDSTGYADSVKGRFTISRDNAKNTVDLQMNSLKPEDTAIYYCAAAAGSAWYGTLYEYDYWGQGTLVTVSSGGGSGGGSEVQLVESGGSLVQPGGSLRLSCAASGFTFDDYAMSWVRQVPGKGLEWVSSINWSGTHTDYADSVKGRFTISRNNANNTLYLQMNSLKSEDTAVYYCAKNWRDAGTTWFEKSGSAGQGTQVTVSSGTGGGGSGGGGSGGGGSEFDIQMTQSPSSLSASVGDRVTITCKASDHINNWLAWYQQKPGQAPKLLIYGATTLETGVPSRFSGSGSGTDYTLTISSLQPEDFATYYCQQSWNTPWTFGQGTKLEIKRLEDLKNVFPPEVAVFEPSEAEISHTQKATLVCLATGFYPDHVELSWWVNGKEVHSGVCTDPQPLKEQPALNDSRYCLSSRLRVSATFWQNPRNHFRCQVQFYGLSENDEWTQDRAKPVTQIVSAEAWGRADCGFTSESYQQGVLSATILYEILLGKATLYAVLVSALVLMAMVKRKDSRGRAKRSGSGATNFSLLKQAGDVEENPGPTSMDWIWRILFLVGAATGAHSFEQVQLQQPGAELVKPGASVKMSCKASGYAFSSYWINWMKQKPGQGLEWIGQIYPGDGDTNYNGKFKGRATLTADTSSSTAYMQLSSLTSEDSAVYFCARSITTVVGCAMDYWGQGTSVTVSSTRIQNPDPAVYQLRDSKSSDKSVCLFTDFDSQTNVSQSKDSDVYITDKCVLDMRSMDFKSNSAVAWSNKSDFACANAFNNSIIPEDTFFPSPESSCDVKLVEKSFETDTNLNFQNLSVIGFRILLLKVAGFNLLMTLRLWSS

SEQ ID NO: 16510 - protein, 1122 aa, Artificial Sequence
  Synthetic Polypeptide
MALPVTALLLPLALLLHAARPEVQLVESGGGSVQTGGSLRLTCAASGRTSRSYGMGWFRQAPGKEREFVSGISWRGDSTGYADSVKGRFTISRDNAKNTVDLQMNSLKPEDTAIYYCAAAAGSAWYGTLYEYDYWGQGTLVTVSSGGGSGGGSEVQLVESGGSLVQPGGSLRLSCAASGFTFDDYAMSWVRQVPGKGLEWVSSINWSGTHTDYADSVKGRFTISRNNANNTLYLQMNSLKSEDTAVYYCAKNWRDAGTTWFEKSGSAGQGTQVTVSSGTGGGGSGGGGSGGGGSEFDIQMTQSPSSLSASVGDRVTITCKASDHINNWLAWYQQKPGQAPKLLIYGATTLETGVPSRFSGSGSGTDYTLTISSLQPEDFATYYCQQSWNTPWTFGQGTKLEIKRLEDLKNVFPPEVAVFEPSEAEISHTQKATLVCLATGFYPDHVELSWWVNGKEVHSGVCTDPQPLKEQPALNDSRYCLSSRLRVSATFWQNPRNHFRCQVQFYGLSENDEWTQDRAKPVTQIVSAEAWGRADCGFTSESYQQGVLSATILYEILLGKATLYAVLVSALVLMAMVKRKDSRGRAKRSGSGATNFSLLKQAGDVEENPGPTSMDWIWRILFLVGAATGAHSFEQVQLQQPGAELVKPGASVKMSCKASGYAFSSYWINWMKQKPGQGLEWIGQIYPGDGDTNYNGKFKGRATLTADTSSSTAYMQLSSLTSEDSAVYFCARSITTVVGCAMDYWGQGTSVTVSSTRIQNPDPAVYQLRDSKSSDKSVCLFTDFDSQTNVSQSKDSDVYITDKCVLDMRSMDFKSNSAVAWSNKSDFACANAFNNSIIPEDTFFPSPESSCDVKLVEKSFETDTNLNFQNLSVIGFRILLLKVAGFNLLMTLRLWSSRAKRSGSGVKQTLNFDLLKLAGDVESNPGPSRGGIHTMATYEVLCEVARKLGTDDREVVLFLLNVFIPQPTLAQLIGALRALKEEGRLTFPLLAECLFRAGRRDLLRDLLHLDPRFLERHLAGTMSYFSPYQLTVLHVDGELCARDIRSLIFLSKDTIGSRSTPQTFLHWVYCMENLDLLGPTDVDALMSMLRSLSRVDLQRQVQTLMGLHLSGPSHSQHYRHTP

SEQ ID NO: 16511 - protein, 901 aa, Artificial Sequence
  Synthetic Polypeptide
MALPVTALLLPLALLLHAARPEVQLVESGGGSVQTGGSLRLTCAASGRTSRSYGMGWFRQAPGKEREFVSGISWRGDSTGYADSVKGRFTISRDNAKNTVDLQMNSLKPEDTAIYYCAAAAGSAWYGTLYEYDYWGQGTLVTVSSGGGSGGGSEVQLVESGGSLVQPGGSLRLSCAASGFTFDDYAMSWVRQVPGKGLEWVSSINWSGTHTDYADSVKGRFTISRNNANNTLYLQMNSLKSEDTAVYYCAKNWRDAGTTWFEKSGSAGQGTQVTVSSGTGGGGSGGGGSGGGGSEFDIQMTQSPSSLSASVGDRVTITCKASDHINNWLAWYQQKPGQAPKLLIYGATTLETGVPSRFSGSGSGTDYTLTISSLQPEDFATYYCQQSWNTPWTFGQGTKLEIKRLEIQNPDPAVYQLRDSKSSDKSVCLFTDFDSQTNVSQSKDSDVYITDKCVLDMRSMDFKSNSAVAWSNKSDFACANAFNNSIIPEDTFFPSPESSCDVKLVEKSFETDTNLNFQNLSVIGFRILLLKVAGFNLLMTLRLWSSRAKRSGSGVKQTLNFDLLKLAGDVESNPGPTSMDWIWRILFLVGAATGAHSFEQVQLQQPGAELVKPGASVKMSCKASGYAFSSYWINWMKQKPGQGLEWIGQIYPGDGDTNYNGKFKGRATLTADTSSSTAYMQLSSLTSEDSAVYFCARSITTVVGCAMDYWGQGTSVTVSSTREDLKNVFPPEVAVFEPSEAEISHTQKATLVCLATGFYPDHVELSWWVNGKEVHSGVCTDPQPLKEQPALNDSRYCLSSRLRVSATFWQNPRNHFRCQVQFYGLSENDEWTQDRAKPVTQIVSAEAWGRADCGFTSESYQQGVLSATILYEILLGKATLYAVLVSALVLMAMVKRKDSRG

SEQ ID NO: 16512 - protein, 1123 aa, Artificial Sequence
  Synthetic Polypeptide
MALPVTALLLPLALLLHAARPEVQLVESGGGSVQTGGSLRLTCAASGRTSRSYGMGWFRQAPGKEREFVSGISWRGDSTGYADSVKGRFTISRDNAKNTVDLQMNSLKPEDTAIYYCAAAAGSAWYGTLYEYDYWGQGTLVTVSSGGGSGGGSEVQLVESGGSLVQPGGSLRLSCAASGFTFDDYAMSWVRQVPGKGLEWVSSINWSGTHTDYADSVKGRFTISRNNANNTLYLQMNSLKSEDTAVYYCAKNWRDAGTTWFEKSGSAGQGTQVTVSSGTGGGGSGGGGSGGGGSEFDIQMTQSPSSLSASVGDRVTITCKASDHINNWLAWYQQKPGQAPKLLIYGATTLETGVPSRFSGSGSGTDYTLTISSLQPEDFATYYCQQSWNTPWTFGQGTKLEIKRLEIQNPDPAVYQLRDSKSSDKSVCLFTDFDSQTNVSQSKDSDVYITDKCVLDMRSMDFKSNSAVAWSNKSDFACANAFNNSIIPEDTFFPSPESSCDVKLVEKSFETDTNLNFQNLSVIGFRILLLKVAGFNLLMTLRLWSSRAKRSGSGVKQTLNFDLLKLAGDVESNPGPTSMDWIWRILFLVGAATGAHSFEQVQLQQPGAELVKPGASVKMSCKASGYAFSSYWINWMKQKPGQGLEWIGQIYPGDGDTNYNGKFKGRATLTADTSSSTAYMQLSSLTSEDSAVYFCARSITTVVGCAMDYWGQGTSVTVSSTREDLKNVFPPEVAVFEPSEAEISHTQKATLVCLATGFYPDHVELSWWVNGKEVHSGVCTDPQPLKEQPALNDSRYCLSSRLRVSATFWQNPRNHFRCQVQFYGLSENDEWTQDRAKPVTQIVSAEAWGRADCGFTSESYQQGVLSATILYEILLGKATLYAVLVSALVLMAMVKRKDSRGRAKRSGSGATNFSLLKQAGDVEENPGPSRGGIHTMATYEVLCEVARKLGTDDREVVLFLLNVFIPQPTLAQLIGALRALKEEGRLTFPLLAECLFRAGRRDLLRDLLHLDPRFLERHLAGTMSYFSPYQLTVLHVDGELCARDIRSLIFLSKDTIGSRSTPQTFLHWVYCMENLDLLGPTDVDALMSMLRSLSRVDLQRQVQTLMGLHLSGPSHSQHYRHTP

SEQ ID NO: 16513 - protein, 1175 aa, Artificial Sequence
  Synthetic Polypeptide
MALPVTALLLPLALLLHAARPLEGKPIPNPLLGLDSTGSGEDLKNVFPPEVAVFEPSKAEIAHTQKATLVCLATGFYPDHVELSWWVNGKEVHSGVCTDPQPLKEQPALNDSRYCLSSRLRVSATFWQNPRNHFRCQVQFYGLSENDEWTQDRAKPVTQIVSAEAWGRADCGITSASYHQGVLSATILYEILLGKATLYAVLVSALVLMAMVKRKDSRGRAKRSGSGATNFSLLKQAGDVEENPGPTSMALPVTALLLPLALLLHAARPEVQLVESGGGSVQTGGSLRLTCAASGRTSRSYGMGWFRQAPGKEREFVSGISWRGDSTGYADSVKGRFTISRDNAKNTVDLQMNSLKPEDTAIYYCAAAAGSAWYGTLYEYDYWGQGTLVTVSSGGGSGGGSEVQLVESGGSLVQPGGSLRLSCAASGFTFDDYAMSWVRQVPGKGLEWVSSINWSGTHTDYADSVKGRFTISRNNANNTLYLQMNSLKSEDTAVYYCAKNWRDAGTTWFEKSGSAGQGTQVTVSSGTGGGGSGGGGSGGGGSEFDIQMTQSPSSLSASVGDRVTITCKASDHINNWLAWYQQKPGQAPKLLIYGATTLETGVPSRFSGSGSGTDYTLTISSLQPEDFATYYCQQSWNTPWTFGQGTKLEIKRGGGGSGGGGSGGGGSQVQLQQPGAELVKPGASVKMSCKASGYAFSSYWINWMKQKPGQGLEWIGQIYPGDGDTNYNGKFKGRATLTADTSSSTAYMQLSSLTSEDSAVYFCARSITTVVGCAMDYWGQGTSVTVSSTREQKLISEEDGSGIQNPDPAVYQLRDSKSSDKSVCLFTDFDSQTNVSQSKDSDVYITDKCVLDMRSMDFKSNSAVAWSNKSDFACANAFNNSIIPEDTFFPSSDVPCDVKLVEKSFETDTNLNFQNLSVIGFRILLLKVAGFNLLMTLRLWSSRAKRSGSGVKQTLNFDLLKLAGDVESNPGPSRGHMTEYKPTVRLATRDDVPRAVRTLAAAFADYPATRHTVDPDRHIERVTELQELFLTRVGLDIGKVWVADDGAAVAVWTTPESVEAGAVFAEIGPRMAELSGSRLAAQQQMEGLLAPHRPKEPAWFLATVGVSPDHQGKGLGSAVVLPGVEAAERAGVPAFLETSAPRNLPFYERLGFTVTADVEVPEGPRTWCMTRKPGA

SEQ ID NO: 16514 - protein, 1176 aa, Artificial Sequence
  Synthetic Polypeptide
MALPVTALLLPLALLLHAARPLEQKLISEEDLGSGDRPDPAVYQLRDSKSSDKSVCLFTDFDSQTNVSQSKDSDVYITDKCVLDMRSMDFKSNSAVAWSNKSDFACANAFNNSIIPEDTFFPSPESSCDVKLVEKSFETDTNLNFQNLSVIGFRILLLKVAGFNLLMTLRLWSSSSRAKRSGSGVKQTLNFDLLKLAGDVESNPGPTSMALPVTALLLPLALLLHAARPEVQLVESGGGSVQTGGSLRLTCAASGRTSRSYGMGWFRQAPGKEREFVSGISWRGDSTGYADSVKGRFTISRDNAKNTVDLQMNSLKPEDTAIYYCAAAAGSAWYGTLYEYDYWGQGTLVTVSSGGGSGGGSEVQLVESGGSLVQPGGSLRLSCAASGFTFDDYAMSWVRQVPGKGLEWVSSINWSGTHTDYADSVKGRFTISRNNANNTLYLQMNSLKSEDTAVYYCAKNWRDAGTTWFEKSGSAGQGTQVTVSSGTGGGGSGGGGSGGGGSEFDIQMTQSPSSLSASVGDRVTITCKASDHINNWLAWYQQKPGQAPKLLIYGATTLETGVPSRFSGSGSGTDYTLTISSLQPEDFATYYCQQSWNTPWTFGQGTKLEIKRGGGGSGGGGSGGGGSQVQLQQPGAELVKPGASVKMSCKASGYAFSSYWINWMKQKPGQGLEWIGQIYPGDGDTNYNGKFKGRATLTADTSSSTAYMQLSSLTSEDSAVYFCARSITTVVGCAMDYWGQGTSVTVSSTRGKPIPNPLLGLDSTGSGEDLKNVFPPEVAVFEPSEAEISHTQKATLVCLATGFYPDHVELSWWVNGKEVHSGVCTDPQPLKEQPALNDSRYCLSSRLRVSATFWQNPRNHFRCQVQFYGLSENDEWTQDRAKPVTQIVSAEAWGRADCGFTSESYQQGVLSATILYEILLGKATLYAVLVSALVLMAMVKRKDSRGRAKRSGSGATNFSLLKQAGDVEENPGPSRGHMTEYKPTVRLATRDDVPRAVRTLAAAFADYPATRHTVDPDRHIERVTELQELFLTRVGLDIGKVWVADDGAAVAVWTTPESVEAGAVFAEIGPRMAELSGSRLAAQQQMEGLLAPHRPKEPAWFLATVGVSPDHQGKGLGSAVVLPGVEAAERAGVPAFLETSAPRNLPFYERLGFTVTADVEVPEGPRTWCMTRKPGA

SEQ ID NO: 16515 - protein, 1130 aa, Artificial Sequence
  Synthetic Polypeptide
MALPVTALLLPLALLLHAARPEVQLVESGGGSVQTGGSLRLTCAASGRTSRSYGMGWFRQAPGKEREFVSGISWRGDSTGYADSVKGRFTISRDNAKNTVDLQMNSLKPEDTAIYYCAAAAGSAWYGTLYEYDYWGQGTLVTVSSGGGSGGGSEVQLVESGGSLVQPGGSLRLSCAASGFTFDDYAMSWVRQVPGKGLEWVSSINWSGTHTDYADSVKGRFTISRNNANNTLYLQMNSLKSEDTAVYYCAKNWRDAGTTWFEKSGSAGQGTQVTVSSGTGGGGSGGGGSGGGGSEFDIQMTQSPSSLSASVGDRVTITCKASDHINNWLAWYQQKPGQAPKLLIYGATTLETGVPSRFSGSGSGTDYTLTISSLQPEDFATYYCQQSWNTPWTFGQGTKLEIKRLEDLKNVFPPEVAVFEPSEAEISHTQKATLVCLATGFYPDHVELSWWVNGKEVHSGVSTDPQPLKEQPALNDSRYCLSSRLRVSATFWQNPRNHFRCQVQFYGLSENDEWTQDRAKPVTQIVSAEAWGRADCGFTSESYQQGVLSATILYEILLGKATLYAVLVSALVLMAMVKRKDSRGRAKRSGSGATNFSLLKQAGDVEENPGPTSMDWIWRILFLVGAATGAHSFEQVQLQQPGAELVKPGASVKMSCKASGYAFSSYWINWMKQKPGQGLEWIGQIYPGDGDTNYNGKFKGRATLTADTSSSTAYMQLSSLTSEDSAVYFCARSITTVVGCAMDYWGQGTSVTVSSTRIQNPDPAVYQLRDSKSSDKSVCLFTDFDSQTNVSQSKDSDVYITDKTVLDMRSMDFKSNSAVAWSNKSDFACANAFNNSIIPEDTFFPSPESSCDVKLVEKSFETDTNLNFQNLSVIGFRILLLKVAGFNLLMTLRLWSSRAKRSGSGVKQTLNFDLLKLAGDVESNPGPSRGHMTEYKPTVRLATRDDVPRAVRTLAAAFADYPATRHTVDPDRHIERVTELQELFLTRVGLDIGKVWVADDGAAVAVWTTPESVEAGAVFAEIGPRMAELSGSRLAAQQQMEGLLAPHRPKEPAWFLATVGVSPDHQGKGLGSAVVLPGVEAAERAGVPAFLETSAPRNLPFYERLGFTVTADVEVPEGPRTWCMTRKPGA

SEQ ID NO: 16516 - protein, 1212 aa, Artificial Sequence
  Synthetic Polypeptide
MALPVTALLLPLALLLHAARPEVQLVESGGGSVQTGGSLRLTCAASGRTSRSYGMGWFRQAPGKEREFVSGISWRGDSTGYADSVKGRFTISRDNAKNTVDLQMNSLKPEDTAIYYCAAAAGSAWYGTLYEYDYWGQGTLVTVSSGGGSGGGSEVQLVESGGSLVQPGGSLRLSCAASGFTFDDYAMSWVRQVPGKGLEWVSSINWSGTHTDYADSVKGRFTISRNNANNTLYLQMNSLKSEDTAVYYCAKNWRDAGTTWFEKSGSAGQGTQVTVSSGTGGGGSGGGGSGGGGSEFDIQMTQSPSSLSASVGDRVTITCKASDHINNWLAWYQQKPGQAPKLLIYGATTLETGVPSRFSGSGSGTDYTLTISSLQPEDFATYYCQQSWNTPWTFGQGTKLEIKRLEDLKNVFPPEVAVFEPSEAEISHTQKATLVCLATGFYPDHVELSWWVNGKEVHSGVSTDPQPLKEQPALNDSRYCLSSRLRVSATFWQNPRNHFRCQVQFYGLSENDEWTQDRAKPVTQIVSAEAWGRADCGFTSESYQQGVLSATILYEILLGKATLYAVLVSALVLMAMVKRKDSRGRAKRSGSGATNFSLLKQAGDVEENPGPTSMDWIWRILFLVGAATGAHSFEQVQLQQPGAELVKPGASVKMSCKASGYAFSSYWINWMKQKPGQGLEWIGQIYPGDGDTNYNGKFKGRATLTADTSSSTAYMQLSSLTSEDSAVYFCARSITTVVGCAMDYWGQGTSVTVSSTREQKLISEEDGSGTPFPSLAPPIMLLVDGKQQMVVVCLVLDVAPPGLDSPIWFSAGNGSALDAFTYGPSPATDGTWTNLAHLSLPSEELASWEPLVCHTGPGAEGHSRSTQPMHLSGEASTARTCPQEPLRGTPGGALWLGVLRLLLFKLLLFDLLLTCSCLCDPAGPLPSPATTTRLRALGSHRLHPATETGGREATSSPRPQPRDRRWGDTPPGRKPGSPVRAKRSGSGVKQTLNFDLLKLAGDVESNPGPSRGHMTEYKPTVRLATRDDVPRAVRTLAAAFADYPATRHTVDPDRHIERVTELQELFLTRVGLDIGKVWVADDGAAVAVWTTPESVEAGAVFAEIGPRMAELSGSRLAAQQQMEGLLAPHRPKEPAWFLATVGVSPDHQGKGLGSAVVLPGVEAAERAGVPAFLETSAPRNLPFYERLGFTVTADVEVPEGPRTWCMTRKPGA

SEQ ID NO: 16517 - protein, 1230 aa, Artificial Sequence
  Synthetic Polypeptide
MALPVTALLLPLALLLHAARPLEDLKNVFPPEVAVFEPSEAEISHTQKATLVCLATGFYPDHVELSWWVNGKEVHSGVSTDPQPLKEQPALNDSRYCLSSRLRVSATFWQNPRNHFRCQVQFYGLSENDEWTQDRAKPVTQIVSAEAWGRADCGFTSESYQQGVLSATILYEILLGKATLYAVLVSALVLMAMVKRKDSRGRAKRSGSGATNFSLLKQAGDVEENPGPTSMALPVTALLLPLALLLHAARPEVQLVESGGGSVQTGGSLRLTCAASGRTSRSYGMGWFRQAPGKEREFVSGISWRGDSTGYADSVKGRFTISRDNAKNTVDLQMNSLKPEDTAIYYCAAAAGSAWYGTLYEYDYWGQGTLVTVSSGGGSGGGSEVQLVESGGSLVQPGGSLRLSCAASGFTFDDYAMSWVRQVPGKGLEWVSSINWSGTHTDYADSVKGRFTISRNNANNTLYLQMNSLKSEDTAVYYCAKNWRDAGTTWFEKSGSAGQGTQVTVSSGTGGGGSGGGGSGGGGSEFDIQMTQSPSSLSASVGDRVTITCKASDHINNWLAWYQQKPGQAPKLLIYGATTLETGVPSRFSGSGSGTDYTLTISSLQPEDFATYYCQQSWNTPWTFGQGTKLEIKRGGGGSGGGGSGGGGSQVQLQQPGAELVKPGASVKMSCKASGYAFSSYWINWMKQKPGQGLEWIGQIYPGDGDTNYNGKFKGRATLTADTSSSTAYMQLSSLTSEDSAVYFCARSITTVVGCAMDYWGQGTSVTVSSTREQKLISEEDLGSGTPFPSLAPPIMLLVDGKQQMVVVCLVLDVAPPGLDSPIWFSAGNGSALDAFTYGPSPATDGTWTNLAHLSLPSEELASWEPLVCHTGPGAEGHSRSTQPMHLSGEASTARTCPQEPLRGTPGGALWLGVLRLLLFKLLLFDLLLTCSCLCDPAGPLPSPATTTRLRALGSHRLHPATETGGREATSSPRPQPRDRRWGDTPPGRKPGSPVRAKRSGSGVKQTLNFDLLKLAGDVESNPGPSRSRGHMTEYKPTVRLATRDDVPRAVRTLAAAFADYPATRHTVDPDRHIERVTELQELFLTRVGLDIGKVWVADDGAAVAVWTTPESVEAGAVFAEIGPRMAELSGSRLAAQQQMEGLLAPHRPKEPAWFLATVGVSPDHQGKGLGSAVVLPGVEAAERAGVPAFLETSAPRNLPFYERLGFTVTADVEVPEGPRTWCMTRKPGA

SEQ ID NO: 16518 - protein, 1167 aa, Artificial Sequence
  Synthetic Polypeptide
MALPVTALLLPLALLLHAARPEVQLVESGGGSVQTGGSLRLTCAASGRTSRSYGMGWFRQAPGKEREFVSGISWRGDSTGYADSVKGRFTISRDNAKNTVDLQMNSLKPEDTAIYYCAAAAGSAWYGTLYEYDYWGQGTLVTVSSGGGSGGGSEVQLVESGGSLVQPGGSLRLSCAASGFTFDDYAMSWVRQVPGKGLEWVSSINWSGTHTDYADSVKGRFTISRNNANNTLYLQMNSLKSEDTAVYYCAKNWRDAGTTWFEKSGSAGQGTQVTVSSGTGGGGSGGGGSGGGGSEFDIQMTQSPSSLSASVGDRVTITCKASDHINNWLAWYQQKPGQAPKLLIYGATTLETGVPSRFSGSGSGTDYTLTISSLQPEDFATYYCQQSWNTPWTFGQGTKLEIKRLEGKPIPNPLLGLDSTGSGDKQLDADVSPKPTIFLPSIAETKLQKAGTYLCLLEKFFPDVIKIHWQEKKSNTILGSQEGNTMKTNDTYMKFSWLTVPEKSLDKEHRCIVRHENNKNGVDQEIIFPPIKTDVITMDPKDNCSKDANDTLLLQLTNTSAYYMYLLLLLKSVVYFAIITCCLLRRTAFCCNGEKSRAKRSGSGATNFSLLKQAGDVEENPGPTSMDWIWRILFLVGAATGAHSFEQVQLQQPGAELVKPGASVKMSCKASGYAFSSYWINWMKQKPGQGLEWIGQIYPGDGDTNYNGKFKGRATLTADTSSSTAYMQLSSLTSEDSAVYFCARSITTVVGCAMDYWGQGTSVTVSSTREQKLISEEDGSGSQPHTKPSVFVMKNGTNVACLVKEFYPKDIRINLVSSKKITEFDPAIVISPSGKYNAVKLGKYEDSNSVTCSVQHDNKTVHSTDFEVKTDSTDHVKPKETENTKQPSKSCHKPKAIVHTEKVNMMSLTVLGLRMLFAKTVAVNFLLTAKLFFLRAKRSGSGVKQTLNFDLLKLAGDVESNPGPSRGHMTEYKPTVRLATRDDVPRAVRTLAAAFADYPATRHTVDPDRHIERVTELQELFLTRVGLDIGKVWVADDGAAVAVWTTPESVEAGAVFAEIGPRMAELSGSRLAAQQQMEGLLAPHRPKEPAWFLATVGVSPDHQGKGLGSAVVLPGVEAAERAGVPAFLETSAPRNLPFYERLGFTVTADVEVPEGPRTWCMTRKPGA

SEQ ID NO: 16519 - protein, 905 aa, Artificial Sequence
  Synthetic Polypeptide
MALPVTALLLPLALLLHAARPEVQLVESGGGSVQTGGSLRLTCAASGRTSRSYGMGWFRQAPGKEREFVSGISWRGDSTGYADSVKGRFTISRDNAKNTVDLQMNSLKPEDTAIYYCAAAAGSAWYGTLYEYDYWGQGTLVTVSSGGGSGGGSEVQLVESGGSLVQPGGSLRLSCAASGFTFDDYAMSWVRQVPGKGLEWVSSINWSGTHTDYADSVKGRFTISRNNANNTLYLQMNSLKSEDTAVYYCAKNWRDAGTTWFEKSGSAGQGTQVTVSSGTGGGGSGGGGSGGGGSEFDIQMTQSPSSLSASVGDRVTITCKASDHINNWLAWYQQKPGQAPKLLIYGATTLETGVPSRFSGSGSGTDYTLTISSLQPEDFATYYCQQSWNTPWTFGQGTKLEIKRLESQPHTKPSVFVMKNGTNVACLVKEFYPKDIRINLVSSKKITEFDPAIVISPSGKYNAVKLGKYEDSNSVTCSVQHDNKTVHSTDFEVKTDSTDHVKPKETENTKQPSKSCHKPKAIVHTEKVNMMSLTVLGLRMLFAKTVAVNFLLTAKLFFLRAKRSGSGATNFSLLKQAGDVEENPGPTSMDWIWRILFLVGAATGAHSFEQVQLQQPGAELVKPGASVKMSCKASGYAFSSYWINWMKQKPGQGLEWIGQIYPGDGDTNYNGKFKGRATLTADTSSSTAYMQLSSLTSEDSAVYFCARSITTVVGCAMDYWGQGTSVTVSSTRDKQLDADVSPKPTIFLPSIAETKLQKAGTYLCLLEKFFPDVIKIHWQEKKSNTILGSQEGNTMKTNDTYMKFSWLTVPEKSLDKEHRCIVRHENNKNGVDQEIIFPPIKTDVITMDPKDNCSKDANDTLLLQLTNTSAYYMYLLLLLKSVVYFAIITCCLLRRTAFCCNGEKS

SEQ ID NO: 16520 - protein, 1182 aa, Artificial Sequence
  Synthetic Polypeptide
MALPVTALLLPLALLLHAARPLEGKPIPNPLLGLDSTGSGDKQLDADVSPKPTIFLPSIAETKLQKAGTYLCLLEKFFPDVIKIHWQEKKSNTILGSQEGNTMKTNDTYMKFSWLTVPEKSLDKEHRCIVRHENNKNGVDQEIIFPPIKTDVITMDPKDNCSKDANDTLLLQLTNTSAYYMYLLLLLKSVVYFAIITCCLLRRTAFCCNGEKSRAKRSGSGATNFSLLKQAGDVEENPGPTSMALPVTALLLPLALLLHAARPEVQLVESGGGSVQTGGSLRLTCAASGRTSRSYGMGWFRQAPGKEREFVSGISWRGDSTGYADSVKGRFTISRDNAKNTVDLQMNSLKPEDTAIYYCAAAAGSAWYGTLYEYDYWGQGTLVTVSSGGGSGGGSEVQLVESGGSLVQPGGSLRLSCAASGFTFDDYAMSWVRQVPGKGLEWVSSINWSGTHTDYADSVKGRFTISRNNANNTLYLQMNSLKSEDTAVYYCAKNWRDAGTTWFEKSGSAGQGTQVTVSSGTGGGGSGGGGSGGGGSEFDIQMTQSPSSLSASVGDRVTITCKASDHINNWLAWYQQKPGQAPKLLIYGATTLETGVPSRFSGSGSGTDYTLTISSLQPEDFATYYCQQSWNTPWTFGQGTKLEIKRGGGGSGGGGSGGGGSQVQLQQPGAELVKPGASVKMSCKASGYAFSSYWINWMKQKPGQGLEWIGQIYPGDGDTNYNGKFKGRATLTADTSSSTAYMQLSSLTSEDSAVYFCARSITTVVGCAMDYWGQGTSVTVSSTREQKLISEEDGSGSQPHTKPSVFVMKNGTNVACLVKEFYPKDIRINLVSSKKITEFDPAIVISPSGKYNAVKLGKYEDSNSVTCSVQHDNKTVHSTDFEVKTDSTDHVKPKETENTKQPSKSCHKPKAIVHTEKVNMMSLTVLGLRMLFAKTVAVNFLLTAKLFFLRAKRSGSGVKQTLNFDLLKLAGDVESNPGPSRGHMTEYKPTVRLATRDDVPRAVRTLAAAFADYPATRHTVDPDRHIERVTELQELFLTRVGLDIGKVWVADDGAAVAVWTTPESVEAGAVFAEIGPRMAELSGSRLAAQQQMEGLLAPHRPKEPAWFLATVGVSPDHQGKGLGSAVVLPGVEAAERAGVPAFLETSAPRNLPFYERLGFTVTADVEVPEGPRTWCMTRKPGA

SEQ ID NO: 16521 - protein, 1307 aa, Artificial Sequence
  Synthetic Polypeptide
MALPVTALLLPLALLLHAARPEVQLVESGGGSVQTGGSLRLTCAASGRTSRSYGMGWFRQAPGKEREFVSGISWRGDSTGYADSVKGRFTISRDNAKNTVDLQMNSLKPEDTAIYYCAAAAGSAWYGTLYEYDYWGQGTLVTVSSGGGSGGGSEVQLVESGGSLVQPGGSLRLSCAASGFTFDDYAMSWVRQVPGKGLEWVSSINWSGTHTDYADSVKGRFTISRNNANNTLYLQMNSLKSEDTAVYYCAKNWRDAGTTWFEKSGSAGQGTQVTVSSGTGGGGSGGGGSGGGGSEFDIQMTQSPSSLSASVGDRVTITCKASDHINNWLAWYQQKPGQAPKLLIYGATTLETGVPSRFSGSGSGTDYTLTISSLQPEDFATYYCQQSWNTPWTFGQGTKLEIKRGQPKANPTVTLFPPSSEELQANKATLVCLISDFYPGAVTVAWKADGSPVKAGVETTKPSKQSNNKYAASSYLSLTPEQWKSHRSYSCQVTHEGSTVEKTVAPTECSGSQSFGLLDPKLCYLLDGILFIYGVILTALFLRVKFSRSADAPAYQQGQNQLYNELNLGRREEYDVLDKRRGRDPEMGGKPQRRKNPQEGLYNELQKDKMAEAYSEIGMKGERRRGKGHDGLYQGLSTATKDTYDALHMQALPPRRAKRSGSGATNFSLLKQAGDVEENPGPTSMDWIWRILFLVGAATGAHSFEQVQLQQPGAELVKPGASVKMSCKASGYAFSSYWINWMKQKPGQGLEWIGQIYPGDGDTNYNGKFKGRATLTADTSSSTAYMQLSSLTSEDSAVYFCARSITTVVGCAMDYWGQGTSVTVSSASTKGPSVFPLAPSSKSTSGGTAALGCLVKDYFPEPVTVSWNSGALTSGVHTFPAVLQSSGLYSLSSVVTVPSSSLGTQTYICNVNHKPSNTKVDKRVEPKSCGTQSFGLLDPKLCYLLDGILFIYGVILTALFLRVKFSRSADAPAYQQGQNQLYNELNLGRREEYDVLDKRRGRDPEMGGKPQRRKNPQEGLYNELQKDKMAEAYSEIGMKGERRRGKGHDGLYQGLSTATKDTYDALHMQALPPRRAKRSGSGVKQTLNFDLLKLAGDVESNPGPSRGHMTEYKPTVRLATRDDVPRAVRTLAAAFADYPATRHTVDPDRHIERVTELQELFLTRVGLDIGKVWVADDGAAVAVWTTPESVEAGAVFAEIGPRMAELSGSRLAAQQQMEGLLAPHRPKEPAWFLATVGVSPDHQGKGLGSAVVLPGVEAAERAGVPAFLETSAPRNLPFYERLGFTVTADVEVPEGPRTWCMTRKPGA

SEQ ID NO: 16522 - protein, 1093 aa, Artificial Sequence
  Synthetic Polypeptide
MALPVTALLLPLALLLHAARPEVQLVESGGGSVQTGGSLRLTCAASGRTSRSYGMGWFRQAPGKEREFVSGISWRGDSTGYADSVKGRFTISRDNAKNTVDLQMNSLKPEDTAIYYCAAAAGSAWYGTLYEYDYWGQGTLVTVSSGGGSGGGSEVQLVESGGSLVQPGGSLRLSCAASGFTFDDYAMSWVRQVPGKGLEWVSSINWSGTHTDYADSVKGRFTISRNNANNTLYLQMNSLKSEDTAVYYCAKNWRDAGTTWFEKSGSAGQGTQVTVSSGTGGGGSGGGGSGGGGSEFDIQMTQSPSSLSASVGDRVTITCKASDHINNWLAWYQQKPGQAPKLLIYGATTLETGVPSRFSGSGSGTDYTLTISSLQPEDFATYYCQQSWNTPWTFGQGTKLEIKRLEDLKNVFPPEVAVFEPSEAEISHTQKATLVCLATGFYPDHVELSWWVNGKEVHSGVSTDPQPLKEQPALNDSRYCLSSRLRVSATFWQNPRNHFRCQVQFYGLSENDEWTQDRAKPVTQIVSAEAWGRADCGSQSFGLLDPKLCYLLDGILFIYGVILTALFLRVKFSRSADAPAYQQGQNQLYNELNLGRREEYDVLDKRRGRDPEMGGKPQRRKNPQEGLYNELQKDKMAEAYSEIGMKGERRRGKGHDGLYQGLSTATKDTYDALHMQALPPRRAKRSGSGATNFSLLKQAGDVEENPGPTSMDWIWRILFLVGAATGAHSFEQVQLQQPGAELVKPGASVKMSCKASGYAFSSYWINWMKQKPGQGLEWIGQIYPGDGDTNYNGKFKGRATLTADTSSSTAYMQLSSLTSEDSAVYFCARSITTVVGCAMDYWGQGTSVTVSSTRIQNPDPAVYQLRDSKSSDKSVCLFTDFDSQTNVSQSKDSDVYITDKTVLDMRSMDFKSNSAVAWSNKSDFACANAFNNSIIPEDTFFPSPESSCGTQSFGLLDPKLCYLLDGILFIYGVILTALFLRVKFSRSADAPAYQQGQNQLYNELNLGRREEYDVLDKRRGRDPEMGGKPQRRKNPQEGLYNELQKDKMAEAYSEIGMKGERRRGKGHDGLYQGLSTATKDTYDALHMQALPPR

SEQ ID NO: 16523 - protein, 1093 aa, Artificial Sequence
  Synthetic Polypeptide
MALPVTALLLPLALLLHAARPEVQLVESGGGSVQTGGSLRLTCAASGRTSRSYGMGWFRQAPGKEREFVSGISWRGDSTGYADSVKGRFTISRDNAKNTVDLQMNSLKPEDTAIYYCAAAAGSAWYGTLYEYDYWGQGTLVTVSSGGGSGGGSEVQLVESGGSLVQPGGSLRLSCAASGFTFDDYAMSWVRQVPGKGLEWVSSINWSGTHTDYADSVKGRFTISRNNANNTLYLQMNSLKSEDTAVYYCAKNWRDAGTTWFEKSGSAGQGTQVTVSSGTGGGGSGGGGSGGGGSEFDIQMTQSPSSLSASVGDRVTITCKASDHINNWLAWYQQKPGQAPKLLIYGATTLETGVPSRFSGSGSGTDYTLTISSLQPEDFATYYCQQSWNTPWTFGQGTKLEIKRLEDLKNVFPPEVAVFEPSKAEIAHTQKATLVCLATGFYPDHVELSWWVNGKEVHSGVCTDPQPLKEQPALNDSRYCLSSRLRVSATFWQNPRNHFRCQVQFYGLSENDEWTQDRAKPVTQIVSAEAWGRADCGSQSFGLLDPKLCYLLDGILFIYGVILTALFLRVKFSRSADAPAYQQGQNQLYNELNLGRREEYDVLDKRRGRDPEMGGKPQRRKNPQEGLYNELQKDKMAEAYSEIGMKGERRRGKGHDGLYQGLSTATKDTYDALHMQALPPRRAKRSGSGATNFSLLKQAGDVEENPGPTSMDWIWRILFLVGAATGAHSFEQVQLQQPGAELVKPGASVKMSCKASGYAFSSYWINWMKQKPGQGLEWIGQIYPGDGDTNYNGKFKGRATLTADTSSSTAYMQLSSLTSEDSAVYFCARSITTVVGCAMDYWGQGTSVTVSSTRIQNPDPAVYQLRDSKSSDKSVCLFTDFDSQTNVSQSKDSDVYITDKCVLDMRSMDFKSNSAVAWSNKSDFACANAFNNSIIPEDTFFPSSDVPCGTQSFGLLDPKLCYLLDGILFIYGVILTALFLRVKFSRSADAPAYQQGQNQLYNELNLGRREEYDVLDKRRGRDPEMGGKPQRRKNPQEGLYNELQKDKMAEAYSEIGMKGERRRGKGHDGLYQGLSTATKDTYDALHMQALPPR

SEQ ID NO: 16524 - protein, 1164 aa, Artificial Sequence
  Synthetic Polypeptide
MALPVTALLLPLALLLHAARPEVQLVESGGGSVQTGGSLRLTCAASGRTSRSYGMGWFRQAPGKEREFVSGISWRGDSTGYADSVKGRFTISRDNAKNTVDLQMNSLKPEDTAIYYCAAAAGSAWYGTLYEYDYWGQGTLVTVSSGGGSGGGSEVQLVESGGSLVQPGGSLRLSCAASGFTFDDYAMSWVRQVPGKGLEWVSSINWSGTHTDYADSVKGRFTISRNNANNTLYLQMNSLKSEDTAVYYCAKNWRDAGTTWFEKSGSAGQGTQVTVSSGTGGGGSGGGGSGGGGSEFDIQMTQSPSSLSASVGDRVTITCKASDHINNWLAWYQQKPGQAPKLLIYGATTLETGVPSRFSGSGSGTDYTLTISSLQPEDFATYYCQQSWNTPWTFGQGTKLEIKRLEGKPIPNPLLGLDSTGSGEDLKNVFPPEVAVFEPSEAEISHTQKATLVCLATGFYPDHVELSWWVNGKEVHSGVSTDPQPLKEQPALNDSRYCLSSRLRVSATFWQNPRNHFRCQVQFYGLSENDEWTQDRAKPVTQIVSAEAWGRADCGSQSFGLLDPKLCYLLDGILFIYGVILTALFLRVKFSRSADAPAYQQGQNQLYNELNLGRREEYDVLDKRRGRDPEMGGKPQRRKNPQEGLYNELQKDKMAEAYSEIGMKGERRRGKGHDGLYQGLSTATKDTYDALHMQALPPRRAKRSGSGATNFSLLKQAGDVEENPGPTSMDWIWRILFLVGAATGAHSFEQVQLQQPGAELVKPGASVKMSCKASGYAFSSYWINWMKQKPGQGLEWIGQIYPGDGDTNYNGKFKGRATLTADTSSSTAYMQLSSLTSEDSAVYFCARSITTVVGCAMDYWGQGTSVTVSSTREQKLISEEDGSGIQNPDPAVYQLRDSKSSDKSVCLFTDFDSQTNVSQSKDSDVYITDKTVLDMRSMDFKSNSAVAWSNKSDFACANAFNNSIIPEDTFFPSPESSCGTQSFGLLDPKLCYLLDGILFIYGVILTALFLRSKRSRLLHSDYMNMTPRRPGPTRKHYQPYAPPRDFAAYRSRVKFSRSADAPAYQQGQNQLYNELNLGRREEYDVLDKRRGRDPEMGGKPQRRKNPQEGLYNELQKDKMAEAYSEIGMKGERRRGKGHDGLYQGLSTATKDTYDALHMQALPPR

SEQ ID NO: 16525 - protein, 1205 aa, Artificial Sequence
  Synthetic Polypeptide
MALPVTALLLPLALLLHAARPEVQLVESGGGSVQTGGSLRLTCAASGRTSRSYGMGWFRQAPGKEREFVSGISWRGDSTGYADSVKGRFTISRDNAKNTVDLQMNSLKPEDTAIYYCAAAAGSAWYGTLYEYDYWGQGTLVTVSSGGGSGGGSEVQLVESGGSLVQPGGSLRLSCAASGFTFDDYAMSWVRQVPGKGLEWVSSINWSGTHTDYADSVKGRFTISRNNANNTLYLQMNSLKSEDTAVYYCAKNWRDAGTTWFEKSGSAGQGTQVTVSSGTGGGGSGGGGSGGGGSEFDIQMTQSPSSLSASVGDRVTITCKASDHINNWLAWYQQKPGQAPKLLIYGATTLETGVPSRFSGSGSGTDYTLTISSLQPEDFATYYCQQSWNTPWTFGQGTKLEIKRLEGKPIPNPLLGLDSTGSGEDLKNVFPPEVAVFEPSEAEISHTQKATLVCLATGFYPDHVELSWWVNGKEVHSGVSTDPQPLKEQPALNDSRYCLSSRLRVSATFWQNPRNHFRCQVQFYGLSENDEWTQDRAKPVTQIVSAEAWGRADCGSQSFGLLDPKLCYLLDGILFIYGVILTALFLRSKRSRLLHSDYMNMTPRRPGPTRKHYQPYAPPRDFAAYRSRVKFSRSADAPAYQQGQNQLYNELNLGRREEYDVLDKRRGRDPEMGGKPQRRKNPQEGLYNELQKDKMAEAYSEIGMKGERRRGKGHDGLYQGLSTATKDTYDALHMQALPPRRAKRSGSGATNFSLLKQAGDVEENPGPTSMDWIWRILFLVGAATGAHSFEQVQLQQPGAELVKPGASVKMSCKASGYAFSSYWINWMKQKPGQGLEWIGQIYPGDGDTNYNGKFKGRATLTADTSSSTAYMQLSSLTSEDSAVYFCARSITTVVGCAMDYWGQGTSVTVSSTREQKLISEEDGSGIQNPDPAVYQLRDSKSSDKSVCLFTDFDSQTNVSQSKDSDVYITDKTVLDMRSMDFKSNSAVAWSNKSDFACANAFNNSIIPEDTFFPSPESSCGTQSFGLLDPKLCYLLDGILFIYGVILTALFLRSKRSRLLHSDYMNMTPRRPGPTRKHYQPYAPPRDFAAYRSRVKFSRSADAPAYQQGQNQLYNELNLGRREEYDVLDKRRGRDPEMGGKPQRRKNPQEGLYNELQKDKMAEAYSEIGMKGERRRGKGHDGLYQGLSTATKDTYDALHMQALPPR

SEQ ID NO: 16526 - protein, 1166 aa, Artificial Sequence
  Synthetic Polypeptide
MALPVTALLLPLALLLHAARPEVQLVESGGGSVQTGGSLRLTCAASGRTSRSYGMGWFRQAPGKEREFVSGISWRGDSTGYADSVKGRFTISRDNAKNTVDLQMNSLKPEDTAIYYCAAAAGSAWYGTLYEYDYWGQGTLVTVSSGGGSGGGSEVQLVESGGSLVQPGGSLRLSCAASGFTFDDYAMSWVRQVPGKGLEWVSSINWSGTHTDYADSVKGRFTISRNNANNTLYLQMNSLKSEDTAVYYCAKNWRDAGTTWFEKSGSAGQGTQVTVSSGTGGGGSGGGGSGGGGSEFDIQMTQSPSSLSASVGDRVTITCKASDHINNWLAWYQQKPGQAPKLLIYGATTLETGVPSRFSGSGSGTDYTLTISSLQPEDFATYYCQQSWNTPWTFGQGTKLEIKRLEGKPIPNPLLGLDSTGSGEDLKNVFPPEVAVFEPSEAEISHTQKATLVCLATGFYPDHVELSWWVNGKEVHSGVSTDPQPLKEQPALNDSRYCLSSRLRVSATFWQNPRNHFRCQVQFYGLSENDEWTQDRAKPVTQIVSAEAWGRADCGSQSFGLLDPKLCYLLDGILFIYGVILTALFLRVKFSRSADAPAYQQGQNQLYNELNLGRREEYDVLDKRRGRDPEMGGKPQRRKNPQEGLYNELQKDKMAEAYSEIGMKGERRRGKGHDGLYQGLSTATKDTYDALHMQALPPRRAKRSGSGATNFSLLKQAGDVEENPGPTSMDWIWRILFLVGAATGAHSFEQVQLQQPGAELVKPGASVKMSCKASGYAFSSYWINWMKQKPGQGLEWIGQIYPGDGDTNYNGKFKGRATLTADTSSSTAYMQLSSLTSEDSAVYFCARSITTVVGCAMDYWGQGTSVTVSSTREQKLISEEDLGSGIQNPDPAVYQLRDSKSSDKSVCLFTDFDSQTNVSQSKDSDVYITDKTVLDMRSMDFKSNSAVAWSNKSDFACANAFNNSIIPEDTFFPSPESSCGTQSFGLLDPKLCYLLDGILFIYGVILTALFLKRGRKKLLYIFKQPFMRPVQTTQEEDGCSCRFPEEEEGGCELRVKFSRSADAPAYQQGQNQLYNELNLGRREEYDVLDKRRGRDPEMGGKPQRRKNPQEGLYNELQKDKMAEAYSEIGMKGERRRGKGHDGLYQGLSTATKDTYDALHMQALPPR

SEQ ID NO: 16527 - protein, 1208 aa, Artificial Sequence
  Synthetic Polypeptide
MALPVTALLLPLALLLHAARPEVQLVESGGGSVQTGGSLRLTCAASGRTSRSYGMGWFRQAPGKEREFVSGISWRGDSTGYADSVKGRFTISRDNAKNTVDLQMNSLKPEDTAIYYCAAAAGSAWYGTLYEYDYWGQGTLVTVSSGGGSGGGSEVQLVESGGSLVQPGGSLRLSCAASGFTFDDYAMSWVRQVPGKGLEWVSSINWSGTHTDYADSVKGRFTISRNNANNTLYLQMNSLKSEDTAVYYCAKNWRDAGTTWFEKSGSAGQGTQVTVSSGTGGGGSGGGGSGGGGSEFDIQMTQSPSSLSASVGDRVTITCKASDHINNWLAWYQQKPGQAPKLLIYGATTLETGVPSRFSGSGSGTDYTLTISSLQPEDFATYYCQQSWNTPWTFGQGTKLEIKRLEGKPIPNPLLGLDSTGSGEDLKNVFPPEVAVFEPSEAEISHTQKATLVCLATGFYPDHVELSWWVNGKEVHSGVSTDPQPLKEQPALNDSRYCLSSRLRVSATFWQNPRNHFRCQVQFYGLSENDEWTQDRAKPVTQIVSAEAWGRADCGSQSFGLLDPKLCYLLDGILFIYGVILTALFLKRGRKKLLYIFKQPFMRPVQTTQEEDGCSCRFPEEEEGGCELRVKFSRSADAPAYQQGQNQLYNELNLGRREEYDVLDKRRGRDPEMGGKPQRRKNPQEGLYNELQKDKMAEAYSEIGMKGERRRGKGHDGLYQGLSTATKDTYDALHMQALPPRRAKRSGSGATNFSLLKQAGDVEENPGPTSMDWIWRILFLVGAATGAHSFEQVQLQQPGAELVKPGASVKMSCKASGYAFSSYWINWMKQKPGQGLEWIGQIYPGDGDTNYNGKFKGRATLTADTSSSTAYMQLSSLTSEDSAVYFCARSITTVVGCAMDYWGQGTSVTVSSTREQKLISEEDLGSGIQNPDPAVYQLRDSKSSDKSVCLFTDFDSQTNVSQSKDSDVYITDKTVLDMRSMDFKSNSAVAWSNKSDFACANAFNNSIIPEDTFFPSPESSCGTQSFGLLDPKLCYLLDGILFIYGVILTALFLKRGRKKLLYIFKQPFMRPVQTTQEEDGCSCRFPEEEEGGCELRVKFSRSADAPAYQQGQNQLYNELNLGRREEYDVLDKRRGRDPEMGGKPQRRKNPQEGLYNELQKDKMAEAYSEIGMKGERRRGKGHDGLYQGLSTATKDTYDALHMQALPPR

SEQ ID NO: 16528 - protein, 1098 aa, Artificial Sequence
  Synthetic Polypeptide
MALPVTALLLPLALLLHAARPEVQLVESGGGSVQTGGSLRLTCAASGRTSRSYGMGWFRQAPGKEREFVSGISWRGDSTGYADSVKGRFTISRDNAKNTVDLQMNSLKPEDTAIYYCAAAAGSAWYGTLYEYDYWGQGTLVTVSSGGGSGGGSEVQLVESGGSLVQPGGSLRLSCAASGFTFDDYAMSWVRQVPGKGLEWVSSINWSGTHTDYADSVKGRFTISRNNANNTLYLQMNSLKSEDTAVYYCAKNWRDAGTTWFEKSGSAGQGTQVTVSSGTGGGGSGGGGSGGGGSEFDIQMTQSPSSLSASVGDRVTITCKASDHINNWLAWYQQKPGQAPKLLIYGATTLETGVPSRFSGSGSGTDYTLTISSLQPEDFATYYCQQSWNTPWTFGQGTKLEIKRLEQSFGLLDPKLCYLLDGILFIYGVILTALFLRVKFSRSADAPAYQQGQNQLYNELNLGRREEYDVLDKRRGRDPEMGGKPQRRKNPQEGLYNELQKDKMAEAYSEIGMKGERRRGKGHDGLYQGLSTATKDTYDALHMQALPPRRAKRSGSGATNFSLLKQAGDVEENPGPTSMDWIWRILFLVGAATGAHSFEQVQLQQPGAELVKPGASVKMSCKASGYAFSSYWINWMKQKPGQGLEWIGQIYPGDGDTNYNGKFKGRATLTADTSSSTAYMQLSSLTSEDSAVYFCARSITTVVGCAMDYWGQGTSVTVSSTRQSFGLLDPKLCYLLDGILFIYGVILTALFLRVKFSRSADAPAYQQGQNQLYNELNLGRREEYDVLDKRRGRDPEMGGKPQRRKNPQEGLYNELQKDKMAEAYSEIGMKGERRRGKGHDGLYQGLSTATKDTYDALHMQALPPRRAKRSGSGVKQTLNFDLLKLAGDVESNPGPSRGHMTEYKPTVRLATRDDVPRAVRTLAAAFADYPATRHTVDPDRHIERVTELQELFLTRVGLDIGKVWVADDGAAVAVWTTPESVEAGAVFAEIGPRMAELSGSRLAAQQQMEGLLAPHRPKEPAWFLATVGVSPDHQGKGLGSAVVLPGVEAAERAGVPAFLETSAPRNLPFYERLGFTVTADVEVPEGPRTWCMTRKPGA

SEQ ID NO: 16529 - protein, 923 aa, Artificial Sequence
  Synthetic Polypeptide
MALPVTALLLPLALLLHAARPEVQLVESGGGSVQTGGSLRLTCAASGRTSRSYGMGWFRQAPGKEREFVSGISWRGDSTGYADSVKGRFTISRDNAKNTVDLQMNSLKPEDTAIYYCAAAAGSAWYGTLYEYDYWGQGTLVTVSSGGGSGGGSEVQLVESGGSLVQPGGSLRLSCAASGFTFDDYAMSWVRQVPGKGLEWVSSINWSGTHTDYADSVKGRFTISRNNANNTLYLQMNSLKSEDTAVYYCAKNWRDAGTTWFEKSGSAGQGTQVTVSSGTGGGGSGGGGSGGGGSEFDIQMTQSPSSLSASVGDRVTITCKASDHINNWLAWYQQKPGQAPKLLIYGATTLETGVPSRFSGSGSGTDYTLTISSLQPEDFATYYCQQSWNTPWTFGQGTKLEIKRLEGQPKANPTVTLFPPSSEELQANKATLVCLISDFYPGAVTVAWKADGSPVKAGVETTKPSKQSNNKYAASSYLSLTPEQWKSHRSYSCQVTHEGSTVEKTVAPTECSPIKTDVITMDPKDNCSKDANDTLLLQLTNTSAYYMYLLLLLKSVVYFAIITCCLLRRTAFCCNGEKSRAKRSGSGATNFSLLKQAGDVEENPGPTSMDWIWRILFLVGAATGAHSFEQVQLQQPGAELVKPGASVKMSCKASGYAFSSYWINWMKQKPGQGLEWIGQIYPGDGDTNYNGKFKGRATLTADTSSSTAYMQLSSLTSEDSAVYFCARSITTVVGCAMDYWGQGTSVTVSSTRASTKGPSVFPLAPSSKSTSGGTAALGCLVKDYFPEPVTVSWNSGALTSGVHTFPAVLQSSGLYSLSSVVTVPSSSLGTQTYICNVNHKPSNTKVDKRVEPKSCEVKTDSTDHVKPKETENTKQPSKSCHKPKAIVHTEKVNMMSLTVLGLRMLFAKTVAVNFLLTAKLFFL

SEQ ID NO: 16530 - protein, 901 aa, Artificial Sequence
  Synthetic Polypeptide
MALPVTALLLPLALLLHAARPEVQLVESGGGSVQTGGSLRLTCAASGRTSRSYGMGWFRQAPGKEREFVSGISWRGDSTGYADSVKGRFTISRDNAKNTVDLQMNSLKPEDTAIYYCAAAAGSAWYGTLYEYDYWGQGTLVTVSSGGGSGGGSEVQLVESGGSLVQPGGSLRLSCAASGFTFDDYAMSWVRQVPGKGLEWVSSINWSGTHTDYADSVKGRFTISRNNANNTLYLQMNSLKSEDTAVYYCAKNWRDAGTTWFEKSGSAGQGTQVTVSSGTGGGGSGGGGSGGGGSEFDIQMTQSPSSLSASVGDRVTITCKASDHINNWLAWYQQKPGQAPKLLIYGATTLETGVPSRFSGSGSGTDYTLTISSLQPEDFATYYCQQSWNTPWTFGQGTKLEIKRLEGQPKANPTVTLFPPSSEELQANKATLVCLISDFYPGAVTVAWKADGSPVKAGVETTKPSKQSNNKYAASSYLSLTPEQWKSHRSYSCQVTHEGSTVEKTVAPTECSGRADCGITSASYHQGVLSATILYEILLGKATLYAVLVSALVLMAMVKRKDSRGRAKRSGSGATNFSLLKQAGDVEENPGPTSMDWIWRILFLVGAATGAHSFEQVQLQQPGAELVKPGASVKMSCKASGYAFSSYWINWMKQKPGQGLEWIGQIYPGDGDTNYNGKFKGRATLTADTSSSTAYMQLSSLTSEDSAVYFCARSITTVVGCAMDYWGQGTSVTVSSTRASTKGPSVFPLAPSSKSTSGGTAALGCLVKDYFPEPVTVSWNSGALTSGVHTFPAVLQSSGLYSLSSVVTVPSSSLGTQTYICNVNHKPSNTKVDKRVEPKSCIPEDTFFPSSDVPCDVKLVEKSFETDTNLNFQNLSVIGFRILLLKVAGFNLLMTLRLWSS

SEQ ID NO: 16531 - protein, 901 aa, Artificial Sequence
  Synthetic Polypeptide
MALPVTALLLPLALLLHAARPEVQLVESGGGSVQTGGSLRLTCAASGRTSRSYGMGWFRQAPGKEREFVSGISWRGDSTGYADSVKGRFTISRDNAKNTVDLQMNSLKPEDTAIYYCAAAAGSAWYGTLYEYDYWGQGTLVTVSSGGGSGGGSEVQLVESGGSLVQPGGSLRLSCAASGFTFDDYAMSWVRQVPGKGLEWVSSINWSGTHTDYADSVKGRFTISRNNANNTLYLQMNSLKSEDTAVYYCAKNWRDAGTTWFEKSGSAGQGTQVTVSSGTGGGGSGGGGSGGGGSEFDIQMTQSPSSLSASVGDRVTITCKASDHINNWLAWYQQKPGQAPKLLIYGATTLETGVPSRFSGSGSGTDYTLTISSLQPEDFATYYCQQSWNTPWTFGQGTKLEIKRLEGQPKANPTVTLFPPSSEELQANKATLVCLISDFYPGAVTVAWKADGSPVKAGVETTKPSKQSNNKYAASSYLSLTPEQWKSHRSYSCQVTHEGSTVEKTVAPTECSGRADCGFTSESYQQGVLSATILYEILLGKATLYAVLVSALVLMAMVKRKDSRGRAKRSGSGATNFSLLKQAGDVEENPGPTSMDWIWRILFLVGAATGAHSFEQVQLQQPGAELVKPGASVKMSCKASGYAFSSYWINWMKQKPGQGLEWIGQIYPGDGDTNYNGKFKGRATLTADTSSSTAYMQLSSLTSEDSAVYFCARSITTVVGCAMDYWGQGTSVTVSSTRASTKGPSVFPLAPSSKSTSGGTAALGCLVKDYFPEPVTVSWNSGALTSGVHTFPAVLQSSGLYSLSSVVTVPSSSLGTQTYICNVNHKPSNTKVDKRVEPKSCIPEDTFFPSPESSCDVKLVEKSFETDTNLNFQNLSVIGFRILLLKVAGFNLLMTLRLWSS

SEQ ID NO: 16532 - protein, 727 aa, Artificial Sequence
  Synthetic Polypeptide
MALPVTALLLPLALLLHAARPEVQLVESGGGSVQTGGSLRLTCAASGRTSRSYGMGWFRQAPGKEREFVSGISWRGDSTGYADSVKGRFTISRDNAKNTVDLQMNSLKPEDTAIYYCAAAAGSAWYGTLYEYDYWGQGTLVTVSSGGGSGGGSEVQLVESGGSLVQPGGSLRLSCAASGFTFDDYAMSWVRQVPGKGLEWVSSINWSGTHTDYADSVKGRFTISRNNANNTLYLQMNSLKSEDTAVYYCAKNWRDAGTTWFEKSGSAGQGTQVTVSSGTGGGGSGGGGSGGGGSEFDIQMTQSPSSLSASVGDRVTITCKASDHINNWLAWYQQKPGQAPKLLIYGATTLETGVPSRFSGSGSGTDYTLTISSLQPEDFATYYCQQSWNTPWTFGQGTKLEIKRGGGGSGGGGSGGGGSQVQLQQPGAELVKPGASVKMSCKASGYAFSSYWINWMKQKPGQGLEWIGQIYPGDGDTNYNGKFKGRATLTADTSSSTAYMQLSSLTSEDSAVYFCARSITTVVGCAMDYWGQGTSVTVSSTRDGNEEMGGITQTPYKVSISGTTVILTCPQYPGSEILWQHNDKNIGGDEDDKNIGSDEDHLSLKEFSELEQSGYYVCYPRGSKPEDANFYLYLRARVCENCMEMDVMSVATIVIVDICITGGLLLLVYYWSKNRKAKAKPVTRGAGAGGRQRGQNKERPPPVPNPDYEPIRKGQRDLYSGLNQRRI

SEQ ID NO: 16533 - protein, 692 aa, Artificial Sequence
  Synthetic Polypeptide
MALPVTALLLPLALLLHAARPEVQLVESGGGSVQTGGSLRLTCAASGRTSRSYGMGWFRQAPGKEREFVSGISWRGDSTGYADSVKGRFTISRDNAKNTVDLQMNSLKPEDTAIYYCAAAAGSAWYGTLYEYDYWGQGTLVTVSSGGGSGGGSEVQLVESGGSLVQPGGSLRLSCAASGFTFDDYAMSWVRQVPGKGLEWVSSINWSGTHTDYADSVKGRFTISRNNANNTLYLQMNSLKSEDTAVYYCAKNWRDAGTTWFEKSGSAGQGTQVTVSSGTGGGGSGGGGSGGGGSEFDIQMTQSPSSLSASVGDRVTITCKASDHINNWLAWYQQKPGQAPKLLIYGATTLETGVPSRFSGSGSGTDYTLTISSLQPEDFATYYCQQSWNTPWTFGQGTKLEIKRGGGGSGGGGSGGGGSQVQLQQPGAELVKPGASVKMSCKASGYAFSSYWINWMKQKPGQGLEWIGQIYPGDGDTNYNGKFKGRATLTADTSSSTAYMQLSSLTSEDSAVYFCARSITTVVGCAMDYWGQGTSVTVSSTRFKIPIEELEDRVFVNCNTSITWVEGTVGTLLSDITRLDLGKRILDPRGIYRCNGTDIYKDKESTVQVHYRMCQSCVELDPATVAGIIVTDVIATLLLALGVFCFAGHETGRLSGAADTQALLRNDQVYQPLRDRDDAQYSHLGGNWARNK

SEQ ID NO: 16534 - protein, 702 aa, Artificial Sequence
  Synthetic Polypeptide
MALPVTALLLPLALLLHAARPEVQLVESGGGSVQTGGSLRLTCAASGRTSRSYGMGWFRQAPGKEREFVSGISWRGDSTGYADSVKGRFTISRDNAKNTVDLQMNSLKPEDTAIYYCAAAAGSAWYGTLYEYDYWGQGTLVTVSSGGGSGGGSEVQLVESGGSLVQPGGSLRLSCAASGFTFDDYAMSWVRQVPGKGLEWVSSINWSGTHTDYADSVKGRFTISRNNANNTLYLQMNSLKSEDTAVYYCAKNWRDAGTTWFEKSGSAGQGTQVTVSSGTGGGGSGGGGSGGGGSEFDIQMTQSPSSLSASVGDRVTITCKASDHINNWLAWYQQKPGQAPKLLIYGATTLETGVPSRFSGSGSGTDYTLTISSLQPEDFATYYCQQSWNTPWTFGQGTKLEIKRGGGGSGGGGSGGGGSQVQLQQPGAELVKPGASVKMSCKASGYAFSSYWINWMKQKPGQGLEWIGQIYPGDGDTNYNGKFKGRATLTADTSSSTAYMQLSSLTSEDSAVYFCARSITTVVGCAMDYWGQGTSVTVSSTRQSIKGNHLVKVYDYQEDGSVLLTCDAEAKNITWFKDGKMIGFLTEDKKKWNLGSNAKDPRGMYQCKGSQNKSKPLQVYYRMCQNCIELNAATISGFLFAEIVSIFVLAVGVYFIAGQDGVRQSRASDKQTLLPNDQLYQPLKDREDDQYSHLQGNQLRRN

SEQ ID NO: 16535 - protein, 685 aa, Artificial Sequence
  Synthetic Polypeptide
MALPVTALLLPLALLLHAARPEVQLVESGGGSVQTGGSLRLTCAASGRTSRSYGMGWFRQAPGKEREFVSGISWRGDSTGYADSVKGRFTISRDNAKNTVDLQMNSLKPEDTAIYYCAAAAGSAWYGTLYEYDYWGQGTLVTVSSGGGSGGGSEVQLVESGGSLVQPGGSLRLSCAASGFTFDDYAMSWVRQVPGKGLEWVSSINWSGTHTDYADSVKGRFTISRNNANNTLYLQMNSLKSEDTAVYYCAKNWRDAGTTWFEKSGSAGQGTQVTVSSGTGGGGSGGGGSGGGGSEFDIQMTQSPSSLSASVGDRVTITCKASDHINNWLAWYQQKPGQAPKLLIYGATTLETGVPSRFSGSGSGTDYTLTISSLQPEDFATYYCQQSWNTPWTFGQGTKLEIKRGGGGSGGGGSGGGGSQVQLQQPGAELVKPGASVKMSCKASGYAFSSYWINWMKQKPGQGLEWIGQIYPGDGDTNYNGKFKGRATLTADTSSSTAYMQLSSLTSEDSAVYFCARSITTVVGCAMDYWGQGTSVTVSSTRQSFGLLDPKLCYLLDGILFIYGVILTALFLRVKFSRSADAPAYQQGQNQLYNELNLGRREEYDVLDKRRGRDPEMGGKPQRRKNPQEGLYNELQKDKMAEAYSEIGMKGERRRGKGHDGLYQGLSTATKDTYDALHMQALPPR

SEQ ID NO: 16536 - protein, 918 aa, Artificial Sequence
  Synthetic Polypeptide
MALPVTALLLPLALLLHAARPEVQLVESGGGSVQTGGSLRLTCAASGRTSRSYGMGWFRQAPGKEREFVSGISWRGDSTGYADSVKGRFTISRDNAKNTVDLQMNSLKPEDTAIYYCAAAAGSAWYGTLYEYDYWGQGTLVTVSSGGGSGGGSEVQLVESGGSLVQPGGSLRLSCAASGFTFDDYAMSWVRQVPGKGLEWVSSINWSGTHTDYADSVKGRFTISRNNANNTLYLQMNSLKSEDTAVYYCAKNWRDAGTTWFEKSGSAGQGTQVTVSSGTGGGGSGGGGSGGGGSEFDIQMTQSPSSLSASVGDRVTITCKASDHINNWLAWYQQKPGQAPKLLIYGATTLETGVPSRFSGSGSGTDYTLTISSLQPEDFATYYCQQSWNTPWTFGQGTKLEIKRGGGGSGGGGSGGGGSQVQLQQPGAELVKPGASVKMSCKASGYAFSSYWINWMKQKPGQGLEWIGQIYPGDGDTNYNGKFKGRATLTADTSSSTAYMQLSSLTSEDSAVYFCARSITTVVGCAMDYWGQGTSVTVSSTRGSGIQNPDPAVYQLRDSKSSDKSVCLFTDFDSQTNVSQSKDSDVYITDKTVLDMRSMDFKSNSAVAWSNKSDFACANAFNNSIIPEDTFFPSPESSCDVKLVEKSFETDTNLNFQNLSVIGFRILLLKVAGFNLLMTLRLWSSRAKRSGSGVKQTLNFDLLKLAGDVESNPGPSRGHMTEYKPTVRLATRDDVPRAVRTLAAAFADYPATRHTVDPDRHIERVTELQELFLTRVGLDIGKVWVADDGAAVAVWTTPESVEAGAVFAEIGPRMAELSGSRLAAQQQMEGLLAPHRPKEPAWFLATVGVSPDHQGKGLGSAVVLPGVEAAERAGVPAFLETSAPRNLPFYERLGFTVTADVEVPEGPRTWCMTRKPGA

SEQ ID NO: 16537 - protein, 950 aa, Artificial Sequence
  Synthetic Polypeptide
MALPVTALLLPLALLLHAARPEVQLVESGGGSVQTGGSLRLTCAASGRTSRSYGMGWFRQAPGKEREFVSGISWRGDSTGYADSVKGRFTISRDNAKNTVDLQMNSLKPEDTAIYYCAAAAGSAWYGTLYEYDYWGQGTLVTVSSGGGSGGGSEVQLVESGGSLVQPGGSLRLSCAASGFTFDDYAMSWVRQVPGKGLEWVSSINWSGTHTDYADSVKGRFTISRNNANNTLYLQMNSLKSEDTAVYYCAKNWRDAGTTWFEKSGSAGQGTQVTVSSGTGGGGSGGGGSGGGGSEFDIQMTQSPSSLSASVGDRVTITCKASDHINNWLAWYQQKPGQAPKLLIYGATTLETGVPSRFSGSGSGTDYTLTISSLQPEDFATYYCQQSWNTPWTFGQGTKLEIKRGGGGSGGGGSGGGGSQVQLQQPGAELVKPGASVKMSCKASGYAFSSYWINWMKQKPGQGLEWIGQIYPGDGDTNYNGKFKGRATLTADTSSSTAYMQLSSLTSEDSAVYFCARSITTVVGCAMDYWGQGTSVTVSSLEDLKNVFPPEVAVFEPSEAEISHTQKATLVCLATGFYPDHVELSWWVNGKEVHSGVSTDPQPLKEQPALNDSRYCLSSRLRVSATFWQNPRNHFRCQVQFYGLSENDEWTQDRAKPVTQIVSAEAWGRADCGFTSESYQQGVLSATILYEILLGKATLYAVLVSALVLMAMVKRKDSRGRAKRSGSGATNFSLLKQAGDVEENPGPTRGHMTEYKPTVRLATRDDVPRAVRTLAAAFADYPATRHTVDPDRHIERVTELQELFLTRVGLDIGKVWVADDGAAVAVWTTPESVEAGAVFAEIGPRMAELSGSRLAAQQQMEGLLAPHRPKEPAWFLATVGVSPDHQGKGLGSAVVLPGVEAAERAGVPAFLETSAPRNLPFYERLGFTVTADVEVPEGPRTWCMTRKPGA

SEQ ID NO: 16538 - protein, 1000 aa, Artificial Sequence
  Synthetic Polypeptide
MALPVTALLLPLALLLHAARPEVQLVESGGGSVQTGGSLRLTCAASGRTSRSYGMGWFRQAPGKEREFVSGISWRGDSTGYADSVKGRFTISRDNAKNTVDLQMNSLKPEDTAIYYCAAAAGSAWYGTLYEYDYWGQGTLVTVSSGGGSGGGSEVQLVESGGSLVQPGGSLRLSCAASGFTFDDYAMSWVRQVPGKGLEWVSSINWSGTHTDYADSVKGRFTISRNNANNTLYLQMNSLKSEDTAVYYCAKNWRDAGTTWFEKSGSAGQGTQVTVSSGTGGGGSGGGGSGGGGSEFDIQMTQSPSSLSASVGDRVTITCKASDHINNWLAWYQQKPGQAPKLLIYGATTLETGVPSRFSGSGSGTDYTLTISSLQPEDFATYYCQQSWNTPWTFGQGTKLEIKRGGGGSGGGGSGGGGSQVQLQQPGAELVKPGASVKMSCKASGYAFSSYWINWMKQKPGQGLEWIGQIYPGDGDTNYNGKFKGRATLTADTSSSTAYMQLSSLTSEDSAVYFCARSITTVVGCAMDYWGQGTSVTVSSTREQKLISEEDLGSGTPFPSLAPPIMLLVDGKQQMVVVCLVLDVAPPGLDSPIWFSAGNGSALDAFTYGPSPATDGTWTNLAHLSLPSEELASWEPLVCHTGPGAEGHSRSTQPMHLSGEASTARTCPQEPLRGTPGGALWLGVLRLLLFKLLLFDLLLTCSCLCDPAGPLPSPATTTRLRALGSHRLHPATETGGREATSSPRPQPRDRRWGDTPPGRKPGSPVRAKRSGSGVKQTLNFDLLKLAGDVESNPGPSRSRGHMTEYKPTVRLATRDDVPRAVRTLAAAFADYPATRHTVDPDRHIERVTELQELFLTRVGLDIGKVWVADDGAAVAVWTTPESVEAGAVFAEIGPRMAELSGSRLAAQQQMEGLLAPHRPKEPAWFLATVGVSPDHQGKGLGSAVVLPGVEAAERAGVPAFLETSAPRNLPFYERLGFTVTADVEVPEGPRTWCMTRKPGA

SEQ ID NO: 16539 - protein, 814 aa, Artificial Sequence
  Synthetic Polypeptide
MALPVTALLLPLALLLHAARPEVQLVESGGGSVQTGGSLRLTCAASGRTSRSYGMGWFRQAPGKEREFVSGISWRGDSTGYADSVKGRFTISRDNAKNTVDLQMNSLKPEDTAIYYCAAAAGSAWYGTLYEYDYWGQGTLVTVSSGGGSGGGSEVQLVESGGSLVQPGGSLRLSCAASGFTFDDYAMSWVRQVPGKGLEWVSSINWSGTHTDYADSVKGRFTISRNNANNTLYLQMNSLKSEDTAVYYCAKNWRDAGTTWFEKSGSAGQGTQVTVSSGTGGGGSGGGGSGGGGSEFDIQMTQSPSSLSASVGDRVTITCKASDHINNWLAWYQQKPGQAPKLLIYGATTLETGVPSRFSGSGSGTDYTLTISSLQPEDFATYYCQQSWNTPWTFGQGTKLEIKRLEDLKNVFPPEVAVFEPSEAEISHTQKATLVCLATGFYPDHVELSWWVNGKEVHSGVSTDPQPLKEQPALNDSRYCLSSRLRVSATFWQNPRNHFRCQVQFYGLSENDEWTQDRAKPVTQIVSAEAWGRADCGFTSESYQQGVLSATILYEILLGKATLYAVLVSALVLMAMVKRKDSRGRAKRSGSGATNFSLLKQAGDVEENPGPTRGHMTEYKPTVRLATRDDVPRAVRTLAAAFADYPATRHTVDPDRHIERVTELQELFLTRVGLDIGKVWVADDGAAVAVWTTPESVEAGAVFAEIGPRMAELSGSRLAAQQQMEGLLAPHRPKEPAWFLATVGVSPDHQGKGLGSAVVLPGVEAAERAGVPAFLETSAPRNLPFYERLGFTVTADVEVPEGPRTWCMTRKPGA

SEQ ID NO: 16540 - protein, 584 aa, Artificial Sequence
  Synthetic Polypeptide
MALPVTALLLPLALLLHAARPEVQLVESGGGSVQTGGSLRLTCAASGRTSRSYGMGWFRQAPGKEREFVSGISWRGDSTGYADSVKGRFTISRDNAKNTVDLQMNSLKPEDTAIYYCAAAAGSAWYGTLYEYDYWGQGTLVTVSSGGGSGGGSEVQLVESGGSLVQPGGSLRLSCAASGFTFDDYAMSWVRQVPGKGLEWVSSINWSGTHTDYADSVKGRFTISRNNANNTLYLQMNSLKSEDTAVYYCAKNWRDAGTTWFEKSGSAGQGTQVTVSSGTGGGGSGGGGSGGGGSEFDIQMTQSPSSLSASVGDRVTITCKASDHINNWLAWYQQKPGQAPKLLIYGATTLETGVPSRFSGSGSGTDYTLTISSLQPEDFATYYCQQSWNTPWTFGQGTKLEIKRLEDLKNVFPPEVAVFEPSEAEISHTQKATLVCLATGFYPDHVELSWWVNGKEVHSGVSTDPQPLKEQPALNDSRYCLSSRLRVSATFWQNPRNHFRCQVQFYGLSENDEWTQDRAKPVTQIVSAEAWGRADCGFTSESYQQGVLSATILYEILLGKATLYAVLVSALVLMAMVKRKDSRG

SEQ ID NO: 16541 - protein, 832 aa, Artificial Sequence
  Synthetic Polypeptide
MALPVTALLLPLALLLHAARPEVQLVESGGGSVQTGGSLRLTCAASGRTSRSYGMGWFRQAPGKEREFVSGISWRGDSTGYADSVKGRFTISRDNAKNTVDLQMNSLKPEDTAIYYCAAAAGSAWYGTLYEYDYWGQGTLVTVSSGGGSGGGSEVQLVESGGSLVQPGGSLRLSCAASGFTFDDYAMSWVRQVPGKGLEWVSSINWSGTHTDYADSVKGRFTISRNNANNTLYLQMNSLKSEDTAVYYCAKNWRDAGTTWFEKSGSAGQGTQVTVSSGTGGGGSGGGGSGGGGSEFDIQMTQSPSSLSASVGDRVTITCKASDHINNWLAWYQQKPGQAPKLLIYGATTLETGVPSRFSGSGSGTDYTLTISSLQPEDFATYYCQQSWNTPWTFGQGTKLEIKRLEGKPIPNPLLGLDSTGSGEDLKNVFPPEVAVFEPSEAEISHTQKATLVCLATGFYPDHVELSWWVNGKEVHSGVCTDPQPLKEQPALNDSRYCLSSRLRVSATFWQNPRNHFRCQVQFYGLSENDEWTQDRAKPVTQIVSAEAWGRADCGFTSESYQQGVLSATILYEILLGKATLYAVLVSALVLMAMVKRKDSRGRAKRSGSGATNFSLLKQAGDVEENPGPTRGHMTEYKPTVRLATRDDVPRAVRTLAAAFADYPATRHTVDPDRHIERVTELQELFLTRVGLDIGKVWVADDGAAVAVWTTPESVEAGAVFAEIGPRMAELSGSRLAAQQQMEGLLAPHRPKEPAWFLATVGVSPDHQGKGLGSAVVLPGVEAAERAGVPAFLETSAPRNLPFYERLGFTVTADVEVPEGPRTWCMTRKPGA

SEQ ID NO: 16542 - protein, 602 aa, Artificial Sequence
  Synthetic Polypeptide
MALPVTALLLPLALLLHAARPEVQLVESGGGSVQTGGSLRLTCAASGRTSRSYGMGWFRQAPGKEREFVSGISWRGDSTGYADSVKGRFTISRDNAKNTVDLQMNSLKPEDTAIYYCAAAAGSAWYGTLYEYDYWGQGTLVTVSSGGGSGGGSEVQLVESGGSLVQPGGSLRLSCAASGFTFDDYAMSWVRQVPGKGLEWVSSINWSGTHTDYADSVKGRFTISRNNANNTLYLQMNSLKSEDTAVYYCAKNWRDAGTTWFEKSGSAGQGTQVTVSSGTGGGGSGGGGSGGGGSEFDIQMTQSPSSLSASVGDRVTITCKASDHINNWLAWYQQKPGQAPKLLIYGATTLETGVPSRFSGSGSGTDYTLTISSLQPEDFATYYCQQSWNTPWTFGQGTKLEIKRLEGKPIPNPLLGLDSTGSGEDLKNVFPPEVAVFEPSEAEISHTQKATLVCLATGFYPDHVELSWWVNGKEVHSGVCTDPQPLKEQPALNDSRYCLSSRLRVSATFWQNPRNHFRCQVQFYGLSENDEWTQDRAKPVTQIVSAEAWGRADCGFTSESYQQGVLSATILYEILLGKATLYAVLVSALVLMAMVKRKDSRG

SEQ ID NO: 16543 - protein, 918 aa, Artificial Sequence
  Synthetic Polypeptide
MALPVTALLLPLALLLHAARPEVQLVESGGGSVQTGGSLRLTCAASGRTSRSYGMGWFRQAPGKEREFVSGISWRGDSTGYADSVKGRFTISRDNAKNTVDLQMNSLKPEDTAIYYCAAAAGSAWYGTLYEYDYWGQGTLVTVSSGGGSGGGSEVQLVESGGSLVQPGGSLRLSCAASGFTFDDYAMSWVRQVPGKGLEWVSSINWSGTHTDYADSVKGRFTISRNNANNTLYLQMNSLKSEDTAVYYCAKNWRDAGTTWFEKSGSAGQGTQVTVSSGTGGGGSGGGGSGGGGSEFDIQMTQSPSSLSASVGDRVTITCKASDHINNWLAWYQQKPGQAPKLLIYGATTLETGVPSRFSGSGSGTDYTLTISSLQPEDFATYYCQQSWNTPWTFGQGTKLEIKRGGGGSGGGGSGGGGSQVQLQQPGAELVKPGASVKMSCKASGYAFSSYWINWMKQKPGQGLEWIGQIYPGDGDTNYNGKFKGRATLTADTSSSTAYMQLSSLTSEDSAVYFCARSITTVVGCAMDYWGQGTSVTVSSTRGSGIQNPDPAVYQLRDSKSSDKSVCLFTDFDSQTNVSQSKDSDVYITDKTVLDMRSMDFKSNSAVAWSNKSDFACANAFNNSIIPEDTFFPSSDVPCDVKLVEKSFETDTNLNFQNLSVIGFRILLLKVAGFNLLMTLRLWSSRAKRSGSGVKQTLNFDLLKLAGDVESNPGPSRGHMTEYKPTVRLATRDDVPRAVRTLAAAFADYPATRHTVDPDRHIERVTELQELFLTRVGLDIGKVWVADDGAAVAVWTTPESVEAGAVFAEIGPRMAELSGSRLAAQQQMEGLLAPHRPKEPAWFLATVGVSPDHQGKGLGSAVVLPGVEAAERAGVPAFLETSAPRNLPFYERLGFTVTADVEVPEGPRTWCMTRKPGA

SEQ ID NO: 16544 - protein, 950 aa, Artificial Sequence
  Synthetic Polypeptide
MALPVTALLLPLALLLHAARPEVQLVESGGGSVQTGGSLRLTCAASGRTSRSYGMGWFRQAPGKEREFVSGISWRGDSTGYADSVKGRFTISRDNAKNTVDLQMNSLKPEDTAIYYCAAAAGSAWYGTLYEYDYWGQGTLVTVSSGGGSGGGSEVQLVESGGSLVQPGGSLRLSCAASGFTFDDYAMSWVRQVPGKGLEWVSSINWSGTHTDYADSVKGRFTISRNNANNTLYLQMNSLKSEDTAVYYCAKNWRDAGTTWFEKSGSAGQGTQVTVSSGTGGGGSGGGGSGGGGSEFDIQMTQSPSSLSASVGDRVTITCKASDHINNWLAWYQQKPGQAPKLLIYGATTLETGVPSRFSGSGSGTDYTLTISSLQPEDFATYYCQQSWNTPWTFGQGTKLEIKRGGGGSGGGGSGGGGSQVQLQQPGAELVKPGASVKMSCKASGYAFSSYWINWMKQKPGQGLEWIGQIYPGDGDTNYNGKFKGRATLTADTSSSTAYMQLSSLTSEDSAVYFCARSITTVVGCAMDYWGQGTSVTVSSLEDLKNVFPPEVAVFEPSKAEIAHTQKATLVCLATGFYPDHVELSWWVNGKEVHSGVSTDPQPLKEQPALNDSRYCLSSRLRVSATFWQNPRNHFRCQVQFYGLSENDEWTQDRAKPVTQIVSAEAWGRADCGITSASYHQGVLSATILYEILLGKATLYAVLVSALVLMAMVKRKDSRGRAKRSGSGATNFSLLKQAGDVEENPGPTRGHMTEYKPTVRLATRDDVPRAVRTLAAAFADYPATRHTVDPDRHIERVTELQELFLTRVGLDIGKVWVADDGAAVAVWTTPESVEAGAVFAEIGPRMAELSGSRLAAQQQMEGLLAPHRPKEPAWFLATVGVSPDHQGKGLGSAVVLPGVEAAERAGVPAFLETSAPRNLPFYERLGFTVTADVEVPEGPRTWCMTRKPGA

SEQ ID NO: 16545 - protein, 1208 aa, Artificial Sequence
  Synthetic Polypeptide
MALPVTALLLPLALLLHAARPEVQLVESGGGSVQTGGSLRLTCAASGRTSRSYGMGWFRQAPGKEREFVSGISWRGDSTGYADSVKGRFTISRDNAKNTVDLQMNSLKPEDTAIYYCAAAAGSAWYGTLYEYDYWGQGTLVTVSSGGGSGGGSEVQLVESGGSLVQPGGSLRLSCAASGFTFDDYAMSWVRQVPGKGLEWVSSINWSGTHTDYADSVKGRFTISRNNANNTLYLQMNSLKSEDTAVYYCAKNWRDAGTTWFEKSGSAGQGTQVTVSSGTGGGGSGGGGSGGGGSEFDIQMTQSPSSLSASVGDRVTITCKASDHINNWLAWYQQKPGQAPKLLIYGATTLETGVPSRFSGSGSGTDYTLTISSLQPEDFATYYCQQSWNTPWTFGQGTKLEIKRLEIQNPDPAVYQLRDSKSSDKSVCLFTDFDSQTNVSQSKDSDVYITDKCVLDMRSMDFKSNSAVAWSNKSDFACANAFNNSIIPEDTFFPSSDVPCDVKLVEKSFETDTNLNFQNLSVIGFRILLLKVAGFNLLMTLRLWSSRAKRSGSGVKQTLNFDLLKLAGDVESNPGPTSMDWIWRILFLVGAATGAHSGPVDNKFNKERYSAYYEIWQLPNLNVRQKAAFIGSLQDDPSQSANLLAEAKKLNDAQAPKGSGGGGSGGGGSGGGGSFEQVQLQQPGAELVKPGASVKMSCKASGYAFSSYWINWMKQKPGQGLEWIGQIYPGDGDTNYNGKFKGRATLTADTSSSTAYMQLSSLTSEDSAVYFCARSITTVVGCAMDYWGQGTSVTVSSTREDLKNVFPPEVAVFEPSKAEIAHTQKATLVCLATGFYPDHVELSWWVNGKEVHSGVCTDPQPLKEQPALNDSRYCLSSRLRVSATFWQNPRNHFRCQVQFYGLSENDEWTQDRAKPVTQIVSAEAWGRADCGITSASYHQGVLSATILYEILLGKATLYAVLVSALVLMAMVKRKDSRGRAKRSGSGATNFSLLKQAGDVEENPGPSRGHMTEYKPTVRLATRDDVPRAVRTLAAAFADYPATRHTVDPDRHIERVTELQELFLTRVGLDIGKVWVADDGAAVAVWTTPESVEAGAVFAEIGPRMAELSGSRLAAQQQMEGLLAPHRPKEPAWFLATVGVSPDHQGKGLGSAVVLPGVEAAERAGVPAFLETSAPRNLPFYERLGFTVTADVEVPEGPRTWCMTRKPGA

SEQ ID NO: 16546 - protein, 1207 aa, Artificial Sequence
  Synthetic Polypeptide
MALPVTALLLPLALLLHAARPEVQLVESGGGSVQTGGSLRLTCAASGRTSRSYGMGWFRQAPGKEREFVSGISWRGDSTGYADSVKGRFTISRDNAKNTVDLQMNSLKPEDTAIYYCAAAAGSAWYGTLYEYDYWGQGTLVTVSSGGGSGGGSEVQLVESGGSLVQPGGSLRLSCAASGFTFDDYAMSWVRQVPGKGLEWVSSINWSGTHTDYADSVKGRFTISRNNANNTLYLQMNSLKSEDTAVYYCAKNWRDAGTTWFEKSGSAGQGTQVTVSSGTGGGGSGGGGSGGGGSEFDIQMTQSPSSLSASVGDRVTITCKASDHINNWLAWYQQKPGQAPKLLIYGATTLETGVPSRFSGSGSGTDYTLTISSLQPEDFATYYCQQSWNTPWTFGQGTKLEIKRLEDLKNVFPPEVAVFEPSKAEIAHTQKATLVCLATGFYPDHVELSWWVNGKEVHSGVCTDPQPLKEQPALNDSRYCLSSRLRVSATFWQNPRNHFRCQVQFYGLSENDEWTQDRAKPVTQIVSAEAWGRADCGITSASYHQGVLSATILYEILLGKATLYAVLVSALVLMAMVKRKDSRGRAKRSGSGATNFSLLKQAGDVEENPGPTSMDWIWRILFLVGAATGAHSGPVDNKFNKERYSAYYEIWQLPNLNVRQKAAFIGSLQDDPSQSANLLAEAKKLNDAQAPKGSGGGGSGGGGSGGGGSFEQVQLQQPGAELVKPGASVKMSCKASGYAFSSYWINWMKQKPGQGLEWIGQIYPGDGDTNYNGKFKGRATLTADTSSSTAYMQLSSLTSEDSAVYFCARSITTVVGCAMDYWGQGTSVTVSSTRIQNPDPAVYQLRDSKSSDKSVCLFTDFDSQTNVSQSKDSDVYITDKCVLDMRSMDFKSNSAVAWSNKSDFACANAFNNSIIPEDTFFPSSDVPCDVKLVEKSFETDTNLNFQNLSVIGFRILLLKVAGFNLLMTLRLWSSRAKRSGSGVKQTLNFDLLKLAGDVESNPGPSRGHMTEYKPTVRLATRDDVPRAVRTLAAAFADYPATRHTVDPDRHIERVTELQELFLTRVGLDIGKVWVADDGAAVAVWTTPESVEAGAVFAEIGPRMAELSGSRLAAQQQMEGLLAPHRPKEPAWFLATVGVSPDHQGKGLGSAVVLPGVEAAERAGVPAFLETSAPRNLPFYERLGFTVTADVEVPEGPRTWCMTRKPGA

SEQ ID NO: 16547 - protein, 1207 aa, Artificial Sequence
  Synthetic Polypeptide
MALPVTALLLPLALLLHAARPEVQLVESGGGSVQTGGSLRLTCAASGRTSRSYGMGWFRQAPGKEREFVSGISWRGDSTGYADSVKGRFTISRDNAKNTVDLQMNSLKPEDTAIYYCAAAAGSAWYGTLYEYDYWGQGTLVTVSSGGGSGGGSEVQLVESGGSLVQPGGSLRLSCAASGFTFDDYAMSWVRQVPGKGLEWVSSINWSGTHTDYADSVKGRFTISRNNANNTLYLQMNSLKSEDTAVYYCAKNWRDAGTTWFEKSGSAGQGTQVTVSSGTGGGGSGGGGSGGGGSEFDIQMTQSPSSLSASVGDRVTITCKASDHINNWLAWYQQKPGQAPKLLIYGATTLETGVPSRFSGSGSGTDYTLTISSLQPEDFATYYCQQSWNTPWTFGQGTKLEIKRLEDLKNVFPPEVAVFEPSEAEISHTQKATLVCLATGFYPDHVELSWWVNGKEVHSGVCTDPQPLKEQPALNDSRYCLSSRLRVSATFWQNPRNHFRCQVQFYGLSENDEWTQDRAKPVTQIVSAEAWGRADCGFTSESYQQGVLSATILYEILLGKATLYAVLVSALVLMAMVKRKDSRGRAKRSGSGATNFSLLKQAGDVEENPGPTSMDWIWRILFLVGAATGAHSGPVDNKFNKERYSAYYEIWQLPNLNVRQKAAFIGSLQDDPSQSANLLAEAKKLNDAQAPKGSGGGGSGGGGSGGGGSFEQVQLQQPGAELVKPGASVKMSCKASGYAFSSYWINWMKQKPGQGLEWIGQIYPGDGDTNYNGKFKGRATLTADTSSSTAYMQLSSLTSEDSAVYFCARSITTVVGCAMDYWGQGTSVTVSSTRIQNPDPAVYQLRDSKSSDKSVCLFTDFDSQTNVSQSKDSDVYITDKCVLDMRSMDFKSNSAVAWSNKSDFACANAFNNSIIPEDTFFPSPESSCDVKLVEKSFETDTNLNFQNLSVIGFRILLLKVAGFNLLMTLRLWSSRAKRSGSGVKQTLNFDLLKLAGDVESNPGPSRGHMTEYKPTVRLATRDDVPRAVRTLAAAFADYPATRHTVDPDRHIERVTELQELFLTRVGLDIGKVWVADDGAAVAVWTTPESVEAGAVFAEIGPRMAELSGSRLAAQQQMEGLLAPHRPKEPAWFLATVGVSPDHQGKGLGSAVVLPGVEAAERAGVPAFLETSAPRNLPFYERLGFTVTADVEVPEGPRTWCMTRKPGA

SEQ ID NO: 16548 - protein, 974 aa, Artificial Sequence
  Synthetic Polypeptide
MALPVTALLLPLALLLHAARPEVQLVESGGGSVQTGGSLRLTCAASGRTSRSYGMGWFRQAPGKEREFVSGISWRGDSTGYADSVKGRFTISRDNAKNTVDLQMNSLKPEDTAIYYCAAAAGSAWYGTLYEYDYWGQGTLVTVSSGGGSGGGSEVQLVESGGSLVQPGGSLRLSCAASGFTFDDYAMSWVRQVPGKGLEWVSSINWSGTHTDYADSVKGRFTISRNNANNTLYLQMNSLKSEDTAVYYCAKNWRDAGTTWFEKSGSAGQGTQVTVSSGTGGGGSGGGGSGGGGSEFDIQMTQSPSSLSASVGDRVTITCKASDHINNWLAWYQQKPGQAPKLLIYGATTLETGVPSRFSGSGSGTDYTLTISSLQPEDFATYYCQQSWNTPWTFGQGTKLEIKRLEDLKNVFPPEVAVFEPSEAEISHTQKATLVCLATGFYPDHVELSWWVNGKEVHSGVCTDPQPLKEQPALNDSRYCLSSRLRVSATFWQNPRNHFRCQVQFYGLSENDEWTQDRAKPVTQIVSAEAWGRADCGFTSESYQQGVLSATILYEILLGKATLYAVLVSALVLMAMVKRKDSRGRAKRSGSGATNFSLLKQAGDVEENPGPTSMDWIWRILFLVGAATGAHSGPVDNKFNKERYSAYYEIWQLPNLNVRQKAAFIGSLQDDPSQSANLLAEAKKLNDAQAPKGSGGGGSGGGGSGGGGSFEQVQLQQPGAELVKPGASVKMSCKASGYAFSSYWINWMKQKPGQGLEWIGQIYPGDGDTNYNGKFKGRATLTADTSSSTAYMQLSSLTSEDSAVYFCARSITTVVGCAMDYWGQGTSVTVSSTRIQNPDPAVYQLRDSKSSDKSVCLFTDFDSQTNVSQSKDSDVYITDKCVLDMRSMDFKSNSAVAWSNKSDFACANAFNNSIIPEDTFFPSPESSCDVKLVEKSFETDTNLNFQNLSVIGFRILLLKVAGFNLLMTLRLWSS

SEQ ID NO: 16549 - protein, 1199 aa, Artificial Sequence
  Synthetic Polypeptide
MALPVTALLLPLALLLHAARPEVQLVESGGGSVQTGGSLRLTCAASGRTSRSYGMGWFRQAPGKEREFVSGISWRGDSTGYADSVKGRFTISRDNAKNTVDLQMNSLKPEDTAIYYCAAAAGSAWYGTLYEYDYWGQGTLVTVSSGGGSGGGSEVQLVESGGSLVQPGGSLRLSCAASGFTFDDYAMSWVRQVPGKGLEWVSSINWSGTHTDYADSVKGRFTISRNNANNTLYLQMNSLKSEDTAVYYCAKNWRDAGTTWFEKSGSAGQGTQVTVSSGTGGGGSGGGGSGGGGSEFDIQMTQSPSSLSASVGDRVTITCKASDHINNWLAWYQQKPGQAPKLLIYGATTLETGVPSRFSGSGSGTDYTLTISSLQPEDFATYYCQQSWNTPWTFGQGTKLEIKRLEDLKNVFPPEVAVFEPSEAEISHTQKATLVCLATGFYPDHVELSWWVNGKEVHSGVCTDPQPLKEQPALNDSRYCLSSRLRVSATFWQNPRNHFRCQVQFYGLSENDEWTQDRAKPVTQIVSAEAWGRADCGFTSESYQQGVLSATILYEILLGKATLYAVLVSALVLMAMVKRKDSRGRAKRSGSGATNFSLLKQAGDVEENPGPTSMDWIWRILFLVGAATGAHSGPVDNKFNKERYSAYYEIWQLPNLNVRQKAAFIGSLQDDPSQSANLLAEAKKLNDAQAPKGSGGGGSGGGGSGGGGSFEQVQLQQPGAELVKPGASVKMSCKASGYAFSSYWINWMKQKPGQGLEWIGQIYPGDGDTNYNGKFKGRATLTADTSSSTAYMQLSSLTSEDSAVYFCARSITTVVGCAMDYWGQGTSVTVSSTRIQNPDPAVYQLRDSKSSDKSVCLFTDFDSQTNVSQSKDSDVYITDKCVLDMRSMDFKSNSAVAWSNKSDFACANAFNNSIIPEDTFFPSPESSCDVKLVEKSFETDTNLNFQNLSVIGFRILLLKVAGFNLLMTLRLWSSRAKRSGSGVKQTLNFDLLKLAGDVESNPGPSRGGIHTMATYEVLCEVARKLGTDDREVVLFLLNVFIPQPTLAQLIGALRALKEEGRLTFPLLAECLFRAGRRDLLRDLLHLDPRFLERHLAGTMSYFSPYQLTVLHVDGELCARDIRSLIFLSKDTIGSRSTPQTFLHWVYCMENLDLLGPTDVDALMSMLRSLSRVDLQRQVQTLMGLHLSGPSHSQHYRHTP

SEQ ID NO: 16550 - protein, 978 aa, Artificial Sequence
  Synthetic Polypeptide
MALPVTALLLPLALLLHAARPEVQLVESGGGSVQTGGSLRLTCAASGRTSRSYGMGWFRQAPGKEREFVSGISWRGDSTGYADSVKGRFTISRDNAKNTVDLQMNSLKPEDTAIYYCAAAAGSAWYGTLYEYDYWGQGTLVTVSSGGGSGGGSEVQLVESGGSLVQPGGSLRLSCAASGFTFDDYAMSWVRQVPGKGLEWVSSINWSGTHTDYADSVKGRFTISRNNANNTLYLQMNSLKSEDTAVYYCAKNWRDAGTTWFEKSGSAGQGTQVTVSSGTGGGGSGGGGSGGGGSEFDIQMTQSPSSLSASVGDRVTITCKASDHINNWLAWYQQKPGQAPKLLIYGATTLETGVPSRFSGSGSGTDYTLTISSLQPEDFATYYCQQSWNTPWTFGQGTKLEIKRLEIQNPDPAVYQLRDSKSSDKSVCLFTDFDSQTNVSQSKDSDVYITDKCVLDMRSMDFKSNSAVAWSNKSDFACANAFNNSIIPEDTFFPSPESSCDVKLVEKSFETDTNLNFQNLSVIGFRILLLKVAGFNLLMTLRLWSSRAKRSGSGVKQTLNFDLLKLAGDVESNPGPTSMDWIWRILFLVGAATGAHSGPVDNKFNKERYSAYYEIWQLPNLNVRQKAAFIGSLQDDPSQSANLLAEAKKLNDAQAPKGSGGGGSGGGGSGGGGSFEQVQLQQPGAELVKPGASVKMSCKASGYAFSSYWINWMKQKPGQGLEWIGQIYPGDGDTNYNGKFKGRATLTADTSSSTAYMQLSSLTSEDSAVYFCARSITTVVGCAMDYWGQGTSVTVSSTREDLKNVFPPEVAVFEPSEAEISHTQKATLVCLATGFYPDHVELSWWVNGKEVHSGVCTDPQPLKEQPALNDSRYCLSSRLRVSATFWQNPRNHFRCQVQFYGLSENDEWTQDRAKPVTQIVSAEAWGRADCGFTSESYQQGVLSATILYEILLGKATLYAVLVSALVLMAMVKRKDSRG

SEQ ID NO: 16551 - protein, 1200 aa, Artificial Sequence
  Synthetic Polypeptide
MALPVTALLLPLALLLHAARPEVQLVESGGGSVQTGGSLRLTCAASGRTSRSYGMGWFRQAPGKEREFVSGISWRGDSTGYADSVKGRFTISRDNAKNTVDLQMNSLKPEDTAIYYCAAAAGSAWYGTLYEYDYWGQGTLVTVSSGGGSGGGSEVQLVESGGSLVQPGGSLRLSCAASGFTFDDYAMSWVRQVPGKGLEWVSSINWSGTHTDYADSVKGRFTISRNNANNTLYLQMNSLKSEDTAVYYCAKNWRDAGTTWFEKSGSAGQGTQVTVSSGTGGGGSGGGGSGGGGSEFDIQMTQSPSSLSASVGDRVTITCKASDHINNWLAWYQQKPGQAPKLLIYGATTLETGVPSRFSGSGSGTDYTLTISSLQPEDFATYYCQQSWNTPWTFGQGTKLEIKRLEIQNPDPAVYQLRDSKSSDKSVCLFTDFDSQTNVSQSKDSDVYITDKCVLDMRSMDFKSNSAVAWSNKSDFACANAFNNSIIPEDTFFPSPESSCDVKLVEKSFETDTNLNFQNLSVIGFRILLLKVAGFNLLMTLRLWSSRAKRSGSGVKQTLNFDLLKLAGDVESNPGPTSMDWIWRILFLVGAATGAHSGPVDNKFNKERYSAYYEIWQLPNLNVRQKAAFIGSLQDDPSQSANLLAEAKKLNDAQAPKGSGGGGSGGGGSGGGGSFEQVQLQQPGAELVKPGASVKMSCKASGYAFSSYWINWMKQKPGQGLEWIGQIYPGDGDTNYNGKFKGRATLTADTSSSTAYMQLSSLTSEDSAVYFCARSITTVVGCAMDYWGQGTSVTVSSTREDLKNVFPPEVAVFEPSEAEISHTQKATLVCLATGFYPDHVELSWWVNGKEVHSGVCTDPQPLKEQPALNDSRYCLSSRLRVSATFWQNPRNHFRCQVQFYGLSENDEWTQDRAKPVTQIVSAEAWGRADCGFTSESYQQGVLSATILYEILLGKATLYAVLVSALVLMAMVKRKDSRGRAKRSGSGATNFSLLKQAGDVEENPGPSRGGIHTMATYEVLCEVARKLGTDDREVVLFLLNVFIPQPTLAQLIGALRALKEEGRLTFPLLAECLFRAGRRDLLRDLLHLDPRFLERHLAGTMSYFSPYQLTVLHVDGELCARDIRSLIFLSKDTIGSRSTPQTFLHWVYCMENLDLLGPTDVDALMSMLRSLSRVDLQRQVQTLMGLHLSGPSHSQHYRHTP

SEQ ID NO: 16552 - protein, 1207 aa, Artificial Sequence
  Synthetic Polypeptide
MALPVTALLLPLALLLHAARPEVQLVESGGGSVQTGGSLRLTCAASGRTSRSYGMGWFRQAPGKEREFVSGISWRGDSTGYADSVKGRFTISRDNAKNTVDLQMNSLKPEDTAIYYCAAAAGSAWYGTLYEYDYWGQGTLVTVSSGGGSGGGSEVQLVESGGSLVQPGGSLRLSCAASGFTFDDYAMSWVRQVPGKGLEWVSSINWSGTHTDYADSVKGRFTISRNNANNTLYLQMNSLKSEDTAVYYCAKNWRDAGTTWFEKSGSAGQGTQVTVSSGTGGGGSGGGGSGGGGSEFDIQMTQSPSSLSASVGDRVTITCKASDHINNWLAWYQQKPGQAPKLLIYGATTLETGVPSRFSGSGSGTDYTLTISSLQPEDFATYYCQQSWNTPWTFGQGTKLEIKRLEDLKNVFPPEVAVFEPSEAEISHTQKATLVCLATGFYPDHVELSWWVNGKEVHSGVSTDPQPLKEQPALNDSRYCLSSRLRVSATFWQNPRNHFRCQVQFYGLSENDEWTQDRAKPVTQIVSAEAWGRADCGFTSESYQQGVLSATILYEILLGKATLYAVLVSALVLMAMVKRKDSRGRAKRSGSGATNFSLLKQAGDVEENPGPTSMDWIWRILFLVGAATGAHSGPVDNKFNKERYSAYYEIWQLPNLNVRQKAAFIGSLQDDPSQSANLLAEAKKLNDAQAPKGSGGGGSGGGGSGGGGSFEQVQLQQPGAELVKPGASVKMSCKASGYAFSSYWINWMKQKPGQGLEWIGQIYPGDGDTNYNGKFKGRATLTADTSSSTAYMQLSSLTSEDSAVYFCARSITTVVGCAMDYWGQGTSVTVSSTRIQNPDPAVYQLRDSKSSDKSVCLFTDFDSQTNVSQSKDSDVYITDKTVLDMRSMDFKSNSAVAWSNKSDFACANAFNNSIIPEDTFFPSPESSCDVKLVEKSFETDTNLNFQNLSVIGFRILLLKVAGFNLLMTLRLWSSRAKRSGSGVKQTLNFDLLKLAGDVESNPGPSRGHMTEYKPTVRLATRDDVPRAVRTLAAAFADYPATRHTVDPDRHIERVTELQELFLTRVGLDIGKVWVADDGAAVAVWTTPESVEAGAVFAEIGPRMAELSGSRLAAQQQMEGLLAPHRPKEPAWFLATVGVSPDHQGKGLGSAVVLPGVEAAERAGVPAFLETSAPRNLPFYERLGFTVTADVEVPEGPRTWCMTRKPGA

SEQ ID NO: 16553 - protein, 1289 aa, Artificial Sequence
  Synthetic Polypeptide
MALPVTALLLPLALLLHAARPEVQLVESGGGSVQTGGSLRLTCAASGRTSRSYGMGWFRQAPGKEREFVSGISWRGDSTGYADSVKGRFTISRDNAKNTVDLQMNSLKPEDTAIYYCAAAAGSAWYGTLYEYDYWGQGTLVTVSSGGGSGGGSEVQLVESGGSLVQPGGSLRLSCAASGFTFDDYAMSWVRQVPGKGLEWVSSINWSGTHTDYADSVKGRFTISRNNANNTLYLQMNSLKSEDTAVYYCAKNWRDAGTTWFEKSGSAGQGTQVTVSSGTGGGGSGGGGSGGGGSEFDIQMTQSPSSLSASVGDRVTITCKASDHINNWLAWYQQKPGQAPKLLIYGATTLETGVPSRFSGSGSGTDYTLTISSLQPEDFATYYCQQSWNTPWTFGQGTKLEIKRLEDLKNVFPPEVAVFEPSEAEISHTQKATLVCLATGFYPDHVELSWWVNGKEVHSGVSTDPQPLKEQPALNDSRYCLSSRLRVSATFWQNPRNHFRCQVQFYGLSENDEWTQDRAKPVTQIVSAEAWGRADCGFTSESYQQGVLSATILYEILLGKATLYAVLVSALVLMAMVKRKDSRGRAKRSGSGATNFSLLKQAGDVEENPGPTSMDWIWRILFLVGAATGAHSGPVDNKFNKERYSAYYEIWQLPNLNVRQKAAFIGSLQDDPSQSANLLAEAKKLNDAQAPKGSGGGGSGGGGSGGGGSFEQVQLQQPGAELVKPGASVKMSCKASGYAFSSYWINWMKQKPGQGLEWIGQIYPGDGDTNYNGKFKGRATLTADTSSSTAYMQLSSLTSEDSAVYFCARSITTVVGCAMDYWGQGTSVTVSSTREQKLISEEDGSGTPFPSLAPPIMLLVDGKQQMVVVCLVLDVAPPGLDSPIWFSAGNGSALDAFTYGPSPATDGTWTNLAHLSLPSEELASWEPLVCHTGPGAEGHSRSTQPMHLSGEASTARTCPQEPLRGTPGGALWLGVLRLLLFKLLLFDLLLTCSCLCDPAGPLPSPATTTRLRALGSHRLHPATETGGREATSSPRPQPRDRRWGDTPPGRKPGSPVRAKRSGSGVKQTLNFDLLKLAGDVESNPGPSRGHMTEYKPTVRLATRDDVPRAVRTLAAAFADYPATRHTVDPDRHIERVTELQELFLTRVGLDIGKVWVADDGAAVAVWTTPESVEAGAVFAEIGPRMAELSGSRLAAQQQMEGLLAPHRPKEPAWFLATVGVSPDHQGKGLGSAVVLPGVEAAERAGVPAFLETSAPRNLPFYERLGFTVTADVEVPEGPRTWCMTRKPGA

SEQ ID NO: 16554 - protein, 1244 aa, Artificial Sequence
  Synthetic Polypeptide
MALPVTALLLPLALLLHAARPEVQLVESGGGSVQTGGSLRLTCAASGRTSRSYGMGWFRQAPGKEREFVSGISWRGDSTGYADSVKGRFTISRDNAKNTVDLQMNSLKPEDTAIYYCAAAAGSAWYGTLYEYDYWGQGTLVTVSSGGGSGGGSEVQLVESGGSLVQPGGSLRLSCAASGFTFDDYAMSWVRQVPGKGLEWVSSINWSGTHTDYADSVKGRFTISRNNANNTLYLQMNSLKSEDTAVYYCAKNWRDAGTTWFEKSGSAGQGTQVTVSSGTGGGGSGGGGSGGGGSEFDIQMTQSPSSLSASVGDRVTITCKASDHINNWLAWYQQKPGQAPKLLIYGATTLETGVPSRFSGSGSGTDYTLTISSLQPEDFATYYCQQSWNTPWTFGQGTKLEIKRLEGKPIPNPLLGLDSTGSGDKQLDADVSPKPTIFLPSIAETKLQKAGTYLCLLEKFFPDVIKIHWQEKKSNTILGSQEGNTMKTNDTYMKFSWLTVPEKSLDKEHRCIVRHENNKNGVDQEIIFPPIKTDVITMDPKDNCSKDANDTLLLQLTNTSAYYMYLLLLLKSVVYFAIITCCLLRRTAFCCNGEKSRAKRSGSGATNFSLLKQAGDVEENPGPTSMDWIWRILFLVGAATGAHSGPVDNKFNKERYSAYYEIWQLPNLNVRQKAAFIGSLQDDPSQSANLLAEAKKLNDAQAPKGSGGGGSGGGGSGGGGSFEQVQLQQPGAELVKPGASVKMSCKASGYAFSSYWINWMKQKPGQGLEWIGQIYPGDGDTNYNGKFKGRATLTADTSSSTAYMQLSSLTSEDSAVYFCARSITTVVGCAMDYWGQGTSVTVSSTREQKLISEEDGSGSQPHTKPSVFVMKNGTNVACLVKEFYPKDIRINLVSSKKITEFDPAIVISPSGKYNAVKLGKYEDSNSVTCSVQHDNKTVHSTDFEVKTDSTDHVKPKETENTKQPSKSCHKPKAIVHTEKVNMMSLTVLGLRMLFAKTVAVNFLLTAKLFFLRAKRSGSGVKQTLNFDLLKLAGDVESNPGPSRGHMTEYKPTVRLATRDDVPRAVRTLAAAFADYPATRHTVDPDRHIERVTELQELFLTRVGLDIGKVWVADDGAAVAVWTTPESVEAGAVFAEIGPRMAELSGSRLAAQQQMEGLLAPHRPKEPAWFLATVGVSPDHQGKGLGSAVVLPGVEAAERAGVPAFLETSAPRNLPFYERLGFTVTADVEVPEGPRTWCMTRKPGA

SEQ ID NO: 16555 - protein, 982 aa, Artificial Sequence
  Synthetic Polypeptide
MALPVTALLLPLALLLHAARPEVQLVESGGGSVQTGGSLRLTCAASGRTSRSYGMGWFRQAPGKEREFVSGISWRGDSTGYADSVKGRFTISRDNAKNTVDLQMNSLKPEDTAIYYCAAAAGSAWYGTLYEYDYWGQGTLVTVSSGGGSGGGSEVQLVESGGSLVQPGGSLRLSCAASGFTFDDYAMSWVRQVPGKGLEWVSSINWSGTHTDYADSVKGRFTISRNNANNTLYLQMNSLKSEDTAVYYCAKNWRDAGTTWFEKSGSAGQGTQVTVSSGTGGGGSGGGGSGGGGSEFDIQMTQSPSSLSASVGDRVTITCKASDHINNWLAWYQQKPGQAPKLLIYGATTLETGVPSRFSGSGSGTDYTLTISSLQPEDFATYYCQQSWNTPWTFGQGTKLEIKRLESQPHTKPSVFVMKNGTNVACLVKEFYPKDIRINLVSSKKITEFDPAIVISPSGKYNAVKLGKYEDSNSVTCSVQHDNKTVHSTDFEVKTDSTDHVKPKETENTKQPSKSCHKPKAIVHTEKVNMMSLTVLGLRMLFAKTVAVNFLLTAKLFFLRAKRSGSGATNFSLLKQAGDVEENPGPTSMDWIWRILFLVGAATGAHSGPVDNKFNKERYSAYYEIWQLPNLNVRQKAAFIGSLQDDPSQSANLLAEAKKLNDAQAPKGSGGGGSGGGGSGGGGSFEQVQLQQPGAELVKPGASVKMSCKASGYAFSSYWINWMKQKPGQGLEWIGQIYPGDGDTNYNGKFKGRATLTADTSSSTAYMQLSSLTSEDSAVYFCARSITTVVGCAMDYWGQGTSVTVSSTRDKQLDADVSPKPTIFLPSIAETKLQKAGTYLCLLEKFFPDVIKIHWQEKKSNTILGSQEGNTMKTNDTYMKFSWLTVPEKSLDKEHRCIVRHENNKNGVDQEIIFPPIKTDVITMDPKDNCSKDANDTLLLQLTNTSAYYMYLLLLLKSVVYFAIITCCLLRRTAFCCNGEKS

SEQ ID NO: 16556 - protein, 1384 aa, Artificial Sequence
  Synthetic Polypeptide
MALPVTALLLPLALLLHAARPEVQLVESGGGSVQTGGSLRLTCAASGRTSRSYGMGWFRQAPGKEREFVSGISWRGDSTGYADSVKGRFTISRDNAKNTVDLQMNSLKPEDTAIYYCAAAAGSAWYGTLYEYDYWGQGTLVTVSSGGGSGGGSEVQLVESGGSLVQPGGSLRLSCAASGFTFDDYAMSWVRQVPGKGLEWVSSINWSGTHTDYADSVKGRFTISRNNANNTLYLQMNSLKSEDTAVYYCAKNWRDAGTTWFEKSGSAGQGTQVTVSSGTGGGGSGGGGSGGGGSEFDIQMTQSPSSLSASVGDRVTITCKASDHINNWLAWYQQKPGQAPKLLIYGATTLETGVPSRFSGSGSGTDYTLTISSLQPEDFATYYCQQSWNTPWTFGQGTKLEIKRGQPKANPTVTLFPPSSEELQANKATLVCLISDFYPGAVTVAWKADGSPVKAGVETTKPSKQSNNKYAASSYLSLTPEQWKSHRSYSCQVTHEGSTVEKTVAPTECSGSQSFGLLDPKLCYLLDGILFIYGVILTALFLRVKFSRSADAPAYQQGQNQLYNELNLGRREEYDVLDKRRGRDPEMGGKPQRRKNPQEGLYNELQKDKMAEAYSEIGMKGERRRGKGHDGLYQGLSTATKDTYDALHMQALPPRRAKRSGSGATNFSLLKQAGDVEENPGPTSMDWIWRILFLVGAATGAHSGPVDNKFNKERYSAYYEIWQLPNLNVRQKAAFIGSLQDDPSQSANLLAEAKKLNDAQAPKGSGGGGSGGGGSGGGGSFEQVQLQQPGAELVKPGASVKMSCKASGYAFSSYWINWMKQKPGQGLEWIGQIYPGDGDTNYNGKFKGRATLTADTSSSTAYMQLSSLTSEDSAVYFCARSITTVVGCAMDYWGQGTSVTVSSASTKGPSVFPLAPSSKSTSGGTAALGCLVKDYFPEPVTVSWNSGALTSGVHTFPAVLQSSGLYSLSSVVTVPSSSLGTQTYICNVNHKPSNTKVDKRVEPKSCGTQSFGLLDPKLCYLLDGILFIYGVILTALFLRVKFSRSADAPAYQQGQNQLYNELNLGRREEYDVLDKRRGRDPEMGGKPQRRKNPQEGLYNELQKDKMAEAYSEIGMKGERRRGKGHDGLYQGLSTATKDTYDALHMQALPPRRAKRSGSGVKQTLNFDLLKLAGDVESNPGPSRGHMTEYKPTVRLATRDDVPRAVRTLAAAFADYPATRHTVDPDRHIERVTELQELFLTRVGLDIGKVWVADDGAAVAVWTTPESVEAGAVFAEIGPRMAELSGSRLAAQQQMEGLLAPHRPKEPAWFLATVGVSPDHQGKGLGSAVVLPGVEAAERAGVPAFLETSAPRNLPFYERLGFTVTADVEVPEGPRTWCMTRKPGA

SEQ ID NO: 16557 - protein, 1170 aa, Artificial Sequence
  Synthetic Polypeptide
MALPVTALLLPLALLLHAARPEVQLVESGGGSVQTGGSLRLTCAASGRTSRSYGMGWFRQAPGKEREFVSGISWRGDSTGYADSVKGRFTISRDNAKNTVDLQMNSLKPEDTAIYYCAAAAGSAWYGTLYEYDYWGQGTLVTVSSGGGSGGGSEVQLVESGGSLVQPGGSLRLSCAASGFTFDDYAMSWVRQVPGKGLEWVSSINWSGTHTDYADSVKGRFTISRNNANNTLYLQMNSLKSEDTAVYYCAKNWRDAGTTWFEKSGSAGQGTQVTVSSGTGGGGSGGGGSGGGGSEFDIQMTQSPSSLSASVGDRVTITCKASDHINNWLAWYQQKPGQAPKLLIYGATTLETGVPSRFSGSGSGTDYTLTISSLQPEDFATYYCQQSWNTPWTFGQGTKLEIKRLEDLKNVFPPEVAVFEPSEAEISHTQKATLVCLATGFYPDHVELSWWVNGKEVHSGVSTDPQPLKEQPALNDSRYCLSSRLRVSATFWQNPRNHFRCQVQFYGLSENDEWTQDRAKPVTQIVSAEAWGRADCGSQSFGLLDPKLCYLLDGILFIYGVILTALFLRVKFSRSADAPAYQQGQNQLYNELNLGRREEYDVLDKRRGRDPEMGGKPQRRKNPQEGLYNELQKDKMAEAYSEIGMKGERRRGKGHDGLYQGLSTATKDTYDALHMQALPPRRAKRSGSGATNFSLLKQAGDVEENPGPTSMDWIWRILFLVGAATGAHSGPVDNKFNKERYSAYYEIWQLPNLNVRQKAAFIGSLQDDPSQSANLLAEAKKLNDAQAPKGSGGGGSGGGGSGGGGSFEQVQLQQPGAELVKPGASVKMSCKASGYAFSSYWINWMKQKPGQGLEWIGQIYPGDGDTNYNGKFKGRATLTADTSSSTAYMQLSSLTSEDSAVYFCARSITTVVGCAMDYWGQGTSVTVSSTRIQNPDPAVYQLRDSKSSDKSVCLFTDFDSQTNVSQSKDSDVYITDKTVLDMRSMDFKSNSAVAWSNKSDFACANAFNNSIIPEDTFFPSPESSCGTQSFGLLDPKLCYLLDGILFIYGVILTALFLRVKFSRSADAPAYQQGQNQLYNELNLGRREEYDVLDKRRGRDPEMGGKPQRRKNPQEGLYNELQKDKMAEAYSEIGMKGERRRGKGHDGLYQGLSTATKDTYDALHMQALPPR

SEQ ID NO: 16558 - protein, 1170 aa, Artificial Sequence
  Synthetic Polypeptide
MALPVTALLLPLALLLHAARPEVQLVESGGGSVQTGGSLRLTCAASGRTSRSYGMGWFRQAPGKEREFVSGISWRGDSTGYADSVKGRFTISRDNAKNTVDLQMNSLKPEDTAIYYCAAAAGSAWYGTLYEYDYWGQGTLVTVSSGGGSGGGSEVQLVESGGSLVQPGGSLRLSCAASGFTFDDYAMSWVRQVPGKGLEWVSSINWSGTHTDYADSVKGRFTISRNNANNTLYLQMNSLKSEDTAVYYCAKNWRDAGTTWFEKSGSAGQGTQVTVSSGTGGGGSGGGGSGGGGSEFDIQMTQSPSSLSASVGDRVTITCKASDHINNWLAWYQQKPGQAPKLLIYGATTLETGVPSRFSGSGSGTDYTLTISSLQPEDFATYYCQQSWNTPWTFGQGTKLEIKRLEDLKNVFPPEVAVFEPSKAEIAHTQKATLVCLATGFYPDHVELSWWVNGKEVHSGVCTDPQPLKEQPALNDSRYCLSSRLRVSATFWQNPRNHFRCQVQFYGLSENDEWTQDRAKPVTQIVSAEAWGRADCGSQSFGLLDPKLCYLLDGILFIYGVILTALFLRVKFSRSADAPAYQQGQNQLYNELNLGRREEYDVLDKRRGRDPEMGGKPQRRKNPQEGLYNELQKDKMAEAYSEIGMKGERRRGKGHDGLYQGLSTATKDTYDALHMQALPPRRAKRSGSGATNFSLLKQAGDVEENPGPTSMDWIWRILFLVGAATGAHSGPVDNKFNKERYSAYYEIWQLPNLNVRQKAAFIGSLQDDPSQSANLLAEAKKLNDAQAPKGSGGGGSGGGGSGGGGSFEQVQLQQPGAELVKPGASVKMSCKASGYAFSSYWINWMKQKPGQGLEWIGQIYPGDGDTNYNGKFKGRATLTADTSSSTAYMQLSSLTSEDSAVYFCARSITTVVGCAMDYWGQGTSVTVSSTRIQNPDPAVYQLRDSKSSDKSVCLFTDFDSQTNVSQSKDSDVYITDKCVLDMRSMDFKSNSAVAWSNKSDFACANAFNNSIIPEDTFFPSSDVPCGTQSFGLLDPKLCYLLDGILFIYGVILTALFLRVKFSRSADAPAYQQGQNQLYNELNLGRREEYDVLDKRRGRDPEMGGKPQRRKNPQEGLYNELQKDKMAEAYSEIGMKGERRRGKGHDGLYQGLSTATKDTYDALHMQALPPR

SEQ ID NO: 16559 - protein, 1241 aa, Artificial Sequence
  Synthetic Polypeptide
MALPVTALLLPLALLLHAARPEVQLVESGGGSVQTGGSLRLTCAASGRTSRSYGMGWFRQAPGKEREFVSGISWRGDSTGYADSVKGRFTISRDNAKNTVDLQMNSLKPEDTAIYYCAAAAGSAWYGTLYEYDYWGQGTLVTVSSGGGSGGGSEVQLVESGGSLVQPGGSLRLSCAASGFTFDDYAMSWVRQVPGKGLEWVSSINWSGTHTDYADSVKGRFTISRNNANNTLYLQMNSLKSEDTAVYYCAKNWRDAGTTWFEKSGSAGQGTQVTVSSGTGGGGSGGGGSGGGGSEFDIQMTQSPSSLSASVGDRVTITCKASDHINNWLAWYQQKPGQAPKLLIYGATTLETGVPSRFSGSGSGTDYTLTISSLQPEDFATYYCQQSWNTPWTFGQGTKLEIKRLEGKPIPNPLLGLDSTGSGEDLKNVFPPEVAVFEPSEAEISHTQKATLVCLATGFYPDHVELSWWVNGKEVHSGVSTDPQPLKEQPALNDSRYCLSSRLRVSATFWQNPRNHFRCQVQFYGLSENDEWTQDRAKPVTQIVSAEAWGRADCGSQSFGLLDPKLCYLLDGILFIYGVILTALFLRVKFSRSADAPAYQQGQNQLYNELNLGRREEYDVLDKRRGRDPEMGGKPQRRKNPQEGLYNELQKDKMAEAYSEIGMKGERRRGKGHDGLYQGLSTATKDTYDALHMQALPPRRAKRSGSGATNFSLLKQAGDVEENPGPTSMDWIWRILFLVGAATGAHSGPVDNKFNKERYSAYYEIWQLPNLNVRQKAAFIGSLQDDPSQSANLLAEAKKLNDAQAPKGSGGGGSGGGGSGGGGSFEQVQLQQPGAELVKPGASVKMSCKASGYAFSSYWINWMKQKPGQGLEWIGQIYPGDGDTNYNGKFKGRATLTADTSSSTAYMQLSSLTSEDSAVYFCARSITTVVGCAMDYWGQGTSVTVSSTREQKLISEEDGSGIQNPDPAVYQLRDSKSSDKSVCLFTDFDSQTNVSQSKDSDVYITDKTVLDMRSMDFKSNSAVAWSNKSDFACANAFNNSIIPEDTFFPSPESSCGTQSFGLLDPKLCYLLDGILFIYGVILTALFLRSKRSRLLHSDYMNMTPRRPGPTRKHYQPYAPPRDFAAYRSRVKFSRSADAPAYQQGQNQLYNELNLGRREEYDVLDKRRGRDPEMGGKPQRRKNPQEGLYNELQKDKMAEAYSEIGMKGERRRGKGHDGLYQGLSTATKDTYDALHMQALPPR

SEQ ID NO: 16560 - protein, 1282 aa, Artificial Sequence
  Synthetic Polypeptide
MALPVTALLLPLALLLHAARPEVQLVESGGGSVQTGGSLRLTCAASGRTSRSYGMGWFRQAPGKEREFVSGISWRGDSTGYADSVKGRFTISRDNAKNTVDLQMNSLKPEDTAIYYCAAAAGSAWYGTLYEYDYWGQGTLVTVSSGGGSGGGSEVQLVESGGSLVQPGGSLRLSCAASGFTFDDYAMSWVRQVPGKGLEWVSSINWSGTHTDYADSVKGRFTISRNNANNTLYLQMNSLKSEDTAVYYCAKNWRDAGTTWFEKSGSAGQGTQVTVSSGTGGGGSGGGGSGGGGSEFDIQMTQSPSSLSASVGDRVTITCKASDHINNWLAWYQQKPGQAPKLLIYGATTLETGVPSRFSGSGSGTDYTLTISSLQPEDFATYYCQQSWNTPWTFGQGTKLEIKRLEGKPIPNPLLGLDSTGSGEDLKNVFPPEVAVFEPSEAEISHTQKATLVCLATGFYPDHVELSWWVNGKEVHSGVSTDPQPLKEQPALNDSRYCLSSRLRVSATFWQNPRNHFRCQVQFYGLSENDEWTQDRAKPVTQIVSAEAWGRADCGSQSFGLLDPKLCYLLDGILFIYGVILTALFLRSKRSRLLHSDYMNMTPRRPGPTRKHYQPYAPPRDFAAYRSRVKFSRSADAPAYQQGQNQLYNELNLGRREEYDVLDKRRGRDPEMGGKPQRRKNPQEGLYNELQKDKMAEAYSEIGMKGERRRGKGHDGLYQGLSTATKDTYDALHMQALPPRRAKRSGSGATNFSLLKQAGDVEENPGPTSMDWIWRILFLVGAATGAHSGPVDNKFNKERYSAYYEIWQLPNLNVRQKAAFIGSLQDDPSQSANLLAEAKKLNDAQAPKGSGGGGSGGGGSGGGGSFEQVQLQQPGAELVKPGASVKMSCKASGYAFSSYWINWMKQKPGQGLEWIGQIYPGDGDTNYNGKFKGRATLTADTSSSTAYMQLSSLTSEDSAVYFCARSITTVVGCAMDYWGQGTSVTVSSTREQKLISEEDGSGIQNPDPAVYQLRDSKSSDKSVCLFTDFDSQTNVSQSKDSDVYITDKTVLDMRSMDFKSNSAVAWSNKSDFACANAFNNSIIPEDTFFPSPESSCGTQSFGLLDPKLCYLLDGILFIYGVILTALFLRSKRSRLLHSDYMNMTPRRPGPTRKHYQPYAPPRDFAAYRSRVKFSRSADAPAYQQGQNQLYNELNLGRREEYDVLDKRRGRDPEMGGKPQRRKNPQEGLYNELQKDKMAEAYSEIGMKGERRRGKGHDGLYQGLSTATKDTYDALHMQALPPR

SEQ ID NO: 16561 - protein, 1243 aa, Artificial Sequence
  Synthetic Polypeptide
MALPVTALLLPLALLLHAARPEVQLVESGGGSVQTGGSLRLTCAASGRTSRSYGMGWFRQAPGKEREFVSGISWRGDSTGYADSVKGRFTISRDNAKNTVDLQMNSLKPEDTAIYYCAAAAGSAWYGTLYEYDYWGQGTLVTVSSGGGSGGGSEVQLVESGGSLVQPGGSLRLSCAASGFTFDDYAMSWVRQVPGKGLEWVSSINWSGTHTDYADSVKGRFTISRNNANNTLYLQMNSLKSEDTAVYYCAKNWRDAGTTWFEKSGSAGQGTQVTVSSGTGGGGSGGGGSGGGGSEFDIQMTQSPSSLSASVGDRVTITCKASDHINNWLAWYQQKPGQAPKLLIYGATTLETGVPSRFSGSGSGTDYTLTISSLQPEDFATYYCQQSWNTPWTFGQGTKLEIKRLEGKPIPNPLLGLDSTGSGEDLKNVFPPEVAVFEPSEAEISHTQKATLVCLATGFYPDHVELSWWVNGKEVHSGVSTDPQPLKEQPALNDSRYCLSSRLRVSATFWQNPRNHFRCQVQFYGLSENDEWTQDRAKPVTQIVSAEAWGRADCGSQSFGLLDPKLCYLLDGILFIYGVILTALFLRVKFSRSADAPAYQQGQNQLYNELNLGRREEYDVLDKRRGRDPEMGGKPQRRKNPQEGLYNELQKDKMAEAYSEIGMKGERRRGKGHDGLYQGLSTATKDTYDALHMQALPPRRAKRSGSGATNFSLLKQAGDVEENPGPTSMDWIWRILFLVGAATGAHSGPVDNKFNKERYSAYYEIWQLPNLNVRQKAAFIGSLQDDPSQSANLLAEAKKLNDAQAPKGSGGGGSGGGGSGGGGSFEQVQLQQPGAELVKPGASVKMSCKASGYAFSSYWINWMKQKPGQGLEWIGQIYPGDGDTNYNGKFKGRATLTADTSSSTAYMQLSSLTSEDSAVYFCARSITTVVGCAMDYWGQGTSVTVSSTREQKLISEEDLGSGIQNPDPAVYQLRDSKSSDKSVCLFTDFDSQTNVSQSKDSDVYITDKTVLDMRSMDFKSNSAVAWSNKSDFACANAFNNSIIPEDTFFPSPESSCGTQSFGLLDPKLCYLLDGILFIYGVILTALFLKRGRKKLLYIFKQPFMRPVQTTQEEDGCSCRFPEEEEGGCELRVKFSRSADAPAYQQGQNQLYNELNLGRREEYDVLDKRRGRDPEMGGKPQRRKNPQEGLYNELQKDKMAEAYSEIGMKGERRRGKGHDGLYQGLSTATKDTYDALHMQALPPR

SEQ ID NO: 16562 - protein, 1285 aa, Artificial Sequence
  Synthetic Polypeptide
MALPVTALLLPLALLLHAARPEVQLVESGGGSVQTGGSLRLTCAASGRTSRSYGMGWFRQAPGKEREFVSGISWRGDSTGYADSVKGRFTISRDNAKNTVDLQMNSLKPEDTAIYYCAAAAGSAWYGTLYEYDYWGQGTLVTVSSGGGSGGGSEVQLVESGGSLVQPGGSLRLSCAASGFTFDDYAMSWVRQVPGKGLEWVSSINWSGTHTDYADSVKGRFTISRNNANNTLYLQMNSLKSEDTAVYYCAKNWRDAGTTWFEKSGSAGQGTQVTVSSGTGGGGSGGGGSGGGGSEFDIQMTQSPSSLSASVGDRVTITCKASDHINNWLAWYQQKPGQAPKLLIYGATTLETGVPSRFSGSGSGTDYTLTISSLQPEDFATYYCQQSWNTPWTFGQGTKLEIKRLEGKPIPNPLLGLDSTGSGEDLKNVFPPEVAVFEPSEAEISHTQKATLVCLATGFYPDHVELSWWVNGKEVHSGVSTDPQPLKEQPALNDSRYCLSSRLRVSATFWQNPRNHFRCQVQFYGLSENDEWTQDRAKPVTQIVSAEAWGRADCGSQSFGLLDPKLCYLLDGILFIYGVILTALFLKRGRKKLLYIFKQPFMRPVQTTQEEDGCSCRFPEEEEGGCELRVKFSRSADAPAYQQGQNQLYNELNLGRREEYDVLDKRRGRDPEMGGKPQRRKNPQEGLYNELQKDKMAEAYSEIGMKGERRRGKGHDGLYQGLSTATKDTYDALHMQALPPRRAKRSGSGATNFSLLKQAGDVEENPGPTSMDWIWRILFLVGAATGAHSGPVDNKFNKERYSAYYEIWQLPNLNVRQKAAFIGSLQDDPSQSANLLAEAKKLNDAQAPKGSGGGGSGGGGSGGGGSFEQVQLQQPGAELVKPGASVKMSCKASGYAFSSYWINWMKQKPGQGLEWIGQIYPGDGDTNYNGKFKGRATLTADTSSSTAYMQLSSLTSEDSAVYFCARSITTVVGCAMDYWGQGTSVTVSSTREQKLISEEDLGSGIQNPDPAVYQLRDSKSSDKSVCLFTDFDSQTNVSQSKDSDVYITDKTVLDMRSMDFKSNSAVAWSNKSDFACANAFNNSIIPEDTFFPSPESSCGTQSFGLLDPKLCYLLDGILFIYGVILTALFLKRGRKKLLYIFKQPFMRPVQTTQEEDGCSCRFPEEEEGGCELRVKFSRSADAPAYQQGQNQLYNELNLGRREEYDVLDKRRGRDPEMGGKPQRRKNPQEGLYNELQKDKMAEAYSEIGMKGERRRGKGHDGLYQGLSTATKDTYDALHMQALPPR

SEQ ID NO: 16563 - protein, 1175 aa, Artificial Sequence
  Synthetic Polypeptide
MALPVTALLLPLALLLHAARPEVQLVESGGGSVQTGGSLRLTCAASGRTSRSYGMGWFRQAPGKEREFVSGISWRGDSTGYADSVKGRFTISRDNAKNTVDLQMNSLKPEDTAIYYCAAAAGSAWYGTLYEYDYWGQGTLVTVSSGGGSGGGSEVQLVESGGSLVQPGGSLRLSCAASGFTFDDYAMSWVRQVPGKGLEWVSSINWSGTHTDYADSVKGRFTISRNNANNTLYLQMNSLKSEDTAVYYCAKNWRDAGTTWFEKSGSAGQGTQVTVSSGTGGGGSGGGGSGGGGSEFDIQMTQSPSSLSASVGDRVTITCKASDHINNWLAWYQQKPGQAPKLLIYGATTLETGVPSRFSGSGSGTDYTLTISSLQPEDFATYYCQQSWNTPWTFGQGTKLEIKRLEQSFGLLDPKLCYLLDGILFIYGVILTALFLRVKFSRSADAPAYQQGQNQLYNELNLGRREEYDVLDKRRGRDPEMGGKPQRRKNPQEGLYNELQKDKMAEAYSEIGMKGERRRGKGHDGLYQGLSTATKDTYDALHMQALPPRRAKRSGSGATNFSLLKQAGDVEENPGPTSMDWIWRILFLVGAATGAHSGPVDNKFNKERYSAYYEIWQLPNLNVRQKAAFIGSLQDDPSQSANLLAEAKKLNDAQAPKGSGGGGSGGGGSGGGGSFEQVQLQQPGAELVKPGASVKMSCKASGYAFSSYWINWMKQKPGQGLEWIGQIYPGDGDTNYNGKFKGRATLTADTSSSTAYMQLSSLTSEDSAVYFCARSITTVVGCAMDYWGQGTSVTVSSTRQSFGLLDPKLCYLLDGILFIYGVILTALFLRVKFSRSADAPAYQQGQNQLYNELNLGRREEYDVLDKRRGRDPEMGGKPQRRKNPQEGLYNELQKDKMAEAYSEIGMKGERRRGKGHDGLYQGLSTATKDTYDALHMQALPPRRAKRSGSGVKQTLNFDLLKLAGDVESNPGPSRGHMTEYKPTVRLATRDDVPRAVRTLAAAFADYPATRHTVDPDRHIERVTELQELFLTRVGLDIGKVWVADDGAAVAVWTTPESVEAGAVFAEIGPRMAELSGSRLAAQQQMEGLLAPHRPKEPAWFLATVGVSPDHQGKGLGSAVVLPGVEAAERAGVPAFLETSAPRNLPFYERLGFTVTADVEVPEGPRTWCMTRKPGA

SEQ ID NO: 16564 - protein, 1000 aa, Artificial Sequence
  Synthetic Polypeptide
MALPVTALLLPLALLLHAARPEVQLVESGGGSVQTGGSLRLTCAASGRTSRSYGMGWFRQAPGKEREFVSGISWRGDSTGYADSVKGRFTISRDNAKNTVDLQMNSLKPEDTAIYYCAAAAGSAWYGTLYEYDYWGQGTLVTVSSGGGSGGGSEVQLVESGGSLVQPGGSLRLSCAASGFTFDDYAMSWVRQVPGKGLEWVSSINWSGTHTDYADSVKGRFTISRNNANNTLYLQMNSLKSEDTAVYYCAKNWRDAGTTWFEKSGSAGQGTQVTVSSGTGGGGSGGGGSGGGGSEFDIQMTQSPSSLSASVGDRVTITCKASDHINNWLAWYQQKPGQAPKLLIYGATTLETGVPSRFSGSGSGTDYTLTISSLQPEDFATYYCQQSWNTPWTFGQGTKLEIKRLEGQPKANPTVTLFPPSSEELQANKATLVCLISDFYPGAVTVAWKADGSPVKAGVETTKPSKQSNNKYAASSYLSLTPEQWKSHRSYSCQVTHEGSTVEKTVAPTECSPIKTDVITMDPKDNCSKDANDTLLLQLTNTSAYYMYLLLLLKSVVYFAIITCCLLRRTAFCCNGEKSRAKRSGSGATNFSLLKQAGDVEENPGPTSMDWIWRILFLVGAATGAHSGPVDNKFNKERYSAYYEIWQLPNLNVRQKAAFIGSLQDDPSQSANLLAEAKKLNDAQAPKGSGGGGSGGGGSGGGGSFEQVQLQQPGAELVKPGASVKMSCKASGYAFSSYWINWMKQKPGQGLEWIGQIYPGDGDTNYNGKFKGRATLTADTSSSTAYMQLSSLTSEDSAVYFCARSITTVVGCAMDYWGQGTSVTVSSTRASTKGPSVFPLAPSSKSTSGGTAALGCLVKDYFPEPVTVSWNSGALTSGVHTFPAVLQSSGLYSLSSVVTVPSSSLGTQTYICNVNHKPSNTKVDKRVEPKSCEVKTDSTDHVKPKETENTKQPSKSCHKPKAIVHTEKVNMMSLTVLGLRMLFAKTVAVNFLLTAKLFFL

SEQ ID NO: 16565 - protein, 978 aa, Artificial Sequence
  Synthetic Polypeptide
MALPVTALLLPLALLLHAARPEVQLVESGGGSVQTGGSLRLTCAASGRTSRSYGMGWFRQAPGKEREFVSGISWRGDSTGYADSVKGRFTISRDNAKNTVDLQMNSLKPEDTAIYYCAAAAGSAWYGTLYEYDYWGQGTLVTVSSGGGSGGGSEVQLVESGGSLVQPGGSLRLSCAASGFTFDDYAMSWVRQVPGKGLEWVSSINWSGTHTDYADSVKGRFTISRNNANNTLYLQMNSLKSEDTAVYYCAKNWRDAGTTWFEKSGSAGQGTQVTVSSGTGGGGSGGGGSGGGGSEFDIQMTQSPSSLSASVGDRVTITCKASDHINNWLAWYQQKPGQAPKLLIYGATTLETGVPSRFSGSGSGTDYTLTISSLQPEDFATYYCQQSWNTPWTFGQGTKLEIKRLEGQPKANPTVTLFPPSSEELQANKATLVCLISDFYPGAVTVAWKADGSPVKAGVETTKPSKQSNNKYAASSYLSLTPEQWKSHRSYSCQVTHEGSTVEKTVAPTECSGRADCGITSASYHQGVLSATILYEILLGKATLYAVLVSALVLMAMVKRKDSRGRAKRSGSGATNFSLLKQAGDVEENPGPTSMDWIWRILFLVGAATGAHSGPVDNKFNKERYSAYYEIWQLPNLNVRQKAAFIGSLQDDPSQSANLLAEAKKLNDAQAPKGSGGGGSGGGGSGGGGSFEQVQLQQPGAELVKPGASVKMSCKASGYAFSSYWINWMKQKPGQGLEWIGQIYPGDGDTNYNGKFKGRATLTADTSSSTAYMQLSSLTSEDSAVYFCARSITTVVGCAMDYWGQGTSVTVSSTRASTKGPSVFPLAPSSKSTSGGTAALGCLVKDYFPEPVTVSWNSGALTSGVHTFPAVLQSSGLYSLSSVVTVPSSSLGTQTYICNVNHKPSNTKVDKRVEPKSCIPEDTFFPSSDVPCDVKLVEKSFETDTNLNFQNLSVIGFRILLLKVAGFNLLMTLRLWSS

SEQ ID NO: 16566 - protein, 978 aa, Artificial Sequence
  Synthetic Polypeptide
MALPVTALLLPLALLLHAARPEVQLVESGGGSVQTGGSLRLTCAASGRTSRSYGMGWFRQAPGKEREFVSGISWRGDSTGYADSVKGRFTISRDNAKNTVDLQMNSLKPEDTAIYYCAAAAGSAWYGTLYEYDYWGQGTLVTVSSGGGSGGGSEVQLVESGGSLVQPGGSLRLSCAASGFTFDDYAMSWVRQVPGKGLEWVSSINWSGTHTDYADSVKGRFTISRNNANNTLYLQMNSLKSEDTAVYYCAKNWRDAGTTWFEKSGSAGQGTQVTVSSGTGGGGSGGGGSGGGGSEFDIQMTQSPSSLSASVGDRVTITCKASDHINNWLAWYQQKPGQAPKLLIYGATTLETGVPSRFSGSGSGTDYTLTISSLQPEDFATYYCQQSWNTPWTFGQGTKLEIKRLEGQPKANPTVTLFPPSSEELQANKATLVCLISDFYPGAVTVAWKADGSPVKAGVETTKPSKQSNNKYAASSYLSLTPEQWKSHRSYSCQVTHEGSTVEKTVAPTECSGRADCGFTSESYQQGVLSATILYEILLGKATLYAVLVSALVLMAMVKRKDSRGRAKRSGSGATNFSLLKQAGDVEENPGPTSMDWIWRILFLVGAATGAHSGPVDNKFNKERYSAYYEIWQLPNLNVRQKAAFIGSLQDDPSQSANLLAEAKKLNDAQAPKGSGGGGSGGGGSGGGGSFEQVQLQQPGAELVKPGASVKMSCKASGYAFSSYWINWMKQKPGQGLEWIGQIYPGDGDTNYNGKFKGRATLTADTSSSTAYMQLSSLTSEDSAVYFCARSITTVVGCAMDYWGQGTSVTVSSTRASTKGPSVFPLAPSSKSTSGGTAALGCLVKDYFPEPVTVSWNSGALTSGVHTFPAVLQSSGLYSLSSVVTVPSSSLGTQTYICNVNHKPSNTKVDKRVEPKSCIPEDTFFPSPESSCDVKLVEKSFETDTNLNFQNLSVIGFRILLLKVAGFNLLMTLRLWSS

SEQ ID NO: 16567 - protein, 944 aa, Artificial Sequence
  Synthetic Polypeptide
MALPVTALLLPLALLLHAARPEVQLVESGGGSVQTGGSLRLTCAASGRTSRSYGMGWFRQAPGKEREFVSGISWRGDSTGYADSVKGRFTISRDNAKNTVDLQMNSLKPEDTAIYYCAAAAGSAWYGTLYEYDYWGQGTLVTVSSGGGSGGGSEVQLVESGGSLVQPGGSLRLSCAASGFTFDDYAMSWVRQVPGKGLEWVSSINWSGTHTDYADSVKGRFTISRNNANNTLYLQMNSLKSEDTAVYYCAKNWRDAGTTWFEKSGSAGQGTQVTVSSLEGQPKANPTVTLFPPSSEELQANKATLVCLISDFYPGAVTVAWKADGSPVKAGVETTKPSKQSNNKYAASSYLSLTPEQWKSHRSYSCQVTHEGSTVEKTVAPTECSGRADCGFTSESYQQGVLSATILYEILLGKATLYAVLVSALVLMAMVKRKDSRGRAKRSGSGATNFSLLKQAGDVEENPGPTSMDWIWRILFLVGAATGAHSGPVDNKFNKERYSAYYEIWQLPNLNVRQKAAFIGSLQDDPSQSANLLAEAKKLNDAQAPKTRASTKGPSVFPLAPSSKSTSGGTAALGCLVKDYFPEPVTVSWNSGALTSGVHTFPAVLQSSGLYSLSSVVTVPSSSLGTQTYICNVNHKPSNTKVDKRVEPKSCIPEDTFFPSPESSCDVKLVEKSFETDTNLNFQNLSVIGFRILLLKVAGFNLLMTLRLWSSRAKRSGSGVKQTLNFDLLKLAGDVESNPGPSRGHMTEYKPTVRLATRDDVPRAVRTLAAAFADYPATRHTVDPDRHIERVTELQELFLTRVGLDIGKVWVADDGAAVAVWTTPESVEAGAVFAEIGPRMAELSGSRLAAQQQMEGLLAPHRPKEPAWFLATVGVSPDHQGKGLGSAVVLPGVEAAERAGVPAFLETSAPRNLPFYERLGFTVTADVEVPEGPRTWCMTRKPGA

SEQ ID NO: 16568 - protein, 711 aa, Artificial Sequence
  Synthetic Polypeptide
MALPVTALLLPLALLLHAARPEVQLVESGGGSVQTGGSLRLTCAASGRTSRSYGMGWFRQAPGKEREFVSGISWRGDSTGYADSVKGRFTISRDNAKNTVDLQMNSLKPEDTAIYYCAAAAGSAWYGTLYEYDYWGQGTLVTVSSGGGSGGGSEVQLVESGGSLVQPGGSLRLSCAASGFTFDDYAMSWVRQVPGKGLEWVSSINWSGTHTDYADSVKGRFTISRNNANNTLYLQMNSLKSEDTAVYYCAKNWRDAGTTWFEKSGSAGQGTQVTVSSLEGQPKANPTVTLFPPSSEELQANKATLVCLISDFYPGAVTVAWKADGSPVKAGVETTKPSKQSNNKYAASSYLSLTPEQWKSHRSYSCQVTHEGSTVEKTVAPTECSGRADCGFTSESYQQGVLSATILYEILLGKATLYAVLVSALVLMAMVKRKDSRGRAKRSGSGATNFSLLKQAGDVEENPGPTSMDWIWRILFLVGAATGAHSGPVDNKFNKERYSAYYEIWQLPNLNVRQKAAFIGSLQDDPSQSANLLAEAKKLNDAQAPKTRASTKGPSVFPLAPSSKSTSGGTAALGCLVKDYFPEPVTVSWNSGALTSGVHTFPAVLQSSGLYSLSSVVTVPSSSLGTQTYICNVNHKPSNTKVDKRVEPKSCIPEDTFFPSPESSCDVKLVEKSFETDTNLNFQNLSVIGFRILLLKVAGFNLLMTLRLWSS

SEQ ID NO: 16569 - protein, 739 aa, Artificial Sequence
  Synthetic Polypeptide
MALPVTALLLPLALLLHAARPEVQLVESGGGSVQTGGSLRLTCAASGRTSRSYGMGWFRQAPGKEREFVSGISWRGDSTGYADSVKGRFTISRDNAKNTVDLQMNSLKPEDTAIYYCAAAAGSAWYGTLYEYDYWGQGTLVTVSSGGGSGGGSEVQLVESGGSLVQPGGSLRLSCAASGFTFDDYAMSWVRQVPGKGLEWVSSINWSGTHTDYADSVKGRFTISRNNANNTLYLQMNSLKSEDTAVYYCAKNWRDAGTTWFEKSGSAGQGTQVTVSSLEGSGRADCGFTSESYQQGVLSATILYEILLGKATLYAVLVSALVLMAMVKRKDSRGRAKRSGSGATNFSLLKQAGDVEENPGPTSMDWIWRILFLVGAATGAHSGPVDNKFNKERYSAYYEIWQLPNLNVRQKAAFIGSLQDDPSQSANLLAEAKKLNDAQAPKTRGSIPEDTFFPSPESSCDVKLVEKSFETDTNLNFQNLSVIGFRILLLKVAGFNLLMTLRLWSSRAKRSGSGVKQTLNFDLLKLAGDVESNPGPSRGHMTEYKPTVRLATRDDVPRAVRTLAAAFADYPATRHTVDPDRHIERVTELQELFLTRVGLDIGKVWVADDGAAVAVWTTPESVEAGAVFAEIGPRMAELSGSRLAAQQQMEGLLAPHRPKEPAWFLATVGVSPDHQGKGLGSAVVLPGVEAAERAGVPAFLETSAPRNLPFYERLGFTVTADVEVPEGPRTWCMTRKPGA

SEQ ID NO: 16570 - protein, 506 aa, Artificial Sequence
  Synthetic Polypeptide
MALPVTALLLPLALLLHAARPEVQLVESGGGSVQTGGSLRLTCAASGRTSRSYGMGWFRQAPGKEREFVSGISWRGDSTGYADSVKGRFTISRDNAKNTVDLQMNSLKPEDTAIYYCAAAAGSAWYGTLYEYDYWGQGTLVTVSSGGGSGGGSEVQLVESGGSLVQPGGSLRLSCAASGFTFDDYAMSWVRQVPGKGLEWVSSINWSGTHTDYADSVKGRFTISRNNANNTLYLQMNSLKSEDTAVYYCAKNWRDAGTTWFEKSGSAGQGTQVTVSSLEGSGRADCGFTSESYQQGVLSATILYEILLGKATLYAVLVSALVLMAMVKRKDSRGRAKRSGSGATNFSLLKQAGDVEENPGPTSMDWIWRILFLVGAATGAHSGPVDNKFNKERYSAYYEIWQLPNLNVRQKAAFIGSLQDDPSQSANLLAEAKKLNDAQAPKTRGSIPEDTFFPSPESSCDVKLVEKSFETDTNLNFQNLSVIGFRILLLKVAGFNLLMTLRLWSS

SEQ ID NO: 16571 - protein, 748 aa, Artificial Sequence
  Synthetic Polypeptide
MALPVTALLLPLALLLHAARPEVQLVESGGGSVQTGGSLRLTCAASGRTSRSYGMGWFRQAPGKEREFVSGISWRGDSTGYADSVKGRFTISRDNAKNTVDLQMNSLKPEDTAIYYCAAAAGSAWYGTLYEYDYWGQGTLVTVSSGGGSGGGSEVQLVESGGSLVQPGGSLRLSCAASGFTFDDYAMSWVRQVPGKGLEWVSSINWSGTHTDYADSVKGRFTISRNNANNTLYLQMNSLKSEDTAVYYCAKNWRDAGTTWFEKSGSAGQGTQVTVSSLEDKTHTCPPCPAGRADCGFTSESYQQGVLSATILYEILLGKATLYAVLVSALVLMAMVKRKDSRGRAKRSGSGATNFSLLKQAGDVEENPGPTSMDWIWRILFLVGAATGAHSGPVDNKFNKERYSAYYEIWQLPNLNVRQKAAFIGSLQDDPSQSANLLAEAKKLNDAQAPKTRGSIPEDTFFPSPESSCDVKLVEKSFETDTNLNFQNLSVIGFRILLLKVAGFNLLMTLRLWSSRAKRSGSGVKQTLNFDLLKLAGDVESNPGPSRGHMTEYKPTVRLATRDDVPRAVRTLAAAFADYPATRHTVDPDRHIERVTELQELFLTRVGLDIGKVWVADDGAAVAVWTTPESVEAGAVFAEIGPRMAELSGSRLAAQQQMEGLLAPHRPKEPAWFLATVGVSPDHQGKGLGSAVVLPGVEAAERAGVPAFLETSAPRNLPFYERLGFTVTADVEVPEGPRTWCMTRKPGA

SEQ ID NO: 16572 - protein, 748 aa, Artificial Sequence
  Synthetic Polypeptide
MALPVTALLLPLALLLHAARPEVQLVESGGGSVQTGGSLRLTCAASGRTSRSYGMGWFRQAPGKEREFVSGISWRGDSTGYADSVKGRFTISRDNAKNTVDLQMNSLKPEDTAIYYCAAAAGSAWYGTLYEYDYWGQGTLVTVSSGGGSGGGSEVQLVESGGSLVQPGGSLRLSCAASGFTFDDYAMSWVRQVPGKGLEWVSSINWSGTHTDYADSVKGRFTISRNNANNTLYLQMNSLKSEDTAVYYCAKNWRDAGTTWFEKSGSAGQGTQVTVSSLEGSGRADCGFTSESYQQGVLSATILYEILLGKATLYAVLVSALVLMAMVKRKDSRGRAKRSGSGATNFSLLKQAGDVEENPGPTSMDWIWRILFLVGAATGAHSGPVDNKFNKERYSAYYEIWQLPNLNVRQKAAFIGSLQDDPSQSANLLAEAKKLNDAQAPKTRDKTHTCPPCPAIPEDTFFPSPESSCDVKLVEKSFETDTNLNFQNLSVIGFRILLLKVAGFNLLMTLRLWSSRAKRSGSGVKQTLNFDLLKLAGDVESNPGPSRGHMTEYKPTVRLATRDDVPRAVRTLAAAFADYPATRHTVDPDRHIERVTELQELFLTRVGLDIGKVWVADDGAAVAVWTTPESVEAGAVFAEIGPRMAELSGSRLAAQQQMEGLLAPHRPKEPAWFLATVGVSPDHQGKGLGSAVVLPGVEAAERAGVPAFLETSAPRNLPFYERLGFTVTADVEVPEGPRTWCMTRKPGA

SEQ ID NO: 16573 - protein, 757 aa, Artificial Sequence
  Synthetic Polypeptide
MALPVTALLLPLALLLHAARPEVQLVESGGGSVQTGGSLRLTCAASGRTSRSYGMGWFRQAPGKEREFVSGISWRGDSTGYADSVKGRFTISRDNAKNTVDLQMNSLKPEDTAIYYCAAAAGSAWYGTLYEYDYWGQGTLVTVSSGGGSGGGSEVQLVESGGSLVQPGGSLRLSCAASGFTFDDYAMSWVRQVPGKGLEWVSSINWSGTHTDYADSVKGRFTISRNNANNTLYLQMNSLKSEDTAVYYCAKNWRDAGTTWFEKSGSAGQGTQVTVSSLEDKTHTCPPCPAGRADCGFTSESYQQGVLSATILYEILLGKATLYAVLVSALVLMAMVKRKDSRGRAKRSGSGATNFSLLKQAGDVEENPGPTSMDWIWRILFLVGAATGAHSGPVDNKFNKERYSAYYEIWQLPNLNVRQKAAFIGSLQDDPSQSANLLAEAKKLNDAQAPKTRDKTHTCPPCPAIPEDTFFPSPESSCDVKLVEKSFETDTNLNFQNLSVIGFRILLLKVAGFNLLMTLRLWSSRAKRSGSGVKQTLNFDLLKLAGDVESNPGPSRGHMTEYKPTVRLATRDDVPRAVRTLAAAFADYPATRHTVDPDRHIERVTELQELFLTRVGLDIGKVWVADDGAAVAVWTTPESVEAGAVFAEIGPRMAELSGSRLAAQQQMEGLLAPHRPKEPAWFLATVGVSPDHQGKGLGSAVVLPGVEAAERAGVPAFLETSAPRNLPFYERLGFTVTADVEVPEGPRTWCMTRKPGA

SEQ ID NO: 16574 - protein, 524 aa, Artificial Sequence
  Synthetic Polypeptide
MALPVTALLLPLALLLHAARPEVQLVESGGGSVQTGGSLRLTCAASGRTSRSYGMGWFRQAPGKEREFVSGISWRGDSTGYADSVKGRFTISRDNAKNTVDLQMNSLKPEDTAIYYCAAAAGSAWYGTLYEYDYWGQGTLVTVSSGGGSGGGSEVQLVESGGSLVQPGGSLRLSCAASGFTFDDYAMSWVRQVPGKGLEWVSSINWSGTHTDYADSVKGRFTISRNNANNTLYLQMNSLKSEDTAVYYCAKNWRDAGTTWFEKSGSAGQGTQVTVSSLEDKTHTCPPCPAGRADCGFTSESYQQGVLSATILYEILLGKATLYAVLVSALVLMAMVKRKDSRGRAKRSGSGATNFSLLKQAGDVEENPGPTSMDWIWRILFLVGAATGAHSGPVDNKFNKERYSAYYEIWQLPNLNVRQKAAFIGSLQDDPSQSANLLAEAKKLNDAQAPKTRDKTHTCPPCPAIPEDTFFPSPESSCDVKLVEKSFETDTNLNFQNLSVIGFRILLLKVAGFNLLMTLRLWSS

SEQ ID NO: 16575 - protein, 515 aa, Artificial Sequence
  Synthetic Polypeptide
MALPVTALLLPLALLLHAARPEVQLVESGGGSVQTGGSLRLTCAASGRTSRSYGMGWFRQAPGKEREFVSGISWRGDSTGYADSVKGRFTISRDNAKNTVDLQMNSLKPEDTAIYYCAAAAGSAWYGTLYEYDYWGQGTLVTVSSGGGSGGGSEVQLVESGGSLVQPGGSLRLSCAASGFTFDDYAMSWVRQVPGKGLEWVSSINWSGTHTDYADSVKGRFTISRNNANNTLYLQMNSLKSEDTAVYYCAKNWRDAGTTWFEKSGSAGQGTQVTVSSLEGSGRADCGFTSESYQQGVLSATILYEILLGKATLYAVLVSALVLMAMVKRKDSRGRAKRSGSGATNFSLLKQAGDVEENPGPTSMDWIWRILFLVGAATGAHSGPVDNKFNKERYSAYYEIWQLPNLNVRQKAAFIGSLQDDPSQSANLLAEAKKLNDAQAPKTRDKTHTCPPCPAIPEDTFFPSPESSCDVKLVEKSFETDTNLNFQNLSVIGFRILLLKVAGFNLLMTLRLWSS

SEQ ID NO: 16576 - protein, 966 aa, Artificial Sequence
  Synthetic Polypeptide
MALPVTALLLPLALLLHAARPEVQLVESGGGSVQTGGSLRLTCAASGRTSRSYGMGWFRQAPGKEREFVSGISWRGDSTGYADSVKGRFTISRDNAKNTVDLQMNSLKPEDTAIYYCAAAAGSAWYGTLYEYDYWGQGTLVTVSSGGGSGGGSEVQLVESGGSLVQPGGSLRLSCAASGFTFDDYAMSWVRQVPGKGLEWVSSINWSGTHTDYADSVKGRFTISRNNANNTLYLQMNSLKSEDTAVYYCAKNWRDAGTTWFEKSGSAGQGTQVTVSSLEGQPKANPTVTLFPPSSEELQANKATLVCLISDFYPGAVTVAWKADGSPVKAGVETTKPSKQSNNKYAASSYLSLTPEQWKSHRSYSCQVTHEGSTVEKTVAPTECSPIKTDVITMDPKDNCSKDANDTLLLQLTNTSAYYMYLLLLLKSVVYFAIITCCLLRRTAFCCNGEKSRAKRSGSGATNFSLLKQAGDVEENPGPTSMDWIWRILFLVGAATGAHSGPVDNKFNKERYSAYYEIWQLPNLNVRQKAAFIGSLQDDPSQSANLLAEAKKLNDAQAPKTRASTKGPSVFPLAPSSKSTSGGTAALGCLVKDYFPEPVTVSWNSGALTSGVHTFPAVLQSSGLYSLSSVVTVPSSSLGTQTYICNVNHKPSNTKVDKRVEPKSCEVKTDSTDHVKPKETENTKQPSKSCHKPKAIVHTEKVNMMSLTVLGLRMLFAKTVAVNFLLTAKLFFLRAKRSGSGVKQTLNFDLLKLAGDVESNPGPSRGHMTEYKPTVRLATRDDVPRAVRTLAAAFADYPATRHTVDPDRHIERVTELQELFLTRVGLDIGKVWVADDGAAVAVWTTPESVEAGAVFAEIGPRMAELSGSRLAAQQQMEGLLAPHRPKEPAWFLATVGVSPDHQGKGLGSAVVLPGVEAAERAGVPAFLETSAPRNLPFYERLGFTVTADVEVPEGPRTWCMTRKPGA

SEQ ID NO: 16577 - protein, 733 aa, Artificial Sequence
  Synthetic Polypeptide
MALPVTALLLPLALLLHAARPEVQLVESGGGSVQTGGSLRLTCAASGRTSRSYGMGWFRQAPGKEREFVSGISWRGDSTGYADSVKGRFTISRDNAKNTVDLQMNSLKPEDTAIYYCAAAAGSAWYGTLYEYDYWGQGTLVTVSSGGGSGGGSEVQLVESGGSLVQPGGSLRLSCAASGFTFDDYAMSWVRQVPGKGLEWVSSINWSGTHTDYADSVKGRFTISRNNANNTLYLQMNSLKSEDTAVYYCAKNWRDAGTTWFEKSGSAGQGTQVTVSSLEGQPKANPTVTLFPPSSEELQANKATLVCLISDFYPGAVTVAWKADGSPVKAGVETTKPSKQSNNKYAASSYLSLTPEQWKSHRSYSCQVTHEGSTVEKTVAPTECSPIKTDVITMDPKDNCSKDANDTLLLQLTNTSAYYMYLLLLLKSVVYFAIITCCLLRRTAFCCNGEKSRAKRSGSGATNFSLLKQAGDVEENPGPTSMDWIWRILFLVGAATGAHSGPVDNKFNKERYSAYYEIWQLPNLNVRQKAAFIGSLQDDPSQSANLLAEAKKLNDAQAPKTRASTKGPSVFPLAPSSKSTSGGTAALGCLVKDYFPEPVTVSWNSGALTSGVHTFPAVLQSSGLYSLSSVVTVPSSSLGTQTYICNVNHKPSNTKVDKRVEPKSCEVKTDSTDHVKPKETENTKQPSKSCHKPKAIVHTEKVNMMSLTVLGLRMLFAKTVAVNFLLTAKLFFL

SEQ ID NO: 16578 - protein, 761 aa, Artificial Sequence
  Synthetic Polypeptide
MALPVTALLLPLALLLHAARPEVQLVESGGGSVQTGGSLRLTCAASGRTSRSYGMGWFRQAPGKEREFVSGISWRGDSTGYADSVKGRFTISRDNAKNTVDLQMNSLKPEDTAIYYCAAAAGSAWYGTLYEYDYWGQGTLVTVSSGGGSGGGSEVQLVESGGSLVQPGGSLRLSCAASGFTFDDYAMSWVRQVPGKGLEWVSSINWSGTHTDYADSVKGRFTISRNNANNTLYLQMNSLKSEDTAVYYCAKNWRDAGTTWFEKSGSAGQGTQVTVSSLEGSPIKTDVITMDPKDNCSKDANDTLLLQLTNTSAYYMYLLLLLKSVVYFAIITCCLLRRTAFCCNGEKSRAKRSGSGATNFSLLKQAGDVEENPGPTSMDWIWRILFLVGAATGAHSGPVDNKFNKERYSAYYEIWQLPNLNVRQKAAFIGSLQDDPSQSANLLAEAKKLNDAQAPKTRGSEVKTDSTDHVKPKETENTKQPSKSCHKPKAIVHTEKVNMMSLTVLGLRMLFAKTVAVNFLLTAKLFFLRAKRSGSGVKQTLNFDLLKLAGDVESNPGPSRGHMTEYKPTVRLATRDDVPRAVRTLAAAFADYPATRHTVDPDRHIERVTELQELFLTRVGLDIGKVWVADDGAAVAVWTTPESVEAGAVFAEIGPRMAELSGSRLAAQQQMEGLLAPHRPKEPAWFLATVGVSPDHQGKGLGSAVVLPGVEAAERAGVPAFLETSAPRNLPFYERLGFTVTADVEVPEGPRTWCMTRKPGA

SEQ ID NO: 16579 - protein, 528 aa, Artificial Sequence
  Synthetic Polypeptide
MALPVTALLLPLALLLHAARPEVQLVESGGGSVQTGGSLRLTCAASGRTSRSYGMGWFRQAPGKEREFVSGISWRGDSTGYADSVKGRFTISRDNAKNTVDLQMNSLKPEDTAIYYCAAAAGSAWYGTLYEYDYWGQGTLVTVSSGGGSGGGSEVQLVESGGSLVQPGGSLRLSCAASGFTFDDYAMSWVRQVPGKGLEWVSSINWSGTHTDYADSVKGRFTISRNNANNTLYLQMNSLKSEDTAVYYCAKNWRDAGTTWFEKSGSAGQGTQVTVSSLEGSPIKTDVITMDPKDNCSKDANDTLLLQLTNTSAYYMYLLLLLKSVVYFAIITCCLLRRTAFCCNGEKSRAKRSGSGATNFSLLKQAGDVEENPGPTSMDWIWRILFLVGAATGAHSGPVDNKFNKERYSAYYEIWQLPNLNVRQKAAFIGSLQDDPSQSANLLAEAKKLNDAQAPKTRGSEVKTDSTDHVKPKETENTKQPSKSCHKPKAIVHTEKVNMMSLTVLGLRMLFAKTVAVNFLLTAKLFFL

SEQ ID NO: 16580 - protein, 770 aa, Artificial Sequence
  Synthetic Polypeptide
MALPVTALLLPLALLLHAARPEVQLVESGGGSVQTGGSLRLTCAASGRTSRSYGMGWFRQAPGKEREFVSGISWRGDSTGYADSVKGRFTISRDNAKNTVDLQMNSLKPEDTAIYYCAAAAGSAWYGTLYEYDYWGQGTLVTVSSGGGSGGGSEVQLVESGGSLVQPGGSLRLSCAASGFTFDDYAMSWVRQVPGKGLEWVSSINWSGTHTDYADSVKGRFTISRNNANNTLYLQMNSLKSEDTAVYYCAKNWRDAGTTWFEKSGSAGQGTQVTVSSLEDKTHTCPPCPAPIKTDVITMDPKDNCSKDANDTLLLQLTNTSAYYMYLLLLLKSVVYFAIITCCLLRRTAFCCNGEKSRAKRSGSGATNFSLLKQAGDVEENPGPTSMDWIWRILFLVGAATGAHSGPVDNKFNKERYSAYYEIWQLPNLNVRQKAAFIGSLQDDPSQSANLLAEAKKLNDAQAPKTRGSEVKTDSTDHVKPKETENTKQPSKSCHKPKAIVHTEKVNMMSLTVLGLRMLFAKTVAVNFLLTAKLFFLRAKRSGSGVKQTLNFDLLKLAGDVESNPGPSRGHMTEYKPTVRLATRDDVPRAVRTLAAAFADYPATRHTVDPDRHIERVTELQELFLTRVGLDIGKVWVADDGAAVAVWTTPESVEAGAVFAEIGPRMAELSGSRLAAQQQMEGLLAPHRPKEPAWFLATVGVSPDHQGKGLGSAVVLPGVEAAERAGVPAFLETSAPRNLPFYERLGFTVTADVEVPEGPRTWCMTRKPGA

SEQ ID NO: 16581 - protein, 770 aa, Artificial Sequence
  Synthetic Polypeptide
MALPVTALLLPLALLLHAARPEVQLVESGGGSVQTGGSLRLTCAASGRTSRSYGMGWFRQAPGKEREFVSGISWRGDSTGYADSVKGRFTISRDNAKNTVDLQMNSLKPEDTAIYYCAAAAGSAWYGTLYEYDYWGQGTLVTVSSGGGSGGGSEVQLVESGGSLVQPGGSLRLSCAASGFTFDDYAMSWVRQVPGKGLEWVSSINWSGTHTDYADSVKGRFTISRNNANNTLYLQMNSLKSEDTAVYYCAKNWRDAGTTWFEKSGSAGQGTQVTVSSLEGSPIKTDVITMDPKDNCSKDANDTLLLQLTNTSAYYMYLLLLLKSVVYFAIITCCLLRRTAFCCNGEKSRAKRSGSGATNFSLLKQAGDVEENPGPTSMDWIWRILFLVGAATGAHSGPVDNKFNKERYSAYYEIWQLPNLNVRQKAAFIGSLQDDPSQSANLLAEAKKLNDAQAPKTRDKTHTCPPCPAEVKTDSTDHVKPKETENTKQPSKSCHKPKAIVHTEKVNMMSLTVLGLRMLFAKTVAVNFLLTAKLFFLRAKRSGSGVKQTLNFDLLKLAGDVESNPGPSRGHMTEYKPTVRLATRDDVPRAVRTLAAAFADYPATRHTVDPDRHIERVTELQELFLTRVGLDIGKVWVADDGAAVAVWTTPESVEAGAVFAEIGPRMAELSGSRLAAQQQMEGLLAPHRPKEPAWFLATVGVSPDHQGKGLGSAVVLPGVEAAERAGVPAFLETSAPRNLPFYERLGFTVTADVEVPEGPRTWCMTRKPGA

SEQ ID NO: 16582 - protein, 779 aa, Artificial Sequence
  Synthetic Polypeptide
MALPVTALLLPLALLLHAARPEVQLVESGGGSVQTGGSLRLTCAASGRTSRSYGMGWFRQAPGKEREFVSGISWRGDSTGYADSVKGRFTISRDNAKNTVDLQMNSLKPEDTAIYYCAAAAGSAWYGTLYEYDYWGQGTLVTVSSGGGSGGGSEVQLVESGGSLVQPGGSLRLSCAASGFTFDDYAMSWVRQVPGKGLEWVSSINWSGTHTDYADSVKGRFTISRNNANNTLYLQMNSLKSEDTAVYYCAKNWRDAGTTWFEKSGSAGQGTQVTVSSLEDKTHTCPPCPAPIKTDVITMDPKDNCSKDANDTLLLQLTNTSAYYMYLLLLLKSVVYFAIITCCLLRRTAFCCNGEKSRAKRSGSGATNFSLLKQAGDVEENPGPTSMDWIWRILFLVGAATGAHSGPVDNKFNKERYSAYYEIWQLPNLNVRQKAAFIGSLQDDPSQSANLLAEAKKLNDAQAPKTRDKTHTCPPCPAEVKTDSTDHVKPKETENTKQPSKSCHKPKAIVHTEKVNMMSLTVLGLRMLFAKTVAVNFLLTAKLFFLRAKRSGSGVKQTLNFDLLKLAGDVESNPGPSRGHMTEYKPTVRLATRDDVPRAVRTLAAAFADYPATRHTVDPDRHIERVTELQELFLTRVGLDIGKVWVADDGAAVAVWTTPESVEAGAVFAEIGPRMAELSGSRLAAQQQMEGLLAPHRPKEPAWFLATVGVSPDHQGKGLGSAVVLPGVEAAERAGVPAFLETSAPRNLPFYERLGFTVTADVEVPEGPRTWCMTRKPGA

SEQ ID NO: 16583 - protein, 546 aa, Artificial Sequence
  Synthetic Polypeptide
MALPVTALLLPLALLLHAARPEVQLVESGGGSVQTGGSLRLTCAASGRTSRSYGMGWFRQAPGKEREFVSGISWRGDSTGYADSVKGRFTISRDNAKNTVDLQMNSLKPEDTAIYYCAAAAGSAWYGTLYEYDYWGQGTLVTVSSGGGSGGGSEVQLVESGGSLVQPGGSLRLSCAASGFTFDDYAMSWVRQVPGKGLEWVSSINWSGTHTDYADSVKGRFTISRNNANNTLYLQMNSLKSEDTAVYYCAKNWRDAGTTWFEKSGSAGQGTQVTVSSLEDKTHTCPPCPAPIKTDVITMDPKDNCSKDANDTLLLQLTNTSAYYMYLLLLLKSVVYFAIITCCLLRRTAFCCNGEKSRAKRSGSGATNFSLLKQAGDVEENPGPTSMDWIWRILFLVGAATGAHSGPVDNKFNKERYSAYYEIWQLPNLNVRQKAAFIGSLQDDPSQSANLLAEAKKLNDAQAPKTRDKTHTCPPCPAEVKTDSTDHVKPKETENTKQPSKSCHKPKAIVHTEKVNMMSLTVLGLRMLFAKTVAVNFLLTAKLFFL

SEQ ID NO: 16584 - protein, 537 aa, Artificial Sequence
  Synthetic Polypeptide
MALPVTALLLPLALLLHAARPEVQLVESGGGSVQTGGSLRLTCAASGRTSRSYGMGWFRQAPGKEREFVSGISWRGDSTGYADSVKGRFTISRDNAKNTVDLQMNSLKPEDTAIYYCAAAAGSAWYGTLYEYDYWGQGTLVTVSSGGGSGGGSEVQLVESGGSLVQPGGSLRLSCAASGFTFDDYAMSWVRQVPGKGLEWVSSINWSGTHTDYADSVKGRFTISRNNANNTLYLQMNSLKSEDTAVYYCAKNWRDAGTTWFEKSGSAGQGTQVTVSSLEGSPIKTDVITMDPKDNCSKDANDTLLLQLTNTSAYYMYLLLLLKSVVYFAIITCCLLRRTAFCCNGEKSRAKRSGSGATNFSLLKQAGDVEENPGPTSMDWIWRILFLVGAATGAHSGPVDNKFNKERYSAYYEIWQLPNLNVRQKAAFIGSLQDDPSQSANLLAEAKKLNDAQAPKTRDKTHTCPPCPAEVKTDSTDHVKPKETENTKQPSKSCHKPKAIVHTEKVNMMSLTVLGLRMLFAKTVAVNFLLTAKLFFL

SEQ ID NO: 16585 - protein, 753 aa, Artificial Sequence
  Synthetic Polypeptide
MALPVTALLLPLALLLHAARPEVQLVESGGGSVQTGGSLRLTCAASGRTSRSYGMGWFRQAPGKEREFVSGISWRGDSTGYADSVKGRFTISRDNAKNTVDLQMNSLKPEDTAIYYCAAAAGSAWYGTLYEYDYWGQGTLVTVSSGGGSGGGSEVQLVESGGSLVQPGGSLRLSCAASGFTFDDYAMSWVRQVPGKGLEWVSSINWSGTHTDYADSVKGRFTISRNNANNTLYLQMNSLKSEDTAVYYCAKNWRDAGTTWFEKSGSAGQGTQVTVSSLEGSMDPKDNCSKDANDTLLLQLTNTSAYYMYLLLLLKSVVYFAIITCCLLRRTAFCCNGEKSRAKRSGSGATNFSLLKQAGDVEENPGPTSMDWIWRILFLVGAATGAHSGPVDNKFNKERYSAYYEIWQLPNLNVRQKAAFIGSLQDDPSQSANLLAEAKKLNDAQAPKTRGSEVKTDSTDHVKPKETENTKQPSKSCHKPKAIVHTEKVNMMSLTVLGLRMLFAKTVAVNFLLTAKLFFLRAKRSGSGVKQTLNFDLLKLAGDVESNPGPSRGHMTEYKPTVRLATRDDVPRAVRTLAAAFADYPATRHTVDPDRHIERVTELQELFLTRVGLDIGKVWVADDGAAVAVWTTPESVEAGAVFAEIGPRMAELSGSRLAAQQQMEGLLAPHRPKEPAWFLATVGVSPDHQGKGLGSAVVLPGVEAAERAGVPAFLETSAPRNLPFYERLGFTVTADVEVPEGPRTWCMTRKPGA

SEQ ID NO: 16586 - protein, 754 aa, Artificial Sequence
  Synthetic Polypeptide
MALPVTALLLPLALLLHAARPEVQLVESGGGSVQTGGSLRLTCAASGRTSRSYGMGWFRQAPGKEREFVSGISWRGDSTGYADSVKGRFTISRDNAKNTVDLQMNSLKPEDTAIYYCAAAAGSAWYGTLYEYDYWGQGTLVTVSSGGGSGGGSEVQLVESGGSLVQPGGSLRLSCAASGFTFDDYAMSWVRQVPGKGLEWVSSINWSGTHTDYADSVKGRFTISRNNANNTLYLQMNSLKSEDTAVYYCAKNWRDAGTTWFEKSGSAGQGTQVTVSSLEGSPIKTDVITMDPKDNCSKDANDTLLLQLTNTSAYYMYLLLLLKSVVYFAIITCCLLRRTAFCCNGEKSRAKRSGSGATNFSLLKQAGDVEENPGPTSMDWIWRILFLVGAATGAHSGPVDNKFNKERYSAYYEIWQLPNLNVRQKAAFIGSLQDDPSQSANLLAEAKKLNDAQAPKTRGSDHVKPKETENTKQPSKSCHKPKAIVHTEKVNMMSLTVLGLRMLFAKTVAVNFLLTAKLFFLRAKRSGSGVKQTLNFDLLKLAGDVESNPGPSRGHMTEYKPTVRLATRDDVPRAVRTLAAAFADYPATRHTVDPDRHIERVTELQELFLTRVGLDIGKVWVADDGAAVAVWTTPESVEAGAVFAEIGPRMAELSGSRLAAQQQMEGLLAPHRPKEPAWFLATVGVSPDHQGKGLGSAVVLPGVEAAERAGVPAFLETSAPRNLPFYERLGFTVTADVEVPEGPRTWCMTRKPGA

SEQ ID NO: 16587 - protein, 438 aa, Artificial Sequence
  Synthetic Polypeptide
MALPVTALLLPLALLLHAARPEVQLVESGGGSVQTGGSLRLTCAASGRTSRSYGMGWFRQAPGKEREFVSGISWRGDSTGYADSVKGRFTISRDNAKNTVDLQMNSLKPEDTAIYYCAAAAGSAWYGTLYEYDYWGQGTLVTVSSGGGSGGGSEVQLVESGGSLVQPGGSLRLSCAASGFTFDDYAMSWVRQVPGKGLEWVSSINWSGTHTDYADSVKGRFTISRNNANNTLYLQMNSLKSEDTAVYYCAKNWRDAGTTWFEKSGSAGQGTQVTVSSLEGQPKANPTVTLFPPSSEELQANKATLVCLISDFYPGAVTVAWKADGSPVKAGVETTKPSKQSNNKYAASSYLSLTPEQWKSHRSYSCQVTHEGSTVEKTVAPTECSGRADCGFTSESYQQGVLSATILYEILLGKATLYAVLVSALVLMAMVKRKDSRG

SEQ ID NO: 16588 - protein, 452 aa, Artificial Sequence
  Synthetic Polypeptide
MALPVTALLLPLALLLHAARPEVQLVESGGGSVQTGGSLRLTCAASGRTSRSYGMGWFRQAPGKEREFVSGISWRGDSTGYADSVKGRFTISRDNAKNTVDLQMNSLKPEDTAIYYCAAAAGSAWYGTLYEYDYWGQGTLVTVSSGGGSGGGSEVQLVESGGSLVQPGGSLRLSCAASGFTFDDYAMSWVRQVPGKGLEWVSSINWSGTHTDYADSVKGRFTISRNNANNTLYLQMNSLKSEDTAVYYCAKNWRDAGTTWFEKSGSAGQGTQVTVSSLEGQPKANPTVTLFPPSSEELQANKATLVCLISDFYPGAVTVAWKADGSPVKAGVETTKPSKQSNNKYAASSYLSLTPEQWKSHRSYSCQVTHEGSTVEKTVAPTECSPIKTDVITMDPKDNCSKDANDTLLLQLTNTSAYYMYLLLLLKSVVYFAIITCCLLRRTAFCCNGEKS

SEQ ID NO: 16589 - protein, 707 aa, Artificial Sequence
  Synthetic Polypeptide
MDWIWRILFLVGAATGAHSQLQLQESGPGLVKPSETLSLTCTVSGGSISSGDYYWGWIRQPPGKGLEWIGHIYYSGATYYNPSLKSRVTISVDTSRNQFSLKLSSVTAADTAVYYCTRDDSSNWRSRGQGTLVTVSSSGGGGSGGGGSVDNKFNKERYSAYYEIWQLPNLNVRQKAAFIGSLQDDPSQSANLLAEAKKLNDAQAPKGSGGGGSGGGGSGGGGSFEQVQLQQPGAELVKPGASVKMSCKASGYAFSSYWINWMKQKPGQGLEWIGQIYPGDGDTNYNGKFKGRATLTADTSSSTAYMQLSSLTSEDSAVYFCARSITTVVGCAMDYWGQGTSVTVSSGGGGSGGGGSGGGGSDIQMTQSPSSLSASVGDRVTITCKASDHINNWLAWYQQKPGQAPKLLIYGATTLETGVPSRFSGSGSGTDYTLTISSLQPEDFATYYCQQSWNTPWTFGQGTKLEIKRTREQKLISEEDLAKPTTTPAPRPPTPAPTIASQPLSLRPEACRPAAGGAVHTRGLDFACDIYIWAPLAGTCGVLLLSLVITLYCKRGRKKLLYIFKQPFMRPVQTTQEEDGCSCRFPEEEEGGCELRVKFSRSADAPAYQQGQNQLYNELNLGRREEYDVLDKRRGRDPEMGGKPRRKNPQEGLYNELQKDKMAEAYSEIGMKGERRRGKGHDGLYQGLSTATKDTYDALHMQALPPR

SEQ ID NO: 16590 - protein, 1060 aa, Artificial Sequence
  Synthetic Polypeptide
MALPVTALLLPLALLLHAARPDIQMTQSPSSLSASVGDRVTITCKASDHINNWLAWYQQKPGQAPKLLIYGATTLETGVPSRFSGSGSGTDYTLTISSLQPEDFATYYCQQSWNTPWTFGQGTKLEIKRLEIQNPDPAVYQLRDSKSSDKSVCLFTDFDSQTNVSQSKDSDVYITDKCVLDMRSMDFKSNSAVAWSNKSDFACANAFNNSIIPEDTFFPSSDVPCDVKLVEKSFETDTNLNFQNLSVIGFRILLLKVAGFNLLMTLRLWSSRAKRSGSGVKQTLNFDLLKLAGDVESNPGPTSMDWIWRILFLVGAATGAHSQLQLQESGPGLVKPSETLSLTCTVSGGSISSGDYYWGWIRQPPGKGLEWIGHIYYSGATYYNPSLKSRVTISVDTSRNQFSLKLSSVTAADTAVYYCTRDDSSNWRSRGQGTLVTVSSSGGGGSGGGGSVDNKFNKERYSAYYEIWQLPNLNVRQKAAFIGSLQDDPSQSANLLAEAKKLNDAQAPKGSGGGGSGGGGSGGGGSFEQVQLQQPGAELVKPGASVKMSCKASGYAFSSYWINWMKQKPGQGLEWIGQIYPGDGDTNYNGKFKGRATLTADTSSSTAYMQLSSLTSEDSAVYFCARSITTVVGCAMDYWGQGTSVTVSSTREDLKNVFPPEVAVFEPSKAEIAHTQKATLVCLATGFYPDHVELSWWVNGKEVHSGVCTDPQPLKEQPALNDSRYCLSSRLRVSATFWQNPRNHFRCQVQFYGLSENDEWTQDRAKPVTQIVSAEAWGRADCGITSASYHQGVLSATILYEILLGKATLYAVLVSALVLMAMVKRKDSRGRAKRSGSGATNFSLLKQAGDVEENPGPSRGHMTEYKPTVRLATRDDVPRAVRTLAAAFADYPATRHTVDPDRHIERVTELQELFLTRVGLDIGKVWVADDGAAVAVWTTPESVEAGAVFAEIGPRMAELSGSRLAAQQQMEGLLAPHRPKEPAWFLATVGVSPDHQGKGLGSAVVLPGVEAAERAGVPAFLETSAPRNLPFYERLGFTVTADVEVPEGPRTWCMTRKPGA

SEQ ID NO: 16591 - protein, 1059 aa, Artificial Sequence
  Synthetic Polypeptide
MALPVTALLLPLALLLHAARPDIQMTQSPSSLSASVGDRVTITCKASDHINNWLAWYQQKPGQAPKLLIYGATTLETGVPSRFSGSGSGTDYTLTISSLQPEDFATYYCQQSWNTPWTFGQGTKLEIKRLEDLKNVFPPEVAVFEPSKAEIAHTQKATLVCLATGFYPDHVELSWWVNGKEVHSGVCTDPQPLKEQPALNDSRYCLSSRLRVSATFWQNPRNHFRCQVQFYGLSENDEWTQDRAKPVTQIVSAEAWGRADCGITSASYHQGVLSATILYEILLGKATLYAVLVSALVLMAMVKRKDSRGRAKRSGSGATNFSLLKQAGDVEENPGPTSMDWIWRILFLVGAATGAHSQLQLQESGPGLVKPSETLSLTCTVSGGSISSGDYYWGWIRQPPGKGLEWIGHIYYSGATYYNPSLKSRVTISVDTSRNQFSLKLSSVTAADTAVYYCTRDDSSNWRSRGQGTLVTVSSSGGGGSGGGGSVDNKFNKERYSAYYEIWQLPNLNVRQKAAFIGSLQDDPSQSANLLAEAKKLNDAQAPKGSGGGGSGGGGSGGGGSFEQVQLQQPGAELVKPGASVKMSCKASGYAFSSYWINWMKQKPGQGLEWIGQIYPGDGDTNYNGKFKGRATLTADTSSSTAYMQLSSLTSEDSAVYFCARSITTVVGCAMDYWGQGTSVTVSSTRIQNPDPAVYQLRDSKSSDKSVCLFTDFDSQTNVSQSKDSDVYITDKCVLDMRSMDFKSNSAVAWSNKSDFACANAFNNSIIPEDTFFPSSDVPCDVKLVEKSFETDTNLNFQNLSVIGFRILLLKVAGFNLLMTLRLWSSRAKRSGSGVKQTLNFDLLKLAGDVESNPGPSRGHMTEYKPTVRLATRDDVPRAVRTLAAAFADYPATRHTVDPDRHIERVTELQELFLTRVGLDIGKVWVADDGAAVAVWTTPESVEAGAVFAEIGPRMAELSGSRLAAQQQMEGLLAPHRPKEPAWFLATVGVSPDHQGKGLGSAVVLPGVEAAERAGVPAFLETSAPRNLPFYERLGFTVTADVEVPEGPRTWCMTRKPGA

SEQ ID NO: 16592 - protein, 1059 aa, Artificial Sequence
  Synthetic Polypeptide
MALPVTALLLPLALLLHAARPDIQMTQSPSSLSASVGDRVTITCKASDHINNWLAWYQQKPGQAPKLLIYGATTLETGVPSRFSGSGSGTDYTLTISSLQPEDFATYYCQQSWNTPWTFGQGTKLEIKRLEDLKNVFPPEVAVFEPSEAEISHTQKATLVCLATGFYPDHVELSWWVNGKEVHSGVCTDPQPLKEQPALNDSRYCLSSRLRVSATFWQNPRNHFRCQVQFYGLSENDEWTQDRAKPVTQIVSAEAWGRADCGFTSESYQQGVLSATILYEILLGKATLYAVLVSALVLMAMVKRKDSRGRAKRSGSGATNFSLLKQAGDVEENPGPTSMDWIWRILFLVGAATGAHSQLQLQESGPGLVKPSETLSLTCTVSGGSISSGDYYWGWIRQPPGKGLEWIGHIYYSGATYYNPSLKSRVTISVDTSRNQFSLKLSSVTAADTAVYYCTRDDSSNWRSRGQGTLVTVSSSGGGGSGGGGSVDNKFNKERYSAYYEIWQLPNLNVRQKAAFIGSLQDDPSQSANLLAEAKKLNDAQAPKGSGGGGSGGGGSGGGGSFEQVQLQQPGAELVKPGASVKMSCKASGYAFSSYWINWMKQKPGQGLEWIGQIYPGDGDTNYNGKFKGRATLTADTSSSTAYMQLSSLTSEDSAVYFCARSITTVVGCAMDYWGQGTSVTVSSTRIQNPDPAVYQLRDSKSSDKSVCLFTDFDSQTNVSQSKDSDVYITDKCVLDMRSMDFKSNSAVAWSNKSDFACANAFNNSIIPEDTFFPSPESSCDVKLVEKSFETDTNLNFQNLSVIGFRILLLKVAGFNLLMTLRLWSSRAKRSGSGVKQTLNFDLLKLAGDVESNPGPSRGHMTEYKPTVRLATRDDVPRAVRTLAAAFADYPATRHTVDPDRHIERVTELQELFLTRVGLDIGKVWVADDGAAVAVWTTPESVEAGAVFAEIGPRMAELSGSRLAAQQQMEGLLAPHRPKEPAWFLATVGVSPDHQGKGLGSAVVLPGVEAAERAGVPAFLETSAPRNLPFYERLGFTVTADVEVPEGPRTWCMTRKPGA

SEQ ID NO: 16593 - protein, 826 aa, Artificial Sequence
  Synthetic Polypeptide
MALPVTALLLPLALLLHAARPDIQMTQSPSSLSASVGDRVTITCKASDHINNWLAWYQQKPGQAPKLLIYGATTLETGVPSRFSGSGSGTDYTLTISSLQPEDFATYYCQQSWNTPWTFGQGTKLEIKRLEDLKNVFPPEVAVFEPSEAEISHTQKATLVCLATGFYPDHVELSWWVNGKEVHSGVCTDPQPLKEQPALNDSRYCLSSRLRVSATFWQNPRNHFRCQVQFYGLSENDEWTQDRAKPVTQIVSAEAWGRADCGFTSESYQQGVLSATILYEILLGKATLYAVLVSALVLMAMVKRKDSRGRAKRSGSGATNFSLLKQAGDVEENPGPTSMDWIWRILFLVGAATGAHSQLQLQESGPGLVKPSETLSLTCTVSGGSISSGDYYWGWIRQPPGKGLEWIGHIYYSGATYYNPSLKSRVTISVDTSRNQFSLKLSSVTAADTAVYYCTRDDSSNWRSRGQGTLVTVSSSGGGGSGGGGSVDNKFNKERYSAYYEIWQLPNLNVRQKAAFIGSLQDDPSQSANLLAEAKKLNDAQAPKGSGGGGSGGGGSGGGGSFEQVQLQQPGAELVKPGASVKMSCKASGYAFSSYWINWMKQKPGQGLEWIGQIYPGDGDTNYNGKFKGRATLTADTSSSTAYMQLSSLTSEDSAVYFCARSITTVVGCAMDYWGQGTSVTVSSTRIQNPDPAVYQLRDSKSSDKSVCLFTDFDSQTNVSQSKDSDVYITDKCVLDMRSMDFKSNSAVAWSNKSDFACANAFNNSIIPEDTFFPSPESSCDVKLVEKSFETDTNLNFQNLSVIGFRILLLKVAGFNLLMTLRLWSS

SEQ ID NO: 16594 - protein, 1051 aa, Artificial Sequence
  Synthetic Polypeptide
MALPVTALLLPLALLLHAARPDIQMTQSPSSLSASVGDRVTITCKASDHINNWLAWYQQKPGQAPKLLIYGATTLETGVPSRFSGSGSGTDYTLTISSLQPEDFATYYCQQSWNTPWTFGQGTKLEIKRLEDLKNVFPPEVAVFEPSEAEISHTQKATLVCLATGFYPDHVELSWWVNGKEVHSGVCTDPQPLKEQPALNDSRYCLSSRLRVSATFWQNPRNHFRCQVQFYGLSENDEWTQDRAKPVTQIVSAEAWGRADCGFTSESYQQGVLSATILYEILLGKATLYAVLVSALVLMAMVKRKDSRGRAKRSGSGATNFSLLKQAGDVEENPGPTSMDWIWRILFLVGAATGAHSQLQLQESGPGLVKPSETLSLTCTVSGGSISSGDYYWGWIRQPPGKGLEWIGHIYYSGATYYNPSLKSRVTISVDTSRNQFSLKLSSVTAADTAVYYCTRDDSSNWRSRGQGTLVTVSSSGGGGSGGGGSVDNKFNKERYSAYYEIWQLPNLNVRQKAAFIGSLQDDPSQSANLLAEAKKLNDAQAPKGSGGGGSGGGGSGGGGSFEQVQLQQPGAELVKPGASVKMSCKASGYAFSSYWINWMKQKPGQGLEWIGQIYPGDGDTNYNGKFKGRATLTADTSSSTAYMQLSSLTSEDSAVYFCARSITTVVGCAMDYWGQGTSVTVSSTRIQNPDPAVYQLRDSKSSDKSVCLFTDFDSQTNVSQSKDSDVYITDKCVLDMRSMDFKSNSAVAWSNKSDFACANAFNNSIIPEDTFFPSPESSCDVKLVEKSFETDTNLNFQNLSVIGFRILLLKVAGFNLLMTLRLWSSRAKRSGSGVKQTLNFDLLKLAGDVESNPGPSRGGIHTMATYEVLCEVARKLGTDDREVVLFLLNVFIPQPTLAQLIGALRALKEEGRLTFPLLAECLFRAGRRDLLRDLLHLDPRFLERHLAGTMSYFSPYQLTVLHVDGELCARDIRSLIFLSKDTIGSRSTPQTFLHWVYCMENLDLLGPTDVDALMSMLRSLSRVDLQRQVQTLMGLHLSGPSHSQHYRHTP

SEQ ID NO: 16595 - protein, 830 aa, Artificial Sequence
  Synthetic Polypeptide
MALPVTALLLPLALLLHAARPDIQMTQSPSSLSASVGDRVTITCKASDHINNWLAWYQQKPGQAPKLLIYGATTLETGVPSRFSGSGSGTDYTLTISSLQPEDFATYYCQQSWNTPWTFGQGTKLEIKRLEIQNPDPAVYQLRDSKSSDKSVCLFTDFDSQTNVSQSKDSDVYITDKCVLDMRSMDFKSNSAVAWSNKSDFACANAFNNSIIPEDTFFPSPESSCDVKLVEKSFETDTNLNFQNLSVIGFRILLLKVAGFNLLMTLRLWSSRAKRSGSGVKQTLNFDLLKLAGDVESNPGPTSMDWIWRILFLVGAATGAHSQLQLQESGPGLVKPSETLSLTCTVSGGSISSGDYYWGWIRQPPGKGLEWIGHIYYSGATYYNPSLKSRVTISVDTSRNQFSLKLSSVTAADTAVYYCTRDDSSNWRSRGQGTLVTVSSSGGGGSGGGGSVDNKFNKERYSAYYEIWQLPNLNVRQKAAFIGSLQDDPSQSANLLAEAKKLNDAQAPKGSGGGGSGGGGSGGGGSFEQVQLQQPGAELVKPGASVKMSCKASGYAFSSYWINWMKQKPGQGLEWIGQIYPGDGDTNYNGKFKGRATLTADTSSSTAYMQLSSLTSEDSAVYFCARSITTVVGCAMDYWGQGTSVTVSSTREDLKNVFPPEVAVFEPSEAEISHTQKATLVCLATGFYPDHVELSWWVNGKEVHSGVCTDPQPLKEQPALNDSRYCLSSRLRVSATFWQNPRNHFRCQVQFYGLSENDEWTQDRAKPVTQIVSAEAWGRADCGFTSESYQQGVLSATILYEILLGKATLYAVLVSALVLMAMVKRKDSRG

SEQ ID NO: 16596 - protein, 1052 aa, Artificial Sequence
  Synthetic Polypeptide
MALPVTALLLPLALLLHAARPDIQMTQSPSSLSASVGDRVTITCKASDHINNWLAWYQQKPGQAPKLLIYGATTLETGVPSRFSGSGSGTDYTLTISSLQPEDFATYYCQQSWNTPWTFGQGTKLEIKRLEIQNPDPAVYQLRDSKSSDKSVCLFTDFDSQTNVSQSKDSDVYITDKCVLDMRSMDFKSNSAVAWSNKSDFACANAFNNSIIPEDTFFPSPESSCDVKLVEKSFETDTNLNFQNLSVIGFRILLLKVAGFNLLMTLRLWSSRAKRSGSGVKQTLNFDLLKLAGDVESNPGPTSMDWIWRILFLVGAATGAHSQLQLQESGPGLVKPSETLSLTCTVSGGSISSGDYYWGWIRQPPGKGLEWIGHIYYSGATYYNPSLKSRVTISVDTSRNQFSLKLSSVTAADTAVYYCTRDDSSNWRSRGQGTLVTVSSSGGGGSGGGGSVDNKFNKERYSAYYEIWQLPNLNVRQKAAFIGSLQDDPSQSANLLAEAKKLNDAQAPKGSGGGGSGGGGSGGGGSFEQVQLQQPGAELVKPGASVKMSCKASGYAFSSYWINWMKQKPGQGLEWIGQIYPGDGDTNYNGKFKGRATLTADTSSSTAYMQLSSLTSEDSAVYFCARSITTVVGCAMDYWGQGTSVTVSSTREDLKNVFPPEVAVFEPSEAEISHTQKATLVCLATGFYPDHVELSWWVNGKEVHSGVCTDPQPLKEQPALNDSRYCLSSRLRVSATFWQNPRNHFRCQVQFYGLSENDEWTQDRAKPVTQIVSAEAWGRADCGFTSESYQQGVLSATILYEILLGKATLYAVLVSALVLMAMVKRKDSRGRAKRSGSGATNFSLLKQAGDVEENPGPSRGGIHTMATYEVLCEVARKLGTDDREVVLFLLNVFIPQPTLAQLIGALRALKEEGRLTFPLLAECLFRAGRRDLLRDLLHLDPRFLERHLAGTMSYFSPYQLTVLHVDGELCARDIRSLIFLSKDTIGSRSTPQTFLHWVYCMENLDLLGPTDVDALMSMLRSLSRVDLQRQVQTLMGLHLSGPSHSQHYRHTP

SEQ ID NO: 16597 - protein, 1059 aa, Artificial Sequence
  Synthetic Polypeptide
MALPVTALLLPLALLLHAARPDIQMTQSPSSLSASVGDRVTITCKASDHINNWLAWYQQKPGQAPKLLIYGATTLETGVPSRFSGSGSGTDYTLTISSLQPEDFATYYCQQSWNTPWTFGQGTKLEIKRLEDLKNVFPPEVAVFEPSEAEISHTQKATLVCLATGFYPDHVELSWWVNGKEVHSGVSTDPQPLKEQPALNDSRYCLSSRLRVSATFWQNPRNHFRCQVQFYGLSENDEWTQDRAKPVTQIVSAEAWGRADCGFTSESYQQGVLSATILYEILLGKATLYAVLVSALVLMAMVKRKDSRGRAKRSGSGATNFSLLKQAGDVEENPGPTSMDWIWRILFLVGAATGAHSQLQLQESGPGLVKPSETLSLTCTVSGGSISSGDYYWGWIRQPPGKGLEWIGHIYYSGATYYNPSLKSRVTISVDTSRNQFSLKLSSVTAADTAVYYCTRDDSSNWRSRGQGTLVTVSSSGGGGSGGGGSVDNKFNKERYSAYYEIWQLPNLNVRQKAAFIGSLQDDPSQSANLLAEAKKLNDAQAPKGSGGGGSGGGGSGGGGSFEQVQLQQPGAELVKPGASVKMSCKASGYAFSSYWINWMKQKPGQGLEWIGQIYPGDGDTNYNGKFKGRATLTADTSSSTAYMQLSSLTSEDSAVYFCARSITTVVGCAMDYWGQGTSVTVSSTRIQNPDPAVYQLRDSKSSDKSVCLFTDFDSQTNVSQSKDSDVYITDKTVLDMRSMDFKSNSAVAWSNKSDFACANAFNNSIIPEDTFFPSPESSCDVKLVEKSFETDTNLNFQNLSVIGFRILLLKVAGFNLLMTLRLWSSRAKRSGSGVKQTLNFDLLKLAGDVESNPGPSRGHMTEYKPTVRLATRDDVPRAVRTLAAAFADYPATRHTVDPDRHIERVTELQELFLTRVGLDIGKVWVADDGAAVAVWTTPESVEAGAVFAEIGPRMAELSGSRLAAQQQMEGLLAPHRPKEPAWFLATVGVSPDHQGKGLGSAVVLPGVEAAERAGVPAFLETSAPRNLPFYERLGFTVTADVEVPEGPRTWCMTRKPGA

SEQ ID NO: 16598 - protein, 1141 aa, Artificial Sequence
  Synthetic Polypeptide
MALPVTALLLPLALLLHAARPDIQMTQSPSSLSASVGDRVTITCKASDHINNWLAWYQQKPGQAPKLLIYGATTLETGVPSRFSGSGSGTDYTLTISSLQPEDFATYYCQQSWNTPWTFGQGTKLEIKRLEDLKNVFPPEVAVFEPSEAEISHTQKATLVCLATGFYPDHVELSWWVNGKEVHSGVSTDPQPLKEQPALNDSRYCLSSRLRVSATFWQNPRNHFRCQVQFYGLSENDEWTQDRAKPVTQIVSAEAWGRADCGFTSESYQQGVLSATILYEILLGKATLYAVLVSALVLMAMVKRKDSRGRAKRSGSGATNFSLLKQAGDVEENPGPTSMDWIWRILFLVGAATGAHSQLQLQESGPGLVKPSETLSLTCTVSGGSISSGDYYWGWIRQPPGKGLEWIGHIYYSGATYYNPSLKSRVTISVDTSRNQFSLKLSSVTAADTAVYYCTRDDSSNWRSRGQGTLVTVSSSGGGGSGGGGSVDNKFNKERYSAYYEIWQLPNLNVRQKAAFIGSLQDDPSQSANLLAEAKKLNDAQAPKGSGGGGSGGGGSGGGGSFEQVQLQQPGAELVKPGASVKMSCKASGYAFSSYWINWMKQKPGQGLEWIGQIYPGDGDTNYNGKFKGRATLTADTSSSTAYMQLSSLTSEDSAVYFCARSITTVVGCAMDYWGQGTSVTVSSTREQKLISEEDGSGTPFPSLAPPIMLLVDGKQQMVVVCLVLDVAPPGLDSPIWFSAGNGSALDAFTYGPSPATDGTWTNLAHLSLPSEELASWEPLVCHTGPGAEGHSRSTQPMHLSGEASTARTCPQEPLRGTPGGALWLGVLRLLLFKLLLFDLLLTCSCLCDPAGPLPSPATTTRLRALGSHRLHPATETGGREATSSPRPQPRDRRWGDTPPGRKPGSPVRAKRSGSGVKQTLNFDLLKLAGDVESNPGPSRGHMTEYKPTVRLATRDDVPRAVRTLAAAFADYPATRHTVDPDRHIERVTELQELFLTRVGLDIGKVWVADDGAAVAVWTTPESVEAGAVFAEIGPRMAELSGSRLAAQQQMEGLLAPHRPKEPAWFLATVGVSPDHQGKGLGSAVVLPGVEAAERAGVPAFLETSAPRNLPFYERLGFTVTADVEVPEGPRTWCMTRKPGA

SEQ ID NO: 16599 - protein, 1096 aa, Artificial Sequence
  Synthetic Polypeptide
MALPVTALLLPLALLLHAARPDIQMTQSPSSLSASVGDRVTITCKASDHINNWLAWYQQKPGQAPKLLIYGATTLETGVPSRFSGSGSGTDYTLTISSLQPEDFATYYCQQSWNTPWTFGQGTKLEIKRLEGKPIPNPLLGLDSTGSGDKQLDADVSPKPTIFLPSIAETKLQKAGTYLCLLEKFFPDVIKIHWQEKKSNTILGSQEGNTMKTNDTYMKFSWLTVPEKSLDKEHRCIVRHENNKNGVDQEIIFPPIKTDVITMDPKDNCSKDANDTLLLQLTNTSAYYMYLLLLLKSVVYFAIITCCLLRRTAFCCNGEKSRAKRSGSGATNFSLLKQAGDVEENPGPTSMDWIWRILFLVGAATGAHSQLQLQESGPGLVKPSETLSLTCTVSGGSISSGDYYWGWIRQPPGKGLEWIGHIYYSGATYYNPSLKSRVTISVDTSRNQFSLKLSSVTAADTAVYYCTRDDSSNWRSRGQGTLVTVSSSGGGGSGGGGSVDNKFNKERYSAYYEIWQLPNLNVRQKAAFIGSLQDDPSQSANLLAEAKKLNDAQAPKGSGGGGSGGGGSGGGGSFEQVQLQQPGAELVKPGASVKMSCKASGYAFSSYWINWMKQKPGQGLEWIGQIYPGDGDTNYNGKFKGRATLTADTSSSTAYMQLSSLTSEDSAVYFCARSITTVVGCAMDYWGQGTSVTVSSTREQKLISEEDGSGSQPHTKPSVFVMKNGTNVACLVKEFYPKDIRINLVSSKKITEFDPAIVISPSGKYNAVKLGKYEDSNSVTCSVQHDNKTVHSTDFEVKTDSTDHVKPKETENTKQPSKSCHKPKAIVHTEKVNMMSLTVLGLRMLFAKTVAVNFLLTAKLFFLRAKRSGSGVKQTLNFDLLKLAGDVESNPGPSRGHMTEYKPTVRLATRDDVPRAVRTLAAAFADYPATRHTVDPDRHIERVTELQELFLTRVGLDIGKVWVADDGAAVAVWTTPESVEAGAVFAEIGPRMAELSGSRLAAQQQMEGLLAPHRPKEPAWFLATVGVSPDHQGKGLGSAVVLPGVEAAERAGVPAFLETSAPRNLPFYERLGFTVTADVEVPEGPRTWCMTRKPGA

SEQ ID NO: 16600 - protein, 834 aa, Artificial Sequence
  Synthetic Polypeptide
MALPVTALLLPLALLLHAARPDIQMTQSPSSLSASVGDRVTITCKASDHINNWLAWYQQKPGQAPKLLIYGATTLETGVPSRFSGSGSGTDYTLTISSLQPEDFATYYCQQSWNTPWTFGQGTKLEIKRLESQPHTKPSVFVMKNGTNVACLVKEFYPKDIRINLVSSKKITEFDPAIVISPSGKYNAVKLGKYEDSNSVTCSVQHDNKTVHSTDFEVKTDSTDHVKPKETENTKQPSKSCHKPKAIVHTEKVNMMSLTVLGLRMLFAKTVAVNFLLTAKLFFLRAKRSGSGATNFSLLKQAGDVEENPGPTSMDWIWRILFLVGAATGAHSQLQLQESGPGLVKPSETLSLTCTVSGGSISSGDYYWGWIRQPPGKGLEWIGHIYYSGATYYNPSLKSRVTISVDTSRNQFSLKLSSVTAADTAVYYCTRDDSSNWRSRGQGTLVTVSSSGGGGSGGGGSVDNKFNKERYSAYYEIWQLPNLNVRQKAAFIGSLQDDPSQSANLLAEAKKLNDAQAPKGSGGGGSGGGGSGGGGSFEQVQLQQPGAELVKPGASVKMSCKASGYAFSSYWINWMKQKPGQGLEWIGQIYPGDGDTNYNGKFKGRATLTADTSSSTAYMQLSSLTSEDSAVYFCARSITTVVGCAMDYWGQGTSVTVSSTRDKQLDADVSPKPTIFLPSIAETKLQKAGTYLCLLEKFFPDVIKIHWQEKKSNTILGSQEGNTMKTNDTYMKFSWLTVPEKSLDKEHRCIVRHENNKNGVDQEIIFPPIKTDVITMDPKDNCSKDANDTLLLQLTNTSAYYMYLLLLLKSVVYFAIITCCLLRRTAFCCNGEKS

SEQ ID NO: 16601 - protein, 1236 aa, Artificial Sequence
  Synthetic Polypeptide
MALPVTALLLPLALLLHAARPDIQMTQSPSSLSASVGDRVTITCKASDHINNWLAWYQQKPGQAPKLLIYGATTLETGVPSRFSGSGSGTDYTLTISSLQPEDFATYYCQQSWNTPWTFGQGTKLEIKRGQPKANPTVTLFPPSSEELQANKATLVCLISDFYPGAVTVAWKADGSPVKAGVETTKPSKQSNNKYAASSYLSLTPEQWKSHRSYSCQVTHEGSTVEKTVAPTECSGSQSFGLLDPKLCYLLDGILFIYGVILTALFLRVKFSRSADAPAYQQGQNQLYNELNLGRREEYDVLDKRRGRDPEMGGKPQRRKNPQEGLYNELQKDKMAEAYSEIGMKGERRRGKGHDGLYQGLSTATKDTYDALHMQALPPRRAKRSGSGATNFSLLKQAGDVEENPGPTSMDWIWRILFLVGAATGAHSQLQLQESGPGLVKPSETLSLTCTVSGGSISSGDYYWGWIRQPPGKGLEWIGHIYYSGATYYNPSLKSRVTISVDTSRNQFSLKLSSVTAADTAVYYCTRDDSSNWRSRGQGTLVTVSSSGGGGSGGGGSVDNKFNKERYSAYYEIWQLPNLNVRQKAAFIGSLQDDPSQSANLLAEAKKLNDAQAPKGSGGGGSGGGGSGGGGSFEQVQLQQPGAELVKPGASVKMSCKASGYAFSSYWINWMKQKPGQGLEWIGQIYPGDGDTNYNGKFKGRATLTADTSSSTAYMQLSSLTSEDSAVYFCARSITTVVGCAMDYWGQGTSVTVSSASTKGPSVFPLAPSSKSTSGGTAALGCLVKDYFPEPVTVSWNSGALTSGVHTFPAVLQSSGLYSLSSVVTVPSSSLGTQTYICNVNHKPSNTKVDKRVEPKSCGTQSFGLLDPKLCYLLDGILFIYGVILTALFLRVKFSRSADAPAYQQGQNQLYNELNLGRREEYDVLDKRRGRDPEMGGKPQRRKNPQEGLYNELQKDKMAEAYSEIGMKGERRRGKGHDGLYQGLSTATKDTYDALHMQALPPRRAKRSGSGVKQTLNFDLLKLAGDVESNPGPSRGHMTEYKPTVRLATRDDVPRAVRTLAAAFADYPATRHTVDPDRHIERVTELQELFLTRVGLDIGKVWVADDGAAVAVWTTPESVEAGAVFAEIGPRMAELSGSRLAAQQQMEGLLAPHRPKEPAWFLATVGVSPDHQGKGLGSAVVLPGVEAAERAGVPAFLETSAPRNLPFYERLGFTVTADVEVPEGPRTWCMTRKPGA

SEQ ID NO: 16602 - protein, 1022 aa, Artificial Sequence
  Synthetic Polypeptide
MALPVTALLLPLALLLHAARPDIQMTQSPSSLSASVGDRVTITCKASDHINNWLAWYQQKPGQAPKLLIYGATTLETGVPSRFSGSGSGTDYTLTISSLQPEDFATYYCQQSWNTPWTFGQGTKLEIKRLEDLKNVFPPEVAVFEPSEAEISHTQKATLVCLATGFYPDHVELSWWVNGKEVHSGVSTDPQPLKEQPALNDSRYCLSSRLRVSATFWQNPRNHFRCQVQFYGLSENDEWTQDRAKPVTQIVSAEAWGRADCGSQSFGLLDPKLCYLLDGILFIYGVILTALFLRVKFSRSADAPAYQQGQNQLYNELNLGRREEYDVLDKRRGRDPEMGGKPQRRKNPQEGLYNELQKDKMAEAYSEIGMKGERRRGKGHDGLYQGLSTATKDTYDALHMQALPPRRAKRSGSGATNFSLLKQAGDVEENPGPTSMDWIWRILFLVGAATGAHSQLQLQESGPGLVKPSETLSLTCTVSGGSISSGDYYWGWIRQPPGKGLEWIGHIYYSGATYYNPSLKSRVTISVDTSRNQFSLKLSSVTAADTAVYYCTRDDSSNWRSRGQGTLVTVSSSGGGGSGGGGSVDNKFNKERYSAYYEIWQLPNLNVRQKAAFIGSLQDDPSQSANLLAEAKKLNDAQAPKGSGGGGSGGGGSGGGGSFEQVQLQQPGAELVKPGASVKMSCKASGYAFSSYWINWMKQKPGQGLEWIGQIYPGDGDTNYNGKFKGRATLTADTSSSTAYMQLSSLTSEDSAVYFCARSITTVVGCAMDYWGQGTSVTVSSTRIQNPDPAVYQLRDSKSSDKSVCLFTDFDSQTNVSQSKDSDVYITDKTVLDMRSMDFKSNSAVAWSNKSDFACANAFNNSIIPEDTFFPSPESSCGTQSFGLLDPKLCYLLDGILFIYGVILTALFLRVKFSRSADAPAYQQGQNQLYNELNLGRREEYDVLDKRRGRDPEMGGKPQRRKNPQEGLYNELQKDKMAEAYSEIGMKGERRRGKGHDGLYQGLSTATKDTYDALHMQALPPR

SEQ ID NO: 16603 - protein, 1022 aa, Artificial Sequence
  Synthetic Polypeptide
MALPVTALLLPLALLLHAARPDIQMTQSPSSLSASVGDRVTITCKASDHINNWLAWYQQKPGQAPKLLIYGATTLETGVPSRFSGSGSGTDYTLTISSLQPEDFATYYCQQSWNTPWTFGQGTKLEIKRLEDLKNVFPPEVAVFEPSKAEIAHTQKATLVCLATGFYPDHVELSWWVNGKEVHSGVCTDPQPLKEQPALNDSRYCLSSRLRVSATFWQNPRNHFRCQVQFYGLSENDEWTQDRAKPVTQIVSAEAWGRADCGSQSFGLLDPKLCYLLDGILFIYGVILTALFLRVKFSRSADAPAYQQGQNQLYNELNLGRREEYDVLDKRRGRDPEMGGKPQRRKNPQEGLYNELQKDKMAEAYSEIGMKGERRRGKGHDGLYQGLSTATKDTYDALHMQALPPRRAKRSGSGATNFSLLKQAGDVEENPGPTSMDWIWRILFLVGAATGAHSQLQLQESGPGLVKPSETLSLTCTVSGGSISSGDYYWGWIRQPPGKGLEWIGHIYYSGATYYNPSLKSRVTISVDTSRNQFSLKLSSVTAADTAVYYCTRDDSSNWRSRGQGTLVTVSSSGGGGSGGGGSVDNKFNKERYSAYYEIWQLPNLNVRQKAAFIGSLQDDPSQSANLLAEAKKLNDAQAPKGSGGGGSGGGGSGGGGSFEQVQLQQPGAELVKPGASVKMSCKASGYAFSSYWINWMKQKPGQGLEWIGQIYPGDGDTNYNGKFKGRATLTADTSSSTAYMQLSSLTSEDSAVYFCARSITTVVGCAMDYWGQGTSVTVSSTRIQNPDPAVYQLRDSKSSDKSVCLFTDFDSQTNVSQSKDSDVYITDKCVLDMRSMDFKSNSAVAWSNKSDFACANAFNNSIIPEDTFFPSSDVPCGTQSFGLLDPKLCYLLDGILFIYGVILTALFLRVKFSRSADAPAYQQGQNQLYNELNLGRREEYDVLDKRRGRDPEMGGKPQRRKNPQEGLYNELQKDKMAEAYSEIGMKGERRRGKGHDGLYQGLSTATKDTYDALHMQALPPR

SEQ ID NO: 16604 - protein, 1093 aa, Artificial Sequence
  Synthetic Polypeptide
MALPVTALLLPLALLLHAARPDIQMTQSPSSLSASVGDRVTITCKASDHINNWLAWYQQKPGQAPKLLIYGATTLETGVPSRFSGSGSGTDYTLTISSLQPEDFATYYCQQSWNTPWTFGQGTKLEIKRLEGKPIPNPLLGLDSTGSGEDLKNVFPPEVAVFEPSEAEISHTQKATLVCLATGFYPDHVELSWWVNGKEVHSGVSTDPQPLKEQPALNDSRYCLSSRLRVSATFWQNPRNHFRCQVQFYGLSENDEWTQDRAKPVTQIVSAEAWGRADCGSQSFGLLDPKLCYLLDGILFIYGVILTALFLRVKFSRSADAPAYQQGQNQLYNELNLGRREEYDVLDKRRGRDPEMGGKPQRRKNPQEGLYNELQKDKMAEAYSEIGMKGERRRGKGHDGLYQGLSTATKDTYDALHMQALPPRRAKRSGSGATNFSLLKQAGDVEENPGPTSMDWIWRILFLVGAATGAHSQLQLQESGPGLVKPSETLSLTCTVSGGSISSGDYYWGWIRQPPGKGLEWIGHIYYSGATYYNPSLKSRVTISVDTSRNQFSLKLSSVTAADTAVYYCTRDDSSNWRSRGQGTLVTVSSSGGGGSGGGGSVDNKFNKERYSAYYEIWQLPNLNVRQKAAFIGSLQDDPSQSANLLAEAKKLNDAQAPKGSGGGGSGGGGSGGGGSFEQVQLQQPGAELVKPGASVKMSCKASGYAFSSYWINWMKQKPGQGLEWIGQIYPGDGDTNYNGKFKGRATLTADTSSSTAYMQLSSLTSEDSAVYFCARSITTVVGCAMDYWGQGTSVTVSSTREQKLISEEDGSGIQNPDPAVYQLRDSKSSDKSVCLFTDFDSQTNVSQSKDSDVYITDKTVLDMRSMDFKSNSAVAWSNKSDFACANAFNNSIIPEDTFFPSPESSCGTQSFGLLDPKLCYLLDGILFIYGVILTALFLRSKRSRLLHSDYMNMTPRRPGPTRKHYQPYAPPRDFAAYRSRVKFSRSADAPAYQQGQNQLYNELNLGRREEYDVLDKRRGRDPEMGGKPQRRKNPQEGLYNELQKDKMAEAYSEIGMKGERRRGKGHDGLYQGLSTATKDTYDALHMQALPPR

SEQ ID NO: 16605 - protein, 1134 aa, Artificial Sequence
  Synthetic Polypeptide
MALPVTALLLPLALLLHAARPDIQMTQSPSSLSASVGDRVTITCKASDHINNWLAWYQQKPGQAPKLLIYGATTLETGVPSRFSGSGSGTDYTLTISSLQPEDFATYYCQQSWNTPWTFGQGTKLEIKRLEGKPIPNPLLGLDSTGSGEDLKNVFPPEVAVFEPSEAEISHTQKATLVCLATGFYPDHVELSWWVNGKEVHSGVSTDPQPLKEQPALNDSRYCLSSRLRVSATFWQNPRNHFRCQVQFYGLSENDEWTQDRAKPVTQIVSAEAWGRADCGSQSFGLLDPKLCYLLDGILFIYGVILTALFLRSKRSRLLHSDYMNMTPRRPGPTRKHYQPYAPPRDFAAYRSRVKFSRSADAPAYQQGQNQLYNELNLGRREEYDVLDKRRGRDPEMGGKPQRRKNPQEGLYNELQKDKMAEAYSEIGMKGERRRGKGHDGLYQGLSTATKDTYDALHMQALPPRRAKRSGSGATNFSLLKQAGDVEENPGPTSMDWIWRILFLVGAATGAHSQLQLQESGPGLVKPSETLSLTCTVSGGSISSGDYYWGWIRQPPGKGLEWIGHIYYSGATYYNPSLKSRVTISVDTSRNQFSLKLSSVTAADTAVYYCTRDDSSNWRSRGQGTLVTVSSSGGGGSGGGGSVDNKFNKERYSAYYEIWQLPNLNVRQKAAFIGSLQDDPSQSANLLAEAKKLNDAQAPKGSGGGGSGGGGSGGGGSFEQVQLQQPGAELVKPGASVKMSCKASGYAFSSYWINWMKQKPGQGLEWIGQIYPGDGDTNYNGKFKGRATLTADTSSSTAYMQLSSLTSEDSAVYFCARSITTVVGCAMDYWGQGTSVTVSSTREQKLISEEDGSGIQNPDPAVYQLRDSKSSDKSVCLFTDFDSQTNVSQSKDSDVYITDKTVLDMRSMDFKSNSAVAWSNKSDFACANAFNNSIIPEDTFFPSPESSCGTQSFGLLDPKLCYLLDGILFIYGVILTALFLRSKRSRLLHSDYMNMTPRRPGPTRKHYQPYAPPRDFAAYRSRVKFSRSADAPAYQQGQNQLYNELNLGRREEYDVLDKRRGRDPEMGGKPQRRKNPQEGLYNELQKDKMAEAYSEIGMKGERRRGKGHDGLYQGLSTATKDTYDALHMQALPPR

SEQ ID NO: 16606 - protein, 1095 aa, Artificial Sequence
  Synthetic Polypeptide
MALPVTALLLPLALLLHAARPDIQMTQSPSSLSASVGDRVTITCKASDHINNWLAWYQQKPGQAPKLLIYGATTLETGVPSRFSGSGSGTDYTLTISSLQPEDFATYYCQQSWNTPWTFGQGTKLEIKRLEGKPIPNPLLGLDSTGSGEDLKNVFPPEVAVFEPSEAEISHTQKATLVCLATGFYPDHVELSWWVNGKEVHSGVSTDPQPLKEQPALNDSRYCLSSRLRVSATFWQNPRNHFRCQVQFYGLSENDEWTQDRAKPVTQIVSAEAWGRADCGSQSFGLLDPKLCYLLDGILFIYGVILTALFLRVKFSRSADAPAYQQGQNQLYNELNLGRREEYDVLDKRRGRDPEMGGKPQRRKNPQEGLYNELQKDKMAEAYSEIGMKGERRRGKGHDGLYQGLSTATKDTYDALHMQALPPRRAKRSGSGATNFSLLKQAGDVEENPGPTSMDWIWRILFLVGAATGAHSQLQLQESGPGLVKPSETLSLTCTVSGGSISSGDYYWGWIRQPPGKGLEWIGHIYYSGATYYNPSLKSRVTISVDTSRNQFSLKLSSVTAADTAVYYCTRDDSSNWRSRGQGTLVTVSSSGGGGSGGGGSVDNKFNKERYSAYYEIWQLPNLNVRQKAAFIGSLQDDPSQSANLLAEAKKLNDAQAPKGSGGGGSGGGGSGGGGSFEQVQLQQPGAELVKPGASVKMSCKASGYAFSSYWINWMKQKPGQGLEWIGQIYPGDGDTNYNGKFKGRATLTADTSSSTAYMQLSSLTSEDSAVYFCARSITTVVGCAMDYWGQGTSVTVSSTREQKLISEEDLGSGIQNPDPAVYQLRDSKSSDKSVCLFTDFDSQTNVSQSKDSDVYITDKTVLDMRSMDFKSNSAVAWSNKSDFACANAFNNSIIPEDTFFPSPESSCGTQSFGLLDPKLCYLLDGILFIYGVILTALFLKRGRKKLLYIFKQPFMRPVQTTQEEDGCSCRFPEEEEGGCELRVKFSRSADAPAYQQGQNQLYNELNLGRREEYDVLDKRRGRDPEMGGKPQRRKNPQEGLYNELQKDKMAEAYSEIGMKGERRRGKGHDGLYQGLSTATKDTYDALHMQALPPR

SEQ ID NO: 16607 - protein, 1137 aa, Artificial Sequence
  Synthetic Polypeptide
MALPVTALLLPLALLLHAARPDIQMTQSPSSLSASVGDRVTITCKASDHINNWLAWYQQKPGQAPKLLIYGATTLETGVPSRFSGSGSGTDYTLTISSLQPEDFATYYCQQSWNTPWTFGQGTKLEIKRLEGKPIPNPLLGLDSTGSGEDLKNVFPPEVAVFEPSEAEISHTQKATLVCLATGFYPDHVELSWWVNGKEVHSGVSTDPQPLKEQPALNDSRYCLSSRLRVSATFWQNPRNHFRCQVQFYGLSENDEWTQDRAKPVTQIVSAEAWGRADCGSQSFGLLDPKLCYLLDGILFIYGVILTALFLKRGRKKLLYIFKQPFMRPVQTTQEEDGCSCRFPEEEEGGCELRVKFSRSADAPAYQQGQNQLYNELNLGRREEYDVLDKRRGRDPEMGGKPQRRKNPQEGLYNELQKDKMAEAYSEIGMKGERRRGKGHDGLYQGLSTATKDTYDALHMQALPPRRAKRSGSGATNFSLLKQAGDVEENPGPTSMDWIWRILFLVGAATGAHSQLQLQESGPGLVKPSETLSLTCTVSGGSISSGDYYWGWIRQPPGKGLEWIGHIYYSGATYYNPSLKSRVTISVDTSRNQFSLKLSSVTAADTAVYYCTRDDSSNWRSRGQGTLVTVSSSGGGGSGGGGSVDNKFNKERYSAYYEIWQLPNLNVRQKAAFIGSLQDDPSQSANLLAEAKKLNDAQAPKGSGGGGSGGGGSGGGGSFEQVQLQQPGAELVKPGASVKMSCKASGYAFSSYWINWMKQKPGQGLEWIGQIYPGDGDTNYNGKFKGRATLTADTSSSTAYMQLSSLTSEDSAVYFCARSITTVVGCAMDYWGQGTSVTVSSTREQKLISEEDLGSGIQNPDPAVYQLRDSKSSDKSVCLFTDFDSQTNVSQSKDSDVYITDKTVLDMRSMDFKSNSAVAWSNKSDFACANAFNNSIIPEDTFFPSPESSCGTQSFGLLDPKLCYLLDGILFIYGVILTALFLKRGRKKLLYIFKQPFMRPVQTTQEEDGCSCRFPEEEEGGCELRVKFSRSADAPAYQQGQNQLYNELNLGRREEYDVLDKRRGRDPEMGGKPQRRKNPQEGLYNELQKDKMAEAYSEIGMKGERRRGKGHDGLYQGLSTATKDTYDALHMQALPPR

SEQ ID NO: 16608 - protein, 1027 aa, Artificial Sequence
  Synthetic Polypeptide
MALPVTALLLPLALLLHAARPDIQMTQSPSSLSASVGDRVTITCKASDHINNWLAWYQQKPGQAPKLLIYGATTLETGVPSRFSGSGSGTDYTLTISSLQPEDFATYYCQQSWNTPWTFGQGTKLEIKRLEQSFGLLDPKLCYLLDGILFIYGVILTALFLRVKFSRSADAPAYQQGQNQLYNELNLGRREEYDVLDKRRGRDPEMGGKPQRRKNPQEGLYNELQKDKMAEAYSEIGMKGERRRGKGHDGLYQGLSTATKDTYDALHMQALPPRRAKRSGSGATNFSLLKQAGDVEENPGPTSMDWIWRILFLVGAATGAHSQLQLQESGPGLVKPSETLSLTCTVSGGSISSGDYYWGWIRQPPGKGLEWIGHIYYSGATYYNPSLKSRVTISVDTSRNQFSLKLSSVTAADTAVYYCTRDDSSNWRSRGQGTLVTVSSSGGGGSGGGGSVDNKFNKERYSAYYEIWQLPNLNVRQKAAFIGSLQDDPSQSANLLAEAKKLNDAQAPKGSGGGGSGGGGSGGGGSFEQVQLQQPGAELVKPGASVKMSCKASGYAFSSYWINWMKQKPGQGLEWIGQIYPGDGDTNYNGKFKGRATLTADTSSSTAYMQLSSLTSEDSAVYFCARSITTVVGCAMDYWGQGTSVTVSSTRQSFGLLDPKLCYLLDGILFIYGVILTALFLRVKFSRSADAPAYQQGQNQLYNELNLGRREEYDVLDKRRGRDPEMGGKPQRRKNPQEGLYNELQKDKMAEAYSEIGMKGERRRGKGHDGLYQGLSTATKDTYDALHMQALPPRRAKRSGSGVKQTLNFDLLKLAGDVESNPGPSRGHMTEYKPTVRLATRDDVPRAVRTLAAAFADYPATRHTVDPDRHIERVTELQELFLTRVGLDIGKVWVADDGAAVAVWTTPESVEAGAVFAEIGPRMAELSGSRLAAQQQMEGLLAPHRPKEPAWFLATVGVSPDHQGKGLGSAVVLPGVEAAERAGVPAFLETSAPRNLPFYERLGFTVTADVEVPEGPRTWCMTRKPGA

SEQ ID NO: 16609 - protein, 852 aa, Artificial Sequence
  Synthetic Polypeptide
MALPVTALLLPLALLLHAARPDIQMTQSPSSLSASVGDRVTITCKASDHINNWLAWYQQKPGQAPKLLIYGATTLETGVPSRFSGSGSGTDYTLTISSLQPEDFATYYCQQSWNTPWTFGQGTKLEIKRLEGQPKANPTVTLFPPSSEELQANKATLVCLISDFYPGAVTVAWKADGSPVKAGVETTKPSKQSNNKYAASSYLSLTPEQWKSHRSYSCQVTHEGSTVEKTVAPTECSPIKTDVITMDPKDNCSKDANDTLLLQLTNTSAYYMYLLLLLKSVVYFAIITCCLLRRTAFCCNGEKSRAKRSGSGATNFSLLKQAGDVEENPGPTSMDWIWRILFLVGAATGAHSQLQLQESGPGLVKPSETLSLTCTVSGGSISSGDYYWGWIRQPPGKGLEWIGHIYYSGATYYNPSLKSRVTISVDTSRNQFSLKLSSVTAADTAVYYCTRDDSSNWRSRGQGTLVTVSSSGGGGSGGGGSVDNKFNKERYSAYYEIWQLPNLNVRQKAAFIGSLQDDPSQSANLLAEAKKLNDAQAPKGSGGGGSGGGGSGGGGSFEQVQLQQPGAELVKPGASVKMSCKASGYAFSSYWINWMKQKPGQGLEWIGQIYPGDGDTNYNGKFKGRATLTADTSSSTAYMQLSSLTSEDSAVYFCARSITTVVGCAMDYWGQGTSVTVSSTRASTKGPSVFPLAPSSKSTSGGTAALGCLVKDYFPEPVTVSWNSGALTSGVHTFPAVLQSSGLYSLSSVVTVPSSSLGTQTYICNVNHKPSNTKVDKRVEPKSCEVKTDSTDHVKPKETENTKQPSKSCHKPKAIVHTEKVNMMSLTVLGLRMLFAKTVAVNFLLTAKLFFL

SEQ ID NO: 16610 - protein, 830 aa, Artificial Sequence
  Synthetic Polypeptide
MALPVTALLLPLALLLHAARPDIQMTQSPSSLSASVGDRVTITCKASDHINNWLAWYQQKPGQAPKLLIYGATTLETGVPSRFSGSGSGTDYTLTISSLQPEDFATYYCQQSWNTPWTFGQGTKLEIKRLEGQPKANPTVTLFPPSSEELQANKATLVCLISDFYPGAVTVAWKADGSPVKAGVETTKPSKQSNNKYAASSYLSLTPEQWKSHRSYSCQVTHEGSTVEKTVAPTECSGRADCGITSASYHQGVLSATILYEILLGKATLYAVLVSALVLMAMVKRKDSRGRAKRSGSGATNFSLLKQAGDVEENPGPTSMDWIWRILFLVGAATGAHSQLQLQESGPGLVKPSETLSLTCTVSGGSISSGDYYWGWIRQPPGKGLEWIGHIYYSGATYYNPSLKSRVTISVDTSRNQFSLKLSSVTAADTAVYYCTRDDSSNWRSRGQGTLVTVSSSGGGGSGGGGSVDNKFNKERYSAYYEIWQLPNLNVRQKAAFIGSLQDDPSQSANLLAEAKKLNDAQAPKGSGGGGSGGGGSGGGGSFEQVQLQQPGAELVKPGASVKMSCKASGYAFSSYWINWMKQKPGQGLEWIGQIYPGDGDTNYNGKFKGRATLTADTSSSTAYMQLSSLTSEDSAVYFCARSITTVVGCAMDYWGQGTSVTVSSTRASTKGPSVFPLAPSSKSTSGGTAALGCLVKDYFPEPVTVSWNSGALTSGVHTFPAVLQSSGLYSLSSVVTVPSSSLGTQTYICNVNHKPSNTKVDKRVEPKSCIPEDTFFPSSDVPCDVKLVEKSFETDTNLNFQNLSVIGFRILLLKVAGFNLLMTLRLWSS

SEQ ID NO: 16611 - protein, 830 aa, Artificial Sequence
  Synthetic Polypeptide
MALPVTALLLPLALLLHAARPDIQMTQSPSSLSASVGDRVTITCKASDHINNWLAWYQQKPGQAPKLLIYGATTLETGVPSRFSGSGSGTDYTLTISSLQPEDFATYYCQQSWNTPWTFGQGTKLEIKRLEGQPKANPTVTLFPPSSEELQANKATLVCLISDFYPGAVTVAWKADGSPVKAGVETTKPSKQSNNKYAASSYLSLTPEQWKSHRSYSCQVTHEGSTVEKTVAPTECSGRADCGFTSESYQQGVLSATILYEILLGKATLYAVLVSALVLMAMVKRKDSRGRAKRSGSGATNFSLLKQAGDVEENPGPTSMDWIWRILFLVGAATGAHSQLQLQESGPGLVKPSETLSLTCTVSGGSISSGDYYWGWIRQPPGKGLEWIGHIYYSGATYYNPSLKSRVTISVDTSRNQFSLKLSSVTAADTAVYYCTRDDSSNWRSRGQGTLVTVSSSGGGGSGGGGSVDNKFNKERYSAYYEIWQLPNLNVRQKAAFIGSLQDDPSQSANLLAEAKKLNDAQAPKGSGGGGSGGGGSGGGGSFEQVQLQQPGAELVKPGASVKMSCKASGYAFSSYWINWMKQKPGQGLEWIGQIYPGDGDTNYNGKFKGRATLTADTSSSTAYMQLSSLTSEDSAVYFCARSITTVVGCAMDYWGQGTSVTVSSTRASTKGPSVFPLAPSSKSTSGGTAALGCLVKDYFPEPVTVSWNSGALTSGVHTFPAVLQSSGLYSLSSVVTVPSSSLGTQTYICNVNHKPSNTKVDKRVEPKSCIPEDTFFPSPESSCDVKLVEKSFETDTNLNFQNLSVIGFRILLLKVAGFNLLMTLRLWSS

SEQ ID NO: 16612 - protein, 660 aa, Artificial Sequence
  Synthetic Polypeptide
MDWIWRILFLVGAATGAHSQLQLQESGPGLVKPSETLSLTCTVSGGSISSGDYYWGWIRQPPGKGLEWIGHIYYSGATYYNPSLKSRVTISVDTSRNQFSLKLSSVTAADTAVYYCTRDDSSNWRSRGQGTLVTVSSSGGGGSGGGGSVDNKFNKERYSAYYEIWQLPNLNVRQKAAFIGSLQDDPSQSANLLAEAKKLNDAQAPKGSGGGGSGGGGSGGGGSFEQVQLQQPGAELVKPGASVKMSCKASGYAFSSYWINWMKQKPGQGLEWIGQIYPGDGDTNYNGKFKGRATLTADTSSSTAYMQLSSLTSEDSAVYFCARSITTVVGCAMDYWGQGTSVTVSSGGGGSGGGGSGGGGSDIQMTQSPSSLSASVGDRVTITCKASDHINNWLAWYQQKPGQAPKLLIYGATTLETGVPSRFSGSGSGTDYTLTISSLQPEDFATYYCQQSWNTPWTFGQGTKLEIKRTRGGGSDGNEEMGGITQTPYKVSISGTTVILTCPQYPGSEILWQHNDKNIGGDEDDKNIGSDEDHLSLKEFSELEQSGYYVCYPRGSKPEDANFYLYLRARVCENCMEMDVMSVATIVIVDICITGGLLLLVYYWSKNRKAKAKPVTRGAGAGGRQRGQNKERPPPVPNPDYEPIRKGQRDLYSGLNQRRI

SEQ ID NO: 16613 - protein, 625 aa, Artificial Sequence
  Synthetic Polypeptide
MDWIWRILFLVGAATGAHSQLQLQESGPGLVKPSETLSLTCTVSGGSISSGDYYWGWIRQPPGKGLEWIGHIYYSGATYYNPSLKSRVTISVDTSRNQFSLKLSSVTAADTAVYYCTRDDSSNWRSRGQGTLVTVSSSGGGGSGGGGSVDNKFNKERYSAYYEIWQLPNLNVRQKAAFIGSLQDDPSQSANLLAEAKKLNDAQAPKGSGGGGSGGGGSGGGGSFEQVQLQQPGAELVKPGASVKMSCKASGYAFSSYWINWMKQKPGQGLEWIGQIYPGDGDTNYNGKFKGRATLTADTSSSTAYMQLSSLTSEDSAVYFCARSITTVVGCAMDYWGQGTSVTVSSGGGGSGGGGSGGGGSDIQMTQSPSSLSASVGDRVTITCKASDHINNWLAWYQQKPGQAPKLLIYGATTLETGVPSRFSGSGSGTDYTLTISSLQPEDFATYYCQQSWNTPWTFGQGTKLEIKRTRGGGSFKIPIEELEDRVFVNCNTSITWVEGTVGTLLSDITRLDLGKRILDPRGIYRCNGTDIYKDKESTVQVHYRMCQSCVELDPATVAGIIVTDVIATLLLALGVFCFAGHETGRLSGAADTQALLRNDQVYQPLRDRDDAQYSHLGGNWARNK

SEQ ID NO: 16614 - protein, 635 aa, Artificial Sequence
  Synthetic Polypeptide
MDWIWRILFLVGAATGAHSQLQLQESGPGLVKPSETLSLTCTVSGGSISSGDYYWGWIRQPPGKGLEWIGHIYYSGATYYNPSLKSRVTISVDTSRNQFSLKLSSVTAADTAVYYCTRDDSSNWRSRGQGTLVTVSSSGGGGSGGGGSVDNKFNKERYSAYYEIWQLPNLNVRQKAAFIGSLQDDPSQSANLLAEAKKLNDAQAPKGSGGGGSGGGGSGGGGSFEQVQLQQPGAELVKPGASVKMSCKASGYAFSSYWINWMKQKPGQGLEWIGQIYPGDGDTNYNGKFKGRATLTADTSSSTAYMQLSSLTSEDSAVYFCARSITTVVGCAMDYWGQGTSVTVSSGGGGSGGGGSGGGGSDIQMTQSPSSLSASVGDRVTITCKASDHINNWLAWYQQKPGQAPKLLIYGATTLETGVPSRFSGSGSGTDYTLTISSLQPEDFATYYCQQSWNTPWTFGQGTKLEIKRTRGGGSQSIKGNHLVKVYDYQEDGSVLLTCDAEAKNITWFKDGKMIGFLTEDKKKWNLGSNAKDPRGMYQCKGSQNKSKPLQVYYRMCQNCIELNAATISGFLFAEIVSIFVLAVGVYFIAGQDGVRQSRASDKQTLLPNDQLYQPLKDREDDQYSHLQGNQLRRN

SEQ ID NO: 16615 - protein, 618 aa, Artificial Sequence
  Synthetic Polypeptide
MDWIWRILFLVGAATGAHSQLQLQESGPGLVKPSETLSLTCTVSGGSISSGDYYWGWIRQPPGKGLEWIGHIYYSGATYYNPSLKSRVTISVDTSRNQFSLKLSSVTAADTAVYYCTRDDSSNWRSRGQGTLVTVSSSGGGGSGGGGSVDNKFNKERYSAYYEIWQLPNLNVRQKAAFIGSLQDDPSQSANLLAEAKKLNDAQAPKGSGGGGSGGGGSGGGGSFEQVQLQQPGAELVKPGASVKMSCKASGYAFSSYWINWMKQKPGQGLEWIGQIYPGDGDTNYNGKFKGRATLTADTSSSTAYMQLSSLTSEDSAVYFCARSITTVVGCAMDYWGQGTSVTVSSGGGGSGGGGSGGGGSDIQMTQSPSSLSASVGDRVTITCKASDHINNWLAWYQQKPGQAPKLLIYGATTLETGVPSRFSGSGSGTDYTLTISSLQPEDFATYYCQQSWNTPWTFGQGTKLEIKRTRGGGSQSFGLLDPKLCYLLDGILFIYGVILTALFLRVKFSRSADAPAYQQGQNQLYNELNLGRREEYDVLDKRRGRDPEMGGKPQRRKNPQEGLYNELQKDKMAEAYSEIGMKGERRRGKGHDGLYQGLSTATKDTYDALHMQALPPR

SEQ ID NO: 16616 - protein, 654 aa, Artificial Sequence
  Synthetic Polypeptide
MDWIWRILFLVGAATGAHSQLQLQESGPGLVKPSETLSLTCTVSGGSISSGDYYWGWIRQPPGKGLEWIGHIYYSGATYYNPSLKSRVTISVDTSRNQFSLKLSSVTAADTAVYYCTRDDSSNWRSRGQGTLVTVSSSGGGGSGGGGSVDNKFNKERYSAYYEIWQLPNLNVRQKAAFIGSLQDDPSQSANLLAEAKKLNDAQAPKGSGGGGSGGGGSGGGGSFEQVQLQQPGAELVKPGASVKMSCKASGYAFSSYWINWMKQKPGQGLEWIGQIYPGDGDTNYNGKFKGRATLTADTSSSTAYMQLSSLTSEDSAVYFCARSITTVVGCAMDYWGQGTSVTVSSTRIQNPDPAVYQLRDSKSSDKSVCLFTDFDSQTNVSQSKDSDVYITDKTVLDMRSMDFKSNSAVAWSNKSDFACANAFNNSIIPEDTFFPSPESSCDVKLVEKSFETDTNLNFQNLSVIGFRILLLKVAGFNLLMTLRLWSSRAKRSGSGVKQTLNFDLLKLAGDVESNPGPSRGHMAKPLSQEESTLIERATATINSIPISEDYSVASAALSSDGRIFTGVNVYHFTGGPCAELVVLGTAAAAAAGNLTCIVAIGNENRGILSPCGRCRQVLLDLHPGIKAIVKDSDGQPTAVGIRELLPSGYVWEG

SEQ ID NO: 16617 - protein, 488 aa, Artificial Sequence
  Synthetic Polypeptide
MDWIWRILFLVGAATGAHSQLQLQESGPGLVKPSETLSLTCTVSGGSISSGDYYWGWIRQPPGKGLEWIGHIYYSGATYYNPSLKSRVTISVDTSRNQFSLKLSSVTAADTAVYYCTRDDSSNWRSRGQGTLVTVSSSGGGGSGGGGSVDNKFNKERYSAYYEIWQLPNLNVRQKAAFIGSLQDDPSQSANLLAEAKKLNDAQAPKGSGGGGSGGGGSGGGGSFEQVQLQQPGAELVKPGASVKMSCKASGYAFSSYWINWMKQKPGQGLEWIGQIYPGDGDTNYNGKFKGRATLTADTSSSTAYMQLSSLTSEDSAVYFCARSITTVVGCAMDYWGQGTSVTVSSTRIQNPDPAVYQLRDSKSSDKSVCLFTDFDSQTNVSQSKDSDVYITDKTVLDMRSMDFKSNSAVAWSNKSDFACANAFNNSIIPEDTFFPSPESSCDVKLVEKSFETDTNLNFQNLSVIGFRILLLKVAGFNLLMTLRLWSS

SEQ ID NO: 16618 - protein, 666 aa, Artificial Sequence
  Synthetic Polypeptide
MDWIWRILFLVGAATGAHSQLQLQESGPGLVKPSETLSLTCTVSGGSISSGDYYWGWIRQPPGKGLEWIGHIYYSGATYYNPSLKSRVTISVDTSRNQFSLKLSSVTAADTAVYYCTRDDSSNWRSRGQGTLVTVSSSGGGGSGGGGSVDNKFNKERYSAYYEIWQLPNLNVRQKAAFIGSLQDDPSQSANLLAEAKKLNDAQAPKGSGGGGSGGGGSGGGGSFEQVQLQQPGAELVKPGASVKMSCKASGYAFSSYWINWMKQKPGQGLEWIGQIYPGDGDTNYNGKFKGRATLTADTSSSTAYMQLSSLTSEDSAVYFCARSITTVVGCAMDYWGQGTSVTVSSTREQKLISEEDGSGIQNPDPAVYQLRDSKSSDKSVCLFTDFDSQTNVSQSKDSDVYITDKCVLDMRSMDFKSNSAVAWSNKSDFACANAFNNSIIPEDTFFPSPESSCDVKLVEKSFETDTNLNFQNLSVIGFRILLLKVAGFNLLMTLRLWSSRAKRSGSGVKQTLNFDLLKLAGDVESNPGPSRGHMAKPLSQEESTLIERATATINSIPISEDYSVASAALSSDGRIFTGVNVYHFTGGPCAELVVLGTAAAAAAGNLTCIVAIGNENRGILSPCGRCRQVLLDLHPGIKAIVKDSDGQPTAVGIRELLPSGYVWEG

SEQ ID NO: 16619 - protein, 500 aa, Artificial Sequence
  Synthetic Polypeptide
MDWIWRILFLVGAATGAHSQLQLQESGPGLVKPSETLSLTCTVSGGSISSGDYYWGWIRQPPGKGLEWIGHIYYSGATYYNPSLKSRVTISVDTSRNQFSLKLSSVTAADTAVYYCTRDDSSNWRSRGQGTLVTVSSSGGGGSGGGGSVDNKFNKERYSAYYEIWQLPNLNVRQKAAFIGSLQDDPSQSANLLAEAKKLNDAQAPKGSGGGGSGGGGSGGGGSFEQVQLQQPGAELVKPGASVKMSCKASGYAFSSYWINWMKQKPGQGLEWIGQIYPGDGDTNYNGKFKGRATLTADTSSSTAYMQLSSLTSEDSAVYFCARSITTVVGCAMDYWGQGTSVTVSSTREQKLISEEDGSGIQNPDPAVYQLRDSKSSDKSVCLFTDFDSQTNVSQSKDSDVYITDKCVLDMRSMDFKSNSAVAWSNKSDFACANAFNNSIIPEDTFFPSPESSCDVKLVEKSFETDTNLNFQNLSVIGFRILLLKVAGFNLLMTLRLWSS

SEQ ID NO: 16620 - protein, 1335 aa, Artificial Sequence
  Synthetic Polypeptide
MALPVTALLLPLALLLHAARPEVQLVESGGGSVQTGGSLRLTCAASGRTSRSYGMGWFRQAPGKEREFVSGISWRGDSTGYADSVKGRFTISRDNAKNTVDLQMNSLKPEDTAIYYCAAAAGSAWYGTLYEYDYWGQGTLVTVSSGGGSGGGSEVQLVESGGSLVQPGGSLRLSCAASGFTFDDYAMSWVRQVPGKGLEWVSSINWSGTHTDYADSVKGRFTISRNNANNTLYLQMNSLKSEDTAVYYCAKNWRDAGTTWFEKSGSAGQGTQVTVSSGTGGGGSGGGGSGGGGSEFDIQMTQSPSSLSASVGDRVTITCKASDHINNWLAWYQQKPGQAPKLLIYGATTLETGVPSRFSGSGSGTDYTLTISSLQPEDFATYYCQQSWNTPWTFGQGTKLEIKRLEIQNPDPAVYQLRDSKSSDKSVCLFTDFDSQTNVSQSKDSDVYITDKCVLDMRSMDFKSNSAVAWSNKSDFACANAFNNSIIPEDTFFPSSDVPCDVKLVEKSFETDTNLNFQNLSVIGFRILLLKVAGFNLLMTLRLWSSRAKRSGSGVKQTLNFDLLKLAGDVESNPGPTSMDWIWRILFLVGAATGAHSQLQLQESGPGLVKPSETLSLTCTVSGGSISSGDYYWGWIRQPPGKGLEWIGHIYYSGATYYNPSLKSRVTISVDTSRNQFSLKLSSVTAADTAVYYCTRDDSSNWRSRGQGTLVTVSSSGGGGSGGGGSVDNKFNKERYSAYYEIWQLPNLNVRQKAAFIGSLQDDPSQSANLLAEAKKLNDAQAPKGSGGGGSGGGGSGGGGSFEQVQLQQPGAELVKPGASVKMSCKASGYAFSSYWINWMKQKPGQGLEWIGQIYPGDGDTNYNGKFKGRATLTADTSSSTAYMQLSSLTSEDSAVYFCARSITTVVGCAMDYWGQGTSVTVSSTREDLKNVFPPEVAVFEPSKAEIAHTQKATLVCLATGFYPDHVELSWWVNGKEVHSGVCTDPQPLKEQPALNDSRYCLSSRLRVSATFWQNPRNHFRCQVQFYGLSENDEWTQDRAKPVTQIVSAEAWGRADCGITSASYHQGVLSATILYEILLGKATLYAVLVSALVLMAMVKRKDSRGRAKRSGSGATNFSLLKQAGDVEENPGPSRGHMTEYKPTVRLATRDDVPRAVRTLAAAFADYPATRHTVDPDRHIERVTELQELFLTRVGLDIGKVWVADDGAAVAVWTTPESVEAGAVFAEIGPRMAELSGSRLAAQQQMEGLLAPHRPKEPAWFLATVGVSPDHQGKGLGSAVVLPGVEAAERAGVPAFLETSAPRNLPFYERLGFTVTADVEVPEGPRTWCMTRKPGA

SEQ ID NO: 16621 - protein, 1334 aa, Artificial Sequence
  Synthetic Polypeptide
MALPVTALLLPLALLLHAARPEVQLVESGGGSVQTGGSLRLTCAASGRTSRSYGMGWFRQAPGKEREFVSGISWRGDSTGYADSVKGRFTISRDNAKNTVDLQMNSLKPEDTAIYYCAAAAGSAWYGTLYEYDYWGQGTLVTVSSGGGSGGGSEVQLVESGGSLVQPGGSLRLSCAASGFTFDDYAMSWVRQVPGKGLEWVSSINWSGTHTDYADSVKGRFTISRNNANNTLYLQMNSLKSEDTAVYYCAKNWRDAGTTWFEKSGSAGQGTQVTVSSGTGGGGSGGGGSGGGGSEFDIQMTQSPSSLSASVGDRVTITCKASDHINNWLAWYQQKPGQAPKLLIYGATTLETGVPSRFSGSGSGTDYTLTISSLQPEDFATYYCQQSWNTPWTFGQGTKLEIKRLEDLKNVFPPEVAVFEPSKAEIAHTQKATLVCLATGFYPDHVELSWWVNGKEVHSGVCTDPQPLKEQPALNDSRYCLSSRLRVSATFWQNPRNHFRCQVQFYGLSENDEWTQDRAKPVTQIVSAEAWGRADCGITSASYHQGVLSATILYEILLGKATLYAVLVSALVLMAMVKRKDSRGRAKRSGSGATNFSLLKQAGDVEENPGPTSMDWIWRILFLVGAATGAHSQLQLQESGPGLVKPSETLSLTCTVSGGSISSGDYYWGWIRQPPGKGLEWIGHIYYSGATYYNPSLKSRVTISVDTSRNQFSLKLSSVTAADTAVYYCTRDDSSNWRSRGQGTLVTVSSSGGGGSGGGGSVDNKFNKERYSAYYEIWQLPNLNVRQKAAFIGSLQDDPSQSANLLAEAKKLNDAQAPKGSGGGGSGGGGSGGGGSFEQVQLQQPGAELVKPGASVKMSCKASGYAFSSYWINWMKQKPGQGLEWIGQIYPGDGDTNYNGKFKGRATLTADTSSSTAYMQLSSLTSEDSAVYFCARSITTVVGCAMDYWGQGTSVTVSSTRIQNPDPAVYQLRDSKSSDKSVCLFTDFDSQTNVSQSKDSDVYITDKCVLDMRSMDFKSNSAVAWSNKSDFACANAFNNSIIPEDTFFPSSDVPCDVKLVEKSFETDTNLNFQNLSVIGFRILLLKVAGFNLLMTLRLWSSRAKRSGSGVKQTLNFDLLKLAGDVESNPGPSRGHMTEYKPTVRLATRDDVPRAVRTLAAAFADYPATRHTVDPDRHIERVTELQELFLTRVGLDIGKVWVADDGAAVAVWTTPESVEAGAVFAEIGPRMAELSGSRLAAQQQMEGLLAPHRPKEPAWFLATVGVSPDHQGKGLGSAVVLPGVEAAERAGVPAFLETSAPRNLPFYERLGFTVTADVEVPEGPRTWCMTRKPGA

SEQ ID NO: 16622 - protein, 1334 aa, Artificial Sequence
  Synthetic Polypeptide
MALPVTALLLPLALLLHAARPEVQLVESGGGSVQTGGSLRLTCAASGRTSRSYGMGWFRQAPGKEREFVSGISWRGDSTGYADSVKGRFTISRDNAKNTVDLQMNSLKPEDTAIYYCAAAAGSAWYGTLYEYDYWGQGTLVTVSSGGGSGGGSEVQLVESGGSLVQPGGSLRLSCAASGFTFDDYAMSWVRQVPGKGLEWVSSINWSGTHTDYADSVKGRFTISRNNANNTLYLQMNSLKSEDTAVYYCAKNWRDAGTTWFEKSGSAGQGTQVTVSSGTGGGGSGGGGSGGGGSEFDIQMTQSPSSLSASVGDRVTITCKASDHINNWLAWYQQKPGQAPKLLIYGATTLETGVPSRFSGSGSGTDYTLTISSLQPEDFATYYCQQSWNTPWTFGQGTKLEIKRLEDLKNVFPPEVAVFEPSEAEISHTQKATLVCLATGFYPDHVELSWWVNGKEVHSGVCTDPQPLKEQPALNDSRYCLSSRLRVSATFWQNPRNHFRCQVQFYGLSENDEWTQDRAKPVTQIVSAEAWGRADCGFTSESYQQGVLSATILYEILLGKATLYAVLVSALVLMAMVKRKDSRGRAKRSGSGATNFSLLKQAGDVEENPGPTSMDWIWRILFLVGAATGAHSQLQLQESGPGLVKPSETLSLTCTVSGGSISSGDYYWGWIRQPPGKGLEWIGHIYYSGATYYNPSLKSRVTISVDTSRNQFSLKLSSVTAADTAVYYCTRDDSSNWRSRGQGTLVTVSSSGGGGSGGGGSVDNKFNKERYSAYYEIWQLPNLNVRQKAAFIGSLQDDPSQSANLLAEAKKLNDAQAPKGSGGGGSGGGGSGGGGSFEQVQLQQPGAELVKPGASVKMSCKASGYAFSSYWINWMKQKPGQGLEWIGQIYPGDGDTNYNGKFKGRATLTADTSSSTAYMQLSSLTSEDSAVYFCARSITTVVGCAMDYWGQGTSVTVSSTRIQNPDPAVYQLRDSKSSDKSVCLFTDFDSQTNVSQSKDSDVYITDKCVLDMRSMDFKSNSAVAWSNKSDFACANAFNNSIIPEDTFFPSPESSCDVKLVEKSFETDTNLNFQNLSVIGFRILLLKVAGFNLLMTLRLWSSRAKRSGSGVKQTLNFDLLKLAGDVESNPGPSRGHMTEYKPTVRLATRDDVPRAVRTLAAAFADYPATRHTVDPDRHIERVTELQELFLTRVGLDIGKVWVADDGAAVAVWTTPESVEAGAVFAEIGPRMAELSGSRLAAQQQMEGLLAPHRPKEPAWFLATVGVSPDHQGKGLGSAVVLPGVEAAERAGVPAFLETSAPRNLPFYERLGFTVTADVEVPEGPRTWCMTRKPGA

SEQ ID NO: 16623 - protein, 1101 aa, Artificial Sequence
  Synthetic Polypeptide
MALPVTALLLPLALLLHAARPEVQLVESGGGSVQTGGSLRLTCAASGRTSRSYGMGWFRQAPGKEREFVSGISWRGDSTGYADSVKGRFTISRDNAKNTVDLQMNSLKPEDTAIYYCAAAAGSAWYGTLYEYDYWGQGTLVTVSSGGGSGGGSEVQLVESGGSLVQPGGSLRLSCAASGFTFDDYAMSWVRQVPGKGLEWVSSINWSGTHTDYADSVKGRFTISRNNANNTLYLQMNSLKSEDTAVYYCAKNWRDAGTTWFEKSGSAGQGTQVTVSSGTGGGGSGGGGSGGGGSEFDIQMTQSPSSLSASVGDRVTITCKASDHINNWLAWYQQKPGQAPKLLIYGATTLETGVPSRFSGSGSGTDYTLTISSLQPEDFATYYCQQSWNTPWTFGQGTKLEIKRLEDLKNVFPPEVAVFEPSEAEISHTQKATLVCLATGFYPDHVELSWWVNGKEVHSGVCTDPQPLKEQPALNDSRYCLSSRLRVSATFWQNPRNHFRCQVQFYGLSENDEWTQDRAKPVTQIVSAEAWGRADCGFTSESYQQGVLSATILYEILLGKATLYAVLVSALVLMAMVKRKDSRGRAKRSGSGATNFSLLKQAGDVEENPGPTSMDWIWRILFLVGAATGAHSQLQLQESGPGLVKPSETLSLTCTVSGGSISSGDYYWGWIRQPPGKGLEWIGHIYYSGATYYNPSLKSRVTISVDTSRNQFSLKLSSVTAADTAVYYCTRDDSSNWRSRGQGTLVTVSSSGGGGSGGGGSVDNKFNKERYSAYYEIWQLPNLNVRQKAAFIGSLQDDPSQSANLLAEAKKLNDAQAPKGSGGGGSGGGGSGGGGSFEQVQLQQPGAELVKPGASVKMSCKASGYAFSSYWINWMKQKPGQGLEWIGQIYPGDGDTNYNGKFKGRATLTADTSSSTAYMQLSSLTSEDSAVYFCARSITTVVGCAMDYWGQGTSVTVSSTRIQNPDPAVYQLRDSKSSDKSVCLFTDFDSQTNVSQSKDSDVYITDKCVLDMRSMDFKSNSAVAWSNKSDFACANAFNNSIIPEDTFFPSPESSCDVKLVEKSFETDTNLNFQNLSVIGFRILLLKVAGFNLLMTLRLWSS

SEQ ID NO: 16624 - protein, 1326 aa, Artificial Sequence
  Synthetic Polypeptide
MALPVTALLLPLALLLHAARPEVQLVESGGGSVQTGGSLRLTCAASGRTSRSYGMGWFRQAPGKEREFVSGISWRGDSTGYADSVKGRFTISRDNAKNTVDLQMNSLKPEDTAIYYCAAAAGSAWYGTLYEYDYWGQGTLVTVSSGGGSGGGSEVQLVESGGSLVQPGGSLRLSCAASGFTFDDYAMSWVRQVPGKGLEWVSSINWSGTHTDYADSVKGRFTISRNNANNTLYLQMNSLKSEDTAVYYCAKNWRDAGTTWFEKSGSAGQGTQVTVSSGTGGGGSGGGGSGGGGSEFDIQMTQSPSSLSASVGDRVTITCKASDHINNWLAWYQQKPGQAPKLLIYGATTLETGVPSRFSGSGSGTDYTLTISSLQPEDFATYYCQQSWNTPWTFGQGTKLEIKRLEDLKNVFPPEVAVFEPSEAEISHTQKATLVCLATGFYPDHVELSWWVNGKEVHSGVCTDPQPLKEQPALNDSRYCLSSRLRVSATFWQNPRNHFRCQVQFYGLSENDEWTQDRAKPVTQIVSAEAWGRADCGFTSESYQQGVLSATILYEILLGKATLYAVLVSALVLMAMVKRKDSRGRAKRSGSGATNFSLLKQAGDVEENPGPTSMDWIWRILFLVGAATGAHSQLQLQESGPGLVKPSETLSLTCTVSGGSISSGDYYWGWIRQPPGKGLEWIGHIYYSGATYYNPSLKSRVTISVDTSRNQFSLKLSSVTAADTAVYYCTRDDSSNWRSRGQGTLVTVSSSGGGGSGGGGSVDNKFNKERYSAYYEIWQLPNLNVRQKAAFIGSLQDDPSQSANLLAEAKKLNDAQAPKGSGGGGSGGGGSGGGGSFEQVQLQQPGAELVKPGASVKMSCKASGYAFSSYWINWMKQKPGQGLEWIGQIYPGDGDTNYNGKFKGRATLTADTSSSTAYMQLSSLTSEDSAVYFCARSITTVVGCAMDYWGQGTSVTVSSTRIQNPDPAVYQLRDSKSSDKSVCLFTDFDSQTNVSQSKDSDVYITDKCVLDMRSMDFKSNSAVAWSNKSDFACANAFNNSIIPEDTFFPSPESSCDVKLVEKSFETDTNLNFQNLSVIGFRILLLKVAGFNLLMTLRLWSSRAKRSGSGVKQTLNFDLLKLAGDVESNPGPSRGGIHTMATYEVLCEVARKLGTDDREVVLFLLNVFIPQPTLAQLIGALRALKEEGRLTFPLLAECLFRAGRRDLLRDLLHLDPRFLERHLAGTMSYFSPYQLTVLHVDGELCARDIRSLIFLSKDTIGSRSTPQTFLHWVYCMENLDLLGPTDVDALMSMLRSLSRVDLQRQVQTLMGLHLSGPSHSQHYRHTP

SEQ ID NO: 16625 - protein, 1105 aa, Artificial Sequence
  Synthetic Polypeptide
MALPVTALLLPLALLLHAARPEVQLVESGGGSVQTGGSLRLTCAASGRTSRSYGMGWFRQAPGKEREFVSGISWRGDSTGYADSVKGRFTISRDNAKNTVDLQMNSLKPEDTAIYYCAAAAGSAWYGTLYEYDYWGQGTLVTVSSGGGSGGGSEVQLVESGGSLVQPGGSLRLSCAASGFTFDDYAMSWVRQVPGKGLEWVSSINWSGTHTDYADSVKGRFTISRNNANNTLYLQMNSLKSEDTAVYYCAKNWRDAGTTWFEKSGSAGQGTQVTVSSGTGGGGSGGGGSGGGGSEFDIQMTQSPSSLSASVGDRVTITCKASDHINNWLAWYQQKPGQAPKLLIYGATTLETGVPSRFSGSGSGTDYTLTISSLQPEDFATYYCQQSWNTPWTFGQGTKLEIKRLEIQNPDPAVYQLRDSKSSDKSVCLFTDFDSQTNVSQSKDSDVYITDKCVLDMRSMDFKSNSAVAWSNKSDFACANAFNNSIIPEDTFFPSPESSCDVKLVEKSFETDTNLNFQNLSVIGFRILLLKVAGFNLLMTLRLWSSRAKRSGSGVKQTLNFDLLKLAGDVESNPGPTSMDWIWRILFLVGAATGAHSQLQLQESGPGLVKPSETLSLTCTVSGGSISSGDYYWGWIRQPPGKGLEWIGHIYYSGATYYNPSLKSRVTISVDTSRNQFSLKLSSVTAADTAVYYCTRDDSSNWRSRGQGTLVTVSSSGGGGSGGGGSVDNKFNKERYSAYYEIWQLPNLNVRQKAAFIGSLQDDPSQSANLLAEAKKLNDAQAPKGSGGGGSGGGGSGGGGSFEQVQLQQPGAELVKPGASVKMSCKASGYAFSSYWINWMKQKPGQGLEWIGQIYPGDGDTNYNGKFKGRATLTADTSSSTAYMQLSSLTSEDSAVYFCARSITTVVGCAMDYWGQGTSVTVSSTREDLKNVFPPEVAVFEPSEAEISHTQKATLVCLATGFYPDHVELSWWVNGKEVHSGVCTDPQPLKEQPALNDSRYCLSSRLRVSATFWQNPRNHFRCQVQFYGLSENDEWTQDRAKPVTQIVSAEAWGRADCGFTSESYQQGVLSATILYEILLGKATLYAVLVSALVLMAMVKRKDSRG

SEQ ID NO: 16626 - protein, 1327 aa, Artificial Sequence
  Synthetic Polypeptide
MALPVTALLLPLALLLHAARPEVQLVESGGGSVQTGGSLRLTCAASGRTSRSYGMGWFRQAPGKEREFVSGISWRGDSTGYADSVKGRFTISRDNAKNTVDLQMNSLKPEDTAIYYCAAAAGSAWYGTLYEYDYWGQGTLVTVSSGGGSGGGSEVQLVESGGSLVQPGGSLRLSCAASGFTFDDYAMSWVRQVPGKGLEWVSSINWSGTHTDYADSVKGRFTISRNNANNTLYLQMNSLKSEDTAVYYCAKNWRDAGTTWFEKSGSAGQGTQVTVSSGTGGGGSGGGGSGGGGSEFDIQMTQSPSSLSASVGDRVTITCKASDHINNWLAWYQQKPGQAPKLLIYGATTLETGVPSRFSGSGSGTDYTLTISSLQPEDFATYYCQQSWNTPWTFGQGTKLEIKRLEIQNPDPAVYQLRDSKSSDKSVCLFTDFDSQTNVSQSKDSDVYITDKCVLDMRSMDFKSNSAVAWSNKSDFACANAFNNSIIPEDTFFPSPESSCDVKLVEKSFETDTNLNFQNLSVIGFRILLLKVAGFNLLMTLRLWSSRAKRSGSGVKQTLNFDLLKLAGDVESNPGPTSMDWIWRILFLVGAATGAHSQLQLQESGPGLVKPSETLSLTCTVSGGSISSGDYYWGWIRQPPGKGLEWIGHIYYSGATYYNPSLKSRVTISVDTSRNQFSLKLSSVTAADTAVYYCTRDDSSNWRSRGQGTLVTVSSSGGGGSGGGGSVDNKFNKERYSAYYEIWQLPNLNVRQKAAFIGSLQDDPSQSANLLAEAKKLNDAQAPKGSGGGGSGGGGSGGGGSFEQVQLQQPGAELVKPGASVKMSCKASGYAFSSYWINWMKQKPGQGLEWIGQIYPGDGDTNYNGKFKGRATLTADTSSSTAYMQLSSLTSEDSAVYFCARSITTVVGCAMDYWGQGTSVTVSSTREDLKNVFPPEVAVFEPSEAEISHTQKATLVCLATGFYPDHVELSWWVNGKEVHSGVCTDPQPLKEQPALNDSRYCLSSRLRVSATFWQNPRNHFRCQVQFYGLSENDEWTQDRAKPVTQIVSAEAWGRADCGFTSESYQQGVLSATILYEILLGKATLYAVLVSALVLMAMVKRKDSRGRAKRSGSGATNFSLLKQAGDVEENPGPSRGGIHTMATYEVLCEVARKLGTDDREVVLFLLNVFIPQPTLAQLIGALRALKEEGRLTFPLLAECLFRAGRRDLLRDLLHLDPRFLERHLAGTMSYFSPYQLTVLHVDGELCARDIRSLIFLSKDTIGSRSTPQTFLHWVYCMENLDLLGPTDVDALMSMLRSLSRVDLQRQVQTLMGLHLSGPSHSQHYRHTP

SEQ ID NO: 16627 - protein, 1334 aa, Artificial Sequence
  Synthetic Polypeptide
MALPVTALLLPLALLLHAARPEVQLVESGGGSVQTGGSLRLTCAASGRTSRSYGMGWFRQAPGKEREFVSGISWRGDSTGYADSVKGRFTISRDNAKNTVDLQMNSLKPEDTAIYYCAAAAGSAWYGTLYEYDYWGQGTLVTVSSGGGSGGGSEVQLVESGGSLVQPGGSLRLSCAASGFTFDDYAMSWVRQVPGKGLEWVSSINWSGTHTDYADSVKGRFTISRNNANNTLYLQMNSLKSEDTAVYYCAKNWRDAGTTWFEKSGSAGQGTQVTVSSGTGGGGSGGGGSGGGGSEFDIQMTQSPSSLSASVGDRVTITCKASDHINNWLAWYQQKPGQAPKLLIYGATTLETGVPSRFSGSGSGTDYTLTISSLQPEDFATYYCQQSWNTPWTFGQGTKLEIKRLEDLKNVFPPEVAVFEPSEAEISHTQKATLVCLATGFYPDHVELSWWVNGKEVHSGVSTDPQPLKEQPALNDSRYCLSSRLRVSATFWQNPRNHFRCQVQFYGLSENDEWTQDRAKPVTQIVSAEAWGRADCGFTSESYQQGVLSATILYEILLGKATLYAVLVSALVLMAMVKRKDSRGRAKRSGSGATNFSLLKQAGDVEENPGPTSMDWIWRILFLVGAATGAHSQLQLQESGPGLVKPSETLSLTCTVSGGSISSGDYYWGWIRQPPGKGLEWIGHIYYSGATYYNPSLKSRVTISVDTSRNQFSLKLSSVTAADTAVYYCTRDDSSNWRSRGQGTLVTVSSSGGGGSGGGGSVDNKFNKERYSAYYEIWQLPNLNVRQKAAFIGSLQDDPSQSANLLAEAKKLNDAQAPKGSGGGGSGGGGSGGGGSFEQVQLQQPGAELVKPGASVKMSCKASGYAFSSYWINWMKQKPGQGLEWIGQIYPGDGDTNYNGKFKGRATLTADTSSSTAYMQLSSLTSEDSAVYFCARSITTVVGCAMDYWGQGTSVTVSSTRIQNPDPAVYQLRDSKSSDKSVCLFTDFDSQTNVSQSKDSDVYITDKTVLDMRSMDFKSNSAVAWSNKSDFACANAFNNSIIPEDTFFPSPESSCDVKLVEKSFETDTNLNFQNLSVIGFRILLLKVAGFNLLMTLRLWSSRAKRSGSGVKQTLNFDLLKLAGDVESNPGPSRGHMTEYKPTVRLATRDDVPRAVRTLAAAFADYPATRHTVDPDRHIERVTELQELFLTRVGLDIGKVWVADDGAAVAVWTTPESVEAGAVFAEIGPRMAELSGSRLAAQQQMEGLLAPHRPKEPAWFLATVGVSPDHQGKGLGSAVVLPGVEAAERAGVPAFLETSAPRNLPFYERLGFTVTADVEVPEGPRTWCMTRKPGA

SEQ ID NO: 16628 - protein, 1416 aa, Artificial Sequence
  Synthetic Polypeptide
MALPVTALLLPLALLLHAARPEVQLVESGGGSVQTGGSLRLTCAASGRTSRSYGMGWFRQAPGKEREFVSGISWRGDSTGYADSVKGRFTISRDNAKNTVDLQMNSLKPEDTAIYYCAAAAGSAWYGTLYEYDYWGQGTLVTVSSGGGSGGGSEVQLVESGGSLVQPGGSLRLSCAASGFTFDDYAMSWVRQVPGKGLEWVSSINWSGTHTDYADSVKGRFTISRNNANNTLYLQMNSLKSEDTAVYYCAKNWRDAGTTWFEKSGSAGQGTQVTVSSGTGGGGSGGGGSGGGGSEFDIQMTQSPSSLSASVGDRVTITCKASDHINNWLAWYQQKPGQAPKLLIYGATTLETGVPSRFSGSGSGTDYTLTISSLQPEDFATYYCQQSWNTPWTFGQGTKLEIKRLEDLKNVFPPEVAVFEPSEAEISHTQKATLVCLATGFYPDHVELSWWVNGKEVHSGVSTDPQPLKEQPALNDSRYCLSSRLRVSATFWQNPRNHFRCQVQFYGLSENDEWTQDRAKPVTQIVSAEAWGRADCGFTSESYQQGVLSATILYEILLGKATLYAVLVSALVLMAMVKRKDSRGRAKRSGSGATNFSLLKQAGDVEENPGPTSMDWIWRILFLVGAATGAHSQLQLQESGPGLVKPSETLSLTCTVSGGSISSGDYYWGWIRQPPGKGLEWIGHIYYSGATYYNPSLKSRVTISVDTSRNQFSLKLSSVTAADTAVYYCTRDDSSNWRSRGQGTLVTVSSSGGGGSGGGGSVDNKFNKERYSAYYEIWQLPNLNVRQKAAFIGSLQDDPSQSANLLAEAKKLNDAQAPKGSGGGGSGGGGSGGGGSFEQVQLQQPGAELVKPGASVKMSCKASGYAFSSYWINWMKQKPGQGLEWIGQIYPGDGDTNYNGKFKGRATLTADTSSSTAYMQLSSLTSEDSAVYFCARSITTVVGCAMDYWGQGTSVTVSSTREQKLISEEDGSGTPFPSLAPPIMLLVDGKQQMVVVCLVLDVAPPGLDSPIWFSAGNGSALDAFTYGPSPATDGTWTNLAHLSLPSEELASWEPLVCHTGPGAEGHSRSTQPMHLSGEASTARTCPQEPLRGTPGGALWLGVLRLLLFKLLLFDLLLTCSCLCDPAGPLPSPATTTRLRALGSHRLHPATETGGREATSSPRPQPRDRRWGDTPPGRKPGSPVRAKRSGSGVKQTLNFDLLKLAGDVESNPGPSRGHMTEYKPTVRLATRDDVPRAVRTLAAAFADYPATRHTVDPDRHIERVTELQELFLTRVGLDIGKVWVADDGAAVAVWTTPESVEAGAVFAEIGPRMAELSGSRLAAQQQMEGLLAPHRPKEPAWFLATVGVSPDHQGKGLGSAVVLPGVEAAERAGVPAFLETSAPRNLPFYERLGFTVTADVEVPEGPRTWCMTRKPGA

SEQ ID NO: 16629 - protein, 1371 aa, Artificial Sequence
  Synthetic Polypeptide
MALPVTALLLPLALLLHAARPEVQLVESGGGSVQTGGSLRLTCAASGRTSRSYGMGWFRQAPGKEREFVSGISWRGDSTGYADSVKGRFTISRDNAKNTVDLQMNSLKPEDTAIYYCAAAAGSAWYGTLYEYDYWGQGTLVTVSSGGGSGGGSEVQLVESGGSLVQPGGSLRLSCAASGFTFDDYAMSWVRQVPGKGLEWVSSINWSGTHTDYADSVKGRFTISRNNANNTLYLQMNSLKSEDTAVYYCAKNWRDAGTTWFEKSGSAGQGTQVTVSSGTGGGGSGGGGSGGGGSEFDIQMTQSPSSLSASVGDRVTITCKASDHINNWLAWYQQKPGQAPKLLIYGATTLETGVPSRFSGSGSGTDYTLTISSLQPEDFATYYCQQSWNTPWTFGQGTKLEIKRLEGKPIPNPLLGLDSTGSGDKQLDADVSPKPTIFLPSIAETKLQKAGTYLCLLEKFFPDVIKIHWQEKKSNTILGSQEGNTMKTNDTYMKFSWLTVPEKSLDKEHRCIVRHENNKNGVDQEIIFPPIKTDVITMDPKDNCSKDANDTLLLQLTNTSAYYMYLLLLLKSVVYFAIITCCLLRRTAFCCNGEKSRAKRSGSGATNFSLLKQAGDVEENPGPTSMDWIWRILFLVGAATGAHSQLQLQESGPGLVKPSETLSLTCTVSGGSISSGDYYWGWIRQPPGKGLEWIGHIYYSGATYYNPSLKSRVTISVDTSRNQFSLKLSSVTAADTAVYYCTRDDSSNWRSRGQGTLVTVSSSGGGGSGGGGSVDNKFNKERYSAYYEIWQLPNLNVRQKAAFIGSLQDDPSQSANLLAEAKKLNDAQAPKGSGGGGSGGGGSGGGGSFEQVQLQQPGAELVKPGASVKMSCKASGYAFSSYWINWMKQKPGQGLEWIGQIYPGDGDTNYNGKFKGRATLTADTSSSTAYMQLSSLTSEDSAVYFCARSITTVVGCAMDYWGQGTSVTVSSTREQKLISEEDGSGSQPHTKPSVFVMKNGTNVACLVKEFYPKDIRINLVSSKKITEFDPAIVISPSGKYNAVKLGKYEDSNSVTCSVQHDNKTVHSTDFEVKTDSTDHVKPKETENTKQPSKSCHKPKAIVHTEKVNMMSLTVLGLRMLFAKTVAVNFLLTAKLFFLRAKRSGSGVKQTLNFDLLKLAGDVESNPGPSRGHMTEYKPTVRLATRDDVPRAVRTLAAAFADYPATRHTVDPDRHIERVTELQELFLTRVGLDIGKVWVADDGAAVAVWTTPESVEAGAVFAEIGPRMAELSGSRLAAQQQMEGLLAPHRPKEPAWFLATVGVSPDHQGKGLGSAVVLPGVEAAERAGVPAFLETSAPRNLPFYERLGFTVTADVEVPEGPRTWCMTRKPGA

SEQ ID NO: 16630 - protein, 1109 aa, Artificial Sequence
  Synthetic Polypeptide
MALPVTALLLPLALLLHAARPEVQLVESGGGSVQTGGSLRLTCAASGRTSRSYGMGWFRQAPGKEREFVSGISWRGDSTGYADSVKGRFTISRDNAKNTVDLQMNSLKPEDTAIYYCAAAAGSAWYGTLYEYDYWGQGTLVTVSSGGGSGGGSEVQLVESGGSLVQPGGSLRLSCAASGFTFDDYAMSWVRQVPGKGLEWVSSINWSGTHTDYADSVKGRFTISRNNANNTLYLQMNSLKSEDTAVYYCAKNWRDAGTTWFEKSGSAGQGTQVTVSSGTGGGGSGGGGSGGGGSEFDIQMTQSPSSLSASVGDRVTITCKASDHINNWLAWYQQKPGQAPKLLIYGATTLETGVPSRFSGSGSGTDYTLTISSLQPEDFATYYCQQSWNTPWTFGQGTKLEIKRLESQPHTKPSVFVMKNGTNVACLVKEFYPKDIRINLVSSKKITEFDPAIVISPSGKYNAVKLGKYEDSNSVTCSVQHDNKTVHSTDFEVKTDSTDHVKPKETENTKQPSKSCHKPKAIVHTEKVNMMSLTVLGLRMLFAKTVAVNFLLTAKLFFLRAKRSGSGATNFSLLKQAGDVEENPGPTSMDWIWRILFLVGAATGAHSQLQLQESGPGLVKPSETLSLTCTVSGGSISSGDYYWGWIRQPPGKGLEWIGHIYYSGATYYNPSLKSRVTISVDTSRNQFSLKLSSVTAADTAVYYCTRDDSSNWRSRGQGTLVTVSSSGGGGSGGGGSVDNKFNKERYSAYYEIWQLPNLNVRQKAAFIGSLQDDPSQSANLLAEAKKLNDAQAPKGSGGGGSGGGGSGGGGSFEQVQLQQPGAELVKPGASVKMSCKASGYAFSSYWINWMKQKPGQGLEWIGQIYPGDGDTNYNGKFKGRATLTADTSSSTAYMQLSSLTSEDSAVYFCARSITTVVGCAMDYWGQGTSVTVSSTRDKQLDADVSPKPTIFLPSIAETKLQKAGTYLCLLEKFFPDVIKIHWQEKKSNTILGSQEGNTMKTNDTYMKFSWLTVPEKSLDKEHRCIVRHENNKNGVDQEIIFPPIKTDVITMDPKDNCSKDANDTLLLQLTNTSAYYMYLLLLLKSVVYFAIITCCLLRRTAFCCNGEKS

SEQ ID NO: 16631 - protein, 1511 aa, Artificial Sequence
  Synthetic Polypeptide
MALPVTALLLPLALLLHAARPEVQLVESGGGSVQTGGSLRLTCAASGRTSRSYGMGWFRQAPGKEREFVSGISWRGDSTGYADSVKGRFTISRDNAKNTVDLQMNSLKPEDTAIYYCAAAAGSAWYGTLYEYDYWGQGTLVTVSSGGGSGGGSEVQLVESGGSLVQPGGSLRLSCAASGFTFDDYAMSWVRQVPGKGLEWVSSINWSGTHTDYADSVKGRFTISRNNANNTLYLQMNSLKSEDTAVYYCAKNWRDAGTTWFEKSGSAGQGTQVTVSSGTGGGGSGGGGSGGGGSEFDIQMTQSPSSLSASVGDRVTITCKASDHINNWLAWYQQKPGQAPKLLIYGATTLETGVPSRFSGSGSGTDYTLTISSLQPEDFATYYCQQSWNTPWTFGQGTKLEIKRGQPKANPTVTLFPPSSEELQANKATLVCLISDFYPGAVTVAWKADGSPVKAGVETTKPSKQSNNKYAASSYLSLTPEQWKSHRSYSCQVTHEGSTVEKTVAPTECSGSQSFGLLDPKLCYLLDGILFIYGVILTALFLRVKFSRSADAPAYQQGQNQLYNELNLGRREEYDVLDKRRGRDPEMGGKPQRRKNPQEGLYNELQKDKMAEAYSEIGMKGERRRGKGHDGLYQGLSTATKDTYDALHMQALPPRRAKRSGSGATNFSLLKQAGDVEENPGPTSMDWIWRILFLVGAATGAHSQLQLQESGPGLVKPSETLSLTCTVSGGSISSGDYYWGWIRQPPGKGLEWIGHIYYSGATYYNPSLKSRVTISVDTSRNQFSLKLSSVTAADTAVYYCTRDDSSNWRSRGQGTLVTVSSSGGGGSGGGGSVDNKFNKERYSAYYEIWQLPNLNVRQKAAFIGSLQDDPSQSANLLAEAKKLNDAQAPKGSGGGGSGGGGSGGGGSFEQVQLQQPGAELVKPGASVKMSCKASGYAFSSYWINWMKQKPGQGLEWIGQIYPGDGDTNYNGKFKGRATLTADTSSSTAYMQLSSLTSEDSAVYFCARSITTVVGCAMDYWGQGTSVTVSSASTKGPSVFPLAPSSKSTSGGTAALGCLVKDYFPEPVTVSWNSGALTSGVHTFPAVLQSSGLYSLSSVVTVPSSSLGTQTYICNVNHKPSNTKVDKRVEPKSCGTQSFGLLDPKLCYLLDGILFIYGVILTALFLRVKFSRSADAPAYQQGQNQLYNELNLGRREEYDVLDKRRGRDPEMGGKPQRRKNPQEGLYNELQKDKMAEAYSEIGMKGERRRGKGHDGLYQGLSTATKDTYDALHMQALPPRRAKRSGSGVKQTLNFDLLKLAGDVESNPGPSRGHMTEYKPTVRLATRDDVPRAVRTLAAAFADYPATRHTVDPDRHIERVTELQELFLTRVGLDIGKVWVADDGAAVAVWTTPESVEAGAVFAEIGPRMAELSGSRLAAQQQMEGLLAPHRPKEPAWFLATVGVSPDHQGKGLGSAVVLPGVEAAERAGVPAFLETSAPRNLPFYERLGFTVTADVEVPEGPRTWCMTRKPGA

SEQ ID NO: 16632 - protein, 1297 aa, Artificial Sequence
  Synthetic Polypeptide
MALPVTALLLPLALLLHAARPEVQLVESGGGSVQTGGSLRLTCAASGRTSRSYGMGWFRQAPGKEREFVSGISWRGDSTGYADSVKGRFTISRDNAKNTVDLQMNSLKPEDTAIYYCAAAAGSAWYGTLYEYDYWGQGTLVTVSSGGGSGGGSEVQLVESGGSLVQPGGSLRLSCAASGFTFDDYAMSWVRQVPGKGLEWVSSINWSGTHTDYADSVKGRFTISRNNANNTLYLQMNSLKSEDTAVYYCAKNWRDAGTTWFEKSGSAGQGTQVTVSSGTGGGGSGGGGSGGGGSEFDIQMTQSPSSLSASVGDRVTITCKASDHINNWLAWYQQKPGQAPKLLIYGATTLETGVPSRFSGSGSGTDYTLTISSLQPEDFATYYCQQSWNTPWTFGQGTKLEIKRLEDLKNVFPPEVAVFEPSEAEISHTQKATLVCLATGFYPDHVELSWWVNGKEVHSGVSTDPQPLKEQPALNDSRYCLSSRLRVSATFWQNPRNHFRCQVQFYGLSENDEWTQDRAKPVTQIVSAEAWGRADCGSQSFGLLDPKLCYLLDGILFIYGVILTALFLRVKFSRSADAPAYQQGQNQLYNELNLGRREEYDVLDKRRGRDPEMGGKPQRRKNPQEGLYNELQKDKMAEAYSEIGMKGERRRGKGHDGLYQGLSTATKDTYDALHMQALPPRRAKRSGSGATNFSLLKQAGDVEENPGPTSMDWIWRILFLVGAATGAHSQLQLQESGPGLVKPSETLSLTCTVSGGSISSGDYYWGWIRQPPGKGLEWIGHIYYSGATYYNPSLKSRVTISVDTSRNQFSLKLSSVTAADTAVYYCTRDDSSNWRSRGQGTLVTVSSSGGGGSGGGGSVDNKFNKERYSAYYEIWQLPNLNVRQKAAFIGSLQDDPSQSANLLAEAKKLNDAQAPKGSGGGGSGGGGSGGGGSFEQVQLQQPGAELVKPGASVKMSCKASGYAFSSYWINWMKQKPGQGLEWIGQIYPGDGDTNYNGKFKGRATLTADTSSSTAYMQLSSLTSEDSAVYFCARSITTVVGCAMDYWGQGTSVTVSSTRIQNPDPAVYQLRDSKSSDKSVCLFTDFDSQTNVSQSKDSDVYITDKTVLDMRSMDFKSNSAVAWSNKSDFACANAFNNSIIPEDTFFPSPESSCGTQSFGLLDPKLCYLLDGILFIYGVILTALFLRVKFSRSADAPAYQQGQNQLYNELNLGRREEYDVLDKRRGRDPEMGGKPQRRKNPQEGLYNELQKDKMAEAYSEIGMKGERRRGKGHDGLYQGLSTATKDTYDALHMQALPPR

SEQ ID NO: 16633 - protein, 1297 aa, Artificial Sequence
  Synthetic Polypeptide
MALPVTALLLPLALLLHAARPEVQLVESGGGSVQTGGSLRLTCAASGRTSRSYGMGWFRQAPGKEREFVSGISWRGDSTGYADSVKGRFTISRDNAKNTVDLQMNSLKPEDTAIYYCAAAAGSAWYGTLYEYDYWGQGTLVTVSSGGGSGGGSEVQLVESGGSLVQPGGSLRLSCAASGFTFDDYAMSWVRQVPGKGLEWVSSINWSGTHTDYADSVKGRFTISRNNANNTLYLQMNSLKSEDTAVYYCAKNWRDAGTTWFEKSGSAGQGTQVTVSSGTGGGGSGGGGSGGGGSEFDIQMTQSPSSLSASVGDRVTITCKASDHINNWLAWYQQKPGQAPKLLIYGATTLETGVPSRFSGSGSGTDYTLTISSLQPEDFATYYCQQSWNTPWTFGQGTKLEIKRLEDLKNVFPPEVAVFEPSKAEIAHTQKATLVCLATGFYPDHVELSWWVNGKEVHSGVCTDPQPLKEQPALNDSRYCLSSRLRVSATFWQNPRNHFRCQVQFYGLSENDEWTQDRAKPVTQIVSAEAWGRADCGSQSFGLLDPKLCYLLDGILFIYGVILTALFLRVKFSRSADAPAYQQGQNQLYNELNLGRREEYDVLDKRRGRDPEMGGKPQRRKNPQEGLYNELQKDKMAEAYSEIGMKGERRRGKGHDGLYQGLSTATKDTYDALHMQALPPRRAKRSGSGATNFSLLKQAGDVEENPGPTSMDWIWRILFLVGAATGAHSQLQLQESGPGLVKPSETLSLTCTVSGGSISSGDYYWGWIRQPPGKGLEWIGHIYYSGATYYNPSLKSRVTISVDTSRNQFSLKLSSVTAADTAVYYCTRDDSSNWRSRGQGTLVTVSSSGGGGSGGGGSVDNKFNKERYSAYYEIWQLPNLNVRQKAAFIGSLQDDPSQSANLLAEAKKLNDAQAPKGSGGGGSGGGGSGGGGSFEQVQLQQPGAELVKPGASVKMSCKASGYAFSSYWINWMKQKPGQGLEWIGQIYPGDGDTNYNGKFKGRATLTADTSSSTAYMQLSSLTSEDSAVYFCARSITTVVGCAMDYWGQGTSVTVSSTRIQNPDPAVYQLRDSKSSDKSVCLFTDFDSQTNVSQSKDSDVYITDKCVLDMRSMDFKSNSAVAWSNKSDFACANAFNNSIIPEDTFFPSSDVPCGTQSFGLLDPKLCYLLDGILFIYGVILTALFLRVKFSRSADAPAYQQGQNQLYNELNLGRREEYDVLDKRRGRDPEMGGKPQRRKNPQEGLYNELQKDKMAEAYSEIGMKGERRRGKGHDGLYQGLSTATKDTYDALHMQALPPR

SEQ ID NO: 16634 - protein, 1368 aa, Artificial Sequence
  Synthetic Polypeptide
MALPVTALLLPLALLLHAARPEVQLVESGGGSVQTGGSLRLTCAASGRTSRSYGMGWFRQAPGKEREFVSGISWRGDSTGYADSVKGRFTISRDNAKNTVDLQMNSLKPEDTAIYYCAAAAGSAWYGTLYEYDYWGQGTLVTVSSGGGSGGGSEVQLVESGGSLVQPGGSLRLSCAASGFTFDDYAMSWVRQVPGKGLEWVSSINWSGTHTDYADSVKGRFTISRNNANNTLYLQMNSLKSEDTAVYYCAKNWRDAGTTWFEKSGSAGQGTQVTVSSGTGGGGSGGGGSGGGGSEFDIQMTQSPSSLSASVGDRVTITCKASDHINNWLAWYQQKPGQAPKLLIYGATTLETGVPSRFSGSGSGTDYTLTISSLQPEDFATYYCQQSWNTPWTFGQGTKLEIKRLEGKPIPNPLLGLDSTGSGEDLKNVFPPEVAVFEPSEAEISHTQKATLVCLATGFYPDHVELSWWVNGKEVHSGVSTDPQPLKEQPALNDSRYCLSSRLRVSATFWQNPRNHFRCQVQFYGLSENDEWTQDRAKPVTQIVSAEAWGRADCGSQSFGLLDPKLCYLLDGILFIYGVILTALFLRVKFSRSADAPAYQQGQNQLYNELNLGRREEYDVLDKRRGRDPEMGGKPQRRKNPQEGLYNELQKDKMAEAYSEIGMKGERRRGKGHDGLYQGLSTATKDTYDALHMQALPPRRAKRSGSGATNFSLLKQAGDVEENPGPTSMDWIWRILFLVGAATGAHSQLQLQESGPGLVKPSETLSLTCTVSGGSISSGDYYWGWIRQPPGKGLEWIGHIYYSGATYYNPSLKSRVTISVDTSRNQFSLKLSSVTAADTAVYYCTRDDSSNWRSRGQGTLVTVSSSGGGGSGGGGSVDNKFNKERYSAYYEIWQLPNLNVRQKAAFIGSLQDDPSQSANLLAEAKKLNDAQAPKGSGGGGSGGGGSGGGGSFEQVQLQQPGAELVKPGASVKMSCKASGYAFSSYWINWMKQKPGQGLEWIGQIYPGDGDTNYNGKFKGRATLTADTSSSTAYMQLSSLTSEDSAVYFCARSITTVVGCAMDYWGQGTSVTVSSTREQKLISEEDGSGIQNPDPAVYQLRDSKSSDKSVCLFTDFDSQTNVSQSKDSDVYITDKTVLDMRSMDFKSNSAVAWSNKSDFACANAFNNSIIPEDTFFPSPESSCGTQSFGLLDPKLCYLLDGILFIYGVILTALFLRSKRSRLLHSDYMNMTPRRPGPTRKHYQPYAPPRDFAAYRSRVKFSRSADAPAYQQGQNQLYNELNLGRREEYDVLDKRRGRDPEMGGKPQRRKNPQEGLYNELQKDKMAEAYSEIGMKGERRRGKGHDGLYQGLSTATKDTYDALHMQALPPR

SEQ ID NO: 16635 - protein, 1409 aa, Artificial Sequence
  Synthetic Polypeptide
MALPVTALLLPLALLLHAARPEVQLVESGGGSVQTGGSLRLTCAASGRTSRSYGMGWFRQAPGKEREFVSGISWRGDSTGYADSVKGRFTISRDNAKNTVDLQMNSLKPEDTAIYYCAAAAGSAWYGTLYEYDYWGQGTLVTVSSGGGSGGGSEVQLVESGGSLVQPGGSLRLSCAASGFTFDDYAMSWVRQVPGKGLEWVSSINWSGTHTDYADSVKGRFTISRNNANNTLYLQMNSLKSEDTAVYYCAKNWRDAGTTWFEKSGSAGQGTQVTVSSGTGGGGSGGGGSGGGGSEFDIQMTQSPSSLSASVGDRVTITCKASDHINNWLAWYQQKPGQAPKLLIYGATTLETGVPSRFSGSGSGTDYTLTISSLQPEDFATYYCQQSWNTPWTFGQGTKLEIKRLEGKPIPNPLLGLDSTGSGEDLKNVFPPEVAVFEPSEAEISHTQKATLVCLATGFYPDHVELSWWVNGKEVHSGVSTDPQPLKEQPALNDSRYCLSSRLRVSATFWQNPRNHFRCQVQFYGLSENDEWTQDRAKPVTQIVSAEAWGRADCGSQSFGLLDPKLCYLLDGILFIYGVILTALFLRSKRSRLLHSDYMNMTPRRPGPTRKHYQPYAPPRDFAAYRSRVKFSRSADAPAYQQGQNQLYNELNLGRREEYDVLDKRRGRDPEMGGKPQRRKNPQEGLYNELQKDKMAEAYSEIGMKGERRRGKGHDGLYQGLSTATKDTYDALHMQALPPRRAKRSGSGATNFSLLKQAGDVEENPGPTSMDWIWRILFLVGAATGAHSQLQLQESGPGLVKPSETLSLTCTVSGGSISSGDYYWGWIRQPPGKGLEWIGHIYYSGATYYNPSLKSRVTISVDTSRNQFSLKLSSVTAADTAVYYCTRDDSSNWRSRGQGTLVTVSSSGGGGSGGGGSVDNKFNKERYSAYYEIWQLPNLNVRQKAAFIGSLQDDPSQSANLLAEAKKLNDAQAPKGSGGGGSGGGGSGGGGSFEQVQLQQPGAELVKPGASVKMSCKASGYAFSSYWINWMKQKPGQGLEWIGQIYPGDGDTNYNGKFKGRATLTADTSSSTAYMQLSSLTSEDSAVYFCARSITTVVGCAMDYWGQGTSVTVSSTREQKLISEEDGSGIQNPDPAVYQLRDSKSSDKSVCLFTDFDSQTNVSQSKDSDVYITDKTVLDMRSMDFKSNSAVAWSNKSDFACANAFNNSIIPEDTFFPSPESSCGTQSFGLLDPKLCYLLDGILFIYGVILTALFLRSKRSRLLHSDYMNMTPRRPGPTRKHYQPYAPPRDFAAYRSRVKFSRSADAPAYQQGQNQLYNELNLGRREEYDVLDKRRGRDPEMGGKPQRRKNPQEGLYNELQKDKMAEAYSEIGMKGERRRGKGHDGLYQGLSTATKDTYDALHMQALPPR

SEQ ID NO: 16636 - protein, 1370 aa, Artificial Sequence
  Synthetic Polypeptide
MALPVTALLLPLALLLHAARPEVQLVESGGGSVQTGGSLRLTCAASGRTSRSYGMGWFRQAPGKEREFVSGISWRGDSTGYADSVKGRFTISRDNAKNTVDLQMNSLKPEDTAIYYCAAAAGSAWYGTLYEYDYWGQGTLVTVSSGGGSGGGSEVQLVESGGSLVQPGGSLRLSCAASGFTFDDYAMSWVRQVPGKGLEWVSSINWSGTHTDYADSVKGRFTISRNNANNTLYLQMNSLKSEDTAVYYCAKNWRDAGTTWFEKSGSAGQGTQVTVSSGTGGGGSGGGGSGGGGSEFDIQMTQSPSSLSASVGDRVTITCKASDHINNWLAWYQQKPGQAPKLLIYGATTLETGVPSRFSGSGSGTDYTLTISSLQPEDFATYYCQQSWNTPWTFGQGTKLEIKRLEGKPIPNPLLGLDSTGSGEDLKNVFPPEVAVFEPSEAEISHTQKATLVCLATGFYPDHVELSWWVNGKEVHSGVSTDPQPLKEQPALNDSRYCLSSRLRVSATFWQNPRNHFRCQVQFYGLSENDEWTQDRAKPVTQIVSAEAWGRADCGSQSFGLLDPKLCYLLDGILFIYGVILTALFLRVKFSRSADAPAYQQGQNQLYNELNLGRREEYDVLDKRRGRDPEMGGKPQRRKNPQEGLYNELQKDKMAEAYSEIGMKGERRRGKGHDGLYQGLSTATKDTYDALHMQALPPRRAKRSGSGATNFSLLKQAGDVEENPGPTSMDWIWRILFLVGAATGAHSQLQLQESGPGLVKPSETLSLTCTVSGGSISSGDYYWGWIRQPPGKGLEWIGHIYYSGATYYNPSLKSRVTISVDTSRNQFSLKLSSVTAADTAVYYCTRDDSSNWRSRGQGTLVTVSSSGGGGSGGGGSVDNKFNKERYSAYYEIWQLPNLNVRQKAAFIGSLQDDPSQSANLLAEAKKLNDAQAPKGSGGGGSGGGGSGGGGSFEQVQLQQPGAELVKPGASVKMSCKASGYAFSSYWINWMKQKPGQGLEWIGQIYPGDGDTNYNGKFKGRATLTADTSSSTAYMQLSSLTSEDSAVYFCARSITTVVGCAMDYWGQGTSVTVSSTREQKLISEEDLGSGIQNPDPAVYQLRDSKSSDKSVCLFTDFDSQTNVSQSKDSDVYITDKTVLDMRSMDFKSNSAVAWSNKSDFACANAFNNSIIPEDTFFPSPESSCGTQSFGLLDPKLCYLLDGILFIYGVILTALFLKRGRKKLLYIFKQPFMRPVQTTQEEDGCSCRFPEEEEGGCELRVKFSRSADAPAYQQGQNQLYNELNLGRREEYDVLDKRRGRDPEMGGKPQRRKNPQEGLYNELQKDKMAEAYSEIGMKGERRRGKGHDGLYQGLSTATKDTYDALHMQALPPR

SEQ ID NO: 16637 - protein, 1412 aa, Artificial Sequence
  Synthetic Polypeptide
MALPVTALLLPLALLLHAARPEVQLVESGGGSVQTGGSLRLTCAASGRTSRSYGMGWFRQAPGKEREFVSGISWRGDSTGYADSVKGRFTISRDNAKNTVDLQMNSLKPEDTAIYYCAAAAGSAWYGTLYEYDYWGQGTLVTVSSGGGSGGGSEVQLVESGGSLVQPGGSLRLSCAASGFTFDDYAMSWVRQVPGKGLEWVSSINWSGTHTDYADSVKGRFTISRNNANNTLYLQMNSLKSEDTAVYYCAKNWRDAGTTWFEKSGSAGQGTQVTVSSGTGGGGSGGGGSGGGGSEFDIQMTQSPSSLSASVGDRVTITCKASDHINNWLAWYQQKPGQAPKLLIYGATTLETGVPSRFSGSGSGTDYTLTISSLQPEDFATYYCQQSWNTPWTFGQGTKLEIKRLEGKPIPNPLLGLDSTGSGEDLKNVFPPEVAVFEPSEAEISHTQKATLVCLATGFYPDHVELSWWVNGKEVHSGVSTDPQPLKEQPALNDSRYCLSSRLRVSATFWQNPRNHFRCQVQFYGLSENDEWTQDRAKPVTQIVSAEAWGRADCGSQSFGLLDPKLCYLLDGILFIYGVILTALFLKRGRKKLLYIFKQPFMRPVQTTQEEDGCSCRFPEEEEGGCELRVKFSRSADAPAYQQGQNQLYNELNLGRREEYDVLDKRRGRDPEMGGKPQRRKNPQEGLYNELQKDKMAEAYSEIGMKGERRRGKGHDGLYQGLSTATKDTYDALHMQALPPRRAKRSGSGATNFSLLKQAGDVEENPGPTSMDWIWRILFLVGAATGAHSQLQLQESGPGLVKPSETLSLTCTVSGGSISSGDYYWGWIRQPPGKGLEWIGHIYYSGATYYNPSLKSRVTISVDTSRNQFSLKLSSVTAADTAVYYCTRDDSSNWRSRGQGTLVTVSSSGGGGSGGGGSVDNKFNKERYSAYYEIWQLPNLNVRQKAAFIGSLQDDPSQSANLLAEAKKLNDAQAPKGSGGGGSGGGGSGGGGSFEQVQLQQPGAELVKPGASVKMSCKASGYAFSSYWINWMKQKPGQGLEWIGQIYPGDGDTNYNGKFKGRATLTADTSSSTAYMQLSSLTSEDSAVYFCARSITTVVGCAMDYWGQGTSVTVSSTREQKLISEEDLGSGIQNPDPAVYQLRDSKSSDKSVCLFTDFDSQTNVSQSKDSDVYITDKTVLDMRSMDFKSNSAVAWSNKSDFACANAFNNSIIPEDTFFPSPESSCGTQSFGLLDPKLCYLLDGILFIYGVILTALFLKRGRKKLLYIFKQPFMRPVQTTQEEDGCSCRFPEEEEGGCELRVKFSRSADAPAYQQGQNQLYNELNLGRREEYDVLDKRRGRDPEMGGKPQRRKNPQEGLYNELQKDKMAEAYSEIGMKGERRRGKGHDGLYQGLSTATKDTYDALHMQALPPR

SEQ ID NO: 16638 - protein, 1302 aa, Artificial Sequence
  Synthetic Polypeptide
MALPVTALLLPLALLLHAARPEVQLVESGGGSVQTGGSLRLTCAASGRTSRSYGMGWFRQAPGKEREFVSGISWRGDSTGYADSVKGRFTISRDNAKNTVDLQMNSLKPEDTAIYYCAAAAGSAWYGTLYEYDYWGQGTLVTVSSGGGSGGGSEVQLVESGGSLVQPGGSLRLSCAASGFTFDDYAMSWVRQVPGKGLEWVSSINWSGTHTDYADSVKGRFTISRNNANNTLYLQMNSLKSEDTAVYYCAKNWRDAGTTWFEKSGSAGQGTQVTVSSGTGGGGSGGGGSGGGGSEFDIQMTQSPSSLSASVGDRVTITCKASDHINNWLAWYQQKPGQAPKLLIYGATTLETGVPSRFSGSGSGTDYTLTISSLQPEDFATYYCQQSWNTPWTFGQGTKLEIKRLEQSFGLLDPKLCYLLDGILFIYGVILTALFLRVKFSRSADAPAYQQGQNQLYNELNLGRREEYDVLDKRRGRDPEMGGKPQRRKNPQEGLYNELQKDKMAEAYSEIGMKGERRRGKGHDGLYQGLSTATKDTYDALHMQALPPRRAKRSGSGATNFSLLKQAGDVEENPGPTSMDWIWRILFLVGAATGAHSQLQLQESGPGLVKPSETLSLTCTVSGGSISSGDYYWGWIRQPPGKGLEWIGHIYYSGATYYNPSLKSRVTISVDTSRNQFSLKLSSVTAADTAVYYCTRDDSSNWRSRGQGTLVTVSSSGGGGSGGGGSVDNKFNKERYSAYYEIWQLPNLNVRQKAAFIGSLQDDPSQSANLLAEAKKLNDAQAPKGSGGGGSGGGGSGGGGSFEQVQLQQPGAELVKPGASVKMSCKASGYAFSSYWINWMKQKPGQGLEWIGQIYPGDGDTNYNGKFKGRATLTADTSSSTAYMQLSSLTSEDSAVYFCARSITTVVGCAMDYWGQGTSVTVSSTRQSFGLLDPKLCYLLDGILFIYGVILTALFLRVKFSRSADAPAYQQGQNQLYNELNLGRREEYDVLDKRRGRDPEMGGKPQRRKNPQEGLYNELQKDKMAEAYSEIGMKGERRRGKGHDGLYQGLSTATKDTYDALHMQALPPRRAKRSGSGVKQTLNFDLLKLAGDVESNPGPSRGHMTEYKPTVRLATRDDVPRAVRTLAAAFADYPATRHTVDPDRHIERVTELQELFLTRVGLDIGKVWVADDGAAVAVWTTPESVEAGAVFAEIGPRMAELSGSRLAAQQQMEGLLAPHRPKEPAWFLATVGVSPDHQGKGLGSAVVLPGVEAAERAGVPAFLETSAPRNLPFYERLGFTVTADVEVPEGPRTWCMTRKPGA

SEQ ID NO: 16639 - protein, 1127 aa, Artificial Sequence
  Synthetic Polypeptide
MALPVTALLLPLALLLHAARPEVQLVESGGGSVQTGGSLRLTCAASGRTSRSYGMGWFRQAPGKEREFVSGISWRGDSTGYADSVKGRFTISRDNAKNTVDLQMNSLKPEDTAIYYCAAAAGSAWYGTLYEYDYWGQGTLVTVSSGGGSGGGSEVQLVESGGSLVQPGGSLRLSCAASGFTFDDYAMSWVRQVPGKGLEWVSSINWSGTHTDYADSVKGRFTISRNNANNTLYLQMNSLKSEDTAVYYCAKNWRDAGTTWFEKSGSAGQGTQVTVSSGTGGGGSGGGGSGGGGSEFDIQMTQSPSSLSASVGDRVTITCKASDHINNWLAWYQQKPGQAPKLLIYGATTLETGVPSRFSGSGSGTDYTLTISSLQPEDFATYYCQQSWNTPWTFGQGTKLEIKRLEGQPKANPTVTLFPPSSEELQANKATLVCLISDFYPGAVTVAWKADGSPVKAGVETTKPSKQSNNKYAASSYLSLTPEQWKSHRSYSCQVTHEGSTVEKTVAPTECSPIKTDVITMDPKDNCSKDANDTLLLQLTNTSAYYMYLLLLLKSVVYFAIITCCLLRRTAFCCNGEKSRAKRSGSGATNFSLLKQAGDVEENPGPTSMDWIWRILFLVGAATGAHSQLQLQESGPGLVKPSETLSLTCTVSGGSISSGDYYWGWIRQPPGKGLEWIGHIYYSGATYYNPSLKSRVTISVDTSRNQFSLKLSSVTAADTAVYYCTRDDSSNWRSRGQGTLVTVSSSGGGGSGGGGSVDNKFNKERYSAYYEIWQLPNLNVRQKAAFIGSLQDDPSQSANLLAEAKKLNDAQAPKGSGGGGSGGGGSGGGGSFEQVQLQQPGAELVKPGASVKMSCKASGYAFSSYWINWMKQKPGQGLEWIGQIYPGDGDTNYNGKFKGRATLTADTSSSTAYMQLSSLTSEDSAVYFCARSITTVVGCAMDYWGQGTSVTVSSTRASTKGPSVFPLAPSSKSTSGGTAALGCLVKDYFPEPVTVSWNSGALTSGVHTFPAVLQSSGLYSLSSVVTVPSSSLGTQTYICNVNHKPSNTKVDKRVEPKSCEVKTDSTDHVKPKETENTKQPSKSCHKPKAIVHTEKVNMMSLTVLGLRMLFAKTVAVNFLLTAKLFFL

SEQ ID NO: 16640 - protein, 1105 aa, Artificial Sequence
  Synthetic Polypeptide
MALPVTALLLPLALLLHAARPEVQLVESGGGSVQTGGSLRLTCAASGRTSRSYGMGWFRQAPGKEREFVSGISWRGDSTGYADSVKGRFTISRDNAKNTVDLQMNSLKPEDTAIYYCAAAAGSAWYGTLYEYDYWGQGTLVTVSSGGGSGGGSEVQLVESGGSLVQPGGSLRLSCAASGFTFDDYAMSWVRQVPGKGLEWVSSINWSGTHTDYADSVKGRFTISRNNANNTLYLQMNSLKSEDTAVYYCAKNWRDAGTTWFEKSGSAGQGTQVTVSSGTGGGGSGGGGSGGGGSEFDIQMTQSPSSLSASVGDRVTITCKASDHINNWLAWYQQKPGQAPKLLIYGATTLETGVPSRFSGSGSGTDYTLTISSLQPEDFATYYCQQSWNTPWTFGQGTKLEIKRLEGQPKANPTVTLFPPSSEELQANKATLVCLISDFYPGAVTVAWKADGSPVKAGVETTKPSKQSNNKYAASSYLSLTPEQWKSHRSYSCQVTHEGSTVEKTVAPTECSGRADCGITSASYHQGVLSATILYEILLGKATLYAVLVSALVLMAMVKRKDSRGRAKRSGSGATNFSLLKQAGDVEENPGPTSMDWIWRILFLVGAATGAHSQLQLQESGPGLVKPSETLSLTCTVSGGSISSGDYYWGWIRQPPGKGLEWIGHIYYSGATYYNPSLKSRVTISVDTSRNQFSLKLSSVTAADTAVYYCTRDDSSNWRSRGQGTLVTVSSSGGGGSGGGGSVDNKFNKERYSAYYEIWQLPNLNVRQKAAFIGSLQDDPSQSANLLAEAKKLNDAQAPKGSGGGGSGGGGSGGGGSFEQVQLQQPGAELVKPGASVKMSCKASGYAFSSYWINWMKQKPGQGLEWIGQIYPGDGDTNYNGKFKGRATLTADTSSSTAYMQLSSLTSEDSAVYFCARSITTVVGCAMDYWGQGTSVTVSSTRASTKGPSVFPLAPSSKSTSGGTAALGCLVKDYFPEPVTVSWNSGALTSGVHTFPAVLQSSGLYSLSSVVTVPSSSLGTQTYICNVNHKPSNTKVDKRVEPKSCIPEDTFFPSSDVPCDVKLVEKSFETDTNLNFQNLSVIGFRILLLKVAGFNLLMTLRLWSS

SEQ ID NO: 16641 - protein, 1105 aa, Artificial Sequence
  Synthetic Polypeptide
MALPVTALLLPLALLLHAARPEVQLVESGGGSVQTGGSLRLTCAASGRTSRSYGMGWFRQAPGKEREFVSGISWRGDSTGYADSVKGRFTISRDNAKNTVDLQMNSLKPEDTAIYYCAAAAGSAWYGTLYEYDYWGQGTLVTVSSGGGSGGGSEVQLVESGGSLVQPGGSLRLSCAASGFTFDDYAMSWVRQVPGKGLEWVSSINWSGTHTDYADSVKGRFTISRNNANNTLYLQMNSLKSEDTAVYYCAKNWRDAGTTWFEKSGSAGQGTQVTVSSGTGGGGSGGGGSGGGGSEFDIQMTQSPSSLSASVGDRVTITCKASDHINNWLAWYQQKPGQAPKLLIYGATTLETGVPSRFSGSGSGTDYTLTISSLQPEDFATYYCQQSWNTPWTFGQGTKLEIKRLEGQPKANPTVTLFPPSSEELQANKATLVCLISDFYPGAVTVAWKADGSPVKAGVETTKPSKQSNNKYAASSYLSLTPEQWKSHRSYSCQVTHEGSTVEKTVAPTECSGRADCGFTSESYQQGVLSATILYEILLGKATLYAVLVSALVLMAMVKRKDSRGRAKRSGSGATNFSLLKQAGDVEENPGPTSMDWIWRILFLVGAATGAHSQLQLQESGPGLVKPSETLSLTCTVSGGSISSGDYYWGWIRQPPGKGLEWIGHIYYSGATYYNPSLKSRVTISVDTSRNQFSLKLSSVTAADTAVYYCTRDDSSNWRSRGQGTLVTVSSSGGGGSGGGGSVDNKFNKERYSAYYEIWQLPNLNVRQKAAFIGSLQDDPSQSANLLAEAKKLNDAQAPKGSGGGGSGGGGSGGGGSFEQVQLQQPGAELVKPGASVKMSCKASGYAFSSYWINWMKQKPGQGLEWIGQIYPGDGDTNYNGKFKGRATLTADTSSSTAYMQLSSLTSEDSAVYFCARSITTVVGCAMDYWGQGTSVTVSSTRASTKGPSVFPLAPSSKSTSGGTAALGCLVKDYFPEPVTVSWNSGALTSGVHTFPAVLQSSGLYSLSSVVTVPSSSLGTQTYICNVNHKPSNTKVDKRVEPKSCIPEDTFFPSPESSCDVKLVEKSFETDTNLNFQNLSVIGFRILLLKVAGFNLLMTLRLWSS

SEQ ID NO: 16642 - protein, 1071 aa, Artificial Sequence
  Synthetic Polypeptide
MALPVTALLLPLALLLHAARPEVQLVESGGGSVQTGGSLRLTCAASGRTSRSYGMGWFRQAPGKEREFVSGISWRGDSTGYADSVKGRFTISRDNAKNTVDLQMNSLKPEDTAIYYCAAAAGSAWYGTLYEYDYWGQGTLVTVSSGGGSGGGSEVQLVESGGSLVQPGGSLRLSCAASGFTFDDYAMSWVRQVPGKGLEWVSSINWSGTHTDYADSVKGRFTISRNNANNTLYLQMNSLKSEDTAVYYCAKNWRDAGTTWFEKSGSAGQGTQVTVSSLEGQPKANPTVTLFPPSSEELQANKATLVCLISDFYPGAVTVAWKADGSPVKAGVETTKPSKQSNNKYAASSYLSLTPEQWKSHRSYSCQVTHEGSTVEKTVAPTECSGRADCGFTSESYQQGVLSATILYEILLGKATLYAVLVSALVLMAMVKRKDSRGRAKRSGSGATNFSLLKQAGDVEENPGPTSMDWIWRILFLVGAATGAHSQLQLQESGPGLVKPSETLSLTCTVSGGSISSGDYYWGWIRQPPGKGLEWIGHIYYSGATYYNPSLKSRVTISVDTSRNQFSLKLSSVTAADTAVYYCTRDDSSNWRSRGQGTLVTVSSSGGGGSGGGGSVDNKFNKERYSAYYEIWQLPNLNVRQKAAFIGSLQDDPSQSANLLAEAKKLNDAQAPKTRASTKGPSVFPLAPSSKSTSGGTAALGCLVKDYFPEPVTVSWNSGALTSGVHTFPAVLQSSGLYSLSSVVTVPSSSLGTQTYICNVNHKPSNTKVDKRVEPKSCIPEDTFFPSPESSCDVKLVEKSFETDTNLNFQNLSVIGFRILLLKVAGFNLLMTLRLWSSRAKRSGSGVKQTLNFDLLKLAGDVESNPGPSRGHMTEYKPTVRLATRDDVPRAVRTLAAAFADYPATRHTVDPDRHIERVTELQELFLTRVGLDIGKVWVADDGAAVAVWTTPESVEAGAVFAEIGPRMAELSGSRLAAQQQMEGLLAPHRPKEPAWFLATVGVSPDHQGKGLGSAVVLPGVEAAERAGVPAFLETSAPRNLPFYERLGFTVTADVEVPEGPRTWCMTRKPGA

SEQ ID NO: 16643 - protein, 838 aa, Artificial Sequence
  Synthetic Polypeptide
MALPVTALLLPLALLLHAARPEVQLVESGGGSVQTGGSLRLTCAASGRTSRSYGMGWFRQAPGKEREFVSGISWRGDSTGYADSVKGRFTISRDNAKNTVDLQMNSLKPEDTAIYYCAAAAGSAWYGTLYEYDYWGQGTLVTVSSGGGSGGGSEVQLVESGGSLVQPGGSLRLSCAASGFTFDDYAMSWVRQVPGKGLEWVSSINWSGTHTDYADSVKGRFTISRNNANNTLYLQMNSLKSEDTAVYYCAKNWRDAGTTWFEKSGSAGQGTQVTVSSLEGQPKANPTVTLFPPSSEELQANKATLVCLISDFYPGAVTVAWKADGSPVKAGVETTKPSKQSNNKYAASSYLSLTPEQWKSHRSYSCQVTHEGSTVEKTVAPTECSGRADCGFTSESYQQGVLSATILYEILLGKATLYAVLVSALVLMAMVKRKDSRGRAKRSGSGATNFSLLKQAGDVEENPGPTSMDWIWRILFLVGAATGAHSQLQLQESGPGLVKPSETLSLTCTVSGGSISSGDYYWGWIRQPPGKGLEWIGHIYYSGATYYNPSLKSRVTISVDTSRNQFSLKLSSVTAADTAVYYCTRDDSSNWRSRGQGTLVTVSSSGGGGSGGGGSVDNKFNKERYSAYYEIWQLPNLNVRQKAAFIGSLQDDPSQSANLLAEAKKLNDAQAPKTRASTKGPSVFPLAPSSKSTSGGTAALGCLVKDYFPEPVTVSWNSGALTSGVHTFPAVLQSSGLYSLSSVVTVPSSSLGTQTYICNVNHKPSNTKVDKRVEPKSCIPEDTFFPSPESSCDVKLVEKSFETDTNLNFQNLSVIGFRILLLKVAGFNLLMTLRLWSS

SEQ ID NO: 16644 - protein, 866 aa, Artificial Sequence
  Synthetic Polypeptide
MALPVTALLLPLALLLHAARPEVQLVESGGGSVQTGGSLRLTCAASGRTSRSYGMGWFRQAPGKEREFVSGISWRGDSTGYADSVKGRFTISRDNAKNTVDLQMNSLKPEDTAIYYCAAAAGSAWYGTLYEYDYWGQGTLVTVSSGGGSGGGSEVQLVESGGSLVQPGGSLRLSCAASGFTFDDYAMSWVRQVPGKGLEWVSSINWSGTHTDYADSVKGRFTISRNNANNTLYLQMNSLKSEDTAVYYCAKNWRDAGTTWFEKSGSAGQGTQVTVSSLEGSGRADCGFTSESYQQGVLSATILYEILLGKATLYAVLVSALVLMAMVKRKDSRGRAKRSGSGATNFSLLKQAGDVEENPGPTSMDWIWRILFLVGAATGAHSQLQLQESGPGLVKPSETLSLTCTVSGGSISSGDYYWGWIRQPPGKGLEWIGHIYYSGATYYNPSLKSRVTISVDTSRNQFSLKLSSVTAADTAVYYCTRDDSSNWRSRGQGTLVTVSSSGGGGSGGGGSVDNKFNKERYSAYYEIWQLPNLNVRQKAAFIGSLQDDPSQSANLLAEAKKLNDAQAPKTRGSIPEDTFFPSPESSCDVKLVEKSFETDTNLNFQNLSVIGFRILLLKVAGFNLLMTLRLWSSRAKRSGSGVKQTLNFDLLKLAGDVESNPGPSRGHMTEYKPTVRLATRDDVPRAVRTLAAAFADYPATRHTVDPDRHIERVTELQELFLTRVGLDIGKVWVADDGAAVAVWTTPESVEAGAVFAEIGPRMAELSGSRLAAQQQMEGLLAPHRPKEPAWFLATVGVSPDHQGKGLGSAVVLPGVEAAERAGVPAFLETSAPRNLPFYERLGFTVTADVEVPEGPRTWCMTRKPGA

SEQ ID NO: 16645 - protein, 633 aa, Artificial Sequence
  Synthetic Polypeptide
MALPVTALLLPLALLLHAARPEVQLVESGGGSVQTGGSLRLTCAASGRTSRSYGMGWFRQAPGKEREFVSGISWRGDSTGYADSVKGRFTISRDNAKNTVDLQMNSLKPEDTAIYYCAAAAGSAWYGTLYEYDYWGQGTLVTVSSGGGSGGGSEVQLVESGGSLVQPGGSLRLSCAASGFTFDDYAMSWVRQVPGKGLEWVSSINWSGTHTDYADSVKGRFTISRNNANNTLYLQMNSLKSEDTAVYYCAKNWRDAGTTWFEKSGSAGQGTQVTVSSLEGSGRADCGFTSESYQQGVLSATILYEILLGKATLYAVLVSALVLMAMVKRKDSRGRAKRSGSGATNFSLLKQAGDVEENPGPTSMDWIWRILFLVGAATGAHSQLQLQESGPGLVKPSETLSLTCTVSGGSISSGDYYWGWIRQPPGKGLEWIGHIYYSGATYYNPSLKSRVTISVDTSRNQFSLKLSSVTAADTAVYYCTRDDSSNWRSRGQGTLVTVSSSGGGGSGGGGSVDNKFNKERYSAYYEIWQLPNLNVRQKAAFIGSLQDDPSQSANLLAEAKKLNDAQAPKTRGSIPEDTFFPSPESSCDVKLVEKSFETDTNLNFQNLSVIGFRILLLKVAGFNLLMTLRLWSS

SEQ ID NO: 16646 - protein, 875 aa, Artificial Sequence
  Synthetic Polypeptide
MALPVTALLLPLALLLHAARPEVQLVESGGGSVQTGGSLRLTCAASGRTSRSYGMGWFRQAPGKEREFVSGISWRGDSTGYADSVKGRFTISRDNAKNTVDLQMNSLKPEDTAIYYCAAAAGSAWYGTLYEYDYWGQGTLVTVSSGGGSGGGSEVQLVESGGSLVQPGGSLRLSCAASGFTFDDYAMSWVRQVPGKGLEWVSSINWSGTHTDYADSVKGRFTISRNNANNTLYLQMNSLKSEDTAVYYCAKNWRDAGTTWFEKSGSAGQGTQVTVSSLEDKTHTCPPCPAGRADCGFTSESYQQGVLSATILYEILLGKATLYAVLVSALVLMAMVKRKDSRGRAKRSGSGATNFSLLKQAGDVEENPGPTSMDWIWRILFLVGAATGAHSQLQLQESGPGLVKPSETLSLTCTVSGGSISSGDYYWGWIRQPPGKGLEWIGHIYYSGATYYNPSLKSRVTISVDTSRNQFSLKLSSVTAADTAVYYCTRDDSSNWRSRGQGTLVTVSSSGGGGSGGGGSVDNKFNKERYSAYYEIWQLPNLNVRQKAAFIGSLQDDPSQSANLLAEAKKLNDAQAPKTRGSIPEDTFFPSPESSCDVKLVEKSFETDTNLNFQNLSVIGFRILLLKVAGFNLLMTLRLWSSRAKRSGSGVKQTLNFDLLKLAGDVESNPGPSRGHMTEYKPTVRLATRDDVPRAVRTLAAAFADYPATRHTVDPDRHIERVTELQELFLTRVGLDIGKVWVADDGAAVAVWTTPESVEAGAVFAEIGPRMAELSGSRLAAQQQMEGLLAPHRPKEPAWFLATVGVSPDHQGKGLGSAVVLPGVEAAERAGVPAFLETSAPRNLPFYERLGFTVTADVEVPEGPRTWCMTRKPGA

SEQ ID NO: 16647 - protein, 875 aa, Artificial Sequence
  Synthetic Polypeptide
MALPVTALLLPLALLLHAARPEVQLVESGGGSVQTGGSLRLTCAASGRTSRSYGMGWFRQAPGKEREFVSGISWRGDSTGYADSVKGRFTISRDNAKNTVDLQMNSLKPEDTAIYYCAAAAGSAWYGTLYEYDYWGQGTLVTVSSGGGSGGGSEVQLVESGGSLVQPGGSLRLSCAASGFTFDDYAMSWVRQVPGKGLEWVSSINWSGTHTDYADSVKGRFTISRNNANNTLYLQMNSLKSEDTAVYYCAKNWRDAGTTWFEKSGSAGQGTQVTVSSLEGSGRADCGFTSESYQQGVLSATILYEILLGKATLYAVLVSALVLMAMVKRKDSRGRAKRSGSGATNFSLLKQAGDVEENPGPTSMDWIWRILFLVGAATGAHSQLQLQESGPGLVKPSETLSLTCTVSGGSISSGDYYWGWIRQPPGKGLEWIGHIYYSGATYYNPSLKSRVTISVDTSRNQFSLKLSSVTAADTAVYYCTRDDSSNWRSRGQGTLVTVSSSGGGGSGGGGSVDNKFNKERYSAYYEIWQLPNLNVRQKAAFIGSLQDDPSQSANLLAEAKKLNDAQAPKTRDKTHTCPPCPAIPEDTFFPSPESSCDVKLVEKSFETDTNLNFQNLSVIGFRILLLKVAGFNLLMTLRLWSSRAKRSGSGVKQTLNFDLLKLAGDVESNPGPSRGHMTEYKPTVRLATRDDVPRAVRTLAAAFADYPATRHTVDPDRHIERVTELQELFLTRVGLDIGKVWVADDGAAVAVWTTPESVEAGAVFAEIGPRMAELSGSRLAAQQQMEGLLAPHRPKEPAWFLATVGVSPDHQGKGLGSAVVLPGVEAAERAGVPAFLETSAPRNLPFYERLGFTVTADVEVPEGPRTWCMTRKPGA

SEQ ID NO: 16648 - protein, 884 aa, Artificial Sequence
  Synthetic Polypeptide
MALPVTALLLPLALLLHAARPEVQLVESGGGSVQTGGSLRLTCAASGRTSRSYGMGWFRQAPGKEREFVSGISWRGDSTGYADSVKGRFTISRDNAKNTVDLQMNSLKPEDTAIYYCAAAAGSAWYGTLYEYDYWGQGTLVTVSSGGGSGGGSEVQLVESGGSLVQPGGSLRLSCAASGFTFDDYAMSWVRQVPGKGLEWVSSINWSGTHTDYADSVKGRFTISRNNANNTLYLQMNSLKSEDTAVYYCAKNWRDAGTTWFEKSGSAGQGTQVTVSSLEDKTHTCPPCPAGRADCGFTSESYQQGVLSATILYEILLGKATLYAVLVSALVLMAMVKRKDSRGRAKRSGSGATNFSLLKQAGDVEENPGPTSMDWIWRILFLVGAATGAHSQLQLQESGPGLVKPSETLSLTCTVSGGSISSGDYYWGWIRQPPGKGLEWIGHIYYSGATYYNPSLKSRVTISVDTSRNQFSLKLSSVTAADTAVYYCTRDDSSNWRSRGQGTLVTVSSSGGGGSGGGGSVDNKFNKERYSAYYEIWQLPNLNVRQKAAFIGSLQDDPSQSANLLAEAKKLNDAQAPKTRDKTHTCPPCPAIPEDTFFPSPESSCDVKLVEKSFETDTNLNFQNLSVIGFRILLLKVAGFNLLMTLRLWSSRAKRSGSGVKQTLNFDLLKLAGDVESNPGPSRGHMTEYKPTVRLATRDDVPRAVRTLAAAFADYPATRHTVDPDRHIERVTELQELFLTRVGLDIGKVWVADDGAAVAVWTTPESVEAGAVFAEIGPRMAELSGSRLAAQQQMEGLLAPHRPKEPAWFLATVGVSPDHQGKGLGSAVVLPGVEAAERAGVPAFLETSAPRNLPFYERLGFTVTADVEVPEGPRTWCMTRKPGA

SEQ ID NO: 16649 - protein, 651 aa, Artificial Sequence
  Synthetic Polypeptide
MALPVTALLLPLALLLHAARPEVQLVESGGGSVQTGGSLRLTCAASGRTSRSYGMGWFRQAPGKEREFVSGISWRGDSTGYADSVKGRFTISRDNAKNTVDLQMNSLKPEDTAIYYCAAAAGSAWYGTLYEYDYWGQGTLVTVSSGGGSGGGSEVQLVESGGSLVQPGGSLRLSCAASGFTFDDYAMSWVRQVPGKGLEWVSSINWSGTHTDYADSVKGRFTISRNNANNTLYLQMNSLKSEDTAVYYCAKNWRDAGTTWFEKSGSAGQGTQVTVSSLEDKTHTCPPCPAGRADCGFTSESYQQGVLSATILYEILLGKATLYAVLVSALVLMAMVKRKDSRGRAKRSGSGATNFSLLKQAGDVEENPGPTSMDWIWRILFLVGAATGAHSQLQLQESGPGLVKPSETLSLTCTVSGGSISSGDYYWGWIRQPPGKGLEWIGHIYYSGATYYNPSLKSRVTISVDTSRNQFSLKLSSVTAADTAVYYCTRDDSSNWRSRGQGTLVTVSSSGGGGSGGGGSVDNKFNKERYSAYYEIWQLPNLNVRQKAAFIGSLQDDPSQSANLLAEAKKLNDAQAPKTRDKTHTCPPCPAIPEDTFFPSPESSCDVKLVEKSFETDTNLNFQNLSVIGFRILLLKVAGFNLLMTLRLWSS

SEQ ID NO: 16650 - protein, 642 aa, Artificial Sequence
  Synthetic Polypeptide
MALPVTALLLPLALLLHAARPEVQLVESGGGSVQTGGSLRLTCAASGRTSRSYGMGWFRQAPGKEREFVSGISWRGDSTGYADSVKGRFTISRDNAKNTVDLQMNSLKPEDTAIYYCAAAAGSAWYGTLYEYDYWGQGTLVTVSSGGGSGGGSEVQLVESGGSLVQPGGSLRLSCAASGFTFDDYAMSWVRQVPGKGLEWVSSINWSGTHTDYADSVKGRFTISRNNANNTLYLQMNSLKSEDTAVYYCAKNWRDAGTTWFEKSGSAGQGTQVTVSSLEGSGRADCGFTSESYQQGVLSATILYEILLGKATLYAVLVSALVLMAMVKRKDSRGRAKRSGSGATNFSLLKQAGDVEENPGPTSMDWIWRILFLVGAATGAHSQLQLQESGPGLVKPSETLSLTCTVSGGSISSGDYYWGWIRQPPGKGLEWIGHIYYSGATYYNPSLKSRVTISVDTSRNQFSLKLSSVTAADTAVYYCTRDDSSNWRSRGQGTLVTVSSSGGGGSGGGGSVDNKFNKERYSAYYEIWQLPNLNVRQKAAFIGSLQDDPSQSANLLAEAKKLNDAQAPKTRDKTHTCPPCPAIPEDTFFPSPESSCDVKLVEKSFETDTNLNFQNLSVIGFRILLLKVAGFNLLMTLRLWSS

SEQ ID NO: 16651 - protein, 1093 aa, Artificial Sequence
  Synthetic Polypeptide
MALPVTALLLPLALLLHAARPEVQLVESGGGSVQTGGSLRLTCAASGRTSRSYGMGWFRQAPGKEREFVSGISWRGDSTGYADSVKGRFTISRDNAKNTVDLQMNSLKPEDTAIYYCAAAAGSAWYGTLYEYDYWGQGTLVTVSSGGGSGGGSEVQLVESGGSLVQPGGSLRLSCAASGFTFDDYAMSWVRQVPGKGLEWVSSINWSGTHTDYADSVKGRFTISRNNANNTLYLQMNSLKSEDTAVYYCAKNWRDAGTTWFEKSGSAGQGTQVTVSSLEGQPKANPTVTLFPPSSEELQANKATLVCLISDFYPGAVTVAWKADGSPVKAGVETTKPSKQSNNKYAASSYLSLTPEQWKSHRSYSCQVTHEGSTVEKTVAPTECSPIKTDVITMDPKDNCSKDANDTLLLQLTNTSAYYMYLLLLLKSVVYFAIITCCLLRRTAFCCNGEKSRAKRSGSGATNFSLLKQAGDVEENPGPTSMDWIWRILFLVGAATGAHSQLQLQESGPGLVKPSETLSLTCTVSGGSISSGDYYWGWIRQPPGKGLEWIGHIYYSGATYYNPSLKSRVTISVDTSRNQFSLKLSSVTAADTAVYYCTRDDSSNWRSRGQGTLVTVSSSGGGGSGGGGSVDNKFNKERYSAYYEIWQLPNLNVRQKAAFIGSLQDDPSQSANLLAEAKKLNDAQAPKTRASTKGPSVFPLAPSSKSTSGGTAALGCLVKDYFPEPVTVSWNSGALTSGVHTFPAVLQSSGLYSLSSVVTVPSSSLGTQTYICNVNHKPSNTKVDKRVEPKSCEVKTDSTDHVKPKETENTKQPSKSCHKPKAIVHTEKVNMMSLTVLGLRMLFAKTVAVNFLLTAKLFFLRAKRSGSGVKQTLNFDLLKLAGDVESNPGPSRGHMTEYKPTVRLATRDDVPRAVRTLAAAFADYPATRHTVDPDRHIERVTELQELFLTRVGLDIGKVWVADDGAAVAVWTTPESVEAGAVFAEIGPRMAELSGSRLAAQQQMEGLLAPHRPKEPAWFLATVGVSPDHQGKGLGSAVVLPGVEAAERAGVPAFLETSAPRNLPFYERLGFTVTADVEVPEGPRTWCMTRKPGA

SEQ ID NO: 16652 - protein, 860 aa, Artificial Sequence
  Synthetic Polypeptide
MALPVTALLLPLALLLHAARPEVQLVESGGGSVQTGGSLRLTCAASGRTSRSYGMGWFRQAPGKEREFVSGISWRGDSTGYADSVKGRFTISRDNAKNTVDLQMNSLKPEDTAIYYCAAAAGSAWYGTLYEYDYWGQGTLVTVSSGGGSGGGSEVQLVESGGSLVQPGGSLRLSCAASGFTFDDYAMSWVRQVPGKGLEWVSSINWSGTHTDYADSVKGRFTISRNNANNTLYLQMNSLKSEDTAVYYCAKNWRDAGTTWFEKSGSAGQGTQVTVSSLEGQPKANPTVTLFPPSSEELQANKATLVCLISDFYPGAVTVAWKADGSPVKAGVETTKPSKQSNNKYAASSYLSLTPEQWKSHRSYSCQVTHEGSTVEKTVAPTECSPIKTDVITMDPKDNCSKDANDTLLLQLTNTSAYYMYLLLLLKSVVYFAIITCCLLRRTAFCCNGEKSRAKRSGSGATNFSLLKQAGDVEENPGPTSMDWIWRILFLVGAATGAHSQLQLQESGPGLVKPSETLSLTCTVSGGSISSGDYYWGWIRQPPGKGLEWIGHIYYSGATYYNPSLKSRVTISVDTSRNQFSLKLSSVTAADTAVYYCTRDDSSNWRSRGQGTLVTVSSSGGGGSGGGGSVDNKFNKERYSAYYEIWQLPNLNVRQKAAFIGSLQDDPSQSANLLAEAKKLNDAQAPKTRASTKGPSVFPLAPSSKSTSGGTAALGCLVKDYFPEPVTVSWNSGALTSGVHTFPAVLQSSGLYSLSSVVTVPSSSLGTQTYICNVNHKPSNTKVDKRVEPKSCEVKTDSTDHVKPKETENTKQPSKSCHKPKAIVHTEKVNMMSLTVLGLRMLFAKTVAVNFLLTAKLFFL

SEQ ID NO: 16653 - protein, 888 aa, Artificial Sequence
  Synthetic Polypeptide
MALPVTALLLPLALLLHAARPEVQLVESGGGSVQTGGSLRLTCAASGRTSRSYGMGWFRQAPGKEREFVSGISWRGDSTGYADSVKGRFTISRDNAKNTVDLQMNSLKPEDTAIYYCAAAAGSAWYGTLYEYDYWGQGTLVTVSSGGGSGGGSEVQLVESGGSLVQPGGSLRLSCAASGFTFDDYAMSWVRQVPGKGLEWVSSINWSGTHTDYADSVKGRFTISRNNANNTLYLQMNSLKSEDTAVYYCAKNWRDAGTTWFEKSGSAGQGTQVTVSSLEGSPIKTDVITMDPKDNCSKDANDTLLLQLTNTSAYYMYLLLLLKSVVYFAIITCCLLRRTAFCCNGEKSRAKRSGSGATNFSLLKQAGDVEENPGPTSMDWIWRILFLVGAATGAHSQLQLQESGPGLVKPSETLSLTCTVSGGSISSGDYYWGWIRQPPGKGLEWIGHIYYSGATYYNPSLKSRVTISVDTSRNQFSLKLSSVTAADTAVYYCTRDDSSNWRSRGQGTLVTVSSSGGGGSGGGGSVDNKFNKERYSAYYEIWQLPNLNVRQKAAFIGSLQDDPSQSANLLAEAKKLNDAQAPKTRGSEVKTDSTDHVKPKETENTKQPSKSCHKPKAIVHTEKVNMMSLTVLGLRMLFAKTVAVNFLLTAKLFFLRAKRSGSGVKQTLNFDLLKLAGDVESNPGPSRGHMTEYKPTVRLATRDDVPRAVRTLAAAFADYPATRHTVDPDRHIERVTELQELFLTRVGLDIGKVWVADDGAAVAVWTTPESVEAGAVFAEIGPRMAELSGSRLAAQQQMEGLLAPHRPKEPAWFLATVGVSPDHQGKGLGSAVVLPGVEAAERAGVPAFLETSAPRNLPFYERLGFTVTADVEVPEGPRTWCMTRKPGA

SEQ ID NO: 16654 - protein, 655 aa, Artificial Sequence
  Synthetic Polypeptide
MALPVTALLLPLALLLHAARPEVQLVESGGGSVQTGGSLRLTCAASGRTSRSYGMGWFRQAPGKEREFVSGISWRGDSTGYADSVKGRFTISRDNAKNTVDLQMNSLKPEDTAIYYCAAAAGSAWYGTLYEYDYWGQGTLVTVSSGGGSGGGSEVQLVESGGSLVQPGGSLRLSCAASGFTFDDYAMSWVRQVPGKGLEWVSSINWSGTHTDYADSVKGRFTISRNNANNTLYLQMNSLKSEDTAVYYCAKNWRDAGTTWFEKSGSAGQGTQVTVSSLEGSPIKTDVITMDPKDNCSKDANDTLLLQLTNTSAYYMYLLLLLKSVVYFAIITCCLLRRTAFCCNGEKSRAKRSGSGATNFSLLKQAGDVEENPGPTSMDWIWRILFLVGAATGAHSQLQLQESGPGLVKPSETLSLTCTVSGGSISSGDYYWGWIRQPPGKGLEWIGHIYYSGATYYNPSLKSRVTISVDTSRNQFSLKLSSVTAADTAVYYCTRDDSSNWRSRGQGTLVTVSSSGGGGSGGGGSVDNKFNKERYSAYYEIWQLPNLNVRQKAAFIGSLQDDPSQSANLLAEAKKLNDAQAPKTRGSEVKTDSTDHVKPKETENTKQPSKSCHKPKAIVHTEKVNMMSLTVLGLRMLFAKTVAVNFLLTAKLFFL

SEQ ID NO: 16655 - protein, 673 aa, Artificial Sequence
  Synthetic Polypeptide
MALPVTALLLPLALLLHAARPEVQLVESGGGSVQTGGSLRLTCAASGRTSRSYGMGWFRQAPGKEREFVSGISWRGDSTGYADSVKGRFTISRDNAKNTVDLQMNSLKPEDTAIYYCAAAAGSAWYGTLYEYDYWGQGTLVTVSSGGGSGGGSEVQLVESGGSLVQPGGSLRLSCAASGFTFDDYAMSWVRQVPGKGLEWVSSINWSGTHTDYADSVKGRFTISRNNANNTLYLQMNSLKSEDTAVYYCAKNWRDAGTTWFEKSGSAGQGTQVTVSSLEDKTHTCPPCPAPIKTDVITMDPKDNCSKDANDTLLLQLTNTSAYYMYLLLLLKSVVYFAIITCCLLRRTAFCCNGEKSRAKRSGSGATNFSLLKQAGDVEENPGPTSMDWIWRILFLVGAATGAHSQLQLQESGPGLVKPSETLSLTCTVSGGSISSGDYYWGWIRQPPGKGLEWIGHIYYSGATYYNPSLKSRVTISVDTSRNQFSLKLSSVTAADTAVYYCTRDDSSNWRSRGQGTLVTVSSSGGGGSGGGGSVDNKFNKERYSAYYEIWQLPNLNVRQKAAFIGSLQDDPSQSANLLAEAKKLNDAQAPKTRDKTHTCPPCPAEVKTDSTDHVKPKETENTKQPSKSCHKPKAIVHTEKVNMMSLTVLGLRMLFAKTVAVNFLLTAKLFFL

SEQ ID NO: 16656 - protein, 371 aa, Artificial Sequence
  Synthetic Polypeptide
MDWIWRILFLVGAATGAHSQLQLQESGPGLVKPSETLSLTCTVSGGSISSGDYYWGWIRQPPGKGLEWIGHIYYSGATYYNPSLKSRVTISVDTSRNQFSLKLSSVTAADTAVYYCTRDDSSNWRSRGQGTLVTVSSSGGGGSGGGGSVDNKFNKERYSAYYEIWQLPNLNVRQKAAFIGSLQDDPSQSANLLAEAKKLNDAQAPKTRASTKGPSVFPLAPSSKSTSGGTAALGCLVKDYFPEPVTVSWNSGALTSGVHTFPAVLQSSGLYSLSSVVTVPSSSLGTQTYICNVNHKPSNTKVDKRVEPKSCIPEDTFFPSPESSCDVKLVEKSFETDTNLNFQNLSVIGFRILLLKVAGFNLLMTLRLWSS

SEQ ID NO: 16657 - protein, 379 aa, Artificial Sequence
  Synthetic Polypeptide
MDWIWRILFLVGAATGAHSQLQLQESGPGLVKPSETLSLTCTVSGGSISSGDYYWGWIRQPPGKGLEWIGHIYYSGATYYNPSLKSRVTISVDTSRNQFSLKLSSVTAADTAVYYCTRDDSSNWRSRGQGTLVTVSSSGGGGSGGGGSVDNKFNKERYSAYYEIWQLPNLNVRQKAAFIGSLQDDPSQSANLLAEAKKLNDAQAPKTRASTKGPSVFPLAPSSKSTSGGTAALGCLVKDYFPEPVTVSWNSGALTSGVHTFPAVLQSSGLYSLSSVVTVPSSSLGTQTYICNVNHKPSNTKVDKRVEPKSCEVKTDSTDHVKPKETENTKQPSKSCHKPKAIVHTEKVNMMSLTVLGLRMLFAKTVAVNFLLTAKLFFL

SEQ ID NO: 16658 - protein, 640 aa, Artificial Sequence; identical to SEQ ID NO: 16410
  Synthetic Polypeptide

SEQ ID NO: 16659 - protein, 646 aa, Artificial Sequence; identical to SEQ ID NO: 16411
  Synthetic Polypeptide

SEQ ID NO: 16660 - protein, 1059 aa, Artificial Sequence; identical to SEQ ID NO: 16412
  Synthetic Polypeptide

SEQ ID NO: 16661 - protein, 999 aa, Artificial Sequence; identical to SEQ ID NO: 16413
  Synthetic Polypeptide

SEQ ID NO: 16662 - protein, 998 aa, Artificial Sequence; identical to SEQ ID NO: 16414
  Synthetic Polypeptide

SEQ ID NO: 16663 - protein, 765 aa, Artificial Sequence; identical to SEQ ID NO: 16415
  Synthetic Polypeptide

SEQ ID NO: 16664 - protein, 990 aa, Artificial Sequence; identical to SEQ ID NO: 16416
  Synthetic Polypeptide

SEQ ID NO: 16665 - protein, 769 aa, Artificial Sequence; identical to SEQ ID NO: 16417
  Synthetic Polypeptide

SEQ ID NO: 16666 - protein, 991 aa, Artificial Sequence; identical to SEQ ID NO: 16418
  Synthetic Polypeptide

SEQ ID NO: 16667 - protein, 1043 aa, Artificial Sequence; identical to SEQ ID NO: 16419
  Synthetic Polypeptide

SEQ ID NO: 16668 - protein, 1044 aa, Artificial Sequence; identical to SEQ ID NO: 16420
  Synthetic Polypeptide

SEQ ID NO: 16669 - protein, 998 aa, Artificial Sequence; identical to SEQ ID NO: 16421
  Synthetic Polypeptide

SEQ ID NO: 16670 - protein, 1080 aa, Artificial Sequence; identical to SEQ ID NO: 16422
  Synthetic Polypeptide

SEQ ID NO: 16671 - protein, 1098 aa, Artificial Sequence; identical to SEQ ID NO: 16423
  Synthetic Polypeptide

SEQ ID NO: 16672 - protein, 1035 aa, Artificial Sequence; identical to SEQ ID NO: 16424
  Synthetic Polypeptide

SEQ ID NO: 16673 - protein, 773 aa, Artificial Sequence; identical to SEQ ID NO: 16425
  Synthetic Polypeptide

SEQ ID NO: 16674 - protein, 1050 aa, Artificial Sequence; identical to SEQ ID NO: 16426
  Synthetic Polypeptide

SEQ ID NO: 16675 - protein, 1175 aa, Artificial Sequence; identical to SEQ ID NO: 16427
  Synthetic Polypeptide

SEQ ID NO: 16676 - protein, 961 aa, Artificial Sequence; identical to SEQ ID NO: 16428
  Synthetic Polypeptide

SEQ ID NO: 16677 - protein, 961 aa, Artificial Sequence; identical to SEQ ID NO: 16429
  Synthetic Polypeptide

SEQ ID NO: 16678 - protein, 1032 aa, Artificial Sequence; identical to SEQ ID NO: 16430
  Synthetic Polypeptide

SEQ ID NO: 16679 - protein, 1073 aa, Artificial Sequence; identical to SEQ ID NO: 16431
  Synthetic Polypeptide

SEQ ID NO: 16680 - protein, 1034 aa, Artificial Sequence; identical to SEQ ID NO: 16432
  Synthetic Polypeptide

SEQ ID NO: 16681 - protein, 1076 aa, Artificial Sequence; identical to SEQ ID NO: 16433
  Synthetic Polypeptide

SEQ ID NO: 16682 - protein, 966 aa, Artificial Sequence; identical to SEQ ID NO: 16434
  Synthetic Polypeptide

SEQ ID NO: 16683 - protein, 791 aa, Artificial Sequence; identical to SEQ ID NO: 16435
  Synthetic Polypeptide

SEQ ID NO: 16684 - protein, 769 aa, Artificial Sequence; identical to SEQ ID NO: 16436
  Synthetic Polypeptide

SEQ ID NO: 16685 - protein, 769 aa, Artificial Sequence; identical to SEQ ID NO: 16437
  Synthetic Polypeptide

SEQ ID NO: 16686 - protein, 595 aa, Artificial Sequence; identical to SEQ ID NO: 16438
  Synthetic Polypeptide

SEQ ID NO: 16687 - protein, 560 aa, Artificial Sequence; identical to SEQ ID NO: 16439
  Synthetic Polypeptide

SEQ ID NO: 16688 - protein, 570 aa, Artificial Sequence; identical to SEQ ID NO: 16440
  Synthetic Polypeptide

SEQ ID NO: 16689 - protein, 553 aa, Artificial Sequence; identical to SEQ ID NO: 16441
  Synthetic Polypeptide

SEQ ID NO: 16690 - protein, 786 aa, Artificial Sequence; identical to SEQ ID NO: 16442
  Synthetic Polypeptide

SEQ ID NO: 16691 - protein, 818 aa, Artificial Sequence; identical to SEQ ID NO: 16443
  Synthetic Polypeptide

SEQ ID NO: 16692 - protein, 868 aa, Artificial Sequence; identical to SEQ ID NO: 16444
  Synthetic Polypeptide

SEQ ID NO: 16693 - protein, 682 aa, Artificial Sequence; identical to SEQ ID NO: 16445
  Synthetic Polypeptide

SEQ ID NO: 16694 - protein, 452 aa, Artificial Sequence; identical to SEQ ID NO: 16446
  Synthetic Polypeptide

SEQ ID NO: 16695 - protein, 700 aa, Artificial Sequence; identical to SEQ ID NO: 16447
  Synthetic Polypeptide

SEQ ID NO: 16696 - protein, 470 aa, Artificial Sequence; identical to SEQ ID NO: 16448
  Synthetic Polypeptide

SEQ ID NO: 16697 - protein, 786 aa, Artificial Sequence; identical to SEQ ID NO: 16449
  Synthetic Polypeptide

SEQ ID NO: 16698 - protein, 818 aa, Artificial Sequence; identical to SEQ ID NO: 16450
  Synthetic Polypeptide

SEQ ID NO: 16699 - protein, 650 aa, Artificial Sequence
  Synthetic Polypeptide
MDWIWRILFLVGAATGAHSGPEVQLVESGGGLVQPGGSLRLSCAASGFASDYYIIGWFRQAPGKEREGVSCISSRYANTNYADSVKGRFTISRDNAKNTVYLQMNSLKPEDTAVYYCAADTRRYTCPDIATMHRNFDSWGQGTLVTVSSGSGGGGSGGGGSGGGGSFEQVQLQQPGAELVKPGASVKMSCKASGYAFSSYWINWMKQKPGQGLEWIGQIYPGDGDTNYNGKFKGRATLTADTSSSTAYMQLSSLTSEDSAVYFCARSITTVVGCAMDYWGQGTSVTVSSGGGGSGGGGSGGGGSDIQMTQSPSSLSASVGDRVTITCKASDHINNWLAWYQQKPGQAPKLLIYGATTLETGVPSRFSGSGSGTDYTLTISSLQPEDFATYYCQQSWNTPWTFGQGTKLEIKRTREQKLISEEDLAKPTTTPAPRPPTPAPTIASQPLSLRPEACRPAAGGAVHTRGLDFACDIYIWAPLAGTCGVLLLSLVITLYCKRGRKKLLYIFKQPFMRPVQTTQEEDGCSCRFPEEEEGGCELRVKFSRSADAPAYQQGQNQLYNELNLGRREEYDVLDKRRGRDPEMGGKPRRKNPQEGLYNELQKDKMAEAYSEIGMKGERRRGKGHDGLYQGLSTATKDTYDALHMQALPPR

SEQ ID NO: 16700 - protein, 1003 aa, Artificial Sequence
  Synthetic Polypeptide
MALPVTALLLPLALLLHAARPDIQMTQSPSSLSASVGDRVTITCKASDHINNWLAWYQQKPGQAPKLLIYGATTLETGVPSRFSGSGSGTDYTLTISSLQPEDFATYYCQQSWNTPWTFGQGTKLEIKRLEIQNPDPAVYQLRDSKSSDKSVCLFTDFDSQTNVSQSKDSDVYITDKCVLDMRSMDFKSNSAVAWSNKSDFACANAFNNSIIPEDTFFPSSDVPCDVKLVEKSFETDTNLNFQNLSVIGFRILLLKVAGFNLLMTLRLWSSRAKRSGSGVKQTLNFDLLKLAGDVESNPGPTSMDWIWRILFLVGAATGAHSGPEVQLVESGGGLVQPGGSLRLSCAASGFASDYYIIGWFRQAPGKEREGVSCISSRYANTNYADSVKGRFTISRDNAKNTVYLQMNSLKPEDTAVYYCAADTRRYTCPDIATMHRNFDSWGQGTLVTVSSGSGGGGSGGGGSGGGGSFEQVQLQQPGAELVKPGASVKMSCKASGYAFSSYWINWMKQKPGQGLEWIGQIYPGDGDTNYNGKFKGRATLTADTSSSTAYMQLSSLTSEDSAVYFCARSITTVVGCAMDYWGQGTSVTVSSTREDLKNVFPPEVAVFEPSKAEIAHTQKATLVCLATGFYPDHVELSWWVNGKEVHSGVCTDPQPLKEQPALNDSRYCLSSRLRVSATFWQNPRNHFRCQVQFYGLSENDEWTQDRAKPVTQIVSAEAWGRADCGITSASYHQGVLSATILYEILLGKATLYAVLVSALVLMAMVKRKDSRGRAKRSGSGATNFSLLKQAGDVEENPGPSRGHMTEYKPTVRLATRDDVPRAVRTLAAAFADYPATRHTVDPDRHIERVTELQELFLTRVGLDIGKVWVADDGAAVAVWTTPESVEAGAVFAEIGPRMAELSGSRLAAQQQMEGLLAPHRPKEPAWFLATVGVSPDHQGKGLGSAVVLPGVEAAERAGVPAFLETSAPRNLPFYERLGFTVTADVEVPEGPRTWCMTRKPGA

SEQ ID NO: 16701 - protein, 1002 aa, Artificial Sequence
  Synthetic Polypeptide
MALPVTALLLPLALLLHAARPDIQMTQSPSSLSASVGDRVTITCKASDHINNWLAWYQQKPGQAPKLLIYGATTLETGVPSRFSGSGSGTDYTLTISSLQPEDFATYYCQQSWNTPWTFGQGTKLEIKRLEDLKNVFPPEVAVFEPSKAEIAHTQKATLVCLATGFYPDHVELSWWVNGKEVHSGVCTDPQPLKEQPALNDSRYCLSSRLRVSATFWQNPRNHFRCQVQFYGLSENDEWTQDRAKPVTQIVSAEAWGRADCGITSASYHQGVLSATILYEILLGKATLYAVLVSALVLMAMVKRKDSRGRAKRSGSGATNFSLLKQAGDVEENPGPTSMDWIWRILFLVGAATGAHSGPEVQLVESGGGLVQPGGSLRLSCAASGFASDYYIIGWFRQAPGKEREGVSCISSRYANTNYADSVKGRFTISRDNAKNTVYLQMNSLKPEDTAVYYCAADTRRYTCPDIATMHRNFDSWGQGTLVTVSSGSGGGGSGGGGSGGGGSFEQVQLQQPGAELVKPGASVKMSCKASGYAFSSYWINWMKQKPGQGLEWIGQIYPGDGDTNYNGKFKGRATLTADTSSSTAYMQLSSLTSEDSAVYFCARSITTVVGCAMDYWGQGTSVTVSSTRIQNPDPAVYQLRDSKSSDKSVCLFTDFDSQTNVSQSKDSDVYITDKCVLDMRSMDFKSNSAVAWSNKSDFACANAFNNSIIPEDTFFPSSDVPCDVKLVEKSFETDTNLNFQNLSVIGFRILLLKVAGFNLLMTLRLWSSRAKRSGSGVKQTLNFDLLKLAGDVESNPGPSRGHMTEYKPTVRLATRDDVPRAVRTLAAAFADYPATRHTVDPDRHIERVTELQELFLTRVGLDIGKVWVADDGAAVAVWTTPESVEAGAVFAEIGPRMAELSGSRLAAQQQMEGLLAPHRPKEPAWFLATVGVSPDHQGKGLGSAVVLPGVEAAERAGVPAFLETSAPRNLPFYERLGFTVTADVEVPEGPRTWCMTRKPGA

SEQ ID NO: 16702 - protein, 1002 aa, Artificial Sequence
  Synthetic Polypeptide
MALPVTALLLPLALLLHAARPDIQMTQSPSSLSASVGDRVTITCKASDHINNWLAWYQQKPGQAPKLLIYGATTLETGVPSRFSGSGSGTDYTLTISSLQPEDFATYYCQQSWNTPWTFGQGTKLEIKRLEDLKNVFPPEVAVFEPSEAEISHTQKATLVCLATGFYPDHVELSWWVNGKEVHSGVCTDPQPLKEQPALNDSRYCLSSRLRVSATFWQNPRNHFRCQVQFYGLSENDEWTQDRAKPVTQIVSAEAWGRADCGFTSESYQQGVLSATILYEILLGKATLYAVLVSALVLMAMVKRKDSRGRAKRSGSGATNFSLLKQAGDVEENPGPTSMDWIWRILFLVGAATGAHSGPEVQLVESGGGLVQPGGSLRLSCAASGFASDYYIIGWFRQAPGKEREGVSCISSRYANTNYADSVKGRFTISRDNAKNTVYLQMNSLKPEDTAVYYCAADTRRYTCPDIATMHRNFDSWGQGTLVTVSSGSGGGGSGGGGSGGGGSFEQVQLQQPGAELVKPGASVKMSCKASGYAFSSYWINWMKQKPGQGLEWIGQIYPGDGDTNYNGKFKGRATLTADTSSSTAYMQLSSLTSEDSAVYFCARSITTVVGCAMDYWGQGTSVTVSSTRIQNPDPAVYQLRDSKSSDKSVCLFTDFDSQTNVSQSKDSDVYITDKCVLDMRSMDFKSNSAVAWSNKSDFACANAFNNSIIPEDTFFPSPESSCDVKLVEKSFETDTNLNFQNLSVIGFRILLLKVAGFNLLMTLRLWSSRAKRSGSGVKQTLNFDLLKLAGDVESNPGPSRGHMTEYKPTVRLATRDDVPRAVRTLAAAFADYPATRHTVDPDRHIERVTELQELFLTRVGLDIGKVWVADDGAAVAVWTTPESVEAGAVFAEIGPRMAELSGSRLAAQQQMEGLLAPHRPKEPAWFLATVGVSPDHQGKGLGSAVVLPGVEAAERAGVPAFLETSAPRNLPFYERLGFTVTADVEVPEGPRTWCMTRKPGA

SEQ ID NO: 16703 - protein, 769 aa, Artificial Sequence
  Synthetic Polypeptide
MALPVTALLLPLALLLHAARPDIQMTQSPSSLSASVGDRVTITCKASDHINNWLAWYQQKPGQAPKLLIYGATTLETGVPSRFSGSGSGTDYTLTISSLQPEDFATYYCQQSWNTPWTFGQGTKLEIKRLEDLKNVFPPEVAVFEPSEAEISHTQKATLVCLATGFYPDHVELSWWVNGKEVHSGVCTDPQPLKEQPALNDSRYCLSSRLRVSATFWQNPRNHFRCQVQFYGLSENDEWTQDRAKPVTQIVSAEAWGRADCGFTSESYQQGVLSATILYEILLGKATLYAVLVSALVLMAMVKRKDSRGRAKRSGSGATNFSLLKQAGDVEENPGPTSMDWIWRILFLVGAATGAHSGPEVQLVESGGGLVQPGGSLRLSCAASGFASDYYIIGWFRQAPGKEREGVSCISSRYANTNYADSVKGRFTISRDNAKNTVYLQMNSLKPEDTAVYYCAADTRRYTCPDIATMHRNFDSWGQGTLVTVSSGSGGGGSGGGGSGGGGSFEQVQLQQPGAELVKPGASVKMSCKASGYAFSSYWINWMKQKPGQGLEWIGQIYPGDGDTNYNGKFKGRATLTADTSSSTAYMQLSSLTSEDSAVYFCARSITTVVGCAMDYWGQGTSVTVSSTRIQNPDPAVYQLRDSKSSDKSVCLFTDFDSQTNVSQSKDSDVYITDKCVLDMRSMDFKSNSAVAWSNKSDFACANAFNNSIIPEDTFFPSPESSCDVKLVEKSFETDTNLNFQNLSVIGFRILLLKVAGFNLLMTLRLWSS

SEQ ID NO: 16704 - protein, 994 aa, Artificial Sequence
  Synthetic Polypeptide
MALPVTALLLPLALLLHAARPDIQMTQSPSSLSASVGDRVTITCKASDHINNWLAWYQQKPGQAPKLLIYGATTLETGVPSRFSGSGSGTDYTLTISSLQPEDFATYYCQQSWNTPWTFGQGTKLEIKRLEDLKNVFPPEVAVFEPSEAEISHTQKATLVCLATGFYPDHVELSWWVNGKEVHSGVCTDPQPLKEQPALNDSRYCLSSRLRVSATFWQNPRNHFRCQVQFYGLSENDEWTQDRAKPVTQIVSAEAWGRADCGFTSESYQQGVLSATILYEILLGKATLYAVLVSALVLMAMVKRKDSRGRAKRSGSGATNFSLLKQAGDVEENPGPTSMDWIWRILFLVGAATGAHSGPEVQLVESGGGLVQPGGSLRLSCAASGFASDYYIIGWFRQAPGKEREGVSCISSRYANTNYADSVKGRFTISRDNAKNTVYLQMNSLKPEDTAVYYCAADTRRYTCPDIATMHRNFDSWGQGTLVTVSSGSGGGGSGGGGSGGGGSFEQVQLQQPGAELVKPGASVKMSCKASGYAFSSYWINWMKQKPGQGLEWIGQIYPGDGDTNYNGKFKGRATLTADTSSSTAYMQLSSLTSEDSAVYFCARSITTVVGCAMDYWGQGTSVTVSSTRIQNPDPAVYQLRDSKSSDKSVCLFTDFDSQTNVSQSKDSDVYITDKCVLDMRSMDFKSNSAVAWSNKSDFACANAFNNSIIPEDTFFPSPESSCDVKLVEKSFETDTNLNFQNLSVIGFRILLLKVAGFNLLMTLRLWSSRAKRSGSGVKQTLNFDLLKLAGDVESNPGPSRGGIHTMATYEVLCEVARKLGTDDREVVLFLLNVFIPQPTLAQLIGALRALKEEGRLTFPLLAECLFRAGRRDLLRDLLHLDPRFLERHLAGTMSYFSPYQLTVLHVDGELCARDIRSLIFLSKDTIGSRSTPQTFLHWVYCMENLDLLGPTDVDALMSMLRSLSRVDLQRQVQTLMGLHLSGPSHSQHYRHTP

SEQ ID NO: 16705 - protein, 773 aa, Artificial Sequence
  Synthetic Polypeptide
MALPVTALLLPLALLLHAARPDIQMTQSPSSLSASVGDRVTITCKASDHINNWLAWYQQKPGQAPKLLIYGATTLETGVPSRFSGSGSGTDYTLTISSLQPEDFATYYCQQSWNTPWTFGQGTKLEIKRLEIQNPDPAVYQLRDSKSSDKSVCLFTDFDSQTNVSQSKDSDVYITDKCVLDMRSMDFKSNSAVAWSNKSDFACANAFNNSIIPEDTFFPSPESSCDVKLVEKSFETDTNLNFQNLSVIGFRILLLKVAGFNLLMTLRLWSSRAKRSGSGVKQTLNFDLLKLAGDVESNPGPTSMDWIWRILFLVGAATGAHSGPEVQLVESGGGLVQPGGSLRLSCAASGFASDYYIIGWFRQAPGKEREGVSCISSRYANTNYADSVKGRFTISRDNAKNTVYLQMNSLKPEDTAVYYCAADTRRYTCPDIATMHRNFDSWGQGTLVTVSSGSGGGGSGGGGSGGGGSFEQVQLQQPGAELVKPGASVKMSCKASGYAFSSYWINWMKQKPGQGLEWIGQIYPGDGDTNYNGKFKGRATLTADTSSSTAYMQLSSLTSEDSAVYFCARSITTVVGCAMDYWGQGTSVTVSSTREDLKNVFPPEVAVFEPSEAEISHTQKATLVCLATGFYPDHVELSWWVNGKEVHSGVCTDPQPLKEQPALNDSRYCLSSRLRVSATFWQNPRNHFRCQVQFYGLSENDEWTQDRAKPVTQIVSAEAWGRADCGFTSESYQQGVLSATILYEILLGKATLYAVLVSALVLMAMVKRKDSRG

SEQ ID NO: 16706 - protein, 995 aa, Artificial Sequence
  Synthetic Polypeptide
MALPVTALLLPLALLLHAARPDIQMTQSPSSLSASVGDRVTITCKASDHINNWLAWYQQKPGQAPKLLIYGATTLETGVPSRFSGSGSGTDYTLTISSLQPEDFATYYCQQSWNTPWTFGQGTKLEIKRLEIQNPDPAVYQLRDSKSSDKSVCLFTDFDSQTNVSQSKDSDVYITDKCVLDMRSMDFKSNSAVAWSNKSDFACANAFNNSIIPEDTFFPSPESSCDVKLVEKSFETDTNLNFQNLSVIGFRILLLKVAGFNLLMTLRLWSSRAKRSGSGVKQTLNFDLLKLAGDVESNPGPTSMDWIWRILFLVGAATGAHSGPEVQLVESGGGLVQPGGSLRLSCAASGFASDYYIIGWFRQAPGKEREGVSCISSRYANTNYADSVKGRFTISRDNAKNTVYLQMNSLKPEDTAVYYCAADTRRYTCPDIATMHRNFDSWGQGTLVTVSSGSGGGGSGGGGSGGGGSFEQVQLQQPGAELVKPGASVKMSCKASGYAFSSYWINWMKQKPGQGLEWIGQIYPGDGDTNYNGKFKGRATLTADTSSSTAYMQLSSLTSEDSAVYFCARSITTVVGCAMDYWGQGTSVTVSSTREDLKNVFPPEVAVFEPSEAEISHTQKATLVCLATGFYPDHVELSWWVNGKEVHSGVCTDPQPLKEQPALNDSRYCLSSRLRVSATFWQNPRNHFRCQVQFYGLSENDEWTQDRAKPVTQIVSAEAWGRADCGFTSESYQQGVLSATILYEILLGKATLYAVLVSALVLMAMVKRKDSRGRAKRSGSGATNFSLLKQAGDVEENPGPSRGGIHTMATYEVLCEVARKLGTDDREVVLFLLNVFIPQPTLAQLIGALRALKEEGRLTFPLLAECLFRAGRRDLLRDLLHLDPRFLERHLAGTMSYFSPYQLTVLHVDGELCARDIRSLIFLSKDTIGSRSTPQTFLHWVYCMENLDLLGPTDVDALMSMLRSLSRVDLQRQVQTLMGLHLSGPSHSQHYRHTP

SEQ ID NO: 16707 - protein, 1002 aa, Artificial Sequence
  Synthetic Polypeptide
MALPVTALLLPLALLLHAARPDIQMTQSPSSLSASVGDRVTITCKASDHINNWLAWYQQKPGQAPKLLIYGATTLETGVPSRFSGSGSGTDYTLTISSLQPEDFATYYCQQSWNTPWTFGQGTKLEIKRLEDLKNVFPPEVAVFEPSEAEISHTQKATLVCLATGFYPDHVELSWWVNGKEVHSGVSTDPQPLKEQPALNDSRYCLSSRLRVSATFWQNPRNHFRCQVQFYGLSENDEWTQDRAKPVTQIVSAEAWGRADCGFTSESYQQGVLSATILYEILLGKATLYAVLVSALVLMAMVKRKDSRGRAKRSGSGATNFSLLKQAGDVEENPGPTSMDWIWRILFLVGAATGAHSGPEVQLVESGGGLVQPGGSLRLSCAASGFASDYYIIGWFRQAPGKEREGVSCISSRYANTNYADSVKGRFTISRDNAKNTVYLQMNSLKPEDTAVYYCAADTRRYTCPDIATMHRNFDSWGQGTLVTVSSGSGGGGSGGGGSGGGGSFEQVQLQQPGAELVKPGASVKMSCKASGYAFSSYWINWMKQKPGQGLEWIGQIYPGDGDTNYNGKFKGRATLTADTSSSTAYMQLSSLTSEDSAVYFCARSITTVVGCAMDYWGQGTSVTVSSTRIQNPDPAVYQLRDSKSSDKSVCLFTDFDSQTNVSQSKDSDVYITDKTVLDMRSMDFKSNSAVAWSNKSDFACANAFNNSIIPEDTFFPSPESSCDVKLVEKSFETDTNLNFQNLSVIGFRILLLKVAGFNLLMTLRLWSSRAKRSGSGVKQTLNFDLLKLAGDVESNPGPSRGHMTEYKPTVRLATRDDVPRAVRTLAAAFADYPATRHTVDPDRHIERVTELQELFLTRVGLDIGKVWVADDGAAVAVWTTPESVEAGAVFAEIGPRMAELSGSRLAAQQQMEGLLAPHRPKEPAWFLATVGVSPDHQGKGLGSAVVLPGVEAAERAGVPAFLETSAPRNLPFYERLGFTVTADVEVPEGPRTWCMTRKPGA

SEQ ID NO: 16708 - protein, 1084 aa, Artificial Sequence
  Synthetic Polypeptide
MALPVTALLLPLALLLHAARPDIQMTQSPSSLSASVGDRVTITCKASDHINNWLAWYQQKPGQAPKLLIYGATTLETGVPSRFSGSGSGTDYTLTISSLQPEDFATYYCQQSWNTPWTFGQGTKLEIKRLEDLKNVFPPEVAVFEPSEAEISHTQKATLVCLATGFYPDHVELSWWVNGKEVHSGVSTDPQPLKEQPALNDSRYCLSSRLRVSATFWQNPRNHFRCQVQFYGLSENDEWTQDRAKPVTQIVSAEAWGRADCGFTSESYQQGVLSATILYEILLGKATLYAVLVSALVLMAMVKRKDSRGRAKRSGSGATNFSLLKQAGDVEENPGPTSMDWIWRILFLVGAATGAHSGPEVQLVESGGGLVQPGGSLRLSCAASGFASDYYIIGWFRQAPGKEREGVSCISSRYANTNYADSVKGRFTISRDNAKNTVYLQMNSLKPEDTAVYYCAADTRRYTCPDIATMHRNFDSWGQGTLVTVSSGSGGGGSGGGGSGGGGSFEQVQLQQPGAELVKPGASVKMSCKASGYAFSSYWINWMKQKPGQGLEWIGQIYPGDGDTNYNGKFKGRATLTADTSSSTAYMQLSSLTSEDSAVYFCARSITTVVGCAMDYWGQGTSVTVSSTREQKLISEEDGSGTPFPSLAPPIMLLVDGKQQMVVVCLVLDVAPPGLDSPIWFSAGNGSALDAFTYGPSPATDGTWTNLAHLSLPSEELASWEPLVCHTGPGAEGHSRSTQPMHLSGEASTARTCPQEPLRGTPGGALWLGVLRLLLFKLLLFDLLLTCSCLCDPAGPLPSPATTTRLRALGSHRLHPATETGGREATSSPRPQPRDRRWGDTPPGRKPGSPVRAKRSGSGVKQTLNFDLLKLAGDVESNPGPSRGHMTEYKPTVRLATRDDVPRAVRTLAAAFADYPATRHTVDPDRHIERVTELQELFLTRVGLDIGKVWVADDGAAVAVWTTPESVEAGAVFAEIGPRMAELSGSRLAAQQQMEGLLAPHRPKEPAWFLATVGVSPDHQGKGLGSAVVLPGVEAAERAGVPAFLETSAPRNLPFYERLGFTVTADVEVPEGPRTWCMTRKPGA

SEQ ID NO: 16709 - protein, 1039 aa, Artificial Sequence
  Synthetic Polypeptide
MALPVTALLLPLALLLHAARPDIQMTQSPSSLSASVGDRVTITCKASDHINNWLAWYQQKPGQAPKLLIYGATTLETGVPSRFSGSGSGTDYTLTISSLQPEDFATYYCQQSWNTPWTFGQGTKLEIKRLEGKPIPNPLLGLDSTGSGDKQLDADVSPKPTIFLPSIAETKLQKAGTYLCLLEKFFPDVIKIHWQEKKSNTILGSQEGNTMKTNDTYMKFSWLTVPEKSLDKEHRCIVRHENNKNGVDQEIIFPPIKTDVITMDPKDNCSKDANDTLLLQLTNTSAYYMYLLLLLKSVVYFAIITCCLLRRTAFCCNGEKSRAKRSGSGATNFSLLKQAGDVEENPGPTSMDWIWRILFLVGAATGAHSGPEVQLVESGGGLVQPGGSLRLSCAASGFASDYYIIGWFRQAPGKEREGVSCISSRYANTNYADSVKGRFTISRDNAKNTVYLQMNSLKPEDTAVYYCAADTRRYTCPDIATMHRNFDSWGQGTLVTVSSGSGGGGSGGGGSGGGGSFEQVQLQQPGAELVKPGASVKMSCKASGYAFSSYWINWMKQKPGQGLEWIGQIYPGDGDTNYNGKFKGRATLTADTSSSTAYMQLSSLTSEDSAVYFCARSITTVVGCAMDYWGQGTSVTVSSTREQKLISEEDGSGSQPHTKPSVFVMKNGTNVACLVKEFYPKDIRINLVSSKKITEFDPAIVISPSGKYNAVKLGKYEDSNSVTCSVQHDNKTVHSTDFEVKTDSTDHVKPKETENTKQPSKSCHKPKAIVHTEKVNMMSLTVLGLRMLFAKTVAVNFLLTAKLFFLRAKRSGSGVKQTLNFDLLKLAGDVESNPGPSRGHMTEYKPTVRLATRDDVPRAVRTLAAAFADYPATRHTVDPDRHIERVTELQELFLTRVGLDIGKVWVADDGAAVAVWTTPESVEAGAVFAEIGPRMAELSGSRLAAQQQMEGLLAPHRPKEPAWFLATVGVSPDHQGKGLGSAVVLPGVEAAERAGVPAFLETSAPRNLPFYERLGFTVTADVEVPEGPRTWCMTRKPGA

SEQ ID NO: 16710 - protein, 777 aa, Artificial Sequence
  Synthetic Polypeptide
MALPVTALLLPLALLLHAARPDIQMTQSPSSLSASVGDRVTITCKASDHINNWLAWYQQKPGQAPKLLIYGATTLETGVPSRFSGSGSGTDYTLTISSLQPEDFATYYCQQSWNTPWTFGQGTKLEIKRLESQPHTKPSVFVMKNGTNVACLVKEFYPKDIRINLVSSKKITEFDPAIVISPSGKYNAVKLGKYEDSNSVTCSVQHDNKTVHSTDFEVKTDSTDHVKPKETENTKQPSKSCHKPKAIVHTEKVNMMSLTVLGLRMLFAKTVAVNFLLTAKLFFLRAKRSGSGATNFSLLKQAGDVEENPGPTSMDWIWRILFLVGAATGAHSGPEVQLVESGGGLVQPGGSLRLSCAASGFASDYYIIGWFRQAPGKEREGVSCISSRYANTNYADSVKGRFTISRDNAKNTVYLQMNSLKPEDTAVYYCAADTRRYTCPDIATMHRNFDSWGQGTLVTVSSGSGGGGSGGGGSGGGGSFEQVQLQQPGAELVKPGASVKMSCKASGYAFSSYWINWMKQKPGQGLEWIGQIYPGDGDTNYNGKFKGRATLTADTSSSTAYMQLSSLTSEDSAVYFCARSITTVVGCAMDYWGQGTSVTVSSTRDKQLDADVSPKPTIFLPSIAETKLQKAGTYLCLLEKFFPDVIKIHWQEKKSNTILGSQEGNTMKTNDTYMKFSWLTVPEKSLDKEHRCIVRHENNKNGVDQEIIFPPIKTDVITMDPKDNCSKDANDTLLLQLTNTSAYYMYLLLLLKSVVYFAIITCCLLRRTAFCCNGEKS

SEQ ID NO: 16711 - protein, 1179 aa, Artificial Sequence
  Synthetic Polypeptide
MALPVTALLLPLALLLHAARPDIQMTQSPSSLSASVGDRVTITCKASDHINNWLAWYQQKPGQAPKLLIYGATTLETGVPSRFSGSGSGTDYTLTISSLQPEDFATYYCQQSWNTPWTFGQGTKLEIKRGQPKANPTVTLFPPSSEELQANKATLVCLISDFYPGAVTVAWKADGSPVKAGVETTKPSKQSNNKYAASSYLSLTPEQWKSHRSYSCQVTHEGSTVEKTVAPTECSGSQSFGLLDPKLCYLLDGILFIYGVILTALFLRVKFSRSADAPAYQQGQNQLYNELNLGRREEYDVLDKRRGRDPEMGGKPQRRKNPQEGLYNELQKDKMAEAYSEIGMKGERRRGKGHDGLYQGLSTATKDTYDALHMQALPPRRAKRSGSGATNFSLLKQAGDVEENPGPTSMDWIWRILFLVGAATGAHSGPEVQLVESGGGLVQPGGSLRLSCAASGFASDYYIIGWFRQAPGKEREGVSCISSRYANTNYADSVKGRFTISRDNAKNTVYLQMNSLKPEDTAVYYCAADTRRYTCPDIATMHRNFDSWGQGTLVTVSSGSGGGGSGGGGSGGGGSFEQVQLQQPGAELVKPGASVKMSCKASGYAFSSYWINWMKQKPGQGLEWIGQIYPGDGDTNYNGKFKGRATLTADTSSSTAYMQLSSLTSEDSAVYFCARSITTVVGCAMDYWGQGTSVTVSSASTKGPSVFPLAPSSKSTSGGTAALGCLVKDYFPEPVTVSWNSGALTSGVHTFPAVLQSSGLYSLSSVVTVPSSSLGTQTYICNVNHKPSNTKVDKRVEPKSCGTQSFGLLDPKLCYLLDGILFIYGVILTALFLRVKFSRSADAPAYQQGQNQLYNELNLGRREEYDVLDKRRGRDPEMGGKPQRRKNPQEGLYNELQKDKMAEAYSEIGMKGERRRGKGHDGLYQGLSTATKDTYDALHMQALPPRRAKRSGSGVKQTLNFDLLKLAGDVESNPGPSRGHMTEYKPTVRLATRDDVPRAVRTLAAAFADYPATRHTVDPDRHIERVTELQELFLTRVGLDIGKVWVADDGAAVAVWTTPESVEAGAVFAEIGPRMAELSGSRLAAQQQMEGLLAPHRPKEPAWFLATVGVSPDHQGKGLGSAVVLPGVEAAERAGVPAFLETSAPRNLPFYERLGFTVTADVEVPEGPRTWCMTRKPGA

SEQ ID NO: 16712 - protein, 965 aa, Artificial Sequence
  Synthetic Polypeptide
MALPVTALLLPLALLLHAARPDIQMTQSPSSLSASVGDRVTITCKASDHINNWLAWYQQKPGQAPKLLIYGATTLETGVPSRFSGSGSGTDYTLTISSLQPEDFATYYCQQSWNTPWTFGQGTKLEIKRLEDLKNVFPPEVAVFEPSEAEISHTQKATLVCLATGFYPDHVELSWWVNGKEVHSGVSTDPQPLKEQPALNDSRYCLSSRLRVSATFWQNPRNHFRCQVQFYGLSENDEWTQDRAKPVTQIVSAEAWGRADCGSQSFGLLDPKLCYLLDGILFIYGVILTALFLRVKFSRSADAPAYQQGQNQLYNELNLGRREEYDVLDKRRGRDPEMGGKPQRRKNPQEGLYNELQKDKMAEAYSEIGMKGERRRGKGHDGLYQGLSTATKDTYDALHMQALPPRRAKRSGSGATNFSLLKQAGDVEENPGPTSMDWIWRILFLVGAATGAHSGPEVQLVESGGGLVQPGGSLRLSCAASGFASDYYIIGWFRQAPGKEREGVSCISSRYANTNYADSVKGRFTISRDNAKNTVYLQMNSLKPEDTAVYYCAADTRRYTCPDIATMHRNFDSWGQGTLVTVSSGSGGGGSGGGGSGGGGSFEQVQLQQPGAELVKPGASVKMSCKASGYAFSSYWINWMKQKPGQGLEWIGQIYPGDGDTNYNGKFKGRATLTADTSSSTAYMQLSSLTSEDSAVYFCARSITTVVGCAMDYWGQGTSVTVSSTRIQNPDPAVYQLRDSKSSDKSVCLFTDFDSQTNVSQSKDSDVYITDKTVLDMRSMDFKSNSAVAWSNKSDFACANAFNNSIIPEDTFFPSPESSCGTQSFGLLDPKLCYLLDGILFIYGVILTALFLRVKFSRSADAPAYQQGQNQLYNELNLGRREEYDVLDKRRGRDPEMGGKPQRRKNPQEGLYNELQKDKMAEAYSEIGMKGERRRGKGHDGLYQGLSTATKDTYDALHMQALPPR

SEQ ID NO: 16713 - protein, 965 aa, Artificial Sequence
  Synthetic Polypeptide
MALPVTALLLPLALLLHAARPDIQMTQSPSSLSASVGDRVTITCKASDHINNWLAWYQQKPGQAPKLLIYGATTLETGVPSRFSGSGSGTDYTLTISSLQPEDFATYYCQQSWNTPWTFGQGTKLEIKRLEDLKNVFPPEVAVFEPSKAEIAHTQKATLVCLATGFYPDHVELSWWVNGKEVHSGVCTDPQPLKEQPALNDSRYCLSSRLRVSATFWQNPRNHFRCQVQFYGLSENDEWTQDRAKPVTQIVSAEAWGRADCGSQSFGLLDPKLCYLLDGILFIYGVILTALFLRVKFSRSADAPAYQQGQNQLYNELNLGRREEYDVLDKRRGRDPEMGGKPQRRKNPQEGLYNELQKDKMAEAYSEIGMKGERRRGKGHDGLYQGLSTATKDTYDALHMQALPPRRAKRSGSGATNFSLLKQAGDVEENPGPTSMDWIWRILFLVGAATGAHSGPEVQLVESGGGLVQPGGSLRLSCAASGFASDYYIIGWFRQAPGKEREGVSCISSRYANTNYADSVKGRFTISRDNAKNTVYLQMNSLKPEDTAVYYCAADTRRYTCPDIATMHRNFDSWGQGTLVTVSSGSGGGGSGGGGSGGGGSFEQVQLQQPGAELVKPGASVKMSCKASGYAFSSYWINWMKQKPGQGLEWIGQIYPGDGDTNYNGKFKGRATLTADTSSSTAYMQLSSLTSEDSAVYFCARSITTVVGCAMDYWGQGTSVTVSSTRIQNPDPAVYQLRDSKSSDKSVCLFTDFDSQTNVSQSKDSDVYITDKCVLDMRSMDFKSNSAVAWSNKSDFACANAFNNSIIPEDTFFPSSDVPCGTQSFGLLDPKLCYLLDGILFIYGVILTALFLRVKFSRSADAPAYQQGQNQLYNELNLGRREEYDVLDKRRGRDPEMGGKPQRRKNPQEGLYNELQKDKMAEAYSEIGMKGERRRGKGHDGLYQGLSTATKDTYDALHMQALPPR

SEQ ID NO: 16714 - protein, 1036 aa, Artificial Sequence
  Synthetic Polypeptide
MALPVTALLLPLALLLHAARPDIQMTQSPSSLSASVGDRVTITCKASDHINNWLAWYQQKPGQAPKLLIYGATTLETGVPSRFSGSGSGTDYTLTISSLQPEDFATYYCQQSWNTPWTFGQGTKLEIKRLEGKPIPNPLLGLDSTGSGEDLKNVFPPEVAVFEPSEAEISHTQKATLVCLATGFYPDHVELSWWVNGKEVHSGVSTDPQPLKEQPALNDSRYCLSSRLRVSATFWQNPRNHFRCQVQFYGLSENDEWTQDRAKPVTQIVSAEAWGRADCGSQSFGLLDPKLCYLLDGILFIYGVILTALFLRVKFSRSADAPAYQQGQNQLYNELNLGRREEYDVLDKRRGRDPEMGGKPQRRKNPQEGLYNELQKDKMAEAYSEIGMKGERRRGKGHDGLYQGLSTATKDTYDALHMQALPPRRAKRSGSGATNFSLLKQAGDVEENPGPTSMDWIWRILFLVGAATGAHSGPEVQLVESGGGLVQPGGSLRLSCAASGFASDYYIIGWFRQAPGKEREGVSCISSRYANTNYADSVKGRFTISRDNAKNTVYLQMNSLKPEDTAVYYCAADTRRYTCPDIATMHRNFDSWGQGTLVTVSSGSGGGGSGGGGSGGGGSFEQVQLQQPGAELVKPGASVKMSCKASGYAFSSYWINWMKQKPGQGLEWIGQIYPGDGDTNYNGKFKGRATLTADTSSSTAYMQLSSLTSEDSAVYFCARSITTVVGCAMDYWGQGTSVTVSSTREQKLISEEDGSGIQNPDPAVYQLRDSKSSDKSVCLFTDFDSQTNVSQSKDSDVYITDKTVLDMRSMDFKSNSAVAWSNKSDFACANAFNNSIIPEDTFFPSPESSCGTQSFGLLDPKLCYLLDGILFIYGVILTALFLRSKRSRLLHSDYMNMTPRRPGPTRKHYQPYAPPRDFAAYRSRVKFSRSADAPAYQQGQNQLYNELNLGRREEYDVLDKRRGRDPEMGGKPQRRKNPQEGLYNELQKDKMAEAYSEIGMKGERRRGKGHDGLYQGLSTATKDTYDALHMQALPPR

SEQ ID NO: 16715 - protein, 1077 aa, Artificial Sequence
  Synthetic Polypeptide
MALPVTALLLPLALLLHAARPDIQMTQSPSSLSASVGDRVTITCKASDHINNWLAWYQQKPGQAPKLLIYGATTLETGVPSRFSGSGSGTDYTLTISSLQPEDFATYYCQQSWNTPWTFGQGTKLEIKRLEGKPIPNPLLGLDSTGSGEDLKNVFPPEVAVFEPSEAEISHTQKATLVCLATGFYPDHVELSWWVNGKEVHSGVSTDPQPLKEQPALNDSRYCLSSRLRVSATFWQNPRNHFRCQVQFYGLSENDEWTQDRAKPVTQIVSAEAWGRADCGSQSFGLLDPKLCYLLDGILFIYGVILTALFLRSKRSRLLHSDYMNMTPRRPGPTRKHYQPYAPPRDFAAYRSRVKFSRSADAPAYQQGQNQLYNELNLGRREEYDVLDKRRGRDPEMGGKPQRRKNPQEGLYNELQKDKMAEAYSEIGMKGERRRGKGHDGLYQGLSTATKDTYDALHMQALPPRRAKRSGSGATNFSLLKQAGDVEENPGPTSMDWIWRILFLVGAATGAHSGPEVQLVESGGGLVQPGGSLRLSCAASGFASDYYIIGWFRQAPGKEREGVSCISSRYANTNYADSVKGRFTISRDNAKNTVYLQMNSLKPEDTAVYYCAADTRRYTCPDIATMHRNFDSWGQGTLVTVSSGSGGGGSGGGGSGGGGSFEQVQLQQPGAELVKPGASVKMSCKASGYAFSSYWINWMKQKPGQGLEWIGQIYPGDGDTNYNGKFKGRATLTADTSSSTAYMQLSSLTSEDSAVYFCARSITTVVGCAMDYWGQGTSVTVSSTREQKLISEEDGSGIQNPDPAVYQLRDSKSSDKSVCLFTDFDSQTNVSQSKDSDVYITDKTVLDMRSMDFKSNSAVAWSNKSDFACANAFNNSIIPEDTFFPSPESSCGTQSFGLLDPKLCYLLDGILFIYGVILTALFLRSKRSRLLHSDYMNMTPRRPGPTRKHYQPYAPPRDFAAYRSRVKFSRSADAPAYQQGQNQLYNELNLGRREEYDVLDKRRGRDPEMGGKPQRRKNPQEGLYNELQKDKMAEAYSEIGMKGERRRGKGHDGLYQGLSTATKDTYDALHMQALPPR

SEQ ID NO: 16716 - protein, 1038 aa, Artificial Sequence
  Synthetic Polypeptide
MALPVTALLLPLALLLHAARPDIQMTQSPSSLSASVGDRVTITCKASDHINNWLAWYQQKPGQAPKLLIYGATTLETGVPSRFSGSGSGTDYTLTISSLQPEDFATYYCQQSWNTPWTFGQGTKLEIKRLEGKPIPNPLLGLDSTGSGEDLKNVFPPEVAVFEPSEAEISHTQKATLVCLATGFYPDHVELSWWVNGKEVHSGVSTDPQPLKEQPALNDSRYCLSSRLRVSATFWQNPRNHFRCQVQFYGLSENDEWTQDRAKPVTQIVSAEAWGRADCGSQSFGLLDPKLCYLLDGILFIYGVILTALFLRVKFSRSADAPAYQQGQNQLYNELNLGRREEYDVLDKRRGRDPEMGGKPQRRKNPQEGLYNELQKDKMAEAYSEIGMKGERRRGKGHDGLYQGLSTATKDTYDALHMQALPPRRAKRSGSGATNFSLLKQAGDVEENPGPTSMDWIWRILFLVGAATGAHSGPEVQLVESGGGLVQPGGSLRLSCAASGFASDYYIIGWFRQAPGKEREGVSCISSRYANTNYADSVKGRFTISRDNAKNTVYLQMNSLKPEDTAVYYCAADTRRYTCPDIATMHRNFDSWGQGTLVTVSSGSGGGGSGGGGSGGGGSFEQVQLQQPGAELVKPGASVKMSCKASGYAFSSYWINWMKQKPGQGLEWIGQIYPGDGDTNYNGKFKGRATLTADTSSSTAYMQLSSLTSEDSAVYFCARSITTVVGCAMDYWGQGTSVTVSSTREQKLISEEDLGSGIQNPDPAVYQLRDSKSSDKSVCLFTDFDSQTNVSQSKDSDVYITDKTVLDMRSMDFKSNSAVAWSNKSDFACANAFNNSIIPEDTFFPSPESSCGTQSFGLLDPKLCYLLDGILFIYGVILTALFLKRGRKKLLYIFKQPFMRPVQTTQEEDGCSCRFPEEEEGGCELRVKFSRSADAPAYQQGQNQLYNELNLGRREEYDVLDKRRGRDPEMGGKPQRRKNPQEGLYNELQKDKMAEAYSEIGMKGERRRGKGHDGLYQGLSTATKDTYDALHMQALPPR

SEQ ID NO: 16717 - protein, 1080 aa, Artificial Sequence
  Synthetic Polypeptide
MALPVTALLLPLALLLHAARPDIQMTQSPSSLSASVGDRVTITCKASDHINNWLAWYQQKPGQAPKLLIYGATTLETGVPSRFSGSGSGTDYTLTISSLQPEDFATYYCQQSWNTPWTFGQGTKLEIKRLEGKPIPNPLLGLDSTGSGEDLKNVFPPEVAVFEPSEAEISHTQKATLVCLATGFYPDHVELSWWVNGKEVHSGVSTDPQPLKEQPALNDSRYCLSSRLRVSATFWQNPRNHFRCQVQFYGLSENDEWTQDRAKPVTQIVSAEAWGRADCGSQSFGLLDPKLCYLLDGILFIYGVILTALFLKRGRKKLLYIFKQPFMRPVQTTQEEDGCSCRFPEEEEGGCELRVKFSRSADAPAYQQGQNQLYNELNLGRREEYDVLDKRRGRDPEMGGKPQRRKNPQEGLYNELQKDKMAEAYSEIGMKGERRRGKGHDGLYQGLSTATKDTYDALHMQALPPRRAKRSGSGATNFSLLKQAGDVEENPGPTSMDWIWRILFLVGAATGAHSGPEVQLVESGGGLVQPGGSLRLSCAASGFASDYYIIGWFRQAPGKEREGVSCISSRYANTNYADSVKGRFTISRDNAKNTVYLQMNSLKPEDTAVYYCAADTRRYTCPDIATMHRNFDSWGQGTLVTVSSGSGGGGSGGGGSGGGGSFEQVQLQQPGAELVKPGASVKMSCKASGYAFSSYWINWMKQKPGQGLEWIGQIYPGDGDTNYNGKFKGRATLTADTSSSTAYMQLSSLTSEDSAVYFCARSITTVVGCAMDYWGQGTSVTVSSTREQKLISEEDLGSGIQNPDPAVYQLRDSKSSDKSVCLFTDFDSQTNVSQSKDSDVYITDKTVLDMRSMDFKSNSAVAWSNKSDFACANAFNNSIIPEDTFFPSPESSCGTQSFGLLDPKLCYLLDGILFIYGVILTALFLKRGRKKLLYIFKQPFMRPVQTTQEEDGCSCRFPEEEEGGCELRVKFSRSADAPAYQQGQNQLYNELNLGRREEYDVLDKRRGRDPEMGGKPQRRKNPQEGLYNELQKDKMAEAYSEIGMKGERRRGKGHDGLYQGLSTATKDTYDALHMQALPPR

SEQ ID NO: 16718 - protein, 970 aa, Artificial Sequence
  Synthetic Polypeptide
MALPVTALLLPLALLLHAARPDIQMTQSPSSLSASVGDRVTITCKASDHINNWLAWYQQKPGQAPKLLIYGATTLETGVPSRFSGSGSGTDYTLTISSLQPEDFATYYCQQSWNTPWTFGQGTKLEIKRLEQSFGLLDPKLCYLLDGILFIYGVILTALFLRVKFSRSADAPAYQQGQNQLYNELNLGRREEYDVLDKRRGRDPEMGGKPQRRKNPQEGLYNELQKDKMAEAYSEIGMKGERRRGKGHDGLYQGLSTATKDTYDALHMQALPPRRAKRSGSGATNFSLLKQAGDVEENPGPTSMDWIWRILFLVGAATGAHSGPEVQLVESGGGLVQPGGSLRLSCAASGFASDYYIIGWFRQAPGKEREGVSCISSRYANTNYADSVKGRFTISRDNAKNTVYLQMNSLKPEDTAVYYCAADTRRYTCPDIATMHRNFDSWGQGTLVTVSSGSGGGGSGGGGSGGGGSFEQVQLQQPGAELVKPGASVKMSCKASGYAFSSYWINWMKQKPGQGLEWIGQIYPGDGDTNYNGKFKGRATLTADTSSSTAYMQLSSLTSEDSAVYFCARSITTVVGCAMDYWGQGTSVTVSSTRQSFGLLDPKLCYLLDGILFIYGVILTALFLRVKFSRSADAPAYQQGQNQLYNELNLGRREEYDVLDKRRGRDPEMGGKPQRRKNPQEGLYNELQKDKMAEAYSEIGMKGERRRGKGHDGLYQGLSTATKDTYDALHMQALPPRRAKRSGSGVKQTLNFDLLKLAGDVESNPGPSRGHMTEYKPTVRLATRDDVPRAVRTLAAAFADYPATRHTVDPDRHIERVTELQELFLTRVGLDIGKVWVADDGAAVAVWTTPESVEAGAVFAEIGPRMAELSGSRLAAQQQMEGLLAPHRPKEPAWFLATVGVSPDHQGKGLGSAVVLPGVEAAERAGVPAFLETSAPRNLPFYERLGFTVTADVEVPEGPRTWCMTRKPGA

SEQ ID NO: 16719 - protein, 795 aa, Artificial Sequence
  Synthetic Polypeptide
MALPVTALLLPLALLLHAARPDIQMTQSPSSLSASVGDRVTITCKASDHINNWLAWYQQKPGQAPKLLIYGATTLETGVPSRFSGSGSGTDYTLTISSLQPEDFATYYCQQSWNTPWTFGQGTKLEIKRLEGQPKANPTVTLFPPSSEELQANKATLVCLISDFYPGAVTVAWKADGSPVKAGVETTKPSKQSNNKYAASSYLSLTPEQWKSHRSYSCQVTHEGSTVEKTVAPTECSPIKTDVITMDPKDNCSKDANDTLLLQLTNTSAYYMYLLLLLKSVVYFAIITCCLLRRTAFCCNGEKSRAKRSGSGATNFSLLKQAGDVEENPGPTSMDWIWRILFLVGAATGAHSGPEVQLVESGGGLVQPGGSLRLSCAASGFASDYYIIGWFRQAPGKEREGVSCISSRYANTNYADSVKGRFTISRDNAKNTVYLQMNSLKPEDTAVYYCAADTRRYTCPDIATMHRNFDSWGQGTLVTVSSGSGGGGSGGGGSGGGGSFEQVQLQQPGAELVKPGASVKMSCKASGYAFSSYWINWMKQKPGQGLEWIGQIYPGDGDTNYNGKFKGRATLTADTSSSTAYMQLSSLTSEDSAVYFCARSITTVVGCAMDYWGQGTSVTVSSTRASTKGPSVFPLAPSSKSTSGGTAALGCLVKDYFPEPVTVSWNSGALTSGVHTFPAVLQSSGLYSLSSVVTVPSSSLGTQTYICNVNHKPSNTKVDKRVEPKSCEVKTDSTDHVKPKETENTKQPSKSCHKPKAIVHTEKVNMMSLTVLGLRMLFAKTVAVNFLLTAKLFFL

SEQ ID NO: 16720 - protein, 773 aa, Artificial Sequence
  Synthetic Polypeptide
MALPVTALLLPLALLLHAARPDIQMTQSPSSLSASVGDRVTITCKASDHINNWLAWYQQKPGQAPKLLIYGATTLETGVPSRFSGSGSGTDYTLTISSLQPEDFATYYCQQSWNTPWTFGQGTKLEIKRLEGQPKANPTVTLFPPSSEELQANKATLVCLISDFYPGAVTVAWKADGSPVKAGVETTKPSKQSNNKYAASSYLSLTPEQWKSHRSYSCQVTHEGSTVEKTVAPTECSGRADCGITSASYHQGVLSATILYEILLGKATLYAVLVSALVLMAMVKRKDSRGRAKRSGSGATNFSLLKQAGDVEENPGPTSMDWIWRILFLVGAATGAHSGPEVQLVESGGGLVQPGGSLRLSCAASGFASDYYIIGWFRQAPGKEREGVSCISSRYANTNYADSVKGRFTISRDNAKNTVYLQMNSLKPEDTAVYYCAADTRRYTCPDIATMHRNFDSWGQGTLVTVSSGSGGGGSGGGGSGGGGSFEQVQLQQPGAELVKPGASVKMSCKASGYAFSSYWINWMKQKPGQGLEWIGQIYPGDGDTNYNGKFKGRATLTADTSSSTAYMQLSSLTSEDSAVYFCARSITTVVGCAMDYWGQGTSVTVSSTRASTKGPSVFPLAPSSKSTSGGTAALGCLVKDYFPEPVTVSWNSGALTSGVHTFPAVLQSSGLYSLSSVVTVPSSSLGTQTYICNVNHKPSNTKVDKRVEPKSCIPEDTFFPSSDVPCDVKLVEKSFETDTNLNFQNLSVIGFRILLLKVAGFNLLMTLRLWSS

SEQ ID NO: 16721 - protein, 773 aa, Artificial Sequence
  Synthetic Polypeptide
MALPVTALLLPLALLLHAARPDIQMTQSPSSLSASVGDRVTITCKASDHINNWLAWYQQKPGQAPKLLIYGATTLETGVPSRFSGSGSGTDYTLTISSLQPEDFATYYCQQSWNTPWTFGQGTKLEIKRLEGQPKANPTVTLFPPSSEELQANKATLVCLISDFYPGAVTVAWKADGSPVKAGVETTKPSKQSNNKYAASSYLSLTPEQWKSHRSYSCQVTHEGSTVEKTVAPTECSGRADCGFTSESYQQGVLSATILYEILLGKATLYAVLVSALVLMAMVKRKDSRGRAKRSGSGATNFSLLKQAGDVEENPGPTSMDWIWRILFLVGAATGAHSGPEVQLVESGGGLVQPGGSLRLSCAASGFASDYYIIGWFRQAPGKEREGVSCISSRYANTNYADSVKGRFTISRDNAKNTVYLQMNSLKPEDTAVYYCAADTRRYTCPDIATMHRNFDSWGQGTLVTVSSGSGGGGSGGGGSGGGGSFEQVQLQQPGAELVKPGASVKMSCKASGYAFSSYWINWMKQKPGQGLEWIGQIYPGDGDTNYNGKFKGRATLTADTSSSTAYMQLSSLTSEDSAVYFCARSITTVVGCAMDYWGQGTSVTVSSTRASTKGPSVFPLAPSSKSTSGGTAALGCLVKDYFPEPVTVSWNSGALTSGVHTFPAVLQSSGLYSLSSVVTVPSSSLGTQTYICNVNHKPSNTKVDKRVEPKSCIPEDTFFPSPESSCDVKLVEKSFETDTNLNFQNLSVIGFRILLLKVAGFNLLMTLRLWSS

SEQ ID NO: 16722 - protein, 603 aa, Artificial Sequence
  Synthetic Polypeptide
MDWIWRILFLVGAATGAHSGPEVQLVESGGGLVQPGGSLRLSCAASGFASDYYIIGWFRQAPGKEREGVSCISSRYANTNYADSVKGRFTISRDNAKNTVYLQMNSLKPEDTAVYYCAADTRRYTCPDIATMHRNFDSWGQGTLVTVSSGSGGGGSGGGGSGGGGSFEQVQLQQPGAELVKPGASVKMSCKASGYAFSSYWINWMKQKPGQGLEWIGQIYPGDGDTNYNGKFKGRATLTADTSSSTAYMQLSSLTSEDSAVYFCARSITTVVGCAMDYWGQGTSVTVSSGGGGSGGGGSGGGGSDIQMTQSPSSLSASVGDRVTITCKASDHINNWLAWYQQKPGQAPKLLIYGATTLETGVPSRFSGSGSGTDYTLTISSLQPEDFATYYCQQSWNTPWTFGQGTKLEIKRTRGGGSDGNEEMGGITQTPYKVSISGTTVILTCPQYPGSEILWQHNDKNIGGDEDDKNIGSDEDHLSLKEFSELEQSGYYVCYPRGSKPEDANFYLYLRARVCENCMEMDVMSVATIVIVDICITGGLLLLVYYWSKNRKAKAKPVTRGAGAGGRQRGQNKERPPPVPNPDYEPIRKGQRDLYSGLNQRRI

SEQ ID NO: 16723 - protein, 568 aa, Artificial Sequence
  Synthetic Polypeptide
MDWIWRILFLVGAATGAHSGPEVQLVESGGGLVQPGGSLRLSCAASGFASDYYIIGWFRQAPGKEREGVSCISSRYANTNYADSVKGRFTISRDNAKNTVYLQMNSLKPEDTAVYYCAADTRRYTCPDIATMHRNFDSWGQGTLVTVSSGSGGGGSGGGGSGGGGSFEQVQLQQPGAELVKPGASVKMSCKASGYAFSSYWINWMKQKPGQGLEWIGQIYPGDGDTNYNGKFKGRATLTADTSSSTAYMQLSSLTSEDSAVYFCARSITTVVGCAMDYWGQGTSVTVSSGGGGSGGGGSGGGGSDIQMTQSPSSLSASVGDRVTITCKASDHINNWLAWYQQKPGQAPKLLIYGATTLETGVPSRFSGSGSGTDYTLTISSLQPEDFATYYCQQSWNTPWTFGQGTKLEIKRTRGGGSFKIPIEELEDRVFVNCNTSITWVEGTVGTLLSDITRLDLGKRILDPRGIYRCNGTDIYKDKESTVQVHYRMCQSCVELDPATVAGIIVTDVIATLLLALGVFCFAGHETGRLSGAADTQALLRNDQVYQPLRDRDDAQYSHLGGNWARNK

SEQ ID NO: 16724 - protein, 578 aa, Artificial Sequence
  Synthetic Polypeptide
MDWIWRILFLVGAATGAHSGPEVQLVESGGGLVQPGGSLRLSCAASGFASDYYIIGWFRQAPGKEREGVSCISSRYANTNYADSVKGRFTISRDNAKNTVYLQMNSLKPEDTAVYYCAADTRRYTCPDIATMHRNFDSWGQGTLVTVSSGSGGGGSGGGGSGGGGSFEQVQLQQPGAELVKPGASVKMSCKASGYAFSSYWINWMKQKPGQGLEWIGQIYPGDGDTNYNGKFKGRATLTADTSSSTAYMQLSSLTSEDSAVYFCARSITTVVGCAMDYWGQGTSVTVSSGGGGSGGGGSGGGGSDIQMTQSPSSLSASVGDRVTITCKASDHINNWLAWYQQKPGQAPKLLIYGATTLETGVPSRFSGSGSGTDYTLTISSLQPEDFATYYCQQSWNTPWTFGQGTKLEIKRTRGGGSQSIKGNHLVKVYDYQEDGSVLLTCDAEAKNITWFKDGKMIGFLTEDKKKWNLGSNAKDPRGMYQCKGSQNKSKPLQVYYRMCQNCIELNAATISGFLFAEIVSIFVLAVGVYFIAGQDGVRQSRASDKQTLLPNDQLYQPLKDREDDQYSHLQGNQLRRN

SEQ ID NO: 16725 - protein, 561 aa, Artificial Sequence
  Synthetic Polypeptide
MDWIWRILFLVGAATGAHSGPEVQLVESGGGLVQPGGSLRLSCAASGFASDYYIIGWFRQAPGKEREGVSCISSRYANTNYADSVKGRFTISRDNAKNTVYLQMNSLKPEDTAVYYCAADTRRYTCPDIATMHRNFDSWGQGTLVTVSSGSGGGGSGGGGSGGGGSFEQVQLQQPGAELVKPGASVKMSCKASGYAFSSYWINWMKQKPGQGLEWIGQIYPGDGDTNYNGKFKGRATLTADTSSSTAYMQLSSLTSEDSAVYFCARSITTVVGCAMDYWGQGTSVTVSSGGGGSGGGGSGGGGSDIQMTQSPSSLSASVGDRVTITCKASDHINNWLAWYQQKPGQAPKLLIYGATTLETGVPSRFSGSGSGTDYTLTISSLQPEDFATYYCQQSWNTPWTFGQGTKLEIKRTRGGGSQSFGLLDPKLCYLLDGILFIYGVILTALFLRVKFSRSADAPAYQQGQNQLYNELNLGRREEYDVLDKRRGRDPEMGGKPQRRKNPQEGLYNELQKDKMAEAYSEIGMKGERRRGKGHDGLYQGLSTATKDTYDALHMQALPPR

SEQ ID NO: 16726 - protein, 597 aa, Artificial Sequence
  Synthetic Polypeptide
MDWIWRILFLVGAATGAHSGPEVQLVESGGGLVQPGGSLRLSCAASGFASDYYIIGWFRQAPGKEREGVSCISSRYANTNYADSVKGRFTISRDNAKNTVYLQMNSLKPEDTAVYYCAADTRRYTCPDIATMHRNFDSWGQGTLVTVSSGSGGGGSGGGGSGGGGSFEQVQLQQPGAELVKPGASVKMSCKASGYAFSSYWINWMKQKPGQGLEWIGQIYPGDGDTNYNGKFKGRATLTADTSSSTAYMQLSSLTSEDSAVYFCARSITTVVGCAMDYWGQGTSVTVSSTRIQNPDPAVYQLRDSKSSDKSVCLFTDFDSQTNVSQSKDSDVYITDKTVLDMRSMDFKSNSAVAWSNKSDFACANAFNNSIIPEDTFFPSPESSCDVKLVEKSFETDTNLNFQNLSVIGFRILLLKVAGFNLLMTLRLWSSRAKRSGSGVKQTLNFDLLKLAGDVESNPGPSRGHMAKPLSQEESTLIERATATINSIPISEDYSVASAALSSDGRIFTGVNVYHFTGGPCAELVVLGTAAAAAAGNLTCIVAIGNENRGILSPCGRCRQVLLDLHPGIKAIVKDSDGQPTAVGIRELLPSGYVWEG

SEQ ID NO: 16727 - protein, 431 aa, Artificial Sequence
  Synthetic Polypeptide
MDWIWRILFLVGAATGAHSGPEVQLVESGGGLVQPGGSLRLSCAASGFASDYYIIGWFRQAPGKEREGVSCISSRYANTNYADSVKGRFTISRDNAKNTVYLQMNSLKPEDTAVYYCAADTRRYTCPDIATMHRNFDSWGQGTLVTVSSGSGGGGSGGGGSGGGGSFEQVQLQQPGAELVKPGASVKMSCKASGYAFSSYWINWMKQKPGQGLEWIGQIYPGDGDTNYNGKFKGRATLTADTSSSTAYMQLSSLTSEDSAVYFCARSITTVVGCAMDYWGQGTSVTVSSTRIQNPDPAVYQLRDSKSSDKSVCLFTDFDSQTNVSQSKDSDVYITDKTVLDMRSMDFKSNSAVAWSNKSDFACANAFNNSIIPEDTFFPSPESSCDVKLVEKSFETDTNLNFQNLSVIGFRILLLKVAGFNLLMTLRLWSS

SEQ ID NO: 16728 - protein, 609 aa, Artificial Sequence
  Synthetic Polypeptide
MDWIWRILFLVGAATGAHSGPEVQLVESGGGLVQPGGSLRLSCAASGFASDYYIIGWFRQAPGKEREGVSCISSRYANTNYADSVKGRFTISRDNAKNTVYLQMNSLKPEDTAVYYCAADTRRYTCPDIATMHRNFDSWGQGTLVTVSSGSGGGGSGGGGSGGGGSFEQVQLQQPGAELVKPGASVKMSCKASGYAFSSYWINWMKQKPGQGLEWIGQIYPGDGDTNYNGKFKGRATLTADTSSSTAYMQLSSLTSEDSAVYFCARSITTVVGCAMDYWGQGTSVTVSSTREQKLISEEDGSGIQNPDPAVYQLRDSKSSDKSVCLFTDFDSQTNVSQSKDSDVYITDKCVLDMRSMDFKSNSAVAWSNKSDFACANAFNNSIIPEDTFFPSPESSCDVKLVEKSFETDTNLNFQNLSVIGFRILLLKVAGFNLLMTLRLWSSRAKRSGSGVKQTLNFDLLKLAGDVESNPGPSRGHMAKPLSQEESTLIERATATINSIPISEDYSVASAALSSDGRIFTGVNVYHFTGGPCAELVVLGTAAAAAAGNLTCIVAIGNENRGILSPCGRCRQVLLDLHPGIKAIVKDSDGQPTAVGIRELLPSGYVWEG

SEQ ID NO: 16729 - protein, 443 aa, Artificial Sequence
  Synthetic Polypeptide
MDWIWRILFLVGAATGAHSGPEVQLVESGGGLVQPGGSLRLSCAASGFASDYYIIGWFRQAPGKEREGVSCISSRYANTNYADSVKGRFTISRDNAKNTVYLQMNSLKPEDTAVYYCAADTRRYTCPDIATMHRNFDSWGQGTLVTVSSGSGGGGSGGGGSGGGGSFEQVQLQQPGAELVKPGASVKMSCKASGYAFSSYWINWMKQKPGQGLEWIGQIYPGDGDTNYNGKFKGRATLTADTSSSTAYMQLSSLTSEDSAVYFCARSITTVVGCAMDYWGQGTSVTVSSTREQKLISEEDGSGIQNPDPAVYQLRDSKSSDKSVCLFTDFDSQTNVSQSKDSDVYITDKCVLDMRSMDFKSNSAVAWSNKSDFACANAFNNSIIPEDTFFPSPESSCDVKLVEKSFETDTNLNFQNLSVIGFRILLLKVAGFNLLMTLRLWSS

SEQ ID NO: 16730 - protein, 1146 aa, Artificial Sequence
  Synthetic Polypeptide
MALPVTALLLPLALLLHAARPEVQLVESGGSLVQPGGSLRLSCAASGFTFDDYAMSWVRQVPGKGLEWVSSINWSGTHTDYADSVKGRFTISRNNANNTLYLQMNSLKSEDTAVYYCAKNWRDAGTTWFEKSGSAGQGTQVTVSSGTGGGGSGGGGSGGGGSEFDIQMTQSPSSLSASVGDRVTITCKASDHINNWLAWYQQKPGQAPKLLIYGATTLETGVPSRFSGSGSGTDYTLTISSLQPEDFATYYCQQSWNTPWTFGQGTKLEIKRLEIQNPDPAVYQLRDSKSSDKSVCLFTDFDSQTNVSQSKDSDVYITDKCVLDMRSMDFKSNSAVAWSNKSDFACANAFNNSIIPEDTFFPSSDVPCDVKLVEKSFETDTNLNFQNLSVIGFRILLLKVAGFNLLMTLRLWSSRAKRSGSGVKQTLNFDLLKLAGDVESNPGPTSMDWIWRILFLVGAATGAHSGPEVQLVESGGGLVQPGGSLRLSCAASGFASDYYIIGWFRQAPGKEREGVSCISSRYANTNYADSVKGRFTISRDNAKNTVYLQMNSLKPEDTAVYYCAADTRRYTCPDIATMHRNFDSWGQGTLVTVSSGSGGGGSGGGGSGGGGSFEQVQLQQPGAELVKPGASVKMSCKASGYAFSSYWINWMKQKPGQGLEWIGQIYPGDGDTNYNGKFKGRATLTADTSSSTAYMQLSSLTSEDSAVYFCARSITTVVGCAMDYWGQGTSVTVSSTREDLKNVFPPEVAVFEPSKAEIAHTQKATLVCLATGFYPDHVELSWWVNGKEVHSGVCTDPQPLKEQPALNDSRYCLSSRLRVSATFWQNPRNHFRCQVQFYGLSENDEWTQDRAKPVTQIVSAEAWGRADCGITSASYHQGVLSATILYEILLGKATLYAVLVSALVLMAMVKRKDSRGRAKRSGSGATNFSLLKQAGDVEENPGPSRGHMTEYKPTVRLATRDDVPRAVRTLAAAFADYPATRHTVDPDRHIERVTELQELFLTRVGLDIGKVWVADDGAAVAVWTTPESVEAGAVFAEIGPRMAELSGSRLAAQQQMEGLLAPHRPKEPAWFLATVGVSPDHQGKGLGSAVVLPGVEAAERAGVPAFLETSAPRNLPFYERLGFTVTADVEVPEGPRTWCMTRKPGA

SEQ ID NO: 16731 - protein, 1145 aa, Artificial Sequence
  Synthetic Polypeptide
MALPVTALLLPLALLLHAARPEVQLVESGGSLVQPGGSLRLSCAASGFTFDDYAMSWVRQVPGKGLEWVSSINWSGTHTDYADSVKGRFTISRNNANNTLYLQMNSLKSEDTAVYYCAKNWRDAGTTWFEKSGSAGQGTQVTVSSGTGGGGSGGGGSGGGGSEFDIQMTQSPSSLSASVGDRVTITCKASDHINNWLAWYQQKPGQAPKLLIYGATTLETGVPSRFSGSGSGTDYTLTISSLQPEDFATYYCQQSWNTPWTFGQGTKLEIKRLEDLKNVFPPEVAVFEPSKAEIAHTQKATLVCLATGFYPDHVELSWWVNGKEVHSGVCTDPQPLKEQPALNDSRYCLSSRLRVSATFWQNPRNHFRCQVQFYGLSENDEWTQDRAKPVTQIVSAEAWGRADCGITSASYHQGVLSATILYEILLGKATLYAVLVSALVLMAMVKRKDSRGRAKRSGSGATNFSLLKQAGDVEENPGPTSMDWIWRILFLVGAATGAHSGPEVQLVESGGGLVQPGGSLRLSCAASGFASDYYIIGWFRQAPGKEREGVSCISSRYANTNYADSVKGRFTISRDNAKNTVYLQMNSLKPEDTAVYYCAADTRRYTCPDIATMHRNFDSWGQGTLVTVSSGSGGGGSGGGGSGGGGSFEQVQLQQPGAELVKPGASVKMSCKASGYAFSSYWINWMKQKPGQGLEWIGQIYPGDGDTNYNGKFKGRATLTADTSSSTAYMQLSSLTSEDSAVYFCARSITTVVGCAMDYWGQGTSVTVSSTRIQNPDPAVYQLRDSKSSDKSVCLFTDFDSQTNVSQSKDSDVYITDKCVLDMRSMDFKSNSAVAWSNKSDFACANAFNNSIIPEDTFFPSSDVPCDVKLVEKSFETDTNLNFQNLSVIGFRILLLKVAGFNLLMTLRLWSSRAKRSGSGVKQTLNFDLLKLAGDVESNPGPSRGHMTEYKPTVRLATRDDVPRAVRTLAAAFADYPATRHTVDPDRHIERVTELQELFLTRVGLDIGKVWVADDGAAVAVWTTPESVEAGAVFAEIGPRMAELSGSRLAAQQQMEGLLAPHRPKEPAWFLATVGVSPDHQGKGLGSAVVLPGVEAAERAGVPAFLETSAPRNLPFYERLGFTVTADVEVPEGPRTWCMTRKPGA

SEQ ID NO: 16732 - protein, 1145 aa, Artificial Sequence
  Synthetic Polypeptide
MALPVTALLLPLALLLHAARPEVQLVESGGSLVQPGGSLRLSCAASGFTFDDYAMSWVRQVPGKGLEWVSSINWSGTHTDYADSVKGRFTISRNNANNTLYLQMNSLKSEDTAVYYCAKNWRDAGTTWFEKSGSAGQGTQVTVSSGTGGGGSGGGGSGGGGSEFDIQMTQSPSSLSASVGDRVTITCKASDHINNWLAWYQQKPGQAPKLLIYGATTLETGVPSRFSGSGSGTDYTLTISSLQPEDFATYYCQQSWNTPWTFGQGTKLEIKRLEDLKNVFPPEVAVFEPSEAEISHTQKATLVCLATGFYPDHVELSWWVNGKEVHSGVCTDPQPLKEQPALNDSRYCLSSRLRVSATFWQNPRNHFRCQVQFYGLSENDEWTQDRAKPVTQIVSAEAWGRADCGFTSESYQQGVLSATILYEILLGKATLYAVLVSALVLMAMVKRKDSRGRAKRSGSGATNFSLLKQAGDVEENPGPTSMDWIWRILFLVGAATGAHSGPEVQLVESGGGLVQPGGSLRLSCAASGFASDYYIIGWFRQAPGKEREGVSCISSRYANTNYADSVKGRFTISRDNAKNTVYLQMNSLKPEDTAVYYCAADTRRYTCPDIATMHRNFDSWGQGTLVTVSSGSGGGGSGGGGSGGGGSFEQVQLQQPGAELVKPGASVKMSCKASGYAFSSYWINWMKQKPGQGLEWIGQIYPGDGDTNYNGKFKGRATLTADTSSSTAYMQLSSLTSEDSAVYFCARSITTVVGCAMDYWGQGTSVTVSSTRIQNPDPAVYQLRDSKSSDKSVCLFTDFDSQTNVSQSKDSDVYITDKCVLDMRSMDFKSNSAVAWSNKSDFACANAFNNSIIPEDTFFPSPESSCDVKLVEKSFETDTNLNFQNLSVIGFRILLLKVAGFNLLMTLRLWSSRAKRSGSGVKQTLNFDLLKLAGDVESNPGPSRGHMTEYKPTVRLATRDDVPRAVRTLAAAFADYPATRHTVDPDRHIERVTELQELFLTRVGLDIGKVWVADDGAAVAVWTTPESVEAGAVFAEIGPRMAELSGSRLAAQQQMEGLLAPHRPKEPAWFLATVGVSPDHQGKGLGSAVVLPGVEAAERAGVPAFLETSAPRNLPFYERLGFTVTADVEVPEGPRTWCMTRKPGA

SEQ ID NO: 16733 - protein, 912 aa, Artificial Sequence
  Synthetic Polypeptide
MALPVTALLLPLALLLHAARPEVQLVESGGSLVQPGGSLRLSCAASGFTFDDYAMSWVRQVPGKGLEWVSSINWSGTHTDYADSVKGRFTISRNNANNTLYLQMNSLKSEDTAVYYCAKNWRDAGTTWFEKSGSAGQGTQVTVSSGTGGGGSGGGGSGGGGSEFDIQMTQSPSSLSASVGDRVTITCKASDHINNWLAWYQQKPGQAPKLLIYGATTLETGVPSRFSGSGSGTDYTLTISSLQPEDFATYYCQQSWNTPWTFGQGTKLEIKRLEDLKNVFPPEVAVFEPSEAEISHTQKATLVCLATGFYPDHVELSWWVNGKEVHSGVCTDPQPLKEQPALNDSRYCLSSRLRVSATFWQNPRNHFRCQVQFYGLSENDEWTQDRAKPVTQIVSAEAWGRADCGFTSESYQQGVLSATILYEILLGKATLYAVLVSALVLMAMVKRKDSRGRAKRSGSGATNFSLLKQAGDVEENPGPTSMDWIWRILFLVGAATGAHSGPEVQLVESGGGLVQPGGSLRLSCAASGFASDYYIIGWFRQAPGKEREGVSCISSRYANTNYADSVKGRFTISRDNAKNTVYLQMNSLKPEDTAVYYCAADTRRYTCPDIATMHRNFDSWGQGTLVTVSSGSGGGGSGGGGSGGGGSFEQVQLQQPGAELVKPGASVKMSCKASGYAFSSYWINWMKQKPGQGLEWIGQIYPGDGDTNYNGKFKGRATLTADTSSSTAYMQLSSLTSEDSAVYFCARSITTVVGCAMDYWGQGTSVTVSSTRIQNPDPAVYQLRDSKSSDKSVCLFTDFDSQTNVSQSKDSDVYITDKCVLDMRSMDFKSNSAVAWSNKSDFACANAFNNSIIPEDTFFPSPESSCDVKLVEKSFETDTNLNFQNLSVIGFRILLLKVAGFNLLMTLRLWSS

SEQ ID NO: 16734 - protein, 1137 aa, Artificial Sequence
  Synthetic Polypeptide
MALPVTALLLPLALLLHAARPEVQLVESGGSLVQPGGSLRLSCAASGFTFDDYAMSWVRQVPGKGLEWVSSINWSGTHTDYADSVKGRFTISRNNANNTLYLQMNSLKSEDTAVYYCAKNWRDAGTTWFEKSGSAGQGTQVTVSSGTGGGGSGGGGSGGGGSEFDIQMTQSPSSLSASVGDRVTITCKASDHINNWLAWYQQKPGQAPKLLIYGATTLETGVPSRFSGSGSGTDYTLTISSLQPEDFATYYCQQSWNTPWTFGQGTKLEIKRLEDLKNVFPPEVAVFEPSEAEISHTQKATLVCLATGFYPDHVELSWWVNGKEVHSGVCTDPQPLKEQPALNDSRYCLSSRLRVSATFWQNPRNHFRCQVQFYGLSENDEWTQDRAKPVTQIVSAEAWGRADCGFTSESYQQGVLSATILYEILLGKATLYAVLVSALVLMAMVKRKDSRGRAKRSGSGATNFSLLKQAGDVEENPGPTSMDWIWRILFLVGAATGAHSGPEVQLVESGGGLVQPGGSLRLSCAASGFASDYYIIGWFRQAPGKEREGVSCISSRYANTNYADSVKGRFTISRDNAKNTVYLQMNSLKPEDTAVYYCAADTRRYTCPDIATMHRNFDSWGQGTLVTVSSGSGGGGSGGGGSGGGGSFEQVQLQQPGAELVKPGASVKMSCKASGYAFSSYWINWMKQKPGQGLEWIGQIYPGDGDTNYNGKFKGRATLTADTSSSTAYMQLSSLTSEDSAVYFCARSITTVVGCAMDYWGQGTSVTVSSTRIQNPDPAVYQLRDSKSSDKSVCLFTDFDSQTNVSQSKDSDVYITDKCVLDMRSMDFKSNSAVAWSNKSDFACANAFNNSIIPEDTFFPSPESSCDVKLVEKSFETDTNLNFQNLSVIGFRILLLKVAGFNLLMTLRLWSSRAKRSGSGVKQTLNFDLLKLAGDVESNPGPSRGGIHTMATYEVLCEVARKLGTDDREVVLFLLNVFIPQPTLAQLIGALRALKEEGRLTFPLLAECLFRAGRRDLLRDLLHLDPRFLERHLAGTMSYFSPYQLTVLHVDGELCARDIRSLIFLSKDTIGSRSTPQTFLHWVYCMENLDLLGPTDVDALMSMLRSLSRVDLQRQVQTLMGLHLSGPSHSQHYRHTP

SEQ ID NO: 16735 - protein, 916 aa, Artificial Sequence
  Synthetic Polypeptide
MALPVTALLLPLALLLHAARPEVQLVESGGSLVQPGGSLRLSCAASGFTFDDYAMSWVRQVPGKGLEWVSSINWSGTHTDYADSVKGRFTISRNNANNTLYLQMNSLKSEDTAVYYCAKNWRDAGTTWFEKSGSAGQGTQVTVSSGTGGGGSGGGGSGGGGSEFDIQMTQSPSSLSASVGDRVTITCKASDHINNWLAWYQQKPGQAPKLLIYGATTLETGVPSRFSGSGSGTDYTLTISSLQPEDFATYYCQQSWNTPWTFGQGTKLEIKRLEIQNPDPAVYQLRDSKSSDKSVCLFTDFDSQTNVSQSKDSDVYITDKCVLDMRSMDFKSNSAVAWSNKSDFACANAFNNSIIPEDTFFPSPESSCDVKLVEKSFETDTNLNFQNLSVIGFRILLLKVAGFNLLMTLRLWSSRAKRSGSGVKQTLNFDLLKLAGDVESNPGPTSMDWIWRILFLVGAATGAHSGPEVQLVESGGGLVQPGGSLRLSCAASGFASDYYIIGWFRQAPGKEREGVSCISSRYANTNYADSVKGRFTISRDNAKNTVYLQMNSLKPEDTAVYYCAADTRRYTCPDIATMHRNFDSWGQGTLVTVSSGSGGGGSGGGGSGGGGSFEQVQLQQPGAELVKPGASVKMSCKASGYAFSSYWINWMKQKPGQGLEWIGQIYPGDGDTNYNGKFKGRATLTADTSSSTAYMQLSSLTSEDSAVYFCARSITTVVGCAMDYWGQGTSVTVSSTREDLKNVFPPEVAVFEPSEAEISHTQKATLVCLATGFYPDHVELSWWVNGKEVHSGVCTDPQPLKEQPALNDSRYCLSSRLRVSATFWQNPRNHFRCQVQFYGLSENDEWTQDRAKPVTQIVSAEAWGRADCGFTSESYQQGVLSATILYEILLGKATLYAVLVSALVLMAMVKRKDSRG

SEQ ID NO: 16736 - protein, 1138 aa, Artificial Sequence
  Synthetic Polypeptide
MALPVTALLLPLALLLHAARPEVQLVESGGSLVQPGGSLRLSCAASGFTFDDYAMSWVRQVPGKGLEWVSSINWSGTHTDYADSVKGRFTISRNNANNTLYLQMNSLKSEDTAVYYCAKNWRDAGTTWFEKSGSAGQGTQVTVSSGTGGGGSGGGGSGGGGSEFDIQMTQSPSSLSASVGDRVTITCKASDHINNWLAWYQQKPGQAPKLLIYGATTLETGVPSRFSGSGSGTDYTLTISSLQPEDFATYYCQQSWNTPWTFGQGTKLEIKRLEIQNPDPAVYQLRDSKSSDKSVCLFTDFDSQTNVSQSKDSDVYITDKCVLDMRSMDFKSNSAVAWSNKSDFACANAFNNSIIPEDTFFPSPESSCDVKLVEKSFETDTNLNFQNLSVIGFRILLLKVAGFNLLMTLRLWSSRAKRSGSGVKQTLNFDLLKLAGDVESNPGPTSMDWIWRILFLVGAATGAHSGPEVQLVESGGGLVQPGGSLRLSCAASGFASDYYIIGWFRQAPGKEREGVSCISSRYANTNYADSVKGRFTISRDNAKNTVYLQMNSLKPEDTAVYYCAADTRRYTCPDIATMHRNFDSWGQGTLVTVSSGSGGGGSGGGGSGGGGSFEQVQLQQPGAELVKPGASVKMSCKASGYAFSSYWINWMKQKPGQGLEWIGQIYPGDGDTNYNGKFKGRATLTADTSSSTAYMQLSSLTSEDSAVYFCARSITTVVGCAMDYWGQGTSVTVSSTREDLKNVFPPEVAVFEPSEAEISHTQKATLVCLATGFYPDHVELSWWVNGKEVHSGVCTDPQPLKEQPALNDSRYCLSSRLRVSATFWQNPRNHFRCQVQFYGLSENDEWTQDRAKPVTQIVSAEAWGRADCGFTSESYQQGVLSATILYEILLGKATLYAVLVSALVLMAMVKRKDSRGRAKRSGSGATNFSLLKQAGDVEENPGPSRGGIHTMATYEVLCEVARKLGTDDREVVLFLLNVFIPQPTLAQLIGALRALKEEGRLTFPLLAECLFRAGRRDLLRDLLHLDPRFLERHLAGTMSYFSPYQLTVLHVDGELCARDIRSLIFLSKDTIGSRSTPQTFLHWVYCMENLDLLGPTDVDALMSMLRSLSRVDLQRQVQTLMGLHLSGPSHSQHYRHTP

SEQ ID NO: 16737 - protein, 1145 aa, Artificial Sequence
  Synthetic Polypeptide
MALPVTALLLPLALLLHAARPEVQLVESGGSLVQPGGSLRLSCAASGFTFDDYAMSWVRQVPGKGLEWVSSINWSGTHTDYADSVKGRFTISRNNANNTLYLQMNSLKSEDTAVYYCAKNWRDAGTTWFEKSGSAGQGTQVTVSSGTGGGGSGGGGSGGGGSEFDIQMTQSPSSLSASVGDRVTITCKASDHINNWLAWYQQKPGQAPKLLIYGATTLETGVPSRFSGSGSGTDYTLTISSLQPEDFATYYCQQSWNTPWTFGQGTKLEIKRLEDLKNVFPPEVAVFEPSEAEISHTQKATLVCLATGFYPDHVELSWWVNGKEVHSGVSTDPQPLKEQPALNDSRYCLSSRLRVSATFWQNPRNHFRCQVQFYGLSENDEWTQDRAKPVTQIVSAEAWGRADCGFTSESYQQGVLSATILYEILLGKATLYAVLVSALVLMAMVKRKDSRGRAKRSGSGATNFSLLKQAGDVEENPGPTSMDWIWRILFLVGAATGAHSGPEVQLVESGGGLVQPGGSLRLSCAASGFASDYYIIGWFRQAPGKEREGVSCISSRYANTNYADSVKGRFTISRDNAKNTVYLQMNSLKPEDTAVYYCAADTRRYTCPDIATMHRNFDSWGQGTLVTVSSGSGGGGSGGGGSGGGGSFEQVQLQQPGAELVKPGASVKMSCKASGYAFSSYWINWMKQKPGQGLEWIGQIYPGDGDTNYNGKFKGRATLTADTSSSTAYMQLSSLTSEDSAVYFCARSITTVVGCAMDYWGQGTSVTVSSTRIQNPDPAVYQLRDSKSSDKSVCLFTDFDSQTNVSQSKDSDVYITDKTVLDMRSMDFKSNSAVAWSNKSDFACANAFNNSIIPEDTFFPSPESSCDVKLVEKSFETDTNLNFQNLSVIGFRILLLKVAGFNLLMTLRLWSSRAKRSGSGVKQTLNFDLLKLAGDVESNPGPSRGHMTEYKPTVRLATRDDVPRAVRTLAAAFADYPATRHTVDPDRHIERVTELQELFLTRVGLDIGKVWVADDGAAVAVWTTPESVEAGAVFAEIGPRMAELSGSRLAAQQQMEGLLAPHRPKEPAWFLATVGVSPDHQGKGLGSAVVLPGVEAAERAGVPAFLETSAPRNLPFYERLGFTVTADVEVPEGPRTWCMTRKPGA

SEQ ID NO: 16738 - protein, 1227 aa, Artificial Sequence
  Synthetic Polypeptide
MALPVTALLLPLALLLHAARPEVQLVESGGSLVQPGGSLRLSCAASGFTFDDYAMSWVRQVPGKGLEWVSSINWSGTHTDYADSVKGRFTISRNNANNTLYLQMNSLKSEDTAVYYCAKNWRDAGTTWFEKSGSAGQGTQVTVSSGTGGGGSGGGGSGGGGSEFDIQMTQSPSSLSASVGDRVTITCKASDHINNWLAWYQQKPGQAPKLLIYGATTLETGVPSRFSGSGSGTDYTLTISSLQPEDFATYYCQQSWNTPWTFGQGTKLEIKRLEDLKNVFPPEVAVFEPSEAEISHTQKATLVCLATGFYPDHVELSWWVNGKEVHSGVSTDPQPLKEQPALNDSRYCLSSRLRVSATFWQNPRNHFRCQVQFYGLSENDEWTQDRAKPVTQIVSAEAWGRADCGFTSESYQQGVLSATILYEILLGKATLYAVLVSALVLMAMVKRKDSRGRAKRSGSGATNFSLLKQAGDVEENPGPTSMDWIWRILFLVGAATGAHSGPEVQLVESGGGLVQPGGSLRLSCAASGFASDYYIIGWFRQAPGKEREGVSCISSRYANTNYADSVKGRFTISRDNAKNTVYLQMNSLKPEDTAVYYCAADTRRYTCPDIATMHRNFDSWGQGTLVTVSSGSGGGGSGGGGSGGGGSFEQVQLQQPGAELVKPGASVKMSCKASGYAFSSYWINWMKQKPGQGLEWIGQIYPGDGDTNYNGKFKGRATLTADTSSSTAYMQLSSLTSEDSAVYFCARSITTVVGCAMDYWGQGTSVTVSSTREQKLISEEDGSGTPFPSLAPPIMLLVDGKQQMVVVCLVLDVAPPGLDSPIWFSAGNGSALDAFTYGPSPATDGTWTNLAHLSLPSEELASWEPLVCHTGPGAEGHSRSTQPMHLSGEASTARTCPQEPLRGTPGGALWLGVLRLLLFKLLLFDLLLTCSCLCDPAGPLPSPATTTRLRALGSHRLHPATETGGREATSSPRPQPRDRRWGDTPPGRKPGSPVRAKRSGSGVKQTLNFDLLKLAGDVESNPGPSRGHMTEYKPTVRLATRDDVPRAVRTLAAAFADYPATRHTVDPDRHIERVTELQELFLTRVGLDIGKVWVADDGAAVAVWTTPESVEAGAVFAEIGPRMAELSGSRLAAQQQMEGLLAPHRPKEPAWFLATVGVSPDHQGKGLGSAVVLPGVEAAERAGVPAFLETSAPRNLPFYERLGFTVTADVEVPEGPRTWCMTRKPGA

SEQ ID NO: 16739 - protein, 1182 aa, Artificial Sequence
  Synthetic Polypeptide
MALPVTALLLPLALLLHAARPEVQLVESGGSLVQPGGSLRLSCAASGFTFDDYAMSWVRQVPGKGLEWVSSINWSGTHTDYADSVKGRFTISRNNANNTLYLQMNSLKSEDTAVYYCAKNWRDAGTTWFEKSGSAGQGTQVTVSSGTGGGGSGGGGSGGGGSEFDIQMTQSPSSLSASVGDRVTITCKASDHINNWLAWYQQKPGQAPKLLIYGATTLETGVPSRFSGSGSGTDYTLTISSLQPEDFATYYCQQSWNTPWTFGQGTKLEIKRLEGKPIPNPLLGLDSTGSGDKQLDADVSPKPTIFLPSIAETKLQKAGTYLCLLEKFFPDVIKIHWQEKKSNTILGSQEGNTMKTNDTYMKFSWLTVPEKSLDKEHRCIVRHENNKNGVDQEIIFPPIKTDVITMDPKDNCSKDANDTLLLQLTNTSAYYMYLLLLLKSVVYFAIITCCLLRRTAFCCNGEKSRAKRSGSGATNFSLLKQAGDVEENPGPTSMDWIWRILFLVGAATGAHSGPEVQLVESGGGLVQPGGSLRLSCAASGFASDYYIIGWFRQAPGKEREGVSCISSRYANTNYADSVKGRFTISRDNAKNTVYLQMNSLKPEDTAVYYCAADTRRYTCPDIATMHRNFDSWGQGTLVTVSSGSGGGGSGGGGSGGGGSFEQVQLQQPGAELVKPGASVKMSCKASGYAFSSYWINWMKQKPGQGLEWIGQIYPGDGDTNYNGKFKGRATLTADTSSSTAYMQLSSLTSEDSAVYFCARSITTVVGCAMDYWGQGTSVTVSSTREQKLISEEDGSGSQPHTKPSVFVMKNGTNVACLVKEFYPKDIRINLVSSKKITEFDPAIVISPSGKYNAVKLGKYEDSNSVTCSVQHDNKTVHSTDFEVKTDSTDHVKPKETENTKQPSKSCHKPKAIVHTEKVNMMSLTVLGLRMLFAKTVAVNFLLTAKLFFLRAKRSGSGVKQTLNFDLLKLAGDVESNPGPSRGHMTEYKPTVRLATRDDVPRAVRTLAAAFADYPATRHTVDPDRHIERVTELQELFLTRVGLDIGKVWVADDGAAVAVWTTPESVEAGAVFAEIGPRMAELSGSRLAAQQQMEGLLAPHRPKEPAWFLATVGVSPDHQGKGLGSAVVLPGVEAAERAGVPAFLETSAPRNLPFYERLGFTVTADVEVPEGPRTWCMTRKPGA

SEQ ID NO: 16740 - protein, 920 aa, Artificial Sequence
  Synthetic Polypeptide
MALPVTALLLPLALLLHAARPEVQLVESGGSLVQPGGSLRLSCAASGFTFDDYAMSWVRQVPGKGLEWVSSINWSGTHTDYADSVKGRFTISRNNANNTLYLQMNSLKSEDTAVYYCAKNWRDAGTTWFEKSGSAGQGTQVTVSSGTGGGGSGGGGSGGGGSEFDIQMTQSPSSLSASVGDRVTITCKASDHINNWLAWYQQKPGQAPKLLIYGATTLETGVPSRFSGSGSGTDYTLTISSLQPEDFATYYCQQSWNTPWTFGQGTKLEIKRLESQPHTKPSVFVMKNGTNVACLVKEFYPKDIRINLVSSKKITEFDPAIVISPSGKYNAVKLGKYEDSNSVTCSVQHDNKTVHSTDFEVKTDSTDHVKPKETENTKQPSKSCHKPKAIVHTEKVNMMSLTVLGLRMLFAKTVAVNFLLTAKLFFLRAKRSGSGATNFSLLKQAGDVEENPGPTSMDWIWRILFLVGAATGAHSGPEVQLVESGGGLVQPGGSLRLSCAASGFASDYYIIGWFRQAPGKEREGVSCISSRYANTNYADSVKGRFTISRDNAKNTVYLQMNSLKPEDTAVYYCAADTRRYTCPDIATMHRNFDSWGQGTLVTVSSGSGGGGSGGGGSGGGGSFEQVQLQQPGAELVKPGASVKMSCKASGYAFSSYWINWMKQKPGQGLEWIGQIYPGDGDTNYNGKFKGRATLTADTSSSTAYMQLSSLTSEDSAVYFCARSITTVVGCAMDYWGQGTSVTVSSTRDKQLDADVSPKPTIFLPSIAETKLQKAGTYLCLLEKFFPDVIKIHWQEKKSNTILGSQEGNTMKTNDTYMKFSWLTVPEKSLDKEHRCIVRHENNKNGVDQEIIFPPIKTDVITMDPKDNCSKDANDTLLLQLTNTSAYYMYLLLLLKSVVYFAIITCCLLRRTAFCCNGEKS

SEQ ID NO: 16741 - protein, 1322 aa, Artificial Sequence
  Synthetic Polypeptide
MALPVTALLLPLALLLHAARPEVQLVESGGSLVQPGGSLRLSCAASGFTFDDYAMSWVRQVPGKGLEWVSSINWSGTHTDYADSVKGRFTISRNNANNTLYLQMNSLKSEDTAVYYCAKNWRDAGTTWFEKSGSAGQGTQVTVSSGTGGGGSGGGGSGGGGSEFDIQMTQSPSSLSASVGDRVTITCKASDHINNWLAWYQQKPGQAPKLLIYGATTLETGVPSRFSGSGSGTDYTLTISSLQPEDFATYYCQQSWNTPWTFGQGTKLEIKRGQPKANPTVTLFPPSSEELQANKATLVCLISDFYPGAVTVAWKADGSPVKAGVETTKPSKQSNNKYAASSYLSLTPEQWKSHRSYSCQVTHEGSTVEKTVAPTECSGSQSFGLLDPKLCYLLDGILFIYGVILTALFLRVKFSRSADAPAYQQGQNQLYNELNLGRREEYDVLDKRRGRDPEMGGKPQRRKNPQEGLYNELQKDKMAEAYSEIGMKGERRRGKGHDGLYQGLSTATKDTYDALHMQALPPRRAKRSGSGATNFSLLKQAGDVEENPGPTSMDWIWRILFLVGAATGAHSGPEVQLVESGGGLVQPGGSLRLSCAASGFASDYYIIGWFRQAPGKEREGVSCISSRYANTNYADSVKGRFTISRDNAKNTVYLQMNSLKPEDTAVYYCAADTRRYTCPDIATMHRNFDSWGQGTLVTVSSGSGGGGSGGGGSGGGGSFEQVQLQQPGAELVKPGASVKMSCKASGYAFSSYWINWMKQKPGQGLEWIGQIYPGDGDTNYNGKFKGRATLTADTSSSTAYMQLSSLTSEDSAVYFCARSITTVVGCAMDYWGQGTSVTVSSASTKGPSVFPLAPSSKSTSGGTAALGCLVKDYFPEPVTVSWNSGALTSGVHTFPAVLQSSGLYSLSSVVTVPSSSLGTQTYICNVNHKPSNTKVDKRVEPKSCGTQSFGLLDPKLCYLLDGILFIYGVILTALFLRVKFSRSADAPAYQQGQNQLYNELNLGRREEYDVLDKRRGRDPEMGGKPQRRKNPQEGLYNELQKDKMAEAYSEIGMKGERRRGKGHDGLYQGLSTATKDTYDALHMQALPPRRAKRSGSGVKQTLNFDLLKLAGDVESNPGPSRGHMTEYKPTVRLATRDDVPRAVRTLAAAFADYPATRHTVDPDRHIERVTELQELFLTRVGLDIGKVWVADDGAAVAVWTTPESVEAGAVFAEIGPRMAELSGSRLAAQQQMEGLLAPHRPKEPAWFLATVGVSPDHQGKGLGSAVVLPGVEAAERAGVPAFLETSAPRNLPFYERLGFTVTADVEVPEGPRTWCMTRKPGA

SEQ ID NO: 16742 - protein, 1108 aa, Artificial Sequence
  Synthetic Polypeptide
MALPVTALLLPLALLLHAARPEVQLVESGGSLVQPGGSLRLSCAASGFTFDDYAMSWVRQVPGKGLEWVSSINWSGTHTDYADSVKGRFTISRNNANNTLYLQMNSLKSEDTAVYYCAKNWRDAGTTWFEKSGSAGQGTQVTVSSGTGGGGSGGGGSGGGGSEFDIQMTQSPSSLSASVGDRVTITCKASDHINNWLAWYQQKPGQAPKLLIYGATTLETGVPSRFSGSGSGTDYTLTISSLQPEDFATYYCQQSWNTPWTFGQGTKLEIKRLEDLKNVFPPEVAVFEPSEAEISHTQKATLVCLATGFYPDHVELSWWVNGKEVHSGVSTDPQPLKEQPALNDSRYCLSSRLRVSATFWQNPRNHFRCQVQFYGLSENDEWTQDRAKPVTQIVSAEAWGRADCGSQSFGLLDPKLCYLLDGILFIYGVILTALFLRVKFSRSADAPAYQQGQNQLYNELNLGRREEYDVLDKRRGRDPEMGGKPQRRKNPQEGLYNELQKDKMAEAYSEIGMKGERRRGKGHDGLYQGLSTATKDTYDALHMQALPPRRAKRSGSGATNFSLLKQAGDVEENPGPTSMDWIWRILFLVGAATGAHSGPEVQLVESGGGLVQPGGSLRLSCAASGFASDYYIIGWFRQAPGKEREGVSCISSRYANTNYADSVKGRFTISRDNAKNTVYLQMNSLKPEDTAVYYCAADTRRYTCPDIATMHRNFDSWGQGTLVTVSSGSGGGGSGGGGSGGGGSFEQVQLQQPGAELVKPGASVKMSCKASGYAFSSYWINWMKQKPGQGLEWIGQIYPGDGDTNYNGKFKGRATLTADTSSSTAYMQLSSLTSEDSAVYFCARSITTVVGCAMDYWGQGTSVTVSSTRIQNPDPAVYQLRDSKSSDKSVCLFTDFDSQTNVSQSKDSDVYITDKTVLDMRSMDFKSNSAVAWSNKSDFACANAFNNSIIPEDTFFPSPESSCGTQSFGLLDPKLCYLLDGILFIYGVILTALFLRVKFSRSADAPAYQQGQNQLYNELNLGRREEYDVLDKRRGRDPEMGGKPQRRKNPQEGLYNELQKDKMAEAYSEIGMKGERRRGKGHDGLYQGLSTATKDTYDALHMQALPPR

SEQ ID NO: 16743 - protein, 1108 aa, Artificial Sequence
  Synthetic Polypeptide
MALPVTALLLPLALLLHAARPEVQLVESGGSLVQPGGSLRLSCAASGFTFDDYAMSWVRQVPGKGLEWVSSINWSGTHTDYADSVKGRFTISRNNANNTLYLQMNSLKSEDTAVYYCAKNWRDAGTTWFEKSGSAGQGTQVTVSSGTGGGGSGGGGSGGGGSEFDIQMTQSPSSLSASVGDRVTITCKASDHINNWLAWYQQKPGQAPKLLIYGATTLETGVPSRFSGSGSGTDYTLTISSLQPEDFATYYCQQSWNTPWTFGQGTKLEIKRLEDLKNVFPPEVAVFEPSKAEIAHTQKATLVCLATGFYPDHVELSWWVNGKEVHSGVCTDPQPLKEQPALNDSRYCLSSRLRVSATFWQNPRNHFRCQVQFYGLSENDEWTQDRAKPVTQIVSAEAWGRADCGSQSFGLLDPKLCYLLDGILFIYGVILTALFLRVKFSRSADAPAYQQGQNQLYNELNLGRREEYDVLDKRRGRDPEMGGKPQRRKNPQEGLYNELQKDKMAEAYSEIGMKGERRRGKGHDGLYQGLSTATKDTYDALHMQALPPRRAKRSGSGATNFSLLKQAGDVEENPGPTSMDWIWRILFLVGAATGAHSGPEVQLVESGGGLVQPGGSLRLSCAASGFASDYYIIGWFRQAPGKEREGVSCISSRYANTNYADSVKGRFTISRDNAKNTVYLQMNSLKPEDTAVYYCAADTRRYTCPDIATMHRNFDSWGQGTLVTVSSGSGGGGSGGGGSGGGGSFEQVQLQQPGAELVKPGASVKMSCKASGYAFSSYWINWMKQKPGQGLEWIGQIYPGDGDTNYNGKFKGRATLTADTSSSTAYMQLSSLTSEDSAVYFCARSITTVVGCAMDYWGQGTSVTVSSTRIQNPDPAVYQLRDSKSSDKSVCLFTDFDSQTNVSQSKDSDVYITDKCVLDMRSMDFKSNSAVAWSNKSDFACANAFNNSIIPEDTFFPSSDVPCGTQSFGLLDPKLCYLLDGILFIYGVILTALFLRVKFSRSADAPAYQQGQNQLYNELNLGRREEYDVLDKRRGRDPEMGGKPQRRKNPQEGLYNELQKDKMAEAYSEIGMKGERRRGKGHDGLYQGLSTATKDTYDALHMQALPPR

SEQ ID NO: 16744 - protein, 1179 aa, Artificial Sequence
  Synthetic Polypeptide
MALPVTALLLPLALLLHAARPEVQLVESGGSLVQPGGSLRLSCAASGFTFDDYAMSWVRQVPGKGLEWVSSINWSGTHTDYADSVKGRFTISRNNANNTLYLQMNSLKSEDTAVYYCAKNWRDAGTTWFEKSGSAGQGTQVTVSSGTGGGGSGGGGSGGGGSEFDIQMTQSPSSLSASVGDRVTITCKASDHINNWLAWYQQKPGQAPKLLIYGATTLETGVPSRFSGSGSGTDYTLTISSLQPEDFATYYCQQSWNTPWTFGQGTKLEIKRLEGKPIPNPLLGLDSTGSGEDLKNVFPPEVAVFEPSEAEISHTQKATLVCLATGFYPDHVELSWWVNGKEVHSGVSTDPQPLKEQPALNDSRYCLSSRLRVSATFWQNPRNHFRCQVQFYGLSENDEWTQDRAKPVTQIVSAEAWGRADCGSQSFGLLDPKLCYLLDGILFIYGVILTALFLRVKFSRSADAPAYQQGQNQLYNELNLGRREEYDVLDKRRGRDPEMGGKPQRRKNPQEGLYNELQKDKMAEAYSEIGMKGERRRGKGHDGLYQGLSTATKDTYDALHMQALPPRRAKRSGSGATNFSLLKQAGDVEENPGPTSMDWIWRILFLVGAATGAHSGPEVQLVESGGGLVQPGGSLRLSCAASGFASDYYIIGWFRQAPGKEREGVSCISSRYANTNYADSVKGRFTISRDNAKNTVYLQMNSLKPEDTAVYYCAADTRRYTCPDIATMHRNFDSWGQGTLVTVSSGSGGGGSGGGGSGGGGSFEQVQLQQPGAELVKPGASVKMSCKASGYAFSSYWINWMKQKPGQGLEWIGQIYPGDGDTNYNGKFKGRATLTADTSSSTAYMQLSSLTSEDSAVYFCARSITTVVGCAMDYWGQGTSVTVSSTREQKLISEEDGSGIQNPDPAVYQLRDSKSSDKSVCLFTDFDSQTNVSQSKDSDVYITDKTVLDMRSMDFKSNSAVAWSNKSDFACANAFNNSIIPEDTFFPSPESSCGTQSFGLLDPKLCYLLDGILFIYGVILTALFLRSKRSRLLHSDYMNMTPRRPGPTRKHYQPYAPPRDFAAYRSRVKFSRSADAPAYQQGQNQLYNELNLGRREEYDVLDKRRGRDPEMGGKPQRRKNPQEGLYNELQKDKMAEAYSEIGMKGERRRGKGHDGLYQGLSTATKDTYDALHMQALPPR

SEQ ID NO: 16745 - protein, 1220 aa, Artificial Sequence
  Synthetic Polypeptide
MALPVTALLLPLALLLHAARPEVQLVESGGSLVQPGGSLRLSCAASGFTFDDYAMSWVRQVPGKGLEWVSSINWSGTHTDYADSVKGRFTISRNNANNTLYLQMNSLKSEDTAVYYCAKNWRDAGTTWFEKSGSAGQGTQVTVSSGTGGGGSGGGGSGGGGSEFDIQMTQSPSSLSASVGDRVTITCKASDHINNWLAWYQQKPGQAPKLLIYGATTLETGVPSRFSGSGSGTDYTLTISSLQPEDFATYYCQQSWNTPWTFGQGTKLEIKRLEGKPIPNPLLGLDSTGSGEDLKNVFPPEVAVFEPSEAEISHTQKATLVCLATGFYPDHVELSWWVNGKEVHSGVSTDPQPLKEQPALNDSRYCLSSRLRVSATFWQNPRNHFRCQVQFYGLSENDEWTQDRAKPVTQIVSAEAWGRADCGSQSFGLLDPKLCYLLDGILFIYGVILTALFLRSKRSRLLHSDYMNMTPRRPGPTRKHYQPYAPPRDFAAYRSRVKFSRSADAPAYQQGQNQLYNELNLGRREEYDVLDKRRGRDPEMGGKPQRRKNPQEGLYNELQKDKMAEAYSEIGMKGERRRGKGHDGLYQGLSTATKDTYDALHMQALPPRRAKRSGSGATNFSLLKQAGDVEENPGPTSMDWIWRILFLVGAATGAHSGPEVQLVESGGGLVQPGGSLRLSCAASGFASDYYIIGWFRQAPGKEREGVSCISSRYANTNYADSVKGRFTISRDNAKNTVYLQMNSLKPEDTAVYYCAADTRRYTCPDIATMHRNFDSWGQGTLVTVSSGSGGGGSGGGGSGGGGSFEQVQLQQPGAELVKPGASVKMSCKASGYAFSSYWINWMKQKPGQGLEWIGQIYPGDGDTNYNGKFKGRATLTADTSSSTAYMQLSSLTSEDSAVYFCARSITTVVGCAMDYWGQGTSVTVSSTREQKLISEEDGSGIQNPDPAVYQLRDSKSSDKSVCLFTDFDSQTNVSQSKDSDVYITDKTVLDMRSMDFKSNSAVAWSNKSDFACANAFNNSIIPEDTFFPSPESSCGTQSFGLLDPKLCYLLDGILFIYGVILTALFLRSKRSRLLHSDYMNMTPRRPGPTRKHYQPYAPPRDFAAYRSRVKFSRSADAPAYQQGQNQLYNELNLGRREEYDVLDKRRGRDPEMGGKPQRRKNPQEGLYNELQKDKMAEAYSEIGMKGERRRGKGHDGLYQGLSTATKDTYDALHMQALPPR

SEQ ID NO: 16746 - protein, 1181 aa, Artificial Sequence
  Synthetic Polypeptide
MALPVTALLLPLALLLHAARPEVQLVESGGSLVQPGGSLRLSCAASGFTFDDYAMSWVRQVPGKGLEWVSSINWSGTHTDYADSVKGRFTISRNNANNTLYLQMNSLKSEDTAVYYCAKNWRDAGTTWFEKSGSAGQGTQVTVSSGTGGGGSGGGGSGGGGSEFDIQMTQSPSSLSASVGDRVTITCKASDHINNWLAWYQQKPGQAPKLLIYGATTLETGVPSRFSGSGSGTDYTLTISSLQPEDFATYYCQQSWNTPWTFGQGTKLEIKRLEGKPIPNPLLGLDSTGSGEDLKNVFPPEVAVFEPSEAEISHTQKATLVCLATGFYPDHVELSWWVNGKEVHSGVSTDPQPLKEQPALNDSRYCLSSRLRVSATFWQNPRNHFRCQVQFYGLSENDEWTQDRAKPVTQIVSAEAWGRADCGSQSFGLLDPKLCYLLDGILFIYGVILTALFLRVKFSRSADAPAYQQGQNQLYNELNLGRREEYDVLDKRRGRDPEMGGKPQRRKNPQEGLYNELQKDKMAEAYSEIGMKGERRRGKGHDGLYQGLSTATKDTYDALHMQALPPRRAKRSGSGATNFSLLKQAGDVEENPGPTSMDWIWRILFLVGAATGAHSGPEVQLVESGGGLVQPGGSLRLSCAASGFASDYYIIGWFRQAPGKEREGVSCISSRYANTNYADSVKGRFTISRDNAKNTVYLQMNSLKPEDTAVYYCAADTRRYTCPDIATMHRNFDSWGQGTLVTVSSGSGGGGSGGGGSGGGGSFEQVQLQQPGAELVKPGASVKMSCKASGYAFSSYWINWMKQKPGQGLEWIGQIYPGDGDTNYNGKFKGRATLTADTSSSTAYMQLSSLTSEDSAVYFCARSITTVVGCAMDYWGQGTSVTVSSTREQKLISEEDLGSGIQNPDPAVYQLRDSKSSDKSVCLFTDFDSQTNVSQSKDSDVYITDKTVLDMRSMDFKSNSAVAWSNKSDFACANAFNNSIIPEDTFFPSPESSCGTQSFGLLDPKLCYLLDGILFIYGVILTALFLKRGRKKLLYIFKQPFMRPVQTTQEEDGCSCRFPEEEEGGCELRVKFSRSADAPAYQQGQNQLYNELNLGRREEYDVLDKRRGRDPEMGGKPQRRKNPQEGLYNELQKDKMAEAYSEIGMKGERRRGKGHDGLYQGLSTATKDTYDALHMQALPPR

SEQ ID NO: 16747 - protein, 1223 aa, Artificial Sequence
  Synthetic Polypeptide
MALPVTALLLPLALLLHAARPEVQLVESGGSLVQPGGSLRLSCAASGFTFDDYAMSWVRQVPGKGLEWVSSINWSGTHTDYADSVKGRFTISRNNANNTLYLQMNSLKSEDTAVYYCAKNWRDAGTTWFEKSGSAGQGTQVTVSSGTGGGGSGGGGSGGGGSEFDIQMTQSPSSLSASVGDRVTITCKASDHINNWLAWYQQKPGQAPKLLIYGATTLETGVPSRFSGSGSGTDYTLTISSLQPEDFATYYCQQSWNTPWTFGQGTKLEIKRLEGKPIPNPLLGLDSTGSGEDLKNVFPPEVAVFEPSEAEISHTQKATLVCLATGFYPDHVELSWWVNGKEVHSGVSTDPQPLKEQPALNDSRYCLSSRLRVSATFWQNPRNHFRCQVQFYGLSENDEWTQDRAKPVTQIVSAEAWGRADCGSQSFGLLDPKLCYLLDGILFIYGVILTALFLKRGRKKLLYIFKQPFMRPVQTTQEEDGCSCRFPEEEEGGCELRVKFSRSADAPAYQQGQNQLYNELNLGRREEYDVLDKRRGRDPEMGGKPQRRKNPQEGLYNELQKDKMAEAYSEIGMKGERRRGKGHDGLYQGLSTATKDTYDALHMQALPPRRAKRSGSGATNFSLLKQAGDVEENPGPTSMDWIWRILFLVGAATGAHSGPEVQLVESGGGLVQPGGSLRLSCAASGFASDYYIIGWFRQAPGKEREGVSCISSRYANTNYADSVKGRFTISRDNAKNTVYLQMNSLKPEDTAVYYCAADTRRYTCPDIATMHRNFDSWGQGTLVTVSSGSGGGGSGGGGSGGGGSFEQVQLQQPGAELVKPGASVKMSCKASGYAFSSYWINWMKQKPGQGLEWIGQIYPGDGDTNYNGKFKGRATLTADTSSSTAYMQLSSLTSEDSAVYFCARSITTVVGCAMDYWGQGTSVTVSSTREQKLISEEDLGSGIQNPDPAVYQLRDSKSSDKSVCLFTDFDSQTNVSQSKDSDVYITDKTVLDMRSMDFKSNSAVAWSNKSDFACANAFNNSIIPEDTFFPSPESSCGTQSFGLLDPKLCYLLDGILFIYGVILTALFLKRGRKKLLYIFKQPFMRPVQTTQEEDGCSCRFPEEEEGGCELRVKFSRSADAPAYQQGQNQLYNELNLGRREEYDVLDKRRGRDPEMGGKPQRRKNPQEGLYNELQKDKMAEAYSEIGMKGERRRGKGHDGLYQGLSTATKDTYDALHMQALPPR

SEQ ID NO: 16748 - protein, 1113 aa, Artificial Sequence
  Synthetic Polypeptide
MALPVTALLLPLALLLHAARPEVQLVESGGSLVQPGGSLRLSCAASGFTFDDYAMSWVRQVPGKGLEWVSSINWSGTHTDYADSVKGRFTISRNNANNTLYLQMNSLKSEDTAVYYCAKNWRDAGTTWFEKSGSAGQGTQVTVSSGTGGGGSGGGGSGGGGSEFDIQMTQSPSSLSASVGDRVTITCKASDHINNWLAWYQQKPGQAPKLLIYGATTLETGVPSRFSGSGSGTDYTLTISSLQPEDFATYYCQQSWNTPWTFGQGTKLEIKRLEQSFGLLDPKLCYLLDGILFIYGVILTALFLRVKFSRSADAPAYQQGQNQLYNELNLGRREEYDVLDKRRGRDPEMGGKPQRRKNPQEGLYNELQKDKMAEAYSEIGMKGERRRGKGHDGLYQGLSTATKDTYDALHMQALPPRRAKRSGSGATNFSLLKQAGDVEENPGPTSMDWIWRILFLVGAATGAHSGPEVQLVESGGGLVQPGGSLRLSCAASGFASDYYIIGWFRQAPGKEREGVSCISSRYANTNYADSVKGRFTISRDNAKNTVYLQMNSLKPEDTAVYYCAADTRRYTCPDIATMHRNFDSWGQGTLVTVSSGSGGGGSGGGGSGGGGSFEQVQLQQPGAELVKPGASVKMSCKASGYAFSSYWINWMKQKPGQGLEWIGQIYPGDGDTNYNGKFKGRATLTADTSSSTAYMQLSSLTSEDSAVYFCARSITTVVGCAMDYWGQGTSVTVSSTRQSFGLLDPKLCYLLDGILFIYGVILTALFLRVKFSRSADAPAYQQGQNQLYNELNLGRREEYDVLDKRRGRDPEMGGKPQRRKNPQEGLYNELQKDKMAEAYSEIGMKGERRRGKGHDGLYQGLSTATKDTYDALHMQALPPRRAKRSGSGVKQTLNFDLLKLAGDVESNPGPSRGHMTEYKPTVRLATRDDVPRAVRTLAAAFADYPATRHTVDPDRHIERVTELQELFLTRVGLDIGKVWVADDGAAVAVWTTPESVEAGAVFAEIGPRMAELSGSRLAAQQQMEGLLAPHRPKEPAWFLATVGVSPDHQGKGLGSAVVLPGVEAAERAGVPAFLETSAPRNLPFYERLGFTVTADVEVPEGPRTWCMTRKPGA

SEQ ID NO: 16749 - protein, 938 aa, Artificial Sequence
  Synthetic Polypeptide
MALPVTALLLPLALLLHAARPEVQLVESGGSLVQPGGSLRLSCAASGFTFDDYAMSWVRQVPGKGLEWVSSINWSGTHTDYADSVKGRFTISRNNANNTLYLQMNSLKSEDTAVYYCAKNWRDAGTTWFEKSGSAGQGTQVTVSSGTGGGGSGGGGSGGGGSEFDIQMTQSPSSLSASVGDRVTITCKASDHINNWLAWYQQKPGQAPKLLIYGATTLETGVPSRFSGSGSGTDYTLTISSLQPEDFATYYCQQSWNTPWTFGQGTKLEIKRLEGQPKANPTVTLFPPSSEELQANKATLVCLISDFYPGAVTVAWKADGSPVKAGVETTKPSKQSNNKYAASSYLSLTPEQWKSHRSYSCQVTHEGSTVEKTVAPTECSPIKTDVITMDPKDNCSKDANDTLLLQLTNTSAYYMYLLLLLKSVVYFAIITCCLLRRTAFCCNGEKSRAKRSGSGATNFSLLKQAGDVEENPGPTSMDWIWRILFLVGAATGAHSGPEVQLVESGGGLVQPGGSLRLSCAASGFASDYYIIGWFRQAPGKEREGVSCISSRYANTNYADSVKGRFTISRDNAKNTVYLQMNSLKPEDTAVYYCAADTRRYTCPDIATMHRNFDSWGQGTLVTVSSGSGGGGSGGGGSGGGGSFEQVQLQQPGAELVKPGASVKMSCKASGYAFSSYWINWMKQKPGQGLEWIGQIYPGDGDTNYNGKFKGRATLTADTSSSTAYMQLSSLTSEDSAVYFCARSITTVVGCAMDYWGQGTSVTVSSTRASTKGPSVFPLAPSSKSTSGGTAALGCLVKDYFPEPVTVSWNSGALTSGVHTFPAVLQSSGLYSLSSVVTVPSSSLGTQTYICNVNHKPSNTKVDKRVEPKSCEVKTDSTDHVKPKETENTKQPSKSCHKPKAIVHTEKVNMMSLTVLGLRMLFAKTVAVNFLLTAKLFFL

SEQ ID NO: 16750 - protein, 916 aa, Artificial Sequence
  Synthetic Polypeptide
MALPVTALLLPLALLLHAARPEVQLVESGGSLVQPGGSLRLSCAASGFTFDDYAMSWVRQVPGKGLEWVSSINWSGTHTDYADSVKGRFTISRNNANNTLYLQMNSLKSEDTAVYYCAKNWRDAGTTWFEKSGSAGQGTQVTVSSGTGGGGSGGGGSGGGGSEFDIQMTQSPSSLSASVGDRVTITCKASDHINNWLAWYQQKPGQAPKLLIYGATTLETGVPSRFSGSGSGTDYTLTISSLQPEDFATYYCQQSWNTPWTFGQGTKLEIKRLEGQPKANPTVTLFPPSSEELQANKATLVCLISDFYPGAVTVAWKADGSPVKAGVETTKPSKQSNNKYAASSYLSLTPEQWKSHRSYSCQVTHEGSTVEKTVAPTECSGRADCGITSASYHQGVLSATILYEILLGKATLYAVLVSALVLMAMVKRKDSRGRAKRSGSGATNFSLLKQAGDVEENPGPTSMDWIWRILFLVGAATGAHSGPEVQLVESGGGLVQPGGSLRLSCAASGFASDYYIIGWFRQAPGKEREGVSCISSRYANTNYADSVKGRFTISRDNAKNTVYLQMNSLKPEDTAVYYCAADTRRYTCPDIATMHRNFDSWGQGTLVTVSSGSGGGGSGGGGSGGGGSFEQVQLQQPGAELVKPGASVKMSCKASGYAFSSYWINWMKQKPGQGLEWIGQIYPGDGDTNYNGKFKGRATLTADTSSSTAYMQLSSLTSEDSAVYFCARSITTVVGCAMDYWGQGTSVTVSSTRASTKGPSVFPLAPSSKSTSGGTAALGCLVKDYFPEPVTVSWNSGALTSGVHTFPAVLQSSGLYSLSSVVTVPSSSLGTQTYICNVNHKPSNTKVDKRVEPKSCIPEDTFFPSSDVPCDVKLVEKSFETDTNLNFQNLSVIGFRILLLKVAGFNLLMTLRLWSS

SEQ ID NO: 16751 - protein, 916 aa, Artificial Sequence
  Synthetic Polypeptide
MALPVTALLLPLALLLHAARPEVQLVESGGSLVQPGGSLRLSCAASGFTFDDYAMSWVRQVPGKGLEWVSSINWSGTHTDYADSVKGRFTISRNNANNTLYLQMNSLKSEDTAVYYCAKNWRDAGTTWFEKSGSAGQGTQVTVSSGTGGGGSGGGGSGGGGSEFDIQMTQSPSSLSASVGDRVTITCKASDHINNWLAWYQQKPGQAPKLLIYGATTLETGVPSRFSGSGSGTDYTLTISSLQPEDFATYYCQQSWNTPWTFGQGTKLEIKRLEGQPKANPTVTLFPPSSEELQANKATLVCLISDFYPGAVTVAWKADGSPVKAGVETTKPSKQSNNKYAASSYLSLTPEQWKSHRSYSCQVTHEGSTVEKTVAPTECSGRADCGFTSESYQQGVLSATILYEILLGKATLYAVLVSALVLMAMVKRKDSRGRAKRSGSGATNFSLLKQAGDVEENPGPTSMDWIWRILFLVGAATGAHSGPEVQLVESGGGLVQPGGSLRLSCAASGFASDYYIIGWFRQAPGKEREGVSCISSRYANTNYADSVKGRFTISRDNAKNTVYLQMNSLKPEDTAVYYCAADTRRYTCPDIATMHRNFDSWGQGTLVTVSSGSGGGGSGGGGSGGGGSFEQVQLQQPGAELVKPGASVKMSCKASGYAFSSYWINWMKQKPGQGLEWIGQIYPGDGDTNYNGKFKGRATLTADTSSSTAYMQLSSLTSEDSAVYFCARSITTVVGCAMDYWGQGTSVTVSSTRASTKGPSVFPLAPSSKSTSGGTAALGCLVKDYFPEPVTVSWNSGALTSGVHTFPAVLQSSGLYSLSSVVTVPSSSLGTQTYICNVNHKPSNTKVDKRVEPKSCIPEDTFFPSPESSCDVKLVEKSFETDTNLNFQNLSVIGFRILLLKVAGFNLLMTLRLWSS

SEQ ID NO: 16752 - protein, 769 aa, Artificial Sequence
  Synthetic Polypeptide
MALPVTALLLPLALLLHAARPEVQLLESGGGLVQPGGSLRLSCAASGFTFSSYAMSWVRQAPGKGLEWVSSISGSGDYIYYADSVKGRFTISRDISKNTLYLQMNSLRAEDTAVYYCAKEGTGANSSLADYRGQGTLVTVSSGGGSGGGSEVQLVESGGSLVQPGGSLRLSCAASGFTFDDYAMSWVRQVPGKGLEWVSSINWSGTHTDYADSVKGRFTISRNNANNTLYLQMNSLKSEDTAVYYCAKNWRDAGTTWFEKSGSAGQGTQVTVSSGTGGGGSGGGGSGGGGSEFDIQMTQSPSSLSASVGDRVTITCKASDHINNWLAWYQQKPGQAPKLLIYGATTLETGVPSRFSGSGSGTDYTLTISSLQPEDFATYYCQQSWNTPWTFGQGTKLEIKRGGGGSGGGGSGGGGSQVQLQQPGAELVKPGASVKMSCKASGYAFSSYWINWMKQKPGQGLEWIGQIYPGDGDTNYNGKFKGRATLTADTSSSTAYMQLSSLTSEDSAVYFCARSITTVVGCAMDYWGQGTSVTVSSTREQKLISEEDLKIEVMYPPPYLDNEKSNGTIIHVKGKHLCPSPLFPGPSKPFWVLVVVGGVLACYSLLVTVAFIIFWVRSKRSRLLHSDYMNMTPRRPGPTRKHYQPYAPPRDFAAYRSRVKFSRSADAPAYQQGQNQLYNELNLGRREEYDVLDKRRGRDPEMGGKPRRKNPQEGLYNELQKDKMAEAYSEIGMKGERRRGKGHDGLYQGLSTATKDTYDALHMQALPPR

SEQ ID NO: 16753 - protein, 775 aa, Artificial Sequence
  Synthetic Polypeptide
MALPVTALLLPLALLLHAARPEVQLLESGGGLVQPGGSLRLSCAASGFTFSSYAMSWVRQAPGKGLEWVSSISGSGDYIYYADSVKGRFTISRDISKNTLYLQMNSLRAEDTAVYYCAKEGTGANSSLADYRGQGTLVTVSSGGGSGGGSEVQLVESGGSLVQPGGSLRLSCAASGFTFDDYAMSWVRQVPGKGLEWVSSINWSGTHTDYADSVKGRFTISRNNANNTLYLQMNSLKSEDTAVYYCAKNWRDAGTTWFEKSGSAGQGTQVTVSSGTGGGGSGGGGSGGGGSEFDIQMTQSPSSLSASVGDRVTITCKASDHINNWLAWYQQKPGQAPKLLIYGATTLETGVPSRFSGSGSGTDYTLTISSLQPEDFATYYCQQSWNTPWTFGQGTKLEIKRGGGGSGGGGSGGGGSQVQLQQPGAELVKPGASVKMSCKASGYAFSSYWINWMKQKPGQGLEWIGQIYPGDGDTNYNGKFKGRATLTADTSSSTAYMQLSSLTSEDSAVYFCARSITTVVGCAMDYWGQGTSVTVSSTREQKLISEEDLAKPTTTPAPRPPTPAPTIASQPLSLRPEACRPAAGGAVHTRGLDFACDIYIWAPLAGTCGVLLLSLVITLYCKRGRKKLLYIFKQPFMRPVQTTQEEDGCSCRFPEEEEGGCELRVKFSRSADAPAYQQGQNQLYNELNLGRREEYDVLDKRRGRDPEMGGKPRRKNPQEGLYNELQKDKMAEAYSEIGMKGERRRGKGHDGLYQGLSTATKDTYDALHMQALPPR

SEQ ID NO: 16754 - protein, 1188 aa, Artificial Sequence
  Synthetic Polypeptide
MALPVTALLLPLALLLHAARPEVQLLESGGGLVQPGGSLRLSCAASGFTFSSYAMSWVRQAPGKGLEWVSSISGSGDYIYYADSVKGRFTISRDISKNTLYLQMNSLRAEDTAVYYCAKEGTGANSSLADYRGQGTLVTVSSGGGSGGGSEVQLVESGGSLVQPGGSLRLSCAASGFTFDDYAMSWVRQVPGKGLEWVSSINWSGTHTDYADSVKGRFTISRNNANNTLYLQMNSLKSEDTAVYYCAKNWRDAGTTWFEKSGSAGQGTQVTVSSGTGGGGSGGGGSGGGGSEFDIQMTQSPSSLSASVGDRVTITCKASDHINNWLAWYQQKPGQAPKLLIYGATTLETGVPSRFSGSGSGTDYTLTISSLQPEDFATYYCQQSWNTPWTFGQGTKLEIKRGGGGSGGGGSGGGGSQVQLQQPGAELVKPGASVKMSCKASGYAFSSYWINWMKQKPGQGLEWIGQIYPGDGDTNYNGKFKGRATLTADTSSSTAYMQLSSLTSEDSAVYFCARSITTVVGCAMDYWGQGTSVTVSSTREQKLISEEDLAKPTTTPAPRPPTPAPTIASQPLSLRPEACRPAAGGAVHTRGLDFACDIYIWAPLAGTCGVLLLSLVITLYCGRARVKFSRSADAPAYQQGQNQLYNELNLGRREEYDVLDKRRGRDPEMGGKPRRKNPQEGLYNELQKDKMAEAYSEIGMKGERRRGKGHDGLYQGLSTATKDTYDALHMQALPPRSRGSGATNFSLLKQAGDVEENPGPGIHMATYEVLCEVARKLGTDDREVVLFLLNVFIPQPTLAQLIGALRALKEEGRLTFPLLAECLFRAGRRDLLRDLLHLDPRFLERHLAGTMSYFSPYQLTVLHVDGELCARDIRSLIFLSKDTIGSRSTPQTFLHWVYCMENLDLLGPTDVDALMSMLRSLSRVDLQRQVQTLMGLHLSGPSHSQHYRHTPLETDFYDYKDDDDKTSGSGEGRGSLLTCGDVEENPGPHMTEYKPTVRLATRDDVPRAVRTLAAAFADYPATRHTVDPDRHIERVTELQELFLTRVGLDIGKVWVADDGAAVAVWTTPESVEAGAVFAEIGPRMAELSGSRLAAQQQMEGLLAPHRPKEPAWFLATVGVSPDHQGKGLGSAVVLPGVEAAERAGVPAFLETSAPRNLPFYERLGFTVTADVEVPEGPRTWCMTRKPGA

SEQ ID NO: 16755 - protein, 1128 aa, Artificial Sequence
  Synthetic Polypeptide
MALPVTALLLPLALLLHAARPEVQLLESGGGLVQPGGSLRLSCAASGFTFSSYAMSWVRQAPGKGLEWVSSISGSGDYIYYADSVKGRFTISRDISKNTLYLQMNSLRAEDTAVYYCAKEGTGANSSLADYRGQGTLVTVSSGGGSGGGSEVQLVESGGSLVQPGGSLRLSCAASGFTFDDYAMSWVRQVPGKGLEWVSSINWSGTHTDYADSVKGRFTISRNNANNTLYLQMNSLKSEDTAVYYCAKNWRDAGTTWFEKSGSAGQGTQVTVSSGTGGGGSGGGGSGGGGSEFDIQMTQSPSSLSASVGDRVTITCKASDHINNWLAWYQQKPGQAPKLLIYGATTLETGVPSRFSGSGSGTDYTLTISSLQPEDFATYYCQQSWNTPWTFGQGTKLEIKRLEIQNPDPAVYQLRDSKSSDKSVCLFTDFDSQTNVSQSKDSDVYITDKCVLDMRSMDFKSNSAVAWSNKSDFACANAFNNSIIPEDTFFPSSDVPCDVKLVEKSFETDTNLNFQNLSVIGFRILLLKVAGFNLLMTLRLWSSRAKRSGSGVKQTLNFDLLKLAGDVESNPGPTSMDWIWRILFLVGAATGAHSFEQVQLQQPGAELVKPGASVKMSCKASGYAFSSYWINWMKQKPGQGLEWIGQIYPGDGDTNYNGKFKGRATLTADTSSSTAYMQLSSLTSEDSAVYFCARSITTVVGCAMDYWGQGTSVTVSSTREDLKNVFPPEVAVFEPSKAEIAHTQKATLVCLATGFYPDHVELSWWVNGKEVHSGVCTDPQPLKEQPALNDSRYCLSSRLRVSATFWQNPRNHFRCQVQFYGLSENDEWTQDRAKPVTQIVSAEAWGRADCGITSASYHQGVLSATILYEILLGKATLYAVLVSALVLMAMVKRKDSRGRAKRSGSGATNFSLLKQAGDVEENPGPSRGHMTEYKPTVRLATRDDVPRAVRTLAAAFADYPATRHTVDPDRHIERVTELQELFLTRVGLDIGKVWVADDGAAVAVWTTPESVEAGAVFAEIGPRMAELSGSRLAAQQQMEGLLAPHRPKEPAWFLATVGVSPDHQGKGLGSAVVLPGVEAAERAGVPAFLETSAPRNLPFYERLGFTVTADVEVPEGPRTWCMTRKPGA

SEQ ID NO: 16756 - protein, 1127 aa, Artificial Sequence
  Synthetic Polypeptide
MALPVTALLLPLALLLHAARPEVQLLESGGGLVQPGGSLRLSCAASGFTFSSYAMSWVRQAPGKGLEWVSSISGSGDYIYYADSVKGRFTISRDISKNTLYLQMNSLRAEDTAVYYCAKEGTGANSSLADYRGQGTLVTVSSGGGSGGGSEVQLVESGGSLVQPGGSLRLSCAASGFTFDDYAMSWVRQVPGKGLEWVSSINWSGTHTDYADSVKGRFTISRNNANNTLYLQMNSLKSEDTAVYYCAKNWRDAGTTWFEKSGSAGQGTQVTVSSGTGGGGSGGGGSGGGGSEFDIQMTQSPSSLSASVGDRVTITCKASDHINNWLAWYQQKPGQAPKLLIYGATTLETGVPSRFSGSGSGTDYTLTISSLQPEDFATYYCQQSWNTPWTFGQGTKLEIKRLEDLKNVFPPEVAVFEPSKAEIAHTQKATLVCLATGFYPDHVELSWWVNGKEVHSGVCTDPQPLKEQPALNDSRYCLSSRLRVSATFWQNPRNHFRCQVQFYGLSENDEWTQDRAKPVTQIVSAEAWGRADCGITSASYHQGVLSATILYEILLGKATLYAVLVSALVLMAMVKRKDSRGRAKRSGSGATNFSLLKQAGDVEENPGPTSMDWIWRILFLVGAATGAHSFEQVQLQQPGAELVKPGASVKMSCKASGYAFSSYWINWMKQKPGQGLEWIGQIYPGDGDTNYNGKFKGRATLTADTSSSTAYMQLSSLTSEDSAVYFCARSITTVVGCAMDYWGQGTSVTVSSTRIQNPDPAVYQLRDSKSSDKSVCLFTDFDSQTNVSQSKDSDVYITDKCVLDMRSMDFKSNSAVAWSNKSDFACANAFNNSIIPEDTFFPSSDVPCDVKLVEKSFETDTNLNFQNLSVIGFRILLLKVAGFNLLMTLRLWSSRAKRSGSGVKQTLNFDLLKLAGDVESNPGPSRGHMTEYKPTVRLATRDDVPRAVRTLAAAFADYPATRHTVDPDRHIERVTELQELFLTRVGLDIGKVWVADDGAAVAVWTTPESVEAGAVFAEIGPRMAELSGSRLAAQQQMEGLLAPHRPKEPAWFLATVGVSPDHQGKGLGSAVVLPGVEAAERAGVPAFLETSAPRNLPFYERLGFTVTADVEVPEGPRTWCMTRKPGA

SEQ ID NO: 16757 - protein, 894 aa, Artificial Sequence
  Synthetic Polypeptide
MALPVTALLLPLALLLHAARPEVQLLESGGGLVQPGGSLRLSCAASGFTFSSYAMSWVRQAPGKGLEWVSSISGSGDYIYYADSVKGRFTISRDISKNTLYLQMNSLRAEDTAVYYCAKEGTGANSSLADYRGQGTLVTVSSGGGSGGGSEVQLVESGGSLVQPGGSLRLSCAASGFTFDDYAMSWVRQVPGKGLEWVSSINWSGTHTDYADSVKGRFTISRNNANNTLYLQMNSLKSEDTAVYYCAKNWRDAGTTWFEKSGSAGQGTQVTVSSGTGGGGSGGGGSGGGGSEFDIQMTQSPSSLSASVGDRVTITCKASDHINNWLAWYQQKPGQAPKLLIYGATTLETGVPSRFSGSGSGTDYTLTISSLQPEDFATYYCQQSWNTPWTFGQGTKLEIKRLEDLKNVFPPEVAVFEPSEAEISHTQKATLVCLATGFYPDHVELSWWVNGKEVHSGVCTDPQPLKEQPALNDSRYCLSSRLRVSATFWQNPRNHFRCQVQFYGLSENDEWTQDRAKPVTQIVSAEAWGRADCGFTSESYQQGVLSATILYEILLGKATLYAVLVSALVLMAMVKRKDSRGRAKRSGSGATNFSLLKQAGDVEENPGPTSMDWIWRILFLVGAATGAHSFEQVQLQQPGAELVKPGASVKMSCKASGYAFSSYWINWMKQKPGQGLEWIGQIYPGDGDTNYNGKFKGRATLTADTSSSTAYMQLSSLTSEDSAVYFCARSITTVVGCAMDYWGQGTSVTVSSTRIQNPDPAVYQLRDSKSSDKSVCLFTDFDSQTNVSQSKDSDVYITDKCVLDMRSMDFKSNSAVAWSNKSDFACANAFNNSIIPEDTFFPSPESSCDVKLVEKSFETDTNLNFQNLSVIGFRILLLKVAGFNLLMTLRLWSS

SEQ ID NO: 16758 - protein, 1119 aa, Artificial Sequence
  Synthetic Polypeptide
MALPVTALLLPLALLLHAARPEVQLLESGGGLVQPGGSLRLSCAASGFTFSSYAMSWVRQAPGKGLEWVSSISGSGDYIYYADSVKGRFTISRDISKNTLYLQMNSLRAEDTAVYYCAKEGTGANSSLADYRGQGTLVTVSSGGGSGGGSEVQLVESGGSLVQPGGSLRLSCAASGFTFDDYAMSWVRQVPGKGLEWVSSINWSGTHTDYADSVKGRFTISRNNANNTLYLQMNSLKSEDTAVYYCAKNWRDAGTTWFEKSGSAGQGTQVTVSSGTGGGGSGGGGSGGGGSEFDIQMTQSPSSLSASVGDRVTITCKASDHINNWLAWYQQKPGQAPKLLIYGATTLETGVPSRFSGSGSGTDYTLTISSLQPEDFATYYCQQSWNTPWTFGQGTKLEIKRLEDLKNVFPPEVAVFEPSEAEISHTQKATLVCLATGFYPDHVELSWWVNGKEVHSGVCTDPQPLKEQPALNDSRYCLSSRLRVSATFWQNPRNHFRCQVQFYGLSENDEWTQDRAKPVTQIVSAEAWGRADCGFTSESYQQGVLSATILYEILLGKATLYAVLVSALVLMAMVKRKDSRGRAKRSGSGATNFSLLKQAGDVEENPGPTSMDWIWRILFLVGAATGAHSFEQVQLQQPGAELVKPGASVKMSCKASGYAFSSYWINWMKQKPGQGLEWIGQIYPGDGDTNYNGKFKGRATLTADTSSSTAYMQLSSLTSEDSAVYFCARSITTVVGCAMDYWGQGTSVTVSSTRIQNPDPAVYQLRDSKSSDKSVCLFTDFDSQTNVSQSKDSDVYITDKCVLDMRSMDFKSNSAVAWSNKSDFACANAFNNSIIPEDTFFPSPESSCDVKLVEKSFETDTNLNFQNLSVIGFRILLLKVAGFNLLMTLRLWSSRAKRSGSGVKQTLNFDLLKLAGDVESNPGPSRGGIHTMATYEVLCEVARKLGTDDREVVLFLLNVFIPQPTLAQLIGALRALKEEGRLTFPLLAECLFRAGRRDLLRDLLHLDPRFLERHLAGTMSYFSPYQLTVLHVDGELCARDIRSLIFLSKDTIGSRSTPQTFLHWVYCMENLDLLGPTDVDALMSMLRSLSRVDLQRQVQTLMGLHLSGPSHSQHYRHTP

SEQ ID NO: 16759 - protein, 898 aa, Artificial Sequence
  Synthetic Polypeptide
MALPVTALLLPLALLLHAARPEVQLLESGGGLVQPGGSLRLSCAASGFTFSSYAMSWVRQAPGKGLEWVSSISGSGDYIYYADSVKGRFTISRDISKNTLYLQMNSLRAEDTAVYYCAKEGTGANSSLADYRGQGTLVTVSSGGGSGGGSEVQLVESGGSLVQPGGSLRLSCAASGFTFDDYAMSWVRQVPGKGLEWVSSINWSGTHTDYADSVKGRFTISRNNANNTLYLQMNSLKSEDTAVYYCAKNWRDAGTTWFEKSGSAGQGTQVTVSSGTGGGGSGGGGSGGGGSEFDIQMTQSPSSLSASVGDRVTITCKASDHINNWLAWYQQKPGQAPKLLIYGATTLETGVPSRFSGSGSGTDYTLTISSLQPEDFATYYCQQSWNTPWTFGQGTKLEIKRLEIQNPDPAVYQLRDSKSSDKSVCLFTDFDSQTNVSQSKDSDVYITDKCVLDMRSMDFKSNSAVAWSNKSDFACANAFNNSIIPEDTFFPSPESSCDVKLVEKSFETDTNLNFQNLSVIGFRILLLKVAGFNLLMTLRLWSSRAKRSGSGVKQTLNFDLLKLAGDVESNPGPTSMDWIWRILFLVGAATGAHSFEQVQLQQPGAELVKPGASVKMSCKASGYAFSSYWINWMKQKPGQGLEWIGQIYPGDGDTNYNGKFKGRATLTADTSSSTAYMQLSSLTSEDSAVYFCARSITTVVGCAMDYWGQGTSVTVSSTREDLKNVFPPEVAVFEPSEAEISHTQKATLVCLATGFYPDHVELSWWVNGKEVHSGVCTDPQPLKEQPALNDSRYCLSSRLRVSATFWQNPRNHFRCQVQFYGLSENDEWTQDRAKPVTQIVSAEAWGRADCGFTSESYQQGVLSATILYEILLGKATLYAVLVSALVLMAMVKRKDSRG

SEQ ID NO: 16760 - protein, 1120 aa, Artificial Sequence
  Synthetic Polypeptide
MALPVTALLLPLALLLHAARPEVQLLESGGGLVQPGGSLRLSCAASGFTFSSYAMSWVRQAPGKGLEWVSSISGSGDYIYYADSVKGRFTISRDISKNTLYLQMNSLRAEDTAVYYCAKEGTGANSSLADYRGQGTLVTVSSGGGSGGGSEVQLVESGGSLVQPGGSLRLSCAASGFTFDDYAMSWVRQVPGKGLEWVSSINWSGTHTDYADSVKGRFTISRNNANNTLYLQMNSLKSEDTAVYYCAKNWRDAGTTWFEKSGSAGQGTQVTVSSGTGGGGSGGGGSGGGGSEFDIQMTQSPSSLSASVGDRVTITCKASDHINNWLAWYQQKPGQAPKLLIYGATTLETGVPSRFSGSGSGTDYTLTISSLQPEDFATYYCQQSWNTPWTFGQGTKLEIKRLEIQNPDPAVYQLRDSKSSDKSVCLFTDFDSQTNVSQSKDSDVYITDKCVLDMRSMDFKSNSAVAWSNKSDFACANAFNNSIIPEDTFFPSPESSCDVKLVEKSFETDTNLNFQNLSVIGFRILLLKVAGFNLLMTLRLWSSRAKRSGSGVKQTLNFDLLKLAGDVESNPGPTSMDWIWRILFLVGAATGAHSFEQVQLQQPGAELVKPGASVKMSCKASGYAFSSYWINWMKQKPGQGLEWIGQIYPGDGDTNYNGKFKGRATLTADTSSSTAYMQLSSLTSEDSAVYFCARSITTVVGCAMDYWGQGTSVTVSSTREDLKNVFPPEVAVFEPSEAEISHTQKATLVCLATGFYPDHVELSWWVNGKEVHSGVCTDPQPLKEQPALNDSRYCLSSRLRVSATFWQNPRNHFRCQVQFYGLSENDEWTQDRAKPVTQIVSAEAWGRADCGFTSESYQQGVLSATILYEILLGKATLYAVLVSALVLMAMVKRKDSRGRAKRSGSGATNFSLLKQAGDVEENPGPSRGGIHTMATYEVLCEVARKLGTDDREVVLFLLNVFIPQPTLAQLIGALRALKEEGRLTFPLLAECLFRAGRRDLLRDLLHLDPRFLERHLAGTMSYFSPYQLTVLHVDGELCARDIRSLIFLSKDTIGSRSTPQTFLHWVYCMENLDLLGPTDVDALMSMLRSLSRVDLQRQVQTLMGLHLSGPSHSQHYRHTP

SEQ ID NO: 16761 - protein, 1172 aa, Artificial Sequence
  Synthetic Polypeptide
MALPVTALLLPLALLLHAARPLEGKPIPNPLLGLDSTGSGEDLKNVFPPEVAVFEPSKAEIAHTQKATLVCLATGFYPDHVELSWWVNGKEVHSGVCTDPQPLKEQPALNDSRYCLSSRLRVSATFWQNPRNHFRCQVQFYGLSENDEWTQDRAKPVTQIVSAEAWGRADCGITSASYHQGVLSATILYEILLGKATLYAVLVSALVLMAMVKRKDSRGRAKRSGSGATNFSLLKQAGDVEENPGPTSMALPVTALLLPLALLLHAARPEVQLLESGGGLVQPGGSLRLSCAASGFTFSSYAMSWVRQAPGKGLEWVSSISGSGDYIYYADSVKGRFTISRDISKNTLYLQMNSLRAEDTAVYYCAKEGTGANSSLADYRGQGTLVTVSSGGGSGGGSEVQLVESGGSLVQPGGSLRLSCAASGFTFDDYAMSWVRQVPGKGLEWVSSINWSGTHTDYADSVKGRFTISRNNANNTLYLQMNSLKSEDTAVYYCAKNWRDAGTTWFEKSGSAGQGTQVTVSSGTGGGGSGGGGSGGGGSEFDIQMTQSPSSLSASVGDRVTITCKASDHINNWLAWYQQKPGQAPKLLIYGATTLETGVPSRFSGSGSGTDYTLTISSLQPEDFATYYCQQSWNTPWTFGQGTKLEIKRGGGGSGGGGSGGGGSQVQLQQPGAELVKPGASVKMSCKASGYAFSSYWINWMKQKPGQGLEWIGQIYPGDGDTNYNGKFKGRATLTADTSSSTAYMQLSSLTSEDSAVYFCARSITTVVGCAMDYWGQGTSVTVSSTREQKLISEEDGSGIQNPDPAVYQLRDSKSSDKSVCLFTDFDSQTNVSQSKDSDVYITDKCVLDMRSMDFKSNSAVAWSNKSDFACANAFNNSIIPEDTFFPSSDVPCDVKLVEKSFETDTNLNFQNLSVIGFRILLLKVAGFNLLMTLRLWSSRAKRSGSGVKQTLNFDLLKLAGDVESNPGPSRGHMTEYKPTVRLATRDDVPRAVRTLAAAFADYPATRHTVDPDRHIERVTELQELFLTRVGLDIGKVWVADDGAAVAVWTTPESVEAGAVFAEIGPRMAELSGSRLAAQQQMEGLLAPHRPKEPAWFLATVGVSPDHQGKGLGSAVVLPGVEAAERAGVPAFLETSAPRNLPFYERLGFTVTADVEVPEGPRTWCMTRKPGA

SEQ ID NO: 16762 - protein, 1173 aa, Artificial Sequence
  Synthetic Polypeptide
MALPVTALLLPLALLLHAARPLEQKLISEEDLGSGDRPDPAVYQLRDSKSSDKSVCLFTDFDSQTNVSQSKDSDVYITDKCVLDMRSMDFKSNSAVAWSNKSDFACANAFNNSIIPEDTFFPSPESSCDVKLVEKSFETDTNLNFQNLSVIGFRILLLKVAGFNLLMTLRLWSSSSRAKRSGSGVKQTLNFDLLKLAGDVESNPGPTSMALPVTALLLPLALLLHAARPEVQLLESGGGLVQPGGSLRLSCAASGFTFSSYAMSWVRQAPGKGLEWVSSISGSGDYIYYADSVKGRFTISRDISKNTLYLQMNSLRAEDTAVYYCAKEGTGANSSLADYRGQGTLVTVSSGGGSGGGSEVQLVESGGSLVQPGGSLRLSCAASGFTFDDYAMSWVRQVPGKGLEWVSSINWSGTHTDYADSVKGRFTISRNNANNTLYLQMNSLKSEDTAVYYCAKNWRDAGTTWFEKSGSAGQGTQVTVSSGTGGGGSGGGGSGGGGSEFDIQMTQSPSSLSASVGDRVTITCKASDHINNWLAWYQQKPGQAPKLLIYGATTLETGVPSRFSGSGSGTDYTLTISSLQPEDFATYYCQQSWNTPWTFGQGTKLEIKRGGGGSGGGGSGGGGSQVQLQQPGAELVKPGASVKMSCKASGYAFSSYWINWMKQKPGQGLEWIGQIYPGDGDTNYNGKFKGRATLTADTSSSTAYMQLSSLTSEDSAVYFCARSITTVVGCAMDYWGQGTSVTVSSTRGKPIPNPLLGLDSTGSGEDLKNVFPPEVAVFEPSEAEISHTQKATLVCLATGFYPDHVELSWWVNGKEVHSGVCTDPQPLKEQPALNDSRYCLSSRLRVSATFWQNPRNHFRCQVQFYGLSENDEWTQDRAKPVTQIVSAEAWGRADCGFTSESYQQGVLSATILYEILLGKATLYAVLVSALVLMAMVKRKDSRGRAKRSGSGATNFSLLKQAGDVEENPGPSRGHMTEYKPTVRLATRDDVPRAVRTLAAAFADYPATRHTVDPDRHIERVTELQELFLTRVGLDIGKVWVADDGAAVAVWTTPESVEAGAVFAEIGPRMAELSGSRLAAQQQMEGLLAPHRPKEPAWFLATVGVSPDHQGKGLGSAVVLPGVEAAERAGVPAFLETSAPRNLPFYERLGFTVTADVEVPEGPRTWCMTRKPGA

SEQ ID NO: 16763 - protein, 1127 aa, Artificial Sequence
  Synthetic Polypeptide
MALPVTALLLPLALLLHAARPEVQLLESGGGLVQPGGSLRLSCAASGFTFSSYAMSWVRQAPGKGLEWVSSISGSGDYIYYADSVKGRFTISRDISKNTLYLQMNSLRAEDTAVYYCAKEGTGANSSLADYRGQGTLVTVSSGGGSGGGSEVQLVESGGSLVQPGGSLRLSCAASGFTFDDYAMSWVRQVPGKGLEWVSSINWSGTHTDYADSVKGRFTISRNNANNTLYLQMNSLKSEDTAVYYCAKNWRDAGTTWFEKSGSAGQGTQVTVSSGTGGGGSGGGGSGGGGSEFDIQMTQSPSSLSASVGDRVTITCKASDHINNWLAWYQQKPGQAPKLLIYGATTLETGVPSRFSGSGSGTDYTLTISSLQPEDFATYYCQQSWNTPWTFGQGTKLEIKRLEDLKNVFPPEVAVFEPSEAEISHTQKATLVCLATGFYPDHVELSWWVNGKEVHSGVSTDPQPLKEQPALNDSRYCLSSRLRVSATFWQNPRNHFRCQVQFYGLSENDEWTQDRAKPVTQIVSAEAWGRADCGFTSESYQQGVLSATILYEILLGKATLYAVLVSALVLMAMVKRKDSRGRAKRSGSGATNFSLLKQAGDVEENPGPTSMDWIWRILFLVGAATGAHSFEQVQLQQPGAELVKPGASVKMSCKASGYAFSSYWINWMKQKPGQGLEWIGQIYPGDGDTNYNGKFKGRATLTADTSSSTAYMQLSSLTSEDSAVYFCARSITTVVGCAMDYWGQGTSVTVSSTRIQNPDPAVYQLRDSKSSDKSVCLFTDFDSQTNVSQSKDSDVYITDKTVLDMRSMDFKSNSAVAWSNKSDFACANAFNNSIIPEDTFFPSPESSCDVKLVEKSFETDTNLNFQNLSVIGFRILLLKVAGFNLLMTLRLWSSRAKRSGSGVKQTLNFDLLKLAGDVESNPGPSRGHMTEYKPTVRLATRDDVPRAVRTLAAAFADYPATRHTVDPDRHIERVTELQELFLTRVGLDIGKVWVADDGAAVAVWTTPESVEAGAVFAEIGPRMAELSGSRLAAQQQMEGLLAPHRPKEPAWFLATVGVSPDHQGKGLGSAVVLPGVEAAERAGVPAFLETSAPRNLPFYERLGFTVTADVEVPEGPRTWCMTRKPGA

SEQ ID NO: 16764 - protein, 1209 aa, Artificial Sequence
  Synthetic Polypeptide
MALPVTALLLPLALLLHAARPEVQLLESGGGLVQPGGSLRLSCAASGFTFSSYAMSWVRQAPGKGLEWVSSISGSGDYIYYADSVKGRFTISRDISKNTLYLQMNSLRAEDTAVYYCAKEGTGANSSLADYRGQGTLVTVSSGGGSGGGSEVQLVESGGSLVQPGGSLRLSCAASGFTFDDYAMSWVRQVPGKGLEWVSSINWSGTHTDYADSVKGRFTISRNNANNTLYLQMNSLKSEDTAVYYCAKNWRDAGTTWFEKSGSAGQGTQVTVSSGTGGGGSGGGGSGGGGSEFDIQMTQSPSSLSASVGDRVTITCKASDHINNWLAWYQQKPGQAPKLLIYGATTLETGVPSRFSGSGSGTDYTLTISSLQPEDFATYYCQQSWNTPWTFGQGTKLEIKRLEDLKNVFPPEVAVFEPSEAEISHTQKATLVCLATGFYPDHVELSWWVNGKEVHSGVSTDPQPLKEQPALNDSRYCLSSRLRVSATFWQNPRNHFRCQVQFYGLSENDEWTQDRAKPVTQIVSAEAWGRADCGFTSESYQQGVLSATILYEILLGKATLYAVLVSALVLMAMVKRKDSRGRAKRSGSGATNFSLLKQAGDVEENPGPTSMDWIWRILFLVGAATGAHSFEQVQLQQPGAELVKPGASVKMSCKASGYAFSSYWINWMKQKPGQGLEWIGQIYPGDGDTNYNGKFKGRATLTADTSSSTAYMQLSSLTSEDSAVYFCARSITTVVGCAMDYWGQGTSVTVSSTREQKLISEEDGSGTPFPSLAPPIMLLVDGKQQMVVVCLVLDVAPPGLDSPIWFSAGNGSALDAFTYGPSPATDGTWTNLAHLSLPSEELASWEPLVCHTGPGAEGHSRSTQPMHLSGEASTARTCPQEPLRGTPGGALWLGVLRLLLFKLLLFDLLLTCSCLCDPAGPLPSPATTTRLRALGSHRLHPATETGGREATSSPRPQPRDRRWGDTPPGRKPGSPVRAKRSGSGVKQTLNFDLLKLAGDVESNPGPSRGHMTEYKPTVRLATRDDVPRAVRTLAAAFADYPATRHTVDPDRHIERVTELQELFLTRVGLDIGKVWVADDGAAVAVWTTPESVEAGAVFAEIGPRMAELSGSRLAAQQQMEGLLAPHRPKEPAWFLATVGVSPDHQGKGLGSAVVLPGVEAAERAGVPAFLETSAPRNLPFYERLGFTVTADVEVPEGPRTWCMTRKPGA

SEQ ID NO: 16765 - protein, 1227 aa, Artificial Sequence
  Synthetic Polypeptide
MALPVTALLLPLALLLHAARPLEDLKNVFPPEVAVFEPSEAEISHTQKATLVCLATGFYPDHVELSWWVNGKEVHSGVSTDPQPLKEQPALNDSRYCLSSRLRVSATFWQNPRNHFRCQVQFYGLSENDEWTQDRAKPVTQIVSAEAWGRADCGFTSESYQQGVLSATILYEILLGKATLYAVLVSALVLMAMVKRKDSRGRAKRSGSGATNFSLLKQAGDVEENPGPTSMALPVTALLLPLALLLHAARPEVQLLESGGGLVQPGGSLRLSCAASGFTFSSYAMSWVRQAPGKGLEWVSSISGSGDYIYYADSVKGRFTISRDISKNTLYLQMNSLRAEDTAVYYCAKEGTGANSSLADYRGQGTLVTVSSGGGSGGGSEVQLVESGGSLVQPGGSLRLSCAASGFTFDDYAMSWVRQVPGKGLEWVSSINWSGTHTDYADSVKGRFTISRNNANNTLYLQMNSLKSEDTAVYYCAKNWRDAGTTWFEKSGSAGQGTQVTVSSGTGGGGSGGGGSGGGGSEFDIQMTQSPSSLSASVGDRVTITCKASDHINNWLAWYQQKPGQAPKLLIYGATTLETGVPSRFSGSGSGTDYTLTISSLQPEDFATYYCQQSWNTPWTFGQGTKLEIKRGGGGSGGGGSGGGGSQVQLQQPGAELVKPGASVKMSCKASGYAFSSYWINWMKQKPGQGLEWIGQIYPGDGDTNYNGKFKGRATLTADTSSSTAYMQLSSLTSEDSAVYFCARSITTVVGCAMDYWGQGTSVTVSSTREQKLISEEDLGSGTPFPSLAPPIMLLVDGKQQMVVVCLVLDVAPPGLDSPIWFSAGNGSALDAFTYGPSPATDGTWTNLAHLSLPSEELASWEPLVCHTGPGAEGHSRSTQPMHLSGEASTARTCPQEPLRGTPGGALWLGVLRLLLFKLLLFDLLLTCSCLCDPAGPLPSPATTTRLRALGSHRLHPATETGGREATSSPRPQPRDRRWGDTPPGRKPGSPVRAKRSGSGVKQTLNFDLLKLAGDVESNPGPSRSRGHMTEYKPTVRLATRDDVPRAVRTLAAAFADYPATRHTVDPDRHIERVTELQELFLTRVGLDIGKVWVADDGAAVAVWTTPESVEAGAVFAEIGPRMAELSGSRLAAQQQMEGLLAPHRPKEPAWFLATVGVSPDHQGKGLGSAVVLPGVEAAERAGVPAFLETSAPRNLPFYERLGFTVTADVEVPEGPRTWCMTRKPGA

SEQ ID NO: 16766 - protein, 1164 aa, Artificial Sequence
  Synthetic Polypeptide
MALPVTALLLPLALLLHAARPEVQLLESGGGLVQPGGSLRLSCAASGFTFSSYAMSWVRQAPGKGLEWVSSISGSGDYIYYADSVKGRFTISRDISKNTLYLQMNSLRAEDTAVYYCAKEGTGANSSLADYRGQGTLVTVSSGGGSGGGSEVQLVESGGSLVQPGGSLRLSCAASGFTFDDYAMSWVRQVPGKGLEWVSSINWSGTHTDYADSVKGRFTISRNNANNTLYLQMNSLKSEDTAVYYCAKNWRDAGTTWFEKSGSAGQGTQVTVSSGTGGGGSGGGGSGGGGSEFDIQMTQSPSSLSASVGDRVTITCKASDHINNWLAWYQQKPGQAPKLLIYGATTLETGVPSRFSGSGSGTDYTLTISSLQPEDFATYYCQQSWNTPWTFGQGTKLEIKRLEGKPIPNPLLGLDSTGSGDKQLDADVSPKPTIFLPSIAETKLQKAGTYLCLLEKFFPDVIKIHWQEKKSNTILGSQEGNTMKTNDTYMKFSWLTVPEKSLDKEHRCIVRHENNKNGVDQEIIFPPIKTDVITMDPKDNCSKDANDTLLLQLTNTSAYYMYLLLLLKSVVYFAIITCCLLRRTAFCCNGEKSRAKRSGSGATNFSLLKQAGDVEENPGPTSMDWIWRILFLVGAATGAHSFEQVQLQQPGAELVKPGASVKMSCKASGYAFSSYWINWMKQKPGQGLEWIGQIYPGDGDTNYNGKFKGRATLTADTSSSTAYMQLSSLTSEDSAVYFCARSITTVVGCAMDYWGQGTSVTVSSTREQKLISEEDGSGSQPHTKPSVFVMKNGTNVACLVKEFYPKDIRINLVSSKKITEFDPAIVISPSGKYNAVKLGKYEDSNSVTCSVQHDNKTVHSTDFEVKTDSTDHVKPKETENTKQPSKSCHKPKAIVHTEKVNMMSLTVLGLRMLFAKTVAVNFLLTAKLFFLRAKRSGSGVKQTLNFDLLKLAGDVESNPGPSRGHMTEYKPTVRLATRDDVPRAVRTLAAAFADYPATRHTVDPDRHIERVTELQELFLTRVGLDIGKVWVADDGAAVAVWTTPESVEAGAVFAEIGPRMAELSGSRLAAQQQMEGLLAPHRPKEPAWFLATVGVSPDHQGKGLGSAVVLPGVEAAERAGVPAFLETSAPRNLPFYERLGFTVTADVEVPEGPRTWCMTRKPGA

SEQ ID NO: 16767 - protein, 902 aa, Artificial Sequence
  Synthetic Polypeptide
MALPVTALLLPLALLLHAARPEVQLLESGGGLVQPGGSLRLSCAASGFTFSSYAMSWVRQAPGKGLEWVSSISGSGDYIYYADSVKGRFTISRDISKNTLYLQMNSLRAEDTAVYYCAKEGTGANSSLADYRGQGTLVTVSSGGGSGGGSEVQLVESGGSLVQPGGSLRLSCAASGFTFDDYAMSWVRQVPGKGLEWVSSINWSGTHTDYADSVKGRFTISRNNANNTLYLQMNSLKSEDTAVYYCAKNWRDAGTTWFEKSGSAGQGTQVTVSSGTGGGGSGGGGSGGGGSEFDIQMTQSPSSLSASVGDRVTITCKASDHINNWLAWYQQKPGQAPKLLIYGATTLETGVPSRFSGSGSGTDYTLTISSLQPEDFATYYCQQSWNTPWTFGQGTKLEIKRLESQPHTKPSVFVMKNGTNVACLVKEFYPKDIRINLVSSKKITEFDPAIVISPSGKYNAVKLGKYEDSNSVTCSVQHDNKTVHSTDFEVKTDSTDHVKPKETENTKQPSKSCHKPKAIVHTEKVNMMSLTVLGLRMLFAKTVAVNFLLTAKLFFLRAKRSGSGATNFSLLKQAGDVEENPGPTSMDWIWRILFLVGAATGAHSFEQVQLQQPGAELVKPGASVKMSCKASGYAFSSYWINWMKQKPGQGLEWIGQIYPGDGDTNYNGKFKGRATLTADTSSSTAYMQLSSLTSEDSAVYFCARSITTVVGCAMDYWGQGTSVTVSSTRDKQLDADVSPKPTIFLPSIAETKLQKAGTYLCLLEKFFPDVIKIHWQEKKSNTILGSQEGNTMKTNDTYMKFSWLTVPEKSLDKEHRCIVRHENNKNGVDQEIIFPPIKTDVITMDPKDNCSKDANDTLLLQLTNTSAYYMYLLLLLKSVVYFAIITCCLLRRTAFCCNGEKS

SEQ ID NO: 16768 - protein, 1179 aa, Artificial Sequence
  Synthetic Polypeptide
MALPVTALLLPLALLLHAARPLEGKPIPNPLLGLDSTGSGDKQLDADVSPKPTIFLPSIAETKLQKAGTYLCLLEKFFPDVIKIHWQEKKSNTILGSQEGNTMKTNDTYMKFSWLTVPEKSLDKEHRCIVRHENNKNGVDQEIIFPPIKTDVITMDPKDNCSKDANDTLLLQLTNTSAYYMYLLLLLKSVVYFAIITCCLLRRTAFCCNGEKSRAKRSGSGATNFSLLKQAGDVEENPGPTSMALPVTALLLPLALLLHAARPEVQLLESGGGLVQPGGSLRLSCAASGFTFSSYAMSWVRQAPGKGLEWVSSISGSGDYIYYADSVKGRFTISRDISKNTLYLQMNSLRAEDTAVYYCAKEGTGANSSLADYRGQGTLVTVSSGGGSGGGSEVQLVESGGSLVQPGGSLRLSCAASGFTFDDYAMSWVRQVPGKGLEWVSSINWSGTHTDYADSVKGRFTISRNNANNTLYLQMNSLKSEDTAVYYCAKNWRDAGTTWFEKSGSAGQGTQVTVSSGTGGGGSGGGGSGGGGSEFDIQMTQSPSSLSASVGDRVTITCKASDHINNWLAWYQQKPGQAPKLLIYGATTLETGVPSRFSGSGSGTDYTLTISSLQPEDFATYYCQQSWNTPWTFGQGTKLEIKRGGGGSGGGGSGGGGSQVQLQQPGAELVKPGASVKMSCKASGYAFSSYWINWMKQKPGQGLEWIGQIYPGDGDTNYNGKFKGRATLTADTSSSTAYMQLSSLTSEDSAVYFCARSITTVVGCAMDYWGQGTSVTVSSTREQKLISEEDGSGSQPHTKPSVFVMKNGTNVACLVKEFYPKDIRINLVSSKKITEFDPAIVISPSGKYNAVKLGKYEDSNSVTCSVQHDNKTVHSTDFEVKTDSTDHVKPKETENTKQPSKSCHKPKAIVHTEKVNMMSLTVLGLRMLFAKTVAVNFLLTAKLFFLRAKRSGSGVKQTLNFDLLKLAGDVESNPGPSRGHMTEYKPTVRLATRDDVPRAVRTLAAAFADYPATRHTVDPDRHIERVTELQELFLTRVGLDIGKVWVADDGAAVAVWTTPESVEAGAVFAEIGPRMAELSGSRLAAQQQMEGLLAPHRPKEPAWFLATVGVSPDHQGKGLGSAVVLPGVEAAERAGVPAFLETSAPRNLPFYERLGFTVTADVEVPEGPRTWCMTRKPGA

SEQ ID NO: 16769 - protein, 1304 aa, Artificial Sequence
  Synthetic Polypeptide
MALPVTALLLPLALLLHAARPEVQLLESGGGLVQPGGSLRLSCAASGFTFSSYAMSWVRQAPGKGLEWVSSISGSGDYIYYADSVKGRFTISRDISKNTLYLQMNSLRAEDTAVYYCAKEGTGANSSLADYRGQGTLVTVSSGGGSGGGSEVQLVESGGSLVQPGGSLRLSCAASGFTFDDYAMSWVRQVPGKGLEWVSSINWSGTHTDYADSVKGRFTISRNNANNTLYLQMNSLKSEDTAVYYCAKNWRDAGTTWFEKSGSAGQGTQVTVSSGTGGGGSGGGGSGGGGSEFDIQMTQSPSSLSASVGDRVTITCKASDHINNWLAWYQQKPGQAPKLLIYGATTLETGVPSRFSGSGSGTDYTLTISSLQPEDFATYYCQQSWNTPWTFGQGTKLEIKRGQPKANPTVTLFPPSSEELQANKATLVCLISDFYPGAVTVAWKADGSPVKAGVETTKPSKQSNNKYAASSYLSLTPEQWKSHRSYSCQVTHEGSTVEKTVAPTECSGSQSFGLLDPKLCYLLDGILFIYGVILTALFLRVKFSRSADAPAYQQGQNQLYNELNLGRREEYDVLDKRRGRDPEMGGKPQRRKNPQEGLYNELQKDKMAEAYSEIGMKGERRRGKGHDGLYQGLSTATKDTYDALHMQALPPRRAKRSGSGATNFSLLKQAGDVEENPGPTSMDWIWRILFLVGAATGAHSFEQVQLQQPGAELVKPGASVKMSCKASGYAFSSYWINWMKQKPGQGLEWIGQIYPGDGDTNYNGKFKGRATLTADTSSSTAYMQLSSLTSEDSAVYFCARSITTVVGCAMDYWGQGTSVTVSSASTKGPSVFPLAPSSKSTSGGTAALGCLVKDYFPEPVTVSWNSGALTSGVHTFPAVLQSSGLYSLSSVVTVPSSSLGTQTYICNVNHKPSNTKVDKRVEPKSCGTQSFGLLDPKLCYLLDGILFIYGVILTALFLRVKFSRSADAPAYQQGQNQLYNELNLGRREEYDVLDKRRGRDPEMGGKPQRRKNPQEGLYNELQKDKMAEAYSEIGMKGERRRGKGHDGLYQGLSTATKDTYDALHMQALPPRRAKRSGSGVKQTLNFDLLKLAGDVESNPGPSRGHMTEYKPTVRLATRDDVPRAVRTLAAAFADYPATRHTVDPDRHIERVTELQELFLTRVGLDIGKVWVADDGAAVAVWTTPESVEAGAVFAEIGPRMAELSGSRLAAQQQMEGLLAPHRPKEPAWFLATVGVSPDHQGKGLGSAVVLPGVEAAERAGVPAFLETSAPRNLPFYERLGFTVTADVEVPEGPRTWCMTRKPGA

SEQ ID NO: 16770 - protein, 1090 aa, Artificial Sequence
  Synthetic Polypeptide
MALPVTALLLPLALLLHAARPEVQLLESGGGLVQPGGSLRLSCAASGFTFSSYAMSWVRQAPGKGLEWVSSISGSGDYIYYADSVKGRFTISRDISKNTLYLQMNSLRAEDTAVYYCAKEGTGANSSLADYRGQGTLVTVSSGGGSGGGSEVQLVESGGSLVQPGGSLRLSCAASGFTFDDYAMSWVRQVPGKGLEWVSSINWSGTHTDYADSVKGRFTISRNNANNTLYLQMNSLKSEDTAVYYCAKNWRDAGTTWFEKSGSAGQGTQVTVSSGTGGGGSGGGGSGGGGSEFDIQMTQSPSSLSASVGDRVTITCKASDHINNWLAWYQQKPGQAPKLLIYGATTLETGVPSRFSGSGSGTDYTLTISSLQPEDFATYYCQQSWNTPWTFGQGTKLEIKRLEDLKNVFPPEVAVFEPSEAEISHTQKATLVCLATGFYPDHVELSWWVNGKEVHSGVSTDPQPLKEQPALNDSRYCLSSRLRVSATFWQNPRNHFRCQVQFYGLSENDEWTQDRAKPVTQIVSAEAWGRADCGSQSFGLLDPKLCYLLDGILFIYGVILTALFLRVKFSRSADAPAYQQGQNQLYNELNLGRREEYDVLDKRRGRDPEMGGKPQRRKNPQEGLYNELQKDKMAEAYSEIGMKGERRRGKGHDGLYQGLSTATKDTYDALHMQALPPRRAKRSGSGATNFSLLKQAGDVEENPGPTSMDWIWRILFLVGAATGAHSFEQVQLQQPGAELVKPGASVKMSCKASGYAFSSYWINWMKQKPGQGLEWIGQIYPGDGDTNYNGKFKGRATLTADTSSSTAYMQLSSLTSEDSAVYFCARSITTVVGCAMDYWGQGTSVTVSSTRIQNPDPAVYQLRDSKSSDKSVCLFTDFDSQTNVSQSKDSDVYITDKTVLDMRSMDFKSNSAVAWSNKSDFACANAFNNSIIPEDTFFPSPESSCGTQSFGLLDPKLCYLLDGILFIYGVILTALFLRVKFSRSADAPAYQQGQNQLYNELNLGRREEYDVLDKRRGRDPEMGGKPQRRKNPQEGLYNELQKDKMAEAYSEIGMKGERRRGKGHDGLYQGLSTATKDTYDALHMQALPPR

SEQ ID NO: 16771 - protein, 1090 aa, Artificial Sequence
  Synthetic Polypeptide
MALPVTALLLPLALLLHAARPEVQLLESGGGLVQPGGSLRLSCAASGFTFSSYAMSWVRQAPGKGLEWVSSISGSGDYIYYADSVKGRFTISRDISKNTLYLQMNSLRAEDTAVYYCAKEGTGANSSLADYRGQGTLVTVSSGGGSGGGSEVQLVESGGSLVQPGGSLRLSCAASGFTFDDYAMSWVRQVPGKGLEWVSSINWSGTHTDYADSVKGRFTISRNNANNTLYLQMNSLKSEDTAVYYCAKNWRDAGTTWFEKSGSAGQGTQVTVSSGTGGGGSGGGGSGGGGSEFDIQMTQSPSSLSASVGDRVTITCKASDHINNWLAWYQQKPGQAPKLLIYGATTLETGVPSRFSGSGSGTDYTLTISSLQPEDFATYYCQQSWNTPWTFGQGTKLEIKRLEDLKNVFPPEVAVFEPSKAEIAHTQKATLVCLATGFYPDHVELSWWVNGKEVHSGVCTDPQPLKEQPALNDSRYCLSSRLRVSATFWQNPRNHFRCQVQFYGLSENDEWTQDRAKPVTQIVSAEAWGRADCGSQSFGLLDPKLCYLLDGILFIYGVILTALFLRVKFSRSADAPAYQQGQNQLYNELNLGRREEYDVLDKRRGRDPEMGGKPQRRKNPQEGLYNELQKDKMAEAYSEIGMKGERRRGKGHDGLYQGLSTATKDTYDALHMQALPPRRAKRSGSGATNFSLLKQAGDVEENPGPTSMDWIWRILFLVGAATGAHSFEQVQLQQPGAELVKPGASVKMSCKASGYAFSSYWINWMKQKPGQGLEWIGQIYPGDGDTNYNGKFKGRATLTADTSSSTAYMQLSSLTSEDSAVYFCARSITTVVGCAMDYWGQGTSVTVSSTRIQNPDPAVYQLRDSKSSDKSVCLFTDFDSQTNVSQSKDSDVYITDKCVLDMRSMDFKSNSAVAWSNKSDFACANAFNNSIIPEDTFFPSSDVPCGTQSFGLLDPKLCYLLDGILFIYGVILTALFLRVKFSRSADAPAYQQGQNQLYNELNLGRREEYDVLDKRRGRDPEMGGKPQRRKNPQEGLYNELQKDKMAEAYSEIGMKGERRRGKGHDGLYQGLSTATKDTYDALHMQALPPR

SEQ ID NO: 16772 - protein, 1161 aa, Artificial Sequence
  Synthetic Polypeptide
MALPVTALLLPLALLLHAARPEVQLLESGGGLVQPGGSLRLSCAASGFTFSSYAMSWVRQAPGKGLEWVSSISGSGDYIYYADSVKGRFTISRDISKNTLYLQMNSLRAEDTAVYYCAKEGTGANSSLADYRGQGTLVTVSSGGGSGGGSEVQLVESGGSLVQPGGSLRLSCAASGFTFDDYAMSWVRQVPGKGLEWVSSINWSGTHTDYADSVKGRFTISRNNANNTLYLQMNSLKSEDTAVYYCAKNWRDAGTTWFEKSGSAGQGTQVTVSSGTGGGGSGGGGSGGGGSEFDIQMTQSPSSLSASVGDRVTITCKASDHINNWLAWYQQKPGQAPKLLIYGATTLETGVPSRFSGSGSGTDYTLTISSLQPEDFATYYCQQSWNTPWTFGQGTKLEIKRLEGKPIPNPLLGLDSTGSGEDLKNVFPPEVAVFEPSEAEISHTQKATLVCLATGFYPDHVELSWWVNGKEVHSGVSTDPQPLKEQPALNDSRYCLSSRLRVSATFWQNPRNHFRCQVQFYGLSENDEWTQDRAKPVTQIVSAEAWGRADCGSQSFGLLDPKLCYLLDGILFIYGVILTALFLRVKFSRSADAPAYQQGQNQLYNELNLGRREEYDVLDKRRGRDPEMGGKPQRRKNPQEGLYNELQKDKMAEAYSEIGMKGERRRGKGHDGLYQGLSTATKDTYDALHMQALPPRRAKRSGSGATNFSLLKQAGDVEENPGPTSMDWIWRILFLVGAATGAHSFEQVQLQQPGAELVKPGASVKMSCKASGYAFSSYWINWMKQKPGQGLEWIGQIYPGDGDTNYNGKFKGRATLTADTSSSTAYMQLSSLTSEDSAVYFCARSITTVVGCAMDYWGQGTSVTVSSTREQKLISEEDGSGIQNPDPAVYQLRDSKSSDKSVCLFTDFDSQTNVSQSKDSDVYITDKTVLDMRSMDFKSNSAVAWSNKSDFACANAFNNSIIPEDTFFPSPESSCGTQSFGLLDPKLCYLLDGILFIYGVILTALFLRSKRSRLLHSDYMNMTPRRPGPTRKHYQPYAPPRDFAAYRSRVKFSRSADAPAYQQGQNQLYNELNLGRREEYDVLDKRRGRDPEMGGKPQRRKNPQEGLYNELQKDKMAEAYSEIGMKGERRRGKGHDGLYQGLSTATKDTYDALHMQALPPR

SEQ ID NO: 16773 - protein, 1202 aa, Artificial Sequence
  Synthetic Polypeptide
MALPVTALLLPLALLLHAARPEVQLLESGGGLVQPGGSLRLSCAASGFTFSSYAMSWVRQAPGKGLEWVSSISGSGDYIYYADSVKGRFTISRDISKNTLYLQMNSLRAEDTAVYYCAKEGTGANSSLADYRGQGTLVTVSSGGGSGGGSEVQLVESGGSLVQPGGSLRLSCAASGFTFDDYAMSWVRQVPGKGLEWVSSINWSGTHTDYADSVKGRFTISRNNANNTLYLQMNSLKSEDTAVYYCAKNWRDAGTTWFEKSGSAGQGTQVTVSSGTGGGGSGGGGSGGGGSEFDIQMTQSPSSLSASVGDRVTITCKASDHINNWLAWYQQKPGQAPKLLIYGATTLETGVPSRFSGSGSGTDYTLTISSLQPEDFATYYCQQSWNTPWTFGQGTKLEIKRLEGKPIPNPLLGLDSTGSGEDLKNVFPPEVAVFEPSEAEISHTQKATLVCLATGFYPDHVELSWWVNGKEVHSGVSTDPQPLKEQPALNDSRYCLSSRLRVSATFWQNPRNHFRCQVQFYGLSENDEWTQDRAKPVTQIVSAEAWGRADCGSQSFGLLDPKLCYLLDGILFIYGVILTALFLRSKRSRLLHSDYMNMTPRRPGPTRKHYQPYAPPRDFAAYRSRVKFSRSADAPAYQQGQNQLYNELNLGRREEYDVLDKRRGRDPEMGGKPQRRKNPQEGLYNELQKDKMAEAYSEIGMKGERRRGKGHDGLYQGLSTATKDTYDALHMQALPPRRAKRSGSGATNFSLLKQAGDVEENPGPTSMDWIWRILFLVGAATGAHSFEQVQLQQPGAELVKPGASVKMSCKASGYAFSSYWINWMKQKPGQGLEWIGQIYPGDGDTNYNGKFKGRATLTADTSSSTAYMQLSSLTSEDSAVYFCARSITTVVGCAMDYWGQGTSVTVSSTREQKLISEEDGSGIQNPDPAVYQLRDSKSSDKSVCLFTDFDSQTNVSQSKDSDVYITDKTVLDMRSMDFKSNSAVAWSNKSDFACANAFNNSIIPEDTFFPSPESSCGTQSFGLLDPKLCYLLDGILFIYGVILTALFLRSKRSRLLHSDYMNMTPRRPGPTRKHYQPYAPPRDFAAYRSRVKFSRSADAPAYQQGQNQLYNELNLGRREEYDVLDKRRGRDPEMGGKPQRRKNPQEGLYNELQKDKMAEAYSEIGMKGERRRGKGHDGLYQGLSTATKDTYDALHMQALPPR

SEQ ID NO: 16774 - protein, 1163 aa, Artificial Sequence
  Synthetic Polypeptide
MALPVTALLLPLALLLHAARPEVQLLESGGGLVQPGGSLRLSCAASGFTFSSYAMSWVRQAPGKGLEWVSSISGSGDYIYYADSVKGRFTISRDISKNTLYLQMNSLRAEDTAVYYCAKEGTGANSSLADYRGQGTLVTVSSGGGSGGGSEVQLVESGGSLVQPGGSLRLSCAASGFTFDDYAMSWVRQVPGKGLEWVSSINWSGTHTDYADSVKGRFTISRNNANNTLYLQMNSLKSEDTAVYYCAKNWRDAGTTWFEKSGSAGQGTQVTVSSGTGGGGSGGGGSGGGGSEFDIQMTQSPSSLSASVGDRVTITCKASDHINNWLAWYQQKPGQAPKLLIYGATTLETGVPSRFSGSGSGTDYTLTISSLQPEDFATYYCQQSWNTPWTFGQGTKLEIKRLEGKPIPNPLLGLDSTGSGEDLKNVFPPEVAVFEPSEAEISHTQKATLVCLATGFYPDHVELSWWVNGKEVHSGVSTDPQPLKEQPALNDSRYCLSSRLRVSATFWQNPRNHFRCQVQFYGLSENDEWTQDRAKPVTQIVSAEAWGRADCGSQSFGLLDPKLCYLLDGILFIYGVILTALFLRVKFSRSADAPAYQQGQNQLYNELNLGRREEYDVLDKRRGRDPEMGGKPQRRKNPQEGLYNELQKDKMAEAYSEIGMKGERRRGKGHDGLYQGLSTATKDTYDALHMQALPPRRAKRSGSGATNFSLLKQAGDVEENPGPTSMDWIWRILFLVGAATGAHSFEQVQLQQPGAELVKPGASVKMSCKASGYAFSSYWINWMKQKPGQGLEWIGQIYPGDGDTNYNGKFKGRATLTADTSSSTAYMQLSSLTSEDSAVYFCARSITTVVGCAMDYWGQGTSVTVSSTREQKLISEEDLGSGIQNPDPAVYQLRDSKSSDKSVCLFTDFDSQTNVSQSKDSDVYITDKTVLDMRSMDFKSNSAVAWSNKSDFACANAFNNSIIPEDTFFPSPESSCGTQSFGLLDPKLCYLLDGILFIYGVILTALFLKRGRKKLLYIFKQPFMRPVQTTQEEDGCSCRFPEEEEGGCELRVKFSRSADAPAYQQGQNQLYNELNLGRREEYDVLDKRRGRDPEMGGKPQRRKNPQEGLYNELQKDKMAEAYSEIGMKGERRRGKGHDGLYQGLSTATKDTYDALHMQALPPR

SEQ ID NO: 16775 - protein, 1205 aa, Artificial Sequence
  Synthetic Polypeptide
MALPVTALLLPLALLLHAARPEVQLLESGGGLVQPGGSLRLSCAASGFTFSSYAMSWVRQAPGKGLEWVSSISGSGDYIYYADSVKGRFTISRDISKNTLYLQMNSLRAEDTAVYYCAKEGTGANSSLADYRGQGTLVTVSSGGGSGGGSEVQLVESGGSLVQPGGSLRLSCAASGFTFDDYAMSWVRQVPGKGLEWVSSINWSGTHTDYADSVKGRFTISRNNANNTLYLQMNSLKSEDTAVYYCAKNWRDAGTTWFEKSGSAGQGTQVTVSSGTGGGGSGGGGSGGGGSEFDIQMTQSPSSLSASVGDRVTITCKASDHINNWLAWYQQKPGQAPKLLIYGATTLETGVPSRFSGSGSGTDYTLTISSLQPEDFATYYCQQSWNTPWTFGQGTKLEIKRLEGKPIPNPLLGLDSTGSGEDLKNVFPPEVAVFEPSEAEISHTQKATLVCLATGFYPDHVELSWWVNGKEVHSGVSTDPQPLKEQPALNDSRYCLSSRLRVSATFWQNPRNHFRCQVQFYGLSENDEWTQDRAKPVTQIVSAEAWGRADCGSQSFGLLDPKLCYLLDGILFIYGVILTALFLKRGRKKLLYIFKQPFMRPVQTTQEEDGCSCRFPEEEEGGCELRVKFSRSADAPAYQQGQNQLYNELNLGRREEYDVLDKRRGRDPEMGGKPQRRKNPQEGLYNELQKDKMAEAYSEIGMKGERRRGKGHDGLYQGLSTATKDTYDALHMQALPPRRAKRSGSGATNFSLLKQAGDVEENPGPTSMDWIWRILFLVGAATGAHSFEQVQLQQPGAELVKPGASVKMSCKASGYAFSSYWINWMKQKPGQGLEWIGQIYPGDGDTNYNGKFKGRATLTADTSSSTAYMQLSSLTSEDSAVYFCARSITTVVGCAMDYWGQGTSVTVSSTREQKLISEEDLGSGIQNPDPAVYQLRDSKSSDKSVCLFTDFDSQTNVSQSKDSDVYITDKTVLDMRSMDFKSNSAVAWSNKSDFACANAFNNSIIPEDTFFPSPESSCGTQSFGLLDPKLCYLLDGILFIYGVILTALFLKRGRKKLLYIFKQPFMRPVQTTQEEDGCSCRFPEEEEGGCELRVKFSRSADAPAYQQGQNQLYNELNLGRREEYDVLDKRRGRDPEMGGKPQRRKNPQEGLYNELQKDKMAEAYSEIGMKGERRRGKGHDGLYQGLSTATKDTYDALHMQALPPR

SEQ ID NO: 16776 - protein, 1095 aa, Artificial Sequence
  Synthetic Polypeptide
MALPVTALLLPLALLLHAARPEVQLLESGGGLVQPGGSLRLSCAASGFTFSSYAMSWVRQAPGKGLEWVSSISGSGDYIYYADSVKGRFTISRDISKNTLYLQMNSLRAEDTAVYYCAKEGTGANSSLADYRGQGTLVTVSSGGGSGGGSEVQLVESGGSLVQPGGSLRLSCAASGFTFDDYAMSWVRQVPGKGLEWVSSINWSGTHTDYADSVKGRFTISRNNANNTLYLQMNSLKSEDTAVYYCAKNWRDAGTTWFEKSGSAGQGTQVTVSSGTGGGGSGGGGSGGGGSEFDIQMTQSPSSLSASVGDRVTITCKASDHINNWLAWYQQKPGQAPKLLIYGATTLETGVPSRFSGSGSGTDYTLTISSLQPEDFATYYCQQSWNTPWTFGQGTKLEIKRLEQSFGLLDPKLCYLLDGILFIYGVILTALFLRVKFSRSADAPAYQQGQNQLYNELNLGRREEYDVLDKRRGRDPEMGGKPQRRKNPQEGLYNELQKDKMAEAYSEIGMKGERRRGKGHDGLYQGLSTATKDTYDALHMQALPPRRAKRSGSGATNFSLLKQAGDVEENPGPTSMDWIWRILFLVGAATGAHSFEQVQLQQPGAELVKPGASVKMSCKASGYAFSSYWINWMKQKPGQGLEWIGQIYPGDGDTNYNGKFKGRATLTADTSSSTAYMQLSSLTSEDSAVYFCARSITTVVGCAMDYWGQGTSVTVSSTRQSFGLLDPKLCYLLDGILFIYGVILTALFLRVKFSRSADAPAYQQGQNQLYNELNLGRREEYDVLDKRRGRDPEMGGKPQRRKNPQEGLYNELQKDKMAEAYSEIGMKGERRRGKGHDGLYQGLSTATKDTYDALHMQALPPRRAKRSGSGVKQTLNFDLLKLAGDVESNPGPSRGHMTEYKPTVRLATRDDVPRAVRTLAAAFADYPATRHTVDPDRHIERVTELQELFLTRVGLDIGKVWVADDGAAVAVWTTPESVEAGAVFAEIGPRMAELSGSRLAAQQQMEGLLAPHRPKEPAWFLATVGVSPDHQGKGLGSAVVLPGVEAAERAGVPAFLETSAPRNLPFYERLGFTVTADVEVPEGPRTWCMTRKPGA

SEQ ID NO: 16777 - protein, 920 aa, Artificial Sequence
  Synthetic Polypeptide
MALPVTALLLPLALLLHAARPEVQLLESGGGLVQPGGSLRLSCAASGFTFSSYAMSWVRQAPGKGLEWVSSISGSGDYIYYADSVKGRFTISRDISKNTLYLQMNSLRAEDTAVYYCAKEGTGANSSLADYRGQGTLVTVSSGGGSGGGSEVQLVESGGSLVQPGGSLRLSCAASGFTFDDYAMSWVRQVPGKGLEWVSSINWSGTHTDYADSVKGRFTISRNNANNTLYLQMNSLKSEDTAVYYCAKNWRDAGTTWFEKSGSAGQGTQVTVSSGTGGGGSGGGGSGGGGSEFDIQMTQSPSSLSASVGDRVTITCKASDHINNWLAWYQQKPGQAPKLLIYGATTLETGVPSRFSGSGSGTDYTLTISSLQPEDFATYYCQQSWNTPWTFGQGTKLEIKRLEGQPKANPTVTLFPPSSEELQANKATLVCLISDFYPGAVTVAWKADGSPVKAGVETTKPSKQSNNKYAASSYLSLTPEQWKSHRSYSCQVTHEGSTVEKTVAPTECSPIKTDVITMDPKDNCSKDANDTLLLQLTNTSAYYMYLLLLLKSVVYFAIITCCLLRRTAFCCNGEKSRAKRSGSGATNFSLLKQAGDVEENPGPTSMDWIWRILFLVGAATGAHSFEQVQLQQPGAELVKPGASVKMSCKASGYAFSSYWINWMKQKPGQGLEWIGQIYPGDGDTNYNGKFKGRATLTADTSSSTAYMQLSSLTSEDSAVYFCARSITTVVGCAMDYWGQGTSVTVSSTRASTKGPSVFPLAPSSKSTSGGTAALGCLVKDYFPEPVTVSWNSGALTSGVHTFPAVLQSSGLYSLSSVVTVPSSSLGTQTYICNVNHKPSNTKVDKRVEPKSCEVKTDSTDHVKPKETENTKQPSKSCHKPKAIVHTEKVNMMSLTVLGLRMLFAKTVAVNFLLTAKLFFL

SEQ ID NO: 16778 - protein, 898 aa, Artificial Sequence
  Synthetic Polypeptide
MALPVTALLLPLALLLHAARPEVQLLESGGGLVQPGGSLRLSCAASGFTFSSYAMSWVRQAPGKGLEWVSSISGSGDYIYYADSVKGRFTISRDISKNTLYLQMNSLRAEDTAVYYCAKEGTGANSSLADYRGQGTLVTVSSGGGSGGGSEVQLVESGGSLVQPGGSLRLSCAASGFTFDDYAMSWVRQVPGKGLEWVSSINWSGTHTDYADSVKGRFTISRNNANNTLYLQMNSLKSEDTAVYYCAKNWRDAGTTWFEKSGSAGQGTQVTVSSGTGGGGSGGGGSGGGGSEFDIQMTQSPSSLSASVGDRVTITCKASDHINNWLAWYQQKPGQAPKLLIYGATTLETGVPSRFSGSGSGTDYTLTISSLQPEDFATYYCQQSWNTPWTFGQGTKLEIKRLEGQPKANPTVTLFPPSSEELQANKATLVCLISDFYPGAVTVAWKADGSPVKAGVETTKPSKQSNNKYAASSYLSLTPEQWKSHRSYSCQVTHEGSTVEKTVAPTECSGRADCGITSASYHQGVLSATILYEILLGKATLYAVLVSALVLMAMVKRKDSRGRAKRSGSGATNFSLLKQAGDVEENPGPTSMDWIWRILFLVGAATGAHSFEQVQLQQPGAELVKPGASVKMSCKASGYAFSSYWINWMKQKPGQGLEWIGQIYPGDGDTNYNGKFKGRATLTADTSSSTAYMQLSSLTSEDSAVYFCARSITTVVGCAMDYWGQGTSVTVSSTRASTKGPSVFPLAPSSKSTSGGTAALGCLVKDYFPEPVTVSWNSGALTSGVHTFPAVLQSSGLYSLSSVVTVPSSSLGTQTYICNVNHKPSNTKVDKRVEPKSCIPEDTFFPSSDVPCDVKLVEKSFETDTNLNFQNLSVIGFRILLLKVAGFNLLMTLRLWSS

SEQ ID NO: 16779 - protein, 898 aa, Artificial Sequence
  Synthetic Polypeptide
MALPVTALLLPLALLLHAARPEVQLLESGGGLVQPGGSLRLSCAASGFTFSSYAMSWVRQAPGKGLEWVSSISGSGDYIYYADSVKGRFTISRDISKNTLYLQMNSLRAEDTAVYYCAKEGTGANSSLADYRGQGTLVTVSSGGGSGGGSEVQLVESGGSLVQPGGSLRLSCAASGFTFDDYAMSWVRQVPGKGLEWVSSINWSGTHTDYADSVKGRFTISRNNANNTLYLQMNSLKSEDTAVYYCAKNWRDAGTTWFEKSGSAGQGTQVTVSSGTGGGGSGGGGSGGGGSEFDIQMTQSPSSLSASVGDRVTITCKASDHINNWLAWYQQKPGQAPKLLIYGATTLETGVPSRFSGSGSGTDYTLTISSLQPEDFATYYCQQSWNTPWTFGQGTKLEIKRLEGQPKANPTVTLFPPSSEELQANKATLVCLISDFYPGAVTVAWKADGSPVKAGVETTKPSKQSNNKYAASSYLSLTPEQWKSHRSYSCQVTHEGSTVEKTVAPTECSGRADCGFTSESYQQGVLSATILYEILLGKATLYAVLVSALVLMAMVKRKDSRGRAKRSGSGATNFSLLKQAGDVEENPGPTSMDWIWRILFLVGAATGAHSFEQVQLQQPGAELVKPGASVKMSCKASGYAFSSYWINWMKQKPGQGLEWIGQIYPGDGDTNYNGKFKGRATLTADTSSSTAYMQLSSLTSEDSAVYFCARSITTVVGCAMDYWGQGTSVTVSSTRASTKGPSVFPLAPSSKSTSGGTAALGCLVKDYFPEPVTVSWNSGALTSGVHTFPAVLQSSGLYSLSSVVTVPSSSLGTQTYICNVNHKPSNTKVDKRVEPKSCIPEDTFFPSPESSCDVKLVEKSFETDTNLNFQNLSVIGFRILLLKVAGFNLLMTLRLWSS

SEQ ID NO: 16780 - protein, 724 aa, Artificial Sequence
  Synthetic Polypeptide
MALPVTALLLPLALLLHAARPEVQLLESGGGLVQPGGSLRLSCAASGFTFSSYAMSWVRQAPGKGLEWVSSISGSGDYIYYADSVKGRFTISRDISKNTLYLQMNSLRAEDTAVYYCAKEGTGANSSLADYRGQGTLVTVSSGGGSGGGSEVQLVESGGSLVQPGGSLRLSCAASGFTFDDYAMSWVRQVPGKGLEWVSSINWSGTHTDYADSVKGRFTISRNNANNTLYLQMNSLKSEDTAVYYCAKNWRDAGTTWFEKSGSAGQGTQVTVSSGTGGGGSGGGGSGGGGSEFDIQMTQSPSSLSASVGDRVTITCKASDHINNWLAWYQQKPGQAPKLLIYGATTLETGVPSRFSGSGSGTDYTLTISSLQPEDFATYYCQQSWNTPWTFGQGTKLEIKRGGGGSGGGGSGGGGSQVQLQQPGAELVKPGASVKMSCKASGYAFSSYWINWMKQKPGQGLEWIGQIYPGDGDTNYNGKFKGRATLTADTSSSTAYMQLSSLTSEDSAVYFCARSITTVVGCAMDYWGQGTSVTVSSTRDGNEEMGGITQTPYKVSISGTTVILTCPQYPGSEILWQHNDKNIGGDEDDKNIGSDEDHLSLKEFSELEQSGYYVCYPRGSKPEDANFYLYLRARVCENCMEMDVMSVATIVIVDICITGGLLLLVYYWSKNRKAKAKPVTRGAGAGGRQRGQNKERPPPVPNPDYEPIRKGQRDLYSGLNQRRI

SEQ ID NO: 16781 - protein, 689 aa, Artificial Sequence
  Synthetic Polypeptide
MALPVTALLLPLALLLHAARPEVQLLESGGGLVQPGGSLRLSCAASGFTFSSYAMSWVRQAPGKGLEWVSSISGSGDYIYYADSVKGRFTISRDISKNTLYLQMNSLRAEDTAVYYCAKEGTGANSSLADYRGQGTLVTVSSGGGSGGGSEVQLVESGGSLVQPGGSLRLSCAASGFTFDDYAMSWVRQVPGKGLEWVSSINWSGTHTDYADSVKGRFTISRNNANNTLYLQMNSLKSEDTAVYYCAKNWRDAGTTWFEKSGSAGQGTQVTVSSGTGGGGSGGGGSGGGGSEFDIQMTQSPSSLSASVGDRVTITCKASDHINNWLAWYQQKPGQAPKLLIYGATTLETGVPSRFSGSGSGTDYTLTISSLQPEDFATYYCQQSWNTPWTFGQGTKLEIKRGGGGSGGGGSGGGGSQVQLQQPGAELVKPGASVKMSCKASGYAFSSYWINWMKQKPGQGLEWIGQIYPGDGDTNYNGKFKGRATLTADTSSSTAYMQLSSLTSEDSAVYFCARSITTVVGCAMDYWGQGTSVTVSSTRFKIPIEELEDRVFVNCNTSITWVEGTVGTLLSDITRLDLGKRILDPRGIYRCNGTDIYKDKESTVQVHYRMCQSCVELDPATVAGIIVTDVIATLLLALGVFCFAGHETGRLSGAADTQALLRNDQVYQPLRDRDDAQYSHLGGNWARNK

SEQ ID NO: 16782 - protein, 699 aa, Artificial Sequence
  Synthetic Polypeptide
MALPVTALLLPLALLLHAARPEVQLLESGGGLVQPGGSLRLSCAASGFTFSSYAMSWVRQAPGKGLEWVSSISGSGDYIYYADSVKGRFTISRDISKNTLYLQMNSLRAEDTAVYYCAKEGTGANSSLADYRGQGTLVTVSSGGGSGGGSEVQLVESGGSLVQPGGSLRLSCAASGFTFDDYAMSWVRQVPGKGLEWVSSINWSGTHTDYADSVKGRFTISRNNANNTLYLQMNSLKSEDTAVYYCAKNWRDAGTTWFEKSGSAGQGTQVTVSSGTGGGGSGGGGSGGGGSEFDIQMTQSPSSLSASVGDRVTITCKASDHINNWLAWYQQKPGQAPKLLIYGATTLETGVPSRFSGSGSGTDYTLTISSLQPEDFATYYCQQSWNTPWTFGQGTKLEIKRGGGGSGGGGSGGGGSQVQLQQPGAELVKPGASVKMSCKASGYAFSSYWINWMKQKPGQGLEWIGQIYPGDGDTNYNGKFKGRATLTADTSSSTAYMQLSSLTSEDSAVYFCARSITTVVGCAMDYWGQGTSVTVSSTRQSIKGNHLVKVYDYQEDGSVLLTCDAEAKNITWFKDGKMIGFLTEDKKKWNLGSNAKDPRGMYQCKGSQNKSKPLQVYYRMCQNCIELNAATISGFLFAEIVSIFVLAVGVYFIAGQDGVRQSRASDKQTLLPNDQLYQPLKDREDDQYSHLQGNQLRRN

SEQ ID NO: 16783 - protein, 682 aa, Artificial Sequence
  Synthetic Polypeptide
MALPVTALLLPLALLLHAARPEVQLLESGGGLVQPGGSLRLSCAASGFTFSSYAMSWVRQAPGKGLEWVSSISGSGDYIYYADSVKGRFTISRDISKNTLYLQMNSLRAEDTAVYYCAKEGTGANSSLADYRGQGTLVTVSSGGGSGGGSEVQLVESGGSLVQPGGSLRLSCAASGFTFDDYAMSWVRQVPGKGLEWVSSINWSGTHTDYADSVKGRFTISRNNANNTLYLQMNSLKSEDTAVYYCAKNWRDAGTTWFEKSGSAGQGTQVTVSSGTGGGGSGGGGSGGGGSEFDIQMTQSPSSLSASVGDRVTITCKASDHINNWLAWYQQKPGQAPKLLIYGATTLETGVPSRFSGSGSGTDYTLTISSLQPEDFATYYCQQSWNTPWTFGQGTKLEIKRGGGGSGGGGSGGGGSQVQLQQPGAELVKPGASVKMSCKASGYAFSSYWINWMKQKPGQGLEWIGQIYPGDGDTNYNGKFKGRATLTADTSSSTAYMQLSSLTSEDSAVYFCARSITTVVGCAMDYWGQGTSVTVSSTRQSFGLLDPKLCYLLDGILFIYGVILTALFLRVKFSRSADAPAYQQGQNQLYNELNLGRREEYDVLDKRRGRDPEMGGKPQRRKNPQEGLYNELQKDKMAEAYSEIGMKGERRRGKGHDGLYQGLSTATKDTYDALHMQALPPR

SEQ ID NO: 16784 - protein, 915 aa, Artificial Sequence
  Synthetic Polypeptide
MALPVTALLLPLALLLHAARPEVQLLESGGGLVQPGGSLRLSCAASGFTFSSYAMSWVRQAPGKGLEWVSSISGSGDYIYYADSVKGRFTISRDISKNTLYLQMNSLRAEDTAVYYCAKEGTGANSSLADYRGQGTLVTVSSGGGSGGGSEVQLVESGGSLVQPGGSLRLSCAASGFTFDDYAMSWVRQVPGKGLEWVSSINWSGTHTDYADSVKGRFTISRNNANNTLYLQMNSLKSEDTAVYYCAKNWRDAGTTWFEKSGSAGQGTQVTVSSGTGGGGSGGGGSGGGGSEFDIQMTQSPSSLSASVGDRVTITCKASDHINNWLAWYQQKPGQAPKLLIYGATTLETGVPSRFSGSGSGTDYTLTISSLQPEDFATYYCQQSWNTPWTFGQGTKLEIKRGGGGSGGGGSGGGGSQVQLQQPGAELVKPGASVKMSCKASGYAFSSYWINWMKQKPGQGLEWIGQIYPGDGDTNYNGKFKGRATLTADTSSSTAYMQLSSLTSEDSAVYFCARSITTVVGCAMDYWGQGTSVTVSSTRGSGIQNPDPAVYQLRDSKSSDKSVCLFTDFDSQTNVSQSKDSDVYITDKTVLDMRSMDFKSNSAVAWSNKSDFACANAFNNSIIPEDTFFPSPESSCDVKLVEKSFETDTNLNFQNLSVIGFRILLLKVAGFNLLMTLRLWSSRAKRSGSGVKQTLNFDLLKLAGDVESNPGPSRGHMTEYKPTVRLATRDDVPRAVRTLAAAFADYPATRHTVDPDRHIERVTELQELFLTRVGLDIGKVWVADDGAAVAVWTTPESVEAGAVFAEIGPRMAELSGSRLAAQQQMEGLLAPHRPKEPAWFLATVGVSPDHQGKGLGSAVVLPGVEAAERAGVPAFLETSAPRNLPFYERLGFTVTADVEVPEGPRTWCMTRKPGA

SEQ ID NO: 16785 - protein, 947 aa, Artificial Sequence
  Synthetic Polypeptide
MALPVTALLLPLALLLHAARPEVQLLESGGGLVQPGGSLRLSCAASGFTFSSYAMSWVRQAPGKGLEWVSSISGSGDYIYYADSVKGRFTISRDISKNTLYLQMNSLRAEDTAVYYCAKEGTGANSSLADYRGQGTLVTVSSGGGSGGGSEVQLVESGGSLVQPGGSLRLSCAASGFTFDDYAMSWVRQVPGKGLEWVSSINWSGTHTDYADSVKGRFTISRNNANNTLYLQMNSLKSEDTAVYYCAKNWRDAGTTWFEKSGSAGQGTQVTVSSGTGGGGSGGGGSGGGGSEFDIQMTQSPSSLSASVGDRVTITCKASDHINNWLAWYQQKPGQAPKLLIYGATTLETGVPSRFSGSGSGTDYTLTISSLQPEDFATYYCQQSWNTPWTFGQGTKLEIKRGGGGSGGGGSGGGGSQVQLQQPGAELVKPGASVKMSCKASGYAFSSYWINWMKQKPGQGLEWIGQIYPGDGDTNYNGKFKGRATLTADTSSSTAYMQLSSLTSEDSAVYFCARSITTVVGCAMDYWGQGTSVTVSSLEDLKNVFPPEVAVFEPSEAEISHTQKATLVCLATGFYPDHVELSWWVNGKEVHSGVSTDPQPLKEQPALNDSRYCLSSRLRVSATFWQNPRNHFRCQVQFYGLSENDEWTQDRAKPVTQIVSAEAWGRADCGFTSESYQQGVLSATILYEILLGKATLYAVLVSALVLMAMVKRKDSRGRAKRSGSGATNFSLLKQAGDVEENPGPTRGHMTEYKPTVRLATRDDVPRAVRTLAAAFADYPATRHTVDPDRHIERVTELQELFLTRVGLDIGKVWVADDGAAVAVWTTPESVEAGAVFAEIGPRMAELSGSRLAAQQQMEGLLAPHRPKEPAWFLATVGVSPDHQGKGLGSAVVLPGVEAAERAGVPAFLETSAPRNLPFYERLGFTVTADVEVPEGPRTWCMTRKPGA

SEQ ID NO: 16786 - protein, 997 aa, Artificial Sequence
  Synthetic Polypeptide
MALPVTALLLPLALLLHAARPEVQLLESGGGLVQPGGSLRLSCAASGFTFSSYAMSWVRQAPGKGLEWVSSISGSGDYIYYADSVKGRFTISRDISKNTLYLQMNSLRAEDTAVYYCAKEGTGANSSLADYRGQGTLVTVSSGGGSGGGSEVQLVESGGSLVQPGGSLRLSCAASGFTFDDYAMSWVRQVPGKGLEWVSSINWSGTHTDYADSVKGRFTISRNNANNTLYLQMNSLKSEDTAVYYCAKNWRDAGTTWFEKSGSAGQGTQVTVSSGTGGGGSGGGGSGGGGSEFDIQMTQSPSSLSASVGDRVTITCKASDHINNWLAWYQQKPGQAPKLLIYGATTLETGVPSRFSGSGSGTDYTLTISSLQPEDFATYYCQQSWNTPWTFGQGTKLEIKRGGGGSGGGGSGGGGSQVQLQQPGAELVKPGASVKMSCKASGYAFSSYWINWMKQKPGQGLEWIGQIYPGDGDTNYNGKFKGRATLTADTSSSTAYMQLSSLTSEDSAVYFCARSITTVVGCAMDYWGQGTSVTVSSTREQKLISEEDLGSGTPFPSLAPPIMLLVDGKQQMVVVCLVLDVAPPGLDSPIWFSAGNGSALDAFTYGPSPATDGTWTNLAHLSLPSEELASWEPLVCHTGPGAEGHSRSTQPMHLSGEASTARTCPQEPLRGTPGGALWLGVLRLLLFKLLLFDLLLTCSCLCDPAGPLPSPATTTRLRALGSHRLHPATETGGREATSSPRPQPRDRRWGDTPPGRKPGSPVRAKRSGSGVKQTLNFDLLKLAGDVESNPGPSRSRGHMTEYKPTVRLATRDDVPRAVRTLAAAFADYPATRHTVDPDRHIERVTELQELFLTRVGLDIGKVWVADDGAAVAVWTTPESVEAGAVFAEIGPRMAELSGSRLAAQQQMEGLLAPHRPKEPAWFLATVGVSPDHQGKGLGSAVVLPGVEAAERAGVPAFLETSAPRNLPFYERLGFTVTADVEVPEGPRTWCMTRKPGA

SEQ ID NO: 16787 - protein, 811 aa, Artificial Sequence
  Synthetic Polypeptide
MALPVTALLLPLALLLHAARPEVQLLESGGGLVQPGGSLRLSCAASGFTFSSYAMSWVRQAPGKGLEWVSSISGSGDYIYYADSVKGRFTISRDISKNTLYLQMNSLRAEDTAVYYCAKEGTGANSSLADYRGQGTLVTVSSGGGSGGGSEVQLVESGGSLVQPGGSLRLSCAASGFTFDDYAMSWVRQVPGKGLEWVSSINWSGTHTDYADSVKGRFTISRNNANNTLYLQMNSLKSEDTAVYYCAKNWRDAGTTWFEKSGSAGQGTQVTVSSGTGGGGSGGGGSGGGGSEFDIQMTQSPSSLSASVGDRVTITCKASDHINNWLAWYQQKPGQAPKLLIYGATTLETGVPSRFSGSGSGTDYTLTISSLQPEDFATYYCQQSWNTPWTFGQGTKLEIKRLEDLKNVFPPEVAVFEPSEAEISHTQKATLVCLATGFYPDHVELSWWVNGKEVHSGVSTDPQPLKEQPALNDSRYCLSSRLRVSATFWQNPRNHFRCQVQFYGLSENDEWTQDRAKPVTQIVSAEAWGRADCGFTSESYQQGVLSATILYEILLGKATLYAVLVSALVLMAMVKRKDSRGRAKRSGSGATNFSLLKQAGDVEENPGPTRGHMTEYKPTVRLATRDDVPRAVRTLAAAFADYPATRHTVDPDRHIERVTELQELFLTRVGLDIGKVWVADDGAAVAVWTTPESVEAGAVFAEIGPRMAELSGSRLAAQQQMEGLLAPHRPKEPAWFLATVGVSPDHQGKGLGSAVVLPGVEAAERAGVPAFLETSAPRNLPFYERLGFTVTADVEVPEGPRTWCMTRKPGA

SEQ ID NO: 16788 - protein, 581 aa, Artificial Sequence
  Synthetic Polypeptide
MALPVTALLLPLALLLHAARPEVQLLESGGGLVQPGGSLRLSCAASGFTFSSYAMSWVRQAPGKGLEWVSSISGSGDYIYYADSVKGRFTISRDISKNTLYLQMNSLRAEDTAVYYCAKEGTGANSSLADYRGQGTLVTVSSGGGSGGGSEVQLVESGGSLVQPGGSLRLSCAASGFTFDDYAMSWVRQVPGKGLEWVSSINWSGTHTDYADSVKGRFTISRNNANNTLYLQMNSLKSEDTAVYYCAKNWRDAGTTWFEKSGSAGQGTQVTVSSGTGGGGSGGGGSGGGGSEFDIQMTQSPSSLSASVGDRVTITCKASDHINNWLAWYQQKPGQAPKLLIYGATTLETGVPSRFSGSGSGTDYTLTISSLQPEDFATYYCQQSWNTPWTFGQGTKLEIKRLEDLKNVFPPEVAVFEPSEAEISHTQKATLVCLATGFYPDHVELSWWVNGKEVHSGVSTDPQPLKEQPALNDSRYCLSSRLRVSATFWQNPRNHFRCQVQFYGLSENDEWTQDRAKPVTQIVSAEAWGRADCGFTSESYQQGVLSATILYEILLGKATLYAVLVSALVLMAMVKRKDSRG

SEQ ID NO: 16789 - protein, 829 aa, Artificial Sequence
  Synthetic Polypeptide
MALPVTALLLPLALLLHAARPEVQLLESGGGLVQPGGSLRLSCAASGFTFSSYAMSWVRQAPGKGLEWVSSISGSGDYIYYADSVKGRFTISRDISKNTLYLQMNSLRAEDTAVYYCAKEGTGANSSLADYRGQGTLVTVSSGGGSGGGSEVQLVESGGSLVQPGGSLRLSCAASGFTFDDYAMSWVRQVPGKGLEWVSSINWSGTHTDYADSVKGRFTISRNNANNTLYLQMNSLKSEDTAVYYCAKNWRDAGTTWFEKSGSAGQGTQVTVSSGTGGGGSGGGGSGGGGSEFDIQMTQSPSSLSASVGDRVTITCKASDHINNWLAWYQQKPGQAPKLLIYGATTLETGVPSRFSGSGSGTDYTLTISSLQPEDFATYYCQQSWNTPWTFGQGTKLEIKRLEGKPIPNPLLGLDSTGSGEDLKNVFPPEVAVFEPSEAEISHTQKATLVCLATGFYPDHVELSWWVNGKEVHSGVCTDPQPLKEQPALNDSRYCLSSRLRVSATFWQNPRNHFRCQVQFYGLSENDEWTQDRAKPVTQIVSAEAWGRADCGFTSESYQQGVLSATILYEILLGKATLYAVLVSALVLMAMVKRKDSRGRAKRSGSGATNFSLLKQAGDVEENPGPTRGHMTEYKPTVRLATRDDVPRAVRTLAAAFADYPATRHTVDPDRHIERVTELQELFLTRVGLDIGKVWVADDGAAVAVWTTPESVEAGAVFAEIGPRMAELSGSRLAAQQQMEGLLAPHRPKEPAWFLATVGVSPDHQGKGLGSAVVLPGVEAAERAGVPAFLETSAPRNLPFYERLGFTVTADVEVPEGPRTWCMTRKPGA

SEQ ID NO: 16790 - protein, 599 aa, Artificial Sequence
  Synthetic Polypeptide
MALPVTALLLPLALLLHAARPEVQLLESGGGLVQPGGSLRLSCAASGFTFSSYAMSWVRQAPGKGLEWVSSISGSGDYIYYADSVKGRFTISRDISKNTLYLQMNSLRAEDTAVYYCAKEGTGANSSLADYRGQGTLVTVSSGGGSGGGSEVQLVESGGSLVQPGGSLRLSCAASGFTFDDYAMSWVRQVPGKGLEWVSSINWSGTHTDYADSVKGRFTISRNNANNTLYLQMNSLKSEDTAVYYCAKNWRDAGTTWFEKSGSAGQGTQVTVSSGTGGGGSGGGGSGGGGSEFDIQMTQSPSSLSASVGDRVTITCKASDHINNWLAWYQQKPGQAPKLLIYGATTLETGVPSRFSGSGSGTDYTLTISSLQPEDFATYYCQQSWNTPWTFGQGTKLEIKRLEGKPIPNPLLGLDSTGSGEDLKNVFPPEVAVFEPSEAEISHTQKATLVCLATGFYPDHVELSWWVNGKEVHSGVCTDPQPLKEQPALNDSRYCLSSRLRVSATFWQNPRNHFRCQVQFYGLSENDEWTQDRAKPVTQIVSAEAWGRADCGFTSESYQQGVLSATILYEILLGKATLYAVLVSALVLMAMVKRKDSRG

SEQ ID NO: 16791 - protein, 915 aa, Artificial Sequence
  Synthetic Polypeptide
MALPVTALLLPLALLLHAARPEVQLLESGGGLVQPGGSLRLSCAASGFTFSSYAMSWVRQAPGKGLEWVSSISGSGDYIYYADSVKGRFTISRDISKNTLYLQMNSLRAEDTAVYYCAKEGTGANSSLADYRGQGTLVTVSSGGGSGGGSEVQLVESGGSLVQPGGSLRLSCAASGFTFDDYAMSWVRQVPGKGLEWVSSINWSGTHTDYADSVKGRFTISRNNANNTLYLQMNSLKSEDTAVYYCAKNWRDAGTTWFEKSGSAGQGTQVTVSSGTGGGGSGGGGSGGGGSEFDIQMTQSPSSLSASVGDRVTITCKASDHINNWLAWYQQKPGQAPKLLIYGATTLETGVPSRFSGSGSGTDYTLTISSLQPEDFATYYCQQSWNTPWTFGQGTKLEIKRGGGGSGGGGSGGGGSQVQLQQPGAELVKPGASVKMSCKASGYAFSSYWINWMKQKPGQGLEWIGQIYPGDGDTNYNGKFKGRATLTADTSSSTAYMQLSSLTSEDSAVYFCARSITTVVGCAMDYWGQGTSVTVSSTRGSGIQNPDPAVYQLRDSKSSDKSVCLFTDFDSQTNVSQSKDSDVYITDKTVLDMRSMDFKSNSAVAWSNKSDFACANAFNNSIIPEDTFFPSSDVPCDVKLVEKSFETDTNLNFQNLSVIGFRILLLKVAGFNLLMTLRLWSSRAKRSGSGVKQTLNFDLLKLAGDVESNPGPSRGHMTEYKPTVRLATRDDVPRAVRTLAAAFADYPATRHTVDPDRHIERVTELQELFLTRVGLDIGKVWVADDGAAVAVWTTPESVEAGAVFAEIGPRMAELSGSRLAAQQQMEGLLAPHRPKEPAWFLATVGVSPDHQGKGLGSAVVLPGVEAAERAGVPAFLETSAPRNLPFYERLGFTVTADVEVPEGPRTWCMTRKPGA

SEQ ID NO: 16792 - protein, 947 aa, Artificial Sequence
  Synthetic Polypeptide
MALPVTALLLPLALLLHAARPEVQLLESGGGLVQPGGSLRLSCAASGFTFSSYAMSWVRQAPGKGLEWVSSISGSGDYIYYADSVKGRFTISRDISKNTLYLQMNSLRAEDTAVYYCAKEGTGANSSLADYRGQGTLVTVSSGGGSGGGSEVQLVESGGSLVQPGGSLRLSCAASGFTFDDYAMSWVRQVPGKGLEWVSSINWSGTHTDYADSVKGRFTISRNNANNTLYLQMNSLKSEDTAVYYCAKNWRDAGTTWFEKSGSAGQGTQVTVSSGTGGGGSGGGGSGGGGSEFDIQMTQSPSSLSASVGDRVTITCKASDHINNWLAWYQQKPGQAPKLLIYGATTLETGVPSRFSGSGSGTDYTLTISSLQPEDFATYYCQQSWNTPWTFGQGTKLEIKRGGGGSGGGGSGGGGSQVQLQQPGAELVKPGASVKMSCKASGYAFSSYWINWMKQKPGQGLEWIGQIYPGDGDTNYNGKFKGRATLTADTSSSTAYMQLSSLTSEDSAVYFCARSITTVVGCAMDYWGQGTSVTVSSLEDLKNVFPPEVAVFEPSKAEIAHTQKATLVCLATGFYPDHVELSWWVNGKEVHSGVSTDPQPLKEQPALNDSRYCLSSRLRVSATFWQNPRNHFRCQVQFYGLSENDEWTQDRAKPVTQIVSAEAWGRADCGITSASYHQGVLSATILYEILLGKATLYAVLVSALVLMAMVKRKDSRGRAKRSGSGATNFSLLKQAGDVEENPGPTRGHMTEYKPTVRLATRDDVPRAVRTLAAAFADYPATRHTVDPDRHIERVTELQELFLTRVGLDIGKVWVADDGAAVAVWTTPESVEAGAVFAEIGPRMAELSGSRLAAQQQMEGLLAPHRPKEPAWFLATVGVSPDHQGKGLGSAVVLPGVEAAERAGVPAFLETSAPRNLPFYERLGFTVTADVEVPEGPRTWCMTRKPGA

SEQ ID NO: 16793 - protein, 1275 aa, Artificial Sequence
  Synthetic Polypeptide
MALPVTALLLPLALLLHAARPEVQLLESGGGLVQPGGSLRLSCAASGFTFSSYAMSWVRQAPGKGLEWVSSISGSGDYIYYADSVKGRFTISRDISKNTLYLQMNSLRAEDTAVYYCAKEGTGANSSLADYRGQGTLVTVSSGGGSGGGSEVQLVESGGSLVQPGGSLRLSCAASGFTFDDYAMSWVRQVPGKGLEWVSSINWSGTHTDYADSVKGRFTISRNNANNTLYLQMNSLKSEDTAVYYCAKNWRDAGTTWFEKSGSAGQGTQVTVSSGTGGGGSGGGGSGGGGSEFDIQMTQSPSSLSASVGDRVTITCKASDHINNWLAWYQQKPGQAPKLLIYGATTLETGVPSRFSGSGSGTDYTLTISSLQPEDFATYYCQQSWNTPWTFGQGTKLEIKRLEIQNPDPAVYQLRDSKSSDKSVCLFTDFDSQTNVSQSKDSDVYITDKCVLDMRSMDFKSNSAVAWSNKSDFACANAFNNSIIPEDTFFPSSDVPCDVKLVEKSFETDTNLNFQNLSVIGFRILLLKVAGFNLLMTLRLWSSRAKRSGSGVKQTLNFDLLKLAGDVESNPGPTSMDWIWRILFLVGAATGAHSGPEVQLVESGGGLVQPGGSLRLSCAASGFASDYYIIGWFRQAPGKEREGVSCISSRYANTNYADSVKGRFTISRDNAKNTVYLQMNSLKPEDTAVYYCAADTRRYTCPDIATMHRNFDSWGQGTLVTVSSGSGGGGSGGGGSGGGGSFEQVQLQQPGAELVKPGASVKMSCKASGYAFSSYWINWMKQKPGQGLEWIGQIYPGDGDTNYNGKFKGRATLTADTSSSTAYMQLSSLTSEDSAVYFCARSITTVVGCAMDYWGQGTSVTVSSTREDLKNVFPPEVAVFEPSKAEIAHTQKATLVCLATGFYPDHVELSWWVNGKEVHSGVCTDPQPLKEQPALNDSRYCLSSRLRVSATFWQNPRNHFRCQVQFYGLSENDEWTQDRAKPVTQIVSAEAWGRADCGITSASYHQGVLSATILYEILLGKATLYAVLVSALVLMAMVKRKDSRGRAKRSGSGATNFSLLKQAGDVEENPGPSRGHMTEYKPTVRLATRDDVPRAVRTLAAAFADYPATRHTVDPDRHIERVTELQELFLTRVGLDIGKVWVADDGAAVAVWTTPESVEAGAVFAEIGPRMAELSGSRLAAQQQMEGLLAPHRPKEPAWFLATVGVSPDHQGKGLGSAVVLPGVEAAERAGVPAFLETSAPRNLPFYERLGFTVTADVEVPEGPRTWCMTRKPGA

SEQ ID NO: 16794 - protein, 1274 aa, Artificial Sequence
  Synthetic Polypeptide
MALPVTALLLPLALLLHAARPEVQLLESGGGLVQPGGSLRLSCAASGFTFSSYAMSWVRQAPGKGLEWVSSISGSGDYIYYADSVKGRFTISRDISKNTLYLQMNSLRAEDTAVYYCAKEGTGANSSLADYRGQGTLVTVSSGGGSGGGSEVQLVESGGSLVQPGGSLRLSCAASGFTFDDYAMSWVRQVPGKGLEWVSSINWSGTHTDYADSVKGRFTISRNNANNTLYLQMNSLKSEDTAVYYCAKNWRDAGTTWFEKSGSAGQGTQVTVSSGTGGGGSGGGGSGGGGSEFDIQMTQSPSSLSASVGDRVTITCKASDHINNWLAWYQQKPGQAPKLLIYGATTLETGVPSRFSGSGSGTDYTLTISSLQPEDFATYYCQQSWNTPWTFGQGTKLEIKRLEDLKNVFPPEVAVFEPSKAEIAHTQKATLVCLATGFYPDHVELSWWVNGKEVHSGVCTDPQPLKEQPALNDSRYCLSSRLRVSATFWQNPRNHFRCQVQFYGLSENDEWTQDRAKPVTQIVSAEAWGRADCGITSASYHQGVLSATILYEILLGKATLYAVLVSALVLMAMVKRKDSRGRAKRSGSGATNFSLLKQAGDVEENPGPTSMDWIWRILFLVGAATGAHSGPEVQLVESGGGLVQPGGSLRLSCAASGFASDYYIIGWFRQAPGKEREGVSCISSRYANTNYADSVKGRFTISRDNAKNTVYLQMNSLKPEDTAVYYCAADTRRYTCPDIATMHRNFDSWGQGTLVTVSSGSGGGGSGGGGSGGGGSFEQVQLQQPGAELVKPGASVKMSCKASGYAFSSYWINWMKQKPGQGLEWIGQIYPGDGDTNYNGKFKGRATLTADTSSSTAYMQLSSLTSEDSAVYFCARSITTVVGCAMDYWGQGTSVTVSSTRIQNPDPAVYQLRDSKSSDKSVCLFTDFDSQTNVSQSKDSDVYITDKCVLDMRSMDFKSNSAVAWSNKSDFACANAFNNSIIPEDTFFPSSDVPCDVKLVEKSFETDTNLNFQNLSVIGFRILLLKVAGFNLLMTLRLWSSRAKRSGSGVKQTLNFDLLKLAGDVESNPGPSRGHMTEYKPTVRLATRDDVPRAVRTLAAAFADYPATRHTVDPDRHIERVTELQELFLTRVGLDIGKVWVADDGAAVAVWTTPESVEAGAVFAEIGPRMAELSGSRLAAQQQMEGLLAPHRPKEPAWFLATVGVSPDHQGKGLGSAVVLPGVEAAERAGVPAFLETSAPRNLPFYERLGFTVTADVEVPEGPRTWCMTRKPGA

SEQ ID NO: 16795 - protein, 1274 aa, Artificial Sequence
  Synthetic Polypeptide
MALPVTALLLPLALLLHAARPEVQLLESGGGLVQPGGSLRLSCAASGFTFSSYAMSWVRQAPGKGLEWVSSISGSGDYIYYADSVKGRFTISRDISKNTLYLQMNSLRAEDTAVYYCAKEGTGANSSLADYRGQGTLVTVSSGGGSGGGSEVQLVESGGSLVQPGGSLRLSCAASGFTFDDYAMSWVRQVPGKGLEWVSSINWSGTHTDYADSVKGRFTISRNNANNTLYLQMNSLKSEDTAVYYCAKNWRDAGTTWFEKSGSAGQGTQVTVSSGTGGGGSGGGGSGGGGSEFDIQMTQSPSSLSASVGDRVTITCKASDHINNWLAWYQQKPGQAPKLLIYGATTLETGVPSRFSGSGSGTDYTLTISSLQPEDFATYYCQQSWNTPWTFGQGTKLEIKRLEDLKNVFPPEVAVFEPSEAEISHTQKATLVCLATGFYPDHVELSWWVNGKEVHSGVCTDPQPLKEQPALNDSRYCLSSRLRVSATFWQNPRNHFRCQVQFYGLSENDEWTQDRAKPVTQIVSAEAWGRADCGFTSESYQQGVLSATILYEILLGKATLYAVLVSALVLMAMVKRKDSRGRAKRSGSGATNFSLLKQAGDVEENPGPTSMDWIWRILFLVGAATGAHSGPEVQLVESGGGLVQPGGSLRLSCAASGFASDYYIIGWFRQAPGKEREGVSCISSRYANTNYADSVKGRFTISRDNAKNTVYLQMNSLKPEDTAVYYCAADTRRYTCPDIATMHRNFDSWGQGTLVTVSSGSGGGGSGGGGSGGGGSFEQVQLQQPGAELVKPGASVKMSCKASGYAFSSYWINWMKQKPGQGLEWIGQIYPGDGDTNYNGKFKGRATLTADTSSSTAYMQLSSLTSEDSAVYFCARSITTVVGCAMDYWGQGTSVTVSSTRIQNPDPAVYQLRDSKSSDKSVCLFTDFDSQTNVSQSKDSDVYITDKCVLDMRSMDFKSNSAVAWSNKSDFACANAFNNSIIPEDTFFPSPESSCDVKLVEKSFETDTNLNFQNLSVIGFRILLLKVAGFNLLMTLRLWSSRAKRSGSGVKQTLNFDLLKLAGDVESNPGPSRGHMTEYKPTVRLATRDDVPRAVRTLAAAFADYPATRHTVDPDRHIERVTELQELFLTRVGLDIGKVWVADDGAAVAVWTTPESVEAGAVFAEIGPRMAELSGSRLAAQQQMEGLLAPHRPKEPAWFLATVGVSPDHQGKGLGSAVVLPGVEAAERAGVPAFLETSAPRNLPFYERLGFTVTADVEVPEGPRTWCMTRKPGA

SEQ ID NO: 16796 - protein, 1041 aa, Artificial Sequence
  Synthetic Polypeptide
MALPVTALLLPLALLLHAARPEVQLLESGGGLVQPGGSLRLSCAASGFTFSSYAMSWVRQAPGKGLEWVSSISGSGDYIYYADSVKGRFTISRDISKNTLYLQMNSLRAEDTAVYYCAKEGTGANSSLADYRGQGTLVTVSSGGGSGGGSEVQLVESGGSLVQPGGSLRLSCAASGFTFDDYAMSWVRQVPGKGLEWVSSINWSGTHTDYADSVKGRFTISRNNANNTLYLQMNSLKSEDTAVYYCAKNWRDAGTTWFEKSGSAGQGTQVTVSSGTGGGGSGGGGSGGGGSEFDIQMTQSPSSLSASVGDRVTITCKASDHINNWLAWYQQKPGQAPKLLIYGATTLETGVPSRFSGSGSGTDYTLTISSLQPEDFATYYCQQSWNTPWTFGQGTKLEIKRLEDLKNVFPPEVAVFEPSEAEISHTQKATLVCLATGFYPDHVELSWWVNGKEVHSGVCTDPQPLKEQPALNDSRYCLSSRLRVSATFWQNPRNHFRCQVQFYGLSENDEWTQDRAKPVTQIVSAEAWGRADCGFTSESYQQGVLSATILYEILLGKATLYAVLVSALVLMAMVKRKDSRGRAKRSGSGATNFSLLKQAGDVEENPGPTSMDWIWRILFLVGAATGAHSGPEVQLVESGGGLVQPGGSLRLSCAASGFASDYYIIGWFRQAPGKEREGVSCISSRYANTNYADSVKGRFTISRDNAKNTVYLQMNSLKPEDTAVYYCAADTRRYTCPDIATMHRNFDSWGQGTLVTVSSGSGGGGSGGGGSGGGGSFEQVQLQQPGAELVKPGASVKMSCKASGYAFSSYWINWMKQKPGQGLEWIGQIYPGDGDTNYNGKFKGRATLTADTSSSTAYMQLSSLTSEDSAVYFCARSITTVVGCAMDYWGQGTSVTVSSTRIQNPDPAVYQLRDSKSSDKSVCLFTDFDSQTNVSQSKDSDVYITDKCVLDMRSMDFKSNSAVAWSNKSDFACANAFNNSIIPEDTFFPSPESSCDVKLVEKSFETDTNLNFQNLSVIGFRILLLKVAGFNLLMTLRLWSS

SEQ ID NO: 16797 - protein, 1266 aa, Artificial Sequence
  Synthetic Polypeptide
MALPVTALLLPLALLLHAARPEVQLLESGGGLVQPGGSLRLSCAASGFTFSSYAMSWVRQAPGKGLEWVSSISGSGDYIYYADSVKGRFTISRDISKNTLYLQMNSLRAEDTAVYYCAKEGTGANSSLADYRGQGTLVTVSSGGGSGGGSEVQLVESGGSLVQPGGSLRLSCAASGFTFDDYAMSWVRQVPGKGLEWVSSINWSGTHTDYADSVKGRFTISRNNANNTLYLQMNSLKSEDTAVYYCAKNWRDAGTTWFEKSGSAGQGTQVTVSSGTGGGGSGGGGSGGGGSEFDIQMTQSPSSLSASVGDRVTITCKASDHINNWLAWYQQKPGQAPKLLIYGATTLETGVPSRFSGSGSGTDYTLTISSLQPEDFATYYCQQSWNTPWTFGQGTKLEIKRLEDLKNVFPPEVAVFEPSEAEISHTQKATLVCLATGFYPDHVELSWWVNGKEVHSGVCTDPQPLKEQPALNDSRYCLSSRLRVSATFWQNPRNHFRCQVQFYGLSENDEWTQDRAKPVTQIVSAEAWGRADCGFTSESYQQGVLSATILYEILLGKATLYAVLVSALVLMAMVKRKDSRGRAKRSGSGATNFSLLKQAGDVEENPGPTSMDWIWRILFLVGAATGAHSGPEVQLVESGGGLVQPGGSLRLSCAASGFASDYYIIGWFRQAPGKEREGVSCISSRYANTNYADSVKGRFTISRDNAKNTVYLQMNSLKPEDTAVYYCAADTRRYTCPDIATMHRNFDSWGQGTLVTVSSGSGGGGSGGGGSGGGGSFEQVQLQQPGAELVKPGASVKMSCKASGYAFSSYWINWMKQKPGQGLEWIGQIYPGDGDTNYNGKFKGRATLTADTSSSTAYMQLSSLTSEDSAVYFCARSITTVVGCAMDYWGQGTSVTVSSTRIQNPDPAVYQLRDSKSSDKSVCLFTDFDSQTNVSQSKDSDVYITDKCVLDMRSMDFKSNSAVAWSNKSDFACANAFNNSIIPEDTFFPSPESSCDVKLVEKSFETDTNLNFQNLSVIGFRILLLKVAGFNLLMTLRLWSSRAKRSGSGVKQTLNFDLLKLAGDVESNPGPSRGGIHTMATYEVLCEVARKLGTDDREVVLFLLNVFIPQPTLAQLIGALRALKEEGRLTFPLLAECLFRAGRRDLLRDLLHLDPRFLERHLAGTMSYFSPYQLTVLHVDGELCARDIRSLIFLSKDTIGSRSTPQTFLHWVYCMENLDLLGPTDVDALMSMLRSLSRVDLQRQVQTLMGLHLSGPSHSQHYRHTP

SEQ ID NO: 16798 - protein, 1045 aa, Artificial Sequence
  Synthetic Polypeptide
MALPVTALLLPLALLLHAARPEVQLLESGGGLVQPGGSLRLSCAASGFTFSSYAMSWVRQAPGKGLEWVSSISGSGDYIYYADSVKGRFTISRDISKNTLYLQMNSLRAEDTAVYYCAKEGTGANSSLADYRGQGTLVTVSSGGGSGGGSEVQLVESGGSLVQPGGSLRLSCAASGFTFDDYAMSWVRQVPGKGLEWVSSINWSGTHTDYADSVKGRFTISRNNANNTLYLQMNSLKSEDTAVYYCAKNWRDAGTTWFEKSGSAGQGTQVTVSSGTGGGGSGGGGSGGGGSEFDIQMTQSPSSLSASVGDRVTITCKASDHINNWLAWYQQKPGQAPKLLIYGATTLETGVPSRFSGSGSGTDYTLTISSLQPEDFATYYCQQSWNTPWTFGQGTKLEIKRLEIQNPDPAVYQLRDSKSSDKSVCLFTDFDSQTNVSQSKDSDVYITDKCVLDMRSMDFKSNSAVAWSNKSDFACANAFNNSIIPEDTFFPSPESSCDVKLVEKSFETDTNLNFQNLSVIGFRILLLKVAGFNLLMTLRLWSSRAKRSGSGVKQTLNFDLLKLAGDVESNPGPTSMDWIWRILFLVGAATGAHSGPEVQLVESGGGLVQPGGSLRLSCAASGFASDYYIIGWFRQAPGKEREGVSCISSRYANTNYADSVKGRFTISRDNAKNTVYLQMNSLKPEDTAVYYCAADTRRYTCPDIATMHRNFDSWGQGTLVTVSSGSGGGGSGGGGSGGGGSFEQVQLQQPGAELVKPGASVKMSCKASGYAFSSYWINWMKQKPGQGLEWIGQIYPGDGDTNYNGKFKGRATLTADTSSSTAYMQLSSLTSEDSAVYFCARSITTVVGCAMDYWGQGTSVTVSSTREDLKNVFPPEVAVFEPSEAEISHTQKATLVCLATGFYPDHVELSWWVNGKEVHSGVCTDPQPLKEQPALNDSRYCLSSRLRVSATFWQNPRNHFRCQVQFYGLSENDEWTQDRAKPVTQIVSAEAWGRADCGFTSESYQQGVLSATILYEILLGKATLYAVLVSALVLMAMVKRKDSRG

SEQ ID NO: 16799 - protein, 1267 aa, Artificial Sequence
  Synthetic Polypeptide
MALPVTALLLPLALLLHAARPEVQLLESGGGLVQPGGSLRLSCAASGFTFSSYAMSWVRQAPGKGLEWVSSISGSGDYIYYADSVKGRFTISRDISKNTLYLQMNSLRAEDTAVYYCAKEGTGANSSLADYRGQGTLVTVSSGGGSGGGSEVQLVESGGSLVQPGGSLRLSCAASGFTFDDYAMSWVRQVPGKGLEWVSSINWSGTHTDYADSVKGRFTISRNNANNTLYLQMNSLKSEDTAVYYCAKNWRDAGTTWFEKSGSAGQGTQVTVSSGTGGGGSGGGGSGGGGSEFDIQMTQSPSSLSASVGDRVTITCKASDHINNWLAWYQQKPGQAPKLLIYGATTLETGVPSRFSGSGSGTDYTLTISSLQPEDFATYYCQQSWNTPWTFGQGTKLEIKRLEIQNPDPAVYQLRDSKSSDKSVCLFTDFDSQTNVSQSKDSDVYITDKCVLDMRSMDFKSNSAVAWSNKSDFACANAFNNSIIPEDTFFPSPESSCDVKLVEKSFETDTNLNFQNLSVIGFRILLLKVAGFNLLMTLRLWSSRAKRSGSGVKQTLNFDLLKLAGDVESNPGPTSMDWIWRILFLVGAATGAHSGPEVQLVESGGGLVQPGGSLRLSCAASGFASDYYIIGWFRQAPGKEREGVSCISSRYANTNYADSVKGRFTISRDNAKNTVYLQMNSLKPEDTAVYYCAADTRRYTCPDIATMHRNFDSWGQGTLVTVSSGSGGGGSGGGGSGGGGSFEQVQLQQPGAELVKPGASVKMSCKASGYAFSSYWINWMKQKPGQGLEWIGQIYPGDGDTNYNGKFKGRATLTADTSSSTAYMQLSSLTSEDSAVYFCARSITTVVGCAMDYWGQGTSVTVSSTREDLKNVFPPEVAVFEPSEAEISHTQKATLVCLATGFYPDHVELSWWVNGKEVHSGVCTDPQPLKEQPALNDSRYCLSSRLRVSATFWQNPRNHFRCQVQFYGLSENDEWTQDRAKPVTQIVSAEAWGRADCGFTSESYQQGVLSATILYEILLGKATLYAVLVSALVLMAMVKRKDSRGRAKRSGSGATNFSLLKQAGDVEENPGPSRGGIHTMATYEVLCEVARKLGTDDREVVLFLLNVFIPQPTLAQLIGALRALKEEGRLTFPLLAECLFRAGRRDLLRDLLHLDPRFLERHLAGTMSYFSPYQLTVLHVDGELCARDIRSLIFLSKDTIGSRSTPQTFLHWVYCMENLDLLGPTDVDALMSMLRSLSRVDLQRQVQTLMGLHLSGPSHSQHYRHTP

SEQ ID NO: 16800 - protein, 1274 aa, Artificial Sequence
  Synthetic Polypeptide
MALPVTALLLPLALLLHAARPEVQLLESGGGLVQPGGSLRLSCAASGFTFSSYAMSWVRQAPGKGLEWVSSISGSGDYIYYADSVKGRFTISRDISKNTLYLQMNSLRAEDTAVYYCAKEGTGANSSLADYRGQGTLVTVSSGGGSGGGSEVQLVESGGSLVQPGGSLRLSCAASGFTFDDYAMSWVRQVPGKGLEWVSSINWSGTHTDYADSVKGRFTISRNNANNTLYLQMNSLKSEDTAVYYCAKNWRDAGTTWFEKSGSAGQGTQVTVSSGTGGGGSGGGGSGGGGSEFDIQMTQSPSSLSASVGDRVTITCKASDHINNWLAWYQQKPGQAPKLLIYGATTLETGVPSRFSGSGSGTDYTLTISSLQPEDFATYYCQQSWNTPWTFGQGTKLEIKRLEDLKNVFPPEVAVFEPSEAEISHTQKATLVCLATGFYPDHVELSWWVNGKEVHSGVSTDPQPLKEQPALNDSRYCLSSRLRVSATFWQNPRNHFRCQVQFYGLSENDEWTQDRAKPVTQIVSAEAWGRADCGFTSESYQQGVLSATILYEILLGKATLYAVLVSALVLMAMVKRKDSRGRAKRSGSGATNFSLLKQAGDVEENPGPTSMDWIWRILFLVGAATGAHSGPEVQLVESGGGLVQPGGSLRLSCAASGFASDYYIIGWFRQAPGKEREGVSCISSRYANTNYADSVKGRFTISRDNAKNTVYLQMNSLKPEDTAVYYCAADTRRYTCPDIATMHRNFDSWGQGTLVTVSSGSGGGGSGGGGSGGGGSFEQVQLQQPGAELVKPGASVKMSCKASGYAFSSYWINWMKQKPGQGLEWIGQIYPGDGDTNYNGKFKGRATLTADTSSSTAYMQLSSLTSEDSAVYFCARSITTVVGCAMDYWGQGTSVTVSSTRIQNPDPAVYQLRDSKSSDKSVCLFTDFDSQTNVSQSKDSDVYITDKTVLDMRSMDFKSNSAVAWSNKSDFACANAFNNSIIPEDTFFPSPESSCDVKLVEKSFETDTNLNFQNLSVIGFRILLLKVAGFNLLMTLRLWSSRAKRSGSGVKQTLNFDLLKLAGDVESNPGPSRGHMTEYKPTVRLATRDDVPRAVRTLAAAFADYPATRHTVDPDRHIERVTELQELFLTRVGLDIGKVWVADDGAAVAVWTTPESVEAGAVFAEIGPRMAELSGSRLAAQQQMEGLLAPHRPKEPAWFLATVGVSPDHQGKGLGSAVVLPGVEAAERAGVPAFLETSAPRNLPFYERLGFTVTADVEVPEGPRTWCMTRKPGA

SEQ ID NO: 16801 - protein, 1356 aa, Artificial Sequence
  Synthetic Polypeptide
MALPVTALLLPLALLLHAARPEVQLLESGGGLVQPGGSLRLSCAASGFTFSSYAMSWVRQAPGKGLEWVSSISGSGDYIYYADSVKGRFTISRDISKNTLYLQMNSLRAEDTAVYYCAKEGTGANSSLADYRGQGTLVTVSSGGGSGGGSEVQLVESGGSLVQPGGSLRLSCAASGFTFDDYAMSWVRQVPGKGLEWVSSINWSGTHTDYADSVKGRFTISRNNANNTLYLQMNSLKSEDTAVYYCAKNWRDAGTTWFEKSGSAGQGTQVTVSSGTGGGGSGGGGSGGGGSEFDIQMTQSPSSLSASVGDRVTITCKASDHINNWLAWYQQKPGQAPKLLIYGATTLETGVPSRFSGSGSGTDYTLTISSLQPEDFATYYCQQSWNTPWTFGQGTKLEIKRLEDLKNVFPPEVAVFEPSEAEISHTQKATLVCLATGFYPDHVELSWWVNGKEVHSGVSTDPQPLKEQPALNDSRYCLSSRLRVSATFWQNPRNHFRCQVQFYGLSENDEWTQDRAKPVTQIVSAEAWGRADCGFTSESYQQGVLSATILYEILLGKATLYAVLVSALVLMAMVKRKDSRGRAKRSGSGATNFSLLKQAGDVEENPGPTSMDWIWRILFLVGAATGAHSGPEVQLVESGGGLVQPGGSLRLSCAASGFASDYYIIGWFRQAPGKEREGVSCISSRYANTNYADSVKGRFTISRDNAKNTVYLQMNSLKPEDTAVYYCAADTRRYTCPDIATMHRNFDSWGQGTLVTVSSGSGGGGSGGGGSGGGGSFEQVQLQQPGAELVKPGASVKMSCKASGYAFSSYWINWMKQKPGQGLEWIGQIYPGDGDTNYNGKFKGRATLTADTSSSTAYMQLSSLTSEDSAVYFCARSITTVVGCAMDYWGQGTSVTVSSTREQKLISEEDGSGTPFPSLAPPIMLLVDGKQQMVVVCLVLDVAPPGLDSPIWFSAGNGSALDAFTYGPSPATDGTWTNLAHLSLPSEELASWEPLVCHTGPGAEGHSRSTQPMHLSGEASTARTCPQEPLRGTPGGALWLGVLRLLLFKLLLFDLLLTCSCLCDPAGPLPSPATTTRLRALGSHRLHPATETGGREATSSPRPQPRDRRWGDTPPGRKPGSPVRAKRSGSGVKQTLNFDLLKLAGDVESNPGPSRGHMTEYKPTVRLATRDDVPRAVRTLAAAFADYPATRHTVDPDRHIERVTELQELFLTRVGLDIGKVWVADDGAAVAVWTTPESVEAGAVFAEIGPRMAELSGSRLAAQQQMEGLLAPHRPKEPAWFLATVGVSPDHQGKGLGSAVVLPGVEAAERAGVPAFLETSAPRNLPFYERLGFTVTADVEVPEGPRTWCMTRKPGA

SEQ ID NO: 16802 - protein, 1311 aa, Artificial Sequence
  Synthetic Polypeptide
MALPVTALLLPLALLLHAARPEVQLLESGGGLVQPGGSLRLSCAASGFTFSSYAMSWVRQAPGKGLEWVSSISGSGDYIYYADSVKGRFTISRDISKNTLYLQMNSLRAEDTAVYYCAKEGTGANSSLADYRGQGTLVTVSSGGGSGGGSEVQLVESGGSLVQPGGSLRLSCAASGFTFDDYAMSWVRQVPGKGLEWVSSINWSGTHTDYADSVKGRFTISRNNANNTLYLQMNSLKSEDTAVYYCAKNWRDAGTTWFEKSGSAGQGTQVTVSSGTGGGGSGGGGSGGGGSEFDIQMTQSPSSLSASVGDRVTITCKASDHINNWLAWYQQKPGQAPKLLIYGATTLETGVPSRFSGSGSGTDYTLTISSLQPEDFATYYCQQSWNTPWTFGQGTKLEIKRLEGKPIPNPLLGLDSTGSGDKQLDADVSPKPTIFLPSIAETKLQKAGTYLCLLEKFFPDVIKIHWQEKKSNTILGSQEGNTMKTNDTYMKFSWLTVPEKSLDKEHRCIVRHENNKNGVDQEIIFPPIKTDVITMDPKDNCSKDANDTLLLQLTNTSAYYMYLLLLLKSVVYFAIITCCLLRRTAFCCNGEKSRAKRSGSGATNFSLLKQAGDVEENPGPTSMDWIWRILFLVGAATGAHSGPEVQLVESGGGLVQPGGSLRLSCAASGFASDYYIIGWFRQAPGKEREGVSCISSRYANTNYADSVKGRFTISRDNAKNTVYLQMNSLKPEDTAVYYCAADTRRYTCPDIATMHRNFDSWGQGTLVTVSSGSGGGGSGGGGSGGGGSFEQVQLQQPGAELVKPGASVKMSCKASGYAFSSYWINWMKQKPGQGLEWIGQIYPGDGDTNYNGKFKGRATLTADTSSSTAYMQLSSLTSEDSAVYFCARSITTVVGCAMDYWGQGTSVTVSSTREQKLISEEDGSGSQPHTKPSVFVMKNGTNVACLVKEFYPKDIRINLVSSKKITEFDPAIVISPSGKYNAVKLGKYEDSNSVTCSVQHDNKTVHSTDFEVKTDSTDHVKPKETENTKQPSKSCHKPKAIVHTEKVNMMSLTVLGLRMLFAKTVAVNFLLTAKLFFLRAKRSGSGVKQTLNFDLLKLAGDVESNPGPSRGHMTEYKPTVRLATRDDVPRAVRTLAAAFADYPATRHTVDPDRHIERVTELQELFLTRVGLDIGKVWVADDGAAVAVWTTPESVEAGAVFAEIGPRMAELSGSRLAAQQQMEGLLAPHRPKEPAWFLATVGVSPDHQGKGLGSAVVLPGVEAAERAGVPAFLETSAPRNLPFYERLGFTVTADVEVPEGPRTWCMTRKPGA

SEQ ID NO: 16803 - protein, 1049 aa, Artificial Sequence
  Synthetic Polypeptide
MALPVTALLLPLALLLHAARPEVQLLESGGGLVQPGGSLRLSCAASGFTFSSYAMSWVRQAPGKGLEWVSSISGSGDYIYYADSVKGRFTISRDISKNTLYLQMNSLRAEDTAVYYCAKEGTGANSSLADYRGQGTLVTVSSGGGSGGGSEVQLVESGGSLVQPGGSLRLSCAASGFTFDDYAMSWVRQVPGKGLEWVSSINWSGTHTDYADSVKGRFTISRNNANNTLYLQMNSLKSEDTAVYYCAKNWRDAGTTWFEKSGSAGQGTQVTVSSGTGGGGSGGGGSGGGGSEFDIQMTQSPSSLSASVGDRVTITCKASDHINNWLAWYQQKPGQAPKLLIYGATTLETGVPSRFSGSGSGTDYTLTISSLQPEDFATYYCQQSWNTPWTFGQGTKLEIKRLESQPHTKPSVFVMKNGTNVACLVKEFYPKDIRINLVSSKKITEFDPAIVISPSGKYNAVKLGKYEDSNSVTCSVQHDNKTVHSTDFEVKTDSTDHVKPKETENTKQPSKSCHKPKAIVHTEKVNMMSLTVLGLRMLFAKTVAVNFLLTAKLFFLRAKRSGSGATNFSLLKQAGDVEENPGPTSMDWIWRILFLVGAATGAHSGPEVQLVESGGGLVQPGGSLRLSCAASGFASDYYIIGWFRQAPGKEREGVSCISSRYANTNYADSVKGRFTISRDNAKNTVYLQMNSLKPEDTAVYYCAADTRRYTCPDIATMHRNFDSWGQGTLVTVSSGSGGGGSGGGGSGGGGSFEQVQLQQPGAELVKPGASVKMSCKASGYAFSSYWINWMKQKPGQGLEWIGQIYPGDGDTNYNGKFKGRATLTADTSSSTAYMQLSSLTSEDSAVYFCARSITTVVGCAMDYWGQGTSVTVSSTRDKQLDADVSPKPTIFLPSIAETKLQKAGTYLCLLEKFFPDVIKIHWQEKKSNTILGSQEGNTMKTNDTYMKFSWLTVPEKSLDKEHRCIVRHENNKNGVDQEIIFPPIKTDVITMDPKDNCSKDANDTLLLQLTNTSAYYMYLLLLLKSVVYFAIITCCLLRRTAFCCNGEKS

SEQ ID NO: 16804 - protein, 1451 aa, Artificial Sequence
  Synthetic Polypeptide
MALPVTALLLPLALLLHAARPEVQLLESGGGLVQPGGSLRLSCAASGFTFSSYAMSWVRQAPGKGLEWVSSISGSGDYIYYADSVKGRFTISRDISKNTLYLQMNSLRAEDTAVYYCAKEGTGANSSLADYRGQGTLVTVSSGGGSGGGSEVQLVESGGSLVQPGGSLRLSCAASGFTFDDYAMSWVRQVPGKGLEWVSSINWSGTHTDYADSVKGRFTISRNNANNTLYLQMNSLKSEDTAVYYCAKNWRDAGTTWFEKSGSAGQGTQVTVSSGTGGGGSGGGGSGGGGSEFDIQMTQSPSSLSASVGDRVTITCKASDHINNWLAWYQQKPGQAPKLLIYGATTLETGVPSRFSGSGSGTDYTLTISSLQPEDFATYYCQQSWNTPWTFGQGTKLEIKRGQPKANPTVTLFPPSSEELQANKATLVCLISDFYPGAVTVAWKADGSPVKAGVETTKPSKQSNNKYAASSYLSLTPEQWKSHRSYSCQVTHEGSTVEKTVAPTECSGSQSFGLLDPKLCYLLDGILFIYGVILTALFLRVKFSRSADAPAYQQGQNQLYNELNLGRREEYDVLDKRRGRDPEMGGKPQRRKNPQEGLYNELQKDKMAEAYSEIGMKGERRRGKGHDGLYQGLSTATKDTYDALHMQALPPRRAKRSGSGATNFSLLKQAGDVEENPGPTSMDWIWRILFLVGAATGAHSGPEVQLVESGGGLVQPGGSLRLSCAASGFASDYYIIGWFRQAPGKEREGVSCISSRYANTNYADSVKGRFTISRDNAKNTVYLQMNSLKPEDTAVYYCAADTRRYTCPDIATMHRNFDSWGQGTLVTVSSGSGGGGSGGGGSGGGGSFEQVQLQQPGAELVKPGASVKMSCKASGYAFSSYWINWMKQKPGQGLEWIGQIYPGDGDTNYNGKFKGRATLTADTSSSTAYMQLSSLTSEDSAVYFCARSITTVVGCAMDYWGQGTSVTVSSASTKGPSVFPLAPSSKSTSGGTAALGCLVKDYFPEPVTVSWNSGALTSGVHTFPAVLQSSGLYSLSSVVTVPSSSLGTQTYICNVNHKPSNTKVDKRVEPKSCGTQSFGLLDPKLCYLLDGILFIYGVILTALFLRVKFSRSADAPAYQQGQNQLYNELNLGRREEYDVLDKRRGRDPEMGGKPQRRKNPQEGLYNELQKDKMAEAYSEIGMKGERRRGKGHDGLYQGLSTATKDTYDALHMQALPPRRAKRSGSGVKQTLNFDLLKLAGDVESNPGPSRGHMTEYKPTVRLATRDDVPRAVRTLAAAFADYPATRHTVDPDRHIERVTELQELFLTRVGLDIGKVWVADDGAAVAVWTTPESVEAGAVFAEIGPRMAELSGSRLAAQQQMEGLLAPHRPKEPAWFLATVGVSPDHQGKGLGSAVVLPGVEAAERAGVPAFLETSAPRNLPFYERLGFTVTADVEVPEGPRTWCMTRKPGA

SEQ ID NO: 16805 - protein, 1237 aa, Artificial Sequence
  Synthetic Polypeptide
MALPVTALLLPLALLLHAARPEVQLLESGGGLVQPGGSLRLSCAASGFTFSSYAMSWVRQAPGKGLEWVSSISGSGDYIYYADSVKGRFTISRDISKNTLYLQMNSLRAEDTAVYYCAKEGTGANSSLADYRGQGTLVTVSSGGGSGGGSEVQLVESGGSLVQPGGSLRLSCAASGFTFDDYAMSWVRQVPGKGLEWVSSINWSGTHTDYADSVKGRFTISRNNANNTLYLQMNSLKSEDTAVYYCAKNWRDAGTTWFEKSGSAGQGTQVTVSSGTGGGGSGGGGSGGGGSEFDIQMTQSPSSLSASVGDRVTITCKASDHINNWLAWYQQKPGQAPKLLIYGATTLETGVPSRFSGSGSGTDYTLTISSLQPEDFATYYCQQSWNTPWTFGQGTKLEIKRLEDLKNVFPPEVAVFEPSEAEISHTQKATLVCLATGFYPDHVELSWWVNGKEVHSGVSTDPQPLKEQPALNDSRYCLSSRLRVSATFWQNPRNHFRCQVQFYGLSENDEWTQDRAKPVTQIVSAEAWGRADCGSQSFGLLDPKLCYLLDGILFIYGVILTALFLRVKFSRSADAPAYQQGQNQLYNELNLGRREEYDVLDKRRGRDPEMGGKPQRRKNPQEGLYNELQKDKMAEAYSEIGMKGERRRGKGHDGLYQGLSTATKDTYDALHMQALPPRRAKRSGSGATNFSLLKQAGDVEENPGPTSMDWIWRILFLVGAATGAHSGPEVQLVESGGGLVQPGGSLRLSCAASGFASDYYIIGWFRQAPGKEREGVSCISSRYANTNYADSVKGRFTISRDNAKNTVYLQMNSLKPEDTAVYYCAADTRRYTCPDIATMHRNFDSWGQGTLVTVSSGSGGGGSGGGGSGGGGSFEQVQLQQPGAELVKPGASVKMSCKASGYAFSSYWINWMKQKPGQGLEWIGQIYPGDGDTNYNGKFKGRATLTADTSSSTAYMQLSSLTSEDSAVYFCARSITTVVGCAMDYWGQGTSVTVSSTRIQNPDPAVYQLRDSKSSDKSVCLFTDFDSQTNVSQSKDSDVYITDKTVLDMRSMDFKSNSAVAWSNKSDFACANAFNNSIIPEDTFFPSPESSCGTQSFGLLDPKLCYLLDGILFIYGVILTALFLRVKFSRSADAPAYQQGQNQLYNELNLGRREEYDVLDKRRGRDPEMGGKPQRRKNPQEGLYNELQKDKMAEAYSEIGMKGERRRGKGHDGLYQGLSTATKDTYDALHMQALPPR

SEQ ID NO: 16806 - protein, 1237 aa, Artificial Sequence
  Synthetic Polypeptide
MALPVTALLLPLALLLHAARPEVQLLESGGGLVQPGGSLRLSCAASGFTFSSYAMSWVRQAPGKGLEWVSSISGSGDYIYYADSVKGRFTISRDISKNTLYLQMNSLRAEDTAVYYCAKEGTGANSSLADYRGQGTLVTVSSGGGSGGGSEVQLVESGGSLVQPGGSLRLSCAASGFTFDDYAMSWVRQVPGKGLEWVSSINWSGTHTDYADSVKGRFTISRNNANNTLYLQMNSLKSEDTAVYYCAKNWRDAGTTWFEKSGSAGQGTQVTVSSGTGGGGSGGGGSGGGGSEFDIQMTQSPSSLSASVGDRVTITCKASDHINNWLAWYQQKPGQAPKLLIYGATTLETGVPSRFSGSGSGTDYTLTISSLQPEDFATYYCQQSWNTPWTFGQGTKLEIKRLEDLKNVFPPEVAVFEPSKAEIAHTQKATLVCLATGFYPDHVELSWWVNGKEVHSGVCTDPQPLKEQPALNDSRYCLSSRLRVSATFWQNPRNHFRCQVQFYGLSENDEWTQDRAKPVTQIVSAEAWGRADCGSQSFGLLDPKLCYLLDGILFIYGVILTALFLRVKFSRSADAPAYQQGQNQLYNELNLGRREEYDVLDKRRGRDPEMGGKPQRRKNPQEGLYNELQKDKMAEAYSEIGMKGERRRGKGHDGLYQGLSTATKDTYDALHMQALPPRRAKRSGSGATNFSLLKQAGDVEENPGPTSMDWIWRILFLVGAATGAHSGPEVQLVESGGGLVQPGGSLRLSCAASGFASDYYIIGWFRQAPGKEREGVSCISSRYANTNYADSVKGRFTISRDNAKNTVYLQMNSLKPEDTAVYYCAADTRRYTCPDIATMHRNFDSWGQGTLVTVSSGSGGGGSGGGGSGGGGSFEQVQLQQPGAELVKPGASVKMSCKASGYAFSSYWINWMKQKPGQGLEWIGQIYPGDGDTNYNGKFKGRATLTADTSSSTAYMQLSSLTSEDSAVYFCARSITTVVGCAMDYWGQGTSVTVSSTRIQNPDPAVYQLRDSKSSDKSVCLFTDFDSQTNVSQSKDSDVYITDKCVLDMRSMDFKSNSAVAWSNKSDFACANAFNNSIIPEDTFFPSSDVPCGTQSFGLLDPKLCYLLDGILFIYGVILTALFLRVKFSRSADAPAYQQGQNQLYNELNLGRREEYDVLDKRRGRDPEMGGKPQRRKNPQEGLYNELQKDKMAEAYSEIGMKGERRRGKGHDGLYQGLSTATKDTYDALHMQALPPR

SEQ ID NO: 16807 - protein, 1308 aa, Artificial Sequence
  Synthetic Polypeptide
MALPVTALLLPLALLLHAARPEVQLLESGGGLVQPGGSLRLSCAASGFTFSSYAMSWVRQAPGKGLEWVSSISGSGDYIYYADSVKGRFTISRDISKNTLYLQMNSLRAEDTAVYYCAKEGTGANSSLADYRGQGTLVTVSSGGGSGGGSEVQLVESGGSLVQPGGSLRLSCAASGFTFDDYAMSWVRQVPGKGLEWVSSINWSGTHTDYADSVKGRFTISRNNANNTLYLQMNSLKSEDTAVYYCAKNWRDAGTTWFEKSGSAGQGTQVTVSSGTGGGGSGGGGSGGGGSEFDIQMTQSPSSLSASVGDRVTITCKASDHINNWLAWYQQKPGQAPKLLIYGATTLETGVPSRFSGSGSGTDYTLTISSLQPEDFATYYCQQSWNTPWTFGQGTKLEIKRLEGKPIPNPLLGLDSTGSGEDLKNVFPPEVAVFEPSEAEISHTQKATLVCLATGFYPDHVELSWWVNGKEVHSGVSTDPQPLKEQPALNDSRYCLSSRLRVSATFWQNPRNHFRCQVQFYGLSENDEWTQDRAKPVTQIVSAEAWGRADCGSQSFGLLDPKLCYLLDGILFIYGVILTALFLRVKFSRSADAPAYQQGQNQLYNELNLGRREEYDVLDKRRGRDPEMGGKPQRRKNPQEGLYNELQKDKMAEAYSEIGMKGERRRGKGHDGLYQGLSTATKDTYDALHMQALPPRRAKRSGSGATNFSLLKQAGDVEENPGPTSMDWIWRILFLVGAATGAHSGPEVQLVESGGGLVQPGGSLRLSCAASGFASDYYIIGWFRQAPGKEREGVSCISSRYANTNYADSVKGRFTISRDNAKNTVYLQMNSLKPEDTAVYYCAADTRRYTCPDIATMHRNFDSWGQGTLVTVSSGSGGGGSGGGGSGGGGSFEQVQLQQPGAELVKPGASVKMSCKASGYAFSSYWINWMKQKPGQGLEWIGQIYPGDGDTNYNGKFKGRATLTADTSSSTAYMQLSSLTSEDSAVYFCARSITTVVGCAMDYWGQGTSVTVSSTREQKLISEEDGSGIQNPDPAVYQLRDSKSSDKSVCLFTDFDSQTNVSQSKDSDVYITDKTVLDMRSMDFKSNSAVAWSNKSDFACANAFNNSIIPEDTFFPSPESSCGTQSFGLLDPKLCYLLDGILFIYGVILTALFLRSKRSRLLHSDYMNMTPRRPGPTRKHYQPYAPPRDFAAYRSRVKFSRSADAPAYQQGQNQLYNELNLGRREEYDVLDKRRGRDPEMGGKPQRRKNPQEGLYNELQKDKMAEAYSEIGMKGERRRGKGHDGLYQGLSTATKDTYDALHMQALPPR

SEQ ID NO: 16808 - protein, 1349 aa, Artificial Sequence
  Synthetic Polypeptide
MALPVTALLLPLALLLHAARPEVQLLESGGGLVQPGGSLRLSCAASGFTFSSYAMSWVRQAPGKGLEWVSSISGSGDYIYYADSVKGRFTISRDISKNTLYLQMNSLRAEDTAVYYCAKEGTGANSSLADYRGQGTLVTVSSGGGSGGGSEVQLVESGGSLVQPGGSLRLSCAASGFTFDDYAMSWVRQVPGKGLEWVSSINWSGTHTDYADSVKGRFTISRNNANNTLYLQMNSLKSEDTAVYYCAKNWRDAGTTWFEKSGSAGQGTQVTVSSGTGGGGSGGGGSGGGGSEFDIQMTQSPSSLSASVGDRVTITCKASDHINNWLAWYQQKPGQAPKLLIYGATTLETGVPSRFSGSGSGTDYTLTISSLQPEDFATYYCQQSWNTPWTFGQGTKLEIKRLEGKPIPNPLLGLDSTGSGEDLKNVFPPEVAVFEPSEAEISHTQKATLVCLATGFYPDHVELSWWVNGKEVHSGVSTDPQPLKEQPALNDSRYCLSSRLRVSATFWQNPRNHFRCQVQFYGLSENDEWTQDRAKPVTQIVSAEAWGRADCGSQSFGLLDPKLCYLLDGILFIYGVILTALFLRSKRSRLLHSDYMNMTPRRPGPTRKHYQPYAPPRDFAAYRSRVKFSRSADAPAYQQGQNQLYNELNLGRREEYDVLDKRRGRDPEMGGKPQRRKNPQEGLYNELQKDKMAEAYSEIGMKGERRRGKGHDGLYQGLSTATKDTYDALHMQALPPRRAKRSGSGATNFSLLKQAGDVEENPGPTSMDWIWRILFLVGAATGAHSGPEVQLVESGGGLVQPGGSLRLSCAASGFASDYYIIGWFRQAPGKEREGVSCISSRYANTNYADSVKGRFTISRDNAKNTVYLQMNSLKPEDTAVYYCAADTRRYTCPDIATMHRNFDSWGQGTLVTVSSGSGGGGSGGGGSGGGGSFEQVQLQQPGAELVKPGASVKMSCKASGYAFSSYWINWMKQKPGQGLEWIGQIYPGDGDTNYNGKFKGRATLTADTSSSTAYMQLSSLTSEDSAVYFCARSITTVVGCAMDYWGQGTSVTVSSTREQKLISEEDGSGIQNPDPAVYQLRDSKSSDKSVCLFTDFDSQTNVSQSKDSDVYITDKTVLDMRSMDFKSNSAVAWSNKSDFACANAFNNSIIPEDTFFPSPESSCGTQSFGLLDPKLCYLLDGILFIYGVILTALFLRSKRSRLLHSDYMNMTPRRPGPTRKHYQPYAPPRDFAAYRSRVKFSRSADAPAYQQGQNQLYNELNLGRREEYDVLDKRRGRDPEMGGKPQRRKNPQEGLYNELQKDKMAEAYSEIGMKGERRRGKGHDGLYQGLSTATKDTYDALHMQALPPR

SEQ ID NO: 16809 - protein, 1310 aa, Artificial Sequence
  Synthetic Polypeptide
MALPVTALLLPLALLLHAARPEVQLLESGGGLVQPGGSLRLSCAASGFTFSSYAMSWVRQAPGKGLEWVSSISGSGDYIYYADSVKGRFTISRDISKNTLYLQMNSLRAEDTAVYYCAKEGTGANSSLADYRGQGTLVTVSSGGGSGGGSEVQLVESGGSLVQPGGSLRLSCAASGFTFDDYAMSWVRQVPGKGLEWVSSINWSGTHTDYADSVKGRFTISRNNANNTLYLQMNSLKSEDTAVYYCAKNWRDAGTTWFEKSGSAGQGTQVTVSSGTGGGGSGGGGSGGGGSEFDIQMTQSPSSLSASVGDRVTITCKASDHINNWLAWYQQKPGQAPKLLIYGATTLETGVPSRFSGSGSGTDYTLTISSLQPEDFATYYCQQSWNTPWTFGQGTKLEIKRLEGKPIPNPLLGLDSTGSGEDLKNVFPPEVAVFEPSEAEISHTQKATLVCLATGFYPDHVELSWWVNGKEVHSGVSTDPQPLKEQPALNDSRYCLSSRLRVSATFWQNPRNHFRCQVQFYGLSENDEWTQDRAKPVTQIVSAEAWGRADCGSQSFGLLDPKLCYLLDGILFIYGVILTALFLRVKFSRSADAPAYQQGQNQLYNELNLGRREEYDVLDKRRGRDPEMGGKPQRRKNPQEGLYNELQKDKMAEAYSEIGMKGERRRGKGHDGLYQGLSTATKDTYDALHMQALPPRRAKRSGSGATNFSLLKQAGDVEENPGPTSMDWIWRILFLVGAATGAHSGPEVQLVESGGGLVQPGGSLRLSCAASGFASDYYIIGWFRQAPGKEREGVSCISSRYANTNYADSVKGRFTISRDNAKNTVYLQMNSLKPEDTAVYYCAADTRRYTCPDIATMHRNFDSWGQGTLVTVSSGSGGGGSGGGGSGGGGSFEQVQLQQPGAELVKPGASVKMSCKASGYAFSSYWINWMKQKPGQGLEWIGQIYPGDGDTNYNGKFKGRATLTADTSSSTAYMQLSSLTSEDSAVYFCARSITTVVGCAMDYWGQGTSVTVSSTREQKLISEEDLGSGIQNPDPAVYQLRDSKSSDKSVCLFTDFDSQTNVSQSKDSDVYITDKTVLDMRSMDFKSNSAVAWSNKSDFACANAFNNSIIPEDTFFPSPESSCGTQSFGLLDPKLCYLLDGILFIYGVILTALFLKRGRKKLLYIFKQPFMRPVQTTQEEDGCSCRFPEEEEGGCELRVKFSRSADAPAYQQGQNQLYNELNLGRREEYDVLDKRRGRDPEMGGKPQRRKNPQEGLYNELQKDKMAEAYSEIGMKGERRRGKGHDGLYQGLSTATKDTYDALHMQALPPR

SEQ ID NO: 16810 - protein, 1352 aa, Artificial Sequence
  Synthetic Polypeptide
MALPVTALLLPLALLLHAARPEVQLLESGGGLVQPGGSLRLSCAASGFTFSSYAMSWVRQAPGKGLEWVSSISGSGDYIYYADSVKGRFTISRDISKNTLYLQMNSLRAEDTAVYYCAKEGTGANSSLADYRGQGTLVTVSSGGGSGGGSEVQLVESGGSLVQPGGSLRLSCAASGFTFDDYAMSWVRQVPGKGLEWVSSINWSGTHTDYADSVKGRFTISRNNANNTLYLQMNSLKSEDTAVYYCAKNWRDAGTTWFEKSGSAGQGTQVTVSSGTGGGGSGGGGSGGGGSEFDIQMTQSPSSLSASVGDRVTITCKASDHINNWLAWYQQKPGQAPKLLIYGATTLETGVPSRFSGSGSGTDYTLTISSLQPEDFATYYCQQSWNTPWTFGQGTKLEIKRLEGKPIPNPLLGLDSTGSGEDLKNVFPPEVAVFEPSEAEISHTQKATLVCLATGFYPDHVELSWWVNGKEVHSGVSTDPQPLKEQPALNDSRYCLSSRLRVSATFWQNPRNHFRCQVQFYGLSENDEWTQDRAKPVTQIVSAEAWGRADCGSQSFGLLDPKLCYLLDGILFIYGVILTALFLKRGRKKLLYIFKQPFMRPVQTTQEEDGCSCRFPEEEEGGCELRVKFSRSADAPAYQQGQNQLYNELNLGRREEYDVLDKRRGRDPEMGGKPQRRKNPQEGLYNELQKDKMAEAYSEIGMKGERRRGKGHDGLYQGLSTATKDTYDALHMQALPPRRAKRSGSGATNFSLLKQAGDVEENPGPTSMDWIWRILFLVGAATGAHSGPEVQLVESGGGLVQPGGSLRLSCAASGFASDYYIIGWFRQAPGKEREGVSCISSRYANTNYADSVKGRFTISRDNAKNTVYLQMNSLKPEDTAVYYCAADTRRYTCPDIATMHRNFDSWGQGTLVTVSSGSGGGGSGGGGSGGGGSFEQVQLQQPGAELVKPGASVKMSCKASGYAFSSYWINWMKQKPGQGLEWIGQIYPGDGDTNYNGKFKGRATLTADTSSSTAYMQLSSLTSEDSAVYFCARSITTVVGCAMDYWGQGTSVTVSSTREQKLISEEDLGSGIQNPDPAVYQLRDSKSSDKSVCLFTDFDSQTNVSQSKDSDVYITDKTVLDMRSMDFKSNSAVAWSNKSDFACANAFNNSIIPEDTFFPSPESSCGTQSFGLLDPKLCYLLDGILFIYGVILTALFLKRGRKKLLYIFKQPFMRPVQTTQEEDGCSCRFPEEEEGGCELRVKFSRSADAPAYQQGQNQLYNELNLGRREEYDVLDKRRGRDPEMGGKPQRRKNPQEGLYNELQKDKMAEAYSEIGMKGERRRGKGHDGLYQGLSTATKDTYDALHMQALPPR

SEQ ID NO: 16811 - protein, 1242 aa, Artificial Sequence
  Synthetic Polypeptide
MALPVTALLLPLALLLHAARPEVQLLESGGGLVQPGGSLRLSCAASGFTFSSYAMSWVRQAPGKGLEWVSSISGSGDYIYYADSVKGRFTISRDISKNTLYLQMNSLRAEDTAVYYCAKEGTGANSSLADYRGQGTLVTVSSGGGSGGGSEVQLVESGGSLVQPGGSLRLSCAASGFTFDDYAMSWVRQVPGKGLEWVSSINWSGTHTDYADSVKGRFTISRNNANNTLYLQMNSLKSEDTAVYYCAKNWRDAGTTWFEKSGSAGQGTQVTVSSGTGGGGSGGGGSGGGGSEFDIQMTQSPSSLSASVGDRVTITCKASDHINNWLAWYQQKPGQAPKLLIYGATTLETGVPSRFSGSGSGTDYTLTISSLQPEDFATYYCQQSWNTPWTFGQGTKLEIKRLEQSFGLLDPKLCYLLDGILFIYGVILTALFLRVKFSRSADAPAYQQGQNQLYNELNLGRREEYDVLDKRRGRDPEMGGKPQRRKNPQEGLYNELQKDKMAEAYSEIGMKGERRRGKGHDGLYQGLSTATKDTYDALHMQALPPRRAKRSGSGATNFSLLKQAGDVEENPGPTSMDWIWRILFLVGAATGAHSGPEVQLVESGGGLVQPGGSLRLSCAASGFASDYYIIGWFRQAPGKEREGVSCISSRYANTNYADSVKGRFTISRDNAKNTVYLQMNSLKPEDTAVYYCAADTRRYTCPDIATMHRNFDSWGQGTLVTVSSGSGGGGSGGGGSGGGGSFEQVQLQQPGAELVKPGASVKMSCKASGYAFSSYWINWMKQKPGQGLEWIGQIYPGDGDTNYNGKFKGRATLTADTSSSTAYMQLSSLTSEDSAVYFCARSITTVVGCAMDYWGQGTSVTVSSTRQSFGLLDPKLCYLLDGILFIYGVILTALFLRVKFSRSADAPAYQQGQNQLYNELNLGRREEYDVLDKRRGRDPEMGGKPQRRKNPQEGLYNELQKDKMAEAYSEIGMKGERRRGKGHDGLYQGLSTATKDTYDALHMQALPPRRAKRSGSGVKQTLNFDLLKLAGDVESNPGPSRGHMTEYKPTVRLATRDDVPRAVRTLAAAFADYPATRHTVDPDRHIERVTELQELFLTRVGLDIGKVWVADDGAAVAVWTTPESVEAGAVFAEIGPRMAELSGSRLAAQQQMEGLLAPHRPKEPAWFLATVGVSPDHQGKGLGSAVVLPGVEAAERAGVPAFLETSAPRNLPFYERLGFTVTADVEVPEGPRTWCMTRKPGA

SEQ ID NO: 16812 - protein, 1067 aa, Artificial Sequence
  Synthetic Polypeptide
MALPVTALLLPLALLLHAARPEVQLLESGGGLVQPGGSLRLSCAASGFTFSSYAMSWVRQAPGKGLEWVSSISGSGDYIYYADSVKGRFTISRDISKNTLYLQMNSLRAEDTAVYYCAKEGTGANSSLADYRGQGTLVTVSSGGGSGGGSEVQLVESGGSLVQPGGSLRLSCAASGFTFDDYAMSWVRQVPGKGLEWVSSINWSGTHTDYADSVKGRFTISRNNANNTLYLQMNSLKSEDTAVYYCAKNWRDAGTTWFEKSGSAGQGTQVTVSSGTGGGGSGGGGSGGGGSEFDIQMTQSPSSLSASVGDRVTITCKASDHINNWLAWYQQKPGQAPKLLIYGATTLETGVPSRFSGSGSGTDYTLTISSLQPEDFATYYCQQSWNTPWTFGQGTKLEIKRLEGQPKANPTVTLFPPSSEELQANKATLVCLISDFYPGAVTVAWKADGSPVKAGVETTKPSKQSNNKYAASSYLSLTPEQWKSHRSYSCQVTHEGSTVEKTVAPTECSPIKTDVITMDPKDNCSKDANDTLLLQLTNTSAYYMYLLLLLKSVVYFAIITCCLLRRTAFCCNGEKSRAKRSGSGATNFSLLKQAGDVEENPGPTSMDWIWRILFLVGAATGAHSGPEVQLVESGGGLVQPGGSLRLSCAASGFASDYYIIGWFRQAPGKEREGVSCISSRYANTNYADSVKGRFTISRDNAKNTVYLQMNSLKPEDTAVYYCAADTRRYTCPDIATMHRNFDSWGQGTLVTVSSGSGGGGSGGGGSGGGGSFEQVQLQQPGAELVKPGASVKMSCKASGYAFSSYWINWMKQKPGQGLEWIGQIYPGDGDTNYNGKFKGRATLTADTSSSTAYMQLSSLTSEDSAVYFCARSITTVVGCAMDYWGQGTSVTVSSTRASTKGPSVFPLAPSSKSTSGGTAALGCLVKDYFPEPVTVSWNSGALTSGVHTFPAVLQSSGLYSLSSVVTVPSSSLGTQTYICNVNHKPSNTKVDKRVEPKSCEVKTDSTDHVKPKETENTKQPSKSCHKPKAIVHTEKVNMMSLTVLGLRMLFAKTVAVNFLLTAKLFFL

SEQ ID NO: 16813 - protein, 1045 aa, Artificial Sequence
  Synthetic Polypeptide
MALPVTALLLPLALLLHAARPEVQLLESGGGLVQPGGSLRLSCAASGFTFSSYAMSWVRQAPGKGLEWVSSISGSGDYIYYADSVKGRFTISRDISKNTLYLQMNSLRAEDTAVYYCAKEGTGANSSLADYRGQGTLVTVSSGGGSGGGSEVQLVESGGSLVQPGGSLRLSCAASGFTFDDYAMSWVRQVPGKGLEWVSSINWSGTHTDYADSVKGRFTISRNNANNTLYLQMNSLKSEDTAVYYCAKNWRDAGTTWFEKSGSAGQGTQVTVSSGTGGGGSGGGGSGGGGSEFDIQMTQSPSSLSASVGDRVTITCKASDHINNWLAWYQQKPGQAPKLLIYGATTLETGVPSRFSGSGSGTDYTLTISSLQPEDFATYYCQQSWNTPWTFGQGTKLEIKRLEGQPKANPTVTLFPPSSEELQANKATLVCLISDFYPGAVTVAWKADGSPVKAGVETTKPSKQSNNKYAASSYLSLTPEQWKSHRSYSCQVTHEGSTVEKTVAPTECSGRADCGITSASYHQGVLSATILYEILLGKATLYAVLVSALVLMAMVKRKDSRGRAKRSGSGATNFSLLKQAGDVEENPGPTSMDWIWRILFLVGAATGAHSGPEVQLVESGGGLVQPGGSLRLSCAASGFASDYYIIGWFRQAPGKEREGVSCISSRYANTNYADSVKGRFTISRDNAKNTVYLQMNSLKPEDTAVYYCAADTRRYTCPDIATMHRNFDSWGQGTLVTVSSGSGGGGSGGGGSGGGGSFEQVQLQQPGAELVKPGASVKMSCKASGYAFSSYWINWMKQKPGQGLEWIGQIYPGDGDTNYNGKFKGRATLTADTSSSTAYMQLSSLTSEDSAVYFCARSITTVVGCAMDYWGQGTSVTVSSTRASTKGPSVFPLAPSSKSTSGGTAALGCLVKDYFPEPVTVSWNSGALTSGVHTFPAVLQSSGLYSLSSVVTVPSSSLGTQTYICNVNHKPSNTKVDKRVEPKSCIPEDTFFPSSDVPCDVKLVEKSFETDTNLNFQNLSVIGFRILLLKVAGFNLLMTLRLWSS

SEQ ID NO: 16814 - protein, 1045 aa, Artificial Sequence
  Synthetic Polypeptide
MALPVTALLLPLALLLHAARPEVQLLESGGGLVQPGGSLRLSCAASGFTFSSYAMSWVRQAPGKGLEWVSSISGSGDYIYYADSVKGRFTISRDISKNTLYLQMNSLRAEDTAVYYCAKEGTGANSSLADYRGQGTLVTVSSGGGSGGGSEVQLVESGGSLVQPGGSLRLSCAASGFTFDDYAMSWVRQVPGKGLEWVSSINWSGTHTDYADSVKGRFTISRNNANNTLYLQMNSLKSEDTAVYYCAKNWRDAGTTWFEKSGSAGQGTQVTVSSGTGGGGSGGGGSGGGGSEFDIQMTQSPSSLSASVGDRVTITCKASDHINNWLAWYQQKPGQAPKLLIYGATTLETGVPSRFSGSGSGTDYTLTISSLQPEDFATYYCQQSWNTPWTFGQGTKLEIKRLEGQPKANPTVTLFPPSSEELQANKATLVCLISDFYPGAVTVAWKADGSPVKAGVETTKPSKQSNNKYAASSYLSLTPEQWKSHRSYSCQVTHEGSTVEKTVAPTECSGRADCGFTSESYQQGVLSATILYEILLGKATLYAVLVSALVLMAMVKRKDSRGRAKRSGSGATNFSLLKQAGDVEENPGPTSMDWIWRILFLVGAATGAHSGPEVQLVESGGGLVQPGGSLRLSCAASGFASDYYIIGWFRQAPGKEREGVSCISSRYANTNYADSVKGRFTISRDNAKNTVYLQMNSLKPEDTAVYYCAADTRRYTCPDIATMHRNFDSWGQGTLVTVSSGSGGGGSGGGGSGGGGSFEQVQLQQPGAELVKPGASVKMSCKASGYAFSSYWINWMKQKPGQGLEWIGQIYPGDGDTNYNGKFKGRATLTADTSSSTAYMQLSSLTSEDSAVYFCARSITTVVGCAMDYWGQGTSVTVSSTRASTKGPSVFPLAPSSKSTSGGTAALGCLVKDYFPEPVTVSWNSGALTSGVHTFPAVLQSSGLYSLSSVVTVPSSSLGTQTYICNVNHKPSNTKVDKRVEPKSCIPEDTFFPSPESSCDVKLVEKSFETDTNLNFQNLSVIGFRILLLKVAGFNLLMTLRLWSS

SEQ ID NO: 16815 - protein, 1011 aa, Artificial Sequence
  Synthetic Polypeptide
MALPVTALLLPLALLLHAARPEVQLLESGGGLVQPGGSLRLSCAASGFTFSSYAMSWVRQAPGKGLEWVSSISGSGDYIYYADSVKGRFTISRDISKNTLYLQMNSLRAEDTAVYYCAKEGTGANSSLADYRGQGTLVTVSSGGGSGGGSEVQLVESGGSLVQPGGSLRLSCAASGFTFDDYAMSWVRQVPGKGLEWVSSINWSGTHTDYADSVKGRFTISRNNANNTLYLQMNSLKSEDTAVYYCAKNWRDAGTTWFEKSGSAGQGTQVTVSSLEGQPKANPTVTLFPPSSEELQANKATLVCLISDFYPGAVTVAWKADGSPVKAGVETTKPSKQSNNKYAASSYLSLTPEQWKSHRSYSCQVTHEGSTVEKTVAPTECSGRADCGFTSESYQQGVLSATILYEILLGKATLYAVLVSALVLMAMVKRKDSRGRAKRSGSGATNFSLLKQAGDVEENPGPTSMDWIWRILFLVGAATGAHSGPEVQLVESGGGLVQPGGSLRLSCAASGFASDYYIIGWFRQAPGKEREGVSCISSRYANTNYADSVKGRFTISRDNAKNTVYLQMNSLKPEDTAVYYCAADTRRYTCPDIATMHRNFDSWGQGTLVTVSSTRASTKGPSVFPLAPSSKSTSGGTAALGCLVKDYFPEPVTVSWNSGALTSGVHTFPAVLQSSGLYSLSSVVTVPSSSLGTQTYICNVNHKPSNTKVDKRVEPKSCIPEDTFFPSPESSCDVKLVEKSFETDTNLNFQNLSVIGFRILLLKVAGFNLLMTLRLWSSRAKRSGSGVKQTLNFDLLKLAGDVESNPGPSRGHMTEYKPTVRLATRDDVPRAVRTLAAAFADYPATRHTVDPDRHIERVTELQELFLTRVGLDIGKVWVADDGAAVAVWTTPESVEAGAVFAEIGPRMAELSGSRLAAQQQMEGLLAPHRPKEPAWFLATVGVSPDHQGKGLGSAVVLPGVEAAERAGVPAFLETSAPRNLPFYERLGFTVTADVEVPEGPRTWCMTRKPGA

SEQ ID NO: 16816 - protein, 778 aa, Artificial Sequence
  Synthetic Polypeptide
MALPVTALLLPLALLLHAARPEVQLLESGGGLVQPGGSLRLSCAASGFTFSSYAMSWVRQAPGKGLEWVSSISGSGDYIYYADSVKGRFTISRDISKNTLYLQMNSLRAEDTAVYYCAKEGTGANSSLADYRGQGTLVTVSSGGGSGGGSEVQLVESGGSLVQPGGSLRLSCAASGFTFDDYAMSWVRQVPGKGLEWVSSINWSGTHTDYADSVKGRFTISRNNANNTLYLQMNSLKSEDTAVYYCAKNWRDAGTTWFEKSGSAGQGTQVTVSSLEGQPKANPTVTLFPPSSEELQANKATLVCLISDFYPGAVTVAWKADGSPVKAGVETTKPSKQSNNKYAASSYLSLTPEQWKSHRSYSCQVTHEGSTVEKTVAPTECSGRADCGFTSESYQQGVLSATILYEILLGKATLYAVLVSALVLMAMVKRKDSRGRAKRSGSGATNFSLLKQAGDVEENPGPTSMDWIWRILFLVGAATGAHSGPEVQLVESGGGLVQPGGSLRLSCAASGFASDYYIIGWFRQAPGKEREGVSCISSRYANTNYADSVKGRFTISRDNAKNTVYLQMNSLKPEDTAVYYCAADTRRYTCPDIATMHRNFDSWGQGTLVTVSSTRASTKGPSVFPLAPSSKSTSGGTAALGCLVKDYFPEPVTVSWNSGALTSGVHTFPAVLQSSGLYSLSSVVTVPSSSLGTQTYICNVNHKPSNTKVDKRVEPKSCIPEDTFFPSPESSCDVKLVEKSFETDTNLNFQNLSVIGFRILLLKVAGFNLLMTLRLWSS

SEQ ID NO: 16817 - protein, 806 aa, Artificial Sequence
  Synthetic Polypeptide
MALPVTALLLPLALLLHAARPEVQLLESGGGLVQPGGSLRLSCAASGFTFSSYAMSWVRQAPGKGLEWVSSISGSGDYIYYADSVKGRFTISRDISKNTLYLQMNSLRAEDTAVYYCAKEGTGANSSLADYRGQGTLVTVSSGGGSGGGSEVQLVESGGSLVQPGGSLRLSCAASGFTFDDYAMSWVRQVPGKGLEWVSSINWSGTHTDYADSVKGRFTISRNNANNTLYLQMNSLKSEDTAVYYCAKNWRDAGTTWFEKSGSAGQGTQVTVSSLEGSGRADCGFTSESYQQGVLSATILYEILLGKATLYAVLVSALVLMAMVKRKDSRGRAKRSGSGATNFSLLKQAGDVEENPGPTSMDWIWRILFLVGAATGAHSGPEVQLVESGGGLVQPGGSLRLSCAASGFASDYYIIGWFRQAPGKEREGVSCISSRYANTNYADSVKGRFTISRDNAKNTVYLQMNSLKPEDTAVYYCAADTRRYTCPDIATMHRNFDSWGQGTLVTVSSTRGSIPEDTFFPSPESSCDVKLVEKSFETDTNLNFQNLSVIGFRILLLKVAGFNLLMTLRLWSSRAKRSGSGVKQTLNFDLLKLAGDVESNPGPSRGHMTEYKPTVRLATRDDVPRAVRTLAAAFADYPATRHTVDPDRHIERVTELQELFLTRVGLDIGKVWVADDGAAVAVWTTPESVEAGAVFAEIGPRMAELSGSRLAAQQQMEGLLAPHRPKEPAWFLATVGVSPDHQGKGLGSAVVLPGVEAAERAGVPAFLETSAPRNLPFYERLGFTVTADVEVPEGPRTWCMTRKPGA

SEQ ID NO: 16818 - protein, 573 aa, Artificial Sequence
  Synthetic Polypeptide
MALPVTALLLPLALLLHAARPEVQLLESGGGLVQPGGSLRLSCAASGFTFSSYAMSWVRQAPGKGLEWVSSISGSGDYIYYADSVKGRFTISRDISKNTLYLQMNSLRAEDTAVYYCAKEGTGANSSLADYRGQGTLVTVSSGGGSGGGSEVQLVESGGSLVQPGGSLRLSCAASGFTFDDYAMSWVRQVPGKGLEWVSSINWSGTHTDYADSVKGRFTISRNNANNTLYLQMNSLKSEDTAVYYCAKNWRDAGTTWFEKSGSAGQGTQVTVSSLEGSGRADCGFTSESYQQGVLSATILYEILLGKATLYAVLVSALVLMAMVKRKDSRGRAKRSGSGATNFSLLKQAGDVEENPGPTSMDWIWRILFLVGAATGAHSGPEVQLVESGGGLVQPGGSLRLSCAASGFASDYYIIGWFRQAPGKEREGVSCISSRYANTNYADSVKGRFTISRDNAKNTVYLQMNSLKPEDTAVYYCAADTRRYTCPDIATMHRNFDSWGQGTLVTVSSTRGSIPEDTFFPSPESSCDVKLVEKSFETDTNLNFQNLSVIGFRILLLKVAGFNLLMTLRLWSS

SEQ ID NO: 16819 - protein, 815 aa, Artificial Sequence
  Synthetic Polypeptide
MALPVTALLLPLALLLHAARPEVQLLESGGGLVQPGGSLRLSCAASGFTFSSYAMSWVRQAPGKGLEWVSSISGSGDYIYYADSVKGRFTISRDISKNTLYLQMNSLRAEDTAVYYCAKEGTGANSSLADYRGQGTLVTVSSGGGSGGGSEVQLVESGGSLVQPGGSLRLSCAASGFTFDDYAMSWVRQVPGKGLEWVSSINWSGTHTDYADSVKGRFTISRNNANNTLYLQMNSLKSEDTAVYYCAKNWRDAGTTWFEKSGSAGQGTQVTVSSLEDKTHTCPPCPAGRADCGFTSESYQQGVLSATILYEILLGKATLYAVLVSALVLMAMVKRKDSRGRAKRSGSGATNFSLLKQAGDVEENPGPTSMDWIWRILFLVGAATGAHSGPEVQLVESGGGLVQPGGSLRLSCAASGFASDYYIIGWFRQAPGKEREGVSCISSRYANTNYADSVKGRFTISRDNAKNTVYLQMNSLKPEDTAVYYCAADTRRYTCPDIATMHRNFDSWGQGTLVTVSSTRGSIPEDTFFPSPESSCDVKLVEKSFETDTNLNFQNLSVIGFRILLLKVAGFNLLMTLRLWSSRAKRSGSGVKQTLNFDLLKLAGDVESNPGPSRGHMTEYKPTVRLATRDDVPRAVRTLAAAFADYPATRHTVDPDRHIERVTELQELFLTRVGLDIGKVWVADDGAAVAVWTTPESVEAGAVFAEIGPRMAELSGSRLAAQQQMEGLLAPHRPKEPAWFLATVGVSPDHQGKGLGSAVVLPGVEAAERAGVPAFLETSAPRNLPFYERLGFTVTADVEVPEGPRTWCMTRKPGA

SEQ ID NO: 16820 - protein, 815 aa, Artificial Sequence
  Synthetic Polypeptide
MALPVTALLLPLALLLHAARPEVQLLESGGGLVQPGGSLRLSCAASGFTFSSYAMSWVRQAPGKGLEWVSSISGSGDYIYYADSVKGRFTISRDISKNTLYLQMNSLRAEDTAVYYCAKEGTGANSSLADYRGQGTLVTVSSGGGSGGGSEVQLVESGGSLVQPGGSLRLSCAASGFTFDDYAMSWVRQVPGKGLEWVSSINWSGTHTDYADSVKGRFTISRNNANNTLYLQMNSLKSEDTAVYYCAKNWRDAGTTWFEKSGSAGQGTQVTVSSLEGSGRADCGFTSESYQQGVLSATILYEILLGKATLYAVLVSALVLMAMVKRKDSRGRAKRSGSGATNFSLLKQAGDVEENPGPTSMDWIWRILFLVGAATGAHSGPEVQLVESGGGLVQPGGSLRLSCAASGFASDYYIIGWFRQAPGKEREGVSCISSRYANTNYADSVKGRFTISRDNAKNTVYLQMNSLKPEDTAVYYCAADTRRYTCPDIATMHRNFDSWGQGTLVTVSSTRDKTHTCPPCPAIPEDTFFPSPESSCDVKLVEKSFETDTNLNFQNLSVIGFRILLLKVAGFNLLMTLRLWSSRAKRSGSGVKQTLNFDLLKLAGDVESNPGPSRGHMTEYKPTVRLATRDDVPRAVRTLAAAFADYPATRHTVDPDRHIERVTELQELFLTRVGLDIGKVWVADDGAAVAVWTTPESVEAGAVFAEIGPRMAELSGSRLAAQQQMEGLLAPHRPKEPAWFLATVGVSPDHQGKGLGSAVVLPGVEAAERAGVPAFLETSAPRNLPFYERLGFTVTADVEVPEGPRTWCMTRKPGA

SEQ ID NO: 16821 - protein, 824 aa, Artificial Sequence
  Synthetic Polypeptide
MALPVTALLLPLALLLHAARPEVQLLESGGGLVQPGGSLRLSCAASGFTFSSYAMSWVRQAPGKGLEWVSSISGSGDYIYYADSVKGRFTISRDISKNTLYLQMNSLRAEDTAVYYCAKEGTGANSSLADYRGQGTLVTVSSGGGSGGGSEVQLVESGGSLVQPGGSLRLSCAASGFTFDDYAMSWVRQVPGKGLEWVSSINWSGTHTDYADSVKGRFTISRNNANNTLYLQMNSLKSEDTAVYYCAKNWRDAGTTWFEKSGSAGQGTQVTVSSLEDKTHTCPPCPAGRADCGFTSESYQQGVLSATILYEILLGKATLYAVLVSALVLMAMVKRKDSRGRAKRSGSGATNFSLLKQAGDVEENPGPTSMDWIWRILFLVGAATGAHSGPEVQLVESGGGLVQPGGSLRLSCAASGFASDYYIIGWFRQAPGKEREGVSCISSRYANTNYADSVKGRFTISRDNAKNTVYLQMNSLKPEDTAVYYCAADTRRYTCPDIATMHRNFDSWGQGTLVTVSSTRDKTHTCPPCPAIPEDTFFPSPESSCDVKLVEKSFETDTNLNFQNLSVIGFRILLLKVAGFNLLMTLRLWSSRAKRSGSGVKQTLNFDLLKLAGDVESNPGPSRGHMTEYKPTVRLATRDDVPRAVRTLAAAFADYPATRHTVDPDRHIERVTELQELFLTRVGLDIGKVWVADDGAAVAVWTTPESVEAGAVFAEIGPRMAELSGSRLAAQQQMEGLLAPHRPKEPAWFLATVGVSPDHQGKGLGSAVVLPGVEAAERAGVPAFLETSAPRNLPFYERLGFTVTADVEVPEGPRTWCMTRKPGA

SEQ ID NO: 16822 - protein, 591 aa, Artificial Sequence
  Synthetic Polypeptide
MALPVTALLLPLALLLHAARPEVQLLESGGGLVQPGGSLRLSCAASGFTFSSYAMSWVRQAPGKGLEWVSSISGSGDYIYYADSVKGRFTISRDISKNTLYLQMNSLRAEDTAVYYCAKEGTGANSSLADYRGQGTLVTVSSGGGSGGGSEVQLVESGGSLVQPGGSLRLSCAASGFTFDDYAMSWVRQVPGKGLEWVSSINWSGTHTDYADSVKGRFTISRNNANNTLYLQMNSLKSEDTAVYYCAKNWRDAGTTWFEKSGSAGQGTQVTVSSLEDKTHTCPPCPAGRADCGFTSESYQQGVLSATILYEILLGKATLYAVLVSALVLMAMVKRKDSRGRAKRSGSGATNFSLLKQAGDVEENPGPTSMDWIWRILFLVGAATGAHSGPEVQLVESGGGLVQPGGSLRLSCAASGFASDYYIIGWFRQAPGKEREGVSCISSRYANTNYADSVKGRFTISRDNAKNTVYLQMNSLKPEDTAVYYCAADTRRYTCPDIATMHRNFDSWGQGTLVTVSSTRDKTHTCPPCPAIPEDTFFPSPESSCDVKLVEKSFETDTNLNFQNLSVIGFRILLLKVAGFNLLMTLRLWSS

SEQ ID NO: 16823 - protein, 582 aa, Artificial Sequence
  Synthetic Polypeptide
MALPVTALLLPLALLLHAARPEVQLLESGGGLVQPGGSLRLSCAASGFTFSSYAMSWVRQAPGKGLEWVSSISGSGDYIYYADSVKGRFTISRDISKNTLYLQMNSLRAEDTAVYYCAKEGTGANSSLADYRGQGTLVTVSSGGGSGGGSEVQLVESGGSLVQPGGSLRLSCAASGFTFDDYAMSWVRQVPGKGLEWVSSINWSGTHTDYADSVKGRFTISRNNANNTLYLQMNSLKSEDTAVYYCAKNWRDAGTTWFEKSGSAGQGTQVTVSSLEGSGRADCGFTSESYQQGVLSATILYEILLGKATLYAVLVSALVLMAMVKRKDSRGRAKRSGSGATNFSLLKQAGDVEENPGPTSMDWIWRILFLVGAATGAHSGPEVQLVESGGGLVQPGGSLRLSCAASGFASDYYIIGWFRQAPGKEREGVSCISSRYANTNYADSVKGRFTISRDNAKNTVYLQMNSLKPEDTAVYYCAADTRRYTCPDIATMHRNFDSWGQGTLVTVSSTRDKTHTCPPCPAIPEDTFFPSPESSCDVKLVEKSFETDTNLNFQNLSVIGFRILLLKVAGFNLLMTLRLWSS

SEQ ID NO: 16824 - protein, 1033 aa, Artificial Sequence
  Synthetic Polypeptide
MALPVTALLLPLALLLHAARPEVQLLESGGGLVQPGGSLRLSCAASGFTFSSYAMSWVRQAPGKGLEWVSSISGSGDYIYYADSVKGRFTISRDISKNTLYLQMNSLRAEDTAVYYCAKEGTGANSSLADYRGQGTLVTVSSGGGSGGGSEVQLVESGGSLVQPGGSLRLSCAASGFTFDDYAMSWVRQVPGKGLEWVSSINWSGTHTDYADSVKGRFTISRNNANNTLYLQMNSLKSEDTAVYYCAKNWRDAGTTWFEKSGSAGQGTQVTVSSLEGQPKANPTVTLFPPSSEELQANKATLVCLISDFYPGAVTVAWKADGSPVKAGVETTKPSKQSNNKYAASSYLSLTPEQWKSHRSYSCQVTHEGSTVEKTVAPTECSPIKTDVITMDPKDNCSKDANDTLLLQLTNTSAYYMYLLLLLKSVVYFAIITCCLLRRTAFCCNGEKSRAKRSGSGATNFSLLKQAGDVEENPGPTSMDWIWRILFLVGAATGAHSGPEVQLVESGGGLVQPGGSLRLSCAASGFASDYYIIGWFRQAPGKEREGVSCISSRYANTNYADSVKGRFTISRDNAKNTVYLQMNSLKPEDTAVYYCAADTRRYTCPDIATMHRNFDSWGQGTLVTVSSTRASTKGPSVFPLAPSSKSTSGGTAALGCLVKDYFPEPVTVSWNSGALTSGVHTFPAVLQSSGLYSLSSVVTVPSSSLGTQTYICNVNHKPSNTKVDKRVEPKSCEVKTDSTDHVKPKETENTKQPSKSCHKPKAIVHTEKVNMMSLTVLGLRMLFAKTVAVNFLLTAKLFFLRAKRSGSGVKQTLNFDLLKLAGDVESNPGPSRGHMTEYKPTVRLATRDDVPRAVRTLAAAFADYPATRHTVDPDRHIERVTELQELFLTRVGLDIGKVWVADDGAAVAVWTTPESVEAGAVFAEIGPRMAELSGSRLAAQQQMEGLLAPHRPKEPAWFLATVGVSPDHQGKGLGSAVVLPGVEAAERAGVPAFLETSAPRNLPFYERLGFTVTADVEVPEGPRTWCMTRKPGA

SEQ ID NO: 16825 - protein, 800 aa, Artificial Sequence
  Synthetic Polypeptide
MALPVTALLLPLALLLHAARPEVQLLESGGGLVQPGGSLRLSCAASGFTFSSYAMSWVRQAPGKGLEWVSSISGSGDYIYYADSVKGRFTISRDISKNTLYLQMNSLRAEDTAVYYCAKEGTGANSSLADYRGQGTLVTVSSGGGSGGGSEVQLVESGGSLVQPGGSLRLSCAASGFTFDDYAMSWVRQVPGKGLEWVSSINWSGTHTDYADSVKGRFTISRNNANNTLYLQMNSLKSEDTAVYYCAKNWRDAGTTWFEKSGSAGQGTQVTVSSLEGQPKANPTVTLFPPSSEELQANKATLVCLISDFYPGAVTVAWKADGSPVKAGVETTKPSKQSNNKYAASSYLSLTPEQWKSHRSYSCQVTHEGSTVEKTVAPTECSPIKTDVITMDPKDNCSKDANDTLLLQLTNTSAYYMYLLLLLKSVVYFAIITCCLLRRTAFCCNGEKSRAKRSGSGATNFSLLKQAGDVEENPGPTSMDWIWRILFLVGAATGAHSGPEVQLVESGGGLVQPGGSLRLSCAASGFASDYYIIGWFRQAPGKEREGVSCISSRYANTNYADSVKGRFTISRDNAKNTVYLQMNSLKPEDTAVYYCAADTRRYTCPDIATMHRNFDSWGQGTLVTVSSTRASTKGPSVFPLAPSSKSTSGGTAALGCLVKDYFPEPVTVSWNSGALTSGVHTFPAVLQSSGLYSLSSVVTVPSSSLGTQTYICNVNHKPSNTKVDKRVEPKSCEVKTDSTDHVKPKETENTKQPSKSCHKPKAIVHTEKVNMMSLTVLGLRMLFAKTVAVNFLLTAKLFFL

SEQ ID NO: 16826 - protein, 828 aa, Artificial Sequence
  Synthetic Polypeptide
MALPVTALLLPLALLLHAARPEVQLLESGGGLVQPGGSLRLSCAASGFTFSSYAMSWVRQAPGKGLEWVSSISGSGDYIYYADSVKGRFTISRDISKNTLYLQMNSLRAEDTAVYYCAKEGTGANSSLADYRGQGTLVTVSSGGGSGGGSEVQLVESGGSLVQPGGSLRLSCAASGFTFDDYAMSWVRQVPGKGLEWVSSINWSGTHTDYADSVKGRFTISRNNANNTLYLQMNSLKSEDTAVYYCAKNWRDAGTTWFEKSGSAGQGTQVTVSSLEGSPIKTDVITMDPKDNCSKDANDTLLLQLTNTSAYYMYLLLLLKSVVYFAIITCCLLRRTAFCCNGEKSRAKRSGSGATNFSLLKQAGDVEENPGPTSMDWIWRILFLVGAATGAHSGPEVQLVESGGGLVQPGGSLRLSCAASGFASDYYIIGWFRQAPGKEREGVSCISSRYANTNYADSVKGRFTISRDNAKNTVYLQMNSLKPEDTAVYYCAADTRRYTCPDIATMHRNFDSWGQGTLVTVSSTRGSEVKTDSTDHVKPKETENTKQPSKSCHKPKAIVHTEKVNMMSLTVLGLRMLFAKTVAVNFLLTAKLFFLRAKRSGSGVKQTLNFDLLKLAGDVESNPGPSRGHMTEYKPTVRLATRDDVPRAVRTLAAAFADYPATRHTVDPDRHIERVTELQELFLTRVGLDIGKVWVADDGAAVAVWTTPESVEAGAVFAEIGPRMAELSGSRLAAQQQMEGLLAPHRPKEPAWFLATVGVSPDHQGKGLGSAVVLPGVEAAERAGVPAFLETSAPRNLPFYERLGFTVTADVEVPEGPRTWCMTRKPGA

SEQ ID NO: 16827 - protein, 595 aa, Artificial Sequence
  Synthetic Polypeptide
MALPVTALLLPLALLLHAARPEVQLLESGGGLVQPGGSLRLSCAASGFTFSSYAMSWVRQAPGKGLEWVSSISGSGDYIYYADSVKGRFTISRDISKNTLYLQMNSLRAEDTAVYYCAKEGTGANSSLADYRGQGTLVTVSSGGGSGGGSEVQLVESGGSLVQPGGSLRLSCAASGFTFDDYAMSWVRQVPGKGLEWVSSINWSGTHTDYADSVKGRFTISRNNANNTLYLQMNSLKSEDTAVYYCAKNWRDAGTTWFEKSGSAGQGTQVTVSSLEGSPIKTDVITMDPKDNCSKDANDTLLLQLTNTSAYYMYLLLLLKSVVYFAIITCCLLRRTAFCCNGEKSRAKRSGSGATNFSLLKQAGDVEENPGPTSMDWIWRILFLVGAATGAHSGPEVQLVESGGGLVQPGGSLRLSCAASGFASDYYIIGWFRQAPGKEREGVSCISSRYANTNYADSVKGRFTISRDNAKNTVYLQMNSLKPEDTAVYYCAADTRRYTCPDIATMHRNFDSWGQGTLVTVSSTRGSEVKTDSTDHVKPKETENTKQPSKSCHKPKAIVHTEKVNMMSLTVLGLRMLFAKTVAVNFLLTAKLFFL

SEQ ID NO: 16828 - protein, 837 aa, Artificial Sequence
  Synthetic Polypeptide
MALPVTALLLPLALLLHAARPEVQLLESGGGLVQPGGSLRLSCAASGFTFSSYAMSWVRQAPGKGLEWVSSISGSGDYIYYADSVKGRFTISRDISKNTLYLQMNSLRAEDTAVYYCAKEGTGANSSLADYRGQGTLVTVSSGGGSGGGSEVQLVESGGSLVQPGGSLRLSCAASGFTFDDYAMSWVRQVPGKGLEWVSSINWSGTHTDYADSVKGRFTISRNNANNTLYLQMNSLKSEDTAVYYCAKNWRDAGTTWFEKSGSAGQGTQVTVSSLEDKTHTCPPCPAPIKTDVITMDPKDNCSKDANDTLLLQLTNTSAYYMYLLLLLKSVVYFAIITCCLLRRTAFCCNGEKSRAKRSGSGATNFSLLKQAGDVEENPGPTSMDWIWRILFLVGAATGAHSGPEVQLVESGGGLVQPGGSLRLSCAASGFASDYYIIGWFRQAPGKEREGVSCISSRYANTNYADSVKGRFTISRDNAKNTVYLQMNSLKPEDTAVYYCAADTRRYTCPDIATMHRNFDSWGQGTLVTVSSTRGSEVKTDSTDHVKPKETENTKQPSKSCHKPKAIVHTEKVNMMSLTVLGLRMLFAKTVAVNFLLTAKLFFLRAKRSGSGVKQTLNFDLLKLAGDVESNPGPSRGHMTEYKPTVRLATRDDVPRAVRTLAAAFADYPATRHTVDPDRHIERVTELQELFLTRVGLDIGKVWVADDGAAVAVWTTPESVEAGAVFAEIGPRMAELSGSRLAAQQQMEGLLAPHRPKEPAWFLATVGVSPDHQGKGLGSAVVLPGVEAAERAGVPAFLETSAPRNLPFYERLGFTVTADVEVPEGPRTWCMTRKPGA

SEQ ID NO: 16829 - protein, 837 aa, Artificial Sequence
  Synthetic Polypeptide
MALPVTALLLPLALLLHAARPEVQLLESGGGLVQPGGSLRLSCAASGFTFSSYAMSWVRQAPGKGLEWVSSISGSGDYIYYADSVKGRFTISRDISKNTLYLQMNSLRAEDTAVYYCAKEGTGANSSLADYRGQGTLVTVSSGGGSGGGSEVQLVESGGSLVQPGGSLRLSCAASGFTFDDYAMSWVRQVPGKGLEWVSSINWSGTHTDYADSVKGRFTISRNNANNTLYLQMNSLKSEDTAVYYCAKNWRDAGTTWFEKSGSAGQGTQVTVSSLEGSPIKTDVITMDPKDNCSKDANDTLLLQLTNTSAYYMYLLLLLKSVVYFAIITCCLLRRTAFCCNGEKSRAKRSGSGATNFSLLKQAGDVEENPGPTSMDWIWRILFLVGAATGAHSGPEVQLVESGGGLVQPGGSLRLSCAASGFASDYYIIGWFRQAPGKEREGVSCISSRYANTNYADSVKGRFTISRDNAKNTVYLQMNSLKPEDTAVYYCAADTRRYTCPDIATMHRNFDSWGQGTLVTVSSTRDKTHTCPPCPAEVKTDSTDHVKPKETENTKQPSKSCHKPKAIVHTEKVNMMSLTVLGLRMLFAKTVAVNFLLTAKLFFLRAKRSGSGVKQTLNFDLLKLAGDVESNPGPSRGHMTEYKPTVRLATRDDVPRAVRTLAAAFADYPATRHTVDPDRHIERVTELQELFLTRVGLDIGKVWVADDGAAVAVWTTPESVEAGAVFAEIGPRMAELSGSRLAAQQQMEGLLAPHRPKEPAWFLATVGVSPDHQGKGLGSAVVLPGVEAAERAGVPAFLETSAPRNLPFYERLGFTVTADVEVPEGPRTWCMTRKPGA

SEQ ID NO: 16830 - protein, 846 aa, Artificial Sequence
  Synthetic Polypeptide
MALPVTALLLPLALLLHAARPEVQLLESGGGLVQPGGSLRLSCAASGFTFSSYAMSWVRQAPGKGLEWVSSISGSGDYIYYADSVKGRFTISRDISKNTLYLQMNSLRAEDTAVYYCAKEGTGANSSLADYRGQGTLVTVSSGGGSGGGSEVQLVESGGSLVQPGGSLRLSCAASGFTFDDYAMSWVRQVPGKGLEWVSSINWSGTHTDYADSVKGRFTISRNNANNTLYLQMNSLKSEDTAVYYCAKNWRDAGTTWFEKSGSAGQGTQVTVSSLEDKTHTCPPCPAPIKTDVITMDPKDNCSKDANDTLLLQLTNTSAYYMYLLLLLKSVVYFAIITCCLLRRTAFCCNGEKSRAKRSGSGATNFSLLKQAGDVEENPGPTSMDWIWRILFLVGAATGAHSGPEVQLVESGGGLVQPGGSLRLSCAASGFASDYYIIGWFRQAPGKEREGVSCISSRYANTNYADSVKGRFTISRDNAKNTVYLQMNSLKPEDTAVYYCAADTRRYTCPDIATMHRNFDSWGQGTLVTVSSTRDKTHTCPPCPAEVKTDSTDHVKPKETENTKQPSKSCHKPKAIVHTEKVNMMSLTVLGLRMLFAKTVAVNFLLTAKLFFLRAKRSGSGVKQTLNFDLLKLAGDVESNPGPSRGHMTEYKPTVRLATRDDVPRAVRTLAAAFADYPATRHTVDPDRHIERVTELQELFLTRVGLDIGKVWVADDGAAVAVWTTPESVEAGAVFAEIGPRMAELSGSRLAAQQQMEGLLAPHRPKEPAWFLATVGVSPDHQGKGLGSAVVLPGVEAAERAGVPAFLETSAPRNLPFYERLGFTVTADVEVPEGPRTWCMTRKPGA

SEQ ID NO: 16831 - protein, 613 aa, Artificial Sequence
  Synthetic Polypeptide
MALPVTALLLPLALLLHAARPEVQLLESGGGLVQPGGSLRLSCAASGFTFSSYAMSWVRQAPGKGLEWVSSISGSGDYIYYADSVKGRFTISRDISKNTLYLQMNSLRAEDTAVYYCAKEGTGANSSLADYRGQGTLVTVSSGGGSGGGSEVQLVESGGSLVQPGGSLRLSCAASGFTFDDYAMSWVRQVPGKGLEWVSSINWSGTHTDYADSVKGRFTISRNNANNTLYLQMNSLKSEDTAVYYCAKNWRDAGTTWFEKSGSAGQGTQVTVSSLEDKTHTCPPCPAPIKTDVITMDPKDNCSKDANDTLLLQLTNTSAYYMYLLLLLKSVVYFAIITCCLLRRTAFCCNGEKSRAKRSGSGATNFSLLKQAGDVEENPGPTSMDWIWRILFLVGAATGAHSGPEVQLVESGGGLVQPGGSLRLSCAASGFASDYYIIGWFRQAPGKEREGVSCISSRYANTNYADSVKGRFTISRDNAKNTVYLQMNSLKPEDTAVYYCAADTRRYTCPDIATMHRNFDSWGQGTLVTVSSTRDKTHTCPPCPAEVKTDSTDHVKPKETENTKQPSKSCHKPKAIVHTEKVNMMSLTVLGLRMLFAKTVAVNFLLTAKLFFL

SEQ ID NO: 16832 - protein, 604 aa, Artificial Sequence
  Synthetic Polypeptide
MALPVTALLLPLALLLHAARPEVQLLESGGGLVQPGGSLRLSCAASGFTFSSYAMSWVRQAPGKGLEWVSSISGSGDYIYYADSVKGRFTISRDISKNTLYLQMNSLRAEDTAVYYCAKEGTGANSSLADYRGQGTLVTVSSGGGSGGGSEVQLVESGGSLVQPGGSLRLSCAASGFTFDDYAMSWVRQVPGKGLEWVSSINWSGTHTDYADSVKGRFTISRNNANNTLYLQMNSLKSEDTAVYYCAKNWRDAGTTWFEKSGSAGQGTQVTVSSLEGSPIKTDVITMDPKDNCSKDANDTLLLQLTNTSAYYMYLLLLLKSVVYFAIITCCLLRRTAFCCNGEKSRAKRSGSGATNFSLLKQAGDVEENPGPTSMDWIWRILFLVGAATGAHSGPEVQLVESGGGLVQPGGSLRLSCAASGFASDYYIIGWFRQAPGKEREGVSCISSRYANTNYADSVKGRFTISRDNAKNTVYLQMNSLKPEDTAVYYCAADTRRYTCPDIATMHRNFDSWGQGTLVTVSSTRDKTHTCPPCPAEVKTDSTDHVKPKETENTKQPSKSCHKPKAIVHTEKVNMMSLTVLGLRMLFAKTVAVNFLLTAKLFFL

SEQ ID NO: 16833 - protein, 820 aa, Artificial Sequence
  Synthetic Polypeptide
MALPVTALLLPLALLLHAARPEVQLLESGGGLVQPGGSLRLSCAASGFTFSSYAMSWVRQAPGKGLEWVSSISGSGDYIYYADSVKGRFTISRDISKNTLYLQMNSLRAEDTAVYYCAKEGTGANSSLADYRGQGTLVTVSSGGGSGGGSEVQLVESGGSLVQPGGSLRLSCAASGFTFDDYAMSWVRQVPGKGLEWVSSINWSGTHTDYADSVKGRFTISRNNANNTLYLQMNSLKSEDTAVYYCAKNWRDAGTTWFEKSGSAGQGTQVTVSSLEGSMDPKDNCSKDANDTLLLQLTNTSAYYMYLLLLLKSVVYFAIITCCLLRRTAFCCNGEKSRAKRSGSGATNFSLLKQAGDVEENPGPTSMDWIWRILFLVGAATGAHSGPEVQLVESGGGLVQPGGSLRLSCAASGFASDYYIIGWFRQAPGKEREGVSCISSRYANTNYADSVKGRFTISRDNAKNTVYLQMNSLKPEDTAVYYCAADTRRYTCPDIATMHRNFDSWGQGTLVTVSSTRGSEVKTDSTDHVKPKETENTKQPSKSCHKPKAIVHTEKVNMMSLTVLGLRMLFAKTVAVNFLLTAKLFFLRAKRSGSGVKQTLNFDLLKLAGDVESNPGPSRGHMTEYKPTVRLATRDDVPRAVRTLAAAFADYPATRHTVDPDRHIERVTELQELFLTRVGLDIGKVWVADDGAAVAVWTTPESVEAGAVFAEIGPRMAELSGSRLAAQQQMEGLLAPHRPKEPAWFLATVGVSPDHQGKGLGSAVVLPGVEAAERAGVPAFLETSAPRNLPFYERLGFTVTADVEVPEGPRTWCMTRKPGA

SEQ ID NO: 16834 - protein, 821 aa, Artificial Sequence
  Synthetic Polypeptide
MALPVTALLLPLALLLHAARPEVQLLESGGGLVQPGGSLRLSCAASGFTFSSYAMSWVRQAPGKGLEWVSSISGSGDYIYYADSVKGRFTISRDISKNTLYLQMNSLRAEDTAVYYCAKEGTGANSSLADYRGQGTLVTVSSGGGSGGGSEVQLVESGGSLVQPGGSLRLSCAASGFTFDDYAMSWVRQVPGKGLEWVSSINWSGTHTDYADSVKGRFTISRNNANNTLYLQMNSLKSEDTAVYYCAKNWRDAGTTWFEKSGSAGQGTQVTVSSLEGSPIKTDVITMDPKDNCSKDANDTLLLQLTNTSAYYMYLLLLLKSVVYFAIITCCLLRRTAFCCNGEKSRAKRSGSGATNFSLLKQAGDVEENPGPTSMDWIWRILFLVGAATGAHSGPEVQLVESGGGLVQPGGSLRLSCAASGFASDYYIIGWFRQAPGKEREGVSCISSRYANTNYADSVKGRFTISRDNAKNTVYLQMNSLKPEDTAVYYCAADTRRYTCPDIATMHRNFDSWGQGTLVTVSSTRGSDHVKPKETENTKQPSKSCHKPKAIVHTEKVNMMSLTVLGLRMLFAKTVAVNFLLTAKLFFLRAKRSGSGVKQTLNFDLLKLAGDVESNPGPSRGHMTEYKPTVRLATRDDVPRAVRTLAAAFADYPATRHTVDPDRHIERVTELQELFLTRVGLDIGKVWVADDGAAVAVWTTPESVEAGAVFAEIGPRMAELSGSRLAAQQQMEGLLAPHRPKEPAWFLATVGVSPDHQGKGLGSAVVLPGVEAAERAGVPAFLETSAPRNLPFYERLGFTVTADVEVPEGPRTWCMTRKPGA

SEQ ID NO: 16835 - protein, 435 aa, Artificial Sequence
  Synthetic Polypeptide
MALPVTALLLPLALLLHAARPEVQLLESGGGLVQPGGSLRLSCAASGFTFSSYAMSWVRQAPGKGLEWVSSISGSGDYIYYADSVKGRFTISRDISKNTLYLQMNSLRAEDTAVYYCAKEGTGANSSLADYRGQGTLVTVSSGGGSGGGSEVQLVESGGSLVQPGGSLRLSCAASGFTFDDYAMSWVRQVPGKGLEWVSSINWSGTHTDYADSVKGRFTISRNNANNTLYLQMNSLKSEDTAVYYCAKNWRDAGTTWFEKSGSAGQGTQVTVSSLEGQPKANPTVTLFPPSSEELQANKATLVCLISDFYPGAVTVAWKADGSPVKAGVETTKPSKQSNNKYAASSYLSLTPEQWKSHRSYSCQVTHEGSTVEKTVAPTECSGRADCGFTSESYQQGVLSATILYEILLGKATLYAVLVSALVLMAMVKRKDSRG

SEQ ID NO: 16836 - protein, 449 aa, Artificial Sequence
  Synthetic Polypeptide
MALPVTALLLPLALLLHAARPEVQLLESGGGLVQPGGSLRLSCAASGFTFSSYAMSWVRQAPGKGLEWVSSISGSGDYIYYADSVKGRFTISRDISKNTLYLQMNSLRAEDTAVYYCAKEGTGANSSLADYRGQGTLVTVSSGGGSGGGSEVQLVESGGSLVQPGGSLRLSCAASGFTFDDYAMSWVRQVPGKGLEWVSSINWSGTHTDYADSVKGRFTISRNNANNTLYLQMNSLKSEDTAVYYCAKNWRDAGTTWFEKSGSAGQGTQVTVSSLEGQPKANPTVTLFPPSSEELQANKATLVCLISDFYPGAVTVAWKADGSPVKAGVETTKPSKQSNNKYAASSYLSLTPEQWKSHRSYSCQVTHEGSTVEKTVAPTECSPIKTDVITMDPKDNCSKDANDTLLLQLTNTSAYYMYLLLLLKSVVYFAIITCCLLRRTAFCCNGEKS

SEQ ID NO: 16837 - protein, 777 aa, Artificial Sequence
  Synthetic Polypeptide
MDWIWRILFLVGAATGAHSQLQLQESGPGLVKPSETLSLTCTVSGGSISSGDYYWGWIRQPPGKGLEWIGHIYYSGATYYNPSLKSRVTISVDTSRNQFSLKLSSVTAADTAVYYCTRDDSSNWRSRGQGTLVTVSSSGGGGSGGGGSEVQLVESGGGLVQPGGSLRLSCAASGFASDYYIIGWFRQAPGKEREGVSCISSRYANTNYADSVKGRFTISRDNAKNTVYLQMNSLKPEDTAVYYCAADTRRYTCPDIATMHRNFDSWGQGTLVTVSSGSGGGGSGGGGSGGGGSFEQVQLQQPGAELVKPGASVKMSCKASGYAFSSYWINWMKQKPGQGLEWIGQIYPGDGDTNYNGKFKGRATLTADTSSSTAYMQLSSLTSEDSAVYFCARSITTVVGCAMDYWGQGTSVTVSSGGGGSGGGGSGGGGSDIQMTQSPSSLSASVGDRVTITCKASDHINNWLAWYQQKPGQAPKLLIYGATTLETGVPSRFSGSGSGTDYTLTISSLQPEDFATYYCQQSWNTPWTFGQGTKLEIKRTREQKLISEEDLAKPTTTPAPRPPTPAPTIASQPLSLRPEACRPAAGGAVHTRGLDFACDIYIWAPLAGTCGVLLLSLVITLYCKRGRKKLLYIFKQPFMRPVQTTQEEDGCSCRFPEEEEGGCELRVKFSRSADAPAYQQGQNQLYNELNLGRREEYDVLDKRRGRDPEMGGKPRRKNPQEGLYNELQKDKMAEAYSEIGMKGERRRGKGHDGLYQGLSTATKDTYDALHMQALPPR

SEQ ID NO: 16838 - protein, 1130 aa, Artificial Sequence
  Synthetic Polypeptide
MALPVTALLLPLALLLHAARPDIQMTQSPSSLSASVGDRVTITCKASDHINNWLAWYQQKPGQAPKLLIYGATTLETGVPSRFSGSGSGTDYTLTISSLQPEDFATYYCQQSWNTPWTFGQGTKLEIKRLEIQNPDPAVYQLRDSKSSDKSVCLFTDFDSQTNVSQSKDSDVYITDKCVLDMRSMDFKSNSAVAWSNKSDFACANAFNNSIIPEDTFFPSSDVPCDVKLVEKSFETDTNLNFQNLSVIGFRILLLKVAGFNLLMTLRLWSSRAKRSGSGVKQTLNFDLLKLAGDVESNPGPTSMDWIWRILFLVGAATGAHSQLQLQESGPGLVKPSETLSLTCTVSGGSISSGDYYWGWIRQPPGKGLEWIGHIYYSGATYYNPSLKSRVTISVDTSRNQFSLKLSSVTAADTAVYYCTRDDSSNWRSRGQGTLVTVSSSGGGGSGGGGSEVQLVESGGGLVQPGGSLRLSCAASGFASDYYIIGWFRQAPGKEREGVSCISSRYANTNYADSVKGRFTISRDNAKNTVYLQMNSLKPEDTAVYYCAADTRRYTCPDIATMHRNFDSWGQGTLVTVSSGSGGGGSGGGGSGGGGSFEQVQLQQPGAELVKPGASVKMSCKASGYAFSSYWINWMKQKPGQGLEWIGQIYPGDGDTNYNGKFKGRATLTADTSSSTAYMQLSSLTSEDSAVYFCARSITTVVGCAMDYWGQGTSVTVSSTREDLKNVFPPEVAVFEPSKAEIAHTQKATLVCLATGFYPDHVELSWWVNGKEVHSGVCTDPQPLKEQPALNDSRYCLSSRLRVSATFWQNPRNHFRCQVQFYGLSENDEWTQDRAKPVTQIVSAEAWGRADCGITSASYHQGVLSATILYEILLGKATLYAVLVSALVLMAMVKRKDSRGRAKRSGSGATNFSLLKQAGDVEENPGPSRGHMTEYKPTVRLATRDDVPRAVRTLAAAFADYPATRHTVDPDRHIERVTELQELFLTRVGLDIGKVWVADDGAAVAVWTTPESVEAGAVFAEIGPRMAELSGSRLAAQQQMEGLLAPHRPKEPAWFLATVGVSPDHQGKGLGSAVVLPGVEAAERAGVPAFLETSAPRNLPFYERLGFTVTADVEVPEGPRTWCMTRKPGA

SEQ ID NO: 16839 - protein, 1129 aa, Artificial Sequence
  Synthetic Polypeptide
MALPVTALLLPLALLLHAARPDIQMTQSPSSLSASVGDRVTITCKASDHINNWLAWYQQKPGQAPKLLIYGATTLETGVPSRFSGSGSGTDYTLTISSLQPEDFATYYCQQSWNTPWTFGQGTKLEIKRLEDLKNVFPPEVAVFEPSKAEIAHTQKATLVCLATGFYPDHVELSWWVNGKEVHSGVCTDPQPLKEQPALNDSRYCLSSRLRVSATFWQNPRNHFRCQVQFYGLSENDEWTQDRAKPVTQIVSAEAWGRADCGITSASYHQGVLSATILYEILLGKATLYAVLVSALVLMAMVKRKDSRGRAKRSGSGATNFSLLKQAGDVEENPGPTSMDWIWRILFLVGAATGAHSQLQLQESGPGLVKPSETLSLTCTVSGGSISSGDYYWGWIRQPPGKGLEWIGHIYYSGATYYNPSLKSRVTISVDTSRNQFSLKLSSVTAADTAVYYCTRDDSSNWRSRGQGTLVTVSSSGGGGSGGGGSEVQLVESGGGLVQPGGSLRLSCAASGFASDYYIIGWFRQAPGKEREGVSCISSRYANTNYADSVKGRFTISRDNAKNTVYLQMNSLKPEDTAVYYCAADTRRYTCPDIATMHRNFDSWGQGTLVTVSSGSGGGGSGGGGSGGGGSFEQVQLQQPGAELVKPGASVKMSCKASGYAFSSYWINWMKQKPGQGLEWIGQIYPGDGDTNYNGKFKGRATLTADTSSSTAYMQLSSLTSEDSAVYFCARSITTVVGCAMDYWGQGTSVTVSSTRIQNPDPAVYQLRDSKSSDKSVCLFTDFDSQTNVSQSKDSDVYITDKCVLDMRSMDFKSNSAVAWSNKSDFACANAFNNSIIPEDTFFPSSDVPCDVKLVEKSFETDTNLNFQNLSVIGFRILLLKVAGFNLLMTLRLWSSRAKRSGSGVKQTLNFDLLKLAGDVESNPGPSRGHMTEYKPTVRLATRDDVPRAVRTLAAAFADYPATRHTVDPDRHIERVTELQELFLTRVGLDIGKVWVADDGAAVAVWTTPESVEAGAVFAEIGPRMAELSGSRLAAQQQMEGLLAPHRPKEPAWFLATVGVSPDHQGKGLGSAVVLPGVEAAERAGVPAFLETSAPRNLPFYERLGFTVTADVEVPEGPRTWCMTRKPGA

SEQ ID NO: 16840 - protein, 1129 aa, Artificial Sequence
  Synthetic Polypeptide
MALPVTALLLPLALLLHAARPDIQMTQSPSSLSASVGDRVTITCKASDHINNWLAWYQQKPGQAPKLLIYGATTLETGVPSRFSGSGSGTDYTLTISSLQPEDFATYYCQQSWNTPWTFGQGTKLEIKRLEDLKNVFPPEVAVFEPSEAEISHTQKATLVCLATGFYPDHVELSWWVNGKEVHSGVCTDPQPLKEQPALNDSRYCLSSRLRVSATFWQNPRNHFRCQVQFYGLSENDEWTQDRAKPVTQIVSAEAWGRADCGFTSESYQQGVLSATILYEILLGKATLYAVLVSALVLMAMVKRKDSRGRAKRSGSGATNFSLLKQAGDVEENPGPTSMDWIWRILFLVGAATGAHSQLQLQESGPGLVKPSETLSLTCTVSGGSISSGDYYWGWIRQPPGKGLEWIGHIYYSGATYYNPSLKSRVTISVDTSRNQFSLKLSSVTAADTAVYYCTRDDSSNWRSRGQGTLVTVSSSGGGGSGGGGSEVQLVESGGGLVQPGGSLRLSCAASGFASDYYIIGWFRQAPGKEREGVSCISSRYANTNYADSVKGRFTISRDNAKNTVYLQMNSLKPEDTAVYYCAADTRRYTCPDIATMHRNFDSWGQGTLVTVSSGSGGGGSGGGGSGGGGSFEQVQLQQPGAELVKPGASVKMSCKASGYAFSSYWINWMKQKPGQGLEWIGQIYPGDGDTNYNGKFKGRATLTADTSSSTAYMQLSSLTSEDSAVYFCARSITTVVGCAMDYWGQGTSVTVSSTRIQNPDPAVYQLRDSKSSDKSVCLFTDFDSQTNVSQSKDSDVYITDKCVLDMRSMDFKSNSAVAWSNKSDFACANAFNNSIIPEDTFFPSPESSCDVKLVEKSFETDTNLNFQNLSVIGFRILLLKVAGFNLLMTLRLWSSRAKRSGSGVKQTLNFDLLKLAGDVESNPGPSRGHMTEYKPTVRLATRDDVPRAVRTLAAAFADYPATRHTVDPDRHIERVTELQELFLTRVGLDIGKVWVADDGAAVAVWTTPESVEAGAVFAEIGPRMAELSGSRLAAQQQMEGLLAPHRPKEPAWFLATVGVSPDHQGKGLGSAVVLPGVEAAERAGVPAFLETSAPRNLPFYERLGFTVTADVEVPEGPRTWCMTRKPGA

SEQ ID NO: 16841 - protein, 896 aa, Artificial Sequence
  Synthetic Polypeptide
MALPVTALLLPLALLLHAARPDIQMTQSPSSLSASVGDRVTITCKASDHINNWLAWYQQKPGQAPKLLIYGATTLETGVPSRFSGSGSGTDYTLTISSLQPEDFATYYCQQSWNTPWTFGQGTKLEIKRLEDLKNVFPPEVAVFEPSEAEISHTQKATLVCLATGFYPDHVELSWWVNGKEVHSGVCTDPQPLKEQPALNDSRYCLSSRLRVSATFWQNPRNHFRCQVQFYGLSENDEWTQDRAKPVTQIVSAEAWGRADCGFTSESYQQGVLSATILYEILLGKATLYAVLVSALVLMAMVKRKDSRGRAKRSGSGATNFSLLKQAGDVEENPGPTSMDWIWRILFLVGAATGAHSQLQLQESGPGLVKPSETLSLTCTVSGGSISSGDYYWGWIRQPPGKGLEWIGHIYYSGATYYNPSLKSRVTISVDTSRNQFSLKLSSVTAADTAVYYCTRDDSSNWRSRGQGTLVTVSSSGGGGSGGGGSEVQLVESGGGLVQPGGSLRLSCAASGFASDYYIIGWFRQAPGKEREGVSCISSRYANTNYADSVKGRFTISRDNAKNTVYLQMNSLKPEDTAVYYCAADTRRYTCPDIATMHRNFDSWGQGTLVTVSSGSGGGGSGGGGSGGGGSFEQVQLQQPGAELVKPGASVKMSCKASGYAFSSYWINWMKQKPGQGLEWIGQIYPGDGDTNYNGKFKGRATLTADTSSSTAYMQLSSLTSEDSAVYFCARSITTVVGCAMDYWGQGTSVTVSSTRIQNPDPAVYQLRDSKSSDKSVCLFTDFDSQTNVSQSKDSDVYITDKCVLDMRSMDFKSNSAVAWSNKSDFACANAFNNSIIPEDTFFPSPESSCDVKLVEKSFETDTNLNFQNLSVIGFRILLLKVAGFNLLMTLRLWSS

SEQ ID NO: 16842 - protein, 1121 aa, Artificial Sequence
  Synthetic Polypeptide
MALPVTALLLPLALLLHAARPDIQMTQSPSSLSASVGDRVTITCKASDHINNWLAWYQQKPGQAPKLLIYGATTLETGVPSRFSGSGSGTDYTLTISSLQPEDFATYYCQQSWNTPWTFGQGTKLEIKRLEDLKNVFPPEVAVFEPSEAEISHTQKATLVCLATGFYPDHVELSWWVNGKEVHSGVCTDPQPLKEQPALNDSRYCLSSRLRVSATFWQNPRNHFRCQVQFYGLSENDEWTQDRAKPVTQIVSAEAWGRADCGFTSESYQQGVLSATILYEILLGKATLYAVLVSALVLMAMVKRKDSRGRAKRSGSGATNFSLLKQAGDVEENPGPTSMDWIWRILFLVGAATGAHSQLQLQESGPGLVKPSETLSLTCTVSGGSISSGDYYWGWIRQPPGKGLEWIGHIYYSGATYYNPSLKSRVTISVDTSRNQFSLKLSSVTAADTAVYYCTRDDSSNWRSRGQGTLVTVSSSGGGGSGGGGSEVQLVESGGGLVQPGGSLRLSCAASGFASDYYIIGWFRQAPGKEREGVSCISSRYANTNYADSVKGRFTISRDNAKNTVYLQMNSLKPEDTAVYYCAADTRRYTCPDIATMHRNFDSWGQGTLVTVSSGSGGGGSGGGGSGGGGSFEQVQLQQPGAELVKPGASVKMSCKASGYAFSSYWINWMKQKPGQGLEWIGQIYPGDGDTNYNGKFKGRATLTADTSSSTAYMQLSSLTSEDSAVYFCARSITTVVGCAMDYWGQGTSVTVSSTRIQNPDPAVYQLRDSKSSDKSVCLFTDFDSQTNVSQSKDSDVYITDKCVLDMRSMDFKSNSAVAWSNKSDFACANAFNNSIIPEDTFFPSPESSCDVKLVEKSFETDTNLNFQNLSVIGFRILLLKVAGFNLLMTLRLWSSRAKRSGSGVKQTLNFDLLKLAGDVESNPGPSRGGIHTMATYEVLCEVARKLGTDDREVVLFLLNVFIPQPTLAQLIGALRALKEEGRLTFPLLAECLFRAGRRDLLRDLLHLDPRFLERHLAGTMSYFSPYQLTVLHVDGELCARDIRSLIFLSKDTIGSRSTPQTFLHWVYCMENLDLLGPTDVDALMSMLRSLSRVDLQRQVQTLMGLHLSGPSHSQHYRHTP

SEQ ID NO: 16843 - protein, 900 aa, Artificial Sequence
  Synthetic Polypeptide
MALPVTALLLPLALLLHAARPDIQMTQSPSSLSASVGDRVTITCKASDHINNWLAWYQQKPGQAPKLLIYGATTLETGVPSRFSGSGSGTDYTLTISSLQPEDFATYYCQQSWNTPWTFGQGTKLEIKRLEIQNPDPAVYQLRDSKSSDKSVCLFTDFDSQTNVSQSKDSDVYITDKCVLDMRSMDFKSNSAVAWSNKSDFACANAFNNSIIPEDTFFPSPESSCDVKLVEKSFETDTNLNFQNLSVIGFRILLLKVAGFNLLMTLRLWSSRAKRSGSGVKQTLNFDLLKLAGDVESNPGPTSMDWIWRILFLVGAATGAHSQLQLQESGPGLVKPSETLSLTCTVSGGSISSGDYYWGWIRQPPGKGLEWIGHIYYSGATYYNPSLKSRVTISVDTSRNQFSLKLSSVTAADTAVYYCTRDDSSNWRSRGQGTLVTVSSSGGGGSGGGGSEVQLVESGGGLVQPGGSLRLSCAASGFASDYYIIGWFRQAPGKEREGVSCISSRYANTNYADSVKGRFTISRDNAKNTVYLQMNSLKPEDTAVYYCAADTRRYTCPDIATMHRNFDSWGQGTLVTVSSGSGGGGSGGGGSGGGGSFEQVQLQQPGAELVKPGASVKMSCKASGYAFSSYWINWMKQKPGQGLEWIGQIYPGDGDTNYNGKFKGRATLTADTSSSTAYMQLSSLTSEDSAVYFCARSITTVVGCAMDYWGQGTSVTVSSTREDLKNVFPPEVAVFEPSEAEISHTQKATLVCLATGFYPDHVELSWWVNGKEVHSGVCTDPQPLKEQPALNDSRYCLSSRLRVSATFWQNPRNHFRCQVQFYGLSENDEWTQDRAKPVTQIVSAEAWGRADCGFTSESYQQGVLSATILYEILLGKATLYAVLVSALVLMAMVKRKDSRG

SEQ ID NO: 16844 - protein, 1122 aa, Artificial Sequence
  Synthetic Polypeptide
MALPVTALLLPLALLLHAARPDIQMTQSPSSLSASVGDRVTITCKASDHINNWLAWYQQKPGQAPKLLIYGATTLETGVPSRFSGSGSGTDYTLTISSLQPEDFATYYCQQSWNTPWTFGQGTKLEIKRLEIQNPDPAVYQLRDSKSSDKSVCLFTDFDSQTNVSQSKDSDVYITDKCVLDMRSMDFKSNSAVAWSNKSDFACANAFNNSIIPEDTFFPSPESSCDVKLVEKSFETDTNLNFQNLSVIGFRILLLKVAGFNLLMTLRLWSSRAKRSGSGVKQTLNFDLLKLAGDVESNPGPTSMDWIWRILFLVGAATGAHSQLQLQESGPGLVKPSETLSLTCTVSGGSISSGDYYWGWIRQPPGKGLEWIGHIYYSGATYYNPSLKSRVTISVDTSRNQFSLKLSSVTAADTAVYYCTRDDSSNWRSRGQGTLVTVSSSGGGGSGGGGSEVQLVESGGGLVQPGGSLRLSCAASGFASDYYIIGWFRQAPGKEREGVSCISSRYANTNYADSVKGRFTISRDNAKNTVYLQMNSLKPEDTAVYYCAADTRRYTCPDIATMHRNFDSWGQGTLVTVSSGSGGGGSGGGGSGGGGSFEQVQLQQPGAELVKPGASVKMSCKASGYAFSSYWINWMKQKPGQGLEWIGQIYPGDGDTNYNGKFKGRATLTADTSSSTAYMQLSSLTSEDSAVYFCARSITTVVGCAMDYWGQGTSVTVSSTREDLKNVFPPEVAVFEPSEAEISHTQKATLVCLATGFYPDHVELSWWVNGKEVHSGVCTDPQPLKEQPALNDSRYCLSSRLRVSATFWQNPRNHFRCQVQFYGLSENDEWTQDRAKPVTQIVSAEAWGRADCGFTSESYQQGVLSATILYEILLGKATLYAVLVSALVLMAMVKRKDSRGRAKRSGSGATNFSLLKQAGDVEENPGPSRGGIHTMATYEVLCEVARKLGTDDREVVLFLLNVFIPQPTLAQLIGALRALKEEGRLTFPLLAECLFRAGRRDLLRDLLHLDPRFLERHLAGTMSYFSPYQLTVLHVDGELCARDIRSLIFLSKDTIGSRSTPQTFLHWVYCMENLDLLGPTDVDALMSMLRSLSRVDLQRQVQTLMGLHLSGPSHSQHYRHTP

SEQ ID NO: 16845 - protein, 1129 aa, Artificial Sequence
  Synthetic Polypeptide
MALPVTALLLPLALLLHAARPDIQMTQSPSSLSASVGDRVTITCKASDHINNWLAWYQQKPGQAPKLLIYGATTLETGVPSRFSGSGSGTDYTLTISSLQPEDFATYYCQQSWNTPWTFGQGTKLEIKRLEDLKNVFPPEVAVFEPSEAEISHTQKATLVCLATGFYPDHVELSWWVNGKEVHSGVSTDPQPLKEQPALNDSRYCLSSRLRVSATFWQNPRNHFRCQVQFYGLSENDEWTQDRAKPVTQIVSAEAWGRADCGFTSESYQQGVLSATILYEILLGKATLYAVLVSALVLMAMVKRKDSRGRAKRSGSGATNFSLLKQAGDVEENPGPTSMDWIWRILFLVGAATGAHSQLQLQESGPGLVKPSETLSLTCTVSGGSISSGDYYWGWIRQPPGKGLEWIGHIYYSGATYYNPSLKSRVTISVDTSRNQFSLKLSSVTAADTAVYYCTRDDSSNWRSRGQGTLVTVSSSGGGGSGGGGSEVQLVESGGGLVQPGGSLRLSCAASGFASDYYIIGWFRQAPGKEREGVSCISSRYANTNYADSVKGRFTISRDNAKNTVYLQMNSLKPEDTAVYYCAADTRRYTCPDIATMHRNFDSWGQGTLVTVSSGSGGGGSGGGGSGGGGSFEQVQLQQPGAELVKPGASVKMSCKASGYAFSSYWINWMKQKPGQGLEWIGQIYPGDGDTNYNGKFKGRATLTADTSSSTAYMQLSSLTSEDSAVYFCARSITTVVGCAMDYWGQGTSVTVSSTRIQNPDPAVYQLRDSKSSDKSVCLFTDFDSQTNVSQSKDSDVYITDKTVLDMRSMDFKSNSAVAWSNKSDFACANAFNNSIIPEDTFFPSPESSCDVKLVEKSFETDTNLNFQNLSVIGFRILLLKVAGFNLLMTLRLWSSRAKRSGSGVKQTLNFDLLKLAGDVESNPGPSRGHMTEYKPTVRLATRDDVPRAVRTLAAAFADYPATRHTVDPDRHIERVTELQELFLTRVGLDIGKVWVADDGAAVAVWTTPESVEAGAVFAEIGPRMAELSGSRLAAQQQMEGLLAPHRPKEPAWFLATVGVSPDHQGKGLGSAVVLPGVEAAERAGVPAFLETSAPRNLPFYERLGFTVTADVEVPEGPRTWCMTRKPGA

SEQ ID NO: 16846 - protein, 1211 aa, Artificial Sequence
  Synthetic Polypeptide
MALPVTALLLPLALLLHAARPDIQMTQSPSSLSASVGDRVTITCKASDHINNWLAWYQQKPGQAPKLLIYGATTLETGVPSRFSGSGSGTDYTLTISSLQPEDFATYYCQQSWNTPWTFGQGTKLEIKRLEDLKNVFPPEVAVFEPSEAEISHTQKATLVCLATGFYPDHVELSWWVNGKEVHSGVSTDPQPLKEQPALNDSRYCLSSRLRVSATFWQNPRNHFRCQVQFYGLSENDEWTQDRAKPVTQIVSAEAWGRADCGFTSESYQQGVLSATILYEILLGKATLYAVLVSALVLMAMVKRKDSRGRAKRSGSGATNFSLLKQAGDVEENPGPTSMDWIWRILFLVGAATGAHSQLQLQESGPGLVKPSETLSLTCTVSGGSISSGDYYWGWIRQPPGKGLEWIGHIYYSGATYYNPSLKSRVTISVDTSRNQFSLKLSSVTAADTAVYYCTRDDSSNWRSRGQGTLVTVSSSGGGGSGGGGSEVQLVESGGGLVQPGGSLRLSCAASGFASDYYIIGWFRQAPGKEREGVSCISSRYANTNYADSVKGRFTISRDNAKNTVYLQMNSLKPEDTAVYYCAADTRRYTCPDIATMHRNFDSWGQGTLVTVSSGSGGGGSGGGGSGGGGSFEQVQLQQPGAELVKPGASVKMSCKASGYAFSSYWINWMKQKPGQGLEWIGQIYPGDGDTNYNGKFKGRATLTADTSSSTAYMQLSSLTSEDSAVYFCARSITTVVGCAMDYWGQGTSVTVSSTREQKLISEEDGSGTPFPSLAPPIMLLVDGKQQMVVVCLVLDVAPPGLDSPIWFSAGNGSALDAFTYGPSPATDGTWTNLAHLSLPSEELASWEPLVCHTGPGAEGHSRSTQPMHLSGEASTARTCPQEPLRGTPGGALWLGVLRLLLFKLLLFDLLLTCSCLCDPAGPLPSPATTTRLRALGSHRLHPATETGGREATSSPRPQPRDRRWGDTPPGRKPGSPVRAKRSGSGVKQTLNFDLLKLAGDVESNPGPSRGHMTEYKPTVRLATRDDVPRAVRTLAAAFADYPATRHTVDPDRHIERVTELQELFLTRVGLDIGKVWVADDGAAVAVWTTPESVEAGAVFAEIGPRMAELSGSRLAAQQQMEGLLAPHRPKEPAWFLATVGVSPDHQGKGLGSAVVLPGVEAAERAGVPAFLETSAPRNLPFYERLGFTVTADVEVPEGPRTWCMTRKPGA

SEQ ID NO: 16847 - protein, 1166 aa, Artificial Sequence
  Synthetic Polypeptide
MALPVTALLLPLALLLHAARPDIQMTQSPSSLSASVGDRVTITCKASDHINNWLAWYQQKPGQAPKLLIYGATTLETGVPSRFSGSGSGTDYTLTISSLQPEDFATYYCQQSWNTPWTFGQGTKLEIKRLEGKPIPNPLLGLDSTGSGDKQLDADVSPKPTIFLPSIAETKLQKAGTYLCLLEKFFPDVIKIHWQEKKSNTILGSQEGNTMKTNDTYMKFSWLTVPEKSLDKEHRCIVRHENNKNGVDQEIIFPPIKTDVITMDPKDNCSKDANDTLLLQLTNTSAYYMYLLLLLKSVVYFAIITCCLLRRTAFCCNGEKSRAKRSGSGATNFSLLKQAGDVEENPGPTSMDWIWRILFLVGAATGAHSQLQLQESGPGLVKPSETLSLTCTVSGGSISSGDYYWGWIRQPPGKGLEWIGHIYYSGATYYNPSLKSRVTISVDTSRNQFSLKLSSVTAADTAVYYCTRDDSSNWRSRGQGTLVTVSSSGGGGSGGGGSEVQLVESGGGLVQPGGSLRLSCAASGFASDYYIIGWFRQAPGKEREGVSCISSRYANTNYADSVKGRFTISRDNAKNTVYLQMNSLKPEDTAVYYCAADTRRYTCPDIATMHRNFDSWGQGTLVTVSSGSGGGGSGGGGSGGGGSFEQVQLQQPGAELVKPGASVKMSCKASGYAFSSYWINWMKQKPGQGLEWIGQIYPGDGDTNYNGKFKGRATLTADTSSSTAYMQLSSLTSEDSAVYFCARSITTVVGCAMDYWGQGTSVTVSSTREQKLISEEDGSGSQPHTKPSVFVMKNGTNVACLVKEFYPKDIRINLVSSKKITEFDPAIVISPSGKYNAVKLGKYEDSNSVTCSVQHDNKTVHSTDFEVKTDSTDHVKPKETENTKQPSKSCHKPKAIVHTEKVNMMSLTVLGLRMLFAKTVAVNFLLTAKLFFLRAKRSGSGVKQTLNFDLLKLAGDVESNPGPSRGHMTEYKPTVRLATRDDVPRAVRTLAAAFADYPATRHTVDPDRHIERVTELQELFLTRVGLDIGKVWVADDGAAVAVWTTPESVEAGAVFAEIGPRMAELSGSRLAAQQQMEGLLAPHRPKEPAWFLATVGVSPDHQGKGLGSAVVLPGVEAAERAGVPAFLETSAPRNLPFYERLGFTVTADVEVPEGPRTWCMTRKPGA

SEQ ID NO: 16848 - protein, 904 aa, Artificial Sequence
  Synthetic Polypeptide
MALPVTALLLPLALLLHAARPDIQMTQSPSSLSASVGDRVTITCKASDHINNWLAWYQQKPGQAPKLLIYGATTLETGVPSRFSGSGSGTDYTLTISSLQPEDFATYYCQQSWNTPWTFGQGTKLEIKRLESQPHTKPSVFVMKNGTNVACLVKEFYPKDIRINLVSSKKITEFDPAIVISPSGKYNAVKLGKYEDSNSVTCSVQHDNKTVHSTDFEVKTDSTDHVKPKETENTKQPSKSCHKPKAIVHTEKVNMMSLTVLGLRMLFAKTVAVNFLLTAKLFFLRAKRSGSGATNFSLLKQAGDVEENPGPTSMDWIWRILFLVGAATGAHSQLQLQESGPGLVKPSETLSLTCTVSGGSISSGDYYWGWIRQPPGKGLEWIGHIYYSGATYYNPSLKSRVTISVDTSRNQFSLKLSSVTAADTAVYYCTRDDSSNWRSRGQGTLVTVSSSGGGGSGGGGSEVQLVESGGGLVQPGGSLRLSCAASGFASDYYIIGWFRQAPGKEREGVSCISSRYANTNYADSVKGRFTISRDNAKNTVYLQMNSLKPEDTAVYYCAADTRRYTCPDIATMHRNFDSWGQGTLVTVSSGSGGGGSGGGGSGGGGSFEQVQLQQPGAELVKPGASVKMSCKASGYAFSSYWINWMKQKPGQGLEWIGQIYPGDGDTNYNGKFKGRATLTADTSSSTAYMQLSSLTSEDSAVYFCARSITTVVGCAMDYWGQGTSVTVSSTRDKQLDADVSPKPTIFLPSIAETKLQKAGTYLCLLEKFFPDVIKIHWQEKKSNTILGSQEGNTMKTNDTYMKFSWLTVPEKSLDKEHRCIVRHENNKNGVDQEIIFPPIKTDVITMDPKDNCSKDANDTLLLQLTNTSAYYMYLLLLLKSVVYFAIITCCLLRRTAFCCNGEKS

SEQ ID NO: 16849 - protein, 1306 aa, Artificial Sequence
  Synthetic Polypeptide
MALPVTALLLPLALLLHAARPDIQMTQSPSSLSASVGDRVTITCKASDHINNWLAWYQQKPGQAPKLLIYGATTLETGVPSRFSGSGSGTDYTLTISSLQPEDFATYYCQQSWNTPWTFGQGTKLEIKRGQPKANPTVTLFPPSSEELQANKATLVCLISDFYPGAVTVAWKADGSPVKAGVETTKPSKQSNNKYAASSYLSLTPEQWKSHRSYSCQVTHEGSTVEKTVAPTECSGSQSFGLLDPKLCYLLDGILFIYGVILTALFLRVKFSRSADAPAYQQGQNQLYNELNLGRREEYDVLDKRRGRDPEMGGKPQRRKNPQEGLYNELQKDKMAEAYSEIGMKGERRRGKGHDGLYQGLSTATKDTYDALHMQALPPRRAKRSGSGATNFSLLKQAGDVEENPGPTSMDWIWRILFLVGAATGAHSQLQLQESGPGLVKPSETLSLTCTVSGGSISSGDYYWGWIRQPPGKGLEWIGHIYYSGATYYNPSLKSRVTISVDTSRNQFSLKLSSVTAADTAVYYCTRDDSSNWRSRGQGTLVTVSSSGGGGSGGGGSEVQLVESGGGLVQPGGSLRLSCAASGFASDYYIIGWFRQAPGKEREGVSCISSRYANTNYADSVKGRFTISRDNAKNTVYLQMNSLKPEDTAVYYCAADTRRYTCPDIATMHRNFDSWGQGTLVTVSSGSGGGGSGGGGSGGGGSFEQVQLQQPGAELVKPGASVKMSCKASGYAFSSYWINWMKQKPGQGLEWIGQIYPGDGDTNYNGKFKGRATLTADTSSSTAYMQLSSLTSEDSAVYFCARSITTVVGCAMDYWGQGTSVTVSSASTKGPSVFPLAPSSKSTSGGTAALGCLVKDYFPEPVTVSWNSGALTSGVHTFPAVLQSSGLYSLSSVVTVPSSSLGTQTYICNVNHKPSNTKVDKRVEPKSCGTQSFGLLDPKLCYLLDGILFIYGVILTALFLRVKFSRSADAPAYQQGQNQLYNELNLGRREEYDVLDKRRGRDPEMGGKPQRRKNPQEGLYNELQKDKMAEAYSEIGMKGERRRGKGHDGLYQGLSTATKDTYDALHMQALPPRRAKRSGSGVKQTLNFDLLKLAGDVESNPGPSRGHMTEYKPTVRLATRDDVPRAVRTLAAAFADYPATRHTVDPDRHIERVTELQELFLTRVGLDIGKVWVADDGAAVAVWTTPESVEAGAVFAEIGPRMAELSGSRLAAQQQMEGLLAPHRPKEPAWFLATVGVSPDHQGKGLGSAVVLPGVEAAERAGVPAFLETSAPRNLPFYERLGFTVTADVEVPEGPRTWCMTRKPGA

SEQ ID NO: 16850 - protein, 1092 aa, Artificial Sequence
  Synthetic Polypeptide
MALPVTALLLPLALLLHAARPDIQMTQSPSSLSASVGDRVTITCKASDHINNWLAWYQQKPGQAPKLLIYGATTLETGVPSRFSGSGSGTDYTLTISSLQPEDFATYYCQQSWNTPWTFGQGTKLEIKRLEDLKNVFPPEVAVFEPSEAEISHTQKATLVCLATGFYPDHVELSWWVNGKEVHSGVSTDPQPLKEQPALNDSRYCLSSRLRVSATFWQNPRNHFRCQVQFYGLSENDEWTQDRAKPVTQIVSAEAWGRADCGSQSFGLLDPKLCYLLDGILFIYGVILTALFLRVKFSRSADAPAYQQGQNQLYNELNLGRREEYDVLDKRRGRDPEMGGKPQRRKNPQEGLYNELQKDKMAEAYSEIGMKGERRRGKGHDGLYQGLSTATKDTYDALHMQALPPRRAKRSGSGATNFSLLKQAGDVEENPGPTSMDWIWRILFLVGAATGAHSQLQLQESGPGLVKPSETLSLTCTVSGGSISSGDYYWGWIRQPPGKGLEWIGHIYYSGATYYNPSLKSRVTISVDTSRNQFSLKLSSVTAADTAVYYCTRDDSSNWRSRGQGTLVTVSSSGGGGSGGGGSEVQLVESGGGLVQPGGSLRLSCAASGFASDYYIIGWFRQAPGKEREGVSCISSRYANTNYADSVKGRFTISRDNAKNTVYLQMNSLKPEDTAVYYCAADTRRYTCPDIATMHRNFDSWGQGTLVTVSSGSGGGGSGGGGSGGGGSFEQVQLQQPGAELVKPGASVKMSCKASGYAFSSYWINWMKQKPGQGLEWIGQIYPGDGDTNYNGKFKGRATLTADTSSSTAYMQLSSLTSEDSAVYFCARSITTVVGCAMDYWGQGTSVTVSSTRIQNPDPAVYQLRDSKSSDKSVCLFTDFDSQTNVSQSKDSDVYITDKTVLDMRSMDFKSNSAVAWSNKSDFACANAFNNSIIPEDTFFPSPESSCGTQSFGLLDPKLCYLLDGILFIYGVILTALFLRVKFSRSADAPAYQQGQNQLYNELNLGRREEYDVLDKRRGRDPEMGGKPQRRKNPQEGLYNELQKDKMAEAYSEIGMKGERRRGKGHDGLYQGLSTATKDTYDALHMQALPPR

SEQ ID NO: 16851 - protein, 1092 aa, Artificial Sequence
  Synthetic Polypeptide
MALPVTALLLPLALLLHAARPDIQMTQSPSSLSASVGDRVTITCKASDHINNWLAWYQQKPGQAPKLLIYGATTLETGVPSRFSGSGSGTDYTLTISSLQPEDFATYYCQQSWNTPWTFGQGTKLEIKRLEDLKNVFPPEVAVFEPSKAEIAHTQKATLVCLATGFYPDHVELSWWVNGKEVHSGVCTDPQPLKEQPALNDSRYCLSSRLRVSATFWQNPRNHFRCQVQFYGLSENDEWTQDRAKPVTQIVSAEAWGRADCGSQSFGLLDPKLCYLLDGILFIYGVILTALFLRVKFSRSADAPAYQQGQNQLYNELNLGRREEYDVLDKRRGRDPEMGGKPQRRKNPQEGLYNELQKDKMAEAYSEIGMKGERRRGKGHDGLYQGLSTATKDTYDALHMQALPPRRAKRSGSGATNFSLLKQAGDVEENPGPTSMDWIWRILFLVGAATGAHSQLQLQESGPGLVKPSETLSLTCTVSGGSISSGDYYWGWIRQPPGKGLEWIGHIYYSGATYYNPSLKSRVTISVDTSRNQFSLKLSSVTAADTAVYYCTRDDSSNWRSRGQGTLVTVSSSGGGGSGGGGSEVQLVESGGGLVQPGGSLRLSCAASGFASDYYIIGWFRQAPGKEREGVSCISSRYANTNYADSVKGRFTISRDNAKNTVYLQMNSLKPEDTAVYYCAADTRRYTCPDIATMHRNFDSWGQGTLVTVSSGSGGGGSGGGGSGGGGSFEQVQLQQPGAELVKPGASVKMSCKASGYAFSSYWINWMKQKPGQGLEWIGQIYPGDGDTNYNGKFKGRATLTADTSSSTAYMQLSSLTSEDSAVYFCARSITTVVGCAMDYWGQGTSVTVSSTRIQNPDPAVYQLRDSKSSDKSVCLFTDFDSQTNVSQSKDSDVYITDKCVLDMRSMDFKSNSAVAWSNKSDFACANAFNNSIIPEDTFFPSSDVPCGTQSFGLLDPKLCYLLDGILFIYGVILTALFLRVKFSRSADAPAYQQGQNQLYNELNLGRREEYDVLDKRRGRDPEMGGKPQRRKNPQEGLYNELQKDKMAEAYSEIGMKGERRRGKGHDGLYQGLSTATKDTYDALHMQALPPR

SEQ ID NO: 16852 - protein, 1163 aa, Artificial Sequence
  Synthetic Polypeptide
MALPVTALLLPLALLLHAARPDIQMTQSPSSLSASVGDRVTITCKASDHINNWLAWYQQKPGQAPKLLIYGATTLETGVPSRFSGSGSGTDYTLTISSLQPEDFATYYCQQSWNTPWTFGQGTKLEIKRLEGKPIPNPLLGLDSTGSGEDLKNVFPPEVAVFEPSEAEISHTQKATLVCLATGFYPDHVELSWWVNGKEVHSGVSTDPQPLKEQPALNDSRYCLSSRLRVSATFWQNPRNHFRCQVQFYGLSENDEWTQDRAKPVTQIVSAEAWGRADCGSQSFGLLDPKLCYLLDGILFIYGVILTALFLRVKFSRSADAPAYQQGQNQLYNELNLGRREEYDVLDKRRGRDPEMGGKPQRRKNPQEGLYNELQKDKMAEAYSEIGMKGERRRGKGHDGLYQGLSTATKDTYDALHMQALPPRRAKRSGSGATNFSLLKQAGDVEENPGPTSMDWIWRILFLVGAATGAHSQLQLQESGPGLVKPSETLSLTCTVSGGSISSGDYYWGWIRQPPGKGLEWIGHIYYSGATYYNPSLKSRVTISVDTSRNQFSLKLSSVTAADTAVYYCTRDDSSNWRSRGQGTLVTVSSSGGGGSGGGGSEVQLVESGGGLVQPGGSLRLSCAASGFASDYYIIGWFRQAPGKEREGVSCISSRYANTNYADSVKGRFTISRDNAKNTVYLQMNSLKPEDTAVYYCAADTRRYTCPDIATMHRNFDSWGQGTLVTVSSGSGGGGSGGGGSGGGGSFEQVQLQQPGAELVKPGASVKMSCKASGYAFSSYWINWMKQKPGQGLEWIGQIYPGDGDTNYNGKFKGRATLTADTSSSTAYMQLSSLTSEDSAVYFCARSITTVVGCAMDYWGQGTSVTVSSTREQKLISEEDGSGIQNPDPAVYQLRDSKSSDKSVCLFTDFDSQTNVSQSKDSDVYITDKTVLDMRSMDFKSNSAVAWSNKSDFACANAFNNSIIPEDTFFPSPESSCGTQSFGLLDPKLCYLLDGILFIYGVILTALFLRSKRSRLLHSDYMNMTPRRPGPTRKHYQPYAPPRDFAAYRSRVKFSRSADAPAYQQGQNQLYNELNLGRREEYDVLDKRRGRDPEMGGKPQRRKNPQEGLYNELQKDKMAEAYSEIGMKGERRRGKGHDGLYQGLSTATKDTYDALHMQALPPR

SEQ ID NO: 16853 - protein, 1204 aa, Artificial Sequence
  Synthetic Polypeptide
MALPVTALLLPLALLLHAARPDIQMTQSPSSLSASVGDRVTITCKASDHINNWLAWYQQKPGQAPKLLIYGATTLETGVPSRFSGSGSGTDYTLTISSLQPEDFATYYCQQSWNTPWTFGQGTKLEIKRLEGKPIPNPLLGLDSTGSGEDLKNVFPPEVAVFEPSEAEISHTQKATLVCLATGFYPDHVELSWWVNGKEVHSGVSTDPQPLKEQPALNDSRYCLSSRLRVSATFWQNPRNHFRCQVQFYGLSENDEWTQDRAKPVTQIVSAEAWGRADCGSQSFGLLDPKLCYLLDGILFIYGVILTALFLRSKRSRLLHSDYMNMTPRRPGPTRKHYQPYAPPRDFAAYRSRVKFSRSADAPAYQQGQNQLYNELNLGRREEYDVLDKRRGRDPEMGGKPQRRKNPQEGLYNELQKDKMAEAYSEIGMKGERRRGKGHDGLYQGLSTATKDTYDALHMQALPPRRAKRSGSGATNFSLLKQAGDVEENPGPTSMDWIWRILFLVGAATGAHSQLQLQESGPGLVKPSETLSLTCTVSGGSISSGDYYWGWIRQPPGKGLEWIGHIYYSGATYYNPSLKSRVTISVDTSRNQFSLKLSSVTAADTAVYYCTRDDSSNWRSRGQGTLVTVSSSGGGGSGGGGSEVQLVESGGGLVQPGGSLRLSCAASGFASDYYIIGWFRQAPGKEREGVSCISSRYANTNYADSVKGRFTISRDNAKNTVYLQMNSLKPEDTAVYYCAADTRRYTCPDIATMHRNFDSWGQGTLVTVSSGSGGGGSGGGGSGGGGSFEQVQLQQPGAELVKPGASVKMSCKASGYAFSSYWINWMKQKPGQGLEWIGQIYPGDGDTNYNGKFKGRATLTADTSSSTAYMQLSSLTSEDSAVYFCARSITTVVGCAMDYWGQGTSVTVSSTREQKLISEEDGSGIQNPDPAVYQLRDSKSSDKSVCLFTDFDSQTNVSQSKDSDVYITDKTVLDMRSMDFKSNSAVAWSNKSDFACANAFNNSIIPEDTFFPSPESSCGTQSFGLLDPKLCYLLDGILFIYGVILTALFLRSKRSRLLHSDYMNMTPRRPGPTRKHYQPYAPPRDFAAYRSRVKFSRSADAPAYQQGQNQLYNELNLGRREEYDVLDKRRGRDPEMGGKPQRRKNPQEGLYNELQKDKMAEAYSEIGMKGERRRGKGHDGLYQGLSTATKDTYDALHMQALPPR

SEQ ID NO: 16854 - protein, 1165 aa, Artificial Sequence
  Synthetic Polypeptide
MALPVTALLLPLALLLHAARPDIQMTQSPSSLSASVGDRVTITCKASDHINNWLAWYQQKPGQAPKLLIYGATTLETGVPSRFSGSGSGTDYTLTISSLQPEDFATYYCQQSWNTPWTFGQGTKLEIKRLEGKPIPNPLLGLDSTGSGEDLKNVFPPEVAVFEPSEAEISHTQKATLVCLATGFYPDHVELSWWVNGKEVHSGVSTDPQPLKEQPALNDSRYCLSSRLRVSATFWQNPRNHFRCQVQFYGLSENDEWTQDRAKPVTQIVSAEAWGRADCGSQSFGLLDPKLCYLLDGILFIYGVILTALFLRVKFSRSADAPAYQQGQNQLYNELNLGRREEYDVLDKRRGRDPEMGGKPQRRKNPQEGLYNELQKDKMAEAYSEIGMKGERRRGKGHDGLYQGLSTATKDTYDALHMQALPPRRAKRSGSGATNFSLLKQAGDVEENPGPTSMDWIWRILFLVGAATGAHSQLQLQESGPGLVKPSETLSLTCTVSGGSISSGDYYWGWIRQPPGKGLEWIGHIYYSGATYYNPSLKSRVTISVDTSRNQFSLKLSSVTAADTAVYYCTRDDSSNWRSRGQGTLVTVSSSGGGGSGGGGSEVQLVESGGGLVQPGGSLRLSCAASGFASDYYIIGWFRQAPGKEREGVSCISSRYANTNYADSVKGRFTISRDNAKNTVYLQMNSLKPEDTAVYYCAADTRRYTCPDIATMHRNFDSWGQGTLVTVSSGSGGGGSGGGGSGGGGSFEQVQLQQPGAELVKPGASVKMSCKASGYAFSSYWINWMKQKPGQGLEWIGQIYPGDGDTNYNGKFKGRATLTADTSSSTAYMQLSSLTSEDSAVYFCARSITTVVGCAMDYWGQGTSVTVSSTREQKLISEEDLGSGIQNPDPAVYQLRDSKSSDKSVCLFTDFDSQTNVSQSKDSDVYITDKTVLDMRSMDFKSNSAVAWSNKSDFACANAFNNSIIPEDTFFPSPESSCGTQSFGLLDPKLCYLLDGILFIYGVILTALFLKRGRKKLLYIFKQPFMRPVQTTQEEDGCSCRFPEEEEGGCELRVKFSRSADAPAYQQGQNQLYNELNLGRREEYDVLDKRRGRDPEMGGKPQRRKNPQEGLYNELQKDKMAEAYSEIGMKGERRRGKGHDGLYQGLSTATKDTYDALHMQALPPR

SEQ ID NO: 16855 - protein, 1207 aa, Artificial Sequence
  Synthetic Polypeptide
MALPVTALLLPLALLLHAARPDIQMTQSPSSLSASVGDRVTITCKASDHINNWLAWYQQKPGQAPKLLIYGATTLETGVPSRFSGSGSGTDYTLTISSLQPEDFATYYCQQSWNTPWTFGQGTKLEIKRLEGKPIPNPLLGLDSTGSGEDLKNVFPPEVAVFEPSEAEISHTQKATLVCLATGFYPDHVELSWWVNGKEVHSGVSTDPQPLKEQPALNDSRYCLSSRLRVSATFWQNPRNHFRCQVQFYGLSENDEWTQDRAKPVTQIVSAEAWGRADCGSQSFGLLDPKLCYLLDGILFIYGVILTALFLKRGRKKLLYIFKQPFMRPVQTTQEEDGCSCRFPEEEEGGCELRVKFSRSADAPAYQQGQNQLYNELNLGRREEYDVLDKRRGRDPEMGGKPQRRKNPQEGLYNELQKDKMAEAYSEIGMKGERRRGKGHDGLYQGLSTATKDTYDALHMQALPPRRAKRSGSGATNFSLLKQAGDVEENPGPTSMDWIWRILFLVGAATGAHSQLQLQESGPGLVKPSETLSLTCTVSGGSISSGDYYWGWIRQPPGKGLEWIGHIYYSGATYYNPSLKSRVTISVDTSRNQFSLKLSSVTAADTAVYYCTRDDSSNWRSRGQGTLVTVSSSGGGGSGGGGSEVQLVESGGGLVQPGGSLRLSCAASGFASDYYIIGWFRQAPGKEREGVSCISSRYANTNYADSVKGRFTISRDNAKNTVYLQMNSLKPEDTAVYYCAADTRRYTCPDIATMHRNFDSWGQGTLVTVSSGSGGGGSGGGGSGGGGSFEQVQLQQPGAELVKPGASVKMSCKASGYAFSSYWINWMKQKPGQGLEWIGQIYPGDGDTNYNGKFKGRATLTADTSSSTAYMQLSSLTSEDSAVYFCARSITTVVGCAMDYWGQGTSVTVSSTREQKLISEEDLGSGIQNPDPAVYQLRDSKSSDKSVCLFTDFDSQTNVSQSKDSDVYITDKTVLDMRSMDFKSNSAVAWSNKSDFACANAFNNSIIPEDTFFPSPESSCGTQSFGLLDPKLCYLLDGILFIYGVILTALFLKRGRKKLLYIFKQPFMRPVQTTQEEDGCSCRFPEEEEGGCELRVKFSRSADAPAYQQGQNQLYNELNLGRREEYDVLDKRRGRDPEMGGKPQRRKNPQEGLYNELQKDKMAEAYSEIGMKGERRRGKGHDGLYQGLSTATKDTYDALHMQALPPR

SEQ ID NO: 16856 - protein, 1097 aa, Artificial Sequence
  Synthetic Polypeptide
MALPVTALLLPLALLLHAARPDIQMTQSPSSLSASVGDRVTITCKASDHINNWLAWYQQKPGQAPKLLIYGATTLETGVPSRFSGSGSGTDYTLTISSLQPEDFATYYCQQSWNTPWTFGQGTKLEIKRLEQSFGLLDPKLCYLLDGILFIYGVILTALFLRVKFSRSADAPAYQQGQNQLYNELNLGRREEYDVLDKRRGRDPEMGGKPQRRKNPQEGLYNELQKDKMAEAYSEIGMKGERRRGKGHDGLYQGLSTATKDTYDALHMQALPPRRAKRSGSGATNFSLLKQAGDVEENPGPTSMDWIWRILFLVGAATGAHSQLQLQESGPGLVKPSETLSLTCTVSGGSISSGDYYWGWIRQPPGKGLEWIGHIYYSGATYYNPSLKSRVTISVDTSRNQFSLKLSSVTAADTAVYYCTRDDSSNWRSRGQGTLVTVSSSGGGGSGGGGSEVQLVESGGGLVQPGGSLRLSCAASGFASDYYIIGWFRQAPGKEREGVSCISSRYANTNYADSVKGRFTISRDNAKNTVYLQMNSLKPEDTAVYYCAADTRRYTCPDIATMHRNFDSWGQGTLVTVSSGSGGGGSGGGGSGGGGSFEQVQLQQPGAELVKPGASVKMSCKASGYAFSSYWINWMKQKPGQGLEWIGQIYPGDGDTNYNGKFKGRATLTADTSSSTAYMQLSSLTSEDSAVYFCARSITTVVGCAMDYWGQGTSVTVSSTRQSFGLLDPKLCYLLDGILFIYGVILTALFLRVKFSRSADAPAYQQGQNQLYNELNLGRREEYDVLDKRRGRDPEMGGKPQRRKNPQEGLYNELQKDKMAEAYSEIGMKGERRRGKGHDGLYQGLSTATKDTYDALHMQALPPRRAKRSGSGVKQTLNFDLLKLAGDVESNPGPSRGHMTEYKPTVRLATRDDVPRAVRTLAAAFADYPATRHTVDPDRHIERVTELQELFLTRVGLDIGKVWVADDGAAVAVWTTPESVEAGAVFAEIGPRMAELSGSRLAAQQQMEGLLAPHRPKEPAWFLATVGVSPDHQGKGLGSAVVLPGVEAAERAGVPAFLETSAPRNLPFYERLGFTVTADVEVPEGPRTWCMTRKPGA

SEQ ID NO: 16857 - protein, 922 aa, Artificial Sequence
  Synthetic Polypeptide
MALPVTALLLPLALLLHAARPDIQMTQSPSSLSASVGDRVTITCKASDHINNWLAWYQQKPGQAPKLLIYGATTLETGVPSRFSGSGSGTDYTLTISSLQPEDFATYYCQQSWNTPWTFGQGTKLEIKRLEGQPKANPTVTLFPPSSEELQANKATLVCLISDFYPGAVTVAWKADGSPVKAGVETTKPSKQSNNKYAASSYLSLTPEQWKSHRSYSCQVTHEGSTVEKTVAPTECSPIKTDVITMDPKDNCSKDANDTLLLQLTNTSAYYMYLLLLLKSVVYFAIITCCLLRRTAFCCNGEKSRAKRSGSGATNFSLLKQAGDVEENPGPTSMDWIWRILFLVGAATGAHSQLQLQESGPGLVKPSETLSLTCTVSGGSISSGDYYWGWIRQPPGKGLEWIGHIYYSGATYYNPSLKSRVTISVDTSRNQFSLKLSSVTAADTAVYYCTRDDSSNWRSRGQGTLVTVSSSGGGGSGGGGSEVQLVESGGGLVQPGGSLRLSCAASGFASDYYIIGWFRQAPGKEREGVSCISSRYANTNYADSVKGRFTISRDNAKNTVYLQMNSLKPEDTAVYYCAADTRRYTCPDIATMHRNFDSWGQGTLVTVSSGSGGGGSGGGGSGGGGSFEQVQLQQPGAELVKPGASVKMSCKASGYAFSSYWINWMKQKPGQGLEWIGQIYPGDGDTNYNGKFKGRATLTADTSSSTAYMQLSSLTSEDSAVYFCARSITTVVGCAMDYWGQGTSVTVSSTRASTKGPSVFPLAPSSKSTSGGTAALGCLVKDYFPEPVTVSWNSGALTSGVHTFPAVLQSSGLYSLSSVVTVPSSSLGTQTYICNVNHKPSNTKVDKRVEPKSCEVKTDSTDHVKPKETENTKQPSKSCHKPKAIVHTEKVNMMSLTVLGLRMLFAKTVAVNFLLTAKLFFL

SEQ ID NO: 16858 - protein, 900 aa, Artificial Sequence
  Synthetic Polypeptide
MALPVTALLLPLALLLHAARPDIQMTQSPSSLSASVGDRVTITCKASDHINNWLAWYQQKPGQAPKLLIYGATTLETGVPSRFSGSGSGTDYTLTISSLQPEDFATYYCQQSWNTPWTFGQGTKLEIKRLEGQPKANPTVTLFPPSSEELQANKATLVCLISDFYPGAVTVAWKADGSPVKAGVETTKPSKQSNNKYAASSYLSLTPEQWKSHRSYSCQVTHEGSTVEKTVAPTECSGRADCGITSASYHQGVLSATILYEILLGKATLYAVLVSALVLMAMVKRKDSRGRAKRSGSGATNFSLLKQAGDVEENPGPTSMDWIWRILFLVGAATGAHSQLQLQESGPGLVKPSETLSLTCTVSGGSISSGDYYWGWIRQPPGKGLEWIGHIYYSGATYYNPSLKSRVTISVDTSRNQFSLKLSSVTAADTAVYYCTRDDSSNWRSRGQGTLVTVSSSGGGGSGGGGSEVQLVESGGGLVQPGGSLRLSCAASGFASDYYIIGWFRQAPGKEREGVSCISSRYANTNYADSVKGRFTISRDNAKNTVYLQMNSLKPEDTAVYYCAADTRRYTCPDIATMHRNFDSWGQGTLVTVSSGSGGGGSGGGGSGGGGSFEQVQLQQPGAELVKPGASVKMSCKASGYAFSSYWINWMKQKPGQGLEWIGQIYPGDGDTNYNGKFKGRATLTADTSSSTAYMQLSSLTSEDSAVYFCARSITTVVGCAMDYWGQGTSVTVSSTRASTKGPSVFPLAPSSKSTSGGTAALGCLVKDYFPEPVTVSWNSGALTSGVHTFPAVLQSSGLYSLSSVVTVPSSSLGTQTYICNVNHKPSNTKVDKRVEPKSCIPEDTFFPSSDVPCDVKLVEKSFETDTNLNFQNLSVIGFRILLLKVAGFNLLMTLRLWSS

SEQ ID NO: 16859 - protein, 900 aa, Artificial Sequence
  Synthetic Polypeptide
MALPVTALLLPLALLLHAARPDIQMTQSPSSLSASVGDRVTITCKASDHINNWLAWYQQKPGQAPKLLIYGATTLETGVPSRFSGSGSGTDYTLTISSLQPEDFATYYCQQSWNTPWTFGQGTKLEIKRLEGQPKANPTVTLFPPSSEELQANKATLVCLISDFYPGAVTVAWKADGSPVKAGVETTKPSKQSNNKYAASSYLSLTPEQWKSHRSYSCQVTHEGSTVEKTVAPTECSGRADCGFTSESYQQGVLSATILYEILLGKATLYAVLVSALVLMAMVKRKDSRGRAKRSGSGATNFSLLKQAGDVEENPGPTSMDWIWRILFLVGAATGAHSQLQLQESGPGLVKPSETLSLTCTVSGGSISSGDYYWGWIRQPPGKGLEWIGHIYYSGATYYNPSLKSRVTISVDTSRNQFSLKLSSVTAADTAVYYCTRDDSSNWRSRGQGTLVTVSSSGGGGSGGGGSEVQLVESGGGLVQPGGSLRLSCAASGFASDYYIIGWFRQAPGKEREGVSCISSRYANTNYADSVKGRFTISRDNAKNTVYLQMNSLKPEDTAVYYCAADTRRYTCPDIATMHRNFDSWGQGTLVTVSSGSGGGGSGGGGSGGGGSFEQVQLQQPGAELVKPGASVKMSCKASGYAFSSYWINWMKQKPGQGLEWIGQIYPGDGDTNYNGKFKGRATLTADTSSSTAYMQLSSLTSEDSAVYFCARSITTVVGCAMDYWGQGTSVTVSSTRASTKGPSVFPLAPSSKSTSGGTAALGCLVKDYFPEPVTVSWNSGALTSGVHTFPAVLQSSGLYSLSSVVTVPSSSLGTQTYICNVNHKPSNTKVDKRVEPKSCIPEDTFFPSPESSCDVKLVEKSFETDTNLNFQNLSVIGFRILLLKVAGFNLLMTLRLWSS

SEQ ID NO: 16860 - protein, 730 aa, Artificial Sequence
  Synthetic Polypeptide
MDWIWRILFLVGAATGAHSQLQLQESGPGLVKPSETLSLTCTVSGGSISSGDYYWGWIRQPPGKGLEWIGHIYYSGATYYNPSLKSRVTISVDTSRNQFSLKLSSVTAADTAVYYCTRDDSSNWRSRGQGTLVTVSSSGGGGSGGGGSEVQLVESGGGLVQPGGSLRLSCAASGFASDYYIIGWFRQAPGKEREGVSCISSRYANTNYADSVKGRFTISRDNAKNTVYLQMNSLKPEDTAVYYCAADTRRYTCPDIATMHRNFDSWGQGTLVTVSSGSGGGGSGGGGSGGGGSFEQVQLQQPGAELVKPGASVKMSCKASGYAFSSYWINWMKQKPGQGLEWIGQIYPGDGDTNYNGKFKGRATLTADTSSSTAYMQLSSLTSEDSAVYFCARSITTVVGCAMDYWGQGTSVTVSSGGGGSGGGGSGGGGSDIQMTQSPSSLSASVGDRVTITCKASDHINNWLAWYQQKPGQAPKLLIYGATTLETGVPSRFSGSGSGTDYTLTISSLQPEDFATYYCQQSWNTPWTFGQGTKLEIKRTRGGGSDGNEEMGGITQTPYKVSISGTTVILTCPQYPGSEILWQHNDKNIGGDEDDKNIGSDEDHLSLKEFSELEQSGYYVCYPRGSKPEDANFYLYLRARVCENCMEMDVMSVATIVIVDICITGGLLLLVYYWSKNRKAKAKPVTRGAGAGGRQRGQNKERPPPVPNPDYEPIRKGQRDLYSGLNQRRI

SEQ ID NO: 16861 - protein, 695 aa, Artificial Sequence
  Synthetic Polypeptide
MDWIWRILFLVGAATGAHSQLQLQESGPGLVKPSETLSLTCTVSGGSISSGDYYWGWIRQPPGKGLEWIGHIYYSGATYYNPSLKSRVTISVDTSRNQFSLKLSSVTAADTAVYYCTRDDSSNWRSRGQGTLVTVSSSGGGGSGGGGSEVQLVESGGGLVQPGGSLRLSCAASGFASDYYIIGWFRQAPGKEREGVSCISSRYANTNYADSVKGRFTISRDNAKNTVYLQMNSLKPEDTAVYYCAADTRRYTCPDIATMHRNFDSWGQGTLVTVSSGSGGGGSGGGGSGGGGSFEQVQLQQPGAELVKPGASVKMSCKASGYAFSSYWINWMKQKPGQGLEWIGQIYPGDGDTNYNGKFKGRATLTADTSSSTAYMQLSSLTSEDSAVYFCARSITTVVGCAMDYWGQGTSVTVSSGGGGSGGGGSGGGGSDIQMTQSPSSLSASVGDRVTITCKASDHINNWLAWYQQKPGQAPKLLIYGATTLETGVPSRFSGSGSGTDYTLTISSLQPEDFATYYCQQSWNTPWTFGQGTKLEIKRTRGGGSFKIPIEELEDRVFVNCNTSITWVEGTVGTLLSDITRLDLGKRILDPRGIYRCNGTDIYKDKESTVQVHYRMCQSCVELDPATVAGIIVTDVIATLLLALGVFCFAGHETGRLSGAADTQALLRNDQVYQPLRDRDDAQYSHLGGNWARNK

SEQ ID NO: 16862 - protein, 705 aa, Artificial Sequence
  Synthetic Polypeptide
MDWIWRILFLVGAATGAHSQLQLQESGPGLVKPSETLSLTCTVSGGSISSGDYYWGWIRQPPGKGLEWIGHIYYSGATYYNPSLKSRVTISVDTSRNQFSLKLSSVTAADTAVYYCTRDDSSNWRSRGQGTLVTVSSSGGGGSGGGGSEVQLVESGGGLVQPGGSLRLSCAASGFASDYYIIGWFRQAPGKEREGVSCISSRYANTNYADSVKGRFTISRDNAKNTVYLQMNSLKPEDTAVYYCAADTRRYTCPDIATMHRNFDSWGQGTLVTVSSGSGGGGSGGGGSGGGGSFEQVQLQQPGAELVKPGASVKMSCKASGYAFSSYWINWMKQKPGQGLEWIGQIYPGDGDTNYNGKFKGRATLTADTSSSTAYMQLSSLTSEDSAVYFCARSITTVVGCAMDYWGQGTSVTVSSGGGGSGGGGSGGGGSDIQMTQSPSSLSASVGDRVTITCKASDHINNWLAWYQQKPGQAPKLLIYGATTLETGVPSRFSGSGSGTDYTLTISSLQPEDFATYYCQQSWNTPWTFGQGTKLEIKRTRGGGSQSIKGNHLVKVYDYQEDGSVLLTCDAEAKNITWFKDGKMIGFLTEDKKKWNLGSNAKDPRGMYQCKGSQNKSKPLQVYYRMCQNCIELNAATISGFLFAEIVSIFVLAVGVYFIAGQDGVRQSRASDKQTLLPNDQLYQPLKDREDDQYSHLQGNQLRRN

SEQ ID NO: 16863 - protein, 688 aa, Artificial Sequence
  Synthetic Polypeptide
MDWIWRILFLVGAATGAHSQLQLQESGPGLVKPSETLSLTCTVSGGSISSGDYYWGWIRQPPGKGLEWIGHIYYSGATYYNPSLKSRVTISVDTSRNQFSLKLSSVTAADTAVYYCTRDDSSNWRSRGQGTLVTVSSSGGGGSGGGGSEVQLVESGGGLVQPGGSLRLSCAASGFASDYYIIGWFRQAPGKEREGVSCISSRYANTNYADSVKGRFTISRDNAKNTVYLQMNSLKPEDTAVYYCAADTRRYTCPDIATMHRNFDSWGQGTLVTVSSGSGGGGSGGGGSGGGGSFEQVQLQQPGAELVKPGASVKMSCKASGYAFSSYWINWMKQKPGQGLEWIGQIYPGDGDTNYNGKFKGRATLTADTSSSTAYMQLSSLTSEDSAVYFCARSITTVVGCAMDYWGQGTSVTVSSGGGGSGGGGSGGGGSDIQMTQSPSSLSASVGDRVTITCKASDHINNWLAWYQQKPGQAPKLLIYGATTLETGVPSRFSGSGSGTDYTLTISSLQPEDFATYYCQQSWNTPWTFGQGTKLEIKRTRGGGSQSFGLLDPKLCYLLDGILFIYGVILTALFLRVKFSRSADAPAYQQGQNQLYNELNLGRREEYDVLDKRRGRDPEMGGKPQRRKNPQEGLYNELQKDKMAEAYSEIGMKGERRRGKGHDGLYQGLSTATKDTYDALHMQALPPR

SEQ ID NO: 16864 - protein, 724 aa, Artificial Sequence
  Synthetic Polypeptide
MDWIWRILFLVGAATGAHSQLQLQESGPGLVKPSETLSLTCTVSGGSISSGDYYWGWIRQPPGKGLEWIGHIYYSGATYYNPSLKSRVTISVDTSRNQFSLKLSSVTAADTAVYYCTRDDSSNWRSRGQGTLVTVSSSGGGGSGGGGSEVQLVESGGGLVQPGGSLRLSCAASGFASDYYIIGWFRQAPGKEREGVSCISSRYANTNYADSVKGRFTISRDNAKNTVYLQMNSLKPEDTAVYYCAADTRRYTCPDIATMHRNFDSWGQGTLVTVSSGSGGGGSGGGGSGGGGSFEQVQLQQPGAELVKPGASVKMSCKASGYAFSSYWINWMKQKPGQGLEWIGQIYPGDGDTNYNGKFKGRATLTADTSSSTAYMQLSSLTSEDSAVYFCARSITTVVGCAMDYWGQGTSVTVSSTRIQNPDPAVYQLRDSKSSDKSVCLFTDFDSQTNVSQSKDSDVYITDKTVLDMRSMDFKSNSAVAWSNKSDFACANAFNNSIIPEDTFFPSPESSCDVKLVEKSFETDTNLNFQNLSVIGFRILLLKVAGFNLLMTLRLWSSRAKRSGSGVKQTLNFDLLKLAGDVESNPGPSRGHMAKPLSQEESTLIERATATINSIPISEDYSVASAALSSDGRIFTGVNVYHFTGGPCAELVVLGTAAAAAAGNLTCIVAIGNENRGILSPCGRCRQVLLDLHPGIKAIVKDSDGQPTAVGIRELLPSGYVWEG

SEQ ID NO: 16865 - protein, 558 aa, Artificial Sequence
  Synthetic Polypeptide
MDWIWRILFLVGAATGAHSQLQLQESGPGLVKPSETLSLTCTVSGGSISSGDYYWGWIRQPPGKGLEWIGHIYYSGATYYNPSLKSRVTISVDTSRNQFSLKLSSVTAADTAVYYCTRDDSSNWRSRGQGTLVTVSSSGGGGSGGGGSEVQLVESGGGLVQPGGSLRLSCAASGFASDYYIIGWFRQAPGKEREGVSCISSRYANTNYADSVKGRFTISRDNAKNTVYLQMNSLKPEDTAVYYCAADTRRYTCPDIATMHRNFDSWGQGTLVTVSSGSGGGGSGGGGSGGGGSFEQVQLQQPGAELVKPGASVKMSCKASGYAFSSYWINWMKQKPGQGLEWIGQIYPGDGDTNYNGKFKGRATLTADTSSSTAYMQLSSLTSEDSAVYFCARSITTVVGCAMDYWGQGTSVTVSSTRIQNPDPAVYQLRDSKSSDKSVCLFTDFDSQTNVSQSKDSDVYITDKTVLDMRSMDFKSNSAVAWSNKSDFACANAFNNSIIPEDTFFPSPESSCDVKLVEKSFETDTNLNFQNLSVIGFRILLLKVAGFNLLMTLRLWSS

SEQ ID NO: 16866 - protein, 736 aa, Artificial Sequence
  Synthetic Polypeptide
MDWIWRILFLVGAATGAHSQLQLQESGPGLVKPSETLSLTCTVSGGSISSGDYYWGWIRQPPGKGLEWIGHIYYSGATYYNPSLKSRVTISVDTSRNQFSLKLSSVTAADTAVYYCTRDDSSNWRSRGQGTLVTVSSSGGGGSGGGGSEVQLVESGGGLVQPGGSLRLSCAASGFASDYYIIGWFRQAPGKEREGVSCISSRYANTNYADSVKGRFTISRDNAKNTVYLQMNSLKPEDTAVYYCAADTRRYTCPDIATMHRNFDSWGQGTLVTVSSGSGGGGSGGGGSGGGGSFEQVQLQQPGAELVKPGASVKMSCKASGYAFSSYWINWMKQKPGQGLEWIGQIYPGDGDTNYNGKFKGRATLTADTSSSTAYMQLSSLTSEDSAVYFCARSITTVVGCAMDYWGQGTSVTVSSTREQKLISEEDGSGIQNPDPAVYQLRDSKSSDKSVCLFTDFDSQTNVSQSKDSDVYITDKCVLDMRSMDFKSNSAVAWSNKSDFACANAFNNSIIPEDTFFPSPESSCDVKLVEKSFETDTNLNFQNLSVIGFRILLLKVAGFNLLMTLRLWSSRAKRSGSGVKQTLNFDLLKLAGDVESNPGPSRGHMAKPLSQEESTLIERATATINSIPISEDYSVASAALSSDGRIFTGVNVYHFTGGPCAELVVLGTAAAAAAGNLTCIVAIGNENRGILSPCGRCRQVLLDLHPGIKAIVKDSDGQPTAVGIRELLPSGYVWEG

SEQ ID NO: 16867 - protein, 570 aa, Artificial Sequence
  Synthetic Polypeptide
MDWIWRILFLVGAATGAHSQLQLQESGPGLVKPSETLSLTCTVSGGSISSGDYYWGWIRQPPGKGLEWIGHIYYSGATYYNPSLKSRVTISVDTSRNQFSLKLSSVTAADTAVYYCTRDDSSNWRSRGQGTLVTVSSSGGGGSGGGGSEVQLVESGGGLVQPGGSLRLSCAASGFASDYYIIGWFRQAPGKEREGVSCISSRYANTNYADSVKGRFTISRDNAKNTVYLQMNSLKPEDTAVYYCAADTRRYTCPDIATMHRNFDSWGQGTLVTVSSGSGGGGSGGGGSGGGGSFEQVQLQQPGAELVKPGASVKMSCKASGYAFSSYWINWMKQKPGQGLEWIGQIYPGDGDTNYNGKFKGRATLTADTSSSTAYMQLSSLTSEDSAVYFCARSITTVVGCAMDYWGQGTSVTVSSTREQKLISEEDGSGIQNPDPAVYQLRDSKSSDKSVCLFTDFDSQTNVSQSKDSDVYITDKCVLDMRSMDFKSNSAVAWSNKSDFACANAFNNSIIPEDTFFPSPESSCDVKLVEKSFETDTNLNFQNLSVIGFRILLLKVAGFNLLMTLRLWSS

SEQ ID NO: 16868 - protein, 1402 aa, Artificial Sequence
  Synthetic Polypeptide
MALPVTALLLPLALLLHAARPEVQLLESGGGLVQPGGSLRLSCAASGFTFSSYAMSWVRQAPGKGLEWVSSISGSGDYIYYADSVKGRFTISRDISKNTLYLQMNSLRAEDTAVYYCAKEGTGANSSLADYRGQGTLVTVSSGGGSGGGSEVQLVESGGSLVQPGGSLRLSCAASGFTFDDYAMSWVRQVPGKGLEWVSSINWSGTHTDYADSVKGRFTISRNNANNTLYLQMNSLKSEDTAVYYCAKNWRDAGTTWFEKSGSAGQGTQVTVSSGTGGGGSGGGGSGGGGSEFDIQMTQSPSSLSASVGDRVTITCKASDHINNWLAWYQQKPGQAPKLLIYGATTLETGVPSRFSGSGSGTDYTLTISSLQPEDFATYYCQQSWNTPWTFGQGTKLEIKRLEIQNPDPAVYQLRDSKSSDKSVCLFTDFDSQTNVSQSKDSDVYITDKCVLDMRSMDFKSNSAVAWSNKSDFACANAFNNSIIPEDTFFPSSDVPCDVKLVEKSFETDTNLNFQNLSVIGFRILLLKVAGFNLLMTLRLWSSRAKRSGSGVKQTLNFDLLKLAGDVESNPGPTSMDWIWRILFLVGAATGAHSQLQLQESGPGLVKPSETLSLTCTVSGGSISSGDYYWGWIRQPPGKGLEWIGHIYYSGATYYNPSLKSRVTISVDTSRNQFSLKLSSVTAADTAVYYCTRDDSSNWRSRGQGTLVTVSSSGGGGSGGGGSEVQLVESGGGLVQPGGSLRLSCAASGFASDYYIIGWFRQAPGKEREGVSCISSRYANTNYADSVKGRFTISRDNAKNTVYLQMNSLKPEDTAVYYCAADTRRYTCPDIATMHRNFDSWGQGTLVTVSSGSGGGGSGGGGSGGGGSFEQVQLQQPGAELVKPGASVKMSCKASGYAFSSYWINWMKQKPGQGLEWIGQIYPGDGDTNYNGKFKGRATLTADTSSSTAYMQLSSLTSEDSAVYFCARSITTVVGCAMDYWGQGTSVTVSSTREDLKNVFPPEVAVFEPSKAEIAHTQKATLVCLATGFYPDHVELSWWVNGKEVHSGVCTDPQPLKEQPALNDSRYCLSSRLRVSATFWQNPRNHFRCQVQFYGLSENDEWTQDRAKPVTQIVSAEAWGRADCGITSASYHQGVLSATILYEILLGKATLYAVLVSALVLMAMVKRKDSRGRAKRSGSGATNFSLLKQAGDVEENPGPSRGHMTEYKPTVRLATRDDVPRAVRTLAAAFADYPATRHTVDPDRHIERVTELQELFLTRVGLDIGKVWVADDGAAVAVWTTPESVEAGAVFAEIGPRMAELSGSRLAAQQQMEGLLAPHRPKEPAWFLATVGVSPDHQGKGLGSAVVLPGVEAAERAGVPAFLETSAPRNLPFYERLGFTVTADVEVPEGPRTWCMTRKPGA

SEQ ID NO: 16869 - protein, 1401 aa, Artificial Sequence
  Synthetic Polypeptide
MALPVTALLLPLALLLHAARPEVQLLESGGGLVQPGGSLRLSCAASGFTFSSYAMSWVRQAPGKGLEWVSSISGSGDYIYYADSVKGRFTISRDISKNTLYLQMNSLRAEDTAVYYCAKEGTGANSSLADYRGQGTLVTVSSGGGSGGGSEVQLVESGGSLVQPGGSLRLSCAASGFTFDDYAMSWVRQVPGKGLEWVSSINWSGTHTDYADSVKGRFTISRNNANNTLYLQMNSLKSEDTAVYYCAKNWRDAGTTWFEKSGSAGQGTQVTVSSGTGGGGSGGGGSGGGGSEFDIQMTQSPSSLSASVGDRVTITCKASDHINNWLAWYQQKPGQAPKLLIYGATTLETGVPSRFSGSGSGTDYTLTISSLQPEDFATYYCQQSWNTPWTFGQGTKLEIKRLEDLKNVFPPEVAVFEPSKAEIAHTQKATLVCLATGFYPDHVELSWWVNGKEVHSGVCTDPQPLKEQPALNDSRYCLSSRLRVSATFWQNPRNHFRCQVQFYGLSENDEWTQDRAKPVTQIVSAEAWGRADCGITSASYHQGVLSATILYEILLGKATLYAVLVSALVLMAMVKRKDSRGRAKRSGSGATNFSLLKQAGDVEENPGPTSMDWIWRILFLVGAATGAHSQLQLQESGPGLVKPSETLSLTCTVSGGSISSGDYYWGWIRQPPGKGLEWIGHIYYSGATYYNPSLKSRVTISVDTSRNQFSLKLSSVTAADTAVYYCTRDDSSNWRSRGQGTLVTVSSSGGGGSGGGGSEVQLVESGGGLVQPGGSLRLSCAASGFASDYYIIGWFRQAPGKEREGVSCISSRYANTNYADSVKGRFTISRDNAKNTVYLQMNSLKPEDTAVYYCAADTRRYTCPDIATMHRNFDSWGQGTLVTVSSGSGGGGSGGGGSGGGGSFEQVQLQQPGAELVKPGASVKMSCKASGYAFSSYWINWMKQKPGQGLEWIGQIYPGDGDTNYNGKFKGRATLTADTSSSTAYMQLSSLTSEDSAVYFCARSITTVVGCAMDYWGQGTSVTVSSTRIQNPDPAVYQLRDSKSSDKSVCLFTDFDSQTNVSQSKDSDVYITDKCVLDMRSMDFKSNSAVAWSNKSDFACANAFNNSIIPEDTFFPSSDVPCDVKLVEKSFETDTNLNFQNLSVIGFRILLLKVAGFNLLMTLRLWSSRAKRSGSGVKQTLNFDLLKLAGDVESNPGPSRGHMTEYKPTVRLATRDDVPRAVRTLAAAFADYPATRHTVDPDRHIERVTELQELFLTRVGLDIGKVWVADDGAAVAVWTTPESVEAGAVFAEIGPRMAELSGSRLAAQQQMEGLLAPHRPKEPAWFLATVGVSPDHQGKGLGSAVVLPGVEAAERAGVPAFLETSAPRNLPFYERLGFTVTADVEVPEGPRTWCMTRKPGA

SEQ ID NO: 16870 - protein, 1401 aa, Artificial Sequence
  Synthetic Polypeptide
MALPVTALLLPLALLLHAARPEVQLLESGGGLVQPGGSLRLSCAASGFTFSSYAMSWVRQAPGKGLEWVSSISGSGDYIYYADSVKGRFTISRDISKNTLYLQMNSLRAEDTAVYYCAKEGTGANSSLADYRGQGTLVTVSSGGGSGGGSEVQLVESGGSLVQPGGSLRLSCAASGFTFDDYAMSWVRQVPGKGLEWVSSINWSGTHTDYADSVKGRFTISRNNANNTLYLQMNSLKSEDTAVYYCAKNWRDAGTTWFEKSGSAGQGTQVTVSSGTGGGGSGGGGSGGGGSEFDIQMTQSPSSLSASVGDRVTITCKASDHINNWLAWYQQKPGQAPKLLIYGATTLETGVPSRFSGSGSGTDYTLTISSLQPEDFATYYCQQSWNTPWTFGQGTKLEIKRLEDLKNVFPPEVAVFEPSEAEISHTQKATLVCLATGFYPDHVELSWWVNGKEVHSGVCTDPQPLKEQPALNDSRYCLSSRLRVSATFWQNPRNHFRCQVQFYGLSENDEWTQDRAKPVTQIVSAEAWGRADCGFTSESYQQGVLSATILYEILLGKATLYAVLVSALVLMAMVKRKDSRGRAKRSGSGATNFSLLKQAGDVEENPGPTSMDWIWRILFLVGAATGAHSQLQLQESGPGLVKPSETLSLTCTVSGGSISSGDYYWGWIRQPPGKGLEWIGHIYYSGATYYNPSLKSRVTISVDTSRNQFSLKLSSVTAADTAVYYCTRDDSSNWRSRGQGTLVTVSSSGGGGSGGGGSEVQLVESGGGLVQPGGSLRLSCAASGFASDYYIIGWFRQAPGKEREGVSCISSRYANTNYADSVKGRFTISRDNAKNTVYLQMNSLKPEDTAVYYCAADTRRYTCPDIATMHRNFDSWGQGTLVTVSSGSGGGGSGGGGSGGGGSFEQVQLQQPGAELVKPGASVKMSCKASGYAFSSYWINWMKQKPGQGLEWIGQIYPGDGDTNYNGKFKGRATLTADTSSSTAYMQLSSLTSEDSAVYFCARSITTVVGCAMDYWGQGTSVTVSSTRIQNPDPAVYQLRDSKSSDKSVCLFTDFDSQTNVSQSKDSDVYITDKCVLDMRSMDFKSNSAVAWSNKSDFACANAFNNSIIPEDTFFPSPESSCDVKLVEKSFETDTNLNFQNLSVIGFRILLLKVAGFNLLMTLRLWSSRAKRSGSGVKQTLNFDLLKLAGDVESNPGPSRGHMTEYKPTVRLATRDDVPRAVRTLAAAFADYPATRHTVDPDRHIERVTELQELFLTRVGLDIGKVWVADDGAAVAVWTTPESVEAGAVFAEIGPRMAELSGSRLAAQQQMEGLLAPHRPKEPAWFLATVGVSPDHQGKGLGSAVVLPGVEAAERAGVPAFLETSAPRNLPFYERLGFTVTADVEVPEGPRTWCMTRKPGA

SEQ ID NO: 16871 - protein, 1168 aa, Artificial Sequence
  Synthetic Polypeptide
MALPVTALLLPLALLLHAARPEVQLLESGGGLVQPGGSLRLSCAASGFTFSSYAMSWVRQAPGKGLEWVSSISGSGDYIYYADSVKGRFTISRDISKNTLYLQMNSLRAEDTAVYYCAKEGTGANSSLADYRGQGTLVTVSSGGGSGGGSEVQLVESGGSLVQPGGSLRLSCAASGFTFDDYAMSWVRQVPGKGLEWVSSINWSGTHTDYADSVKGRFTISRNNANNTLYLQMNSLKSEDTAVYYCAKNWRDAGTTWFEKSGSAGQGTQVTVSSGTGGGGSGGGGSGGGGSEFDIQMTQSPSSLSASVGDRVTITCKASDHINNWLAWYQQKPGQAPKLLIYGATTLETGVPSRFSGSGSGTDYTLTISSLQPEDFATYYCQQSWNTPWTFGQGTKLEIKRLEDLKNVFPPEVAVFEPSEAEISHTQKATLVCLATGFYPDHVELSWWVNGKEVHSGVCTDPQPLKEQPALNDSRYCLSSRLRVSATFWQNPRNHFRCQVQFYGLSENDEWTQDRAKPVTQIVSAEAWGRADCGFTSESYQQGVLSATILYEILLGKATLYAVLVSALVLMAMVKRKDSRGRAKRSGSGATNFSLLKQAGDVEENPGPTSMDWIWRILFLVGAATGAHSQLQLQESGPGLVKPSETLSLTCTVSGGSISSGDYYWGWIRQPPGKGLEWIGHIYYSGATYYNPSLKSRVTISVDTSRNQFSLKLSSVTAADTAVYYCTRDDSSNWRSRGQGTLVTVSSSGGGGSGGGGSEVQLVESGGGLVQPGGSLRLSCAASGFASDYYIIGWFRQAPGKEREGVSCISSRYANTNYADSVKGRFTISRDNAKNTVYLQMNSLKPEDTAVYYCAADTRRYTCPDIATMHRNFDSWGQGTLVTVSSGSGGGGSGGGGSGGGGSFEQVQLQQPGAELVKPGASVKMSCKASGYAFSSYWINWMKQKPGQGLEWIGQIYPGDGDTNYNGKFKGRATLTADTSSSTAYMQLSSLTSEDSAVYFCARSITTVVGCAMDYWGQGTSVTVSSTRIQNPDPAVYQLRDSKSSDKSVCLFTDFDSQTNVSQSKDSDVYITDKCVLDMRSMDFKSNSAVAWSNKSDFACANAFNNSIIPEDTFFPSPESSCDVKLVEKSFETDTNLNFQNLSVIGFRILLLKVAGFNLLMTLRLWSS

SEQ ID NO: 16872 - protein, 1393 aa, Artificial Sequence
  Synthetic Polypeptide
MALPVTALLLPLALLLHAARPEVQLLESGGGLVQPGGSLRLSCAASGFTFSSYAMSWVRQAPGKGLEWVSSISGSGDYIYYADSVKGRFTISRDISKNTLYLQMNSLRAEDTAVYYCAKEGTGANSSLADYRGQGTLVTVSSGGGSGGGSEVQLVESGGSLVQPGGSLRLSCAASGFTFDDYAMSWVRQVPGKGLEWVSSINWSGTHTDYADSVKGRFTISRNNANNTLYLQMNSLKSEDTAVYYCAKNWRDAGTTWFEKSGSAGQGTQVTVSSGTGGGGSGGGGSGGGGSEFDIQMTQSPSSLSASVGDRVTITCKASDHINNWLAWYQQKPGQAPKLLIYGATTLETGVPSRFSGSGSGTDYTLTISSLQPEDFATYYCQQSWNTPWTFGQGTKLEIKRLEDLKNVFPPEVAVFEPSEAEISHTQKATLVCLATGFYPDHVELSWWVNGKEVHSGVCTDPQPLKEQPALNDSRYCLSSRLRVSATFWQNPRNHFRCQVQFYGLSENDEWTQDRAKPVTQIVSAEAWGRADCGFTSESYQQGVLSATILYEILLGKATLYAVLVSALVLMAMVKRKDSRGRAKRSGSGATNFSLLKQAGDVEENPGPTSMDWIWRILFLVGAATGAHSQLQLQESGPGLVKPSETLSLTCTVSGGSISSGDYYWGWIRQPPGKGLEWIGHIYYSGATYYNPSLKSRVTISVDTSRNQFSLKLSSVTAADTAVYYCTRDDSSNWRSRGQGTLVTVSSSGGGGSGGGGSEVQLVESGGGLVQPGGSLRLSCAASGFASDYYIIGWFRQAPGKEREGVSCISSRYANTNYADSVKGRFTISRDNAKNTVYLQMNSLKPEDTAVYYCAADTRRYTCPDIATMHRNFDSWGQGTLVTVSSGSGGGGSGGGGSGGGGSFEQVQLQQPGAELVKPGASVKMSCKASGYAFSSYWINWMKQKPGQGLEWIGQIYPGDGDTNYNGKFKGRATLTADTSSSTAYMQLSSLTSEDSAVYFCARSITTVVGCAMDYWGQGTSVTVSSTRIQNPDPAVYQLRDSKSSDKSVCLFTDFDSQTNVSQSKDSDVYITDKCVLDMRSMDFKSNSAVAWSNKSDFACANAFNNSIIPEDTFFPSPESSCDVKLVEKSFETDTNLNFQNLSVIGFRILLLKVAGFNLLMTLRLWSSRAKRSGSGVKQTLNFDLLKLAGDVESNPGPSRGGIHTMATYEVLCEVARKLGTDDREVVLFLLNVFIPQPTLAQLIGALRALKEEGRLTFPLLAECLFRAGRRDLLRDLLHLDPRFLERHLAGTMSYFSPYQLTVLHVDGELCARDIRSLIFLSKDTIGSRSTPQTFLHWVYCMENLDLLGPTDVDALMSMLRSLSRVDLQRQVQTLMGLHLSGPSHSQHYRHTP

SEQ ID NO: 16873 - protein, 1172 aa, Artificial Sequence
  Synthetic Polypeptide
MALPVTALLLPLALLLHAARPEVQLLESGGGLVQPGGSLRLSCAASGFTFSSYAMSWVRQAPGKGLEWVSSISGSGDYIYYADSVKGRFTISRDISKNTLYLQMNSLRAEDTAVYYCAKEGTGANSSLADYRGQGTLVTVSSGGGSGGGSEVQLVESGGSLVQPGGSLRLSCAASGFTFDDYAMSWVRQVPGKGLEWVSSINWSGTHTDYADSVKGRFTISRNNANNTLYLQMNSLKSEDTAVYYCAKNWRDAGTTWFEKSGSAGQGTQVTVSSGTGGGGSGGGGSGGGGSEFDIQMTQSPSSLSASVGDRVTITCKASDHINNWLAWYQQKPGQAPKLLIYGATTLETGVPSRFSGSGSGTDYTLTISSLQPEDFATYYCQQSWNTPWTFGQGTKLEIKRLEIQNPDPAVYQLRDSKSSDKSVCLFTDFDSQTNVSQSKDSDVYITDKCVLDMRSMDFKSNSAVAWSNKSDFACANAFNNSIIPEDTFFPSPESSCDVKLVEKSFETDTNLNFQNLSVIGFRILLLKVAGFNLLMTLRLWSSRAKRSGSGVKQTLNFDLLKLAGDVESNPGPTSMDWIWRILFLVGAATGAHSQLQLQESGPGLVKPSETLSLTCTVSGGSISSGDYYWGWIRQPPGKGLEWIGHIYYSGATYYNPSLKSRVTISVDTSRNQFSLKLSSVTAADTAVYYCTRDDSSNWRSRGQGTLVTVSSSGGGGSGGGGSEVQLVESGGGLVQPGGSLRLSCAASGFASDYYIIGWFRQAPGKEREGVSCISSRYANTNYADSVKGRFTISRDNAKNTVYLQMNSLKPEDTAVYYCAADTRRYTCPDIATMHRNFDSWGQGTLVTVSSGSGGGGSGGGGSGGGGSFEQVQLQQPGAELVKPGASVKMSCKASGYAFSSYWINWMKQKPGQGLEWIGQIYPGDGDTNYNGKFKGRATLTADTSSSTAYMQLSSLTSEDSAVYFCARSITTVVGCAMDYWGQGTSVTVSSTREDLKNVFPPEVAVFEPSEAEISHTQKATLVCLATGFYPDHVELSWWVNGKEVHSGVCTDPQPLKEQPALNDSRYCLSSRLRVSATFWQNPRNHFRCQVQFYGLSENDEWTQDRAKPVTQIVSAEAWGRADCGFTSESYQQGVLSATILYEILLGKATLYAVLVSALVLMAMVKRKDSRG

SEQ ID NO: 16874 - protein, 1394 aa, Artificial Sequence
  Synthetic Polypeptide
MALPVTALLLPLALLLHAARPEVQLLESGGGLVQPGGSLRLSCAASGFTFSSYAMSWVRQAPGKGLEWVSSISGSGDYIYYADSVKGRFTISRDISKNTLYLQMNSLRAEDTAVYYCAKEGTGANSSLADYRGQGTLVTVSSGGGSGGGSEVQLVESGGSLVQPGGSLRLSCAASGFTFDDYAMSWVRQVPGKGLEWVSSINWSGTHTDYADSVKGRFTISRNNANNTLYLQMNSLKSEDTAVYYCAKNWRDAGTTWFEKSGSAGQGTQVTVSSGTGGGGSGGGGSGGGGSEFDIQMTQSPSSLSASVGDRVTITCKASDHINNWLAWYQQKPGQAPKLLIYGATTLETGVPSRFSGSGSGTDYTLTISSLQPEDFATYYCQQSWNTPWTFGQGTKLEIKRLEIQNPDPAVYQLRDSKSSDKSVCLFTDFDSQTNVSQSKDSDVYITDKCVLDMRSMDFKSNSAVAWSNKSDFACANAFNNSIIPEDTFFPSPESSCDVKLVEKSFETDTNLNFQNLSVIGFRILLLKVAGFNLLMTLRLWSSRAKRSGSGVKQTLNFDLLKLAGDVESNPGPTSMDWIWRILFLVGAATGAHSQLQLQESGPGLVKPSETLSLTCTVSGGSISSGDYYWGWIRQPPGKGLEWIGHIYYSGATYYNPSLKSRVTISVDTSRNQFSLKLSSVTAADTAVYYCTRDDSSNWRSRGQGTLVTVSSSGGGGSGGGGSEVQLVESGGGLVQPGGSLRLSCAASGFASDYYIIGWFRQAPGKEREGVSCISSRYANTNYADSVKGRFTISRDNAKNTVYLQMNSLKPEDTAVYYCAADTRRYTCPDIATMHRNFDSWGQGTLVTVSSGSGGGGSGGGGSGGGGSFEQVQLQQPGAELVKPGASVKMSCKASGYAFSSYWINWMKQKPGQGLEWIGQIYPGDGDTNYNGKFKGRATLTADTSSSTAYMQLSSLTSEDSAVYFCARSITTVVGCAMDYWGQGTSVTVSSTREDLKNVFPPEVAVFEPSEAEISHTQKATLVCLATGFYPDHVELSWWVNGKEVHSGVCTDPQPLKEQPALNDSRYCLSSRLRVSATFWQNPRNHFRCQVQFYGLSENDEWTQDRAKPVTQIVSAEAWGRADCGFTSESYQQGVLSATILYEILLGKATLYAVLVSALVLMAMVKRKDSRGRAKRSGSGATNFSLLKQAGDVEENPGPSRGGIHTMATYEVLCEVARKLGTDDREVVLFLLNVFIPQPTLAQLIGALRALKEEGRLTFPLLAECLFRAGRRDLLRDLLHLDPRFLERHLAGTMSYFSPYQLTVLHVDGELCARDIRSLIFLSKDTIGSRSTPQTFLHWVYCMENLDLLGPTDVDALMSMLRSLSRVDLQRQVQTLMGLHLSGPSHSQHYRHTP

SEQ ID NO: 16875 - protein, 1401 aa, Artificial Sequence
  Synthetic Polypeptide
MALPVTALLLPLALLLHAARPEVQLLESGGGLVQPGGSLRLSCAASGFTFSSYAMSWVRQAPGKGLEWVSSISGSGDYIYYADSVKGRFTISRDISKNTLYLQMNSLRAEDTAVYYCAKEGTGANSSLADYRGQGTLVTVSSGGGSGGGSEVQLVESGGSLVQPGGSLRLSCAASGFTFDDYAMSWVRQVPGKGLEWVSSINWSGTHTDYADSVKGRFTISRNNANNTLYLQMNSLKSEDTAVYYCAKNWRDAGTTWFEKSGSAGQGTQVTVSSGTGGGGSGGGGSGGGGSEFDIQMTQSPSSLSASVGDRVTITCKASDHINNWLAWYQQKPGQAPKLLIYGATTLETGVPSRFSGSGSGTDYTLTISSLQPEDFATYYCQQSWNTPWTFGQGTKLEIKRLEDLKNVFPPEVAVFEPSEAEISHTQKATLVCLATGFYPDHVELSWWVNGKEVHSGVSTDPQPLKEQPALNDSRYCLSSRLRVSATFWQNPRNHFRCQVQFYGLSENDEWTQDRAKPVTQIVSAEAWGRADCGFTSESYQQGVLSATILYEILLGKATLYAVLVSALVLMAMVKRKDSRGRAKRSGSGATNFSLLKQAGDVEENPGPTSMDWIWRILFLVGAATGAHSQLQLQESGPGLVKPSETLSLTCTVSGGSISSGDYYWGWIRQPPGKGLEWIGHIYYSGATYYNPSLKSRVTISVDTSRNQFSLKLSSVTAADTAVYYCTRDDSSNWRSRGQGTLVTVSSSGGGGSGGGGSEVQLVESGGGLVQPGGSLRLSCAASGFASDYYIIGWFRQAPGKEREGVSCISSRYANTNYADSVKGRFTISRDNAKNTVYLQMNSLKPEDTAVYYCAADTRRYTCPDIATMHRNFDSWGQGTLVTVSSGSGGGGSGGGGSGGGGSFEQVQLQQPGAELVKPGASVKMSCKASGYAFSSYWINWMKQKPGQGLEWIGQIYPGDGDTNYNGKFKGRATLTADTSSSTAYMQLSSLTSEDSAVYFCARSITTVVGCAMDYWGQGTSVTVSSTRIQNPDPAVYQLRDSKSSDKSVCLFTDFDSQTNVSQSKDSDVYITDKTVLDMRSMDFKSNSAVAWSNKSDFACANAFNNSIIPEDTFFPSPESSCDVKLVEKSFETDTNLNFQNLSVIGFRILLLKVAGFNLLMTLRLWSSRAKRSGSGVKQTLNFDLLKLAGDVESNPGPSRGHMTEYKPTVRLATRDDVPRAVRTLAAAFADYPATRHTVDPDRHIERVTELQELFLTRVGLDIGKVWVADDGAAVAVWTTPESVEAGAVFAEIGPRMAELSGSRLAAQQQMEGLLAPHRPKEPAWFLATVGVSPDHQGKGLGSAVVLPGVEAAERAGVPAFLETSAPRNLPFYERLGFTVTADVEVPEGPRTWCMTRKPGA

SEQ ID NO: 16876 - protein, 1483 aa, Artificial Sequence
  Synthetic Polypeptide
MALPVTALLLPLALLLHAARPEVQLLESGGGLVQPGGSLRLSCAASGFTFSSYAMSWVRQAPGKGLEWVSSISGSGDYIYYADSVKGRFTISRDISKNTLYLQMNSLRAEDTAVYYCAKEGTGANSSLADYRGQGTLVTVSSGGGSGGGSEVQLVESGGSLVQPGGSLRLSCAASGFTFDDYAMSWVRQVPGKGLEWVSSINWSGTHTDYADSVKGRFTISRNNANNTLYLQMNSLKSEDTAVYYCAKNWRDAGTTWFEKSGSAGQGTQVTVSSGTGGGGSGGGGSGGGGSEFDIQMTQSPSSLSASVGDRVTITCKASDHINNWLAWYQQKPGQAPKLLIYGATTLETGVPSRFSGSGSGTDYTLTISSLQPEDFATYYCQQSWNTPWTFGQGTKLEIKRLEDLKNVFPPEVAVFEPSEAEISHTQKATLVCLATGFYPDHVELSWWVNGKEVHSGVSTDPQPLKEQPALNDSRYCLSSRLRVSATFWQNPRNHFRCQVQFYGLSENDEWTQDRAKPVTQIVSAEAWGRADCGFTSESYQQGVLSATILYEILLGKATLYAVLVSALVLMAMVKRKDSRGRAKRSGSGATNFSLLKQAGDVEENPGPTSMDWIWRILFLVGAATGAHSQLQLQESGPGLVKPSETLSLTCTVSGGSISSGDYYWGWIRQPPGKGLEWIGHIYYSGATYYNPSLKSRVTISVDTSRNQFSLKLSSVTAADTAVYYCTRDDSSNWRSRGQGTLVTVSSSGGGGSGGGGSEVQLVESGGGLVQPGGSLRLSCAASGFASDYYIIGWFRQAPGKEREGVSCISSRYANTNYADSVKGRFTISRDNAKNTVYLQMNSLKPEDTAVYYCAADTRRYTCPDIATMHRNFDSWGQGTLVTVSSGSGGGGSGGGGSGGGGSFEQVQLQQPGAELVKPGASVKMSCKASGYAFSSYWINWMKQKPGQGLEWIGQIYPGDGDTNYNGKFKGRATLTADTSSSTAYMQLSSLTSEDSAVYFCARSITTVVGCAMDYWGQGTSVTVSSTREQKLISEEDGSGTPFPSLAPPIMLLVDGKQQMVVVCLVLDVAPPGLDSPIWFSAGNGSALDAFTYGPSPATDGTWTNLAHLSLPSEELASWEPLVCHTGPGAEGHSRSTQPMHLSGEASTARTCPQEPLRGTPGGALWLGVLRLLLFKLLLFDLLLTCSCLCDPAGPLPSPATTTRLRALGSHRLHPATETGGREATSSPRPQPRDRRWGDTPPGRKPGSPVRAKRSGSGVKQTLNFDLLKLAGDVESNPGPSRGHMTEYKPTVRLATRDDVPRAVRTLAAAFADYPATRHTVDPDRHIERVTELQELFLTRVGLDIGKVWVADDGAAVAVWTTPESVEAGAVFAEIGPRMAELSGSRLAAQQQMEGLLAPHRPKEPAWFLATVGVSPDHQGKGLGSAVVLPGVEAAERAGVPAFLETSAPRNLPFYERLGFTVTADVEVPEGPRTWCMTRKPGA

SEQ ID NO: 16877 - protein, 1438 aa, Artificial Sequence
  Synthetic Polypeptide
MALPVTALLLPLALLLHAARPEVQLLESGGGLVQPGGSLRLSCAASGFTFSSYAMSWVRQAPGKGLEWVSSISGSGDYIYYADSVKGRFTISRDISKNTLYLQMNSLRAEDTAVYYCAKEGTGANSSLADYRGQGTLVTVSSGGGSGGGSEVQLVESGGSLVQPGGSLRLSCAASGFTFDDYAMSWVRQVPGKGLEWVSSINWSGTHTDYADSVKGRFTISRNNANNTLYLQMNSLKSEDTAVYYCAKNWRDAGTTWFEKSGSAGQGTQVTVSSGTGGGGSGGGGSGGGGSEFDIQMTQSPSSLSASVGDRVTITCKASDHINNWLAWYQQKPGQAPKLLIYGATTLETGVPSRFSGSGSGTDYTLTISSLQPEDFATYYCQQSWNTPWTFGQGTKLEIKRLEGKPIPNPLLGLDSTGSGDKQLDADVSPKPTIFLPSIAETKLQKAGTYLCLLEKFFPDVIKIHWQEKKSNTILGSQEGNTMKTNDTYMKFSWLTVPEKSLDKEHRCIVRHENNKNGVDQEIIFPPIKTDVITMDPKDNCSKDANDTLLLQLTNTSAYYMYLLLLLKSVVYFAIITCCLLRRTAFCCNGEKSRAKRSGSGATNFSLLKQAGDVEENPGPTSMDWIWRILFLVGAATGAHSQLQLQESGPGLVKPSETLSLTCTVSGGSISSGDYYWGWIRQPPGKGLEWIGHIYYSGATYYNPSLKSRVTISVDTSRNQFSLKLSSVTAADTAVYYCTRDDSSNWRSRGQGTLVTVSSSGGGGSGGGGSEVQLVESGGGLVQPGGSLRLSCAASGFASDYYIIGWFRQAPGKEREGVSCISSRYANTNYADSVKGRFTISRDNAKNTVYLQMNSLKPEDTAVYYCAADTRRYTCPDIATMHRNFDSWGQGTLVTVSSGSGGGGSGGGGSGGGGSFEQVQLQQPGAELVKPGASVKMSCKASGYAFSSYWINWMKQKPGQGLEWIGQIYPGDGDTNYNGKFKGRATLTADTSSSTAYMQLSSLTSEDSAVYFCARSITTVVGCAMDYWGQGTSVTVSSTREQKLISEEDGSGSQPHTKPSVFVMKNGTNVACLVKEFYPKDIRINLVSSKKITEFDPAIVISPSGKYNAVKLGKYEDSNSVTCSVQHDNKTVHSTDFEVKTDSTDHVKPKETENTKQPSKSCHKPKAIVHTEKVNMMSLTVLGLRMLFAKTVAVNFLLTAKLFFLRAKRSGSGVKQTLNFDLLKLAGDVESNPGPSRGHMTEYKPTVRLATRDDVPRAVRTLAAAFADYPATRHTVDPDRHIERVTELQELFLTRVGLDIGKVWVADDGAAVAVWTTPESVEAGAVFAEIGPRMAELSGSRLAAQQQMEGLLAPHRPKEPAWFLATVGVSPDHQGKGLGSAVVLPGVEAAERAGVPAFLETSAPRNLPFYERLGFTVTADVEVPEGPRTWCMTRKPGA

SEQ ID NO: 16878 - protein, 1176 aa, Artificial Sequence
  Synthetic Polypeptide
MALPVTALLLPLALLLHAARPEVQLLESGGGLVQPGGSLRLSCAASGFTFSSYAMSWVRQAPGKGLEWVSSISGSGDYIYYADSVKGRFTISRDISKNTLYLQMNSLRAEDTAVYYCAKEGTGANSSLADYRGQGTLVTVSSGGGSGGGSEVQLVESGGSLVQPGGSLRLSCAASGFTFDDYAMSWVRQVPGKGLEWVSSINWSGTHTDYADSVKGRFTISRNNANNTLYLQMNSLKSEDTAVYYCAKNWRDAGTTWFEKSGSAGQGTQVTVSSGTGGGGSGGGGSGGGGSEFDIQMTQSPSSLSASVGDRVTITCKASDHINNWLAWYQQKPGQAPKLLIYGATTLETGVPSRFSGSGSGTDYTLTISSLQPEDFATYYCQQSWNTPWTFGQGTKLEIKRLESQPHTKPSVFVMKNGTNVACLVKEFYPKDIRINLVSSKKITEFDPAIVISPSGKYNAVKLGKYEDSNSVTCSVQHDNKTVHSTDFEVKTDSTDHVKPKETENTKQPSKSCHKPKAIVHTEKVNMMSLTVLGLRMLFAKTVAVNFLLTAKLFFLRAKRSGSGATNFSLLKQAGDVEENPGPTSMDWIWRILFLVGAATGAHSQLQLQESGPGLVKPSETLSLTCTVSGGSISSGDYYWGWIRQPPGKGLEWIGHIYYSGATYYNPSLKSRVTISVDTSRNQFSLKLSSVTAADTAVYYCTRDDSSNWRSRGQGTLVTVSSSGGGGSGGGGSEVQLVESGGGLVQPGGSLRLSCAASGFASDYYIIGWFRQAPGKEREGVSCISSRYANTNYADSVKGRFTISRDNAKNTVYLQMNSLKPEDTAVYYCAADTRRYTCPDIATMHRNFDSWGQGTLVTVSSGSGGGGSGGGGSGGGGSFEQVQLQQPGAELVKPGASVKMSCKASGYAFSSYWINWMKQKPGQGLEWIGQIYPGDGDTNYNGKFKGRATLTADTSSSTAYMQLSSLTSEDSAVYFCARSITTVVGCAMDYWGQGTSVTVSSTRDKQLDADVSPKPTIFLPSIAETKLQKAGTYLCLLEKFFPDVIKIHWQEKKSNTILGSQEGNTMKTNDTYMKFSWLTVPEKSLDKEHRCIVRHENNKNGVDQEIIFPPIKTDVITMDPKDNCSKDANDTLLLQLTNTSAYYMYLLLLLKSVVYFAIITCCLLRRTAFCCNGEKS

SEQ ID NO: 16879 - protein, 1578 aa, Artificial Sequence
  Synthetic Polypeptide
MALPVTALLLPLALLLHAARPEVQLLESGGGLVQPGGSLRLSCAASGFTFSSYAMSWVRQAPGKGLEWVSSISGSGDYIYYADSVKGRFTISRDISKNTLYLQMNSLRAEDTAVYYCAKEGTGANSSLADYRGQGTLVTVSSGGGSGGGSEVQLVESGGSLVQPGGSLRLSCAASGFTFDDYAMSWVRQVPGKGLEWVSSINWSGTHTDYADSVKGRFTISRNNANNTLYLQMNSLKSEDTAVYYCAKNWRDAGTTWFEKSGSAGQGTQVTVSSGTGGGGSGGGGSGGGGSEFDIQMTQSPSSLSASVGDRVTITCKASDHINNWLAWYQQKPGQAPKLLIYGATTLETGVPSRFSGSGSGTDYTLTISSLQPEDFATYYCQQSWNTPWTFGQGTKLEIKRGQPKANPTVTLFPPSSEELQANKATLVCLISDFYPGAVTVAWKADGSPVKAGVETTKPSKQSNNKYAASSYLSLTPEQWKSHRSYSCQVTHEGSTVEKTVAPTECSGSQSFGLLDPKLCYLLDGILFIYGVILTALFLRVKFSRSADAPAYQQGQNQLYNELNLGRREEYDVLDKRRGRDPEMGGKPQRRKNPQEGLYNELQKDKMAEAYSEIGMKGERRRGKGHDGLYQGLSTATKDTYDALHMQALPPRRAKRSGSGATNFSLLKQAGDVEENPGPTSMDWIWRILFLVGAATGAHSQLQLQESGPGLVKPSETLSLTCTVSGGSISSGDYYWGWIRQPPGKGLEWIGHIYYSGATYYNPSLKSRVTISVDTSRNQFSLKLSSVTAADTAVYYCTRDDSSNWRSRGQGTLVTVSSSGGGGSGGGGSEVQLVESGGGLVQPGGSLRLSCAASGFASDYYIIGWFRQAPGKEREGVSCISSRYANTNYADSVKGRFTISRDNAKNTVYLQMNSLKPEDTAVYYCAADTRRYTCPDIATMHRNFDSWGQGTLVTVSSGSGGGGSGGGGSGGGGSFEQVQLQQPGAELVKPGASVKMSCKASGYAFSSYWINWMKQKPGQGLEWIGQIYPGDGDTNYNGKFKGRATLTADTSSSTAYMQLSSLTSEDSAVYFCARSITTVVGCAMDYWGQGTSVTVSSASTKGPSVFPLAPSSKSTSGGTAALGCLVKDYFPEPVTVSWNSGALTSGVHTFPAVLQSSGLYSLSSVVTVPSSSLGTQTYICNVNHKPSNTKVDKRVEPKSCGTQSFGLLDPKLCYLLDGILFIYGVILTALFLRVKFSRSADAPAYQQGQNQLYNELNLGRREEYDVLDKRRGRDPEMGGKPQRRKNPQEGLYNELQKDKMAEAYSEIGMKGERRRGKGHDGLYQGLSTATKDTYDALHMQALPPRRAKRSGSGVKQTLNFDLLKLAGDVESNPGPSRGHMTEYKPTVRLATRDDVPRAVRTLAAAFADYPATRHTVDPDRHIERVTELQELFLTRVGLDIGKVWVADDGAAVAVWTTPESVEAGAVFAEIGPRMAELSGSRLAAQQQMEGLLAPHRPKEPAWFLATVGVSPDHQGKGLGSAVVLPGVEAAERAGVPAFLETSAPRNLPFYERLGFTVTADVEVPEGPRTWCMTRKPGA

SEQ ID NO: 16880 - protein, 1364 aa, Artificial Sequence
  Synthetic Polypeptide
MALPVTALLLPLALLLHAARPEVQLLESGGGLVQPGGSLRLSCAASGFTFSSYAMSWVRQAPGKGLEWVSSISGSGDYIYYADSVKGRFTISRDISKNTLYLQMNSLRAEDTAVYYCAKEGTGANSSLADYRGQGTLVTVSSGGGSGGGSEVQLVESGGSLVQPGGSLRLSCAASGFTFDDYAMSWVRQVPGKGLEWVSSINWSGTHTDYADSVKGRFTISRNNANNTLYLQMNSLKSEDTAVYYCAKNWRDAGTTWFEKSGSAGQGTQVTVSSGTGGGGSGGGGSGGGGSEFDIQMTQSPSSLSASVGDRVTITCKASDHINNWLAWYQQKPGQAPKLLIYGATTLETGVPSRFSGSGSGTDYTLTISSLQPEDFATYYCQQSWNTPWTFGQGTKLEIKRLEDLKNVFPPEVAVFEPSEAEISHTQKATLVCLATGFYPDHVELSWWVNGKEVHSGVSTDPQPLKEQPALNDSRYCLSSRLRVSATFWQNPRNHFRCQVQFYGLSENDEWTQDRAKPVTQIVSAEAWGRADCGSQSFGLLDPKLCYLLDGILFIYGVILTALFLRVKFSRSADAPAYQQGQNQLYNELNLGRREEYDVLDKRRGRDPEMGGKPQRRKNPQEGLYNELQKDKMAEAYSEIGMKGERRRGKGHDGLYQGLSTATKDTYDALHMQALPPRRAKRSGSGATNFSLLKQAGDVEENPGPTSMDWIWRILFLVGAATGAHSQLQLQESGPGLVKPSETLSLTCTVSGGSISSGDYYWGWIRQPPGKGLEWIGHIYYSGATYYNPSLKSRVTISVDTSRNQFSLKLSSVTAADTAVYYCTRDDSSNWRSRGQGTLVTVSSSGGGGSGGGGSEVQLVESGGGLVQPGGSLRLSCAASGFASDYYIIGWFRQAPGKEREGVSCISSRYANTNYADSVKGRFTISRDNAKNTVYLQMNSLKPEDTAVYYCAADTRRYTCPDIATMHRNFDSWGQGTLVTVSSGSGGGGSGGGGSGGGGSFEQVQLQQPGAELVKPGASVKMSCKASGYAFSSYWINWMKQKPGQGLEWIGQIYPGDGDTNYNGKFKGRATLTADTSSSTAYMQLSSLTSEDSAVYFCARSITTVVGCAMDYWGQGTSVTVSSTRIQNPDPAVYQLRDSKSSDKSVCLFTDFDSQTNVSQSKDSDVYITDKTVLDMRSMDFKSNSAVAWSNKSDFACANAFNNSIIPEDTFFPSPESSCGTQSFGLLDPKLCYLLDGILFIYGVILTALFLRVKFSRSADAPAYQQGQNQLYNELNLGRREEYDVLDKRRGRDPEMGGKPQRRKNPQEGLYNELQKDKMAEAYSEIGMKGERRRGKGHDGLYQGLSTATKDTYDALHMQALPPR

SEQ ID NO: 16881 - protein, 1364 aa, Artificial Sequence
  Synthetic Polypeptide
MALPVTALLLPLALLLHAARPEVQLLESGGGLVQPGGSLRLSCAASGFTFSSYAMSWVRQAPGKGLEWVSSISGSGDYIYYADSVKGRFTISRDISKNTLYLQMNSLRAEDTAVYYCAKEGTGANSSLADYRGQGTLVTVSSGGGSGGGSEVQLVESGGSLVQPGGSLRLSCAASGFTFDDYAMSWVRQVPGKGLEWVSSINWSGTHTDYADSVKGRFTISRNNANNTLYLQMNSLKSEDTAVYYCAKNWRDAGTTWFEKSGSAGQGTQVTVSSGTGGGGSGGGGSGGGGSEFDIQMTQSPSSLSASVGDRVTITCKASDHINNWLAWYQQKPGQAPKLLIYGATTLETGVPSRFSGSGSGTDYTLTISSLQPEDFATYYCQQSWNTPWTFGQGTKLEIKRLEDLKNVFPPEVAVFEPSKAEIAHTQKATLVCLATGFYPDHVELSWWVNGKEVHSGVCTDPQPLKEQPALNDSRYCLSSRLRVSATFWQNPRNHFRCQVQFYGLSENDEWTQDRAKPVTQIVSAEAWGRADCGSQSFGLLDPKLCYLLDGILFIYGVILTALFLRVKFSRSADAPAYQQGQNQLYNELNLGRREEYDVLDKRRGRDPEMGGKPQRRKNPQEGLYNELQKDKMAEAYSEIGMKGERRRGKGHDGLYQGLSTATKDTYDALHMQALPPRRAKRSGSGATNFSLLKQAGDVEENPGPTSMDWIWRILFLVGAATGAHSQLQLQESGPGLVKPSETLSLTCTVSGGSISSGDYYWGWIRQPPGKGLEWIGHIYYSGATYYNPSLKSRVTISVDTSRNQFSLKLSSVTAADTAVYYCTRDDSSNWRSRGQGTLVTVSSSGGGGSGGGGSEVQLVESGGGLVQPGGSLRLSCAASGFASDYYIIGWFRQAPGKEREGVSCISSRYANTNYADSVKGRFTISRDNAKNTVYLQMNSLKPEDTAVYYCAADTRRYTCPDIATMHRNFDSWGQGTLVTVSSGSGGGGSGGGGSGGGGSFEQVQLQQPGAELVKPGASVKMSCKASGYAFSSYWINWMKQKPGQGLEWIGQIYPGDGDTNYNGKFKGRATLTADTSSSTAYMQLSSLTSEDSAVYFCARSITTVVGCAMDYWGQGTSVTVSSTRIQNPDPAVYQLRDSKSSDKSVCLFTDFDSQTNVSQSKDSDVYITDKCVLDMRSMDFKSNSAVAWSNKSDFACANAFNNSIIPEDTFFPSSDVPCGTQSFGLLDPKLCYLLDGILFIYGVILTALFLRVKFSRSADAPAYQQGQNQLYNELNLGRREEYDVLDKRRGRDPEMGGKPQRRKNPQEGLYNELQKDKMAEAYSEIGMKGERRRGKGHDGLYQGLSTATKDTYDALHMQALPPR

SEQ ID NO: 16882 - protein, 1435 aa, Artificial Sequence
  Synthetic Polypeptide
MALPVTALLLPLALLLHAARPEVQLLESGGGLVQPGGSLRLSCAASGFTFSSYAMSWVRQAPGKGLEWVSSISGSGDYIYYADSVKGRFTISRDISKNTLYLQMNSLRAEDTAVYYCAKEGTGANSSLADYRGQGTLVTVSSGGGSGGGSEVQLVESGGSLVQPGGSLRLSCAASGFTFDDYAMSWVRQVPGKGLEWVSSINWSGTHTDYADSVKGRFTISRNNANNTLYLQMNSLKSEDTAVYYCAKNWRDAGTTWFEKSGSAGQGTQVTVSSGTGGGGSGGGGSGGGGSEFDIQMTQSPSSLSASVGDRVTITCKASDHINNWLAWYQQKPGQAPKLLIYGATTLETGVPSRFSGSGSGTDYTLTISSLQPEDFATYYCQQSWNTPWTFGQGTKLEIKRLEGKPIPNPLLGLDSTGSGEDLKNVFPPEVAVFEPSEAEISHTQKATLVCLATGFYPDHVELSWWVNGKEVHSGVSTDPQPLKEQPALNDSRYCLSSRLRVSATFWQNPRNHFRCQVQFYGLSENDEWTQDRAKPVTQIVSAEAWGRADCGSQSFGLLDPKLCYLLDGILFIYGVILTALFLRVKFSRSADAPAYQQGQNQLYNELNLGRREEYDVLDKRRGRDPEMGGKPQRRKNPQEGLYNELQKDKMAEAYSEIGMKGERRRGKGHDGLYQGLSTATKDTYDALHMQALPPRRAKRSGSGATNFSLLKQAGDVEENPGPTSMDWIWRILFLVGAATGAHSQLQLQESGPGLVKPSETLSLTCTVSGGSISSGDYYWGWIRQPPGKGLEWIGHIYYSGATYYNPSLKSRVTISVDTSRNQFSLKLSSVTAADTAVYYCTRDDSSNWRSRGQGTLVTVSSSGGGGSGGGGSEVQLVESGGGLVQPGGSLRLSCAASGFASDYYIIGWFRQAPGKEREGVSCISSRYANTNYADSVKGRFTISRDNAKNTVYLQMNSLKPEDTAVYYCAADTRRYTCPDIATMHRNFDSWGQGTLVTVSSGSGGGGSGGGGSGGGGSFEQVQLQQPGAELVKPGASVKMSCKASGYAFSSYWINWMKQKPGQGLEWIGQIYPGDGDTNYNGKFKGRATLTADTSSSTAYMQLSSLTSEDSAVYFCARSITTVVGCAMDYWGQGTSVTVSSTREQKLISEEDGSGIQNPDPAVYQLRDSKSSDKSVCLFTDFDSQTNVSQSKDSDVYITDKTVLDMRSMDFKSNSAVAWSNKSDFACANAFNNSIIPEDTFFPSPESSCGTQSFGLLDPKLCYLLDGILFIYGVILTALFLRSKRSRLLHSDYMNMTPRRPGPTRKHYQPYAPPRDFAAYRSRVKFSRSADAPAYQQGQNQLYNELNLGRREEYDVLDKRRGRDPEMGGKPQRRKNPQEGLYNELQKDKMAEAYSEIGMKGERRRGKGHDGLYQGLSTATKDTYDALHMQALPPR

SEQ ID NO: 16883 - protein, 1476 aa, Artificial Sequence
  Synthetic Polypeptide
MALPVTALLLPLALLLHAARPEVQLLESGGGLVQPGGSLRLSCAASGFTFSSYAMSWVRQAPGKGLEWVSSISGSGDYIYYADSVKGRFTISRDISKNTLYLQMNSLRAEDTAVYYCAKEGTGANSSLADYRGQGTLVTVSSGGGSGGGSEVQLVESGGSLVQPGGSLRLSCAASGFTFDDYAMSWVRQVPGKGLEWVSSINWSGTHTDYADSVKGRFTISRNNANNTLYLQMNSLKSEDTAVYYCAKNWRDAGTTWFEKSGSAGQGTQVTVSSGTGGGGSGGGGSGGGGSEFDIQMTQSPSSLSASVGDRVTITCKASDHINNWLAWYQQKPGQAPKLLIYGATTLETGVPSRFSGSGSGTDYTLTISSLQPEDFATYYCQQSWNTPWTFGQGTKLEIKRLEGKPIPNPLLGLDSTGSGEDLKNVFPPEVAVFEPSEAEISHTQKATLVCLATGFYPDHVELSWWVNGKEVHSGVSTDPQPLKEQPALNDSRYCLSSRLRVSATFWQNPRNHFRCQVQFYGLSENDEWTQDRAKPVTQIVSAEAWGRADCGSQSFGLLDPKLCYLLDGILFIYGVILTALFLRSKRSRLLHSDYMNMTPRRPGPTRKHYQPYAPPRDFAAYRSRVKFSRSADAPAYQQGQNQLYNELNLGRREEYDVLDKRRGRDPEMGGKPQRRKNPQEGLYNELQKDKMAEAYSEIGMKGERRRGKGHDGLYQGLSTATKDTYDALHMQALPPRRAKRSGSGATNFSLLKQAGDVEENPGPTSMDWIWRILFLVGAATGAHSQLQLQESGPGLVKPSETLSLTCTVSGGSISSGDYYWGWIRQPPGKGLEWIGHIYYSGATYYNPSLKSRVTISVDTSRNQFSLKLSSVTAADTAVYYCTRDDSSNWRSRGQGTLVTVSSSGGGGSGGGGSEVQLVESGGGLVQPGGSLRLSCAASGFASDYYIIGWFRQAPGKEREGVSCISSRYANTNYADSVKGRFTISRDNAKNTVYLQMNSLKPEDTAVYYCAADTRRYTCPDIATMHRNFDSWGQGTLVTVSSGSGGGGSGGGGSGGGGSFEQVQLQQPGAELVKPGASVKMSCKASGYAFSSYWINWMKQKPGQGLEWIGQIYPGDGDTNYNGKFKGRATLTADTSSSTAYMQLSSLTSEDSAVYFCARSITTVVGCAMDYWGQGTSVTVSSTREQKLISEEDGSGIQNPDPAVYQLRDSKSSDKSVCLFTDFDSQTNVSQSKDSDVYITDKTVLDMRSMDFKSNSAVAWSNKSDFACANAFNNSIIPEDTFFPSPESSCGTQSFGLLDPKLCYLLDGILFIYGVILTALFLRSKRSRLLHSDYMNMTPRRPGPTRKHYQPYAPPRDFAAYRSRVKFSRSADAPAYQQGQNQLYNELNLGRREEYDVLDKRRGRDPEMGGKPQRRKNPQEGLYNELQKDKMAEAYSEIGMKGERRRGKGHDGLYQGLSTATKDTYDALHMQALPPR

SEQ ID NO: 16884 - protein, 1437 aa, Artificial Sequence
  Synthetic Polypeptide
MALPVTALLLPLALLLHAARPEVQLLESGGGLVQPGGSLRLSCAASGFTFSSYAMSWVRQAPGKGLEWVSSISGSGDYIYYADSVKGRFTISRDISKNTLYLQMNSLRAEDTAVYYCAKEGTGANSSLADYRGQGTLVTVSSGGGSGGGSEVQLVESGGSLVQPGGSLRLSCAASGFTFDDYAMSWVRQVPGKGLEWVSSINWSGTHTDYADSVKGRFTISRNNANNTLYLQMNSLKSEDTAVYYCAKNWRDAGTTWFEKSGSAGQGTQVTVSSGTGGGGSGGGGSGGGGSEFDIQMTQSPSSLSASVGDRVTITCKASDHINNWLAWYQQKPGQAPKLLIYGATTLETGVPSRFSGSGSGTDYTLTISSLQPEDFATYYCQQSWNTPWTFGQGTKLEIKRLEGKPIPNPLLGLDSTGSGEDLKNVFPPEVAVFEPSEAEISHTQKATLVCLATGFYPDHVELSWWVNGKEVHSGVSTDPQPLKEQPALNDSRYCLSSRLRVSATFWQNPRNHFRCQVQFYGLSENDEWTQDRAKPVTQIVSAEAWGRADCGSQSFGLLDPKLCYLLDGILFIYGVILTALFLRVKFSRSADAPAYQQGQNQLYNELNLGRREEYDVLDKRRGRDPEMGGKPQRRKNPQEGLYNELQKDKMAEAYSEIGMKGERRRGKGHDGLYQGLSTATKDTYDALHMQALPPRRAKRSGSGATNFSLLKQAGDVEENPGPTSMDWIWRILFLVGAATGAHSQLQLQESGPGLVKPSETLSLTCTVSGGSISSGDYYWGWIRQPPGKGLEWIGHIYYSGATYYNPSLKSRVTISVDTSRNQFSLKLSSVTAADTAVYYCTRDDSSNWRSRGQGTLVTVSSSGGGGSGGGGSEVQLVESGGGLVQPGGSLRLSCAASGFASDYYIIGWFRQAPGKEREGVSCISSRYANTNYADSVKGRFTISRDNAKNTVYLQMNSLKPEDTAVYYCAADTRRYTCPDIATMHRNFDSWGQGTLVTVSSGSGGGGSGGGGSGGGGSFEQVQLQQPGAELVKPGASVKMSCKASGYAFSSYWINWMKQKPGQGLEWIGQIYPGDGDTNYNGKFKGRATLTADTSSSTAYMQLSSLTSEDSAVYFCARSITTVVGCAMDYWGQGTSVTVSSTREQKLISEEDLGSGIQNPDPAVYQLRDSKSSDKSVCLFTDFDSQTNVSQSKDSDVYITDKTVLDMRSMDFKSNSAVAWSNKSDFACANAFNNSIIPEDTFFPSPESSCGTQSFGLLDPKLCYLLDGILFIYGVILTALFLKRGRKKLLYIFKQPFMRPVQTTQEEDGCSCRFPEEEEGGCELRVKFSRSADAPAYQQGQNQLYNELNLGRREEYDVLDKRRGRDPEMGGKPQRRKNPQEGLYNELQKDKMAEAYSEIGMKGERRRGKGHDGLYQGLSTATKDTYDALHMQALPPR

SEQ ID NO: 16885 - protein, 1479 aa, Artificial Sequence
  Synthetic Polypeptide
MALPVTALLLPLALLLHAARPEVQLLESGGGLVQPGGSLRLSCAASGFTFSSYAMSWVRQAPGKGLEWVSSISGSGDYIYYADSVKGRFTISRDISKNTLYLQMNSLRAEDTAVYYCAKEGTGANSSLADYRGQGTLVTVSSGGGSGGGSEVQLVESGGSLVQPGGSLRLSCAASGFTFDDYAMSWVRQVPGKGLEWVSSINWSGTHTDYADSVKGRFTISRNNANNTLYLQMNSLKSEDTAVYYCAKNWRDAGTTWFEKSGSAGQGTQVTVSSGTGGGGSGGGGSGGGGSEFDIQMTQSPSSLSASVGDRVTITCKASDHINNWLAWYQQKPGQAPKLLIYGATTLETGVPSRFSGSGSGTDYTLTISSLQPEDFATYYCQQSWNTPWTFGQGTKLEIKRLEGKPIPNPLLGLDSTGSGEDLKNVFPPEVAVFEPSEAEISHTQKATLVCLATGFYPDHVELSWWVNGKEVHSGVSTDPQPLKEQPALNDSRYCLSSRLRVSATFWQNPRNHFRCQVQFYGLSENDEWTQDRAKPVTQIVSAEAWGRADCGSQSFGLLDPKLCYLLDGILFIYGVILTALFLKRGRKKLLYIFKQPFMRPVQTTQEEDGCSCRFPEEEEGGCELRVKFSRSADAPAYQQGQNQLYNELNLGRREEYDVLDKRRGRDPEMGGKPQRRKNPQEGLYNELQKDKMAEAYSEIGMKGERRRGKGHDGLYQGLSTATKDTYDALHMQALPPRRAKRSGSGATNFSLLKQAGDVEENPGPTSMDWIWRILFLVGAATGAHSQLQLQESGPGLVKPSETLSLTCTVSGGSISSGDYYWGWIRQPPGKGLEWIGHIYYSGATYYNPSLKSRVTISVDTSRNQFSLKLSSVTAADTAVYYCTRDDSSNWRSRGQGTLVTVSSSGGGGSGGGGSEVQLVESGGGLVQPGGSLRLSCAASGFASDYYIIGWFRQAPGKEREGVSCISSRYANTNYADSVKGRFTISRDNAKNTVYLQMNSLKPEDTAVYYCAADTRRYTCPDIATMHRNFDSWGQGTLVTVSSGSGGGGSGGGGSGGGGSFEQVQLQQPGAELVKPGASVKMSCKASGYAFSSYWINWMKQKPGQGLEWIGQIYPGDGDTNYNGKFKGRATLTADTSSSTAYMQLSSLTSEDSAVYFCARSITTVVGCAMDYWGQGTSVTVSSTREQKLISEEDLGSGIQNPDPAVYQLRDSKSSDKSVCLFTDFDSQTNVSQSKDSDVYITDKTVLDMRSMDFKSNSAVAWSNKSDFACANAFNNSIIPEDTFFPSPESSCGTQSFGLLDPKLCYLLDGILFIYGVILTALFLKRGRKKLLYIFKQPFMRPVQTTQEEDGCSCRFPEEEEGGCELRVKFSRSADAPAYQQGQNQLYNELNLGRREEYDVLDKRRGRDPEMGGKPQRRKNPQEGLYNELQKDKMAEAYSEIGMKGERRRGKGHDGLYQGLSTATKDTYDALHMQALPPR

SEQ ID NO: 16886 - protein, 1369 aa, Artificial Sequence
  Synthetic Polypeptide
MALPVTALLLPLALLLHAARPEVQLLESGGGLVQPGGSLRLSCAASGFTFSSYAMSWVRQAPGKGLEWVSSISGSGDYIYYADSVKGRFTISRDISKNTLYLQMNSLRAEDTAVYYCAKEGTGANSSLADYRGQGTLVTVSSGGGSGGGSEVQLVESGGSLVQPGGSLRLSCAASGFTFDDYAMSWVRQVPGKGLEWVSSINWSGTHTDYADSVKGRFTISRNNANNTLYLQMNSLKSEDTAVYYCAKNWRDAGTTWFEKSGSAGQGTQVTVSSGTGGGGSGGGGSGGGGSEFDIQMTQSPSSLSASVGDRVTITCKASDHINNWLAWYQQKPGQAPKLLIYGATTLETGVPSRFSGSGSGTDYTLTISSLQPEDFATYYCQQSWNTPWTFGQGTKLEIKRLEQSFGLLDPKLCYLLDGILFIYGVILTALFLRVKFSRSADAPAYQQGQNQLYNELNLGRREEYDVLDKRRGRDPEMGGKPQRRKNPQEGLYNELQKDKMAEAYSEIGMKGERRRGKGHDGLYQGLSTATKDTYDALHMQALPPRRAKRSGSGATNFSLLKQAGDVEENPGPTSMDWIWRILFLVGAATGAHSQLQLQESGPGLVKPSETLSLTCTVSGGSISSGDYYWGWIRQPPGKGLEWIGHIYYSGATYYNPSLKSRVTISVDTSRNQFSLKLSSVTAADTAVYYCTRDDSSNWRSRGQGTLVTVSSSGGGGSGGGGSEVQLVESGGGLVQPGGSLRLSCAASGFASDYYIIGWFRQAPGKEREGVSCISSRYANTNYADSVKGRFTISRDNAKNTVYLQMNSLKPEDTAVYYCAADTRRYTCPDIATMHRNFDSWGQGTLVTVSSGSGGGGSGGGGSGGGGSFEQVQLQQPGAELVKPGASVKMSCKASGYAFSSYWINWMKQKPGQGLEWIGQIYPGDGDTNYNGKFKGRATLTADTSSSTAYMQLSSLTSEDSAVYFCARSITTVVGCAMDYWGQGTSVTVSSTRQSFGLLDPKLCYLLDGILFIYGVILTALFLRVKFSRSADAPAYQQGQNQLYNELNLGRREEYDVLDKRRGRDPEMGGKPQRRKNPQEGLYNELQKDKMAEAYSEIGMKGERRRGKGHDGLYQGLSTATKDTYDALHMQALPPRRAKRSGSGVKQTLNFDLLKLAGDVESNPGPSRGHMTEYKPTVRLATRDDVPRAVRTLAAAFADYPATRHTVDPDRHIERVTELQELFLTRVGLDIGKVWVADDGAAVAVWTTPESVEAGAVFAEIGPRMAELSGSRLAAQQQMEGLLAPHRPKEPAWFLATVGVSPDHQGKGLGSAVVLPGVEAAERAGVPAFLETSAPRNLPFYERLGFTVTADVEVPEGPRTWCMTRKPGA

SEQ ID NO: 16887 - protein, 1194 aa, Artificial Sequence
  Synthetic Polypeptide
MALPVTALLLPLALLLHAARPEVQLLESGGGLVQPGGSLRLSCAASGFTFSSYAMSWVRQAPGKGLEWVSSISGSGDYIYYADSVKGRFTISRDISKNTLYLQMNSLRAEDTAVYYCAKEGTGANSSLADYRGQGTLVTVSSGGGSGGGSEVQLVESGGSLVQPGGSLRLSCAASGFTFDDYAMSWVRQVPGKGLEWVSSINWSGTHTDYADSVKGRFTISRNNANNTLYLQMNSLKSEDTAVYYCAKNWRDAGTTWFEKSGSAGQGTQVTVSSGTGGGGSGGGGSGGGGSEFDIQMTQSPSSLSASVGDRVTITCKASDHINNWLAWYQQKPGQAPKLLIYGATTLETGVPSRFSGSGSGTDYTLTISSLQPEDFATYYCQQSWNTPWTFGQGTKLEIKRLEGQPKANPTVTLFPPSSEELQANKATLVCLISDFYPGAVTVAWKADGSPVKAGVETTKPSKQSNNKYAASSYLSLTPEQWKSHRSYSCQVTHEGSTVEKTVAPTECSPIKTDVITMDPKDNCSKDANDTLLLQLTNTSAYYMYLLLLLKSVVYFAIITCCLLRRTAFCCNGEKSRAKRSGSGATNFSLLKQAGDVEENPGPTSMDWIWRILFLVGAATGAHSQLQLQESGPGLVKPSETLSLTCTVSGGSISSGDYYWGWIRQPPGKGLEWIGHIYYSGATYYNPSLKSRVTISVDTSRNQFSLKLSSVTAADTAVYYCTRDDSSNWRSRGQGTLVTVSSSGGGGSGGGGSEVQLVESGGGLVQPGGSLRLSCAASGFASDYYIIGWFRQAPGKEREGVSCISSRYANTNYADSVKGRFTISRDNAKNTVYLQMNSLKPEDTAVYYCAADTRRYTCPDIATMHRNFDSWGQGTLVTVSSGSGGGGSGGGGSGGGGSFEQVQLQQPGAELVKPGASVKMSCKASGYAFSSYWINWMKQKPGQGLEWIGQIYPGDGDTNYNGKFKGRATLTADTSSSTAYMQLSSLTSEDSAVYFCARSITTVVGCAMDYWGQGTSVTVSSTRASTKGPSVFPLAPSSKSTSGGTAALGCLVKDYFPEPVTVSWNSGALTSGVHTFPAVLQSSGLYSLSSVVTVPSSSLGTQTYICNVNHKPSNTKVDKRVEPKSCEVKTDSTDHVKPKETENTKQPSKSCHKPKAIVHTEKVNMMSLTVLGLRMLFAKTVAVNFLLTAKLFFL

SEQ ID NO: 16888 - protein, 1172 aa, Artificial Sequence
  Synthetic Polypeptide
MALPVTALLLPLALLLHAARPEVQLLESGGGLVQPGGSLRLSCAASGFTFSSYAMSWVRQAPGKGLEWVSSISGSGDYIYYADSVKGRFTISRDISKNTLYLQMNSLRAEDTAVYYCAKEGTGANSSLADYRGQGTLVTVSSGGGSGGGSEVQLVESGGSLVQPGGSLRLSCAASGFTFDDYAMSWVRQVPGKGLEWVSSINWSGTHTDYADSVKGRFTISRNNANNTLYLQMNSLKSEDTAVYYCAKNWRDAGTTWFEKSGSAGQGTQVTVSSGTGGGGSGGGGSGGGGSEFDIQMTQSPSSLSASVGDRVTITCKASDHINNWLAWYQQKPGQAPKLLIYGATTLETGVPSRFSGSGSGTDYTLTISSLQPEDFATYYCQQSWNTPWTFGQGTKLEIKRLEGQPKANPTVTLFPPSSEELQANKATLVCLISDFYPGAVTVAWKADGSPVKAGVETTKPSKQSNNKYAASSYLSLTPEQWKSHRSYSCQVTHEGSTVEKTVAPTECSGRADCGITSASYHQGVLSATILYEILLGKATLYAVLVSALVLMAMVKRKDSRGRAKRSGSGATNFSLLKQAGDVEENPGPTSMDWIWRILFLVGAATGAHSQLQLQESGPGLVKPSETLSLTCTVSGGSISSGDYYWGWIRQPPGKGLEWIGHIYYSGATYYNPSLKSRVTISVDTSRNQFSLKLSSVTAADTAVYYCTRDDSSNWRSRGQGTLVTVSSSGGGGSGGGGSEVQLVESGGGLVQPGGSLRLSCAASGFASDYYIIGWFRQAPGKEREGVSCISSRYANTNYADSVKGRFTISRDNAKNTVYLQMNSLKPEDTAVYYCAADTRRYTCPDIATMHRNFDSWGQGTLVTVSSGSGGGGSGGGGSGGGGSFEQVQLQQPGAELVKPGASVKMSCKASGYAFSSYWINWMKQKPGQGLEWIGQIYPGDGDTNYNGKFKGRATLTADTSSSTAYMQLSSLTSEDSAVYFCARSITTVVGCAMDYWGQGTSVTVSSTRASTKGPSVFPLAPSSKSTSGGTAALGCLVKDYFPEPVTVSWNSGALTSGVHTFPAVLQSSGLYSLSSVVTVPSSSLGTQTYICNVNHKPSNTKVDKRVEPKSCIPEDTFFPSSDVPCDVKLVEKSFETDTNLNFQNLSVIGFRILLLKVAGFNLLMTLRLWSS

SEQ ID NO: 16889 - protein, 1172 aa, Artificial Sequence
  Synthetic Polypeptide
MALPVTALLLPLALLLHAARPEVQLLESGGGLVQPGGSLRLSCAASGFTFSSYAMSWVRQAPGKGLEWVSSISGSGDYIYYADSVKGRFTISRDISKNTLYLQMNSLRAEDTAVYYCAKEGTGANSSLADYRGQGTLVTVSSGGGSGGGSEVQLVESGGSLVQPGGSLRLSCAASGFTFDDYAMSWVRQVPGKGLEWVSSINWSGTHTDYADSVKGRFTISRNNANNTLYLQMNSLKSEDTAVYYCAKNWRDAGTTWFEKSGSAGQGTQVTVSSGTGGGGSGGGGSGGGGSEFDIQMTQSPSSLSASVGDRVTITCKASDHINNWLAWYQQKPGQAPKLLIYGATTLETGVPSRFSGSGSGTDYTLTISSLQPEDFATYYCQQSWNTPWTFGQGTKLEIKRLEGQPKANPTVTLFPPSSEELQANKATLVCLISDFYPGAVTVAWKADGSPVKAGVETTKPSKQSNNKYAASSYLSLTPEQWKSHRSYSCQVTHEGSTVEKTVAPTECSGRADCGFTSESYQQGVLSATILYEILLGKATLYAVLVSALVLMAMVKRKDSRGRAKRSGSGATNFSLLKQAGDVEENPGPTSMDWIWRILFLVGAATGAHSQLQLQESGPGLVKPSETLSLTCTVSGGSISSGDYYWGWIRQPPGKGLEWIGHIYYSGATYYNPSLKSRVTISVDTSRNQFSLKLSSVTAADTAVYYCTRDDSSNWRSRGQGTLVTVSSSGGGGSGGGGSEVQLVESGGGLVQPGGSLRLSCAASGFASDYYIIGWFRQAPGKEREGVSCISSRYANTNYADSVKGRFTISRDNAKNTVYLQMNSLKPEDTAVYYCAADTRRYTCPDIATMHRNFDSWGQGTLVTVSSGSGGGGSGGGGSGGGGSFEQVQLQQPGAELVKPGASVKMSCKASGYAFSSYWINWMKQKPGQGLEWIGQIYPGDGDTNYNGKFKGRATLTADTSSSTAYMQLSSLTSEDSAVYFCARSITTVVGCAMDYWGQGTSVTVSSTRASTKGPSVFPLAPSSKSTSGGTAALGCLVKDYFPEPVTVSWNSGALTSGVHTFPAVLQSSGLYSLSSVVTVPSSSLGTQTYICNVNHKPSNTKVDKRVEPKSCIPEDTFFPSPESSCDVKLVEKSFETDTNLNFQNLSVIGFRILLLKVAGFNLLMTLRLWSS

SEQ ID NO: 16890 - protein, 1138 aa, Artificial Sequence
  Synthetic Polypeptide
MALPVTALLLPLALLLHAARPEVQLLESGGGLVQPGGSLRLSCAASGFTFSSYAMSWVRQAPGKGLEWVSSISGSGDYIYYADSVKGRFTISRDISKNTLYLQMNSLRAEDTAVYYCAKEGTGANSSLADYRGQGTLVTVSSGGGSGGGSEVQLVESGGSLVQPGGSLRLSCAASGFTFDDYAMSWVRQVPGKGLEWVSSINWSGTHTDYADSVKGRFTISRNNANNTLYLQMNSLKSEDTAVYYCAKNWRDAGTTWFEKSGSAGQGTQVTVSSLEGQPKANPTVTLFPPSSEELQANKATLVCLISDFYPGAVTVAWKADGSPVKAGVETTKPSKQSNNKYAASSYLSLTPEQWKSHRSYSCQVTHEGSTVEKTVAPTECSGRADCGFTSESYQQGVLSATILYEILLGKATLYAVLVSALVLMAMVKRKDSRGRAKRSGSGATNFSLLKQAGDVEENPGPTSMDWIWRILFLVGAATGAHSQLQLQESGPGLVKPSETLSLTCTVSGGSISSGDYYWGWIRQPPGKGLEWIGHIYYSGATYYNPSLKSRVTISVDTSRNQFSLKLSSVTAADTAVYYCTRDDSSNWRSRGQGTLVTVSSSGGGGSGGGGSEVQLVESGGGLVQPGGSLRLSCAASGFASDYYIIGWFRQAPGKEREGVSCISSRYANTNYADSVKGRFTISRDNAKNTVYLQMNSLKPEDTAVYYCAADTRRYTCPDIATMHRNFDSWGQGTLVTVSSTRASTKGPSVFPLAPSSKSTSGGTAALGCLVKDYFPEPVTVSWNSGALTSGVHTFPAVLQSSGLYSLSSVVTVPSSSLGTQTYICNVNHKPSNTKVDKRVEPKSCIPEDTFFPSPESSCDVKLVEKSFETDTNLNFQNLSVIGFRILLLKVAGFNLLMTLRLWSSRAKRSGSGVKQTLNFDLLKLAGDVESNPGPSRGHMTEYKPTVRLATRDDVPRAVRTLAAAFADYPATRHTVDPDRHIERVTELQELFLTRVGLDIGKVWVADDGAAVAVWTTPESVEAGAVFAEIGPRMAELSGSRLAAQQQMEGLLAPHRPKEPAWFLATVGVSPDHQGKGLGSAVVLPGVEAAERAGVPAFLETSAPRNLPFYERLGFTVTADVEVPEGPRTWCMTRKPGA

SEQ ID NO: 16891 - protein, 905 aa, Artificial Sequence
  Synthetic Polypeptide
MALPVTALLLPLALLLHAARPEVQLLESGGGLVQPGGSLRLSCAASGFTFSSYAMSWVRQAPGKGLEWVSSISGSGDYIYYADSVKGRFTISRDISKNTLYLQMNSLRAEDTAVYYCAKEGTGANSSLADYRGQGTLVTVSSGGGSGGGSEVQLVESGGSLVQPGGSLRLSCAASGFTFDDYAMSWVRQVPGKGLEWVSSINWSGTHTDYADSVKGRFTISRNNANNTLYLQMNSLKSEDTAVYYCAKNWRDAGTTWFEKSGSAGQGTQVTVSSLEGQPKANPTVTLFPPSSEELQANKATLVCLISDFYPGAVTVAWKADGSPVKAGVETTKPSKQSNNKYAASSYLSLTPEQWKSHRSYSCQVTHEGSTVEKTVAPTECSGRADCGFTSESYQQGVLSATILYEILLGKATLYAVLVSALVLMAMVKRKDSRGRAKRSGSGATNFSLLKQAGDVEENPGPTSMDWIWRILFLVGAATGAHSQLQLQESGPGLVKPSETLSLTCTVSGGSISSGDYYWGWIRQPPGKGLEWIGHIYYSGATYYNPSLKSRVTISVDTSRNQFSLKLSSVTAADTAVYYCTRDDSSNWRSRGQGTLVTVSSSGGGGSGGGGSEVQLVESGGGLVQPGGSLRLSCAASGFASDYYIIGWFRQAPGKEREGVSCISSRYANTNYADSVKGRFTISRDNAKNTVYLQMNSLKPEDTAVYYCAADTRRYTCPDIATMHRNFDSWGQGTLVTVSSTRASTKGPSVFPLAPSSKSTSGGTAALGCLVKDYFPEPVTVSWNSGALTSGVHTFPAVLQSSGLYSLSSVVTVPSSSLGTQTYICNVNHKPSNTKVDKRVEPKSCIPEDTFFPSPESSCDVKLVEKSFETDTNLNFQNLSVIGFRILLLKVAGFNLLMTLRLWSS

SEQ ID NO: 16892 - protein, 933 aa, Artificial Sequence
  Synthetic Polypeptide
MALPVTALLLPLALLLHAARPEVQLLESGGGLVQPGGSLRLSCAASGFTFSSYAMSWVRQAPGKGLEWVSSISGSGDYIYYADSVKGRFTISRDISKNTLYLQMNSLRAEDTAVYYCAKEGTGANSSLADYRGQGTLVTVSSGGGSGGGSEVQLVESGGSLVQPGGSLRLSCAASGFTFDDYAMSWVRQVPGKGLEWVSSINWSGTHTDYADSVKGRFTISRNNANNTLYLQMNSLKSEDTAVYYCAKNWRDAGTTWFEKSGSAGQGTQVTVSSLEGSGRADCGFTSESYQQGVLSATILYEILLGKATLYAVLVSALVLMAMVKRKDSRGRAKRSGSGATNFSLLKQAGDVEENPGPTSMDWIWRILFLVGAATGAHSQLQLQESGPGLVKPSETLSLTCTVSGGSISSGDYYWGWIRQPPGKGLEWIGHIYYSGATYYNPSLKSRVTISVDTSRNQFSLKLSSVTAADTAVYYCTRDDSSNWRSRGQGTLVTVSSSGGGGSGGGGSEVQLVESGGGLVQPGGSLRLSCAASGFASDYYIIGWFRQAPGKEREGVSCISSRYANTNYADSVKGRFTISRDNAKNTVYLQMNSLKPEDTAVYYCAADTRRYTCPDIATMHRNFDSWGQGTLVTVSSTRGSIPEDTFFPSPESSCDVKLVEKSFETDTNLNFQNLSVIGFRILLLKVAGFNLLMTLRLWSSRAKRSGSGVKQTLNFDLLKLAGDVESNPGPSRGHMTEYKPTVRLATRDDVPRAVRTLAAAFADYPATRHTVDPDRHIERVTELQELFLTRVGLDIGKVWVADDGAAVAVWTTPESVEAGAVFAEIGPRMAELSGSRLAAQQQMEGLLAPHRPKEPAWFLATVGVSPDHQGKGLGSAVVLPGVEAAERAGVPAFLETSAPRNLPFYERLGFTVTADVEVPEGPRTWCMTRKPGA

SEQ ID NO: 16893 - protein, 700 aa, Artificial Sequence
  Synthetic Polypeptide
MALPVTALLLPLALLLHAARPEVQLLESGGGLVQPGGSLRLSCAASGFTFSSYAMSWVRQAPGKGLEWVSSISGSGDYIYYADSVKGRFTISRDISKNTLYLQMNSLRAEDTAVYYCAKEGTGANSSLADYRGQGTLVTVSSGGGSGGGSEVQLVESGGSLVQPGGSLRLSCAASGFTFDDYAMSWVRQVPGKGLEWVSSINWSGTHTDYADSVKGRFTISRNNANNTLYLQMNSLKSEDTAVYYCAKNWRDAGTTWFEKSGSAGQGTQVTVSSLEGSGRADCGFTSESYQQGVLSATILYEILLGKATLYAVLVSALVLMAMVKRKDSRGRAKRSGSGATNFSLLKQAGDVEENPGPTSMDWIWRILFLVGAATGAHSQLQLQESGPGLVKPSETLSLTCTVSGGSISSGDYYWGWIRQPPGKGLEWIGHIYYSGATYYNPSLKSRVTISVDTSRNQFSLKLSSVTAADTAVYYCTRDDSSNWRSRGQGTLVTVSSSGGGGSGGGGSEVQLVESGGGLVQPGGSLRLSCAASGFASDYYIIGWFRQAPGKEREGVSCISSRYANTNYADSVKGRFTISRDNAKNTVYLQMNSLKPEDTAVYYCAADTRRYTCPDIATMHRNFDSWGQGTLVTVSSTRGSIPEDTFFPSPESSCDVKLVEKSFETDTNLNFQNLSVIGFRILLLKVAGFNLLMTLRLWSS

SEQ ID NO: 16894 - protein, 942 aa, Artificial Sequence
  Synthetic Polypeptide
MALPVTALLLPLALLLHAARPEVQLLESGGGLVQPGGSLRLSCAASGFTFSSYAMSWVRQAPGKGLEWVSSISGSGDYIYYADSVKGRFTISRDISKNTLYLQMNSLRAEDTAVYYCAKEGTGANSSLADYRGQGTLVTVSSGGGSGGGSEVQLVESGGSLVQPGGSLRLSCAASGFTFDDYAMSWVRQVPGKGLEWVSSINWSGTHTDYADSVKGRFTISRNNANNTLYLQMNSLKSEDTAVYYCAKNWRDAGTTWFEKSGSAGQGTQVTVSSLEDKTHTCPPCPAGRADCGFTSESYQQGVLSATILYEILLGKATLYAVLVSALVLMAMVKRKDSRGRAKRSGSGATNFSLLKQAGDVEENPGPTSMDWIWRILFLVGAATGAHSQLQLQESGPGLVKPSETLSLTCTVSGGSISSGDYYWGWIRQPPGKGLEWIGHIYYSGATYYNPSLKSRVTISVDTSRNQFSLKLSSVTAADTAVYYCTRDDSSNWRSRGQGTLVTVSSSGGGGSGGGGSEVQLVESGGGLVQPGGSLRLSCAASGFASDYYIIGWFRQAPGKEREGVSCISSRYANTNYADSVKGRFTISRDNAKNTVYLQMNSLKPEDTAVYYCAADTRRYTCPDIATMHRNFDSWGQGTLVTVSSTRGSIPEDTFFPSPESSCDVKLVEKSFETDTNLNFQNLSVIGFRILLLKVAGFNLLMTLRLWSSRAKRSGSGVKQTLNFDLLKLAGDVESNPGPSRGHMTEYKPTVRLATRDDVPRAVRTLAAAFADYPATRHTVDPDRHIERVTELQELFLTRVGLDIGKVWVADDGAAVAVWTTPESVEAGAVFAEIGPRMAELSGSRLAAQQQMEGLLAPHRPKEPAWFLATVGVSPDHQGKGLGSAVVLPGVEAAERAGVPAFLETSAPRNLPFYERLGFTVTADVEVPEGPRTWCMTRKPGA

SEQ ID NO: 16895 - protein, 942 aa, Artificial Sequence
  Synthetic Polypeptide
MALPVTALLLPLALLLHAARPEVQLLESGGGLVQPGGSLRLSCAASGFTFSSYAMSWVRQAPGKGLEWVSSISGSGDYIYYADSVKGRFTISRDISKNTLYLQMNSLRAEDTAVYYCAKEGTGANSSLADYRGQGTLVTVSSGGGSGGGSEVQLVESGGSLVQPGGSLRLSCAASGFTFDDYAMSWVRQVPGKGLEWVSSINWSGTHTDYADSVKGRFTISRNNANNTLYLQMNSLKSEDTAVYYCAKNWRDAGTTWFEKSGSAGQGTQVTVSSLEGSGRADCGFTSESYQQGVLSATILYEILLGKATLYAVLVSALVLMAMVKRKDSRGRAKRSGSGATNFSLLKQAGDVEENPGPTSMDWIWRILFLVGAATGAHSQLQLQESGPGLVKPSETLSLTCTVSGGSISSGDYYWGWIRQPPGKGLEWIGHIYYSGATYYNPSLKSRVTISVDTSRNQFSLKLSSVTAADTAVYYCTRDDSSNWRSRGQGTLVTVSSSGGGGSGGGGSEVQLVESGGGLVQPGGSLRLSCAASGFASDYYIIGWFRQAPGKEREGVSCISSRYANTNYADSVKGRFTISRDNAKNTVYLQMNSLKPEDTAVYYCAADTRRYTCPDIATMHRNFDSWGQGTLVTVSSTRDKTHTCPPCPAIPEDTFFPSPESSCDVKLVEKSFETDTNLNFQNLSVIGFRILLLKVAGFNLLMTLRLWSSRAKRSGSGVKQTLNFDLLKLAGDVESNPGPSRGHMTEYKPTVRLATRDDVPRAVRTLAAAFADYPATRHTVDPDRHIERVTELQELFLTRVGLDIGKVWVADDGAAVAVWTTPESVEAGAVFAEIGPRMAELSGSRLAAQQQMEGLLAPHRPKEPAWFLATVGVSPDHQGKGLGSAVVLPGVEAAERAGVPAFLETSAPRNLPFYERLGFTVTADVEVPEGPRTWCMTRKPGA

SEQ ID NO: 16896 - protein, 951 aa, Artificial Sequence
  Synthetic Polypeptide
MALPVTALLLPLALLLHAARPEVQLLESGGGLVQPGGSLRLSCAASGFTFSSYAMSWVRQAPGKGLEWVSSISGSGDYIYYADSVKGRFTISRDISKNTLYLQMNSLRAEDTAVYYCAKEGTGANSSLADYRGQGTLVTVSSGGGSGGGSEVQLVESGGSLVQPGGSLRLSCAASGFTFDDYAMSWVRQVPGKGLEWVSSINWSGTHTDYADSVKGRFTISRNNANNTLYLQMNSLKSEDTAVYYCAKNWRDAGTTWFEKSGSAGQGTQVTVSSLEDKTHTCPPCPAGRADCGFTSESYQQGVLSATILYEILLGKATLYAVLVSALVLMAMVKRKDSRGRAKRSGSGATNFSLLKQAGDVEENPGPTSMDWIWRILFLVGAATGAHSQLQLQESGPGLVKPSETLSLTCTVSGGSISSGDYYWGWIRQPPGKGLEWIGHIYYSGATYYNPSLKSRVTISVDTSRNQFSLKLSSVTAADTAVYYCTRDDSSNWRSRGQGTLVTVSSSGGGGSGGGGSEVQLVESGGGLVQPGGSLRLSCAASGFASDYYIIGWFRQAPGKEREGVSCISSRYANTNYADSVKGRFTISRDNAKNTVYLQMNSLKPEDTAVYYCAADTRRYTCPDIATMHRNFDSWGQGTLVTVSSTRDKTHTCPPCPAIPEDTFFPSPESSCDVKLVEKSFETDTNLNFQNLSVIGFRILLLKVAGFNLLMTLRLWSSRAKRSGSGVKQTLNFDLLKLAGDVESNPGPSRGHMTEYKPTVRLATRDDVPRAVRTLAAAFADYPATRHTVDPDRHIERVTELQELFLTRVGLDIGKVWVADDGAAVAVWTTPESVEAGAVFAEIGPRMAELSGSRLAAQQQMEGLLAPHRPKEPAWFLATVGVSPDHQGKGLGSAVVLPGVEAAERAGVPAFLETSAPRNLPFYERLGFTVTADVEVPEGPRTWCMTRKPGA

SEQ ID NO: 16897 - protein, 718 aa, Artificial Sequence
  Synthetic Polypeptide
MALPVTALLLPLALLLHAARPEVQLLESGGGLVQPGGSLRLSCAASGFTFSSYAMSWVRQAPGKGLEWVSSISGSGDYIYYADSVKGRFTISRDISKNTLYLQMNSLRAEDTAVYYCAKEGTGANSSLADYRGQGTLVTVSSGGGSGGGSEVQLVESGGSLVQPGGSLRLSCAASGFTFDDYAMSWVRQVPGKGLEWVSSINWSGTHTDYADSVKGRFTISRNNANNTLYLQMNSLKSEDTAVYYCAKNWRDAGTTWFEKSGSAGQGTQVTVSSLEDKTHTCPPCPAGRADCGFTSESYQQGVLSATILYEILLGKATLYAVLVSALVLMAMVKRKDSRGRAKRSGSGATNFSLLKQAGDVEENPGPTSMDWIWRILFLVGAATGAHSQLQLQESGPGLVKPSETLSLTCTVSGGSISSGDYYWGWIRQPPGKGLEWIGHIYYSGATYYNPSLKSRVTISVDTSRNQFSLKLSSVTAADTAVYYCTRDDSSNWRSRGQGTLVTVSSSGGGGSGGGGSEVQLVESGGGLVQPGGSLRLSCAASGFASDYYIIGWFRQAPGKEREGVSCISSRYANTNYADSVKGRFTISRDNAKNTVYLQMNSLKPEDTAVYYCAADTRRYTCPDIATMHRNFDSWGQGTLVTVSSTRDKTHTCPPCPAIPEDTFFPSPESSCDVKLVEKSFETDTNLNFQNLSVIGFRILLLKVAGFNLLMTLRLWSS

SEQ ID NO: 16898 - protein, 709 aa, Artificial Sequence
  Synthetic Polypeptide
MALPVTALLLPLALLLHAARPEVQLLESGGGLVQPGGSLRLSCAASGFTFSSYAMSWVRQAPGKGLEWVSSISGSGDYIYYADSVKGRFTISRDISKNTLYLQMNSLRAEDTAVYYCAKEGTGANSSLADYRGQGTLVTVSSGGGSGGGSEVQLVESGGSLVQPGGSLRLSCAASGFTFDDYAMSWVRQVPGKGLEWVSSINWSGTHTDYADSVKGRFTISRNNANNTLYLQMNSLKSEDTAVYYCAKNWRDAGTTWFEKSGSAGQGTQVTVSSLEGSGRADCGFTSESYQQGVLSATILYEILLGKATLYAVLVSALVLMAMVKRKDSRGRAKRSGSGATNFSLLKQAGDVEENPGPTSMDWIWRILFLVGAATGAHSQLQLQESGPGLVKPSETLSLTCTVSGGSISSGDYYWGWIRQPPGKGLEWIGHIYYSGATYYNPSLKSRVTISVDTSRNQFSLKLSSVTAADTAVYYCTRDDSSNWRSRGQGTLVTVSSSGGGGSGGGGSEVQLVESGGGLVQPGGSLRLSCAASGFASDYYIIGWFRQAPGKEREGVSCISSRYANTNYADSVKGRFTISRDNAKNTVYLQMNSLKPEDTAVYYCAADTRRYTCPDIATMHRNFDSWGQGTLVTVSSTRDKTHTCPPCPAIPEDTFFPSPESSCDVKLVEKSFETDTNLNFQNLSVIGFRILLLKVAGFNLLMTLRLWSS

SEQ ID NO: 16899 - protein, 1160 aa, Artificial Sequence
  Synthetic Polypeptide
MALPVTALLLPLALLLHAARPEVQLLESGGGLVQPGGSLRLSCAASGFTFSSYAMSWVRQAPGKGLEWVSSISGSGDYIYYADSVKGRFTISRDISKNTLYLQMNSLRAEDTAVYYCAKEGTGANSSLADYRGQGTLVTVSSGGGSGGGSEVQLVESGGSLVQPGGSLRLSCAASGFTFDDYAMSWVRQVPGKGLEWVSSINWSGTHTDYADSVKGRFTISRNNANNTLYLQMNSLKSEDTAVYYCAKNWRDAGTTWFEKSGSAGQGTQVTVSSLEGQPKANPTVTLFPPSSEELQANKATLVCLISDFYPGAVTVAWKADGSPVKAGVETTKPSKQSNNKYAASSYLSLTPEQWKSHRSYSCQVTHEGSTVEKTVAPTECSPIKTDVITMDPKDNCSKDANDTLLLQLTNTSAYYMYLLLLLKSVVYFAIITCCLLRRTAFCCNGEKSRAKRSGSGATNFSLLKQAGDVEENPGPTSMDWIWRILFLVGAATGAHSQLQLQESGPGLVKPSETLSLTCTVSGGSISSGDYYWGWIRQPPGKGLEWIGHIYYSGATYYNPSLKSRVTISVDTSRNQFSLKLSSVTAADTAVYYCTRDDSSNWRSRGQGTLVTVSSSGGGGSGGGGSEVQLVESGGGLVQPGGSLRLSCAASGFASDYYIIGWFRQAPGKEREGVSCISSRYANTNYADSVKGRFTISRDNAKNTVYLQMNSLKPEDTAVYYCAADTRRYTCPDIATMHRNFDSWGQGTLVTVSSTRASTKGPSVFPLAPSSKSTSGGTAALGCLVKDYFPEPVTVSWNSGALTSGVHTFPAVLQSSGLYSLSSVVTVPSSSLGTQTYICNVNHKPSNTKVDKRVEPKSCEVKTDSTDHVKPKETENTKQPSKSCHKPKAIVHTEKVNMMSLTVLGLRMLFAKTVAVNFLLTAKLFFLRAKRSGSGVKQTLNFDLLKLAGDVESNPGPSRGHMTEYKPTVRLATRDDVPRAVRTLAAAFADYPATRHTVDPDRHIERVTELQELFLTRVGLDIGKVWVADDGAAVAVWTTPESVEAGAVFAEIGPRMAELSGSRLAAQQQMEGLLAPHRPKEPAWFLATVGVSPDHQGKGLGSAVVLPGVEAAERAGVPAFLETSAPRNLPFYERLGFTVTADVEVPEGPRTWCMTRKPGA

SEQ ID NO: 16900 - protein, 927 aa, Artificial Sequence
  Synthetic Polypeptide
MALPVTALLLPLALLLHAARPEVQLLESGGGLVQPGGSLRLSCAASGFTFSSYAMSWVRQAPGKGLEWVSSISGSGDYIYYADSVKGRFTISRDISKNTLYLQMNSLRAEDTAVYYCAKEGTGANSSLADYRGQGTLVTVSSGGGSGGGSEVQLVESGGSLVQPGGSLRLSCAASGFTFDDYAMSWVRQVPGKGLEWVSSINWSGTHTDYADSVKGRFTISRNNANNTLYLQMNSLKSEDTAVYYCAKNWRDAGTTWFEKSGSAGQGTQVTVSSLEGQPKANPTVTLFPPSSEELQANKATLVCLISDFYPGAVTVAWKADGSPVKAGVETTKPSKQSNNKYAASSYLSLTPEQWKSHRSYSCQVTHEGSTVEKTVAPTECSPIKTDVITMDPKDNCSKDANDTLLLQLTNTSAYYMYLLLLLKSVVYFAIITCCLLRRTAFCCNGEKSRAKRSGSGATNFSLLKQAGDVEENPGPTSMDWIWRILFLVGAATGAHSQLQLQESGPGLVKPSETLSLTCTVSGGSISSGDYYWGWIRQPPGKGLEWIGHIYYSGATYYNPSLKSRVTISVDTSRNQFSLKLSSVTAADTAVYYCTRDDSSNWRSRGQGTLVTVSSSGGGGSGGGGSEVQLVESGGGLVQPGGSLRLSCAASGFASDYYIIGWFRQAPGKEREGVSCISSRYANTNYADSVKGRFTISRDNAKNTVYLQMNSLKPEDTAVYYCAADTRRYTCPDIATMHRNFDSWGQGTLVTVSSTRASTKGPSVFPLAPSSKSTSGGTAALGCLVKDYFPEPVTVSWNSGALTSGVHTFPAVLQSSGLYSLSSVVTVPSSSLGTQTYICNVNHKPSNTKVDKRVEPKSCEVKTDSTDHVKPKETENTKQPSKSCHKPKAIVHTEKVNMMSLTVLGLRMLFAKTVAVNFLLTAKLFFL

SEQ ID NO: 16901 - protein, 955 aa, Artificial Sequence
  Synthetic Polypeptide
MALPVTALLLPLALLLHAARPEVQLLESGGGLVQPGGSLRLSCAASGFTFSSYAMSWVRQAPGKGLEWVSSISGSGDYIYYADSVKGRFTISRDISKNTLYLQMNSLRAEDTAVYYCAKEGTGANSSLADYRGQGTLVTVSSGGGSGGGSEVQLVESGGSLVQPGGSLRLSCAASGFTFDDYAMSWVRQVPGKGLEWVSSINWSGTHTDYADSVKGRFTISRNNANNTLYLQMNSLKSEDTAVYYCAKNWRDAGTTWFEKSGSAGQGTQVTVSSLEGSPIKTDVITMDPKDNCSKDANDTLLLQLTNTSAYYMYLLLLLKSVVYFAIITCCLLRRTAFCCNGEKSRAKRSGSGATNFSLLKQAGDVEENPGPTSMDWIWRILFLVGAATGAHSQLQLQESGPGLVKPSETLSLTCTVSGGSISSGDYYWGWIRQPPGKGLEWIGHIYYSGATYYNPSLKSRVTISVDTSRNQFSLKLSSVTAADTAVYYCTRDDSSNWRSRGQGTLVTVSSSGGGGSGGGGSEVQLVESGGGLVQPGGSLRLSCAASGFASDYYIIGWFRQAPGKEREGVSCISSRYANTNYADSVKGRFTISRDNAKNTVYLQMNSLKPEDTAVYYCAADTRRYTCPDIATMHRNFDSWGQGTLVTVSSTRGSEVKTDSTDHVKPKETENTKQPSKSCHKPKAIVHTEKVNMMSLTVLGLRMLFAKTVAVNFLLTAKLFFLRAKRSGSGVKQTLNFDLLKLAGDVESNPGPSRGHMTEYKPTVRLATRDDVPRAVRTLAAAFADYPATRHTVDPDRHIERVTELQELFLTRVGLDIGKVWVADDGAAVAVWTTPESVEAGAVFAEIGPRMAELSGSRLAAQQQMEGLLAPHRPKEPAWFLATVGVSPDHQGKGLGSAVVLPGVEAAERAGVPAFLETSAPRNLPFYERLGFTVTADVEVPEGPRTWCMTRKPGA

SEQ ID NO: 16902 - protein, 722 aa, Artificial Sequence
  Synthetic Polypeptide
MALPVTALLLPLALLLHAARPEVQLLESGGGLVQPGGSLRLSCAASGFTFSSYAMSWVRQAPGKGLEWVSSISGSGDYIYYADSVKGRFTISRDISKNTLYLQMNSLRAEDTAVYYCAKEGTGANSSLADYRGQGTLVTVSSGGGSGGGSEVQLVESGGSLVQPGGSLRLSCAASGFTFDDYAMSWVRQVPGKGLEWVSSINWSGTHTDYADSVKGRFTISRNNANNTLYLQMNSLKSEDTAVYYCAKNWRDAGTTWFEKSGSAGQGTQVTVSSLEGSPIKTDVITMDPKDNCSKDANDTLLLQLTNTSAYYMYLLLLLKSVVYFAIITCCLLRRTAFCCNGEKSRAKRSGSGATNFSLLKQAGDVEENPGPTSMDWIWRILFLVGAATGAHSQLQLQESGPGLVKPSETLSLTCTVSGGSISSGDYYWGWIRQPPGKGLEWIGHIYYSGATYYNPSLKSRVTISVDTSRNQFSLKLSSVTAADTAVYYCTRDDSSNWRSRGQGTLVTVSSSGGGGSGGGGSEVQLVESGGGLVQPGGSLRLSCAASGFASDYYIIGWFRQAPGKEREGVSCISSRYANTNYADSVKGRFTISRDNAKNTVYLQMNSLKPEDTAVYYCAADTRRYTCPDIATMHRNFDSWGQGTLVTVSSTRGSEVKTDSTDHVKPKETENTKQPSKSCHKPKAIVHTEKVNMMSLTVLGLRMLFAKTVAVNFLLTAKLFFL

SEQ ID NO: 16903 - protein, 740 aa, Artificial Sequence
  Synthetic Polypeptide
MALPVTALLLPLALLLHAARPEVQLLESGGGLVQPGGSLRLSCAASGFTFSSYAMSWVRQAPGKGLEWVSSISGSGDYIYYADSVKGRFTISRDISKNTLYLQMNSLRAEDTAVYYCAKEGTGANSSLADYRGQGTLVTVSSGGGSGGGSEVQLVESGGSLVQPGGSLRLSCAASGFTFDDYAMSWVRQVPGKGLEWVSSINWSGTHTDYADSVKGRFTISRNNANNTLYLQMNSLKSEDTAVYYCAKNWRDAGTTWFEKSGSAGQGTQVTVSSLEDKTHTCPPCPAPIKTDVITMDPKDNCSKDANDTLLLQLTNTSAYYMYLLLLLKSVVYFAIITCCLLRRTAFCCNGEKSRAKRSGSGATNFSLLKQAGDVEENPGPTSMDWIWRILFLVGAATGAHSQLQLQESGPGLVKPSETLSLTCTVSGGSISSGDYYWGWIRQPPGKGLEWIGHIYYSGATYYNPSLKSRVTISVDTSRNQFSLKLSSVTAADTAVYYCTRDDSSNWRSRGQGTLVTVSSSGGGGSGGGGSEVQLVESGGGLVQPGGSLRLSCAASGFASDYYIIGWFRQAPGKEREGVSCISSRYANTNYADSVKGRFTISRDNAKNTVYLQMNSLKPEDTAVYYCAADTRRYTCPDIATMHRNFDSWGQGTLVTVSSTRDKTHTCPPCPAEVKTDSTDHVKPKETENTKQPSKSCHKPKAIVHTEKVNMMSLTVLGLRMLFAKTVAVNFLLTAKLFFL

SEQ ID NO: 16904 - protein, 441 aa, Artificial Sequence
  Synthetic Polypeptide
MDWIWRILFLVGAATGAHSQLQLQESGPGLVKPSETLSLTCTVSGGSISSGDYYWGWIRQPPGKGLEWIGHIYYSGATYYNPSLKSRVTISVDTSRNQFSLKLSSVTAADTAVYYCTRDDSSNWRSRGQGTLVTVSSSGGGGSGGGGSEVQLVESGGGLVQPGGSLRLSCAASGFASDYYIIGWFRQAPGKEREGVSCISSRYANTNYADSVKGRFTISRDNAKNTVYLQMNSLKPEDTAVYYCAADTRRYTCPDIATMHRNFDSWGQGTLVTVSSTRASTKGPSVFPLAPSSKSTSGGTAALGCLVKDYFPEPVTVSWNSGALTSGVHTFPAVLQSSGLYSLSSVVTVPSSSLGTQTYICNVNHKPSNTKVDKRVEPKSCIPEDTFFPSPESSCDVKLVEKSFETDTNLNFQNLSVIGFRILLLKVAGFNLLMTLRLWSS

SEQ ID NO: 16905 - protein, 449 aa, Artificial Sequence
  Synthetic Polypeptide
MDWIWRILFLVGAATGAHSQLQLQESGPGLVKPSETLSLTCTVSGGSISSGDYYWGWIRQPPGKGLEWIGHIYYSGATYYNPSLKSRVTISVDTSRNQFSLKLSSVTAADTAVYYCTRDDSSNWRSRGQGTLVTVSSSGGGGSGGGGSEVQLVESGGGLVQPGGSLRLSCAASGFASDYYIIGWFRQAPGKEREGVSCISSRYANTNYADSVKGRFTISRDNAKNTVYLQMNSLKPEDTAVYYCAADTRRYTCPDIATMHRNFDSWGQGTLVTVSSTRASTKGPSVFPLAPSSKSTSGGTAALGCLVKDYFPEPVTVSWNSGALTSGVHTFPAVLQSSGLYSLSSVVTVPSSSLGTQTYICNVNHKPSNTKVDKRVEPKSCEVKTDSTDHVKPKETENTKQPSKSCHKPKAIVHTEKVNMMSLTVLGLRMLFAKTVAVNFLLTAKLFFL

SEQ ID NO: 16906 - protein, 633 aa, Artificial Sequence
  Synthetic Polypeptide
MALPVTALLLPLALLLHAARPEVQVLESGGGLVQPGGSLRLSCAASGFTFSNFAMSWVRQAPGKGLEWVSTISGSAGTTDYADSVKGRFTISRDNSKKTLYLQMNSLRVEDTAVYYCADGRGPFFDYRGQGTLVTVSSGTGGGGSGGGGSGGGGSEFDIQMTQSPSSLSASVGDRVTITCKASDHINNWLAWYQQKPGQAPKLLIYGATTLETGVPSRFSGSGSGTDYTLTISSLQPEDFATYYCQQSWNTPWTFGQGTKLEIKRGGGGSGGGGSGGGGSQVQLQQPGAELVKPGASVKMSCKASGYAFSSYWINWMKQKPGQGLEWIGQIYPGDGDTNYNGKFKGRATLTADTSSSTAYMQLSSLTSEDSAVYFCARSITTVVGCAMDYWGQGTSVTVSSTREQKLISEEDLKIEVMYPPPYLDNEKSNGTIIHVKGKHLCPSPLFPGPSKPFWVLVVVGGVLACYSLLVTVAFIIFWVRSKRSRLLHSDYMNMTPRRPGPTRKHYQPYAPPRDFAAYRSRVKFSRSADAPAYQQGQNQLYNELNLGRREEYDVLDKRRGRDPEMGGKPRRKNPQEGLYNELQKDKMAEAYSEIGMKGERRRGKGHDGLYQGLSTATKDTYDALHMQALPPR

SEQ ID NO: 16907 - protein, 639 aa, Artificial Sequence
  Synthetic Polypeptide
MALPVTALLLPLALLLHAARPEVQVLESGGGLVQPGGSLRLSCAASGFTFSNFAMSWVRQAPGKGLEWVSTISGSAGTTDYADSVKGRFTISRDNSKKTLYLQMNSLRVEDTAVYYCADGRGPFFDYRGQGTLVTVSSGTGGGGSGGGGSGGGGSEFDIQMTQSPSSLSASVGDRVTITCKASDHINNWLAWYQQKPGQAPKLLIYGATTLETGVPSRFSGSGSGTDYTLTISSLQPEDFATYYCQQSWNTPWTFGQGTKLEIKRGGGGSGGGGSGGGGSQVQLQQPGAELVKPGASVKMSCKASGYAFSSYWINWMKQKPGQGLEWIGQIYPGDGDTNYNGKFKGRATLTADTSSSTAYMQLSSLTSEDSAVYFCARSITTVVGCAMDYWGQGTSVTVSSTREQKLISEEDLAKPTTTPAPRPPTPAPTIASQPLSLRPEACRPAAGGAVHTRGLDFACDIYIWAPLAGTCGVLLLSLVITLYCKRGRKKLLYIFKQPFMRPVQTTQEEDGCSCRFPEEEEGGCELRVKFSRSADAPAYQQGQNQLYNELNLGRREEYDVLDKRRGRDPEMGGKPRRKNPQEGLYNELQKDKMAEAYSEIGMKGERRRGKGHDGLYQGLSTATKDTYDALHMQALPPR

SEQ ID NO: 16908 - protein, 1052 aa, Artificial Sequence
  Synthetic Polypeptide
MALPVTALLLPLALLLHAARPEVQVLESGGGLVQPGGSLRLSCAASGFTFSNFAMSWVRQAPGKGLEWVSTISGSAGTTDYADSVKGRFTISRDNSKKTLYLQMNSLRVEDTAVYYCADGRGPFFDYRGQGTLVTVSSGTGGGGSGGGGSGGGGSEFDIQMTQSPSSLSASVGDRVTITCKASDHINNWLAWYQQKPGQAPKLLIYGATTLETGVPSRFSGSGSGTDYTLTISSLQPEDFATYYCQQSWNTPWTFGQGTKLEIKRGGGGSGGGGSGGGGSQVQLQQPGAELVKPGASVKMSCKASGYAFSSYWINWMKQKPGQGLEWIGQIYPGDGDTNYNGKFKGRATLTADTSSSTAYMQLSSLTSEDSAVYFCARSITTVVGCAMDYWGQGTSVTVSSTREQKLISEEDLAKPTTTPAPRPPTPAPTIASQPLSLRPEACRPAAGGAVHTRGLDFACDIYIWAPLAGTCGVLLLSLVITLYCGRARVKFSRSADAPAYQQGQNQLYNELNLGRREEYDVLDKRRGRDPEMGGKPRRKNPQEGLYNELQKDKMAEAYSEIGMKGERRRGKGHDGLYQGLSTATKDTYDALHMQALPPRSRGSGATNFSLLKQAGDVEENPGPGIHMATYEVLCEVARKLGTDDREVVLFLLNVFIPQPTLAQLIGALRALKEEGRLTFPLLAECLFRAGRRDLLRDLLHLDPRFLERHLAGTMSYFSPYQLTVLHVDGELCARDIRSLIFLSKDTIGSRSTPQTFLHWVYCMENLDLLGPTDVDALMSMLRSLSRVDLQRQVQTLMGLHLSGPSHSQHYRHTPLETDFYDYKDDDDKTSGSGEGRGSLLTCGDVEENPGPHMTEYKPTVRLATRDDVPRAVRTLAAAFADYPATRHTVDPDRHIERVTELQELFLTRVGLDIGKVWVADDGAAVAVWTTPESVEAGAVFAEIGPRMAELSGSRLAAQQQMEGLLAPHRPKEPAWFLATVGVSPDHQGKGLGSAVVLPGVEAAERAGVPAFLETSAPRNLPFYERLGFTVTADVEVPEGPRTWCMTRKPGA

SEQ ID NO: 16909 - protein, 992 aa, Artificial Sequence
  Synthetic Polypeptide
MALPVTALLLPLALLLHAARPEVQVLESGGGLVQPGGSLRLSCAASGFTFSNFAMSWVRQAPGKGLEWVSTISGSAGTTDYADSVKGRFTISRDNSKKTLYLQMNSLRVEDTAVYYCADGRGPFFDYRGQGTLVTVSSGTGGGGSGGGGSGGGGSEFDIQMTQSPSSLSASVGDRVTITCKASDHINNWLAWYQQKPGQAPKLLIYGATTLETGVPSRFSGSGSGTDYTLTISSLQPEDFATYYCQQSWNTPWTFGQGTKLEIKRLEIQNPDPAVYQLRDSKSSDKSVCLFTDFDSQTNVSQSKDSDVYITDKCVLDMRSMDFKSNSAVAWSNKSDFACANAFNNSIIPEDTFFPSSDVPCDVKLVEKSFETDTNLNFQNLSVIGFRILLLKVAGFNLLMTLRLWSSRAKRSGSGVKQTLNFDLLKLAGDVESNPGPTSMDWIWRILFLVGAATGAHSFEQVQLQQPGAELVKPGASVKMSCKASGYAFSSYWINWMKQKPGQGLEWIGQIYPGDGDTNYNGKFKGRATLTADTSSSTAYMQLSSLTSEDSAVYFCARSITTVVGCAMDYWGQGTSVTVSSTREDLKNVFPPEVAVFEPSKAEIAHTQKATLVCLATGFYPDHVELSWWVNGKEVHSGVCTDPQPLKEQPALNDSRYCLSSRLRVSATFWQNPRNHFRCQVQFYGLSENDEWTQDRAKPVTQIVSAEAWGRADCGITSASYHQGVLSATILYEILLGKATLYAVLVSALVLMAMVKRKDSRGRAKRSGSGATNFSLLKQAGDVEENPGPSRGHMTEYKPTVRLATRDDVPRAVRTLAAAFADYPATRHTVDPDRHIERVTELQELFLTRVGLDIGKVWVADDGAAVAVWTTPESVEAGAVFAEIGPRMAELSGSRLAAQQQMEGLLAPHRPKEPAWFLATVGVSPDHQGKGLGSAVVLPGVEAAERAGVPAFLETSAPRNLPFYERLGFTVTADVEVPEGPRTWCMTRKPGA

SEQ ID NO: 16910 - protein, 991 aa, Artificial Sequence
  Synthetic Polypeptide
MALPVTALLLPLALLLHAARPEVQVLESGGGLVQPGGSLRLSCAASGFTFSNFAMSWVRQAPGKGLEWVSTISGSAGTTDYADSVKGRFTISRDNSKKTLYLQMNSLRVEDTAVYYCADGRGPFFDYRGQGTLVTVSSGTGGGGSGGGGSGGGGSEFDIQMTQSPSSLSASVGDRVTITCKASDHINNWLAWYQQKPGQAPKLLIYGATTLETGVPSRFSGSGSGTDYTLTISSLQPEDFATYYCQQSWNTPWTFGQGTKLEIKRLEDLKNVFPPEVAVFEPSKAEIAHTQKATLVCLATGFYPDHVELSWWVNGKEVHSGVCTDPQPLKEQPALNDSRYCLSSRLRVSATFWQNPRNHFRCQVQFYGLSENDEWTQDRAKPVTQIVSAEAWGRADCGITSASYHQGVLSATILYEILLGKATLYAVLVSALVLMAMVKRKDSRGRAKRSGSGATNFSLLKQAGDVEENPGPTSMDWIWRILFLVGAATGAHSFEQVQLQQPGAELVKPGASVKMSCKASGYAFSSYWINWMKQKPGQGLEWIGQIYPGDGDTNYNGKFKGRATLTADTSSSTAYMQLSSLTSEDSAVYFCARSITTVVGCAMDYWGQGTSVTVSSTRIQNPDPAVYQLRDSKSSDKSVCLFTDFDSQTNVSQSKDSDVYITDKCVLDMRSMDFKSNSAVAWSNKSDFACANAFNNSIIPEDTFFPSSDVPCDVKLVEKSFETDTNLNFQNLSVIGFRILLLKVAGFNLLMTLRLWSSRAKRSGSGVKQTLNFDLLKLAGDVESNPGPSRGHMTEYKPTVRLATRDDVPRAVRTLAAAFADYPATRHTVDPDRHIERVTELQELFLTRVGLDIGKVWVADDGAAVAVWTTPESVEAGAVFAEIGPRMAELSGSRLAAQQQMEGLLAPHRPKEPAWFLATVGVSPDHQGKGLGSAVVLPGVEAAERAGVPAFLETSAPRNLPFYERLGFTVTADVEVPEGPRTWCMTRKPGA

SEQ ID NO: 16911 - protein, 758 aa, Artificial Sequence
  Synthetic Polypeptide
MALPVTALLLPLALLLHAARPEVQVLESGGGLVQPGGSLRLSCAASGFTFSNFAMSWVRQAPGKGLEWVSTISGSAGTTDYADSVKGRFTISRDNSKKTLYLQMNSLRVEDTAVYYCADGRGPFFDYRGQGTLVTVSSGTGGGGSGGGGSGGGGSEFDIQMTQSPSSLSASVGDRVTITCKASDHINNWLAWYQQKPGQAPKLLIYGATTLETGVPSRFSGSGSGTDYTLTISSLQPEDFATYYCQQSWNTPWTFGQGTKLEIKRLEDLKNVFPPEVAVFEPSEAEISHTQKATLVCLATGFYPDHVELSWWVNGKEVHSGVCTDPQPLKEQPALNDSRYCLSSRLRVSATFWQNPRNHFRCQVQFYGLSENDEWTQDRAKPVTQIVSAEAWGRADCGFTSESYQQGVLSATILYEILLGKATLYAVLVSALVLMAMVKRKDSRGRAKRSGSGATNFSLLKQAGDVEENPGPTSMDWIWRILFLVGAATGAHSFEQVQLQQPGAELVKPGASVKMSCKASGYAFSSYWINWMKQKPGQGLEWIGQIYPGDGDTNYNGKFKGRATLTADTSSSTAYMQLSSLTSEDSAVYFCARSITTVVGCAMDYWGQGTSVTVSSTRIQNPDPAVYQLRDSKSSDKSVCLFTDFDSQTNVSQSKDSDVYITDKCVLDMRSMDFKSNSAVAWSNKSDFACANAFNNSIIPEDTFFPSPESSCDVKLVEKSFETDTNLNFQNLSVIGFRILLLKVAGFNLLMTLRLWSS

SEQ ID NO: 16912 - protein, 983 aa, Artificial Sequence
  Synthetic Polypeptide
MALPVTALLLPLALLLHAARPEVQVLESGGGLVQPGGSLRLSCAASGFTFSNFAMSWVRQAPGKGLEWVSTISGSAGTTDYADSVKGRFTISRDNSKKTLYLQMNSLRVEDTAVYYCADGRGPFFDYRGQGTLVTVSSGTGGGGSGGGGSGGGGSEFDIQMTQSPSSLSASVGDRVTITCKASDHINNWLAWYQQKPGQAPKLLIYGATTLETGVPSRFSGSGSGTDYTLTISSLQPEDFATYYCQQSWNTPWTFGQGTKLEIKRLEDLKNVFPPEVAVFEPSEAEISHTQKATLVCLATGFYPDHVELSWWVNGKEVHSGVCTDPQPLKEQPALNDSRYCLSSRLRVSATFWQNPRNHFRCQVQFYGLSENDEWTQDRAKPVTQIVSAEAWGRADCGFTSESYQQGVLSATILYEILLGKATLYAVLVSALVLMAMVKRKDSRGRAKRSGSGATNFSLLKQAGDVEENPGPTSMDWIWRILFLVGAATGAHSFEQVQLQQPGAELVKPGASVKMSCKASGYAFSSYWINWMKQKPGQGLEWIGQIYPGDGDTNYNGKFKGRATLTADTSSSTAYMQLSSLTSEDSAVYFCARSITTVVGCAMDYWGQGTSVTVSSTRIQNPDPAVYQLRDSKSSDKSVCLFTDFDSQTNVSQSKDSDVYITDKCVLDMRSMDFKSNSAVAWSNKSDFACANAFNNSIIPEDTFFPSPESSCDVKLVEKSFETDTNLNFQNLSVIGFRILLLKVAGFNLLMTLRLWSSRAKRSGSGVKQTLNFDLLKLAGDVESNPGPSRGGIHTMATYEVLCEVARKLGTDDREVVLFLLNVFIPQPTLAQLIGALRALKEEGRLTFPLLAECLFRAGRRDLLRDLLHLDPRFLERHLAGTMSYFSPYQLTVLHVDGELCARDIRSLIFLSKDTIGSRSTPQTFLHWVYCMENLDLLGPTDVDALMSMLRSLSRVDLQRQVQTLMGLHLSGPSHSQHYRHTP

SEQ ID NO: 16913 - protein, 762 aa, Artificial Sequence
  Synthetic Polypeptide
MALPVTALLLPLALLLHAARPEVQVLESGGGLVQPGGSLRLSCAASGFTFSNFAMSWVRQAPGKGLEWVSTISGSAGTTDYADSVKGRFTISRDNSKKTLYLQMNSLRVEDTAVYYCADGRGPFFDYRGQGTLVTVSSGTGGGGSGGGGSGGGGSEFDIQMTQSPSSLSASVGDRVTITCKASDHINNWLAWYQQKPGQAPKLLIYGATTLETGVPSRFSGSGSGTDYTLTISSLQPEDFATYYCQQSWNTPWTFGQGTKLEIKRLEIQNPDPAVYQLRDSKSSDKSVCLFTDFDSQTNVSQSKDSDVYITDKCVLDMRSMDFKSNSAVAWSNKSDFACANAFNNSIIPEDTFFPSPESSCDVKLVEKSFETDTNLNFQNLSVIGFRILLLKVAGFNLLMTLRLWSSRAKRSGSGVKQTLNFDLLKLAGDVESNPGPTSMDWIWRILFLVGAATGAHSFEQVQLQQPGAELVKPGASVKMSCKASGYAFSSYWINWMKQKPGQGLEWIGQIYPGDGDTNYNGKFKGRATLTADTSSSTAYMQLSSLTSEDSAVYFCARSITTVVGCAMDYWGQGTSVTVSSTREDLKNVFPPEVAVFEPSEAEISHTQKATLVCLATGFYPDHVELSWWVNGKEVHSGVCTDPQPLKEQPALNDSRYCLSSRLRVSATFWQNPRNHFRCQVQFYGLSENDEWTQDRAKPVTQIVSAEAWGRADCGFTSESYQQGVLSATILYEILLGKATLYAVLVSALVLMAMVKRKDSRG

SEQ ID NO: 16914 - protein, 984 aa, Artificial Sequence
  Synthetic Polypeptide
MALPVTALLLPLALLLHAARPEVQVLESGGGLVQPGGSLRLSCAASGFTFSNFAMSWVRQAPGKGLEWVSTISGSAGTTDYADSVKGRFTISRDNSKKTLYLQMNSLRVEDTAVYYCADGRGPFFDYRGQGTLVTVSSGTGGGGSGGGGSGGGGSEFDIQMTQSPSSLSASVGDRVTITCKASDHINNWLAWYQQKPGQAPKLLIYGATTLETGVPSRFSGSGSGTDYTLTISSLQPEDFATYYCQQSWNTPWTFGQGTKLEIKRLEIQNPDPAVYQLRDSKSSDKSVCLFTDFDSQTNVSQSKDSDVYITDKCVLDMRSMDFKSNSAVAWSNKSDFACANAFNNSIIPEDTFFPSPESSCDVKLVEKSFETDTNLNFQNLSVIGFRILLLKVAGFNLLMTLRLWSSRAKRSGSGVKQTLNFDLLKLAGDVESNPGPTSMDWIWRILFLVGAATGAHSFEQVQLQQPGAELVKPGASVKMSCKASGYAFSSYWINWMKQKPGQGLEWIGQIYPGDGDTNYNGKFKGRATLTADTSSSTAYMQLSSLTSEDSAVYFCARSITTVVGCAMDYWGQGTSVTVSSTREDLKNVFPPEVAVFEPSEAEISHTQKATLVCLATGFYPDHVELSWWVNGKEVHSGVCTDPQPLKEQPALNDSRYCLSSRLRVSATFWQNPRNHFRCQVQFYGLSENDEWTQDRAKPVTQIVSAEAWGRADCGFTSESYQQGVLSATILYEILLGKATLYAVLVSALVLMAMVKRKDSRGRAKRSGSGATNFSLLKQAGDVEENPGPSRGGIHTMATYEVLCEVARKLGTDDREVVLFLLNVFIPQPTLAQLIGALRALKEEGRLTFPLLAECLFRAGRRDLLRDLLHLDPRFLERHLAGTMSYFSPYQLTVLHVDGELCARDIRSLIFLSKDTIGSRSTPQTFLHWVYCMENLDLLGPTDVDALMSMLRSLSRVDLQRQVQTLMGLHLSGPSHSQHYRHTP

SEQ ID NO: 16915 - protein, 1036 aa, Artificial Sequence
  Synthetic Polypeptide
MALPVTALLLPLALLLHAARPLEGKPIPNPLLGLDSTGSGEDLKNVFPPEVAVFEPSKAEIAHTQKATLVCLATGFYPDHVELSWWVNGKEVHSGVCTDPQPLKEQPALNDSRYCLSSRLRVSATFWQNPRNHFRCQVQFYGLSENDEWTQDRAKPVTQIVSAEAWGRADCGITSASYHQGVLSATILYEILLGKATLYAVLVSALVLMAMVKRKDSRGRAKRSGSGATNFSLLKQAGDVEENPGPTSMALPVTALLLPLALLLHAARPEVQVLESGGGLVQPGGSLRLSCAASGFTFSNFAMSWVRQAPGKGLEWVSTISGSAGTTDYADSVKGRFTISRDNSKKTLYLQMNSLRVEDTAVYYCADGRGPFFDYRGQGTLVTVSSGTGGGGSGGGGSGGGGSEFDIQMTQSPSSLSASVGDRVTITCKASDHINNWLAWYQQKPGQAPKLLIYGATTLETGVPSRFSGSGSGTDYTLTISSLQPEDFATYYCQQSWNTPWTFGQGTKLEIKRGGGGSGGGGSGGGGSQVQLQQPGAELVKPGASVKMSCKASGYAFSSYWINWMKQKPGQGLEWIGQIYPGDGDTNYNGKFKGRATLTADTSSSTAYMQLSSLTSEDSAVYFCARSITTVVGCAMDYWGQGTSVTVSSTREQKLISEEDGSGIQNPDPAVYQLRDSKSSDKSVCLFTDFDSQTNVSQSKDSDVYITDKCVLDMRSMDFKSNSAVAWSNKSDFACANAFNNSIIPEDTFFPSSDVPCDVKLVEKSFETDTNLNFQNLSVIGFRILLLKVAGFNLLMTLRLWSSRAKRSGSGVKQTLNFDLLKLAGDVESNPGPSRGHMTEYKPTVRLATRDDVPRAVRTLAAAFADYPATRHTVDPDRHIERVTELQELFLTRVGLDIGKVWVADDGAAVAVWTTPESVEAGAVFAEIGPRMAELSGSRLAAQQQMEGLLAPHRPKEPAWFLATVGVSPDHQGKGLGSAVVLPGVEAAERAGVPAFLETSAPRNLPFYERLGFTVTADVEVPEGPRTWCMTRKPGA

SEQ ID NO: 16916 - protein, 1037 aa, Artificial Sequence
  Synthetic Polypeptide
MALPVTALLLPLALLLHAARPLEQKLISEEDLGSGDRPDPAVYQLRDSKSSDKSVCLFTDFDSQTNVSQSKDSDVYITDKCVLDMRSMDFKSNSAVAWSNKSDFACANAFNNSIIPEDTFFPSPESSCDVKLVEKSFETDTNLNFQNLSVIGFRILLLKVAGFNLLMTLRLWSSSSRAKRSGSGVKQTLNFDLLKLAGDVESNPGPTSMALPVTALLLPLALLLHAARPEVQVLESGGGLVQPGGSLRLSCAASGFTFSNFAMSWVRQAPGKGLEWVSTISGSAGTTDYADSVKGRFTISRDNSKKTLYLQMNSLRVEDTAVYYCADGRGPFFDYRGQGTLVTVSSGTGGGGSGGGGSGGGGSEFDIQMTQSPSSLSASVGDRVTITCKASDHINNWLAWYQQKPGQAPKLLIYGATTLETGVPSRFSGSGSGTDYTLTISSLQPEDFATYYCQQSWNTPWTFGQGTKLEIKRGGGGSGGGGSGGGGSQVQLQQPGAELVKPGASVKMSCKASGYAFSSYWINWMKQKPGQGLEWIGQIYPGDGDTNYNGKFKGRATLTADTSSSTAYMQLSSLTSEDSAVYFCARSITTVVGCAMDYWGQGTSVTVSSTRGKPIPNPLLGLDSTGSGEDLKNVFPPEVAVFEPSEAEISHTQKATLVCLATGFYPDHVELSWWVNGKEVHSGVCTDPQPLKEQPALNDSRYCLSSRLRVSATFWQNPRNHFRCQVQFYGLSENDEWTQDRAKPVTQIVSAEAWGRADCGFTSESYQQGVLSATILYEILLGKATLYAVLVSALVLMAMVKRKDSRGRAKRSGSGATNFSLLKQAGDVEENPGPSRGHMTEYKPTVRLATRDDVPRAVRTLAAAFADYPATRHTVDPDRHIERVTELQELFLTRVGLDIGKVWVADDGAAVAVWTTPESVEAGAVFAEIGPRMAELSGSRLAAQQQMEGLLAPHRPKEPAWFLATVGVSPDHQGKGLGSAVVLPGVEAAERAGVPAFLETSAPRNLPFYERLGFTVTADVEVPEGPRTWCMTRKPGA

SEQ ID NO: 16917 - protein, 991 aa, Artificial Sequence
  Synthetic Polypeptide
MALPVTALLLPLALLLHAARPEVQVLESGGGLVQPGGSLRLSCAASGFTFSNFAMSWVRQAPGKGLEWVSTISGSAGTTDYADSVKGRFTISRDNSKKTLYLQMNSLRVEDTAVYYCADGRGPFFDYRGQGTLVTVSSGTGGGGSGGGGSGGGGSEFDIQMTQSPSSLSASVGDRVTITCKASDHINNWLAWYQQKPGQAPKLLIYGATTLETGVPSRFSGSGSGTDYTLTISSLQPEDFATYYCQQSWNTPWTFGQGTKLEIKRLEDLKNVFPPEVAVFEPSEAEISHTQKATLVCLATGFYPDHVELSWWVNGKEVHSGVSTDPQPLKEQPALNDSRYCLSSRLRVSATFWQNPRNHFRCQVQFYGLSENDEWTQDRAKPVTQIVSAEAWGRADCGFTSESYQQGVLSATILYEILLGKATLYAVLVSALVLMAMVKRKDSRGRAKRSGSGATNFSLLKQAGDVEENPGPTSMDWIWRILFLVGAATGAHSFEQVQLQQPGAELVKPGASVKMSCKASGYAFSSYWINWMKQKPGQGLEWIGQIYPGDGDTNYNGKFKGRATLTADTSSSTAYMQLSSLTSEDSAVYFCARSITTVVGCAMDYWGQGTSVTVSSTRIQNPDPAVYQLRDSKSSDKSVCLFTDFDSQTNVSQSKDSDVYITDKTVLDMRSMDFKSNSAVAWSNKSDFACANAFNNSIIPEDTFFPSPESSCDVKLVEKSFETDTNLNFQNLSVIGFRILLLKVAGFNLLMTLRLWSSRAKRSGSGVKQTLNFDLLKLAGDVESNPGPSRGHMTEYKPTVRLATRDDVPRAVRTLAAAFADYPATRHTVDPDRHIERVTELQELFLTRVGLDIGKVWVADDGAAVAVWTTPESVEAGAVFAEIGPRMAELSGSRLAAQQQMEGLLAPHRPKEPAWFLATVGVSPDHQGKGLGSAVVLPGVEAAERAGVPAFLETSAPRNLPFYERLGFTVTADVEVPEGPRTWCMTRKPGA

SEQ ID NO: 16918 - protein, 1073 aa, Artificial Sequence
  Synthetic Polypeptide
MALPVTALLLPLALLLHAARPEVQVLESGGGLVQPGGSLRLSCAASGFTFSNFAMSWVRQAPGKGLEWVSTISGSAGTTDYADSVKGRFTISRDNSKKTLYLQMNSLRVEDTAVYYCADGRGPFFDYRGQGTLVTVSSGTGGGGSGGGGSGGGGSEFDIQMTQSPSSLSASVGDRVTITCKASDHINNWLAWYQQKPGQAPKLLIYGATTLETGVPSRFSGSGSGTDYTLTISSLQPEDFATYYCQQSWNTPWTFGQGTKLEIKRLEDLKNVFPPEVAVFEPSEAEISHTQKATLVCLATGFYPDHVELSWWVNGKEVHSGVSTDPQPLKEQPALNDSRYCLSSRLRVSATFWQNPRNHFRCQVQFYGLSENDEWTQDRAKPVTQIVSAEAWGRADCGFTSESYQQGVLSATILYEILLGKATLYAVLVSALVLMAMVKRKDSRGRAKRSGSGATNFSLLKQAGDVEENPGPTSMDWIWRILFLVGAATGAHSFEQVQLQQPGAELVKPGASVKMSCKASGYAFSSYWINWMKQKPGQGLEWIGQIYPGDGDTNYNGKFKGRATLTADTSSSTAYMQLSSLTSEDSAVYFCARSITTVVGCAMDYWGQGTSVTVSSTREQKLISEEDGSGTPFPSLAPPIMLLVDGKQQMVVVCLVLDVAPPGLDSPIWFSAGNGSALDAFTYGPSPATDGTWTNLAHLSLPSEELASWEPLVCHTGPGAEGHSRSTQPMHLSGEASTARTCPQEPLRGTPGGALWLGVLRLLLFKLLLFDLLLTCSCLCDPAGPLPSPATTTRLRALGSHRLHPATETGGREATSSPRPQPRDRRWGDTPPGRKPGSPVRAKRSGSGVKQTLNFDLLKLAGDVESNPGPSRGHMTEYKPTVRLATRDDVPRAVRTLAAAFADYPATRHTVDPDRHIERVTELQELFLTRVGLDIGKVWVADDGAAVAVWTTPESVEAGAVFAEIGPRMAELSGSRLAAQQQMEGLLAPHRPKEPAWFLATVGVSPDHQGKGLGSAVVLPGVEAAERAGVPAFLETSAPRNLPFYERLGFTVTADVEVPEGPRTWCMTRKPGA

SEQ ID NO: 16919 - protein, 1091 aa, Artificial Sequence
  Synthetic Polypeptide
MALPVTALLLPLALLLHAARPLEDLKNVFPPEVAVFEPSEAEISHTQKATLVCLATGFYPDHVELSWWVNGKEVHSGVSTDPQPLKEQPALNDSRYCLSSRLRVSATFWQNPRNHFRCQVQFYGLSENDEWTQDRAKPVTQIVSAEAWGRADCGFTSESYQQGVLSATILYEILLGKATLYAVLVSALVLMAMVKRKDSRGRAKRSGSGATNFSLLKQAGDVEENPGPTSMALPVTALLLPLALLLHAARPEVQVLESGGGLVQPGGSLRLSCAASGFTFSNFAMSWVRQAPGKGLEWVSTISGSAGTTDYADSVKGRFTISRDNSKKTLYLQMNSLRVEDTAVYYCADGRGPFFDYRGQGTLVTVSSGTGGGGSGGGGSGGGGSEFDIQMTQSPSSLSASVGDRVTITCKASDHINNWLAWYQQKPGQAPKLLIYGATTLETGVPSRFSGSGSGTDYTLTISSLQPEDFATYYCQQSWNTPWTFGQGTKLEIKRGGGGSGGGGSGGGGSQVQLQQPGAELVKPGASVKMSCKASGYAFSSYWINWMKQKPGQGLEWIGQIYPGDGDTNYNGKFKGRATLTADTSSSTAYMQLSSLTSEDSAVYFCARSITTVVGCAMDYWGQGTSVTVSSTREQKLISEEDLGSGTPFPSLAPPIMLLVDGKQQMVVVCLVLDVAPPGLDSPIWFSAGNGSALDAFTYGPSPATDGTWTNLAHLSLPSEELASWEPLVCHTGPGAEGHSRSTQPMHLSGEASTARTCPQEPLRGTPGGALWLGVLRLLLFKLLLFDLLLTCSCLCDPAGPLPSPATTTRLRALGSHRLHPATETGGREATSSPRPQPRDRRWGDTPPGRKPGSPVRAKRSGSGVKQTLNFDLLKLAGDVESNPGPSRSRGHMTEYKPTVRLATRDDVPRAVRTLAAAFADYPATRHTVDPDRHIERVTELQELFLTRVGLDIGKVWVADDGAAVAVWTTPESVEAGAVFAEIGPRMAELSGSRLAAQQQMEGLLAPHRPKEPAWFLATVGVSPDHQGKGLGSAVVLPGVEAAERAGVPAFLETSAPRNLPFYERLGFTVTADVEVPEGPRTWCMTRKPGA

SEQ ID NO: 16920 - protein, 1028 aa, Artificial Sequence
  Synthetic Polypeptide
MALPVTALLLPLALLLHAARPEVQVLESGGGLVQPGGSLRLSCAASGFTFSNFAMSWVRQAPGKGLEWVSTISGSAGTTDYADSVKGRFTISRDNSKKTLYLQMNSLRVEDTAVYYCADGRGPFFDYRGQGTLVTVSSGTGGGGSGGGGSGGGGSEFDIQMTQSPSSLSASVGDRVTITCKASDHINNWLAWYQQKPGQAPKLLIYGATTLETGVPSRFSGSGSGTDYTLTISSLQPEDFATYYCQQSWNTPWTFGQGTKLEIKRLEGKPIPNPLLGLDSTGSGDKQLDADVSPKPTIFLPSIAETKLQKAGTYLCLLEKFFPDVIKIHWQEKKSNTILGSQEGNTMKTNDTYMKFSWLTVPEKSLDKEHRCIVRHENNKNGVDQEIIFPPIKTDVITMDPKDNCSKDANDTLLLQLTNTSAYYMYLLLLLKSVVYFAIITCCLLRRTAFCCNGEKSRAKRSGSGATNFSLLKQAGDVEENPGPTSMDWIWRILFLVGAATGAHSFEQVQLQQPGAELVKPGASVKMSCKASGYAFSSYWINWMKQKPGQGLEWIGQIYPGDGDTNYNGKFKGRATLTADTSSSTAYMQLSSLTSEDSAVYFCARSITTVVGCAMDYWGQGTSVTVSSTREQKLISEEDGSGSQPHTKPSVFVMKNGTNVACLVKEFYPKDIRINLVSSKKITEFDPAIVISPSGKYNAVKLGKYEDSNSVTCSVQHDNKTVHSTDFEVKTDSTDHVKPKETENTKQPSKSCHKPKAIVHTEKVNMMSLTVLGLRMLFAKTVAVNFLLTAKLFFLRAKRSGSGVKQTLNFDLLKLAGDVESNPGPSRGHMTEYKPTVRLATRDDVPRAVRTLAAAFADYPATRHTVDPDRHIERVTELQELFLTRVGLDIGKVWVADDGAAVAVWTTPESVEAGAVFAEIGPRMAELSGSRLAAQQQMEGLLAPHRPKEPAWFLATVGVSPDHQGKGLGSAVVLPGVEAAERAGVPAFLETSAPRNLPFYERLGFTVTADVEVPEGPRTWCMTRKPGA

SEQ ID NO: 16921 - protein, 766 aa, Artificial Sequence
  Synthetic Polypeptide
MALPVTALLLPLALLLHAARPEVQVLESGGGLVQPGGSLRLSCAASGFTFSNFAMSWVRQAPGKGLEWVSTISGSAGTTDYADSVKGRFTISRDNSKKTLYLQMNSLRVEDTAVYYCADGRGPFFDYRGQGTLVTVSSGTGGGGSGGGGSGGGGSEFDIQMTQSPSSLSASVGDRVTITCKASDHINNWLAWYQQKPGQAPKLLIYGATTLETGVPSRFSGSGSGTDYTLTISSLQPEDFATYYCQQSWNTPWTFGQGTKLEIKRLESQPHTKPSVFVMKNGTNVACLVKEFYPKDIRINLVSSKKITEFDPAIVISPSGKYNAVKLGKYEDSNSVTCSVQHDNKTVHSTDFEVKTDSTDHVKPKETENTKQPSKSCHKPKAIVHTEKVNMMSLTVLGLRMLFAKTVAVNFLLTAKLFFLRAKRSGSGATNFSLLKQAGDVEENPGPTSMDWIWRILFLVGAATGAHSFEQVQLQQPGAELVKPGASVKMSCKASGYAFSSYWINWMKQKPGQGLEWIGQIYPGDGDTNYNGKFKGRATLTADTSSSTAYMQLSSLTSEDSAVYFCARSITTVVGCAMDYWGQGTSVTVSSTRDKQLDADVSPKPTIFLPSIAETKLQKAGTYLCLLEKFFPDVIKIHWQEKKSNTILGSQEGNTMKTNDTYMKFSWLTVPEKSLDKEHRCIVRHENNKNGVDQEIIFPPIKTDVITMDPKDNCSKDANDTLLLQLTNTSAYYMYLLLLLKSVVYFAIITCCLLRRTAFCCNGEKS

SEQ ID NO: 16922 - protein, 1043 aa, Artificial Sequence
  Synthetic Polypeptide
MALPVTALLLPLALLLHAARPLEGKPIPNPLLGLDSTGSGDKQLDADVSPKPTIFLPSIAETKLQKAGTYLCLLEKFFPDVIKIHWQEKKSNTILGSQEGNTMKTNDTYMKFSWLTVPEKSLDKEHRCIVRHENNKNGVDQEIIFPPIKTDVITMDPKDNCSKDANDTLLLQLTNTSAYYMYLLLLLKSVVYFAIITCCLLRRTAFCCNGEKSRAKRSGSGATNFSLLKQAGDVEENPGPTSMALPVTALLLPLALLLHAARPEVQVLESGGGLVQPGGSLRLSCAASGFTFSNFAMSWVRQAPGKGLEWVSTISGSAGTTDYADSVKGRFTISRDNSKKTLYLQMNSLRVEDTAVYYCADGRGPFFDYRGQGTLVTVSSGTGGGGSGGGGSGGGGSEFDIQMTQSPSSLSASVGDRVTITCKASDHINNWLAWYQQKPGQAPKLLIYGATTLETGVPSRFSGSGSGTDYTLTISSLQPEDFATYYCQQSWNTPWTFGQGTKLEIKRGGGGSGGGGSGGGGSQVQLQQPGAELVKPGASVKMSCKASGYAFSSYWINWMKQKPGQGLEWIGQIYPGDGDTNYNGKFKGRATLTADTSSSTAYMQLSSLTSEDSAVYFCARSITTVVGCAMDYWGQGTSVTVSSTREQKLISEEDGSGSQPHTKPSVFVMKNGTNVACLVKEFYPKDIRINLVSSKKITEFDPAIVISPSGKYNAVKLGKYEDSNSVTCSVQHDNKTVHSTDFEVKTDSTDHVKPKETENTKQPSKSCHKPKAIVHTEKVNMMSLTVLGLRMLFAKTVAVNFLLTAKLFFLRAKRSGSGVKQTLNFDLLKLAGDVESNPGPSRGHMTEYKPTVRLATRDDVPRAVRTLAAAFADYPATRHTVDPDRHIERVTELQELFLTRVGLDIGKVWVADDGAAVAVWTTPESVEAGAVFAEIGPRMAELSGSRLAAQQQMEGLLAPHRPKEPAWFLATVGVSPDHQGKGLGSAVVLPGVEAAERAGVPAFLETSAPRNLPFYERLGFTVTADVEVPEGPRTWCMTRKPGA

SEQ ID NO: 16923 - protein, 1168 aa, Artificial Sequence
  Synthetic Polypeptide
MALPVTALLLPLALLLHAARPEVQVLESGGGLVQPGGSLRLSCAASGFTFSNFAMSWVRQAPGKGLEWVSTISGSAGTTDYADSVKGRFTISRDNSKKTLYLQMNSLRVEDTAVYYCADGRGPFFDYRGQGTLVTVSSGTGGGGSGGGGSGGGGSEFDIQMTQSPSSLSASVGDRVTITCKASDHINNWLAWYQQKPGQAPKLLIYGATTLETGVPSRFSGSGSGTDYTLTISSLQPEDFATYYCQQSWNTPWTFGQGTKLEIKRGQPKANPTVTLFPPSSEELQANKATLVCLISDFYPGAVTVAWKADGSPVKAGVETTKPSKQSNNKYAASSYLSLTPEQWKSHRSYSCQVTHEGSTVEKTVAPTECSGSQSFGLLDPKLCYLLDGILFIYGVILTALFLRVKFSRSADAPAYQQGQNQLYNELNLGRREEYDVLDKRRGRDPEMGGKPQRRKNPQEGLYNELQKDKMAEAYSEIGMKGERRRGKGHDGLYQGLSTATKDTYDALHMQALPPRRAKRSGSGATNFSLLKQAGDVEENPGPTSMDWIWRILFLVGAATGAHSFEQVQLQQPGAELVKPGASVKMSCKASGYAFSSYWINWMKQKPGQGLEWIGQIYPGDGDTNYNGKFKGRATLTADTSSSTAYMQLSSLTSEDSAVYFCARSITTVVGCAMDYWGQGTSVTVSSASTKGPSVFPLAPSSKSTSGGTAALGCLVKDYFPEPVTVSWNSGALTSGVHTFPAVLQSSGLYSLSSVVTVPSSSLGTQTYICNVNHKPSNTKVDKRVEPKSCGTQSFGLLDPKLCYLLDGILFIYGVILTALFLRVKFSRSADAPAYQQGQNQLYNELNLGRREEYDVLDKRRGRDPEMGGKPQRRKNPQEGLYNELQKDKMAEAYSEIGMKGERRRGKGHDGLYQGLSTATKDTYDALHMQALPPRRAKRSGSGVKQTLNFDLLKLAGDVESNPGPSRGHMTEYKPTVRLATRDDVPRAVRTLAAAFADYPATRHTVDPDRHIERVTELQELFLTRVGLDIGKVWVADDGAAVAVWTTPESVEAGAVFAEIGPRMAELSGSRLAAQQQMEGLLAPHRPKEPAWFLATVGVSPDHQGKGLGSAVVLPGVEAAERAGVPAFLETSAPRNLPFYERLGFTVTADVEVPEGPRTWCMTRKPGA

SEQ ID NO: 16924 - protein, 954 aa, Artificial Sequence
  Synthetic Polypeptide
MALPVTALLLPLALLLHAARPEVQVLESGGGLVQPGGSLRLSCAASGFTFSNFAMSWVRQAPGKGLEWVSTISGSAGTTDYADSVKGRFTISRDNSKKTLYLQMNSLRVEDTAVYYCADGRGPFFDYRGQGTLVTVSSGTGGGGSGGGGSGGGGSEFDIQMTQSPSSLSASVGDRVTITCKASDHINNWLAWYQQKPGQAPKLLIYGATTLETGVPSRFSGSGSGTDYTLTISSLQPEDFATYYCQQSWNTPWTFGQGTKLEIKRLEDLKNVFPPEVAVFEPSEAEISHTQKATLVCLATGFYPDHVELSWWVNGKEVHSGVSTDPQPLKEQPALNDSRYCLSSRLRVSATFWQNPRNHFRCQVQFYGLSENDEWTQDRAKPVTQIVSAEAWGRADCGSQSFGLLDPKLCYLLDGILFIYGVILTALFLRVKFSRSADAPAYQQGQNQLYNELNLGRREEYDVLDKRRGRDPEMGGKPQRRKNPQEGLYNELQKDKMAEAYSEIGMKGERRRGKGHDGLYQGLSTATKDTYDALHMQALPPRRAKRSGSGATNFSLLKQAGDVEENPGPTSMDWIWRILFLVGAATGAHSFEQVQLQQPGAELVKPGASVKMSCKASGYAFSSYWINWMKQKPGQGLEWIGQIYPGDGDTNYNGKFKGRATLTADTSSSTAYMQLSSLTSEDSAVYFCARSITTVVGCAMDYWGQGTSVTVSSTRIQNPDPAVYQLRDSKSSDKSVCLFTDFDSQTNVSQSKDSDVYITDKTVLDMRSMDFKSNSAVAWSNKSDFACANAFNNSIIPEDTFFPSPESSCGTQSFGLLDPKLCYLLDGILFIYGVILTALFLRVKFSRSADAPAYQQGQNQLYNELNLGRREEYDVLDKRRGRDPEMGGKPQRRKNPQEGLYNELQKDKMAEAYSEIGMKGERRRGKGHDGLYQGLSTATKDTYDALHMQALPPR

SEQ ID NO: 16925 - protein, 954 aa, Artificial Sequence
  Synthetic Polypeptide
MALPVTALLLPLALLLHAARPEVQVLESGGGLVQPGGSLRLSCAASGFTFSNFAMSWVRQAPGKGLEWVSTISGSAGTTDYADSVKGRFTISRDNSKKTLYLQMNSLRVEDTAVYYCADGRGPFFDYRGQGTLVTVSSGTGGGGSGGGGSGGGGSEFDIQMTQSPSSLSASVGDRVTITCKASDHINNWLAWYQQKPGQAPKLLIYGATTLETGVPSRFSGSGSGTDYTLTISSLQPEDFATYYCQQSWNTPWTFGQGTKLEIKRLEDLKNVFPPEVAVFEPSKAEIAHTQKATLVCLATGFYPDHVELSWWVNGKEVHSGVCTDPQPLKEQPALNDSRYCLSSRLRVSATFWQNPRNHFRCQVQFYGLSENDEWTQDRAKPVTQIVSAEAWGRADCGSQSFGLLDPKLCYLLDGILFIYGVILTALFLRVKFSRSADAPAYQQGQNQLYNELNLGRREEYDVLDKRRGRDPEMGGKPQRRKNPQEGLYNELQKDKMAEAYSEIGMKGERRRGKGHDGLYQGLSTATKDTYDALHMQALPPRRAKRSGSGATNFSLLKQAGDVEENPGPTSMDWIWRILFLVGAATGAHSFEQVQLQQPGAELVKPGASVKMSCKASGYAFSSYWINWMKQKPGQGLEWIGQIYPGDGDTNYNGKFKGRATLTADTSSSTAYMQLSSLTSEDSAVYFCARSITTVVGCAMDYWGQGTSVTVSSTRIQNPDPAVYQLRDSKSSDKSVCLFTDFDSQTNVSQSKDSDVYITDKCVLDMRSMDFKSNSAVAWSNKSDFACANAFNNSIIPEDTFFPSSDVPCGTQSFGLLDPKLCYLLDGILFIYGVILTALFLRVKFSRSADAPAYQQGQNQLYNELNLGRREEYDVLDKRRGRDPEMGGKPQRRKNPQEGLYNELQKDKMAEAYSEIGMKGERRRGKGHDGLYQGLSTATKDTYDALHMQALPPR

SEQ ID NO: 16926 - protein, 1025 aa, Artificial Sequence
  Synthetic Polypeptide
MALPVTALLLPLALLLHAARPEVQVLESGGGLVQPGGSLRLSCAASGFTFSNFAMSWVRQAPGKGLEWVSTISGSAGTTDYADSVKGRFTISRDNSKKTLYLQMNSLRVEDTAVYYCADGRGPFFDYRGQGTLVTVSSGTGGGGSGGGGSGGGGSEFDIQMTQSPSSLSASVGDRVTITCKASDHINNWLAWYQQKPGQAPKLLIYGATTLETGVPSRFSGSGSGTDYTLTISSLQPEDFATYYCQQSWNTPWTFGQGTKLEIKRLEGKPIPNPLLGLDSTGSGEDLKNVFPPEVAVFEPSEAEISHTQKATLVCLATGFYPDHVELSWWVNGKEVHSGVSTDPQPLKEQPALNDSRYCLSSRLRVSATFWQNPRNHFRCQVQFYGLSENDEWTQDRAKPVTQIVSAEAWGRADCGSQSFGLLDPKLCYLLDGILFIYGVILTALFLRVKFSRSADAPAYQQGQNQLYNELNLGRREEYDVLDKRRGRDPEMGGKPQRRKNPQEGLYNELQKDKMAEAYSEIGMKGERRRGKGHDGLYQGLSTATKDTYDALHMQALPPRRAKRSGSGATNFSLLKQAGDVEENPGPTSMDWIWRILFLVGAATGAHSFEQVQLQQPGAELVKPGASVKMSCKASGYAFSSYWINWMKQKPGQGLEWIGQIYPGDGDTNYNGKFKGRATLTADTSSSTAYMQLSSLTSEDSAVYFCARSITTVVGCAMDYWGQGTSVTVSSTREQKLISEEDGSGIQNPDPAVYQLRDSKSSDKSVCLFTDFDSQTNVSQSKDSDVYITDKTVLDMRSMDFKSNSAVAWSNKSDFACANAFNNSIIPEDTFFPSPESSCGTQSFGLLDPKLCYLLDGILFIYGVILTALFLRSKRSRLLHSDYMNMTPRRPGPTRKHYQPYAPPRDFAAYRSRVKFSRSADAPAYQQGQNQLYNELNLGRREEYDVLDKRRGRDPEMGGKPQRRKNPQEGLYNELQKDKMAEAYSEIGMKGERRRGKGHDGLYQGLSTATKDTYDALHMQALPPR

SEQ ID NO: 16927 - protein, 1066 aa, Artificial Sequence
  Synthetic Polypeptide
MALPVTALLLPLALLLHAARPEVQVLESGGGLVQPGGSLRLSCAASGFTFSNFAMSWVRQAPGKGLEWVSTISGSAGTTDYADSVKGRFTISRDNSKKTLYLQMNSLRVEDTAVYYCADGRGPFFDYRGQGTLVTVSSGTGGGGSGGGGSGGGGSEFDIQMTQSPSSLSASVGDRVTITCKASDHINNWLAWYQQKPGQAPKLLIYGATTLETGVPSRFSGSGSGTDYTLTISSLQPEDFATYYCQQSWNTPWTFGQGTKLEIKRLEGKPIPNPLLGLDSTGSGEDLKNVFPPEVAVFEPSEAEISHTQKATLVCLATGFYPDHVELSWWVNGKEVHSGVSTDPQPLKEQPALNDSRYCLSSRLRVSATFWQNPRNHFRCQVQFYGLSENDEWTQDRAKPVTQIVSAEAWGRADCGSQSFGLLDPKLCYLLDGILFIYGVILTALFLRSKRSRLLHSDYMNMTPRRPGPTRKHYQPYAPPRDFAAYRSRVKFSRSADAPAYQQGQNQLYNELNLGRREEYDVLDKRRGRDPEMGGKPQRRKNPQEGLYNELQKDKMAEAYSEIGMKGERRRGKGHDGLYQGLSTATKDTYDALHMQALPPRRAKRSGSGATNFSLLKQAGDVEENPGPTSMDWIWRILFLVGAATGAHSFEQVQLQQPGAELVKPGASVKMSCKASGYAFSSYWINWMKQKPGQGLEWIGQIYPGDGDTNYNGKFKGRATLTADTSSSTAYMQLSSLTSEDSAVYFCARSITTVVGCAMDYWGQGTSVTVSSTREQKLISEEDGSGIQNPDPAVYQLRDSKSSDKSVCLFTDFDSQTNVSQSKDSDVYITDKTVLDMRSMDFKSNSAVAWSNKSDFACANAFNNSIIPEDTFFPSPESSCGTQSFGLLDPKLCYLLDGILFIYGVILTALFLRSKRSRLLHSDYMNMTPRRPGPTRKHYQPYAPPRDFAAYRSRVKFSRSADAPAYQQGQNQLYNELNLGRREEYDVLDKRRGRDPEMGGKPQRRKNPQEGLYNELQKDKMAEAYSEIGMKGERRRGKGHDGLYQGLSTATKDTYDALHMQALPPR

SEQ ID NO: 16928 - protein, 1027 aa, Artificial Sequence
  Synthetic Polypeptide
MALPVTALLLPLALLLHAARPEVQVLESGGGLVQPGGSLRLSCAASGFTFSNFAMSWVRQAPGKGLEWVSTISGSAGTTDYADSVKGRFTISRDNSKKTLYLQMNSLRVEDTAVYYCADGRGPFFDYRGQGTLVTVSSGTGGGGSGGGGSGGGGSEFDIQMTQSPSSLSASVGDRVTITCKASDHINNWLAWYQQKPGQAPKLLIYGATTLETGVPSRFSGSGSGTDYTLTISSLQPEDFATYYCQQSWNTPWTFGQGTKLEIKRLEGKPIPNPLLGLDSTGSGEDLKNVFPPEVAVFEPSEAEISHTQKATLVCLATGFYPDHVELSWWVNGKEVHSGVSTDPQPLKEQPALNDSRYCLSSRLRVSATFWQNPRNHFRCQVQFYGLSENDEWTQDRAKPVTQIVSAEAWGRADCGSQSFGLLDPKLCYLLDGILFIYGVILTALFLRVKFSRSADAPAYQQGQNQLYNELNLGRREEYDVLDKRRGRDPEMGGKPQRRKNPQEGLYNELQKDKMAEAYSEIGMKGERRRGKGHDGLYQGLSTATKDTYDALHMQALPPRRAKRSGSGATNFSLLKQAGDVEENPGPTSMDWIWRILFLVGAATGAHSFEQVQLQQPGAELVKPGASVKMSCKASGYAFSSYWINWMKQKPGQGLEWIGQIYPGDGDTNYNGKFKGRATLTADTSSSTAYMQLSSLTSEDSAVYFCARSITTVVGCAMDYWGQGTSVTVSSTREQKLISEEDLGSGIQNPDPAVYQLRDSKSSDKSVCLFTDFDSQTNVSQSKDSDVYITDKTVLDMRSMDFKSNSAVAWSNKSDFACANAFNNSIIPEDTFFPSPESSCGTQSFGLLDPKLCYLLDGILFIYGVILTALFLKRGRKKLLYIFKQPFMRPVQTTQEEDGCSCRFPEEEEGGCELRVKFSRSADAPAYQQGQNQLYNELNLGRREEYDVLDKRRGRDPEMGGKPQRRKNPQEGLYNELQKDKMAEAYSEIGMKGERRRGKGHDGLYQGLSTATKDTYDALHMQALPPR

SEQ ID NO: 16929 - protein, 1069 aa, Artificial Sequence
  Synthetic Polypeptide
MALPVTALLLPLALLLHAARPEVQVLESGGGLVQPGGSLRLSCAASGFTFSNFAMSWVRQAPGKGLEWVSTISGSAGTTDYADSVKGRFTISRDNSKKTLYLQMNSLRVEDTAVYYCADGRGPFFDYRGQGTLVTVSSGTGGGGSGGGGSGGGGSEFDIQMTQSPSSLSASVGDRVTITCKASDHINNWLAWYQQKPGQAPKLLIYGATTLETGVPSRFSGSGSGTDYTLTISSLQPEDFATYYCQQSWNTPWTFGQGTKLEIKRLEGKPIPNPLLGLDSTGSGEDLKNVFPPEVAVFEPSEAEISHTQKATLVCLATGFYPDHVELSWWVNGKEVHSGVSTDPQPLKEQPALNDSRYCLSSRLRVSATFWQNPRNHFRCQVQFYGLSENDEWTQDRAKPVTQIVSAEAWGRADCGSQSFGLLDPKLCYLLDGILFIYGVILTALFLKRGRKKLLYIFKQPFMRPVQTTQEEDGCSCRFPEEEEGGCELRVKFSRSADAPAYQQGQNQLYNELNLGRREEYDVLDKRRGRDPEMGGKPQRRKNPQEGLYNELQKDKMAEAYSEIGMKGERRRGKGHDGLYQGLSTATKDTYDALHMQALPPRRAKRSGSGATNFSLLKQAGDVEENPGPTSMDWIWRILFLVGAATGAHSFEQVQLQQPGAELVKPGASVKMSCKASGYAFSSYWINWMKQKPGQGLEWIGQIYPGDGDTNYNGKFKGRATLTADTSSSTAYMQLSSLTSEDSAVYFCARSITTVVGCAMDYWGQGTSVTVSSTREQKLISEEDLGSGIQNPDPAVYQLRDSKSSDKSVCLFTDFDSQTNVSQSKDSDVYITDKTVLDMRSMDFKSNSAVAWSNKSDFACANAFNNSIIPEDTFFPSPESSCGTQSFGLLDPKLCYLLDGILFIYGVILTALFLKRGRKKLLYIFKQPFMRPVQTTQEEDGCSCRFPEEEEGGCELRVKFSRSADAPAYQQGQNQLYNELNLGRREEYDVLDKRRGRDPEMGGKPQRRKNPQEGLYNELQKDKMAEAYSEIGMKGERRRGKGHDGLYQGLSTATKDTYDALHMQALPPR

SEQ ID NO: 16930 - protein, 959 aa, Artificial Sequence
  Synthetic Polypeptide
MALPVTALLLPLALLLHAARPEVQVLESGGGLVQPGGSLRLSCAASGFTFSNFAMSWVRQAPGKGLEWVSTISGSAGTTDYADSVKGRFTISRDNSKKTLYLQMNSLRVEDTAVYYCADGRGPFFDYRGQGTLVTVSSGTGGGGSGGGGSGGGGSEFDIQMTQSPSSLSASVGDRVTITCKASDHINNWLAWYQQKPGQAPKLLIYGATTLETGVPSRFSGSGSGTDYTLTISSLQPEDFATYYCQQSWNTPWTFGQGTKLEIKRLEQSFGLLDPKLCYLLDGILFIYGVILTALFLRVKFSRSADAPAYQQGQNQLYNELNLGRREEYDVLDKRRGRDPEMGGKPQRRKNPQEGLYNELQKDKMAEAYSEIGMKGERRRGKGHDGLYQGLSTATKDTYDALHMQALPPRRAKRSGSGATNFSLLKQAGDVEENPGPTSMDWIWRILFLVGAATGAHSFEQVQLQQPGAELVKPGASVKMSCKASGYAFSSYWINWMKQKPGQGLEWIGQIYPGDGDTNYNGKFKGRATLTADTSSSTAYMQLSSLTSEDSAVYFCARSITTVVGCAMDYWGQGTSVTVSSTRQSFGLLDPKLCYLLDGILFIYGVILTALFLRVKFSRSADAPAYQQGQNQLYNELNLGRREEYDVLDKRRGRDPEMGGKPQRRKNPQEGLYNELQKDKMAEAYSEIGMKGERRRGKGHDGLYQGLSTATKDTYDALHMQALPPRRAKRSGSGVKQTLNFDLLKLAGDVESNPGPSRGHMTEYKPTVRLATRDDVPRAVRTLAAAFADYPATRHTVDPDRHIERVTELQELFLTRVGLDIGKVWVADDGAAVAVWTTPESVEAGAVFAEIGPRMAELSGSRLAAQQQMEGLLAPHRPKEPAWFLATVGVSPDHQGKGLGSAVVLPGVEAAERAGVPAFLETSAPRNLPFYERLGFTVTADVEVPEGPRTWCMTRKPGA

SEQ ID NO: 16931 - protein, 784 aa, Artificial Sequence
  Synthetic Polypeptide
MALPVTALLLPLALLLHAARPEVQVLESGGGLVQPGGSLRLSCAASGFTFSNFAMSWVRQAPGKGLEWVSTISGSAGTTDYADSVKGRFTISRDNSKKTLYLQMNSLRVEDTAVYYCADGRGPFFDYRGQGTLVTVSSGTGGGGSGGGGSGGGGSEFDIQMTQSPSSLSASVGDRVTITCKASDHINNWLAWYQQKPGQAPKLLIYGATTLETGVPSRFSGSGSGTDYTLTISSLQPEDFATYYCQQSWNTPWTFGQGTKLEIKRLEGQPKANPTVTLFPPSSEELQANKATLVCLISDFYPGAVTVAWKADGSPVKAGVETTKPSKQSNNKYAASSYLSLTPEQWKSHRSYSCQVTHEGSTVEKTVAPTECSPIKTDVITMDPKDNCSKDANDTLLLQLTNTSAYYMYLLLLLKSVVYFAIITCCLLRRTAFCCNGEKSRAKRSGSGATNFSLLKQAGDVEENPGPTSMDWIWRILFLVGAATGAHSFEQVQLQQPGAELVKPGASVKMSCKASGYAFSSYWINWMKQKPGQGLEWIGQIYPGDGDTNYNGKFKGRATLTADTSSSTAYMQLSSLTSEDSAVYFCARSITTVVGCAMDYWGQGTSVTVSSTRASTKGPSVFPLAPSSKSTSGGTAALGCLVKDYFPEPVTVSWNSGALTSGVHTFPAVLQSSGLYSLSSVVTVPSSSLGTQTYICNVNHKPSNTKVDKRVEPKSCEVKTDSTDHVKPKETENTKQPSKSCHKPKAIVHTEKVNMMSLTVLGLRMLFAKTVAVNFLLTAKLFFL

SEQ ID NO: 16932 - protein, 762 aa, Artificial Sequence
  Synthetic Polypeptide
MALPVTALLLPLALLLHAARPEVQVLESGGGLVQPGGSLRLSCAASGFTFSNFAMSWVRQAPGKGLEWVSTISGSAGTTDYADSVKGRFTISRDNSKKTLYLQMNSLRVEDTAVYYCADGRGPFFDYRGQGTLVTVSSGTGGGGSGGGGSGGGGSEFDIQMTQSPSSLSASVGDRVTITCKASDHINNWLAWYQQKPGQAPKLLIYGATTLETGVPSRFSGSGSGTDYTLTISSLQPEDFATYYCQQSWNTPWTFGQGTKLEIKRLEGQPKANPTVTLFPPSSEELQANKATLVCLISDFYPGAVTVAWKADGSPVKAGVETTKPSKQSNNKYAASSYLSLTPEQWKSHRSYSCQVTHEGSTVEKTVAPTECSGRADCGITSASYHQGVLSATILYEILLGKATLYAVLVSALVLMAMVKRKDSRGRAKRSGSGATNFSLLKQAGDVEENPGPTSMDWIWRILFLVGAATGAHSFEQVQLQQPGAELVKPGASVKMSCKASGYAFSSYWINWMKQKPGQGLEWIGQIYPGDGDTNYNGKFKGRATLTADTSSSTAYMQLSSLTSEDSAVYFCARSITTVVGCAMDYWGQGTSVTVSSTRASTKGPSVFPLAPSSKSTSGGTAALGCLVKDYFPEPVTVSWNSGALTSGVHTFPAVLQSSGLYSLSSVVTVPSSSLGTQTYICNVNHKPSNTKVDKRVEPKSCIPEDTFFPSSDVPCDVKLVEKSFETDTNLNFQNLSVIGFRILLLKVAGFNLLMTLRLWSS

SEQ ID NO: 16933 - protein, 762 aa, Artificial Sequence
  Synthetic Polypeptide
MALPVTALLLPLALLLHAARPEVQVLESGGGLVQPGGSLRLSCAASGFTFSNFAMSWVRQAPGKGLEWVSTISGSAGTTDYADSVKGRFTISRDNSKKTLYLQMNSLRVEDTAVYYCADGRGPFFDYRGQGTLVTVSSGTGGGGSGGGGSGGGGSEFDIQMTQSPSSLSASVGDRVTITCKASDHINNWLAWYQQKPGQAPKLLIYGATTLETGVPSRFSGSGSGTDYTLTISSLQPEDFATYYCQQSWNTPWTFGQGTKLEIKRLEGQPKANPTVTLFPPSSEELQANKATLVCLISDFYPGAVTVAWKADGSPVKAGVETTKPSKQSNNKYAASSYLSLTPEQWKSHRSYSCQVTHEGSTVEKTVAPTECSGRADCGFTSESYQQGVLSATILYEILLGKATLYAVLVSALVLMAMVKRKDSRGRAKRSGSGATNFSLLKQAGDVEENPGPTSMDWIWRILFLVGAATGAHSFEQVQLQQPGAELVKPGASVKMSCKASGYAFSSYWINWMKQKPGQGLEWIGQIYPGDGDTNYNGKFKGRATLTADTSSSTAYMQLSSLTSEDSAVYFCARSITTVVGCAMDYWGQGTSVTVSSTRASTKGPSVFPLAPSSKSTSGGTAALGCLVKDYFPEPVTVSWNSGALTSGVHTFPAVLQSSGLYSLSSVVTVPSSSLGTQTYICNVNHKPSNTKVDKRVEPKSCIPEDTFFPSPESSCDVKLVEKSFETDTNLNFQNLSVIGFRILLLKVAGFNLLMTLRLWSS

SEQ ID NO: 16934 - protein, 588 aa, Artificial Sequence
  Synthetic Polypeptide
MALPVTALLLPLALLLHAARPEVQVLESGGGLVQPGGSLRLSCAASGFTFSNFAMSWVRQAPGKGLEWVSTISGSAGTTDYADSVKGRFTISRDNSKKTLYLQMNSLRVEDTAVYYCADGRGPFFDYRGQGTLVTVSSGTGGGGSGGGGSGGGGSEFDIQMTQSPSSLSASVGDRVTITCKASDHINNWLAWYQQKPGQAPKLLIYGATTLETGVPSRFSGSGSGTDYTLTISSLQPEDFATYYCQQSWNTPWTFGQGTKLEIKRGGGGSGGGGSGGGGSQVQLQQPGAELVKPGASVKMSCKASGYAFSSYWINWMKQKPGQGLEWIGQIYPGDGDTNYNGKFKGRATLTADTSSSTAYMQLSSLTSEDSAVYFCARSITTVVGCAMDYWGQGTSVTVSSTRDGNEEMGGITQTPYKVSISGTTVILTCPQYPGSEILWQHNDKNIGGDEDDKNIGSDEDHLSLKEFSELEQSGYYVCYPRGSKPEDANFYLYLRARVCENCMEMDVMSVATIVIVDICITGGLLLLVYYWSKNRKAKAKPVTRGAGAGGRQRGQNKERPPPVPNPDYEPIRKGQRDLYSGLNQRRI

SEQ ID NO: 16935 - protein, 553 aa, Artificial Sequence
  Synthetic Polypeptide
MALPVTALLLPLALLLHAARPEVQVLESGGGLVQPGGSLRLSCAASGFTFSNFAMSWVRQAPGKGLEWVSTISGSAGTTDYADSVKGRFTISRDNSKKTLYLQMNSLRVEDTAVYYCADGRGPFFDYRGQGTLVTVSSGTGGGGSGGGGSGGGGSEFDIQMTQSPSSLSASVGDRVTITCKASDHINNWLAWYQQKPGQAPKLLIYGATTLETGVPSRFSGSGSGTDYTLTISSLQPEDFATYYCQQSWNTPWTFGQGTKLEIKRGGGGSGGGGSGGGGSQVQLQQPGAELVKPGASVKMSCKASGYAFSSYWINWMKQKPGQGLEWIGQIYPGDGDTNYNGKFKGRATLTADTSSSTAYMQLSSLTSEDSAVYFCARSITTVVGCAMDYWGQGTSVTVSSTRFKIPIEELEDRVFVNCNTSITWVEGTVGTLLSDITRLDLGKRILDPRGIYRCNGTDIYKDKESTVQVHYRMCQSCVELDPATVAGIIVTDVIATLLLALGVFCFAGHETGRLSGAADTQALLRNDQVYQPLRDRDDAQYSHLGGNWARNK

SEQ ID NO: 16936 - protein, 563 aa, Artificial Sequence
  Synthetic Polypeptide
MALPVTALLLPLALLLHAARPEVQVLESGGGLVQPGGSLRLSCAASGFTFSNFAMSWVRQAPGKGLEWVSTISGSAGTTDYADSVKGRFTISRDNSKKTLYLQMNSLRVEDTAVYYCADGRGPFFDYRGQGTLVTVSSGTGGGGSGGGGSGGGGSEFDIQMTQSPSSLSASVGDRVTITCKASDHINNWLAWYQQKPGQAPKLLIYGATTLETGVPSRFSGSGSGTDYTLTISSLQPEDFATYYCQQSWNTPWTFGQGTKLEIKRGGGGSGGGGSGGGGSQVQLQQPGAELVKPGASVKMSCKASGYAFSSYWINWMKQKPGQGLEWIGQIYPGDGDTNYNGKFKGRATLTADTSSSTAYMQLSSLTSEDSAVYFCARSITTVVGCAMDYWGQGTSVTVSSTRQSIKGNHLVKVYDYQEDGSVLLTCDAEAKNITWFKDGKMIGFLTEDKKKWNLGSNAKDPRGMYQCKGSQNKSKPLQVYYRMCQNCIELNAATISGFLFAEIVSIFVLAVGVYFIAGQDGVRQSRASDKQTLLPNDQLYQPLKDREDDQYSHLQGNQLRRN

SEQ ID NO: 16937 - protein, 546 aa, Artificial Sequence
  Synthetic Polypeptide
MALPVTALLLPLALLLHAARPEVQVLESGGGLVQPGGSLRLSCAASGFTFSNFAMSWVRQAPGKGLEWVSTISGSAGTTDYADSVKGRFTISRDNSKKTLYLQMNSLRVEDTAVYYCADGRGPFFDYRGQGTLVTVSSGTGGGGSGGGGSGGGGSEFDIQMTQSPSSLSASVGDRVTITCKASDHINNWLAWYQQKPGQAPKLLIYGATTLETGVPSRFSGSGSGTDYTLTISSLQPEDFATYYCQQSWNTPWTFGQGTKLEIKRGGGGSGGGGSGGGGSQVQLQQPGAELVKPGASVKMSCKASGYAFSSYWINWMKQKPGQGLEWIGQIYPGDGDTNYNGKFKGRATLTADTSSSTAYMQLSSLTSEDSAVYFCARSITTVVGCAMDYWGQGTSVTVSSTRQSFGLLDPKLCYLLDGILFIYGVILTALFLRVKFSRSADAPAYQQGQNQLYNELNLGRREEYDVLDKRRGRDPEMGGKPQRRKNPQEGLYNELQKDKMAEAYSEIGMKGERRRGKGHDGLYQGLSTATKDTYDALHMQALPPR

SEQ ID NO: 16938 - protein, 779 aa, Artificial Sequence
  Synthetic Polypeptide
MALPVTALLLPLALLLHAARPEVQVLESGGGLVQPGGSLRLSCAASGFTFSNFAMSWVRQAPGKGLEWVSTISGSAGTTDYADSVKGRFTISRDNSKKTLYLQMNSLRVEDTAVYYCADGRGPFFDYRGQGTLVTVSSGTGGGGSGGGGSGGGGSEFDIQMTQSPSSLSASVGDRVTITCKASDHINNWLAWYQQKPGQAPKLLIYGATTLETGVPSRFSGSGSGTDYTLTISSLQPEDFATYYCQQSWNTPWTFGQGTKLEIKRGGGGSGGGGSGGGGSQVQLQQPGAELVKPGASVKMSCKASGYAFSSYWINWMKQKPGQGLEWIGQIYPGDGDTNYNGKFKGRATLTADTSSSTAYMQLSSLTSEDSAVYFCARSITTVVGCAMDYWGQGTSVTVSSTRGSGIQNPDPAVYQLRDSKSSDKSVCLFTDFDSQTNVSQSKDSDVYITDKTVLDMRSMDFKSNSAVAWSNKSDFACANAFNNSIIPEDTFFPSPESSCDVKLVEKSFETDTNLNFQNLSVIGFRILLLKVAGFNLLMTLRLWSSRAKRSGSGVKQTLNFDLLKLAGDVESNPGPSRGHMTEYKPTVRLATRDDVPRAVRTLAAAFADYPATRHTVDPDRHIERVTELQELFLTRVGLDIGKVWVADDGAAVAVWTTPESVEAGAVFAEIGPRMAELSGSRLAAQQQMEGLLAPHRPKEPAWFLATVGVSPDHQGKGLGSAVVLPGVEAAERAGVPAFLETSAPRNLPFYERLGFTVTADVEVPEGPRTWCMTRKPGA

SEQ ID NO: 16939 - protein, 811 aa, Artificial Sequence
  Synthetic Polypeptide
MALPVTALLLPLALLLHAARPEVQVLESGGGLVQPGGSLRLSCAASGFTFSNFAMSWVRQAPGKGLEWVSTISGSAGTTDYADSVKGRFTISRDNSKKTLYLQMNSLRVEDTAVYYCADGRGPFFDYRGQGTLVTVSSGTGGGGSGGGGSGGGGSEFDIQMTQSPSSLSASVGDRVTITCKASDHINNWLAWYQQKPGQAPKLLIYGATTLETGVPSRFSGSGSGTDYTLTISSLQPEDFATYYCQQSWNTPWTFGQGTKLEIKRGGGGSGGGGSGGGGSQVQLQQPGAELVKPGASVKMSCKASGYAFSSYWINWMKQKPGQGLEWIGQIYPGDGDTNYNGKFKGRATLTADTSSSTAYMQLSSLTSEDSAVYFCARSITTVVGCAMDYWGQGTSVTVSSLEDLKNVFPPEVAVFEPSEAEISHTQKATLVCLATGFYPDHVELSWWVNGKEVHSGVSTDPQPLKEQPALNDSRYCLSSRLRVSATFWQNPRNHFRCQVQFYGLSENDEWTQDRAKPVTQIVSAEAWGRADCGFTSESYQQGVLSATILYEILLGKATLYAVLVSALVLMAMVKRKDSRGRAKRSGSGATNFSLLKQAGDVEENPGPTRGHMTEYKPTVRLATRDDVPRAVRTLAAAFADYPATRHTVDPDRHIERVTELQELFLTRVGLDIGKVWVADDGAAVAVWTTPESVEAGAVFAEIGPRMAELSGSRLAAQQQMEGLLAPHRPKEPAWFLATVGVSPDHQGKGLGSAVVLPGVEAAERAGVPAFLETSAPRNLPFYERLGFTVTADVEVPEGPRTWCMTRKPGA

SEQ ID NO: 16940 - protein, 861 aa, Artificial Sequence
  Synthetic Polypeptide
MALPVTALLLPLALLLHAARPEVQVLESGGGLVQPGGSLRLSCAASGFTFSNFAMSWVRQAPGKGLEWVSTISGSAGTTDYADSVKGRFTISRDNSKKTLYLQMNSLRVEDTAVYYCADGRGPFFDYRGQGTLVTVSSGTGGGGSGGGGSGGGGSEFDIQMTQSPSSLSASVGDRVTITCKASDHINNWLAWYQQKPGQAPKLLIYGATTLETGVPSRFSGSGSGTDYTLTISSLQPEDFATYYCQQSWNTPWTFGQGTKLEIKRGGGGSGGGGSGGGGSQVQLQQPGAELVKPGASVKMSCKASGYAFSSYWINWMKQKPGQGLEWIGQIYPGDGDTNYNGKFKGRATLTADTSSSTAYMQLSSLTSEDSAVYFCARSITTVVGCAMDYWGQGTSVTVSSTREQKLISEEDLGSGTPFPSLAPPIMLLVDGKQQMVVVCLVLDVAPPGLDSPIWFSAGNGSALDAFTYGPSPATDGTWTNLAHLSLPSEELASWEPLVCHTGPGAEGHSRSTQPMHLSGEASTARTCPQEPLRGTPGGALWLGVLRLLLFKLLLFDLLLTCSCLCDPAGPLPSPATTTRLRALGSHRLHPATETGGREATSSPRPQPRDRRWGDTPPGRKPGSPVRAKRSGSGVKQTLNFDLLKLAGDVESNPGPSRSRGHMTEYKPTVRLATRDDVPRAVRTLAAAFADYPATRHTVDPDRHIERVTELQELFLTRVGLDIGKVWVADDGAAVAVWTTPESVEAGAVFAEIGPRMAELSGSRLAAQQQMEGLLAPHRPKEPAWFLATVGVSPDHQGKGLGSAVVLPGVEAAERAGVPAFLETSAPRNLPFYERLGFTVTADVEVPEGPRTWCMTRKPGA

SEQ ID NO: 16941 - protein, 675 aa, Artificial Sequence
  Synthetic Polypeptide
MALPVTALLLPLALLLHAARPEVQVLESGGGLVQPGGSLRLSCAASGFTFSNFAMSWVRQAPGKGLEWVSTISGSAGTTDYADSVKGRFTISRDNSKKTLYLQMNSLRVEDTAVYYCADGRGPFFDYRGQGTLVTVSSGTGGGGSGGGGSGGGGSEFDIQMTQSPSSLSASVGDRVTITCKASDHINNWLAWYQQKPGQAPKLLIYGATTLETGVPSRFSGSGSGTDYTLTISSLQPEDFATYYCQQSWNTPWTFGQGTKLEIKRLEDLKNVFPPEVAVFEPSEAEISHTQKATLVCLATGFYPDHVELSWWVNGKEVHSGVSTDPQPLKEQPALNDSRYCLSSRLRVSATFWQNPRNHFRCQVQFYGLSENDEWTQDRAKPVTQIVSAEAWGRADCGFTSESYQQGVLSATILYEILLGKATLYAVLVSALVLMAMVKRKDSRGRAKRSGSGATNFSLLKQAGDVEENPGPTRGHMTEYKPTVRLATRDDVPRAVRTLAAAFADYPATRHTVDPDRHIERVTELQELFLTRVGLDIGKVWVADDGAAVAVWTTPESVEAGAVFAEIGPRMAELSGSRLAAQQQMEGLLAPHRPKEPAWFLATVGVSPDHQGKGLGSAVVLPGVEAAERAGVPAFLETSAPRNLPFYERLGFTVTADVEVPEGPRTWCMTRKPGA

SEQ ID NO: 16942 - protein, 445 aa, Artificial Sequence
  Synthetic Polypeptide
MALPVTALLLPLALLLHAARPEVQVLESGGGLVQPGGSLRLSCAASGFTFSNFAMSWVRQAPGKGLEWVSTISGSAGTTDYADSVKGRFTISRDNSKKTLYLQMNSLRVEDTAVYYCADGRGPFFDYRGQGTLVTVSSGTGGGGSGGGGSGGGGSEFDIQMTQSPSSLSASVGDRVTITCKASDHINNWLAWYQQKPGQAPKLLIYGATTLETGVPSRFSGSGSGTDYTLTISSLQPEDFATYYCQQSWNTPWTFGQGTKLEIKRLEDLKNVFPPEVAVFEPSEAEISHTQKATLVCLATGFYPDHVELSWWVNGKEVHSGVSTDPQPLKEQPALNDSRYCLSSRLRVSATFWQNPRNHFRCQVQFYGLSENDEWTQDRAKPVTQIVSAEAWGRADCGFTSESYQQGVLSATILYEILLGKATLYAVLVSALVLMAMVKRKDSRG

SEQ ID NO: 16943 - protein, 693 aa, Artificial Sequence
  Synthetic Polypeptide
MALPVTALLLPLALLLHAARPEVQVLESGGGLVQPGGSLRLSCAASGFTFSNFAMSWVRQAPGKGLEWVSTISGSAGTTDYADSVKGRFTISRDNSKKTLYLQMNSLRVEDTAVYYCADGRGPFFDYRGQGTLVTVSSGTGGGGSGGGGSGGGGSEFDIQMTQSPSSLSASVGDRVTITCKASDHINNWLAWYQQKPGQAPKLLIYGATTLETGVPSRFSGSGSGTDYTLTISSLQPEDFATYYCQQSWNTPWTFGQGTKLEIKRLEGKPIPNPLLGLDSTGSGEDLKNVFPPEVAVFEPSEAEISHTQKATLVCLATGFYPDHVELSWWVNGKEVHSGVCTDPQPLKEQPALNDSRYCLSSRLRVSATFWQNPRNHFRCQVQFYGLSENDEWTQDRAKPVTQIVSAEAWGRADCGFTSESYQQGVLSATILYEILLGKATLYAVLVSALVLMAMVKRKDSRGRAKRSGSGATNFSLLKQAGDVEENPGPTRGHMTEYKPTVRLATRDDVPRAVRTLAAAFADYPATRHTVDPDRHIERVTELQELFLTRVGLDIGKVWVADDGAAVAVWTTPESVEAGAVFAEIGPRMAELSGSRLAAQQQMEGLLAPHRPKEPAWFLATVGVSPDHQGKGLGSAVVLPGVEAAERAGVPAFLETSAPRNLPFYERLGFTVTADVEVPEGPRTWCMTRKPGA

SEQ ID NO: 16944 - protein, 463 aa, Artificial Sequence
  Synthetic Polypeptide
MALPVTALLLPLALLLHAARPEVQVLESGGGLVQPGGSLRLSCAASGFTFSNFAMSWVRQAPGKGLEWVSTISGSAGTTDYADSVKGRFTISRDNSKKTLYLQMNSLRVEDTAVYYCADGRGPFFDYRGQGTLVTVSSGTGGGGSGGGGSGGGGSEFDIQMTQSPSSLSASVGDRVTITCKASDHINNWLAWYQQKPGQAPKLLIYGATTLETGVPSRFSGSGSGTDYTLTISSLQPEDFATYYCQQSWNTPWTFGQGTKLEIKRLEGKPIPNPLLGLDSTGSGEDLKNVFPPEVAVFEPSEAEISHTQKATLVCLATGFYPDHVELSWWVNGKEVHSGVCTDPQPLKEQPALNDSRYCLSSRLRVSATFWQNPRNHFRCQVQFYGLSENDEWTQDRAKPVTQIVSAEAWGRADCGFTSESYQQGVLSATILYEILLGKATLYAVLVSALVLMAMVKRKDSRG

SEQ ID NO: 16945 - protein, 779 aa, Artificial Sequence
  Synthetic Polypeptide
MALPVTALLLPLALLLHAARPEVQVLESGGGLVQPGGSLRLSCAASGFTFSNFAMSWVRQAPGKGLEWVSTISGSAGTTDYADSVKGRFTISRDNSKKTLYLQMNSLRVEDTAVYYCADGRGPFFDYRGQGTLVTVSSGTGGGGSGGGGSGGGGSEFDIQMTQSPSSLSASVGDRVTITCKASDHINNWLAWYQQKPGQAPKLLIYGATTLETGVPSRFSGSGSGTDYTLTISSLQPEDFATYYCQQSWNTPWTFGQGTKLEIKRGGGGSGGGGSGGGGSQVQLQQPGAELVKPGASVKMSCKASGYAFSSYWINWMKQKPGQGLEWIGQIYPGDGDTNYNGKFKGRATLTADTSSSTAYMQLSSLTSEDSAVYFCARSITTVVGCAMDYWGQGTSVTVSSTRGSGIQNPDPAVYQLRDSKSSDKSVCLFTDFDSQTNVSQSKDSDVYITDKTVLDMRSMDFKSNSAVAWSNKSDFACANAFNNSIIPEDTFFPSSDVPCDVKLVEKSFETDTNLNFQNLSVIGFRILLLKVAGFNLLMTLRLWSSRAKRSGSGVKQTLNFDLLKLAGDVESNPGPSRGHMTEYKPTVRLATRDDVPRAVRTLAAAFADYPATRHTVDPDRHIERVTELQELFLTRVGLDIGKVWVADDGAAVAVWTTPESVEAGAVFAEIGPRMAELSGSRLAAQQQMEGLLAPHRPKEPAWFLATVGVSPDHQGKGLGSAVVLPGVEAAERAGVPAFLETSAPRNLPFYERLGFTVTADVEVPEGPRTWCMTRKPGA

SEQ ID NO: 16946 - protein, 811 aa, Artificial Sequence
  Synthetic Polypeptide
MALPVTALLLPLALLLHAARPEVQVLESGGGLVQPGGSLRLSCAASGFTFSNFAMSWVRQAPGKGLEWVSTISGSAGTTDYADSVKGRFTISRDNSKKTLYLQMNSLRVEDTAVYYCADGRGPFFDYRGQGTLVTVSSGTGGGGSGGGGSGGGGSEFDIQMTQSPSSLSASVGDRVTITCKASDHINNWLAWYQQKPGQAPKLLIYGATTLETGVPSRFSGSGSGTDYTLTISSLQPEDFATYYCQQSWNTPWTFGQGTKLEIKRGGGGSGGGGSGGGGSQVQLQQPGAELVKPGASVKMSCKASGYAFSSYWINWMKQKPGQGLEWIGQIYPGDGDTNYNGKFKGRATLTADTSSSTAYMQLSSLTSEDSAVYFCARSITTVVGCAMDYWGQGTSVTVSSLEDLKNVFPPEVAVFEPSKAEIAHTQKATLVCLATGFYPDHVELSWWVNGKEVHSGVSTDPQPLKEQPALNDSRYCLSSRLRVSATFWQNPRNHFRCQVQFYGLSENDEWTQDRAKPVTQIVSAEAWGRADCGITSASYHQGVLSATILYEILLGKATLYAVLVSALVLMAMVKRKDSRGRAKRSGSGATNFSLLKQAGDVEENPGPTRGHMTEYKPTVRLATRDDVPRAVRTLAAAFADYPATRHTVDPDRHIERVTELQELFLTRVGLDIGKVWVADDGAAVAVWTTPESVEAGAVFAEIGPRMAELSGSRLAAQQQMEGLLAPHRPKEPAWFLATVGVSPDHQGKGLGSAVVLPGVEAAERAGVPAFLETSAPRNLPFYERLGFTVTADVEVPEGPRTWCMTRKPGA

SEQ ID NO: 16947 - protein, 640 aa, Artificial Sequence
  Synthetic Polypeptide
MDWIWRILFLVGAATGAHSGPEVQLVESGGGLVQAGGSLRLSCAASGRTFSMGWFRQAPGKEREFVAAITYSGGSPYYADSVKGRFTISRDNAKNTVYLQMNSLKPEDTAVYYCAANPTYGSDWNAENWGQGTQVTVSSGSGGGGSGGGGSGGGGSFEQVQLQQPGAELVKPGASVKMSCKASGYAFSSYWINWMKQKPGQGLEWIGQIYPGDGDTNYNGKFKGRATLTADTSSSTAYMQLSSLTSEDSAVYFCARSITTVVGCAMDYWGQGTSVTVSSGGGGSGGGGSGGGGSDIQMTQSPSSLSASVGDRVTITCKASDHINNWLAWYQQKPGQAPKLLIYGATTLETGVPSRFSGSGSGTDYTLTISSLQPEDFATYYCQQSWNTPWTFGQGTKLEIKRTREQKLISEEDLAKPTTTPAPRPPTPAPTIASQPLSLRPEACRPAAGGAVHTRGLDFACDIYIWAPLAGTCGVLLLSLVITLYCKRGRKKLLYIFKQPFMRPVQTTQEEDGCSCRFPEEEEGGCELRVKFSRSADAPAYQQGQNQLYNELNLGRREEYDVLDKRRGRDPEMGGKPRRKNPQEGLYNELQKDKMAEAYSEIGMKGERRRGKGHDGLYQGLSTATKDTYDALHMQALPPR

SEQ ID NO: 16948 - protein, 993 aa, Artificial Sequence
  Synthetic Polypeptide
MALPVTALLLPLALLLHAARPDIQMTQSPSSLSASVGDRVTITCKASDHINNWLAWYQQKPGQAPKLLIYGATTLETGVPSRFSGSGSGTDYTLTISSLQPEDFATYYCQQSWNTPWTFGQGTKLEIKRLEIQNPDPAVYQLRDSKSSDKSVCLFTDFDSQTNVSQSKDSDVYITDKCVLDMRSMDFKSNSAVAWSNKSDFACANAFNNSIIPEDTFFPSSDVPCDVKLVEKSFETDTNLNFQNLSVIGFRILLLKVAGFNLLMTLRLWSSRAKRSGSGVKQTLNFDLLKLAGDVESNPGPTSMDWIWRILFLVGAATGAHSGPEVQLVESGGGLVQAGGSLRLSCAASGRTFSMGWFRQAPGKEREFVAAITYSGGSPYYADSVKGRFTISRDNAKNTVYLQMNSLKPEDTAVYYCAANPTYGSDWNAENWGQGTQVTVSSGSGGGGSGGGGSGGGGSFEQVQLQQPGAELVKPGASVKMSCKASGYAFSSYWINWMKQKPGQGLEWIGQIYPGDGDTNYNGKFKGRATLTADTSSSTAYMQLSSLTSEDSAVYFCARSITTVVGCAMDYWGQGTSVTVSSTREDLKNVFPPEVAVFEPSKAEIAHTQKATLVCLATGFYPDHVELSWWVNGKEVHSGVCTDPQPLKEQPALNDSRYCLSSRLRVSATFWQNPRNHFRCQVQFYGLSENDEWTQDRAKPVTQIVSAEAWGRADCGITSASYHQGVLSATILYEILLGKATLYAVLVSALVLMAMVKRKDSRGRAKRSGSGATNFSLLKQAGDVEENPGPSRGHMTEYKPTVRLATRDDVPRAVRTLAAAFADYPATRHTVDPDRHIERVTELQELFLTRVGLDIGKVWVADDGAAVAVWTTPESVEAGAVFAEIGPRMAELSGSRLAAQQQMEGLLAPHRPKEPAWFLATVGVSPDHQGKGLGSAVVLPGVEAAERAGVPAFLETSAPRNLPFYERLGFTVTADVEVPEGPRTWCMTRKPGA

SEQ ID NO: 16949 - protein, 992 aa, Artificial Sequence
  Synthetic Polypeptide
MALPVTALLLPLALLLHAARPDIQMTQSPSSLSASVGDRVTITCKASDHINNWLAWYQQKPGQAPKLLIYGATTLETGVPSRFSGSGSGTDYTLTISSLQPEDFATYYCQQSWNTPWTFGQGTKLEIKRLEDLKNVFPPEVAVFEPSKAEIAHTQKATLVCLATGFYPDHVELSWWVNGKEVHSGVCTDPQPLKEQPALNDSRYCLSSRLRVSATFWQNPRNHFRCQVQFYGLSENDEWTQDRAKPVTQIVSAEAWGRADCGITSASYHQGVLSATILYEILLGKATLYAVLVSALVLMAMVKRKDSRGRAKRSGSGATNFSLLKQAGDVEENPGPTSMDWIWRILFLVGAATGAHSGPEVQLVESGGGLVQAGGSLRLSCAASGRTFSMGWFRQAPGKEREFVAAITYSGGSPYYADSVKGRFTISRDNAKNTVYLQMNSLKPEDTAVYYCAANPTYGSDWNAENWGQGTQVTVSSGSGGGGSGGGGSGGGGSFEQVQLQQPGAELVKPGASVKMSCKASGYAFSSYWINWMKQKPGQGLEWIGQIYPGDGDTNYNGKFKGRATLTADTSSSTAYMQLSSLTSEDSAVYFCARSITTVVGCAMDYWGQGTSVTVSSTRIQNPDPAVYQLRDSKSSDKSVCLFTDFDSQTNVSQSKDSDVYITDKCVLDMRSMDFKSNSAVAWSNKSDFACANAFNNSIIPEDTFFPSSDVPCDVKLVEKSFETDTNLNFQNLSVIGFRILLLKVAGFNLLMTLRLWSSRAKRSGSGVKQTLNFDLLKLAGDVESNPGPSRGHMTEYKPTVRLATRDDVPRAVRTLAAAFADYPATRHTVDPDRHIERVTELQELFLTRVGLDIGKVWVADDGAAVAVWTTPESVEAGAVFAEIGPRMAELSGSRLAAQQQMEGLLAPHRPKEPAWFLATVGVSPDHQGKGLGSAVVLPGVEAAERAGVPAFLETSAPRNLPFYERLGFTVTADVEVPEGPRTWCMTRKPGA

SEQ ID NO: 16950 - protein, 992 aa, Artificial Sequence
  Synthetic Polypeptide
MALPVTALLLPLALLLHAARPDIQMTQSPSSLSASVGDRVTITCKASDHINNWLAWYQQKPGQAPKLLIYGATTLETGVPSRFSGSGSGTDYTLTISSLQPEDFATYYCQQSWNTPWTFGQGTKLEIKRLEDLKNVFPPEVAVFEPSEAEISHTQKATLVCLATGFYPDHVELSWWVNGKEVHSGVCTDPQPLKEQPALNDSRYCLSSRLRVSATFWQNPRNHFRCQVQFYGLSENDEWTQDRAKPVTQIVSAEAWGRADCGFTSESYQQGVLSATILYEILLGKATLYAVLVSALVLMAMVKRKDSRGRAKRSGSGATNFSLLKQAGDVEENPGPTSMDWIWRILFLVGAATGAHSGPEVQLVESGGGLVQAGGSLRLSCAASGRTFSMGWFRQAPGKEREFVAAITYSGGSPYYADSVKGRFTISRDNAKNTVYLQMNSLKPEDTAVYYCAANPTYGSDWNAENWGQGTQVTVSSGSGGGGSGGGGSGGGGSFEQVQLQQPGAELVKPGASVKMSCKASGYAFSSYWINWMKQKPGQGLEWIGQIYPGDGDTNYNGKFKGRATLTADTSSSTAYMQLSSLTSEDSAVYFCARSITTVVGCAMDYWGQGTSVTVSSTRIQNPDPAVYQLRDSKSSDKSVCLFTDFDSQTNVSQSKDSDVYITDKCVLDMRSMDFKSNSAVAWSNKSDFACANAFNNSIIPEDTFFPSPESSCDVKLVEKSFETDTNLNFQNLSVIGFRILLLKVAGFNLLMTLRLWSSRAKRSGSGVKQTLNFDLLKLAGDVESNPGPSRGHMTEYKPTVRLATRDDVPRAVRTLAAAFADYPATRHTVDPDRHIERVTELQELFLTRVGLDIGKVWVADDGAAVAVWTTPESVEAGAVFAEIGPRMAELSGSRLAAQQQMEGLLAPHRPKEPAWFLATVGVSPDHQGKGLGSAVVLPGVEAAERAGVPAFLETSAPRNLPFYERLGFTVTADVEVPEGPRTWCMTRKPGA

SEQ ID NO: 16951 - protein, 759 aa, Artificial Sequence
  Synthetic Polypeptide
MALPVTALLLPLALLLHAARPDIQMTQSPSSLSASVGDRVTITCKASDHINNWLAWYQQKPGQAPKLLIYGATTLETGVPSRFSGSGSGTDYTLTISSLQPEDFATYYCQQSWNTPWTFGQGTKLEIKRLEDLKNVFPPEVAVFEPSEAEISHTQKATLVCLATGFYPDHVELSWWVNGKEVHSGVCTDPQPLKEQPALNDSRYCLSSRLRVSATFWQNPRNHFRCQVQFYGLSENDEWTQDRAKPVTQIVSAEAWGRADCGFTSESYQQGVLSATILYEILLGKATLYAVLVSALVLMAMVKRKDSRGRAKRSGSGATNFSLLKQAGDVEENPGPTSMDWIWRILFLVGAATGAHSGPEVQLVESGGGLVQAGGSLRLSCAASGRTFSMGWFRQAPGKEREFVAAITYSGGSPYYADSVKGRFTISRDNAKNTVYLQMNSLKPEDTAVYYCAANPTYGSDWNAENWGQGTQVTVSSGSGGGGSGGGGSGGGGSFEQVQLQQPGAELVKPGASVKMSCKASGYAFSSYWINWMKQKPGQGLEWIGQIYPGDGDTNYNGKFKGRATLTADTSSSTAYMQLSSLTSEDSAVYFCARSITTVVGCAMDYWGQGTSVTVSSTRIQNPDPAVYQLRDSKSSDKSVCLFTDFDSQTNVSQSKDSDVYITDKCVLDMRSMDFKSNSAVAWSNKSDFACANAFNNSIIPEDTFFPSPESSCDVKLVEKSFETDTNLNFQNLSVIGFRILLLKVAGFNLLMTLRLWSS

SEQ ID NO: 16952 - protein, 984 aa, Artificial Sequence
  Synthetic Polypeptide
MALPVTALLLPLALLLHAARPDIQMTQSPSSLSASVGDRVTITCKASDHINNWLAWYQQKPGQAPKLLIYGATTLETGVPSRFSGSGSGTDYTLTISSLQPEDFATYYCQQSWNTPWTFGQGTKLEIKRLEDLKNVFPPEVAVFEPSEAEISHTQKATLVCLATGFYPDHVELSWWVNGKEVHSGVCTDPQPLKEQPALNDSRYCLSSRLRVSATFWQNPRNHFRCQVQFYGLSENDEWTQDRAKPVTQIVSAEAWGRADCGFTSESYQQGVLSATILYEILLGKATLYAVLVSALVLMAMVKRKDSRGRAKRSGSGATNFSLLKQAGDVEENPGPTSMDWIWRILFLVGAATGAHSGPEVQLVESGGGLVQAGGSLRLSCAASGRTFSMGWFRQAPGKEREFVAAITYSGGSPYYADSVKGRFTISRDNAKNTVYLQMNSLKPEDTAVYYCAANPTYGSDWNAENWGQGTQVTVSSGSGGGGSGGGGSGGGGSFEQVQLQQPGAELVKPGASVKMSCKASGYAFSSYWINWMKQKPGQGLEWIGQIYPGDGDTNYNGKFKGRATLTADTSSSTAYMQLSSLTSEDSAVYFCARSITTVVGCAMDYWGQGTSVTVSSTRIQNPDPAVYQLRDSKSSDKSVCLFTDFDSQTNVSQSKDSDVYITDKCVLDMRSMDFKSNSAVAWSNKSDFACANAFNNSIIPEDTFFPSPESSCDVKLVEKSFETDTNLNFQNLSVIGFRILLLKVAGFNLLMTLRLWSSRAKRSGSGVKQTLNFDLLKLAGDVESNPGPSRGGIHTMATYEVLCEVARKLGTDDREVVLFLLNVFIPQPTLAQLIGALRALKEEGRLTFPLLAECLFRAGRRDLLRDLLHLDPRFLERHLAGTMSYFSPYQLTVLHVDGELCARDIRSLIFLSKDTIGSRSTPQTFLHWVYCMENLDLLGPTDVDALMSMLRSLSRVDLQRQVQTLMGLHLSGPSHSQHYRHTP

SEQ ID NO: 16953 - protein, 763 aa, Artificial Sequence
  Synthetic Polypeptide
MALPVTALLLPLALLLHAARPDIQMTQSPSSLSASVGDRVTITCKASDHINNWLAWYQQKPGQAPKLLIYGATTLETGVPSRFSGSGSGTDYTLTISSLQPEDFATYYCQQSWNTPWTFGQGTKLEIKRLEIQNPDPAVYQLRDSKSSDKSVCLFTDFDSQTNVSQSKDSDVYITDKCVLDMRSMDFKSNSAVAWSNKSDFACANAFNNSIIPEDTFFPSPESSCDVKLVEKSFETDTNLNFQNLSVIGFRILLLKVAGFNLLMTLRLWSSRAKRSGSGVKQTLNFDLLKLAGDVESNPGPTSMDWIWRILFLVGAATGAHSGPEVQLVESGGGLVQAGGSLRLSCAASGRTFSMGWFRQAPGKEREFVAAITYSGGSPYYADSVKGRFTISRDNAKNTVYLQMNSLKPEDTAVYYCAANPTYGSDWNAENWGQGTQVTVSSGSGGGGSGGGGSGGGGSFEQVQLQQPGAELVKPGASVKMSCKASGYAFSSYWINWMKQKPGQGLEWIGQIYPGDGDTNYNGKFKGRATLTADTSSSTAYMQLSSLTSEDSAVYFCARSITTVVGCAMDYWGQGTSVTVSSTREDLKNVFPPEVAVFEPSEAEISHTQKATLVCLATGFYPDHVELSWWVNGKEVHSGVCTDPQPLKEQPALNDSRYCLSSRLRVSATFWQNPRNHFRCQVQFYGLSENDEWTQDRAKPVTQIVSAEAWGRADCGFTSESYQQGVLSATILYEILLGKATLYAVLVSALVLMAMVKRKDSRG

SEQ ID NO: 16954 - protein, 985 aa, Artificial Sequence
  Synthetic Polypeptide
MALPVTALLLPLALLLHAARPDIQMTQSPSSLSASVGDRVTITCKASDHINNWLAWYQQKPGQAPKLLIYGATTLETGVPSRFSGSGSGTDYTLTISSLQPEDFATYYCQQSWNTPWTFGQGTKLEIKRLEIQNPDPAVYQLRDSKSSDKSVCLFTDFDSQTNVSQSKDSDVYITDKCVLDMRSMDFKSNSAVAWSNKSDFACANAFNNSIIPEDTFFPSPESSCDVKLVEKSFETDTNLNFQNLSVIGFRILLLKVAGFNLLMTLRLWSSRAKRSGSGVKQTLNFDLLKLAGDVESNPGPTSMDWIWRILFLVGAATGAHSGPEVQLVESGGGLVQAGGSLRLSCAASGRTFSMGWFRQAPGKEREFVAAITYSGGSPYYADSVKGRFTISRDNAKNTVYLQMNSLKPEDTAVYYCAANPTYGSDWNAENWGQGTQVTVSSGSGGGGSGGGGSGGGGSFEQVQLQQPGAELVKPGASVKMSCKASGYAFSSYWINWMKQKPGQGLEWIGQIYPGDGDTNYNGKFKGRATLTADTSSSTAYMQLSSLTSEDSAVYFCARSITTVVGCAMDYWGQGTSVTVSSTREDLKNVFPPEVAVFEPSEAEISHTQKATLVCLATGFYPDHVELSWWVNGKEVHSGVCTDPQPLKEQPALNDSRYCLSSRLRVSATFWQNPRNHFRCQVQFYGLSENDEWTQDRAKPVTQIVSAEAWGRADCGFTSESYQQGVLSATILYEILLGKATLYAVLVSALVLMAMVKRKDSRGRAKRSGSGATNFSLLKQAGDVEENPGPSRGGIHTMATYEVLCEVARKLGTDDREVVLFLLNVFIPQPTLAQLIGALRALKEEGRLTFPLLAECLFRAGRRDLLRDLLHLDPRFLERHLAGTMSYFSPYQLTVLHVDGELCARDIRSLIFLSKDTIGSRSTPQTFLHWVYCMENLDLLGPTDVDALMSMLRSLSRVDLQRQVQTLMGLHLSGPSHSQHYRHTP

SEQ ID NO: 16955 - protein, 992 aa, Artificial Sequence
  Synthetic Polypeptide
MALPVTALLLPLALLLHAARPDIQMTQSPSSLSASVGDRVTITCKASDHINNWLAWYQQKPGQAPKLLIYGATTLETGVPSRFSGSGSGTDYTLTISSLQPEDFATYYCQQSWNTPWTFGQGTKLEIKRLEDLKNVFPPEVAVFEPSEAEISHTQKATLVCLATGFYPDHVELSWWVNGKEVHSGVSTDPQPLKEQPALNDSRYCLSSRLRVSATFWQNPRNHFRCQVQFYGLSENDEWTQDRAKPVTQIVSAEAWGRADCGFTSESYQQGVLSATILYEILLGKATLYAVLVSALVLMAMVKRKDSRGRAKRSGSGATNFSLLKQAGDVEENPGPTSMDWIWRILFLVGAATGAHSGPEVQLVESGGGLVQAGGSLRLSCAASGRTFSMGWFRQAPGKEREFVAAITYSGGSPYYADSVKGRFTISRDNAKNTVYLQMNSLKPEDTAVYYCAANPTYGSDWNAENWGQGTQVTVSSGSGGGGSGGGGSGGGGSFEQVQLQQPGAELVKPGASVKMSCKASGYAFSSYWINWMKQKPGQGLEWIGQIYPGDGDTNYNGKFKGRATLTADTSSSTAYMQLSSLTSEDSAVYFCARSITTVVGCAMDYWGQGTSVTVSSTRIQNPDPAVYQLRDSKSSDKSVCLFTDFDSQTNVSQSKDSDVYITDKTVLDMRSMDFKSNSAVAWSNKSDFACANAFNNSIIPEDTFFPSPESSCDVKLVEKSFETDTNLNFQNLSVIGFRILLLKVAGFNLLMTLRLWSSRAKRSGSGVKQTLNFDLLKLAGDVESNPGPSRGHMTEYKPTVRLATRDDVPRAVRTLAAAFADYPATRHTVDPDRHIERVTELQELFLTRVGLDIGKVWVADDGAAVAVWTTPESVEAGAVFAEIGPRMAELSGSRLAAQQQMEGLLAPHRPKEPAWFLATVGVSPDHQGKGLGSAVVLPGVEAAERAGVPAFLETSAPRNLPFYERLGFTVTADVEVPEGPRTWCMTRKPGA

SEQ ID NO: 16956 - protein, 1074 aa, Artificial Sequence
  Synthetic Polypeptide
MALPVTALLLPLALLLHAARPDIQMTQSPSSLSASVGDRVTITCKASDHINNWLAWYQQKPGQAPKLLIYGATTLETGVPSRFSGSGSGTDYTLTISSLQPEDFATYYCQQSWNTPWTFGQGTKLEIKRLEDLKNVFPPEVAVFEPSEAEISHTQKATLVCLATGFYPDHVELSWWVNGKEVHSGVSTDPQPLKEQPALNDSRYCLSSRLRVSATFWQNPRNHFRCQVQFYGLSENDEWTQDRAKPVTQIVSAEAWGRADCGFTSESYQQGVLSATILYEILLGKATLYAVLVSALVLMAMVKRKDSRGRAKRSGSGATNFSLLKQAGDVEENPGPTSMDWIWRILFLVGAATGAHSGPEVQLVESGGGLVQAGGSLRLSCAASGRTFSMGWFRQAPGKEREFVAAITYSGGSPYYADSVKGRFTISRDNAKNTVYLQMNSLKPEDTAVYYCAANPTYGSDWNAENWGQGTQVTVSSGSGGGGSGGGGSGGGGSFEQVQLQQPGAELVKPGASVKMSCKASGYAFSSYWINWMKQKPGQGLEWIGQIYPGDGDTNYNGKFKGRATLTADTSSSTAYMQLSSLTSEDSAVYFCARSITTVVGCAMDYWGQGTSVTVSSTREQKLISEEDGSGTPFPSLAPPIMLLVDGKQQMVVVCLVLDVAPPGLDSPIWFSAGNGSALDAFTYGPSPATDGTWTNLAHLSLPSEELASWEPLVCHTGPGAEGHSRSTQPMHLSGEASTARTCPQEPLRGTPGGALWLGVLRLLLFKLLLFDLLLTCSCLCDPAGPLPSPATTTRLRALGSHRLHPATETGGREATSSPRPQPRDRRWGDTPPGRKPGSPVRAKRSGSGVKQTLNFDLLKLAGDVESNPGPSRGHMTEYKPTVRLATRDDVPRAVRTLAAAFADYPATRHTVDPDRHIERVTELQELFLTRVGLDIGKVWVADDGAAVAVWTTPESVEAGAVFAEIGPRMAELSGSRLAAQQQMEGLLAPHRPKEPAWFLATVGVSPDHQGKGLGSAVVLPGVEAAERAGVPAFLETSAPRNLPFYERLGFTVTADVEVPEGPRTWCMTRKPGA

SEQ ID NO: 16957 - protein, 1029 aa, Artificial Sequence
  Synthetic Polypeptide
MALPVTALLLPLALLLHAARPDIQMTQSPSSLSASVGDRVTITCKASDHINNWLAWYQQKPGQAPKLLIYGATTLETGVPSRFSGSGSGTDYTLTISSLQPEDFATYYCQQSWNTPWTFGQGTKLEIKRLEGKPIPNPLLGLDSTGSGDKQLDADVSPKPTIFLPSIAETKLQKAGTYLCLLEKFFPDVIKIHWQEKKSNTILGSQEGNTMKTNDTYMKFSWLTVPEKSLDKEHRCIVRHENNKNGVDQEIIFPPIKTDVITMDPKDNCSKDANDTLLLQLTNTSAYYMYLLLLLKSVVYFAIITCCLLRRTAFCCNGEKSRAKRSGSGATNFSLLKQAGDVEENPGPTSMDWIWRILFLVGAATGAHSGPEVQLVESGGGLVQAGGSLRLSCAASGRTFSMGWFRQAPGKEREFVAAITYSGGSPYYADSVKGRFTISRDNAKNTVYLQMNSLKPEDTAVYYCAANPTYGSDWNAENWGQGTQVTVSSGSGGGGSGGGGSGGGGSFEQVQLQQPGAELVKPGASVKMSCKASGYAFSSYWINWMKQKPGQGLEWIGQIYPGDGDTNYNGKFKGRATLTADTSSSTAYMQLSSLTSEDSAVYFCARSITTVVGCAMDYWGQGTSVTVSSTREQKLISEEDGSGSQPHTKPSVFVMKNGTNVACLVKEFYPKDIRINLVSSKKITEFDPAIVISPSGKYNAVKLGKYEDSNSVTCSVQHDNKTVHSTDFEVKTDSTDHVKPKETENTKQPSKSCHKPKAIVHTEKVNMMSLTVLGLRMLFAKTVAVNFLLTAKLFFLRAKRSGSGVKQTLNFDLLKLAGDVESNPGPSRGHMTEYKPTVRLATRDDVPRAVRTLAAAFADYPATRHTVDPDRHIERVTELQELFLTRVGLDIGKVWVADDGAAVAVWTTPESVEAGAVFAEIGPRMAELSGSRLAAQQQMEGLLAPHRPKEPAWFLATVGVSPDHQGKGLGSAVVLPGVEAAERAGVPAFLETSAPRNLPFYERLGFTVTADVEVPEGPRTWCMTRKPGA

SEQ ID NO: 16958 - protein, 767 aa, Artificial Sequence
  Synthetic Polypeptide
MALPVTALLLPLALLLHAARPDIQMTQSPSSLSASVGDRVTITCKASDHINNWLAWYQQKPGQAPKLLIYGATTLETGVPSRFSGSGSGTDYTLTISSLQPEDFATYYCQQSWNTPWTFGQGTKLEIKRLESQPHTKPSVFVMKNGTNVACLVKEFYPKDIRINLVSSKKITEFDPAIVISPSGKYNAVKLGKYEDSNSVTCSVQHDNKTVHSTDFEVKTDSTDHVKPKETENTKQPSKSCHKPKAIVHTEKVNMMSLTVLGLRMLFAKTVAVNFLLTAKLFFLRAKRSGSGATNFSLLKQAGDVEENPGPTSMDWIWRILFLVGAATGAHSGPEVQLVESGGGLVQAGGSLRLSCAASGRTFSMGWFRQAPGKEREFVAAITYSGGSPYYADSVKGRFTISRDNAKNTVYLQMNSLKPEDTAVYYCAANPTYGSDWNAENWGQGTQVTVSSGSGGGGSGGGGSGGGGSFEQVQLQQPGAELVKPGASVKMSCKASGYAFSSYWINWMKQKPGQGLEWIGQIYPGDGDTNYNGKFKGRATLTADTSSSTAYMQLSSLTSEDSAVYFCARSITTVVGCAMDYWGQGTSVTVSSTRDKQLDADVSPKPTIFLPSIAETKLQKAGTYLCLLEKFFPDVIKIHWQEKKSNTILGSQEGNTMKTNDTYMKFSWLTVPEKSLDKEHRCIVRHENNKNGVDQEIIFPPIKTDVITMDPKDNCSKDANDTLLLQLTNTSAYYMYLLLLLKSVVYFAIITCCLLRRTAFCCNGEKS

SEQ ID NO: 16959 - protein, 1169 aa, Artificial Sequence
  Synthetic Polypeptide
MALPVTALLLPLALLLHAARPDIQMTQSPSSLSASVGDRVTITCKASDHINNWLAWYQQKPGQAPKLLIYGATTLETGVPSRFSGSGSGTDYTLTISSLQPEDFATYYCQQSWNTPWTFGQGTKLEIKRGQPKANPTVTLFPPSSEELQANKATLVCLISDFYPGAVTVAWKADGSPVKAGVETTKPSKQSNNKYAASSYLSLTPEQWKSHRSYSCQVTHEGSTVEKTVAPTECSGSQSFGLLDPKLCYLLDGILFIYGVILTALFLRVKFSRSADAPAYQQGQNQLYNELNLGRREEYDVLDKRRGRDPEMGGKPQRRKNPQEGLYNELQKDKMAEAYSEIGMKGERRRGKGHDGLYQGLSTATKDTYDALHMQALPPRRAKRSGSGATNFSLLKQAGDVEENPGPTSMDWIWRILFLVGAATGAHSGPEVQLVESGGGLVQAGGSLRLSCAASGRTFSMGWFRQAPGKEREFVAAITYSGGSPYYADSVKGRFTISRDNAKNTVYLQMNSLKPEDTAVYYCAANPTYGSDWNAENWGQGTQVTVSSGSGGGGSGGGGSGGGGSFEQVQLQQPGAELVKPGASVKMSCKASGYAFSSYWINWMKQKPGQGLEWIGQIYPGDGDTNYNGKFKGRATLTADTSSSTAYMQLSSLTSEDSAVYFCARSITTVVGCAMDYWGQGTSVTVSSASTKGPSVFPLAPSSKSTSGGTAALGCLVKDYFPEPVTVSWNSGALTSGVHTFPAVLQSSGLYSLSSVVTVPSSSLGTQTYICNVNHKPSNTKVDKRVEPKSCGTQSFGLLDPKLCYLLDGILFIYGVILTALFLRVKFSRSADAPAYQQGQNQLYNELNLGRREEYDVLDKRRGRDPEMGGKPQRRKNPQEGLYNELQKDKMAEAYSEIGMKGERRRGKGHDGLYQGLSTATKDTYDALHMQALPPRRAKRSGSGVKQTLNFDLLKLAGDVESNPGPSRGHMTEYKPTVRLATRDDVPRAVRTLAAAFADYPATRHTVDPDRHIERVTELQELFLTRVGLDIGKVWVADDGAAVAVWTTPESVEAGAVFAEIGPRMAELSGSRLAAQQQMEGLLAPHRPKEPAWFLATVGVSPDHQGKGLGSAVVLPGVEAAERAGVPAFLETSAPRNLPFYERLGFTVTADVEVPEGPRTWCMTRKPGA

SEQ ID NO: 16960 - protein, 955 aa, Artificial Sequence
  Synthetic Polypeptide
MALPVTALLLPLALLLHAARPDIQMTQSPSSLSASVGDRVTITCKASDHINNWLAWYQQKPGQAPKLLIYGATTLETGVPSRFSGSGSGTDYTLTISSLQPEDFATYYCQQSWNTPWTFGQGTKLEIKRLEDLKNVFPPEVAVFEPSEAEISHTQKATLVCLATGFYPDHVELSWWVNGKEVHSGVSTDPQPLKEQPALNDSRYCLSSRLRVSATFWQNPRNHFRCQVQFYGLSENDEWTQDRAKPVTQIVSAEAWGRADCGSQSFGLLDPKLCYLLDGILFIYGVILTALFLRVKFSRSADAPAYQQGQNQLYNELNLGRREEYDVLDKRRGRDPEMGGKPQRRKNPQEGLYNELQKDKMAEAYSEIGMKGERRRGKGHDGLYQGLSTATKDTYDALHMQALPPRRAKRSGSGATNFSLLKQAGDVEENPGPTSMDWIWRILFLVGAATGAHSGPEVQLVESGGGLVQAGGSLRLSCAASGRTFSMGWFRQAPGKEREFVAAITYSGGSPYYADSVKGRFTISRDNAKNTVYLQMNSLKPEDTAVYYCAANPTYGSDWNAENWGQGTQVTVSSGSGGGGSGGGGSGGGGSFEQVQLQQPGAELVKPGASVKMSCKASGYAFSSYWINWMKQKPGQGLEWIGQIYPGDGDTNYNGKFKGRATLTADTSSSTAYMQLSSLTSEDSAVYFCARSITTVVGCAMDYWGQGTSVTVSSTRIQNPDPAVYQLRDSKSSDKSVCLFTDFDSQTNVSQSKDSDVYITDKTVLDMRSMDFKSNSAVAWSNKSDFACANAFNNSIIPEDTFFPSPESSCGTQSFGLLDPKLCYLLDGILFIYGVILTALFLRVKFSRSADAPAYQQGQNQLYNELNLGRREEYDVLDKRRGRDPEMGGKPQRRKNPQEGLYNELQKDKMAEAYSEIGMKGERRRGKGHDGLYQGLSTATKDTYDALHMQALPPR

SEQ ID NO: 16961 - protein, 955 aa, Artificial Sequence
  Synthetic Polypeptide
MALPVTALLLPLALLLHAARPDIQMTQSPSSLSASVGDRVTITCKASDHINNWLAWYQQKPGQAPKLLIYGATTLETGVPSRFSGSGSGTDYTLTISSLQPEDFATYYCQQSWNTPWTFGQGTKLEIKRLEDLKNVFPPEVAVFEPSKAEIAHTQKATLVCLATGFYPDHVELSWWVNGKEVHSGVCTDPQPLKEQPALNDSRYCLSSRLRVSATFWQNPRNHFRCQVQFYGLSENDEWTQDRAKPVTQIVSAEAWGRADCGSQSFGLLDPKLCYLLDGILFIYGVILTALFLRVKFSRSADAPAYQQGQNQLYNELNLGRREEYDVLDKRRGRDPEMGGKPQRRKNPQEGLYNELQKDKMAEAYSEIGMKGERRRGKGHDGLYQGLSTATKDTYDALHMQALPPRRAKRSGSGATNFSLLKQAGDVEENPGPTSMDWIWRILFLVGAATGAHSGPEVQLVESGGGLVQAGGSLRLSCAASGRTFSMGWFRQAPGKEREFVAAITYSGGSPYYADSVKGRFTISRDNAKNTVYLQMNSLKPEDTAVYYCAANPTYGSDWNAENWGQGTQVTVSSGSGGGGSGGGGSGGGGSFEQVQLQQPGAELVKPGASVKMSCKASGYAFSSYWINWMKQKPGQGLEWIGQIYPGDGDTNYNGKFKGRATLTADTSSSTAYMQLSSLTSEDSAVYFCARSITTVVGCAMDYWGQGTSVTVSSTRIQNPDPAVYQLRDSKSSDKSVCLFTDFDSQTNVSQSKDSDVYITDKCVLDMRSMDFKSNSAVAWSNKSDFACANAFNNSIIPEDTFFPSSDVPCGTQSFGLLDPKLCYLLDGILFIYGVILTALFLRVKFSRSADAPAYQQGQNQLYNELNLGRREEYDVLDKRRGRDPEMGGKPQRRKNPQEGLYNELQKDKMAEAYSEIGMKGERRRGKGHDGLYQGLSTATKDTYDALHMQALPPR

SEQ ID NO: 16962 - protein, 1026 aa, Artificial Sequence
  Synthetic Polypeptide
MALPVTALLLPLALLLHAARPDIQMTQSPSSLSASVGDRVTITCKASDHINNWLAWYQQKPGQAPKLLIYGATTLETGVPSRFSGSGSGTDYTLTISSLQPEDFATYYCQQSWNTPWTFGQGTKLEIKRLEGKPIPNPLLGLDSTGSGEDLKNVFPPEVAVFEPSEAEISHTQKATLVCLATGFYPDHVELSWWVNGKEVHSGVSTDPQPLKEQPALNDSRYCLSSRLRVSATFWQNPRNHFRCQVQFYGLSENDEWTQDRAKPVTQIVSAEAWGRADCGSQSFGLLDPKLCYLLDGILFIYGVILTALFLRVKFSRSADAPAYQQGQNQLYNELNLGRREEYDVLDKRRGRDPEMGGKPQRRKNPQEGLYNELQKDKMAEAYSEIGMKGERRRGKGHDGLYQGLSTATKDTYDALHMQALPPRRAKRSGSGATNFSLLKQAGDVEENPGPTSMDWIWRILFLVGAATGAHSGPEVQLVESGGGLVQAGGSLRLSCAASGRTFSMGWFRQAPGKEREFVAAITYSGGSPYYADSVKGRFTISRDNAKNTVYLQMNSLKPEDTAVYYCAANPTYGSDWNAENWGQGTQVTVSSGSGGGGSGGGGSGGGGSFEQVQLQQPGAELVKPGASVKMSCKASGYAFSSYWINWMKQKPGQGLEWIGQIYPGDGDTNYNGKFKGRATLTADTSSSTAYMQLSSLTSEDSAVYFCARSITTVVGCAMDYWGQGTSVTVSSTREQKLISEEDGSGIQNPDPAVYQLRDSKSSDKSVCLFTDFDSQTNVSQSKDSDVYITDKTVLDMRSMDFKSNSAVAWSNKSDFACANAFNNSIIPEDTFFPSPESSCGTQSFGLLDPKLCYLLDGILFIYGVILTALFLRSKRSRLLHSDYMNMTPRRPGPTRKHYQPYAPPRDFAAYRSRVKFSRSADAPAYQQGQNQLYNELNLGRREEYDVLDKRRGRDPEMGGKPQRRKNPQEGLYNELQKDKMAEAYSEIGMKGERRRGKGHDGLYQGLSTATKDTYDALHMQALPPR

SEQ ID NO: 16963 - protein, 1067 aa, Artificial Sequence
  Synthetic Polypeptide
MALPVTALLLPLALLLHAARPDIQMTQSPSSLSASVGDRVTITCKASDHINNWLAWYQQKPGQAPKLLIYGATTLETGVPSRFSGSGSGTDYTLTISSLQPEDFATYYCQQSWNTPWTFGQGTKLEIKRLEGKPIPNPLLGLDSTGSGEDLKNVFPPEVAVFEPSEAEISHTQKATLVCLATGFYPDHVELSWWVNGKEVHSGVSTDPQPLKEQPALNDSRYCLSSRLRVSATFWQNPRNHFRCQVQFYGLSENDEWTQDRAKPVTQIVSAEAWGRADCGSQSFGLLDPKLCYLLDGILFIYGVILTALFLRSKRSRLLHSDYMNMTPRRPGPTRKHYQPYAPPRDFAAYRSRVKFSRSADAPAYQQGQNQLYNELNLGRREEYDVLDKRRGRDPEMGGKPQRRKNPQEGLYNELQKDKMAEAYSEIGMKGERRRGKGHDGLYQGLSTATKDTYDALHMQALPPRRAKRSGSGATNFSLLKQAGDVEENPGPTSMDWIWRILFLVGAATGAHSGPEVQLVESGGGLVQAGGSLRLSCAASGRTFSMGWFRQAPGKEREFVAAITYSGGSPYYADSVKGRFTISRDNAKNTVYLQMNSLKPEDTAVYYCAANPTYGSDWNAENWGQGTQVTVSSGSGGGGSGGGGSGGGGSFEQVQLQQPGAELVKPGASVKMSCKASGYAFSSYWINWMKQKPGQGLEWIGQIYPGDGDTNYNGKFKGRATLTADTSSSTAYMQLSSLTSEDSAVYFCARSITTVVGCAMDYWGQGTSVTVSSTREQKLISEEDGSGIQNPDPAVYQLRDSKSSDKSVCLFTDFDSQTNVSQSKDSDVYITDKTVLDMRSMDFKSNSAVAWSNKSDFACANAFNNSIIPEDTFFPSPESSCGTQSFGLLDPKLCYLLDGILFIYGVILTALFLRSKRSRLLHSDYMNMTPRRPGPTRKHYQPYAPPRDFAAYRSRVKFSRSADAPAYQQGQNQLYNELNLGRREEYDVLDKRRGRDPEMGGKPQRRKNPQEGLYNELQKDKMAEAYSEIGMKGERRRGKGHDGLYQGLSTATKDTYDALHMQALPPR

SEQ ID NO: 16964 - protein, 1028 aa, Artificial Sequence
  Synthetic Polypeptide
MALPVTALLLPLALLLHAARPDIQMTQSPSSLSASVGDRVTITCKASDHINNWLAWYQQKPGQAPKLLIYGATTLETGVPSRFSGSGSGTDYTLTISSLQPEDFATYYCQQSWNTPWTFGQGTKLEIKRLEGKPIPNPLLGLDSTGSGEDLKNVFPPEVAVFEPSEAEISHTQKATLVCLATGFYPDHVELSWWVNGKEVHSGVSTDPQPLKEQPALNDSRYCLSSRLRVSATFWQNPRNHFRCQVQFYGLSENDEWTQDRAKPVTQIVSAEAWGRADCGSQSFGLLDPKLCYLLDGILFIYGVILTALFLRVKFSRSADAPAYQQGQNQLYNELNLGRREEYDVLDKRRGRDPEMGGKPQRRKNPQEGLYNELQKDKMAEAYSEIGMKGERRRGKGHDGLYQGLSTATKDTYDALHMQALPPRRAKRSGSGATNFSLLKQAGDVEENPGPTSMDWIWRILFLVGAATGAHSGPEVQLVESGGGLVQAGGSLRLSCAASGRTFSMGWFRQAPGKEREFVAAITYSGGSPYYADSVKGRFTISRDNAKNTVYLQMNSLKPEDTAVYYCAANPTYGSDWNAENWGQGTQVTVSSGSGGGGSGGGGSGGGGSFEQVQLQQPGAELVKPGASVKMSCKASGYAFSSYWINWMKQKPGQGLEWIGQIYPGDGDTNYNGKFKGRATLTADTSSSTAYMQLSSLTSEDSAVYFCARSITTVVGCAMDYWGQGTSVTVSSTREQKLISEEDLGSGIQNPDPAVYQLRDSKSSDKSVCLFTDFDSQTNVSQSKDSDVYITDKTVLDMRSMDFKSNSAVAWSNKSDFACANAFNNSIIPEDTFFPSPESSCGTQSFGLLDPKLCYLLDGILFIYGVILTALFLKRGRKKLLYIFKQPFMRPVQTTQEEDGCSCRFPEEEEGGCELRVKFSRSADAPAYQQGQNQLYNELNLGRREEYDVLDKRRGRDPEMGGKPQRRKNPQEGLYNELQKDKMAEAYSEIGMKGERRRGKGHDGLYQGLSTATKDTYDALHMQALPPR

SEQ ID NO: 16965 - protein, 1070 aa, Artificial Sequence
  Synthetic Polypeptide
MALPVTALLLPLALLLHAARPDIQMTQSPSSLSASVGDRVTITCKASDHINNWLAWYQQKPGQAPKLLIYGATTLETGVPSRFSGSGSGTDYTLTISSLQPEDFATYYCQQSWNTPWTFGQGTKLEIKRLEGKPIPNPLLGLDSTGSGEDLKNVFPPEVAVFEPSEAEISHTQKATLVCLATGFYPDHVELSWWVNGKEVHSGVSTDPQPLKEQPALNDSRYCLSSRLRVSATFWQNPRNHFRCQVQFYGLSENDEWTQDRAKPVTQIVSAEAWGRADCGSQSFGLLDPKLCYLLDGILFIYGVILTALFLKRGRKKLLYIFKQPFMRPVQTTQEEDGCSCRFPEEEEGGCELRVKFSRSADAPAYQQGQNQLYNELNLGRREEYDVLDKRRGRDPEMGGKPQRRKNPQEGLYNELQKDKMAEAYSEIGMKGERRRGKGHDGLYQGLSTATKDTYDALHMQALPPRRAKRSGSGATNFSLLKQAGDVEENPGPTSMDWIWRILFLVGAATGAHSGPEVQLVESGGGLVQAGGSLRLSCAASGRTFSMGWFRQAPGKEREFVAAITYSGGSPYYADSVKGRFTISRDNAKNTVYLQMNSLKPEDTAVYYCAANPTYGSDWNAENWGQGTQVTVSSGSGGGGSGGGGSGGGGSFEQVQLQQPGAELVKPGASVKMSCKASGYAFSSYWINWMKQKPGQGLEWIGQIYPGDGDTNYNGKFKGRATLTADTSSSTAYMQLSSLTSEDSAVYFCARSITTVVGCAMDYWGQGTSVTVSSTREQKLISEEDLGSGIQNPDPAVYQLRDSKSSDKSVCLFTDFDSQTNVSQSKDSDVYITDKTVLDMRSMDFKSNSAVAWSNKSDFACANAFNNSIIPEDTFFPSPESSCGTQSFGLLDPKLCYLLDGILFIYGVILTALFLKRGRKKLLYIFKQPFMRPVQTTQEEDGCSCRFPEEEEGGCELRVKFSRSADAPAYQQGQNQLYNELNLGRREEYDVLDKRRGRDPEMGGKPQRRKNPQEGLYNELQKDKMAEAYSEIGMKGERRRGKGHDGLYQGLSTATKDTYDALHMQALPPR

SEQ ID NO: 16966 - protein, 960 aa, Artificial Sequence
  Synthetic Polypeptide
MALPVTALLLPLALLLHAARPDIQMTQSPSSLSASVGDRVTITCKASDHINNWLAWYQQKPGQAPKLLIYGATTLETGVPSRFSGSGSGTDYTLTISSLQPEDFATYYCQQSWNTPWTFGQGTKLEIKRLEQSFGLLDPKLCYLLDGILFIYGVILTALFLRVKFSRSADAPAYQQGQNQLYNELNLGRREEYDVLDKRRGRDPEMGGKPQRRKNPQEGLYNELQKDKMAEAYSEIGMKGERRRGKGHDGLYQGLSTATKDTYDALHMQALPPRRAKRSGSGATNFSLLKQAGDVEENPGPTSMDWIWRILFLVGAATGAHSGPEVQLVESGGGLVQAGGSLRLSCAASGRTFSMGWFRQAPGKEREFVAAITYSGGSPYYADSVKGRFTISRDNAKNTVYLQMNSLKPEDTAVYYCAANPTYGSDWNAENWGQGTQVTVSSGSGGGGSGGGGSGGGGSFEQVQLQQPGAELVKPGASVKMSCKASGYAFSSYWINWMKQKPGQGLEWIGQIYPGDGDTNYNGKFKGRATLTADTSSSTAYMQLSSLTSEDSAVYFCARSITTVVGCAMDYWGQGTSVTVSSTRQSFGLLDPKLCYLLDGILFIYGVILTALFLRVKFSRSADAPAYQQGQNQLYNELNLGRREEYDVLDKRRGRDPEMGGKPQRRKNPQEGLYNELQKDKMAEAYSEIGMKGERRRGKGHDGLYQGLSTATKDTYDALHMQALPPRRAKRSGSGVKQTLNFDLLKLAGDVESNPGPSRGHMTEYKPTVRLATRDDVPRAVRTLAAAFADYPATRHTVDPDRHIERVTELQELFLTRVGLDIGKVWVADDGAAVAVWTTPESVEAGAVFAEIGPRMAELSGSRLAAQQQMEGLLAPHRPKEPAWFLATVGVSPDHQGKGLGSAVVLPGVEAAERAGVPAFLETSAPRNLPFYERLGFTVTADVEVPEGPRTWCMTRKPGA

SEQ ID NO: 16967 - protein, 785 aa, Artificial Sequence
  Synthetic Polypeptide
MALPVTALLLPLALLLHAARPDIQMTQSPSSLSASVGDRVTITCKASDHINNWLAWYQQKPGQAPKLLIYGATTLETGVPSRFSGSGSGTDYTLTISSLQPEDFATYYCQQSWNTPWTFGQGTKLEIKRLEGQPKANPTVTLFPPSSEELQANKATLVCLISDFYPGAVTVAWKADGSPVKAGVETTKPSKQSNNKYAASSYLSLTPEQWKSHRSYSCQVTHEGSTVEKTVAPTECSPIKTDVITMDPKDNCSKDANDTLLLQLTNTSAYYMYLLLLLKSVVYFAIITCCLLRRTAFCCNGEKSRAKRSGSGATNFSLLKQAGDVEENPGPTSMDWIWRILFLVGAATGAHSGPEVQLVESGGGLVQAGGSLRLSCAASGRTFSMGWFRQAPGKEREFVAAITYSGGSPYYADSVKGRFTISRDNAKNTVYLQMNSLKPEDTAVYYCAANPTYGSDWNAENWGQGTQVTVSSGSGGGGSGGGGSGGGGSFEQVQLQQPGAELVKPGASVKMSCKASGYAFSSYWINWMKQKPGQGLEWIGQIYPGDGDTNYNGKFKGRATLTADTSSSTAYMQLSSLTSEDSAVYFCARSITTVVGCAMDYWGQGTSVTVSSTRASTKGPSVFPLAPSSKSTSGGTAALGCLVKDYFPEPVTVSWNSGALTSGVHTFPAVLQSSGLYSLSSVVTVPSSSLGTQTYICNVNHKPSNTKVDKRVEPKSCEVKTDSTDHVKPKETENTKQPSKSCHKPKAIVHTEKVNMMSLTVLGLRMLFAKTVAVNFLLTAKLFFL

SEQ ID NO: 16968 - protein, 763 aa, Artificial Sequence
  Synthetic Polypeptide
MALPVTALLLPLALLLHAARPDIQMTQSPSSLSASVGDRVTITCKASDHINNWLAWYQQKPGQAPKLLIYGATTLETGVPSRFSGSGSGTDYTLTISSLQPEDFATYYCQQSWNTPWTFGQGTKLEIKRLEGQPKANPTVTLFPPSSEELQANKATLVCLISDFYPGAVTVAWKADGSPVKAGVETTKPSKQSNNKYAASSYLSLTPEQWKSHRSYSCQVTHEGSTVEKTVAPTECSGRADCGITSASYHQGVLSATILYEILLGKATLYAVLVSALVLMAMVKRKDSRGRAKRSGSGATNFSLLKQAGDVEENPGPTSMDWIWRILFLVGAATGAHSGPEVQLVESGGGLVQAGGSLRLSCAASGRTFSMGWFRQAPGKEREFVAAITYSGGSPYYADSVKGRFTISRDNAKNTVYLQMNSLKPEDTAVYYCAANPTYGSDWNAENWGQGTQVTVSSGSGGGGSGGGGSGGGGSFEQVQLQQPGAELVKPGASVKMSCKASGYAFSSYWINWMKQKPGQGLEWIGQIYPGDGDTNYNGKFKGRATLTADTSSSTAYMQLSSLTSEDSAVYFCARSITTVVGCAMDYWGQGTSVTVSSTRASTKGPSVFPLAPSSKSTSGGTAALGCLVKDYFPEPVTVSWNSGALTSGVHTFPAVLQSSGLYSLSSVVTVPSSSLGTQTYICNVNHKPSNTKVDKRVEPKSCIPEDTFFPSSDVPCDVKLVEKSFETDTNLNFQNLSVIGFRILLLKVAGFNLLMTLRLWSS

SEQ ID NO: 16969 - protein, 763 aa, Artificial Sequence
  Synthetic Polypeptide
MALPVTALLLPLALLLHAARPDIQMTQSPSSLSASVGDRVTITCKASDHINNWLAWYQQKPGQAPKLLIYGATTLETGVPSRFSGSGSGTDYTLTISSLQPEDFATYYCQQSWNTPWTFGQGTKLEIKRLEGQPKANPTVTLFPPSSEELQANKATLVCLISDFYPGAVTVAWKADGSPVKAGVETTKPSKQSNNKYAASSYLSLTPEQWKSHRSYSCQVTHEGSTVEKTVAPTECSGRADCGFTSESYQQGVLSATILYEILLGKATLYAVLVSALVLMAMVKRKDSRGRAKRSGSGATNFSLLKQAGDVEENPGPTSMDWIWRILFLVGAATGAHSGPEVQLVESGGGLVQAGGSLRLSCAASGRTFSMGWFRQAPGKEREFVAAITYSGGSPYYADSVKGRFTISRDNAKNTVYLQMNSLKPEDTAVYYCAANPTYGSDWNAENWGQGTQVTVSSGSGGGGSGGGGSGGGGSFEQVQLQQPGAELVKPGASVKMSCKASGYAFSSYWINWMKQKPGQGLEWIGQIYPGDGDTNYNGKFKGRATLTADTSSSTAYMQLSSLTSEDSAVYFCARSITTVVGCAMDYWGQGTSVTVSSTRASTKGPSVFPLAPSSKSTSGGTAALGCLVKDYFPEPVTVSWNSGALTSGVHTFPAVLQSSGLYSLSSVVTVPSSSLGTQTYICNVNHKPSNTKVDKRVEPKSCIPEDTFFPSPESSCDVKLVEKSFETDTNLNFQNLSVIGFRILLLKVAGFNLLMTLRLWSS

SEQ ID NO: 16970 - protein, 593 aa, Artificial Sequence
  Synthetic Polypeptide
MDWIWRILFLVGAATGAHSGPEVQLVESGGGLVQAGGSLRLSCAASGRTFSMGWFRQAPGKEREFVAAITYSGGSPYYADSVKGRFTISRDNAKNTVYLQMNSLKPEDTAVYYCAANPTYGSDWNAENWGQGTQVTVSSGSGGGGSGGGGSGGGGSFEQVQLQQPGAELVKPGASVKMSCKASGYAFSSYWINWMKQKPGQGLEWIGQIYPGDGDTNYNGKFKGRATLTADTSSSTAYMQLSSLTSEDSAVYFCARSITTVVGCAMDYWGQGTSVTVSSGGGGSGGGGSGGGGSDIQMTQSPSSLSASVGDRVTITCKASDHINNWLAWYQQKPGQAPKLLIYGATTLETGVPSRFSGSGSGTDYTLTISSLQPEDFATYYCQQSWNTPWTFGQGTKLEIKRTRGGGSDGNEEMGGITQTPYKVSISGTTVILTCPQYPGSEILWQHNDKNIGGDEDDKNIGSDEDHLSLKEFSELEQSGYYVCYPRGSKPEDANFYLYLRARVCENCMEMDVMSVATIVIVDICITGGLLLLVYYWSKNRKAKAKPVTRGAGAGGRQRGQNKERPPPVPNPDYEPIRKGQRDLYSGLNQRRI

SEQ ID NO: 16971 - protein, 558 aa, Artificial Sequence
  Synthetic Polypeptide
MDWIWRILFLVGAATGAHSGPEVQLVESGGGLVQAGGSLRLSCAASGRTFSMGWFRQAPGKEREFVAAITYSGGSPYYADSVKGRFTISRDNAKNTVYLQMNSLKPEDTAVYYCAANPTYGSDWNAENWGQGTQVTVSSGSGGGGSGGGGSGGGGSFEQVQLQQPGAELVKPGASVKMSCKASGYAFSSYWINWMKQKPGQGLEWIGQIYPGDGDTNYNGKFKGRATLTADTSSSTAYMQLSSLTSEDSAVYFCARSITTVVGCAMDYWGQGTSVTVSSGGGGSGGGGSGGGGSDIQMTQSPSSLSASVGDRVTITCKASDHINNWLAWYQQKPGQAPKLLIYGATTLETGVPSRFSGSGSGTDYTLTISSLQPEDFATYYCQQSWNTPWTFGQGTKLEIKRTRGGGSFKIPIEELEDRVFVNCNTSITWVEGTVGTLLSDITRLDLGKRILDPRGIYRCNGTDIYKDKESTVQVHYRMCQSCVELDPATVAGIIVTDVIATLLLALGVFCFAGHETGRLSGAADTQALLRNDQVYQPLRDRDDAQYSHLGGNWARNK

SEQ ID NO: 16972 - protein, 568 aa, Artificial Sequence
  Synthetic Polypeptide
MDWIWRILFLVGAATGAHSGPEVQLVESGGGLVQAGGSLRLSCAASGRTFSMGWFRQAPGKEREFVAAITYSGGSPYYADSVKGRFTISRDNAKNTVYLQMNSLKPEDTAVYYCAANPTYGSDWNAENWGQGTQVTVSSGSGGGGSGGGGSGGGGSFEQVQLQQPGAELVKPGASVKMSCKASGYAFSSYWINWMKQKPGQGLEWIGQIYPGDGDTNYNGKFKGRATLTADTSSSTAYMQLSSLTSEDSAVYFCARSITTVVGCAMDYWGQGTSVTVSSGGGGSGGGGSGGGGSDIQMTQSPSSLSASVGDRVTITCKASDHINNWLAWYQQKPGQAPKLLIYGATTLETGVPSRFSGSGSGTDYTLTISSLQPEDFATYYCQQSWNTPWTFGQGTKLEIKRTRGGGSQSIKGNHLVKVYDYQEDGSVLLTCDAEAKNITWFKDGKMIGFLTEDKKKWNLGSNAKDPRGMYQCKGSQNKSKPLQVYYRMCQNCIELNAATISGFLFAEIVSIFVLAVGVYFIAGQDGVRQSRASDKQTLLPNDQLYQPLKDREDDQYSHLQGNQLRRN

SEQ ID NO: 16973 - protein, 551 aa, Artificial Sequence
  Synthetic Polypeptide
MDWIWRILFLVGAATGAHSGPEVQLVESGGGLVQAGGSLRLSCAASGRTFSMGWFRQAPGKEREFVAAITYSGGSPYYADSVKGRFTISRDNAKNTVYLQMNSLKPEDTAVYYCAANPTYGSDWNAENWGQGTQVTVSSGSGGGGSGGGGSGGGGSFEQVQLQQPGAELVKPGASVKMSCKASGYAFSSYWINWMKQKPGQGLEWIGQIYPGDGDTNYNGKFKGRATLTADTSSSTAYMQLSSLTSEDSAVYFCARSITTVVGCAMDYWGQGTSVTVSSGGGGSGGGGSGGGGSDIQMTQSPSSLSASVGDRVTITCKASDHINNWLAWYQQKPGQAPKLLIYGATTLETGVPSRFSGSGSGTDYTLTISSLQPEDFATYYCQQSWNTPWTFGQGTKLEIKRTRGGGSQSFGLLDPKLCYLLDGILFIYGVILTALFLRVKFSRSADAPAYQQGQNQLYNELNLGRREEYDVLDKRRGRDPEMGGKPQRRKNPQEGLYNELQKDKMAEAYSEIGMKGERRRGKGHDGLYQGLSTATKDTYDALHMQALPPR

SEQ ID NO: 16974 - protein, 587 aa, Artificial Sequence
  Synthetic Polypeptide
MDWIWRILFLVGAATGAHSGPEVQLVESGGGLVQAGGSLRLSCAASGRTFSMGWFRQAPGKEREFVAAITYSGGSPYYADSVKGRFTISRDNAKNTVYLQMNSLKPEDTAVYYCAANPTYGSDWNAENWGQGTQVTVSSGSGGGGSGGGGSGGGGSFEQVQLQQPGAELVKPGASVKMSCKASGYAFSSYWINWMKQKPGQGLEWIGQIYPGDGDTNYNGKFKGRATLTADTSSSTAYMQLSSLTSEDSAVYFCARSITTVVGCAMDYWGQGTSVTVSSTRIQNPDPAVYQLRDSKSSDKSVCLFTDFDSQTNVSQSKDSDVYITDKTVLDMRSMDFKSNSAVAWSNKSDFACANAFNNSIIPEDTFFPSPESSCDVKLVEKSFETDTNLNFQNLSVIGFRILLLKVAGFNLLMTLRLWSSRAKRSGSGVKQTLNFDLLKLAGDVESNPGPSRGHMAKPLSQEESTLIERATATINSIPISEDYSVASAALSSDGRIFTGVNVYHFTGGPCAELVVLGTAAAAAAGNLTCIVAIGNENRGILSPCGRCRQVLLDLHPGIKAIVKDSDGQPTAVGIRELLPSGYVWEG

SEQ ID NO: 16975 - protein, 421 aa, Artificial Sequence
  Synthetic Polypeptide
MDWIWRILFLVGAATGAHSGPEVQLVESGGGLVQAGGSLRLSCAASGRTFSMGWFRQAPGKEREFVAAITYSGGSPYYADSVKGRFTISRDNAKNTVYLQMNSLKPEDTAVYYCAANPTYGSDWNAENWGQGTQVTVSSGSGGGGSGGGGSGGGGSFEQVQLQQPGAELVKPGASVKMSCKASGYAFSSYWINWMKQKPGQGLEWIGQIYPGDGDTNYNGKFKGRATLTADTSSSTAYMQLSSLTSEDSAVYFCARSITTVVGCAMDYWGQGTSVTVSSTRIQNPDPAVYQLRDSKSSDKSVCLFTDFDSQTNVSQSKDSDVYITDKTVLDMRSMDFKSNSAVAWSNKSDFACANAFNNSIIPEDTFFPSPESSCDVKLVEKSFETDTNLNFQNLSVIGFRILLLKVAGFNLLMTLRLWSS

SEQ ID NO: 16976 - protein, 599 aa, Artificial Sequence
  Synthetic Polypeptide
MDWIWRILFLVGAATGAHSGPEVQLVESGGGLVQAGGSLRLSCAASGRTFSMGWFRQAPGKEREFVAAITYSGGSPYYADSVKGRFTISRDNAKNTVYLQMNSLKPEDTAVYYCAANPTYGSDWNAENWGQGTQVTVSSGSGGGGSGGGGSGGGGSFEQVQLQQPGAELVKPGASVKMSCKASGYAFSSYWINWMKQKPGQGLEWIGQIYPGDGDTNYNGKFKGRATLTADTSSSTAYMQLSSLTSEDSAVYFCARSITTVVGCAMDYWGQGTSVTVSSTREQKLISEEDGSGIQNPDPAVYQLRDSKSSDKSVCLFTDFDSQTNVSQSKDSDVYITDKCVLDMRSMDFKSNSAVAWSNKSDFACANAFNNSIIPEDTFFPSPESSCDVKLVEKSFETDTNLNFQNLSVIGFRILLLKVAGFNLLMTLRLWSSRAKRSGSGVKQTLNFDLLKLAGDVESNPGPSRGHMAKPLSQEESTLIERATATINSIPISEDYSVASAALSSDGRIFTGVNVYHFTGGPCAELVVLGTAAAAAAGNLTCIVAIGNENRGILSPCGRCRQVLLDLHPGIKAIVKDSDGQPTAVGIRELLPSGYVWEG

SEQ ID NO: 16977 - protein, 433 aa, Artificial Sequence
  Synthetic Polypeptide
MDWIWRILFLVGAATGAHSGPEVQLVESGGGLVQAGGSLRLSCAASGRTFSMGWFRQAPGKEREFVAAITYSGGSPYYADSVKGRFTISRDNAKNTVYLQMNSLKPEDTAVYYCAANPTYGSDWNAENWGQGTQVTVSSGSGGGGSGGGGSGGGGSFEQVQLQQPGAELVKPGASVKMSCKASGYAFSSYWINWMKQKPGQGLEWIGQIYPGDGDTNYNGKFKGRATLTADTSSSTAYMQLSSLTSEDSAVYFCARSITTVVGCAMDYWGQGTSVTVSSTREQKLISEEDGSGIQNPDPAVYQLRDSKSSDKSVCLFTDFDSQTNVSQSKDSDVYITDKCVLDMRSMDFKSNSAVAWSNKSDFACANAFNNSIIPEDTFFPSPESSCDVKLVEKSFETDTNLNFQNLSVIGFRILLLKVAGFNLLMTLRLWSS

SEQ ID NO: 16978 - protein, 1129 aa, Artificial Sequence
  Synthetic Polypeptide
MALPVTALLLPLALLLHAARPEVQVLESGGGLVQPGGSLRLSCAASGFTFSNFAMSWVRQAPGKGLEWVSTISGSAGTTDYADSVKGRFTISRDNSKKTLYLQMNSLRVEDTAVYYCADGRGPFFDYRGQGTLVTVSSGTGGGGSGGGGSGGGGSEFDIQMTQSPSSLSASVGDRVTITCKASDHINNWLAWYQQKPGQAPKLLIYGATTLETGVPSRFSGSGSGTDYTLTISSLQPEDFATYYCQQSWNTPWTFGQGTKLEIKRLEIQNPDPAVYQLRDSKSSDKSVCLFTDFDSQTNVSQSKDSDVYITDKCVLDMRSMDFKSNSAVAWSNKSDFACANAFNNSIIPEDTFFPSSDVPCDVKLVEKSFETDTNLNFQNLSVIGFRILLLKVAGFNLLMTLRLWSSRAKRSGSGVKQTLNFDLLKLAGDVESNPGPTSMDWIWRILFLVGAATGAHSGPEVQLVESGGGLVQAGGSLRLSCAASGRTFSMGWFRQAPGKEREFVAAITYSGGSPYYADSVKGRFTISRDNAKNTVYLQMNSLKPEDTAVYYCAANPTYGSDWNAENWGQGTQVTVSSGSGGGGSGGGGSGGGGSFEQVQLQQPGAELVKPGASVKMSCKASGYAFSSYWINWMKQKPGQGLEWIGQIYPGDGDTNYNGKFKGRATLTADTSSSTAYMQLSSLTSEDSAVYFCARSITTVVGCAMDYWGQGTSVTVSSTREDLKNVFPPEVAVFEPSKAEIAHTQKATLVCLATGFYPDHVELSWWVNGKEVHSGVCTDPQPLKEQPALNDSRYCLSSRLRVSATFWQNPRNHFRCQVQFYGLSENDEWTQDRAKPVTQIVSAEAWGRADCGITSASYHQGVLSATILYEILLGKATLYAVLVSALVLMAMVKRKDSRGRAKRSGSGATNFSLLKQAGDVEENPGPSRGHMTEYKPTVRLATRDDVPRAVRTLAAAFADYPATRHTVDPDRHIERVTELQELFLTRVGLDIGKVWVADDGAAVAVWTTPESVEAGAVFAEIGPRMAELSGSRLAAQQQMEGLLAPHRPKEPAWFLATVGVSPDHQGKGLGSAVVLPGVEAAERAGVPAFLETSAPRNLPFYERLGFTVTADVEVPEGPRTWCMTRKPGA

SEQ ID NO: 16979 - protein, 1128 aa, Artificial Sequence
  Synthetic Polypeptide
MALPVTALLLPLALLLHAARPEVQVLESGGGLVQPGGSLRLSCAASGFTFSNFAMSWVRQAPGKGLEWVSTISGSAGTTDYADSVKGRFTISRDNSKKTLYLQMNSLRVEDTAVYYCADGRGPFFDYRGQGTLVTVSSGTGGGGSGGGGSGGGGSEFDIQMTQSPSSLSASVGDRVTITCKASDHINNWLAWYQQKPGQAPKLLIYGATTLETGVPSRFSGSGSGTDYTLTISSLQPEDFATYYCQQSWNTPWTFGQGTKLEIKRLEDLKNVFPPEVAVFEPSKAEIAHTQKATLVCLATGFYPDHVELSWWVNGKEVHSGVCTDPQPLKEQPALNDSRYCLSSRLRVSATFWQNPRNHFRCQVQFYGLSENDEWTQDRAKPVTQIVSAEAWGRADCGITSASYHQGVLSATILYEILLGKATLYAVLVSALVLMAMVKRKDSRGRAKRSGSGATNFSLLKQAGDVEENPGPTSMDWIWRILFLVGAATGAHSGPEVQLVESGGGLVQAGGSLRLSCAASGRTFSMGWFRQAPGKEREFVAAITYSGGSPYYADSVKGRFTISRDNAKNTVYLQMNSLKPEDTAVYYCAANPTYGSDWNAENWGQGTQVTVSSGSGGGGSGGGGSGGGGSFEQVQLQQPGAELVKPGASVKMSCKASGYAFSSYWINWMKQKPGQGLEWIGQIYPGDGDTNYNGKFKGRATLTADTSSSTAYMQLSSLTSEDSAVYFCARSITTVVGCAMDYWGQGTSVTVSSTRIQNPDPAVYQLRDSKSSDKSVCLFTDFDSQTNVSQSKDSDVYITDKCVLDMRSMDFKSNSAVAWSNKSDFACANAFNNSIIPEDTFFPSSDVPCDVKLVEKSFETDTNLNFQNLSVIGFRILLLKVAGFNLLMTLRLWSSRAKRSGSGVKQTLNFDLLKLAGDVESNPGPSRGHMTEYKPTVRLATRDDVPRAVRTLAAAFADYPATRHTVDPDRHIERVTELQELFLTRVGLDIGKVWVADDGAAVAVWTTPESVEAGAVFAEIGPRMAELSGSRLAAQQQMEGLLAPHRPKEPAWFLATVGVSPDHQGKGLGSAVVLPGVEAAERAGVPAFLETSAPRNLPFYERLGFTVTADVEVPEGPRTWCMTRKPGA

SEQ ID NO: 16980 - protein, 1128 aa, Artificial Sequence
  Synthetic Polypeptide
MALPVTALLLPLALLLHAARPEVQVLESGGGLVQPGGSLRLSCAASGFTFSNFAMSWVRQAPGKGLEWVSTISGSAGTTDYADSVKGRFTISRDNSKKTLYLQMNSLRVEDTAVYYCADGRGPFFDYRGQGTLVTVSSGTGGGGSGGGGSGGGGSEFDIQMTQSPSSLSASVGDRVTITCKASDHINNWLAWYQQKPGQAPKLLIYGATTLETGVPSRFSGSGSGTDYTLTISSLQPEDFATYYCQQSWNTPWTFGQGTKLEIKRLEDLKNVFPPEVAVFEPSEAEISHTQKATLVCLATGFYPDHVELSWWVNGKEVHSGVCTDPQPLKEQPALNDSRYCLSSRLRVSATFWQNPRNHFRCQVQFYGLSENDEWTQDRAKPVTQIVSAEAWGRADCGFTSESYQQGVLSATILYEILLGKATLYAVLVSALVLMAMVKRKDSRGRAKRSGSGATNFSLLKQAGDVEENPGPTSMDWIWRILFLVGAATGAHSGPEVQLVESGGGLVQAGGSLRLSCAASGRTFSMGWFRQAPGKEREFVAAITYSGGSPYYADSVKGRFTISRDNAKNTVYLQMNSLKPEDTAVYYCAANPTYGSDWNAENWGQGTQVTVSSGSGGGGSGGGGSGGGGSFEQVQLQQPGAELVKPGASVKMSCKASGYAFSSYWINWMKQKPGQGLEWIGQIYPGDGDTNYNGKFKGRATLTADTSSSTAYMQLSSLTSEDSAVYFCARSITTVVGCAMDYWGQGTSVTVSSTRIQNPDPAVYQLRDSKSSDKSVCLFTDFDSQTNVSQSKDSDVYITDKCVLDMRSMDFKSNSAVAWSNKSDFACANAFNNSIIPEDTFFPSPESSCDVKLVEKSFETDTNLNFQNLSVIGFRILLLKVAGFNLLMTLRLWSSRAKRSGSGVKQTLNFDLLKLAGDVESNPGPSRGHMTEYKPTVRLATRDDVPRAVRTLAAAFADYPATRHTVDPDRHIERVTELQELFLTRVGLDIGKVWVADDGAAVAVWTTPESVEAGAVFAEIGPRMAELSGSRLAAQQQMEGLLAPHRPKEPAWFLATVGVSPDHQGKGLGSAVVLPGVEAAERAGVPAFLETSAPRNLPFYERLGFTVTADVEVPEGPRTWCMTRKPGA

SEQ ID NO: 16981 - protein, 895 aa, Artificial Sequence
  Synthetic Polypeptide
MALPVTALLLPLALLLHAARPEVQVLESGGGLVQPGGSLRLSCAASGFTFSNFAMSWVRQAPGKGLEWVSTISGSAGTTDYADSVKGRFTISRDNSKKTLYLQMNSLRVEDTAVYYCADGRGPFFDYRGQGTLVTVSSGTGGGGSGGGGSGGGGSEFDIQMTQSPSSLSASVGDRVTITCKASDHINNWLAWYQQKPGQAPKLLIYGATTLETGVPSRFSGSGSGTDYTLTISSLQPEDFATYYCQQSWNTPWTFGQGTKLEIKRLEDLKNVFPPEVAVFEPSEAEISHTQKATLVCLATGFYPDHVELSWWVNGKEVHSGVCTDPQPLKEQPALNDSRYCLSSRLRVSATFWQNPRNHFRCQVQFYGLSENDEWTQDRAKPVTQIVSAEAWGRADCGFTSESYQQGVLSATILYEILLGKATLYAVLVSALVLMAMVKRKDSRGRAKRSGSGATNFSLLKQAGDVEENPGPTSMDWIWRILFLVGAATGAHSGPEVQLVESGGGLVQAGGSLRLSCAASGRTFSMGWFRQAPGKEREFVAAITYSGGSPYYADSVKGRFTISRDNAKNTVYLQMNSLKPEDTAVYYCAANPTYGSDWNAENWGQGTQVTVSSGSGGGGSGGGGSGGGGSFEQVQLQQPGAELVKPGASVKMSCKASGYAFSSYWINWMKQKPGQGLEWIGQIYPGDGDTNYNGKFKGRATLTADTSSSTAYMQLSSLTSEDSAVYFCARSITTVVGCAMDYWGQGTSVTVSSTRIQNPDPAVYQLRDSKSSDKSVCLFTDFDSQTNVSQSKDSDVYITDKCVLDMRSMDFKSNSAVAWSNKSDFACANAFNNSIIPEDTFFPSPESSCDVKLVEKSFETDTNLNFQNLSVIGFRILLLKVAGFNLLMTLRLWSS

SEQ ID NO: 16982 - protein, 1120 aa, Artificial Sequence
  Synthetic Polypeptide
MALPVTALLLPLALLLHAARPEVQVLESGGGLVQPGGSLRLSCAASGFTFSNFAMSWVRQAPGKGLEWVSTISGSAGTTDYADSVKGRFTISRDNSKKTLYLQMNSLRVEDTAVYYCADGRGPFFDYRGQGTLVTVSSGTGGGGSGGGGSGGGGSEFDIQMTQSPSSLSASVGDRVTITCKASDHINNWLAWYQQKPGQAPKLLIYGATTLETGVPSRFSGSGSGTDYTLTISSLQPEDFATYYCQQSWNTPWTFGQGTKLEIKRLEDLKNVFPPEVAVFEPSEAEISHTQKATLVCLATGFYPDHVELSWWVNGKEVHSGVCTDPQPLKEQPALNDSRYCLSSRLRVSATFWQNPRNHFRCQVQFYGLSENDEWTQDRAKPVTQIVSAEAWGRADCGFTSESYQQGVLSATILYEILLGKATLYAVLVSALVLMAMVKRKDSRGRAKRSGSGATNFSLLKQAGDVEENPGPTSMDWIWRILFLVGAATGAHSGPEVQLVESGGGLVQAGGSLRLSCAASGRTFSMGWFRQAPGKEREFVAAITYSGGSPYYADSVKGRFTISRDNAKNTVYLQMNSLKPEDTAVYYCAANPTYGSDWNAENWGQGTQVTVSSGSGGGGSGGGGSGGGGSFEQVQLQQPGAELVKPGASVKMSCKASGYAFSSYWINWMKQKPGQGLEWIGQIYPGDGDTNYNGKFKGRATLTADTSSSTAYMQLSSLTSEDSAVYFCARSITTVVGCAMDYWGQGTSVTVSSTRIQNPDPAVYQLRDSKSSDKSVCLFTDFDSQTNVSQSKDSDVYITDKCVLDMRSMDFKSNSAVAWSNKSDFACANAFNNSIIPEDTFFPSPESSCDVKLVEKSFETDTNLNFQNLSVIGFRILLLKVAGFNLLMTLRLWSSRAKRSGSGVKQTLNFDLLKLAGDVESNPGPSRGGIHTMATYEVLCEVARKLGTDDREVVLFLLNVFIPQPTLAQLIGALRALKEEGRLTFPLLAECLFRAGRRDLLRDLLHLDPRFLERHLAGTMSYFSPYQLTVLHVDGELCARDIRSLIFLSKDTIGSRSTPQTFLHWVYCMENLDLLGPTDVDALMSMLRSLSRVDLQRQVQTLMGLHLSGPSHSQHYRHTP

SEQ ID NO: 16983 - protein, 899 aa, Artificial Sequence
  Synthetic Polypeptide
MALPVTALLLPLALLLHAARPEVQVLESGGGLVQPGGSLRLSCAASGFTFSNFAMSWVRQAPGKGLEWVSTISGSAGTTDYADSVKGRFTISRDNSKKTLYLQMNSLRVEDTAVYYCADGRGPFFDYRGQGTLVTVSSGTGGGGSGGGGSGGGGSEFDIQMTQSPSSLSASVGDRVTITCKASDHINNWLAWYQQKPGQAPKLLIYGATTLETGVPSRFSGSGSGTDYTLTISSLQPEDFATYYCQQSWNTPWTFGQGTKLEIKRLEIQNPDPAVYQLRDSKSSDKSVCLFTDFDSQTNVSQSKDSDVYITDKCVLDMRSMDFKSNSAVAWSNKSDFACANAFNNSIIPEDTFFPSPESSCDVKLVEKSFETDTNLNFQNLSVIGFRILLLKVAGFNLLMTLRLWSSRAKRSGSGVKQTLNFDLLKLAGDVESNPGPTSMDWIWRILFLVGAATGAHSGPEVQLVESGGGLVQAGGSLRLSCAASGRTFSMGWFRQAPGKEREFVAAITYSGGSPYYADSVKGRFTISRDNAKNTVYLQMNSLKPEDTAVYYCAANPTYGSDWNAENWGQGTQVTVSSGSGGGGSGGGGSGGGGSFEQVQLQQPGAELVKPGASVKMSCKASGYAFSSYWINWMKQKPGQGLEWIGQIYPGDGDTNYNGKFKGRATLTADTSSSTAYMQLSSLTSEDSAVYFCARSITTVVGCAMDYWGQGTSVTVSSTREDLKNVFPPEVAVFEPSEAEISHTQKATLVCLATGFYPDHVELSWWVNGKEVHSGVCTDPQPLKEQPALNDSRYCLSSRLRVSATFWQNPRNHFRCQVQFYGLSENDEWTQDRAKPVTQIVSAEAWGRADCGFTSESYQQGVLSATILYEILLGKATLYAVLVSALVLMAMVKRKDSRG

SEQ ID NO: 16984 - protein, 1121 aa, Artificial Sequence
  Synthetic Polypeptide
MALPVTALLLPLALLLHAARPEVQVLESGGGLVQPGGSLRLSCAASGFTFSNFAMSWVRQAPGKGLEWVSTISGSAGTTDYADSVKGRFTISRDNSKKTLYLQMNSLRVEDTAVYYCADGRGPFFDYRGQGTLVTVSSGTGGGGSGGGGSGGGGSEFDIQMTQSPSSLSASVGDRVTITCKASDHINNWLAWYQQKPGQAPKLLIYGATTLETGVPSRFSGSGSGTDYTLTISSLQPEDFATYYCQQSWNTPWTFGQGTKLEIKRLEIQNPDPAVYQLRDSKSSDKSVCLFTDFDSQTNVSQSKDSDVYITDKCVLDMRSMDFKSNSAVAWSNKSDFACANAFNNSIIPEDTFFPSPESSCDVKLVEKSFETDTNLNFQNLSVIGFRILLLKVAGFNLLMTLRLWSSRAKRSGSGVKQTLNFDLLKLAGDVESNPGPTSMDWIWRILFLVGAATGAHSGPEVQLVESGGGLVQAGGSLRLSCAASGRTFSMGWFRQAPGKEREFVAAITYSGGSPYYADSVKGRFTISRDNAKNTVYLQMNSLKPEDTAVYYCAANPTYGSDWNAENWGQGTQVTVSSGSGGGGSGGGGSGGGGSFEQVQLQQPGAELVKPGASVKMSCKASGYAFSSYWINWMKQKPGQGLEWIGQIYPGDGDTNYNGKFKGRATLTADTSSSTAYMQLSSLTSEDSAVYFCARSITTVVGCAMDYWGQGTSVTVSSTREDLKNVFPPEVAVFEPSEAEISHTQKATLVCLATGFYPDHVELSWWVNGKEVHSGVCTDPQPLKEQPALNDSRYCLSSRLRVSATFWQNPRNHFRCQVQFYGLSENDEWTQDRAKPVTQIVSAEAWGRADCGFTSESYQQGVLSATILYEILLGKATLYAVLVSALVLMAMVKRKDSRGRAKRSGSGATNFSLLKQAGDVEENPGPSRGGIHTMATYEVLCEVARKLGTDDREVVLFLLNVFIPQPTLAQLIGALRALKEEGRLTFPLLAECLFRAGRRDLLRDLLHLDPRFLERHLAGTMSYFSPYQLTVLHVDGELCARDIRSLIFLSKDTIGSRSTPQTFLHWVYCMENLDLLGPTDVDALMSMLRSLSRVDLQRQVQTLMGLHLSGPSHSQHYRHTP

SEQ ID NO: 16985 - protein, 1128 aa, Artificial Sequence
  Synthetic Polypeptide
MALPVTALLLPLALLLHAARPEVQVLESGGGLVQPGGSLRLSCAASGFTFSNFAMSWVRQAPGKGLEWVSTISGSAGTTDYADSVKGRFTISRDNSKKTLYLQMNSLRVEDTAVYYCADGRGPFFDYRGQGTLVTVSSGTGGGGSGGGGSGGGGSEFDIQMTQSPSSLSASVGDRVTITCKASDHINNWLAWYQQKPGQAPKLLIYGATTLETGVPSRFSGSGSGTDYTLTISSLQPEDFATYYCQQSWNTPWTFGQGTKLEIKRLEDLKNVFPPEVAVFEPSEAEISHTQKATLVCLATGFYPDHVELSWWVNGKEVHSGVSTDPQPLKEQPALNDSRYCLSSRLRVSATFWQNPRNHFRCQVQFYGLSENDEWTQDRAKPVTQIVSAEAWGRADCGFTSESYQQGVLSATILYEILLGKATLYAVLVSALVLMAMVKRKDSRGRAKRSGSGATNFSLLKQAGDVEENPGPTSMDWIWRILFLVGAATGAHSGPEVQLVESGGGLVQAGGSLRLSCAASGRTFSMGWFRQAPGKEREFVAAITYSGGSPYYADSVKGRFTISRDNAKNTVYLQMNSLKPEDTAVYYCAANPTYGSDWNAENWGQGTQVTVSSGSGGGGSGGGGSGGGGSFEQVQLQQPGAELVKPGASVKMSCKASGYAFSSYWINWMKQKPGQGLEWIGQIYPGDGDTNYNGKFKGRATLTADTSSSTAYMQLSSLTSEDSAVYFCARSITTVVGCAMDYWGQGTSVTVSSTRIQNPDPAVYQLRDSKSSDKSVCLFTDFDSQTNVSQSKDSDVYITDKTVLDMRSMDFKSNSAVAWSNKSDFACANAFNNSIIPEDTFFPSPESSCDVKLVEKSFETDTNLNFQNLSVIGFRILLLKVAGFNLLMTLRLWSSRAKRSGSGVKQTLNFDLLKLAGDVESNPGPSRGHMTEYKPTVRLATRDDVPRAVRTLAAAFADYPATRHTVDPDRHIERVTELQELFLTRVGLDIGKVWVADDGAAVAVWTTPESVEAGAVFAEIGPRMAELSGSRLAAQQQMEGLLAPHRPKEPAWFLATVGVSPDHQGKGLGSAVVLPGVEAAERAGVPAFLETSAPRNLPFYERLGFTVTADVEVPEGPRTWCMTRKPGA

SEQ ID NO: 16986 - protein, 1210 aa, Artificial Sequence
  Synthetic Polypeptide
MALPVTALLLPLALLLHAARPEVQVLESGGGLVQPGGSLRLSCAASGFTFSNFAMSWVRQAPGKGLEWVSTISGSAGTTDYADSVKGRFTISRDNSKKTLYLQMNSLRVEDTAVYYCADGRGPFFDYRGQGTLVTVSSGTGGGGSGGGGSGGGGSEFDIQMTQSPSSLSASVGDRVTITCKASDHINNWLAWYQQKPGQAPKLLIYGATTLETGVPSRFSGSGSGTDYTLTISSLQPEDFATYYCQQSWNTPWTFGQGTKLEIKRLEDLKNVFPPEVAVFEPSEAEISHTQKATLVCLATGFYPDHVELSWWVNGKEVHSGVSTDPQPLKEQPALNDSRYCLSSRLRVSATFWQNPRNHFRCQVQFYGLSENDEWTQDRAKPVTQIVSAEAWGRADCGFTSESYQQGVLSATILYEILLGKATLYAVLVSALVLMAMVKRKDSRGRAKRSGSGATNFSLLKQAGDVEENPGPTSMDWIWRILFLVGAATGAHSGPEVQLVESGGGLVQAGGSLRLSCAASGRTFSMGWFRQAPGKEREFVAAITYSGGSPYYADSVKGRFTISRDNAKNTVYLQMNSLKPEDTAVYYCAANPTYGSDWNAENWGQGTQVTVSSGSGGGGSGGGGSGGGGSFEQVQLQQPGAELVKPGASVKMSCKASGYAFSSYWINWMKQKPGQGLEWIGQIYPGDGDTNYNGKFKGRATLTADTSSSTAYMQLSSLTSEDSAVYFCARSITTVVGCAMDYWGQGTSVTVSSTREQKLISEEDGSGTPFPSLAPPIMLLVDGKQQMVVVCLVLDVAPPGLDSPIWFSAGNGSALDAFTYGPSPATDGTWTNLAHLSLPSEELASWEPLVCHTGPGAEGHSRSTQPMHLSGEASTARTCPQEPLRGTPGGALWLGVLRLLLFKLLLFDLLLTCSCLCDPAGPLPSPATTTRLRALGSHRLHPATETGGREATSSPRPQPRDRRWGDTPPGRKPGSPVRAKRSGSGVKQTLNFDLLKLAGDVESNPGPSRGHMTEYKPTVRLATRDDVPRAVRTLAAAFADYPATRHTVDPDRHIERVTELQELFLTRVGLDIGKVWVADDGAAVAVWTTPESVEAGAVFAEIGPRMAELSGSRLAAQQQMEGLLAPHRPKEPAWFLATVGVSPDHQGKGLGSAVVLPGVEAAERAGVPAFLETSAPRNLPFYERLGFTVTADVEVPEGPRTWCMTRKPGA

SEQ ID NO: 16987 - protein, 1165 aa, Artificial Sequence
  Synthetic Polypeptide
MALPVTALLLPLALLLHAARPEVQVLESGGGLVQPGGSLRLSCAASGFTFSNFAMSWVRQAPGKGLEWVSTISGSAGTTDYADSVKGRFTISRDNSKKTLYLQMNSLRVEDTAVYYCADGRGPFFDYRGQGTLVTVSSGTGGGGSGGGGSGGGGSEFDIQMTQSPSSLSASVGDRVTITCKASDHINNWLAWYQQKPGQAPKLLIYGATTLETGVPSRFSGSGSGTDYTLTISSLQPEDFATYYCQQSWNTPWTFGQGTKLEIKRLEGKPIPNPLLGLDSTGSGDKQLDADVSPKPTIFLPSIAETKLQKAGTYLCLLEKFFPDVIKIHWQEKKSNTILGSQEGNTMKTNDTYMKFSWLTVPEKSLDKEHRCIVRHENNKNGVDQEIIFPPIKTDVITMDPKDNCSKDANDTLLLQLTNTSAYYMYLLLLLKSVVYFAIITCCLLRRTAFCCNGEKSRAKRSGSGATNFSLLKQAGDVEENPGPTSMDWIWRILFLVGAATGAHSGPEVQLVESGGGLVQAGGSLRLSCAASGRTFSMGWFRQAPGKEREFVAAITYSGGSPYYADSVKGRFTISRDNAKNTVYLQMNSLKPEDTAVYYCAANPTYGSDWNAENWGQGTQVTVSSGSGGGGSGGGGSGGGGSFEQVQLQQPGAELVKPGASVKMSCKASGYAFSSYWINWMKQKPGQGLEWIGQIYPGDGDTNYNGKFKGRATLTADTSSSTAYMQLSSLTSEDSAVYFCARSITTVVGCAMDYWGQGTSVTVSSTREQKLISEEDGSGSQPHTKPSVFVMKNGTNVACLVKEFYPKDIRINLVSSKKITEFDPAIVISPSGKYNAVKLGKYEDSNSVTCSVQHDNKTVHSTDFEVKTDSTDHVKPKETENTKQPSKSCHKPKAIVHTEKVNMMSLTVLGLRMLFAKTVAVNFLLTAKLFFLRAKRSGSGVKQTLNFDLLKLAGDVESNPGPSRGHMTEYKPTVRLATRDDVPRAVRTLAAAFADYPATRHTVDPDRHIERVTELQELFLTRVGLDIGKVWVADDGAAVAVWTTPESVEAGAVFAEIGPRMAELSGSRLAAQQQMEGLLAPHRPKEPAWFLATVGVSPDHQGKGLGSAVVLPGVEAAERAGVPAFLETSAPRNLPFYERLGFTVTADVEVPEGPRTWCMTRKPGA

SEQ ID NO: 16988 - protein, 903 aa, Artificial Sequence
  Synthetic Polypeptide
MALPVTALLLPLALLLHAARPEVQVLESGGGLVQPGGSLRLSCAASGFTFSNFAMSWVRQAPGKGLEWVSTISGSAGTTDYADSVKGRFTISRDNSKKTLYLQMNSLRVEDTAVYYCADGRGPFFDYRGQGTLVTVSSGTGGGGSGGGGSGGGGSEFDIQMTQSPSSLSASVGDRVTITCKASDHINNWLAWYQQKPGQAPKLLIYGATTLETGVPSRFSGSGSGTDYTLTISSLQPEDFATYYCQQSWNTPWTFGQGTKLEIKRLESQPHTKPSVFVMKNGTNVACLVKEFYPKDIRINLVSSKKITEFDPAIVISPSGKYNAVKLGKYEDSNSVTCSVQHDNKTVHSTDFEVKTDSTDHVKPKETENTKQPSKSCHKPKAIVHTEKVNMMSLTVLGLRMLFAKTVAVNFLLTAKLFFLRAKRSGSGATNFSLLKQAGDVEENPGPTSMDWIWRILFLVGAATGAHSGPEVQLVESGGGLVQAGGSLRLSCAASGRTFSMGWFRQAPGKEREFVAAITYSGGSPYYADSVKGRFTISRDNAKNTVYLQMNSLKPEDTAVYYCAANPTYGSDWNAENWGQGTQVTVSSGSGGGGSGGGGSGGGGSFEQVQLQQPGAELVKPGASVKMSCKASGYAFSSYWINWMKQKPGQGLEWIGQIYPGDGDTNYNGKFKGRATLTADTSSSTAYMQLSSLTSEDSAVYFCARSITTVVGCAMDYWGQGTSVTVSSTRDKQLDADVSPKPTIFLPSIAETKLQKAGTYLCLLEKFFPDVIKIHWQEKKSNTILGSQEGNTMKTNDTYMKFSWLTVPEKSLDKEHRCIVRHENNKNGVDQEIIFPPIKTDVITMDPKDNCSKDANDTLLLQLTNTSAYYMYLLLLLKSVVYFAIITCCLLRRTAFCCNGEKS

SEQ ID NO: 16989 - protein, 1305 aa, Artificial Sequence
  Synthetic Polypeptide
MALPVTALLLPLALLLHAARPEVQVLESGGGLVQPGGSLRLSCAASGFTFSNFAMSWVRQAPGKGLEWVSTISGSAGTTDYADSVKGRFTISRDNSKKTLYLQMNSLRVEDTAVYYCADGRGPFFDYRGQGTLVTVSSGTGGGGSGGGGSGGGGSEFDIQMTQSPSSLSASVGDRVTITCKASDHINNWLAWYQQKPGQAPKLLIYGATTLETGVPSRFSGSGSGTDYTLTISSLQPEDFATYYCQQSWNTPWTFGQGTKLEIKRGQPKANPTVTLFPPSSEELQANKATLVCLISDFYPGAVTVAWKADGSPVKAGVETTKPSKQSNNKYAASSYLSLTPEQWKSHRSYSCQVTHEGSTVEKTVAPTECSGSQSFGLLDPKLCYLLDGILFIYGVILTALFLRVKFSRSADAPAYQQGQNQLYNELNLGRREEYDVLDKRRGRDPEMGGKPQRRKNPQEGLYNELQKDKMAEAYSEIGMKGERRRGKGHDGLYQGLSTATKDTYDALHMQALPPRRAKRSGSGATNFSLLKQAGDVEENPGPTSMDWIWRILFLVGAATGAHSGPEVQLVESGGGLVQAGGSLRLSCAASGRTFSMGWFRQAPGKEREFVAAITYSGGSPYYADSVKGRFTISRDNAKNTVYLQMNSLKPEDTAVYYCAANPTYGSDWNAENWGQGTQVTVSSGSGGGGSGGGGSGGGGSFEQVQLQQPGAELVKPGASVKMSCKASGYAFSSYWINWMKQKPGQGLEWIGQIYPGDGDTNYNGKFKGRATLTADTSSSTAYMQLSSLTSEDSAVYFCARSITTVVGCAMDYWGQGTSVTVSSASTKGPSVFPLAPSSKSTSGGTAALGCLVKDYFPEPVTVSWNSGALTSGVHTFPAVLQSSGLYSLSSVVTVPSSSLGTQTYICNVNHKPSNTKVDKRVEPKSCGTQSFGLLDPKLCYLLDGILFIYGVILTALFLRVKFSRSADAPAYQQGQNQLYNELNLGRREEYDVLDKRRGRDPEMGGKPQRRKNPQEGLYNELQKDKMAEAYSEIGMKGERRRGKGHDGLYQGLSTATKDTYDALHMQALPPRRAKRSGSGVKQTLNFDLLKLAGDVESNPGPSRGHMTEYKPTVRLATRDDVPRAVRTLAAAFADYPATRHTVDPDRHIERVTELQELFLTRVGLDIGKVWVADDGAAVAVWTTPESVEAGAVFAEIGPRMAELSGSRLAAQQQMEGLLAPHRPKEPAWFLATVGVSPDHQGKGLGSAVVLPGVEAAERAGVPAFLETSAPRNLPFYERLGFTVTADVEVPEGPRTWCMTRKPGA

SEQ ID NO: 16990 - protein, 1091 aa, Artificial Sequence
  Synthetic Polypeptide
MALPVTALLLPLALLLHAARPEVQVLESGGGLVQPGGSLRLSCAASGFTFSNFAMSWVRQAPGKGLEWVSTISGSAGTTDYADSVKGRFTISRDNSKKTLYLQMNSLRVEDTAVYYCADGRGPFFDYRGQGTLVTVSSGTGGGGSGGGGSGGGGSEFDIQMTQSPSSLSASVGDRVTITCKASDHINNWLAWYQQKPGQAPKLLIYGATTLETGVPSRFSGSGSGTDYTLTISSLQPEDFATYYCQQSWNTPWTFGQGTKLEIKRLEDLKNVFPPEVAVFEPSEAEISHTQKATLVCLATGFYPDHVELSWWVNGKEVHSGVSTDPQPLKEQPALNDSRYCLSSRLRVSATFWQNPRNHFRCQVQFYGLSENDEWTQDRAKPVTQIVSAEAWGRADCGSQSFGLLDPKLCYLLDGILFIYGVILTALFLRVKFSRSADAPAYQQGQNQLYNELNLGRREEYDVLDKRRGRDPEMGGKPQRRKNPQEGLYNELQKDKMAEAYSEIGMKGERRRGKGHDGLYQGLSTATKDTYDALHMQALPPRRAKRSGSGATNFSLLKQAGDVEENPGPTSMDWIWRILFLVGAATGAHSGPEVQLVESGGGLVQAGGSLRLSCAASGRTFSMGWFRQAPGKEREFVAAITYSGGSPYYADSVKGRFTISRDNAKNTVYLQMNSLKPEDTAVYYCAANPTYGSDWNAENWGQGTQVTVSSGSGGGGSGGGGSGGGGSFEQVQLQQPGAELVKPGASVKMSCKASGYAFSSYWINWMKQKPGQGLEWIGQIYPGDGDTNYNGKFKGRATLTADTSSSTAYMQLSSLTSEDSAVYFCARSITTVVGCAMDYWGQGTSVTVSSTRIQNPDPAVYQLRDSKSSDKSVCLFTDFDSQTNVSQSKDSDVYITDKTVLDMRSMDFKSNSAVAWSNKSDFACANAFNNSIIPEDTFFPSPESSCGTQSFGLLDPKLCYLLDGILFIYGVILTALFLRVKFSRSADAPAYQQGQNQLYNELNLGRREEYDVLDKRRGRDPEMGGKPQRRKNPQEGLYNELQKDKMAEAYSEIGMKGERRRGKGHDGLYQGLSTATKDTYDALHMQALPPR

SEQ ID NO: 16991 - protein, 1091 aa, Artificial Sequence
  Synthetic Polypeptide
MALPVTALLLPLALLLHAARPEVQVLESGGGLVQPGGSLRLSCAASGFTFSNFAMSWVRQAPGKGLEWVSTISGSAGTTDYADSVKGRFTISRDNSKKTLYLQMNSLRVEDTAVYYCADGRGPFFDYRGQGTLVTVSSGTGGGGSGGGGSGGGGSEFDIQMTQSPSSLSASVGDRVTITCKASDHINNWLAWYQQKPGQAPKLLIYGATTLETGVPSRFSGSGSGTDYTLTISSLQPEDFATYYCQQSWNTPWTFGQGTKLEIKRLEDLKNVFPPEVAVFEPSKAEIAHTQKATLVCLATGFYPDHVELSWWVNGKEVHSGVCTDPQPLKEQPALNDSRYCLSSRLRVSATFWQNPRNHFRCQVQFYGLSENDEWTQDRAKPVTQIVSAEAWGRADCGSQSFGLLDPKLCYLLDGILFIYGVILTALFLRVKFSRSADAPAYQQGQNQLYNELNLGRREEYDVLDKRRGRDPEMGGKPQRRKNPQEGLYNELQKDKMAEAYSEIGMKGERRRGKGHDGLYQGLSTATKDTYDALHMQALPPRRAKRSGSGATNFSLLKQAGDVEENPGPTSMDWIWRILFLVGAATGAHSGPEVQLVESGGGLVQAGGSLRLSCAASGRTFSMGWFRQAPGKEREFVAAITYSGGSPYYADSVKGRFTISRDNAKNTVYLQMNSLKPEDTAVYYCAANPTYGSDWNAENWGQGTQVTVSSGSGGGGSGGGGSGGGGSFEQVQLQQPGAELVKPGASVKMSCKASGYAFSSYWINWMKQKPGQGLEWIGQIYPGDGDTNYNGKFKGRATLTADTSSSTAYMQLSSLTSEDSAVYFCARSITTVVGCAMDYWGQGTSVTVSSTRIQNPDPAVYQLRDSKSSDKSVCLFTDFDSQTNVSQSKDSDVYITDKCVLDMRSMDFKSNSAVAWSNKSDFACANAFNNSIIPEDTFFPSSDVPCGTQSFGLLDPKLCYLLDGILFIYGVILTALFLRVKFSRSADAPAYQQGQNQLYNELNLGRREEYDVLDKRRGRDPEMGGKPQRRKNPQEGLYNELQKDKMAEAYSEIGMKGERRRGKGHDGLYQGLSTATKDTYDALHMQALPPR

SEQ ID NO: 16992 - protein, 1162 aa, Artificial Sequence
  Synthetic Polypeptide
MALPVTALLLPLALLLHAARPEVQVLESGGGLVQPGGSLRLSCAASGFTFSNFAMSWVRQAPGKGLEWVSTISGSAGTTDYADSVKGRFTISRDNSKKTLYLQMNSLRVEDTAVYYCADGRGPFFDYRGQGTLVTVSSGTGGGGSGGGGSGGGGSEFDIQMTQSPSSLSASVGDRVTITCKASDHINNWLAWYQQKPGQAPKLLIYGATTLETGVPSRFSGSGSGTDYTLTISSLQPEDFATYYCQQSWNTPWTFGQGTKLEIKRLEGKPIPNPLLGLDSTGSGEDLKNVFPPEVAVFEPSEAEISHTQKATLVCLATGFYPDHVELSWWVNGKEVHSGVSTDPQPLKEQPALNDSRYCLSSRLRVSATFWQNPRNHFRCQVQFYGLSENDEWTQDRAKPVTQIVSAEAWGRADCGSQSFGLLDPKLCYLLDGILFIYGVILTALFLRVKFSRSADAPAYQQGQNQLYNELNLGRREEYDVLDKRRGRDPEMGGKPQRRKNPQEGLYNELQKDKMAEAYSEIGMKGERRRGKGHDGLYQGLSTATKDTYDALHMQALPPRRAKRSGSGATNFSLLKQAGDVEENPGPTSMDWIWRILFLVGAATGAHSGPEVQLVESGGGLVQAGGSLRLSCAASGRTFSMGWFRQAPGKEREFVAAITYSGGSPYYADSVKGRFTISRDNAKNTVYLQMNSLKPEDTAVYYCAANPTYGSDWNAENWGQGTQVTVSSGSGGGGSGGGGSGGGGSFEQVQLQQPGAELVKPGASVKMSCKASGYAFSSYWINWMKQKPGQGLEWIGQIYPGDGDTNYNGKFKGRATLTADTSSSTAYMQLSSLTSEDSAVYFCARSITTVVGCAMDYWGQGTSVTVSSTREQKLISEEDGSGIQNPDPAVYQLRDSKSSDKSVCLFTDFDSQTNVSQSKDSDVYITDKTVLDMRSMDFKSNSAVAWSNKSDFACANAFNNSIIPEDTFFPSPESSCGTQSFGLLDPKLCYLLDGILFIYGVILTALFLRSKRSRLLHSDYMNMTPRRPGPTRKHYQPYAPPRDFAAYRSRVKFSRSADAPAYQQGQNQLYNELNLGRREEYDVLDKRRGRDPEMGGKPQRRKNPQEGLYNELQKDKMAEAYSEIGMKGERRRGKGHDGLYQGLSTATKDTYDALHMQALPPR

SEQ ID NO: 16993 - protein, 1203 aa, Artificial Sequence
  Synthetic Polypeptide
MALPVTALLLPLALLLHAARPEVQVLESGGGLVQPGGSLRLSCAASGFTFSNFAMSWVRQAPGKGLEWVSTISGSAGTTDYADSVKGRFTISRDNSKKTLYLQMNSLRVEDTAVYYCADGRGPFFDYRGQGTLVTVSSGTGGGGSGGGGSGGGGSEFDIQMTQSPSSLSASVGDRVTITCKASDHINNWLAWYQQKPGQAPKLLIYGATTLETGVPSRFSGSGSGTDYTLTISSLQPEDFATYYCQQSWNTPWTFGQGTKLEIKRLEGKPIPNPLLGLDSTGSGEDLKNVFPPEVAVFEPSEAEISHTQKATLVCLATGFYPDHVELSWWVNGKEVHSGVSTDPQPLKEQPALNDSRYCLSSRLRVSATFWQNPRNHFRCQVQFYGLSENDEWTQDRAKPVTQIVSAEAWGRADCGSQSFGLLDPKLCYLLDGILFIYGVILTALFLRSKRSRLLHSDYMNMTPRRPGPTRKHYQPYAPPRDFAAYRSRVKFSRSADAPAYQQGQNQLYNELNLGRREEYDVLDKRRGRDPEMGGKPQRRKNPQEGLYNELQKDKMAEAYSEIGMKGERRRGKGHDGLYQGLSTATKDTYDALHMQALPPRRAKRSGSGATNFSLLKQAGDVEENPGPTSMDWIWRILFLVGAATGAHSGPEVQLVESGGGLVQAGGSLRLSCAASGRTFSMGWFRQAPGKEREFVAAITYSGGSPYYADSVKGRFTISRDNAKNTVYLQMNSLKPEDTAVYYCAANPTYGSDWNAENWGQGTQVTVSSGSGGGGSGGGGSGGGGSFEQVQLQQPGAELVKPGASVKMSCKASGYAFSSYWINWMKQKPGQGLEWIGQIYPGDGDTNYNGKFKGRATLTADTSSSTAYMQLSSLTSEDSAVYFCARSITTVVGCAMDYWGQGTSVTVSSTREQKLISEEDGSGIQNPDPAVYQLRDSKSSDKSVCLFTDFDSQTNVSQSKDSDVYITDKTVLDMRSMDFKSNSAVAWSNKSDFACANAFNNSIIPEDTFFPSPESSCGTQSFGLLDPKLCYLLDGILFIYGVILTALFLRSKRSRLLHSDYMNMTPRRPGPTRKHYQPYAPPRDFAAYRSRVKFSRSADAPAYQQGQNQLYNELNLGRREEYDVLDKRRGRDPEMGGKPQRRKNPQEGLYNELQKDKMAEAYSEIGMKGERRRGKGHDGLYQGLSTATKDTYDALHMQALPPR

SEQ ID NO: 16994 - protein, 1164 aa, Artificial Sequence
  Synthetic Polypeptide
MALPVTALLLPLALLLHAARPEVQVLESGGGLVQPGGSLRLSCAASGFTFSNFAMSWVRQAPGKGLEWVSTISGSAGTTDYADSVKGRFTISRDNSKKTLYLQMNSLRVEDTAVYYCADGRGPFFDYRGQGTLVTVSSGTGGGGSGGGGSGGGGSEFDIQMTQSPSSLSASVGDRVTITCKASDHINNWLAWYQQKPGQAPKLLIYGATTLETGVPSRFSGSGSGTDYTLTISSLQPEDFATYYCQQSWNTPWTFGQGTKLEIKRLEGKPIPNPLLGLDSTGSGEDLKNVFPPEVAVFEPSEAEISHTQKATLVCLATGFYPDHVELSWWVNGKEVHSGVSTDPQPLKEQPALNDSRYCLSSRLRVSATFWQNPRNHFRCQVQFYGLSENDEWTQDRAKPVTQIVSAEAWGRADCGSQSFGLLDPKLCYLLDGILFIYGVILTALFLRVKFSRSADAPAYQQGQNQLYNELNLGRREEYDVLDKRRGRDPEMGGKPQRRKNPQEGLYNELQKDKMAEAYSEIGMKGERRRGKGHDGLYQGLSTATKDTYDALHMQALPPRRAKRSGSGATNFSLLKQAGDVEENPGPTSMDWIWRILFLVGAATGAHSGPEVQLVESGGGLVQAGGSLRLSCAASGRTFSMGWFRQAPGKEREFVAAITYSGGSPYYADSVKGRFTISRDNAKNTVYLQMNSLKPEDTAVYYCAANPTYGSDWNAENWGQGTQVTVSSGSGGGGSGGGGSGGGGSFEQVQLQQPGAELVKPGASVKMSCKASGYAFSSYWINWMKQKPGQGLEWIGQIYPGDGDTNYNGKFKGRATLTADTSSSTAYMQLSSLTSEDSAVYFCARSITTVVGCAMDYWGQGTSVTVSSTREQKLISEEDLGSGIQNPDPAVYQLRDSKSSDKSVCLFTDFDSQTNVSQSKDSDVYITDKTVLDMRSMDFKSNSAVAWSNKSDFACANAFNNSIIPEDTFFPSPESSCGTQSFGLLDPKLCYLLDGILFIYGVILTALFLKRGRKKLLYIFKQPFMRPVQTTQEEDGCSCRFPEEEEGGCELRVKFSRSADAPAYQQGQNQLYNELNLGRREEYDVLDKRRGRDPEMGGKPQRRKNPQEGLYNELQKDKMAEAYSEIGMKGERRRGKGHDGLYQGLSTATKDTYDALHMQALPPR

SEQ ID NO: 16995 - protein, 1206 aa, Artificial Sequence
  Synthetic Polypeptide
MALPVTALLLPLALLLHAARPEVQVLESGGGLVQPGGSLRLSCAASGFTFSNFAMSWVRQAPGKGLEWVSTISGSAGTTDYADSVKGRFTISRDNSKKTLYLQMNSLRVEDTAVYYCADGRGPFFDYRGQGTLVTVSSGTGGGGSGGGGSGGGGSEFDIQMTQSPSSLSASVGDRVTITCKASDHINNWLAWYQQKPGQAPKLLIYGATTLETGVPSRFSGSGSGTDYTLTISSLQPEDFATYYCQQSWNTPWTFGQGTKLEIKRLEGKPIPNPLLGLDSTGSGEDLKNVFPPEVAVFEPSEAEISHTQKATLVCLATGFYPDHVELSWWVNGKEVHSGVSTDPQPLKEQPALNDSRYCLSSRLRVSATFWQNPRNHFRCQVQFYGLSENDEWTQDRAKPVTQIVSAEAWGRADCGSQSFGLLDPKLCYLLDGILFIYGVILTALFLKRGRKKLLYIFKQPFMRPVQTTQEEDGCSCRFPEEEEGGCELRVKFSRSADAPAYQQGQNQLYNELNLGRREEYDVLDKRRGRDPEMGGKPQRRKNPQEGLYNELQKDKMAEAYSEIGMKGERRRGKGHDGLYQGLSTATKDTYDALHMQALPPRRAKRSGSGATNFSLLKQAGDVEENPGPTSMDWIWRILFLVGAATGAHSGPEVQLVESGGGLVQAGGSLRLSCAASGRTFSMGWFRQAPGKEREFVAAITYSGGSPYYADSVKGRFTISRDNAKNTVYLQMNSLKPEDTAVYYCAANPTYGSDWNAENWGQGTQVTVSSGSGGGGSGGGGSGGGGSFEQVQLQQPGAELVKPGASVKMSCKASGYAFSSYWINWMKQKPGQGLEWIGQIYPGDGDTNYNGKFKGRATLTADTSSSTAYMQLSSLTSEDSAVYFCARSITTVVGCAMDYWGQGTSVTVSSTREQKLISEEDLGSGIQNPDPAVYQLRDSKSSDKSVCLFTDFDSQTNVSQSKDSDVYITDKTVLDMRSMDFKSNSAVAWSNKSDFACANAFNNSIIPEDTFFPSPESSCGTQSFGLLDPKLCYLLDGILFIYGVILTALFLKRGRKKLLYIFKQPFMRPVQTTQEEDGCSCRFPEEEEGGCELRVKFSRSADAPAYQQGQNQLYNELNLGRREEYDVLDKRRGRDPEMGGKPQRRKNPQEGLYNELQKDKMAEAYSEIGMKGERRRGKGHDGLYQGLSTATKDTYDALHMQALPPR

SEQ ID NO: 16996 - protein, 1096 aa, Artificial Sequence
  Synthetic Polypeptide
MALPVTALLLPLALLLHAARPEVQVLESGGGLVQPGGSLRLSCAASGFTFSNFAMSWVRQAPGKGLEWVSTISGSAGTTDYADSVKGRFTISRDNSKKTLYLQMNSLRVEDTAVYYCADGRGPFFDYRGQGTLVTVSSGTGGGGSGGGGSGGGGSEFDIQMTQSPSSLSASVGDRVTITCKASDHINNWLAWYQQKPGQAPKLLIYGATTLETGVPSRFSGSGSGTDYTLTISSLQPEDFATYYCQQSWNTPWTFGQGTKLEIKRLEQSFGLLDPKLCYLLDGILFIYGVILTALFLRVKFSRSADAPAYQQGQNQLYNELNLGRREEYDVLDKRRGRDPEMGGKPQRRKNPQEGLYNELQKDKMAEAYSEIGMKGERRRGKGHDGLYQGLSTATKDTYDALHMQALPPRRAKRSGSGATNFSLLKQAGDVEENPGPTSMDWIWRILFLVGAATGAHSGPEVQLVESGGGLVQAGGSLRLSCAASGRTFSMGWFRQAPGKEREFVAAITYSGGSPYYADSVKGRFTISRDNAKNTVYLQMNSLKPEDTAVYYCAANPTYGSDWNAENWGQGTQVTVSSGSGGGGSGGGGSGGGGSFEQVQLQQPGAELVKPGASVKMSCKASGYAFSSYWINWMKQKPGQGLEWIGQIYPGDGDTNYNGKFKGRATLTADTSSSTAYMQLSSLTSEDSAVYFCARSITTVVGCAMDYWGQGTSVTVSSTRQSFGLLDPKLCYLLDGILFIYGVILTALFLRVKFSRSADAPAYQQGQNQLYNELNLGRREEYDVLDKRRGRDPEMGGKPQRRKNPQEGLYNELQKDKMAEAYSEIGMKGERRRGKGHDGLYQGLSTATKDTYDALHMQALPPRRAKRSGSGVKQTLNFDLLKLAGDVESNPGPSRGHMTEYKPTVRLATRDDVPRAVRTLAAAFADYPATRHTVDPDRHIERVTELQELFLTRVGLDIGKVWVADDGAAVAVWTTPESVEAGAVFAEIGPRMAELSGSRLAAQQQMEGLLAPHRPKEPAWFLATVGVSPDHQGKGLGSAVVLPGVEAAERAGVPAFLETSAPRNLPFYERLGFTVTADVEVPEGPRTWCMTRKPGA

SEQ ID NO: 16997 - protein, 921 aa, Artificial Sequence
  Synthetic Polypeptide
MALPVTALLLPLALLLHAARPEVQVLESGGGLVQPGGSLRLSCAASGFTFSNFAMSWVRQAPGKGLEWVSTISGSAGTTDYADSVKGRFTISRDNSKKTLYLQMNSLRVEDTAVYYCADGRGPFFDYRGQGTLVTVSSGTGGGGSGGGGSGGGGSEFDIQMTQSPSSLSASVGDRVTITCKASDHINNWLAWYQQKPGQAPKLLIYGATTLETGVPSRFSGSGSGTDYTLTISSLQPEDFATYYCQQSWNTPWTFGQGTKLEIKRLEGQPKANPTVTLFPPSSEELQANKATLVCLISDFYPGAVTVAWKADGSPVKAGVETTKPSKQSNNKYAASSYLSLTPEQWKSHRSYSCQVTHEGSTVEKTVAPTECSPIKTDVITMDPKDNCSKDANDTLLLQLTNTSAYYMYLLLLLKSVVYFAIITCCLLRRTAFCCNGEKSRAKRSGSGATNFSLLKQAGDVEENPGPTSMDWIWRILFLVGAATGAHSGPEVQLVESGGGLVQAGGSLRLSCAASGRTFSMGWFRQAPGKEREFVAAITYSGGSPYYADSVKGRFTISRDNAKNTVYLQMNSLKPEDTAVYYCAANPTYGSDWNAENWGQGTQVTVSSGSGGGGSGGGGSGGGGSFEQVQLQQPGAELVKPGASVKMSCKASGYAFSSYWINWMKQKPGQGLEWIGQIYPGDGDTNYNGKFKGRATLTADTSSSTAYMQLSSLTSEDSAVYFCARSITTVVGCAMDYWGQGTSVTVSSTRASTKGPSVFPLAPSSKSTSGGTAALGCLVKDYFPEPVTVSWNSGALTSGVHTFPAVLQSSGLYSLSSVVTVPSSSLGTQTYICNVNHKPSNTKVDKRVEPKSCEVKTDSTDHVKPKETENTKQPSKSCHKPKAIVHTEKVNMMSLTVLGLRMLFAKTVAVNFLLTAKLFFL

SEQ ID NO: 16998 - protein, 899 aa, Artificial Sequence
  Synthetic Polypeptide
MALPVTALLLPLALLLHAARPEVQVLESGGGLVQPGGSLRLSCAASGFTFSNFAMSWVRQAPGKGLEWVSTISGSAGTTDYADSVKGRFTISRDNSKKTLYLQMNSLRVEDTAVYYCADGRGPFFDYRGQGTLVTVSSGTGGGGSGGGGSGGGGSEFDIQMTQSPSSLSASVGDRVTITCKASDHINNWLAWYQQKPGQAPKLLIYGATTLETGVPSRFSGSGSGTDYTLTISSLQPEDFATYYCQQSWNTPWTFGQGTKLEIKRLEGQPKANPTVTLFPPSSEELQANKATLVCLISDFYPGAVTVAWKADGSPVKAGVETTKPSKQSNNKYAASSYLSLTPEQWKSHRSYSCQVTHEGSTVEKTVAPTECSGRADCGITSASYHQGVLSATILYEILLGKATLYAVLVSALVLMAMVKRKDSRGRAKRSGSGATNFSLLKQAGDVEENPGPTSMDWIWRILFLVGAATGAHSGPEVQLVESGGGLVQAGGSLRLSCAASGRTFSMGWFRQAPGKEREFVAAITYSGGSPYYADSVKGRFTISRDNAKNTVYLQMNSLKPEDTAVYYCAANPTYGSDWNAENWGQGTQVTVSSGSGGGGSGGGGSGGGGSFEQVQLQQPGAELVKPGASVKMSCKASGYAFSSYWINWMKQKPGQGLEWIGQIYPGDGDTNYNGKFKGRATLTADTSSSTAYMQLSSLTSEDSAVYFCARSITTVVGCAMDYWGQGTSVTVSSTRASTKGPSVFPLAPSSKSTSGGTAALGCLVKDYFPEPVTVSWNSGALTSGVHTFPAVLQSSGLYSLSSVVTVPSSSLGTQTYICNVNHKPSNTKVDKRVEPKSCIPEDTFFPSSDVPCDVKLVEKSFETDTNLNFQNLSVIGFRILLLKVAGFNLLMTLRLWSS

SEQ ID NO: 16999 - protein, 899 aa, Artificial Sequence
  Synthetic Polypeptide
MALPVTALLLPLALLLHAARPEVQVLESGGGLVQPGGSLRLSCAASGFTFSNFAMSWVRQAPGKGLEWVSTISGSAGTTDYADSVKGRFTISRDNSKKTLYLQMNSLRVEDTAVYYCADGRGPFFDYRGQGTLVTVSSGTGGGGSGGGGSGGGGSEFDIQMTQSPSSLSASVGDRVTITCKASDHINNWLAWYQQKPGQAPKLLIYGATTLETGVPSRFSGSGSGTDYTLTISSLQPEDFATYYCQQSWNTPWTFGQGTKLEIKRLEGQPKANPTVTLFPPSSEELQANKATLVCLISDFYPGAVTVAWKADGSPVKAGVETTKPSKQSNNKYAASSYLSLTPEQWKSHRSYSCQVTHEGSTVEKTVAPTECSGRADCGFTSESYQQGVLSATILYEILLGKATLYAVLVSALVLMAMVKRKDSRGRAKRSGSGATNFSLLKQAGDVEENPGPTSMDWIWRILFLVGAATGAHSGPEVQLVESGGGLVQAGGSLRLSCAASGRTFSMGWFRQAPGKEREFVAAITYSGGSPYYADSVKGRFTISRDNAKNTVYLQMNSLKPEDTAVYYCAANPTYGSDWNAENWGQGTQVTVSSGSGGGGSGGGGSGGGGSFEQVQLQQPGAELVKPGASVKMSCKASGYAFSSYWINWMKQKPGQGLEWIGQIYPGDGDTNYNGKFKGRATLTADTSSSTAYMQLSSLTSEDSAVYFCARSITTVVGCAMDYWGQGTSVTVSSTRASTKGPSVFPLAPSSKSTSGGTAALGCLVKDYFPEPVTVSWNSGALTSGVHTFPAVLQSSGLYSLSSVVTVPSSSLGTQTYICNVNHKPSNTKVDKRVEPKSCIPEDTFFPSPESSCDVKLVEKSFETDTNLNFQNLSVIGFRILLLKVAGFNLLMTLRLWSS

SEQ ID NO: 17000 - protein, 762 aa, Artificial Sequence
  Synthetic Polypeptide
MALPVTALLLPLALLLHAARPEVQLLESGGGLVQPGGSLRLSCAASGFTFSSYAMSWVRQAPGKGLEWVSSISGSGDYIYYADSVKGRFTISRDISKNTLYLQMNSLRAEDTAVYYCAKEGTGANSSLADYRGQGTLVTVSSGGGSGGGSEVQVLESGGGLVQPGGSLRLSCAASGFTFSNFAMSWVRQAPGKGLEWVSTISGSAGTTDYADSVKGRFTISRDNSKKTLYLQMNSLRVEDTAVYYCADGRGPFFDYRGQGTLVTVSSGTGGGGSGGGGSGGGGSEFDIQMTQSPSSLSASVGDRVTITCKASDHINNWLAWYQQKPGQAPKLLIYGATTLETGVPSRFSGSGSGTDYTLTISSLQPEDFATYYCQQSWNTPWTFGQGTKLEIKRGGGGSGGGGSGGGGSQVQLQQPGAELVKPGASVKMSCKASGYAFSSYWINWMKQKPGQGLEWIGQIYPGDGDTNYNGKFKGRATLTADTSSSTAYMQLSSLTSEDSAVYFCARSITTVVGCAMDYWGQGTSVTVSSTREQKLISEEDLKIEVMYPPPYLDNEKSNGTIIHVKGKHLCPSPLFPGPSKPFWVLVVVGGVLACYSLLVTVAFIIFWVRSKRSRLLHSDYMNMTPRRPGPTRKHYQPYAPPRDFAAYRSRVKFSRSADAPAYQQGQNQLYNELNLGRREEYDVLDKRRGRDPEMGGKPRRKNPQEGLYNELQKDKMAEAYSEIGMKGERRRGKGHDGLYQGLSTATKDTYDALHMQALPPR

SEQ ID NO: 17001 - protein, 768 aa, Artificial Sequence
  Synthetic Polypeptide
MALPVTALLLPLALLLHAARPEVQLLESGGGLVQPGGSLRLSCAASGFTFSSYAMSWVRQAPGKGLEWVSSISGSGDYIYYADSVKGRFTISRDISKNTLYLQMNSLRAEDTAVYYCAKEGTGANSSLADYRGQGTLVTVSSGGGSGGGSEVQVLESGGGLVQPGGSLRLSCAASGFTFSNFAMSWVRQAPGKGLEWVSTISGSAGTTDYADSVKGRFTISRDNSKKTLYLQMNSLRVEDTAVYYCADGRGPFFDYRGQGTLVTVSSGTGGGGSGGGGSGGGGSEFDIQMTQSPSSLSASVGDRVTITCKASDHINNWLAWYQQKPGQAPKLLIYGATTLETGVPSRFSGSGSGTDYTLTISSLQPEDFATYYCQQSWNTPWTFGQGTKLEIKRGGGGSGGGGSGGGGSQVQLQQPGAELVKPGASVKMSCKASGYAFSSYWINWMKQKPGQGLEWIGQIYPGDGDTNYNGKFKGRATLTADTSSSTAYMQLSSLTSEDSAVYFCARSITTVVGCAMDYWGQGTSVTVSSTREQKLISEEDLAKPTTTPAPRPPTPAPTIASQPLSLRPEACRPAAGGAVHTRGLDFACDIYIWAPLAGTCGVLLLSLVITLYCKRGRKKLLYIFKQPFMRPVQTTQEEDGCSCRFPEEEEGGCELRVKFSRSADAPAYQQGQNQLYNELNLGRREEYDVLDKRRGRDPEMGGKPRRKNPQEGLYNELQKDKMAEAYSEIGMKGERRRGKGHDGLYQGLSTATKDTYDALHMQALPPR

SEQ ID NO: 17002 - protein, 1181 aa, Artificial Sequence
  Synthetic Polypeptide
MALPVTALLLPLALLLHAARPEVQLLESGGGLVQPGGSLRLSCAASGFTFSSYAMSWVRQAPGKGLEWVSSISGSGDYIYYADSVKGRFTISRDISKNTLYLQMNSLRAEDTAVYYCAKEGTGANSSLADYRGQGTLVTVSSGGGSGGGSEVQVLESGGGLVQPGGSLRLSCAASGFTFSNFAMSWVRQAPGKGLEWVSTISGSAGTTDYADSVKGRFTISRDNSKKTLYLQMNSLRVEDTAVYYCADGRGPFFDYRGQGTLVTVSSGTGGGGSGGGGSGGGGSEFDIQMTQSPSSLSASVGDRVTITCKASDHINNWLAWYQQKPGQAPKLLIYGATTLETGVPSRFSGSGSGTDYTLTISSLQPEDFATYYCQQSWNTPWTFGQGTKLEIKRGGGGSGGGGSGGGGSQVQLQQPGAELVKPGASVKMSCKASGYAFSSYWINWMKQKPGQGLEWIGQIYPGDGDTNYNGKFKGRATLTADTSSSTAYMQLSSLTSEDSAVYFCARSITTVVGCAMDYWGQGTSVTVSSTREQKLISEEDLAKPTTTPAPRPPTPAPTIASQPLSLRPEACRPAAGGAVHTRGLDFACDIYIWAPLAGTCGVLLLSLVITLYCGRARVKFSRSADAPAYQQGQNQLYNELNLGRREEYDVLDKRRGRDPEMGGKPRRKNPQEGLYNELQKDKMAEAYSEIGMKGERRRGKGHDGLYQGLSTATKDTYDALHMQALPPRSRGSGATNFSLLKQAGDVEENPGPGIHMATYEVLCEVARKLGTDDREVVLFLLNVFIPQPTLAQLIGALRALKEEGRLTFPLLAECLFRAGRRDLLRDLLHLDPRFLERHLAGTMSYFSPYQLTVLHVDGELCARDIRSLIFLSKDTIGSRSTPQTFLHWVYCMENLDLLGPTDVDALMSMLRSLSRVDLQRQVQTLMGLHLSGPSHSQHYRHTPLETDFYDYKDDDDKTSGSGEGRGSLLTCGDVEENPGPHMTEYKPTVRLATRDDVPRAVRTLAAAFADYPATRHTVDPDRHIERVTELQELFLTRVGLDIGKVWVADDGAAVAVWTTPESVEAGAVFAEIGPRMAELSGSRLAAQQQMEGLLAPHRPKEPAWFLATVGVSPDHQGKGLGSAVVLPGVEAAERAGVPAFLETSAPRNLPFYERLGFTVTADVEVPEGPRTWCMTRKPGA

SEQ ID NO: 17003 - protein, 1121 aa, Artificial Sequence
  Synthetic Polypeptide
MALPVTALLLPLALLLHAARPEVQLLESGGGLVQPGGSLRLSCAASGFTFSSYAMSWVRQAPGKGLEWVSSISGSGDYIYYADSVKGRFTISRDISKNTLYLQMNSLRAEDTAVYYCAKEGTGANSSLADYRGQGTLVTVSSGGGSGGGSEVQVLESGGGLVQPGGSLRLSCAASGFTFSNFAMSWVRQAPGKGLEWVSTISGSAGTTDYADSVKGRFTISRDNSKKTLYLQMNSLRVEDTAVYYCADGRGPFFDYRGQGTLVTVSSGTGGGGSGGGGSGGGGSEFDIQMTQSPSSLSASVGDRVTITCKASDHINNWLAWYQQKPGQAPKLLIYGATTLETGVPSRFSGSGSGTDYTLTISSLQPEDFATYYCQQSWNTPWTFGQGTKLEIKRLEIQNPDPAVYQLRDSKSSDKSVCLFTDFDSQTNVSQSKDSDVYITDKCVLDMRSMDFKSNSAVAWSNKSDFACANAFNNSIIPEDTFFPSSDVPCDVKLVEKSFETDTNLNFQNLSVIGFRILLLKVAGFNLLMTLRLWSSRAKRSGSGVKQTLNFDLLKLAGDVESNPGPTSMDWIWRILFLVGAATGAHSFEQVQLQQPGAELVKPGASVKMSCKASGYAFSSYWINWMKQKPGQGLEWIGQIYPGDGDTNYNGKFKGRATLTADTSSSTAYMQLSSLTSEDSAVYFCARSITTVVGCAMDYWGQGTSVTVSSTREDLKNVFPPEVAVFEPSKAEIAHTQKATLVCLATGFYPDHVELSWWVNGKEVHSGVCTDPQPLKEQPALNDSRYCLSSRLRVSATFWQNPRNHFRCQVQFYGLSENDEWTQDRAKPVTQIVSAEAWGRADCGITSASYHQGVLSATILYEILLGKATLYAVLVSALVLMAMVKRKDSRGRAKRSGSGATNFSLLKQAGDVEENPGPSRGHMTEYKPTVRLATRDDVPRAVRTLAAAFADYPATRHTVDPDRHIERVTELQELFLTRVGLDIGKVWVADDGAAVAVWTTPESVEAGAVFAEIGPRMAELSGSRLAAQQQMEGLLAPHRPKEPAWFLATVGVSPDHQGKGLGSAVVLPGVEAAERAGVPAFLETSAPRNLPFYERLGFTVTADVEVPEGPRTWCMTRKPGA

SEQ ID NO: 17004 - protein, 1120 aa, Artificial Sequence
  Synthetic Polypeptide
MALPVTALLLPLALLLHAARPEVQLLESGGGLVQPGGSLRLSCAASGFTFSSYAMSWVRQAPGKGLEWVSSISGSGDYIYYADSVKGRFTISRDISKNTLYLQMNSLRAEDTAVYYCAKEGTGANSSLADYRGQGTLVTVSSGGGSGGGSEVQVLESGGGLVQPGGSLRLSCAASGFTFSNFAMSWVRQAPGKGLEWVSTISGSAGTTDYADSVKGRFTISRDNSKKTLYLQMNSLRVEDTAVYYCADGRGPFFDYRGQGTLVTVSSGTGGGGSGGGGSGGGGSEFDIQMTQSPSSLSASVGDRVTITCKASDHINNWLAWYQQKPGQAPKLLIYGATTLETGVPSRFSGSGSGTDYTLTISSLQPEDFATYYCQQSWNTPWTFGQGTKLEIKRLEDLKNVFPPEVAVFEPSKAEIAHTQKATLVCLATGFYPDHVELSWWVNGKEVHSGVCTDPQPLKEQPALNDSRYCLSSRLRVSATFWQNPRNHFRCQVQFYGLSENDEWTQDRAKPVTQIVSAEAWGRADCGITSASYHQGVLSATILYEILLGKATLYAVLVSALVLMAMVKRKDSRGRAKRSGSGATNFSLLKQAGDVEENPGPTSMDWIWRILFLVGAATGAHSFEQVQLQQPGAELVKPGASVKMSCKASGYAFSSYWINWMKQKPGQGLEWIGQIYPGDGDTNYNGKFKGRATLTADTSSSTAYMQLSSLTSEDSAVYFCARSITTVVGCAMDYWGQGTSVTVSSTRIQNPDPAVYQLRDSKSSDKSVCLFTDFDSQTNVSQSKDSDVYITDKCVLDMRSMDFKSNSAVAWSNKSDFACANAFNNSIIPEDTFFPSSDVPCDVKLVEKSFETDTNLNFQNLSVIGFRILLLKVAGFNLLMTLRLWSSRAKRSGSGVKQTLNFDLLKLAGDVESNPGPSRGHMTEYKPTVRLATRDDVPRAVRTLAAAFADYPATRHTVDPDRHIERVTELQELFLTRVGLDIGKVWVADDGAAVAVWTTPESVEAGAVFAEIGPRMAELSGSRLAAQQQMEGLLAPHRPKEPAWFLATVGVSPDHQGKGLGSAVVLPGVEAAERAGVPAFLETSAPRNLPFYERLGFTVTADVEVPEGPRTWCMTRKPGA

SEQ ID NO: 17005 - protein, 887 aa, Artificial Sequence
  Synthetic Polypeptide
MALPVTALLLPLALLLHAARPEVQLLESGGGLVQPGGSLRLSCAASGFTFSSYAMSWVRQAPGKGLEWVSSISGSGDYIYYADSVKGRFTISRDISKNTLYLQMNSLRAEDTAVYYCAKEGTGANSSLADYRGQGTLVTVSSGGGSGGGSEVQVLESGGGLVQPGGSLRLSCAASGFTFSNFAMSWVRQAPGKGLEWVSTISGSAGTTDYADSVKGRFTISRDNSKKTLYLQMNSLRVEDTAVYYCADGRGPFFDYRGQGTLVTVSSGTGGGGSGGGGSGGGGSEFDIQMTQSPSSLSASVGDRVTITCKASDHINNWLAWYQQKPGQAPKLLIYGATTLETGVPSRFSGSGSGTDYTLTISSLQPEDFATYYCQQSWNTPWTFGQGTKLEIKRLEDLKNVFPPEVAVFEPSEAEISHTQKATLVCLATGFYPDHVELSWWVNGKEVHSGVCTDPQPLKEQPALNDSRYCLSSRLRVSATFWQNPRNHFRCQVQFYGLSENDEWTQDRAKPVTQIVSAEAWGRADCGFTSESYQQGVLSATILYEILLGKATLYAVLVSALVLMAMVKRKDSRGRAKRSGSGATNFSLLKQAGDVEENPGPTSMDWIWRILFLVGAATGAHSFEQVQLQQPGAELVKPGASVKMSCKASGYAFSSYWINWMKQKPGQGLEWIGQIYPGDGDTNYNGKFKGRATLTADTSSSTAYMQLSSLTSEDSAVYFCARSITTVVGCAMDYWGQGTSVTVSSTRIQNPDPAVYQLRDSKSSDKSVCLFTDFDSQTNVSQSKDSDVYITDKCVLDMRSMDFKSNSAVAWSNKSDFACANAFNNSIIPEDTFFPSPESSCDVKLVEKSFETDTNLNFQNLSVIGFRILLLKVAGFNLLMTLRLWSS

SEQ ID NO: 17006 - protein, 1112 aa, Artificial Sequence
  Synthetic Polypeptide
MALPVTALLLPLALLLHAARPEVQLLESGGGLVQPGGSLRLSCAASGFTFSSYAMSWVRQAPGKGLEWVSSISGSGDYIYYADSVKGRFTISRDISKNTLYLQMNSLRAEDTAVYYCAKEGTGANSSLADYRGQGTLVTVSSGGGSGGGSEVQVLESGGGLVQPGGSLRLSCAASGFTFSNFAMSWVRQAPGKGLEWVSTISGSAGTTDYADSVKGRFTISRDNSKKTLYLQMNSLRVEDTAVYYCADGRGPFFDYRGQGTLVTVSSGTGGGGSGGGGSGGGGSEFDIQMTQSPSSLSASVGDRVTITCKASDHINNWLAWYQQKPGQAPKLLIYGATTLETGVPSRFSGSGSGTDYTLTISSLQPEDFATYYCQQSWNTPWTFGQGTKLEIKRLEDLKNVFPPEVAVFEPSEAEISHTQKATLVCLATGFYPDHVELSWWVNGKEVHSGVCTDPQPLKEQPALNDSRYCLSSRLRVSATFWQNPRNHFRCQVQFYGLSENDEWTQDRAKPVTQIVSAEAWGRADCGFTSESYQQGVLSATILYEILLGKATLYAVLVSALVLMAMVKRKDSRGRAKRSGSGATNFSLLKQAGDVEENPGPTSMDWIWRILFLVGAATGAHSFEQVQLQQPGAELVKPGASVKMSCKASGYAFSSYWINWMKQKPGQGLEWIGQIYPGDGDTNYNGKFKGRATLTADTSSSTAYMQLSSLTSEDSAVYFCARSITTVVGCAMDYWGQGTSVTVSSTRIQNPDPAVYQLRDSKSSDKSVCLFTDFDSQTNVSQSKDSDVYITDKCVLDMRSMDFKSNSAVAWSNKSDFACANAFNNSIIPEDTFFPSPESSCDVKLVEKSFETDTNLNFQNLSVIGFRILLLKVAGFNLLMTLRLWSSRAKRSGSGVKQTLNFDLLKLAGDVESNPGPSRGGIHTMATYEVLCEVARKLGTDDREVVLFLLNVFIPQPTLAQLIGALRALKEEGRLTFPLLAECLFRAGRRDLLRDLLHLDPRFLERHLAGTMSYFSPYQLTVLHVDGELCARDIRSLIFLSKDTIGSRSTPQTFLHWVYCMENLDLLGPTDVDALMSMLRSLSRVDLQRQVQTLMGLHLSGPSHSQHYRHTP

SEQ ID NO: 17007 - protein, 891 aa, Artificial Sequence
  Synthetic Polypeptide
MALPVTALLLPLALLLHAARPEVQLLESGGGLVQPGGSLRLSCAASGFTFSSYAMSWVRQAPGKGLEWVSSISGSGDYIYYADSVKGRFTISRDISKNTLYLQMNSLRAEDTAVYYCAKEGTGANSSLADYRGQGTLVTVSSGGGSGGGSEVQVLESGGGLVQPGGSLRLSCAASGFTFSNFAMSWVRQAPGKGLEWVSTISGSAGTTDYADSVKGRFTISRDNSKKTLYLQMNSLRVEDTAVYYCADGRGPFFDYRGQGTLVTVSSGTGGGGSGGGGSGGGGSEFDIQMTQSPSSLSASVGDRVTITCKASDHINNWLAWYQQKPGQAPKLLIYGATTLETGVPSRFSGSGSGTDYTLTISSLQPEDFATYYCQQSWNTPWTFGQGTKLEIKRLEIQNPDPAVYQLRDSKSSDKSVCLFTDFDSQTNVSQSKDSDVYITDKCVLDMRSMDFKSNSAVAWSNKSDFACANAFNNSIIPEDTFFPSPESSCDVKLVEKSFETDTNLNFQNLSVIGFRILLLKVAGFNLLMTLRLWSSRAKRSGSGVKQTLNFDLLKLAGDVESNPGPTSMDWIWRILFLVGAATGAHSFEQVQLQQPGAELVKPGASVKMSCKASGYAFSSYWINWMKQKPGQGLEWIGQIYPGDGDTNYNGKFKGRATLTADTSSSTAYMQLSSLTSEDSAVYFCARSITTVVGCAMDYWGQGTSVTVSSTREDLKNVFPPEVAVFEPSEAEISHTQKATLVCLATGFYPDHVELSWWVNGKEVHSGVCTDPQPLKEQPALNDSRYCLSSRLRVSATFWQNPRNHFRCQVQFYGLSENDEWTQDRAKPVTQIVSAEAWGRADCGFTSESYQQGVLSATILYEILLGKATLYAVLVSALVLMAMVKRKDSRG

SEQ ID NO: 17008 - protein, 1113 aa, Artificial Sequence
  Synthetic Polypeptide
MALPVTALLLPLALLLHAARPEVQLLESGGGLVQPGGSLRLSCAASGFTFSSYAMSWVRQAPGKGLEWVSSISGSGDYIYYADSVKGRFTISRDISKNTLYLQMNSLRAEDTAVYYCAKEGTGANSSLADYRGQGTLVTVSSGGGSGGGSEVQVLESGGGLVQPGGSLRLSCAASGFTFSNFAMSWVRQAPGKGLEWVSTISGSAGTTDYADSVKGRFTISRDNSKKTLYLQMNSLRVEDTAVYYCADGRGPFFDYRGQGTLVTVSSGTGGGGSGGGGSGGGGSEFDIQMTQSPSSLSASVGDRVTITCKASDHINNWLAWYQQKPGQAPKLLIYGATTLETGVPSRFSGSGSGTDYTLTISSLQPEDFATYYCQQSWNTPWTFGQGTKLEIKRLEIQNPDPAVYQLRDSKSSDKSVCLFTDFDSQTNVSQSKDSDVYITDKCVLDMRSMDFKSNSAVAWSNKSDFACANAFNNSIIPEDTFFPSPESSCDVKLVEKSFETDTNLNFQNLSVIGFRILLLKVAGFNLLMTLRLWSSRAKRSGSGVKQTLNFDLLKLAGDVESNPGPTSMDWIWRILFLVGAATGAHSFEQVQLQQPGAELVKPGASVKMSCKASGYAFSSYWINWMKQKPGQGLEWIGQIYPGDGDTNYNGKFKGRATLTADTSSSTAYMQLSSLTSEDSAVYFCARSITTVVGCAMDYWGQGTSVTVSSTREDLKNVFPPEVAVFEPSEAEISHTQKATLVCLATGFYPDHVELSWWVNGKEVHSGVCTDPQPLKEQPALNDSRYCLSSRLRVSATFWQNPRNHFRCQVQFYGLSENDEWTQDRAKPVTQIVSAEAWGRADCGFTSESYQQGVLSATILYEILLGKATLYAVLVSALVLMAMVKRKDSRGRAKRSGSGATNFSLLKQAGDVEENPGPSRGGIHTMATYEVLCEVARKLGTDDREVVLFLLNVFIPQPTLAQLIGALRALKEEGRLTFPLLAECLFRAGRRDLLRDLLHLDPRFLERHLAGTMSYFSPYQLTVLHVDGELCARDIRSLIFLSKDTIGSRSTPQTFLHWVYCMENLDLLGPTDVDALMSMLRSLSRVDLQRQVQTLMGLHLSGPSHSQHYRHTP

SEQ ID NO: 17009 - protein, 1165 aa, Artificial Sequence
  Synthetic Polypeptide
MALPVTALLLPLALLLHAARPLEGKPIPNPLLGLDSTGSGEDLKNVFPPEVAVFEPSKAEIAHTQKATLVCLATGFYPDHVELSWWVNGKEVHSGVCTDPQPLKEQPALNDSRYCLSSRLRVSATFWQNPRNHFRCQVQFYGLSENDEWTQDRAKPVTQIVSAEAWGRADCGITSASYHQGVLSATILYEILLGKATLYAVLVSALVLMAMVKRKDSRGRAKRSGSGATNFSLLKQAGDVEENPGPTSMALPVTALLLPLALLLHAARPEVQLLESGGGLVQPGGSLRLSCAASGFTFSSYAMSWVRQAPGKGLEWVSSISGSGDYIYYADSVKGRFTISRDISKNTLYLQMNSLRAEDTAVYYCAKEGTGANSSLADYRGQGTLVTVSSGGGSGGGSEVQVLESGGGLVQPGGSLRLSCAASGFTFSNFAMSWVRQAPGKGLEWVSTISGSAGTTDYADSVKGRFTISRDNSKKTLYLQMNSLRVEDTAVYYCADGRGPFFDYRGQGTLVTVSSGTGGGGSGGGGSGGGGSEFDIQMTQSPSSLSASVGDRVTITCKASDHINNWLAWYQQKPGQAPKLLIYGATTLETGVPSRFSGSGSGTDYTLTISSLQPEDFATYYCQQSWNTPWTFGQGTKLEIKRGGGGSGGGGSGGGGSQVQLQQPGAELVKPGASVKMSCKASGYAFSSYWINWMKQKPGQGLEWIGQIYPGDGDTNYNGKFKGRATLTADTSSSTAYMQLSSLTSEDSAVYFCARSITTVVGCAMDYWGQGTSVTVSSTREQKLISEEDGSGIQNPDPAVYQLRDSKSSDKSVCLFTDFDSQTNVSQSKDSDVYITDKCVLDMRSMDFKSNSAVAWSNKSDFACANAFNNSIIPEDTFFPSSDVPCDVKLVEKSFETDTNLNFQNLSVIGFRILLLKVAGFNLLMTLRLWSSRAKRSGSGVKQTLNFDLLKLAGDVESNPGPSRGHMTEYKPTVRLATRDDVPRAVRTLAAAFADYPATRHTVDPDRHIERVTELQELFLTRVGLDIGKVWVADDGAAVAVWTTPESVEAGAVFAEIGPRMAELSGSRLAAQQQMEGLLAPHRPKEPAWFLATVGVSPDHQGKGLGSAVVLPGVEAAERAGVPAFLETSAPRNLPFYERLGFTVTADVEVPEGPRTWCMTRKPGA

SEQ ID NO: 17010 - protein, 1166 aa, Artificial Sequence
  Synthetic Polypeptide
MALPVTALLLPLALLLHAARPLEQKLISEEDLGSGDRPDPAVYQLRDSKSSDKSVCLFTDFDSQTNVSQSKDSDVYITDKCVLDMRSMDFKSNSAVAWSNKSDFACANAFNNSIIPEDTFFPSPESSCDVKLVEKSFETDTNLNFQNLSVIGFRILLLKVAGFNLLMTLRLWSSSSRAKRSGSGVKQTLNFDLLKLAGDVESNPGPTSMALPVTALLLPLALLLHAARPEVQLLESGGGLVQPGGSLRLSCAASGFTFSSYAMSWVRQAPGKGLEWVSSISGSGDYIYYADSVKGRFTISRDISKNTLYLQMNSLRAEDTAVYYCAKEGTGANSSLADYRGQGTLVTVSSGGGSGGGSEVQVLESGGGLVQPGGSLRLSCAASGFTFSNFAMSWVRQAPGKGLEWVSTISGSAGTTDYADSVKGRFTISRDNSKKTLYLQMNSLRVEDTAVYYCADGRGPFFDYRGQGTLVTVSSGTGGGGSGGGGSGGGGSEFDIQMTQSPSSLSASVGDRVTITCKASDHINNWLAWYQQKPGQAPKLLIYGATTLETGVPSRFSGSGSGTDYTLTISSLQPEDFATYYCQQSWNTPWTFGQGTKLEIKRGGGGSGGGGSGGGGSQVQLQQPGAELVKPGASVKMSCKASGYAFSSYWINWMKQKPGQGLEWIGQIYPGDGDTNYNGKFKGRATLTADTSSSTAYMQLSSLTSEDSAVYFCARSITTVVGCAMDYWGQGTSVTVSSTRGKPIPNPLLGLDSTGSGEDLKNVFPPEVAVFEPSEAEISHTQKATLVCLATGFYPDHVELSWWVNGKEVHSGVCTDPQPLKEQPALNDSRYCLSSRLRVSATFWQNPRNHFRCQVQFYGLSENDEWTQDRAKPVTQIVSAEAWGRADCGFTSESYQQGVLSATILYEILLGKATLYAVLVSALVLMAMVKRKDSRGRAKRSGSGATNFSLLKQAGDVEENPGPSRGHMTEYKPTVRLATRDDVPRAVRTLAAAFADYPATRHTVDPDRHIERVTELQELFLTRVGLDIGKVWVADDGAAVAVWTTPESVEAGAVFAEIGPRMAELSGSRLAAQQQMEGLLAPHRPKEPAWFLATVGVSPDHQGKGLGSAVVLPGVEAAERAGVPAFLETSAPRNLPFYERLGFTVTADVEVPEGPRTWCMTRKPGA

SEQ ID NO: 17011 - protein, 1120 aa, Artificial Sequence
  Synthetic Polypeptide
MALPVTALLLPLALLLHAARPEVQLLESGGGLVQPGGSLRLSCAASGFTFSSYAMSWVRQAPGKGLEWVSSISGSGDYIYYADSVKGRFTISRDISKNTLYLQMNSLRAEDTAVYYCAKEGTGANSSLADYRGQGTLVTVSSGGGSGGGSEVQVLESGGGLVQPGGSLRLSCAASGFTFSNFAMSWVRQAPGKGLEWVSTISGSAGTTDYADSVKGRFTISRDNSKKTLYLQMNSLRVEDTAVYYCADGRGPFFDYRGQGTLVTVSSGTGGGGSGGGGSGGGGSEFDIQMTQSPSSLSASVGDRVTITCKASDHINNWLAWYQQKPGQAPKLLIYGATTLETGVPSRFSGSGSGTDYTLTISSLQPEDFATYYCQQSWNTPWTFGQGTKLEIKRLEDLKNVFPPEVAVFEPSEAEISHTQKATLVCLATGFYPDHVELSWWVNGKEVHSGVSTDPQPLKEQPALNDSRYCLSSRLRVSATFWQNPRNHFRCQVQFYGLSENDEWTQDRAKPVTQIVSAEAWGRADCGFTSESYQQGVLSATILYEILLGKATLYAVLVSALVLMAMVKRKDSRGRAKRSGSGATNFSLLKQAGDVEENPGPTSMDWIWRILFLVGAATGAHSFEQVQLQQPGAELVKPGASVKMSCKASGYAFSSYWINWMKQKPGQGLEWIGQIYPGDGDTNYNGKFKGRATLTADTSSSTAYMQLSSLTSEDSAVYFCARSITTVVGCAMDYWGQGTSVTVSSTRIQNPDPAVYQLRDSKSSDKSVCLFTDFDSQTNVSQSKDSDVYITDKTVLDMRSMDFKSNSAVAWSNKSDFACANAFNNSIIPEDTFFPSPESSCDVKLVEKSFETDTNLNFQNLSVIGFRILLLKVAGFNLLMTLRLWSSRAKRSGSGVKQTLNFDLLKLAGDVESNPGPSRGHMTEYKPTVRLATRDDVPRAVRTLAAAFADYPATRHTVDPDRHIERVTELQELFLTRVGLDIGKVWVADDGAAVAVWTTPESVEAGAVFAEIGPRMAELSGSRLAAQQQMEGLLAPHRPKEPAWFLATVGVSPDHQGKGLGSAVVLPGVEAAERAGVPAFLETSAPRNLPFYERLGFTVTADVEVPEGPRTWCMTRKPGA

SEQ ID NO: 17012 - protein, 1202 aa, Artificial Sequence
  Synthetic Polypeptide
MALPVTALLLPLALLLHAARPEVQLLESGGGLVQPGGSLRLSCAASGFTFSSYAMSWVRQAPGKGLEWVSSISGSGDYIYYADSVKGRFTISRDISKNTLYLQMNSLRAEDTAVYYCAKEGTGANSSLADYRGQGTLVTVSSGGGSGGGSEVQVLESGGGLVQPGGSLRLSCAASGFTFSNFAMSWVRQAPGKGLEWVSTISGSAGTTDYADSVKGRFTISRDNSKKTLYLQMNSLRVEDTAVYYCADGRGPFFDYRGQGTLVTVSSGTGGGGSGGGGSGGGGSEFDIQMTQSPSSLSASVGDRVTITCKASDHINNWLAWYQQKPGQAPKLLIYGATTLETGVPSRFSGSGSGTDYTLTISSLQPEDFATYYCQQSWNTPWTFGQGTKLEIKRLEDLKNVFPPEVAVFEPSEAEISHTQKATLVCLATGFYPDHVELSWWVNGKEVHSGVSTDPQPLKEQPALNDSRYCLSSRLRVSATFWQNPRNHFRCQVQFYGLSENDEWTQDRAKPVTQIVSAEAWGRADCGFTSESYQQGVLSATILYEILLGKATLYAVLVSALVLMAMVKRKDSRGRAKRSGSGATNFSLLKQAGDVEENPGPTSMDWIWRILFLVGAATGAHSFEQVQLQQPGAELVKPGASVKMSCKASGYAFSSYWINWMKQKPGQGLEWIGQIYPGDGDTNYNGKFKGRATLTADTSSSTAYMQLSSLTSEDSAVYFCARSITTVVGCAMDYWGQGTSVTVSSTREQKLISEEDGSGTPFPSLAPPIMLLVDGKQQMVVVCLVLDVAPPGLDSPIWFSAGNGSALDAFTYGPSPATDGTWTNLAHLSLPSEELASWEPLVCHTGPGAEGHSRSTQPMHLSGEASTARTCPQEPLRGTPGGALWLGVLRLLLFKLLLFDLLLTCSCLCDPAGPLPSPATTTRLRALGSHRLHPATETGGREATSSPRPQPRDRRWGDTPPGRKPGSPVRAKRSGSGVKQTLNFDLLKLAGDVESNPGPSRGHMTEYKPTVRLATRDDVPRAVRTLAAAFADYPATRHTVDPDRHIERVTELQELFLTRVGLDIGKVWVADDGAAVAVWTTPESVEAGAVFAEIGPRMAELSGSRLAAQQQMEGLLAPHRPKEPAWFLATVGVSPDHQGKGLGSAVVLPGVEAAERAGVPAFLETSAPRNLPFYERLGFTVTADVEVPEGPRTWCMTRKPGA

SEQ ID NO: 17013 - protein, 1220 aa, Artificial Sequence
  Synthetic Polypeptide
MALPVTALLLPLALLLHAARPLEDLKNVFPPEVAVFEPSEAEISHTQKATLVCLATGFYPDHVELSWWVNGKEVHSGVSTDPQPLKEQPALNDSRYCLSSRLRVSATFWQNPRNHFRCQVQFYGLSENDEWTQDRAKPVTQIVSAEAWGRADCGFTSESYQQGVLSATILYEILLGKATLYAVLVSALVLMAMVKRKDSRGRAKRSGSGATNFSLLKQAGDVEENPGPTSMALPVTALLLPLALLLHAARPEVQLLESGGGLVQPGGSLRLSCAASGFTFSSYAMSWVRQAPGKGLEWVSSISGSGDYIYYADSVKGRFTISRDISKNTLYLQMNSLRAEDTAVYYCAKEGTGANSSLADYRGQGTLVTVSSGGGSGGGSEVQVLESGGGLVQPGGSLRLSCAASGFTFSNFAMSWVRQAPGKGLEWVSTISGSAGTTDYADSVKGRFTISRDNSKKTLYLQMNSLRVEDTAVYYCADGRGPFFDYRGQGTLVTVSSGTGGGGSGGGGSGGGGSEFDIQMTQSPSSLSASVGDRVTITCKASDHINNWLAWYQQKPGQAPKLLIYGATTLETGVPSRFSGSGSGTDYTLTISSLQPEDFATYYCQQSWNTPWTFGQGTKLEIKRGGGGSGGGGSGGGGSQVQLQQPGAELVKPGASVKMSCKASGYAFSSYWINWMKQKPGQGLEWIGQIYPGDGDTNYNGKFKGRATLTADTSSSTAYMQLSSLTSEDSAVYFCARSITTVVGCAMDYWGQGTSVTVSSTREQKLISEEDLGSGTPFPSLAPPIMLLVDGKQQMVVVCLVLDVAPPGLDSPIWFSAGNGSALDAFTYGPSPATDGTWTNLAHLSLPSEELASWEPLVCHTGPGAEGHSRSTQPMHLSGEASTARTCPQEPLRGTPGGALWLGVLRLLLFKLLLFDLLLTCSCLCDPAGPLPSPATTTRLRALGSHRLHPATETGGREATSSPRPQPRDRRWGDTPPGRKPGSPVRAKRSGSGVKQTLNFDLLKLAGDVESNPGPSRSRGHMTEYKPTVRLATRDDVPRAVRTLAAAFADYPATRHTVDPDRHIERVTELQELFLTRVGLDIGKVWVADDGAAVAVWTTPESVEAGAVFAEIGPRMAELSGSRLAAQQQMEGLLAPHRPKEPAWFLATVGVSPDHQGKGLGSAVVLPGVEAAERAGVPAFLETSAPRNLPFYERLGFTVTADVEVPEGPRTWCMTRKPGA

SEQ ID NO: 17014 - protein, 1157 aa, Artificial Sequence
  Synthetic Polypeptide
MALPVTALLLPLALLLHAARPEVQLLESGGGLVQPGGSLRLSCAASGFTFSSYAMSWVRQAPGKGLEWVSSISGSGDYIYYADSVKGRFTISRDISKNTLYLQMNSLRAEDTAVYYCAKEGTGANSSLADYRGQGTLVTVSSGGGSGGGSEVQVLESGGGLVQPGGSLRLSCAASGFTFSNFAMSWVRQAPGKGLEWVSTISGSAGTTDYADSVKGRFTISRDNSKKTLYLQMNSLRVEDTAVYYCADGRGPFFDYRGQGTLVTVSSGTGGGGSGGGGSGGGGSEFDIQMTQSPSSLSASVGDRVTITCKASDHINNWLAWYQQKPGQAPKLLIYGATTLETGVPSRFSGSGSGTDYTLTISSLQPEDFATYYCQQSWNTPWTFGQGTKLEIKRLEGKPIPNPLLGLDSTGSGDKQLDADVSPKPTIFLPSIAETKLQKAGTYLCLLEKFFPDVIKIHWQEKKSNTILGSQEGNTMKTNDTYMKFSWLTVPEKSLDKEHRCIVRHENNKNGVDQEIIFPPIKTDVITMDPKDNCSKDANDTLLLQLTNTSAYYMYLLLLLKSVVYFAIITCCLLRRTAFCCNGEKSRAKRSGSGATNFSLLKQAGDVEENPGPTSMDWIWRILFLVGAATGAHSFEQVQLQQPGAELVKPGASVKMSCKASGYAFSSYWINWMKQKPGQGLEWIGQIYPGDGDTNYNGKFKGRATLTADTSSSTAYMQLSSLTSEDSAVYFCARSITTVVGCAMDYWGQGTSVTVSSTREQKLISEEDGSGSQPHTKPSVFVMKNGTNVACLVKEFYPKDIRINLVSSKKITEFDPAIVISPSGKYNAVKLGKYEDSNSVTCSVQHDNKTVHSTDFEVKTDSTDHVKPKETENTKQPSKSCHKPKAIVHTEKVNMMSLTVLGLRMLFAKTVAVNFLLTAKLFFLRAKRSGSGVKQTLNFDLLKLAGDVESNPGPSRGHMTEYKPTVRLATRDDVPRAVRTLAAAFADYPATRHTVDPDRHIERVTELQELFLTRVGLDIGKVWVADDGAAVAVWTTPESVEAGAVFAEIGPRMAELSGSRLAAQQQMEGLLAPHRPKEPAWFLATVGVSPDHQGKGLGSAVVLPGVEAAERAGVPAFLETSAPRNLPFYERLGFTVTADVEVPEGPRTWCMTRKPGA

SEQ ID NO: 17015 - protein, 895 aa, Artificial Sequence
  Synthetic Polypeptide
MALPVTALLLPLALLLHAARPEVQLLESGGGLVQPGGSLRLSCAASGFTFSSYAMSWVRQAPGKGLEWVSSISGSGDYIYYADSVKGRFTISRDISKNTLYLQMNSLRAEDTAVYYCAKEGTGANSSLADYRGQGTLVTVSSGGGSGGGSEVQVLESGGGLVQPGGSLRLSCAASGFTFSNFAMSWVRQAPGKGLEWVSTISGSAGTTDYADSVKGRFTISRDNSKKTLYLQMNSLRVEDTAVYYCADGRGPFFDYRGQGTLVTVSSGTGGGGSGGGGSGGGGSEFDIQMTQSPSSLSASVGDRVTITCKASDHINNWLAWYQQKPGQAPKLLIYGATTLETGVPSRFSGSGSGTDYTLTISSLQPEDFATYYCQQSWNTPWTFGQGTKLEIKRLESQPHTKPSVFVMKNGTNVACLVKEFYPKDIRINLVSSKKITEFDPAIVISPSGKYNAVKLGKYEDSNSVTCSVQHDNKTVHSTDFEVKTDSTDHVKPKETENTKQPSKSCHKPKAIVHTEKVNMMSLTVLGLRMLFAKTVAVNFLLTAKLFFLRAKRSGSGATNFSLLKQAGDVEENPGPTSMDWIWRILFLVGAATGAHSFEQVQLQQPGAELVKPGASVKMSCKASGYAFSSYWINWMKQKPGQGLEWIGQIYPGDGDTNYNGKFKGRATLTADTSSSTAYMQLSSLTSEDSAVYFCARSITTVVGCAMDYWGQGTSVTVSSTRDKQLDADVSPKPTIFLPSIAETKLQKAGTYLCLLEKFFPDVIKIHWQEKKSNTILGSQEGNTMKTNDTYMKFSWLTVPEKSLDKEHRCIVRHENNKNGVDQEIIFPPIKTDVITMDPKDNCSKDANDTLLLQLTNTSAYYMYLLLLLKSVVYFAIITCCLLRRTAFCCNGEKS

SEQ ID NO: 17016 - protein, 1172 aa, Artificial Sequence
  Synthetic Polypeptide
MALPVTALLLPLALLLHAARPLEGKPIPNPLLGLDSTGSGDKQLDADVSPKPTIFLPSIAETKLQKAGTYLCLLEKFFPDVIKIHWQEKKSNTILGSQEGNTMKTNDTYMKFSWLTVPEKSLDKEHRCIVRHENNKNGVDQEIIFPPIKTDVITMDPKDNCSKDANDTLLLQLTNTSAYYMYLLLLLKSVVYFAIITCCLLRRTAFCCNGEKSRAKRSGSGATNFSLLKQAGDVEENPGPTSMALPVTALLLPLALLLHAARPEVQLLESGGGLVQPGGSLRLSCAASGFTFSSYAMSWVRQAPGKGLEWVSSISGSGDYIYYADSVKGRFTISRDISKNTLYLQMNSLRAEDTAVYYCAKEGTGANSSLADYRGQGTLVTVSSGGGSGGGSEVQVLESGGGLVQPGGSLRLSCAASGFTFSNFAMSWVRQAPGKGLEWVSTISGSAGTTDYADSVKGRFTISRDNSKKTLYLQMNSLRVEDTAVYYCADGRGPFFDYRGQGTLVTVSSGTGGGGSGGGGSGGGGSEFDIQMTQSPSSLSASVGDRVTITCKASDHINNWLAWYQQKPGQAPKLLIYGATTLETGVPSRFSGSGSGTDYTLTISSLQPEDFATYYCQQSWNTPWTFGQGTKLEIKRGGGGSGGGGSGGGGSQVQLQQPGAELVKPGASVKMSCKASGYAFSSYWINWMKQKPGQGLEWIGQIYPGDGDTNYNGKFKGRATLTADTSSSTAYMQLSSLTSEDSAVYFCARSITTVVGCAMDYWGQGTSVTVSSTREQKLISEEDGSGSQPHTKPSVFVMKNGTNVACLVKEFYPKDIRINLVSSKKITEFDPAIVISPSGKYNAVKLGKYEDSNSVTCSVQHDNKTVHSTDFEVKTDSTDHVKPKETENTKQPSKSCHKPKAIVHTEKVNMMSLTVLGLRMLFAKTVAVNFLLTAKLFFLRAKRSGSGVKQTLNFDLLKLAGDVESNPGPSRGHMTEYKPTVRLATRDDVPRAVRTLAAAFADYPATRHTVDPDRHIERVTELQELFLTRVGLDIGKVWVADDGAAVAVWTTPESVEAGAVFAEIGPRMAELSGSRLAAQQQMEGLLAPHRPKEPAWFLATVGVSPDHQGKGLGSAVVLPGVEAAERAGVPAFLETSAPRNLPFYERLGFTVTADVEVPEGPRTWCMTRKPGA

SEQ ID NO: 17017 - protein, 1297 aa, Artificial Sequence
  Synthetic Polypeptide
MALPVTALLLPLALLLHAARPEVQLLESGGGLVQPGGSLRLSCAASGFTFSSYAMSWVRQAPGKGLEWVSSISGSGDYIYYADSVKGRFTISRDISKNTLYLQMNSLRAEDTAVYYCAKEGTGANSSLADYRGQGTLVTVSSGGGSGGGSEVQVLESGGGLVQPGGSLRLSCAASGFTFSNFAMSWVRQAPGKGLEWVSTISGSAGTTDYADSVKGRFTISRDNSKKTLYLQMNSLRVEDTAVYYCADGRGPFFDYRGQGTLVTVSSGTGGGGSGGGGSGGGGSEFDIQMTQSPSSLSASVGDRVTITCKASDHINNWLAWYQQKPGQAPKLLIYGATTLETGVPSRFSGSGSGTDYTLTISSLQPEDFATYYCQQSWNTPWTFGQGTKLEIKRGQPKANPTVTLFPPSSEELQANKATLVCLISDFYPGAVTVAWKADGSPVKAGVETTKPSKQSNNKYAASSYLSLTPEQWKSHRSYSCQVTHEGSTVEKTVAPTECSGSQSFGLLDPKLCYLLDGILFIYGVILTALFLRVKFSRSADAPAYQQGQNQLYNELNLGRREEYDVLDKRRGRDPEMGGKPQRRKNPQEGLYNELQKDKMAEAYSEIGMKGERRRGKGHDGLYQGLSTATKDTYDALHMQALPPRRAKRSGSGATNFSLLKQAGDVEENPGPTSMDWIWRILFLVGAATGAHSFEQVQLQQPGAELVKPGASVKMSCKASGYAFSSYWINWMKQKPGQGLEWIGQIYPGDGDTNYNGKFKGRATLTADTSSSTAYMQLSSLTSEDSAVYFCARSITTVVGCAMDYWGQGTSVTVSSASTKGPSVFPLAPSSKSTSGGTAALGCLVKDYFPEPVTVSWNSGALTSGVHTFPAVLQSSGLYSLSSVVTVPSSSLGTQTYICNVNHKPSNTKVDKRVEPKSCGTQSFGLLDPKLCYLLDGILFIYGVILTALFLRVKFSRSADAPAYQQGQNQLYNELNLGRREEYDVLDKRRGRDPEMGGKPQRRKNPQEGLYNELQKDKMAEAYSEIGMKGERRRGKGHDGLYQGLSTATKDTYDALHMQALPPRRAKRSGSGVKQTLNFDLLKLAGDVESNPGPSRGHMTEYKPTVRLATRDDVPRAVRTLAAAFADYPATRHTVDPDRHIERVTELQELFLTRVGLDIGKVWVADDGAAVAVWTTPESVEAGAVFAEIGPRMAELSGSRLAAQQQMEGLLAPHRPKEPAWFLATVGVSPDHQGKGLGSAVVLPGVEAAERAGVPAFLETSAPRNLPFYERLGFTVTADVEVPEGPRTWCMTRKPGA

SEQ ID NO: 17018 - protein, 1083 aa, Artificial Sequence
  Synthetic Polypeptide
MALPVTALLLPLALLLHAARPEVQLLESGGGLVQPGGSLRLSCAASGFTFSSYAMSWVRQAPGKGLEWVSSISGSGDYIYYADSVKGRFTISRDISKNTLYLQMNSLRAEDTAVYYCAKEGTGANSSLADYRGQGTLVTVSSGGGSGGGSEVQVLESGGGLVQPGGSLRLSCAASGFTFSNFAMSWVRQAPGKGLEWVSTISGSAGTTDYADSVKGRFTISRDNSKKTLYLQMNSLRVEDTAVYYCADGRGPFFDYRGQGTLVTVSSGTGGGGSGGGGSGGGGSEFDIQMTQSPSSLSASVGDRVTITCKASDHINNWLAWYQQKPGQAPKLLIYGATTLETGVPSRFSGSGSGTDYTLTISSLQPEDFATYYCQQSWNTPWTFGQGTKLEIKRLEDLKNVFPPEVAVFEPSEAEISHTQKATLVCLATGFYPDHVELSWWVNGKEVHSGVSTDPQPLKEQPALNDSRYCLSSRLRVSATFWQNPRNHFRCQVQFYGLSENDEWTQDRAKPVTQIVSAEAWGRADCGSQSFGLLDPKLCYLLDGILFIYGVILTALFLRVKFSRSADAPAYQQGQNQLYNELNLGRREEYDVLDKRRGRDPEMGGKPQRRKNPQEGLYNELQKDKMAEAYSEIGMKGERRRGKGHDGLYQGLSTATKDTYDALHMQALPPRRAKRSGSGATNFSLLKQAGDVEENPGPTSMDWIWRILFLVGAATGAHSFEQVQLQQPGAELVKPGASVKMSCKASGYAFSSYWINWMKQKPGQGLEWIGQIYPGDGDTNYNGKFKGRATLTADTSSSTAYMQLSSLTSEDSAVYFCARSITTVVGCAMDYWGQGTSVTVSSTRIQNPDPAVYQLRDSKSSDKSVCLFTDFDSQTNVSQSKDSDVYITDKTVLDMRSMDFKSNSAVAWSNKSDFACANAFNNSIIPEDTFFPSPESSCGTQSFGLLDPKLCYLLDGILFIYGVILTALFLRVKFSRSADAPAYQQGQNQLYNELNLGRREEYDVLDKRRGRDPEMGGKPQRRKNPQEGLYNELQKDKMAEAYSEIGMKGERRRGKGHDGLYQGLSTATKDTYDALHMQALPPR

SEQ ID NO: 17019 - protein, 1083 aa, Artificial Sequence
  Synthetic Polypeptide
MALPVTALLLPLALLLHAARPEVQLLESGGGLVQPGGSLRLSCAASGFTFSSYAMSWVRQAPGKGLEWVSSISGSGDYIYYADSVKGRFTISRDISKNTLYLQMNSLRAEDTAVYYCAKEGTGANSSLADYRGQGTLVTVSSGGGSGGGSEVQVLESGGGLVQPGGSLRLSCAASGFTFSNFAMSWVRQAPGKGLEWVSTISGSAGTTDYADSVKGRFTISRDNSKKTLYLQMNSLRVEDTAVYYCADGRGPFFDYRGQGTLVTVSSGTGGGGSGGGGSGGGGSEFDIQMTQSPSSLSASVGDRVTITCKASDHINNWLAWYQQKPGQAPKLLIYGATTLETGVPSRFSGSGSGTDYTLTISSLQPEDFATYYCQQSWNTPWTFGQGTKLEIKRLEDLKNVFPPEVAVFEPSKAEIAHTQKATLVCLATGFYPDHVELSWWVNGKEVHSGVCTDPQPLKEQPALNDSRYCLSSRLRVSATFWQNPRNHFRCQVQFYGLSENDEWTQDRAKPVTQIVSAEAWGRADCGSQSFGLLDPKLCYLLDGILFIYGVILTALFLRVKFSRSADAPAYQQGQNQLYNELNLGRREEYDVLDKRRGRDPEMGGKPQRRKNPQEGLYNELQKDKMAEAYSEIGMKGERRRGKGHDGLYQGLSTATKDTYDALHMQALPPRRAKRSGSGATNFSLLKQAGDVEENPGPTSMDWIWRILFLVGAATGAHSFEQVQLQQPGAELVKPGASVKMSCKASGYAFSSYWINWMKQKPGQGLEWIGQIYPGDGDTNYNGKFKGRATLTADTSSSTAYMQLSSLTSEDSAVYFCARSITTVVGCAMDYWGQGTSVTVSSTRIQNPDPAVYQLRDSKSSDKSVCLFTDFDSQTNVSQSKDSDVYITDKCVLDMRSMDFKSNSAVAWSNKSDFACANAFNNSIIPEDTFFPSSDVPCGTQSFGLLDPKLCYLLDGILFIYGVILTALFLRVKFSRSADAPAYQQGQNQLYNELNLGRREEYDVLDKRRGRDPEMGGKPQRRKNPQEGLYNELQKDKMAEAYSEIGMKGERRRGKGHDGLYQGLSTATKDTYDALHMQALPPR

SEQ ID NO: 17020 - protein, 1154 aa, Artificial Sequence
  Synthetic Polypeptide
MALPVTALLLPLALLLHAARPEVQLLESGGGLVQPGGSLRLSCAASGFTFSSYAMSWVRQAPGKGLEWVSSISGSGDYIYYADSVKGRFTISRDISKNTLYLQMNSLRAEDTAVYYCAKEGTGANSSLADYRGQGTLVTVSSGGGSGGGSEVQVLESGGGLVQPGGSLRLSCAASGFTFSNFAMSWVRQAPGKGLEWVSTISGSAGTTDYADSVKGRFTISRDNSKKTLYLQMNSLRVEDTAVYYCADGRGPFFDYRGQGTLVTVSSGTGGGGSGGGGSGGGGSEFDIQMTQSPSSLSASVGDRVTITCKASDHINNWLAWYQQKPGQAPKLLIYGATTLETGVPSRFSGSGSGTDYTLTISSLQPEDFATYYCQQSWNTPWTFGQGTKLEIKRLEGKPIPNPLLGLDSTGSGEDLKNVFPPEVAVFEPSEAEISHTQKATLVCLATGFYPDHVELSWWVNGKEVHSGVSTDPQPLKEQPALNDSRYCLSSRLRVSATFWQNPRNHFRCQVQFYGLSENDEWTQDRAKPVTQIVSAEAWGRADCGSQSFGLLDPKLCYLLDGILFIYGVILTALFLRVKFSRSADAPAYQQGQNQLYNELNLGRREEYDVLDKRRGRDPEMGGKPQRRKNPQEGLYNELQKDKMAEAYSEIGMKGERRRGKGHDGLYQGLSTATKDTYDALHMQALPPRRAKRSGSGATNFSLLKQAGDVEENPGPTSMDWIWRILFLVGAATGAHSFEQVQLQQPGAELVKPGASVKMSCKASGYAFSSYWINWMKQKPGQGLEWIGQIYPGDGDTNYNGKFKGRATLTADTSSSTAYMQLSSLTSEDSAVYFCARSITTVVGCAMDYWGQGTSVTVSSTREQKLISEEDGSGIQNPDPAVYQLRDSKSSDKSVCLFTDFDSQTNVSQSKDSDVYITDKTVLDMRSMDFKSNSAVAWSNKSDFACANAFNNSIIPEDTFFPSPESSCGTQSFGLLDPKLCYLLDGILFIYGVILTALFLRSKRSRLLHSDYMNMTPRRPGPTRKHYQPYAPPRDFAAYRSRVKFSRSADAPAYQQGQNQLYNELNLGRREEYDVLDKRRGRDPEMGGKPQRRKNPQEGLYNELQKDKMAEAYSEIGMKGERRRGKGHDGLYQGLSTATKDTYDALHMQALPPR

SEQ ID NO: 17021 - protein, 1195 aa, Artificial Sequence
  Synthetic Polypeptide
MALPVTALLLPLALLLHAARPEVQLLESGGGLVQPGGSLRLSCAASGFTFSSYAMSWVRQAPGKGLEWVSSISGSGDYIYYADSVKGRFTISRDISKNTLYLQMNSLRAEDTAVYYCAKEGTGANSSLADYRGQGTLVTVSSGGGSGGGSEVQVLESGGGLVQPGGSLRLSCAASGFTFSNFAMSWVRQAPGKGLEWVSTISGSAGTTDYADSVKGRFTISRDNSKKTLYLQMNSLRVEDTAVYYCADGRGPFFDYRGQGTLVTVSSGTGGGGSGGGGSGGGGSEFDIQMTQSPSSLSASVGDRVTITCKASDHINNWLAWYQQKPGQAPKLLIYGATTLETGVPSRFSGSGSGTDYTLTISSLQPEDFATYYCQQSWNTPWTFGQGTKLEIKRLEGKPIPNPLLGLDSTGSGEDLKNVFPPEVAVFEPSEAEISHTQKATLVCLATGFYPDHVELSWWVNGKEVHSGVSTDPQPLKEQPALNDSRYCLSSRLRVSATFWQNPRNHFRCQVQFYGLSENDEWTQDRAKPVTQIVSAEAWGRADCGSQSFGLLDPKLCYLLDGILFIYGVILTALFLRSKRSRLLHSDYMNMTPRRPGPTRKHYQPYAPPRDFAAYRSRVKFSRSADAPAYQQGQNQLYNELNLGRREEYDVLDKRRGRDPEMGGKPQRRKNPQEGLYNELQKDKMAEAYSEIGMKGERRRGKGHDGLYQGLSTATKDTYDALHMQALPPRRAKRSGSGATNFSLLKQAGDVEENPGPTSMDWIWRILFLVGAATGAHSFEQVQLQQPGAELVKPGASVKMSCKASGYAFSSYWINWMKQKPGQGLEWIGQIYPGDGDTNYNGKFKGRATLTADTSSSTAYMQLSSLTSEDSAVYFCARSITTVVGCAMDYWGQGTSVTVSSTREQKLISEEDGSGIQNPDPAVYQLRDSKSSDKSVCLFTDFDSQTNVSQSKDSDVYITDKTVLDMRSMDFKSNSAVAWSNKSDFACANAFNNSIIPEDTFFPSPESSCGTQSFGLLDPKLCYLLDGILFIYGVILTALFLRSKRSRLLHSDYMNMTPRRPGPTRKHYQPYAPPRDFAAYRSRVKFSRSADAPAYQQGQNQLYNELNLGRREEYDVLDKRRGRDPEMGGKPQRRKNPQEGLYNELQKDKMAEAYSEIGMKGERRRGKGHDGLYQGLSTATKDTYDALHMQALPPR

SEQ ID NO: 17022 - protein, 1156 aa, Artificial Sequence
  Synthetic Polypeptide
MALPVTALLLPLALLLHAARPEVQLLESGGGLVQPGGSLRLSCAASGFTFSSYAMSWVRQAPGKGLEWVSSISGSGDYIYYADSVKGRFTISRDISKNTLYLQMNSLRAEDTAVYYCAKEGTGANSSLADYRGQGTLVTVSSGGGSGGGSEVQVLESGGGLVQPGGSLRLSCAASGFTFSNFAMSWVRQAPGKGLEWVSTISGSAGTTDYADSVKGRFTISRDNSKKTLYLQMNSLRVEDTAVYYCADGRGPFFDYRGQGTLVTVSSGTGGGGSGGGGSGGGGSEFDIQMTQSPSSLSASVGDRVTITCKASDHINNWLAWYQQKPGQAPKLLIYGATTLETGVPSRFSGSGSGTDYTLTISSLQPEDFATYYCQQSWNTPWTFGQGTKLEIKRLEGKPIPNPLLGLDSTGSGEDLKNVFPPEVAVFEPSEAEISHTQKATLVCLATGFYPDHVELSWWVNGKEVHSGVSTDPQPLKEQPALNDSRYCLSSRLRVSATFWQNPRNHFRCQVQFYGLSENDEWTQDRAKPVTQIVSAEAWGRADCGSQSFGLLDPKLCYLLDGILFIYGVILTALFLRVKFSRSADAPAYQQGQNQLYNELNLGRREEYDVLDKRRGRDPEMGGKPQRRKNPQEGLYNELQKDKMAEAYSEIGMKGERRRGKGHDGLYQGLSTATKDTYDALHMQALPPRRAKRSGSGATNFSLLKQAGDVEENPGPTSMDWIWRILFLVGAATGAHSFEQVQLQQPGAELVKPGASVKMSCKASGYAFSSYWINWMKQKPGQGLEWIGQIYPGDGDTNYNGKFKGRATLTADTSSSTAYMQLSSLTSEDSAVYFCARSITTVVGCAMDYWGQGTSVTVSSTREQKLISEEDLGSGIQNPDPAVYQLRDSKSSDKSVCLFTDFDSQTNVSQSKDSDVYITDKTVLDMRSMDFKSNSAVAWSNKSDFACANAFNNSIIPEDTFFPSPESSCGTQSFGLLDPKLCYLLDGILFIYGVILTALFLKRGRKKLLYIFKQPFMRPVQTTQEEDGCSCRFPEEEEGGCELRVKFSRSADAPAYQQGQNQLYNELNLGRREEYDVLDKRRGRDPEMGGKPQRRKNPQEGLYNELQKDKMAEAYSEIGMKGERRRGKGHDGLYQGLSTATKDTYDALHMQALPPR

SEQ ID NO: 17023 - protein, 1198 aa, Artificial Sequence
  Synthetic Polypeptide
MALPVTALLLPLALLLHAARPEVQLLESGGGLVQPGGSLRLSCAASGFTFSSYAMSWVRQAPGKGLEWVSSISGSGDYIYYADSVKGRFTISRDISKNTLYLQMNSLRAEDTAVYYCAKEGTGANSSLADYRGQGTLVTVSSGGGSGGGSEVQVLESGGGLVQPGGSLRLSCAASGFTFSNFAMSWVRQAPGKGLEWVSTISGSAGTTDYADSVKGRFTISRDNSKKTLYLQMNSLRVEDTAVYYCADGRGPFFDYRGQGTLVTVSSGTGGGGSGGGGSGGGGSEFDIQMTQSPSSLSASVGDRVTITCKASDHINNWLAWYQQKPGQAPKLLIYGATTLETGVPSRFSGSGSGTDYTLTISSLQPEDFATYYCQQSWNTPWTFGQGTKLEIKRLEGKPIPNPLLGLDSTGSGEDLKNVFPPEVAVFEPSEAEISHTQKATLVCLATGFYPDHVELSWWVNGKEVHSGVSTDPQPLKEQPALNDSRYCLSSRLRVSATFWQNPRNHFRCQVQFYGLSENDEWTQDRAKPVTQIVSAEAWGRADCGSQSFGLLDPKLCYLLDGILFIYGVILTALFLKRGRKKLLYIFKQPFMRPVQTTQEEDGCSCRFPEEEEGGCELRVKFSRSADAPAYQQGQNQLYNELNLGRREEYDVLDKRRGRDPEMGGKPQRRKNPQEGLYNELQKDKMAEAYSEIGMKGERRRGKGHDGLYQGLSTATKDTYDALHMQALPPRRAKRSGSGATNFSLLKQAGDVEENPGPTSMDWIWRILFLVGAATGAHSFEQVQLQQPGAELVKPGASVKMSCKASGYAFSSYWINWMKQKPGQGLEWIGQIYPGDGDTNYNGKFKGRATLTADTSSSTAYMQLSSLTSEDSAVYFCARSITTVVGCAMDYWGQGTSVTVSSTREQKLISEEDLGSGIQNPDPAVYQLRDSKSSDKSVCLFTDFDSQTNVSQSKDSDVYITDKTVLDMRSMDFKSNSAVAWSNKSDFACANAFNNSIIPEDTFFPSPESSCGTQSFGLLDPKLCYLLDGILFIYGVILTALFLKRGRKKLLYIFKQPFMRPVQTTQEEDGCSCRFPEEEEGGCELRVKFSRSADAPAYQQGQNQLYNELNLGRREEYDVLDKRRGRDPEMGGKPQRRKNPQEGLYNELQKDKMAEAYSEIGMKGERRRGKGHDGLYQGLSTATKDTYDALHMQALPPR

SEQ ID NO: 17024 - protein, 1088 aa, Artificial Sequence
  Synthetic Polypeptide
MALPVTALLLPLALLLHAARPEVQLLESGGGLVQPGGSLRLSCAASGFTFSSYAMSWVRQAPGKGLEWVSSISGSGDYIYYADSVKGRFTISRDISKNTLYLQMNSLRAEDTAVYYCAKEGTGANSSLADYRGQGTLVTVSSGGGSGGGSEVQVLESGGGLVQPGGSLRLSCAASGFTFSNFAMSWVRQAPGKGLEWVSTISGSAGTTDYADSVKGRFTISRDNSKKTLYLQMNSLRVEDTAVYYCADGRGPFFDYRGQGTLVTVSSGTGGGGSGGGGSGGGGSEFDIQMTQSPSSLSASVGDRVTITCKASDHINNWLAWYQQKPGQAPKLLIYGATTLETGVPSRFSGSGSGTDYTLTISSLQPEDFATYYCQQSWNTPWTFGQGTKLEIKRLEQSFGLLDPKLCYLLDGILFIYGVILTALFLRVKFSRSADAPAYQQGQNQLYNELNLGRREEYDVLDKRRGRDPEMGGKPQRRKNPQEGLYNELQKDKMAEAYSEIGMKGERRRGKGHDGLYQGLSTATKDTYDALHMQALPPRRAKRSGSGATNFSLLKQAGDVEENPGPTSMDWIWRILFLVGAATGAHSFEQVQLQQPGAELVKPGASVKMSCKASGYAFSSYWINWMKQKPGQGLEWIGQIYPGDGDTNYNGKFKGRATLTADTSSSTAYMQLSSLTSEDSAVYFCARSITTVVGCAMDYWGQGTSVTVSSTRQSFGLLDPKLCYLLDGILFIYGVILTALFLRVKFSRSADAPAYQQGQNQLYNELNLGRREEYDVLDKRRGRDPEMGGKPQRRKNPQEGLYNELQKDKMAEAYSEIGMKGERRRGKGHDGLYQGLSTATKDTYDALHMQALPPRRAKRSGSGVKQTLNFDLLKLAGDVESNPGPSRGHMTEYKPTVRLATRDDVPRAVRTLAAAFADYPATRHTVDPDRHIERVTELQELFLTRVGLDIGKVWVADDGAAVAVWTTPESVEAGAVFAEIGPRMAELSGSRLAAQQQMEGLLAPHRPKEPAWFLATVGVSPDHQGKGLGSAVVLPGVEAAERAGVPAFLETSAPRNLPFYERLGFTVTADVEVPEGPRTWCMTRKPGA

SEQ ID NO: 17025 - protein, 913 aa, Artificial Sequence
  Synthetic Polypeptide
MALPVTALLLPLALLLHAARPEVQLLESGGGLVQPGGSLRLSCAASGFTFSSYAMSWVRQAPGKGLEWVSSISGSGDYIYYADSVKGRFTISRDISKNTLYLQMNSLRAEDTAVYYCAKEGTGANSSLADYRGQGTLVTVSSGGGSGGGSEVQVLESGGGLVQPGGSLRLSCAASGFTFSNFAMSWVRQAPGKGLEWVSTISGSAGTTDYADSVKGRFTISRDNSKKTLYLQMNSLRVEDTAVYYCADGRGPFFDYRGQGTLVTVSSGTGGGGSGGGGSGGGGSEFDIQMTQSPSSLSASVGDRVTITCKASDHINNWLAWYQQKPGQAPKLLIYGATTLETGVPSRFSGSGSGTDYTLTISSLQPEDFATYYCQQSWNTPWTFGQGTKLEIKRLEGQPKANPTVTLFPPSSEELQANKATLVCLISDFYPGAVTVAWKADGSPVKAGVETTKPSKQSNNKYAASSYLSLTPEQWKSHRSYSCQVTHEGSTVEKTVAPTECSPIKTDVITMDPKDNCSKDANDTLLLQLTNTSAYYMYLLLLLKSVVYFAIITCCLLRRTAFCCNGEKSRAKRSGSGATNFSLLKQAGDVEENPGPTSMDWIWRILFLVGAATGAHSFEQVQLQQPGAELVKPGASVKMSCKASGYAFSSYWINWMKQKPGQGLEWIGQIYPGDGDTNYNGKFKGRATLTADTSSSTAYMQLSSLTSEDSAVYFCARSITTVVGCAMDYWGQGTSVTVSSTRASTKGPSVFPLAPSSKSTSGGTAALGCLVKDYFPEPVTVSWNSGALTSGVHTFPAVLQSSGLYSLSSVVTVPSSSLGTQTYICNVNHKPSNTKVDKRVEPKSCEVKTDSTDHVKPKETENTKQPSKSCHKPKAIVHTEKVNMMSLTVLGLRMLFAKTVAVNFLLTAKLFFL

SEQ ID NO: 17026 - protein, 891 aa, Artificial Sequence
  Synthetic Polypeptide
MALPVTALLLPLALLLHAARPEVQLLESGGGLVQPGGSLRLSCAASGFTFSSYAMSWVRQAPGKGLEWVSSISGSGDYIYYADSVKGRFTISRDISKNTLYLQMNSLRAEDTAVYYCAKEGTGANSSLADYRGQGTLVTVSSGGGSGGGSEVQVLESGGGLVQPGGSLRLSCAASGFTFSNFAMSWVRQAPGKGLEWVSTISGSAGTTDYADSVKGRFTISRDNSKKTLYLQMNSLRVEDTAVYYCADGRGPFFDYRGQGTLVTVSSGTGGGGSGGGGSGGGGSEFDIQMTQSPSSLSASVGDRVTITCKASDHINNWLAWYQQKPGQAPKLLIYGATTLETGVPSRFSGSGSGTDYTLTISSLQPEDFATYYCQQSWNTPWTFGQGTKLEIKRLEGQPKANPTVTLFPPSSEELQANKATLVCLISDFYPGAVTVAWKADGSPVKAGVETTKPSKQSNNKYAASSYLSLTPEQWKSHRSYSCQVTHEGSTVEKTVAPTECSGRADCGITSASYHQGVLSATILYEILLGKATLYAVLVSALVLMAMVKRKDSRGRAKRSGSGATNFSLLKQAGDVEENPGPTSMDWIWRILFLVGAATGAHSFEQVQLQQPGAELVKPGASVKMSCKASGYAFSSYWINWMKQKPGQGLEWIGQIYPGDGDTNYNGKFKGRATLTADTSSSTAYMQLSSLTSEDSAVYFCARSITTVVGCAMDYWGQGTSVTVSSTRASTKGPSVFPLAPSSKSTSGGTAALGCLVKDYFPEPVTVSWNSGALTSGVHTFPAVLQSSGLYSLSSVVTVPSSSLGTQTYICNVNHKPSNTKVDKRVEPKSCIPEDTFFPSSDVPCDVKLVEKSFETDTNLNFQNLSVIGFRILLLKVAGFNLLMTLRLWSS

SEQ ID NO: 17027 - protein, 891 aa, Artificial Sequence
  Synthetic Polypeptide
MALPVTALLLPLALLLHAARPEVQLLESGGGLVQPGGSLRLSCAASGFTFSSYAMSWVRQAPGKGLEWVSSISGSGDYIYYADSVKGRFTISRDISKNTLYLQMNSLRAEDTAVYYCAKEGTGANSSLADYRGQGTLVTVSSGGGSGGGSEVQVLESGGGLVQPGGSLRLSCAASGFTFSNFAMSWVRQAPGKGLEWVSTISGSAGTTDYADSVKGRFTISRDNSKKTLYLQMNSLRVEDTAVYYCADGRGPFFDYRGQGTLVTVSSGTGGGGSGGGGSGGGGSEFDIQMTQSPSSLSASVGDRVTITCKASDHINNWLAWYQQKPGQAPKLLIYGATTLETGVPSRFSGSGSGTDYTLTISSLQPEDFATYYCQQSWNTPWTFGQGTKLEIKRLEGQPKANPTVTLFPPSSEELQANKATLVCLISDFYPGAVTVAWKADGSPVKAGVETTKPSKQSNNKYAASSYLSLTPEQWKSHRSYSCQVTHEGSTVEKTVAPTECSGRADCGFTSESYQQGVLSATILYEILLGKATLYAVLVSALVLMAMVKRKDSRGRAKRSGSGATNFSLLKQAGDVEENPGPTSMDWIWRILFLVGAATGAHSFEQVQLQQPGAELVKPGASVKMSCKASGYAFSSYWINWMKQKPGQGLEWIGQIYPGDGDTNYNGKFKGRATLTADTSSSTAYMQLSSLTSEDSAVYFCARSITTVVGCAMDYWGQGTSVTVSSTRASTKGPSVFPLAPSSKSTSGGTAALGCLVKDYFPEPVTVSWNSGALTSGVHTFPAVLQSSGLYSLSSVVTVPSSSLGTQTYICNVNHKPSNTKVDKRVEPKSCIPEDTFFPSPESSCDVKLVEKSFETDTNLNFQNLSVIGFRILLLKVAGFNLLMTLRLWSS

SEQ ID NO: 17028 - protein, 717 aa, Artificial Sequence
  Synthetic Polypeptide
MALPVTALLLPLALLLHAARPEVQLLESGGGLVQPGGSLRLSCAASGFTFSSYAMSWVRQAPGKGLEWVSSISGSGDYIYYADSVKGRFTISRDISKNTLYLQMNSLRAEDTAVYYCAKEGTGANSSLADYRGQGTLVTVSSGGGSGGGSEVQVLESGGGLVQPGGSLRLSCAASGFTFSNFAMSWVRQAPGKGLEWVSTISGSAGTTDYADSVKGRFTISRDNSKKTLYLQMNSLRVEDTAVYYCADGRGPFFDYRGQGTLVTVSSGTGGGGSGGGGSGGGGSEFDIQMTQSPSSLSASVGDRVTITCKASDHINNWLAWYQQKPGQAPKLLIYGATTLETGVPSRFSGSGSGTDYTLTISSLQPEDFATYYCQQSWNTPWTFGQGTKLEIKRGGGGSGGGGSGGGGSQVQLQQPGAELVKPGASVKMSCKASGYAFSSYWINWMKQKPGQGLEWIGQIYPGDGDTNYNGKFKGRATLTADTSSSTAYMQLSSLTSEDSAVYFCARSITTVVGCAMDYWGQGTSVTVSSTRDGNEEMGGITQTPYKVSISGTTVILTCPQYPGSEILWQHNDKNIGGDEDDKNIGSDEDHLSLKEFSELEQSGYYVCYPRGSKPEDANFYLYLRARVCENCMEMDVMSVATIVIVDICITGGLLLLVYYWSKNRKAKAKPVTRGAGAGGRQRGQNKERPPPVPNPDYEPIRKGQRDLYSGLNQRRI

SEQ ID NO: 17029 - protein, 682 aa, Artificial Sequence
  Synthetic Polypeptide
MALPVTALLLPLALLLHAARPEVQLLESGGGLVQPGGSLRLSCAASGFTFSSYAMSWVRQAPGKGLEWVSSISGSGDYIYYADSVKGRFTISRDISKNTLYLQMNSLRAEDTAVYYCAKEGTGANSSLADYRGQGTLVTVSSGGGSGGGSEVQVLESGGGLVQPGGSLRLSCAASGFTFSNFAMSWVRQAPGKGLEWVSTISGSAGTTDYADSVKGRFTISRDNSKKTLYLQMNSLRVEDTAVYYCADGRGPFFDYRGQGTLVTVSSGTGGGGSGGGGSGGGGSEFDIQMTQSPSSLSASVGDRVTITCKASDHINNWLAWYQQKPGQAPKLLIYGATTLETGVPSRFSGSGSGTDYTLTISSLQPEDFATYYCQQSWNTPWTFGQGTKLEIKRGGGGSGGGGSGGGGSQVQLQQPGAELVKPGASVKMSCKASGYAFSSYWINWMKQKPGQGLEWIGQIYPGDGDTNYNGKFKGRATLTADTSSSTAYMQLSSLTSEDSAVYFCARSITTVVGCAMDYWGQGTSVTVSSTRFKIPIEELEDRVFVNCNTSITWVEGTVGTLLSDITRLDLGKRILDPRGIYRCNGTDIYKDKESTVQVHYRMCQSCVELDPATVAGIIVTDVIATLLLALGVFCFAGHETGRLSGAADTQALLRNDQVYQPLRDRDDAQYSHLGGNWARNK

SEQ ID NO: 17030 - protein, 692 aa, Artificial Sequence
  Synthetic Polypeptide
MALPVTALLLPLALLLHAARPEVQLLESGGGLVQPGGSLRLSCAASGFTFSSYAMSWVRQAPGKGLEWVSSISGSGDYIYYADSVKGRFTISRDISKNTLYLQMNSLRAEDTAVYYCAKEGTGANSSLADYRGQGTLVTVSSGGGSGGGSEVQVLESGGGLVQPGGSLRLSCAASGFTFSNFAMSWVRQAPGKGLEWVSTISGSAGTTDYADSVKGRFTISRDNSKKTLYLQMNSLRVEDTAVYYCADGRGPFFDYRGQGTLVTVSSGTGGGGSGGGGSGGGGSEFDIQMTQSPSSLSASVGDRVTITCKASDHINNWLAWYQQKPGQAPKLLIYGATTLETGVPSRFSGSGSGTDYTLTISSLQPEDFATYYCQQSWNTPWTFGQGTKLEIKRGGGGSGGGGSGGGGSQVQLQQPGAELVKPGASVKMSCKASGYAFSSYWINWMKQKPGQGLEWIGQIYPGDGDTNYNGKFKGRATLTADTSSSTAYMQLSSLTSEDSAVYFCARSITTVVGCAMDYWGQGTSVTVSSTRQSIKGNHLVKVYDYQEDGSVLLTCDAEAKNITWFKDGKMIGFLTEDKKKWNLGSNAKDPRGMYQCKGSQNKSKPLQVYYRMCQNCIELNAATISGFLFAEIVSIFVLAVGVYFIAGQDGVRQSRASDKQTLLPNDQLYQPLKDREDDQYSHLQGNQLRRN

SEQ ID NO: 17031 - protein, 675 aa, Artificial Sequence
  Synthetic Polypeptide
MALPVTALLLPLALLLHAARPEVQLLESGGGLVQPGGSLRLSCAASGFTFSSYAMSWVRQAPGKGLEWVSSISGSGDYIYYADSVKGRFTISRDISKNTLYLQMNSLRAEDTAVYYCAKEGTGANSSLADYRGQGTLVTVSSGGGSGGGSEVQVLESGGGLVQPGGSLRLSCAASGFTFSNFAMSWVRQAPGKGLEWVSTISGSAGTTDYADSVKGRFTISRDNSKKTLYLQMNSLRVEDTAVYYCADGRGPFFDYRGQGTLVTVSSGTGGGGSGGGGSGGGGSEFDIQMTQSPSSLSASVGDRVTITCKASDHINNWLAWYQQKPGQAPKLLIYGATTLETGVPSRFSGSGSGTDYTLTISSLQPEDFATYYCQQSWNTPWTFGQGTKLEIKRGGGGSGGGGSGGGGSQVQLQQPGAELVKPGASVKMSCKASGYAFSSYWINWMKQKPGQGLEWIGQIYPGDGDTNYNGKFKGRATLTADTSSSTAYMQLSSLTSEDSAVYFCARSITTVVGCAMDYWGQGTSVTVSSTRQSFGLLDPKLCYLLDGILFIYGVILTALFLRVKFSRSADAPAYQQGQNQLYNELNLGRREEYDVLDKRRGRDPEMGGKPQRRKNPQEGLYNELQKDKMAEAYSEIGMKGERRRGKGHDGLYQGLSTATKDTYDALHMQALPPR

SEQ ID NO: 17032 - protein, 908 aa, Artificial Sequence
  Synthetic Polypeptide
MALPVTALLLPLALLLHAARPEVQLLESGGGLVQPGGSLRLSCAASGFTFSSYAMSWVRQAPGKGLEWVSSISGSGDYIYYADSVKGRFTISRDISKNTLYLQMNSLRAEDTAVYYCAKEGTGANSSLADYRGQGTLVTVSSGGGSGGGSEVQVLESGGGLVQPGGSLRLSCAASGFTFSNFAMSWVRQAPGKGLEWVSTISGSAGTTDYADSVKGRFTISRDNSKKTLYLQMNSLRVEDTAVYYCADGRGPFFDYRGQGTLVTVSSGTGGGGSGGGGSGGGGSEFDIQMTQSPSSLSASVGDRVTITCKASDHINNWLAWYQQKPGQAPKLLIYGATTLETGVPSRFSGSGSGTDYTLTISSLQPEDFATYYCQQSWNTPWTFGQGTKLEIKRGGGGSGGGGSGGGGSQVQLQQPGAELVKPGASVKMSCKASGYAFSSYWINWMKQKPGQGLEWIGQIYPGDGDTNYNGKFKGRATLTADTSSSTAYMQLSSLTSEDSAVYFCARSITTVVGCAMDYWGQGTSVTVSSTRGSGIQNPDPAVYQLRDSKSSDKSVCLFTDFDSQTNVSQSKDSDVYITDKTVLDMRSMDFKSNSAVAWSNKSDFACANAFNNSIIPEDTFFPSPESSCDVKLVEKSFETDTNLNFQNLSVIGFRILLLKVAGFNLLMTLRLWSSRAKRSGSGVKQTLNFDLLKLAGDVESNPGPSRGHMTEYKPTVRLATRDDVPRAVRTLAAAFADYPATRHTVDPDRHIERVTELQELFLTRVGLDIGKVWVADDGAAVAVWTTPESVEAGAVFAEIGPRMAELSGSRLAAQQQMEGLLAPHRPKEPAWFLATVGVSPDHQGKGLGSAVVLPGVEAAERAGVPAFLETSAPRNLPFYERLGFTVTADVEVPEGPRTWCMTRKPGA

SEQ ID NO: 17033 - protein, 940 aa, Artificial Sequence
  Synthetic Polypeptide
MALPVTALLLPLALLLHAARPEVQLLESGGGLVQPGGSLRLSCAASGFTFSSYAMSWVRQAPGKGLEWVSSISGSGDYIYYADSVKGRFTISRDISKNTLYLQMNSLRAEDTAVYYCAKEGTGANSSLADYRGQGTLVTVSSGGGSGGGSEVQVLESGGGLVQPGGSLRLSCAASGFTFSNFAMSWVRQAPGKGLEWVSTISGSAGTTDYADSVKGRFTISRDNSKKTLYLQMNSLRVEDTAVYYCADGRGPFFDYRGQGTLVTVSSGTGGGGSGGGGSGGGGSEFDIQMTQSPSSLSASVGDRVTITCKASDHINNWLAWYQQKPGQAPKLLIYGATTLETGVPSRFSGSGSGTDYTLTISSLQPEDFATYYCQQSWNTPWTFGQGTKLEIKRGGGGSGGGGSGGGGSQVQLQQPGAELVKPGASVKMSCKASGYAFSSYWINWMKQKPGQGLEWIGQIYPGDGDTNYNGKFKGRATLTADTSSSTAYMQLSSLTSEDSAVYFCARSITTVVGCAMDYWGQGTSVTVSSLEDLKNVFPPEVAVFEPSEAEISHTQKATLVCLATGFYPDHVELSWWVNGKEVHSGVSTDPQPLKEQPALNDSRYCLSSRLRVSATFWQNPRNHFRCQVQFYGLSENDEWTQDRAKPVTQIVSAEAWGRADCGFTSESYQQGVLSATILYEILLGKATLYAVLVSALVLMAMVKRKDSRGRAKRSGSGATNFSLLKQAGDVEENPGPTRGHMTEYKPTVRLATRDDVPRAVRTLAAAFADYPATRHTVDPDRHIERVTELQELFLTRVGLDIGKVWVADDGAAVAVWTTPESVEAGAVFAEIGPRMAELSGSRLAAQQQMEGLLAPHRPKEPAWFLATVGVSPDHQGKGLGSAVVLPGVEAAERAGVPAFLETSAPRNLPFYERLGFTVTADVEVPEGPRTWCMTRKPGA

SEQ ID NO: 17034 - protein, 990 aa, Artificial Sequence
  Synthetic Polypeptide
MALPVTALLLPLALLLHAARPEVQLLESGGGLVQPGGSLRLSCAASGFTFSSYAMSWVRQAPGKGLEWVSSISGSGDYIYYADSVKGRFTISRDISKNTLYLQMNSLRAEDTAVYYCAKEGTGANSSLADYRGQGTLVTVSSGGGSGGGSEVQVLESGGGLVQPGGSLRLSCAASGFTFSNFAMSWVRQAPGKGLEWVSTISGSAGTTDYADSVKGRFTISRDNSKKTLYLQMNSLRVEDTAVYYCADGRGPFFDYRGQGTLVTVSSGTGGGGSGGGGSGGGGSEFDIQMTQSPSSLSASVGDRVTITCKASDHINNWLAWYQQKPGQAPKLLIYGATTLETGVPSRFSGSGSGTDYTLTISSLQPEDFATYYCQQSWNTPWTFGQGTKLEIKRGGGGSGGGGSGGGGSQVQLQQPGAELVKPGASVKMSCKASGYAFSSYWINWMKQKPGQGLEWIGQIYPGDGDTNYNGKFKGRATLTADTSSSTAYMQLSSLTSEDSAVYFCARSITTVVGCAMDYWGQGTSVTVSSTREQKLISEEDLGSGTPFPSLAPPIMLLVDGKQQMVVVCLVLDVAPPGLDSPIWFSAGNGSALDAFTYGPSPATDGTWTNLAHLSLPSEELASWEPLVCHTGPGAEGHSRSTQPMHLSGEASTARTCPQEPLRGTPGGALWLGVLRLLLFKLLLFDLLLTCSCLCDPAGPLPSPATTTRLRALGSHRLHPATETGGREATSSPRPQPRDRRWGDTPPGRKPGSPVRAKRSGSGVKQTLNFDLLKLAGDVESNPGPSRSRGHMTEYKPTVRLATRDDVPRAVRTLAAAFADYPATRHTVDPDRHIERVTELQELFLTRVGLDIGKVWVADDGAAVAVWTTPESVEAGAVFAEIGPRMAELSGSRLAAQQQMEGLLAPHRPKEPAWFLATVGVSPDHQGKGLGSAVVLPGVEAAERAGVPAFLETSAPRNLPFYERLGFTVTADVEVPEGPRTWCMTRKPGA

SEQ ID NO: 17035 - protein, 804 aa, Artificial Sequence
  Synthetic Polypeptide
MALPVTALLLPLALLLHAARPEVQLLESGGGLVQPGGSLRLSCAASGFTFSSYAMSWVRQAPGKGLEWVSSISGSGDYIYYADSVKGRFTISRDISKNTLYLQMNSLRAEDTAVYYCAKEGTGANSSLADYRGQGTLVTVSSGGGSGGGSEVQVLESGGGLVQPGGSLRLSCAASGFTFSNFAMSWVRQAPGKGLEWVSTISGSAGTTDYADSVKGRFTISRDNSKKTLYLQMNSLRVEDTAVYYCADGRGPFFDYRGQGTLVTVSSGTGGGGSGGGGSGGGGSEFDIQMTQSPSSLSASVGDRVTITCKASDHINNWLAWYQQKPGQAPKLLIYGATTLETGVPSRFSGSGSGTDYTLTISSLQPEDFATYYCQQSWNTPWTFGQGTKLEIKRLEDLKNVFPPEVAVFEPSEAEISHTQKATLVCLATGFYPDHVELSWWVNGKEVHSGVSTDPQPLKEQPALNDSRYCLSSRLRVSATFWQNPRNHFRCQVQFYGLSENDEWTQDRAKPVTQIVSAEAWGRADCGFTSESYQQGVLSATILYEILLGKATLYAVLVSALVLMAMVKRKDSRGRAKRSGSGATNFSLLKQAGDVEENPGPTRGHMTEYKPTVRLATRDDVPRAVRTLAAAFADYPATRHTVDPDRHIERVTELQELFLTRVGLDIGKVWVADDGAAVAVWTTPESVEAGAVFAEIGPRMAELSGSRLAAQQQMEGLLAPHRPKEPAWFLATVGVSPDHQGKGLGSAVVLPGVEAAERAGVPAFLETSAPRNLPFYERLGFTVTADVEVPEGPRTWCMTRKPGA

SEQ ID NO: 17036 - protein, 574 aa, Artificial Sequence
  Synthetic Polypeptide
MALPVTALLLPLALLLHAARPEVQLLESGGGLVQPGGSLRLSCAASGFTFSSYAMSWVRQAPGKGLEWVSSISGSGDYIYYADSVKGRFTISRDISKNTLYLQMNSLRAEDTAVYYCAKEGTGANSSLADYRGQGTLVTVSSGGGSGGGSEVQVLESGGGLVQPGGSLRLSCAASGFTFSNFAMSWVRQAPGKGLEWVSTISGSAGTTDYADSVKGRFTISRDNSKKTLYLQMNSLRVEDTAVYYCADGRGPFFDYRGQGTLVTVSSGTGGGGSGGGGSGGGGSEFDIQMTQSPSSLSASVGDRVTITCKASDHINNWLAWYQQKPGQAPKLLIYGATTLETGVPSRFSGSGSGTDYTLTISSLQPEDFATYYCQQSWNTPWTFGQGTKLEIKRLEDLKNVFPPEVAVFEPSEAEISHTQKATLVCLATGFYPDHVELSWWVNGKEVHSGVSTDPQPLKEQPALNDSRYCLSSRLRVSATFWQNPRNHFRCQVQFYGLSENDEWTQDRAKPVTQIVSAEAWGRADCGFTSESYQQGVLSATILYEILLGKATLYAVLVSALVLMAMVKRKDSRG

SEQ ID NO: 17037 - protein, 822 aa, Artificial Sequence
  Synthetic Polypeptide
MALPVTALLLPLALLLHAARPEVQLLESGGGLVQPGGSLRLSCAASGFTFSSYAMSWVRQAPGKGLEWVSSISGSGDYIYYADSVKGRFTISRDISKNTLYLQMNSLRAEDTAVYYCAKEGTGANSSLADYRGQGTLVTVSSGGGSGGGSEVQVLESGGGLVQPGGSLRLSCAASGFTFSNFAMSWVRQAPGKGLEWVSTISGSAGTTDYADSVKGRFTISRDNSKKTLYLQMNSLRVEDTAVYYCADGRGPFFDYRGQGTLVTVSSGTGGGGSGGGGSGGGGSEFDIQMTQSPSSLSASVGDRVTITCKASDHINNWLAWYQQKPGQAPKLLIYGATTLETGVPSRFSGSGSGTDYTLTISSLQPEDFATYYCQQSWNTPWTFGQGTKLEIKRLEGKPIPNPLLGLDSTGSGEDLKNVFPPEVAVFEPSEAEISHTQKATLVCLATGFYPDHVELSWWVNGKEVHSGVCTDPQPLKEQPALNDSRYCLSSRLRVSATFWQNPRNHFRCQVQFYGLSENDEWTQDRAKPVTQIVSAEAWGRADCGFTSESYQQGVLSATILYEILLGKATLYAVLVSALVLMAMVKRKDSRGRAKRSGSGATNFSLLKQAGDVEENPGPTRGHMTEYKPTVRLATRDDVPRAVRTLAAAFADYPATRHTVDPDRHIERVTELQELFLTRVGLDIGKVWVADDGAAVAVWTTPESVEAGAVFAEIGPRMAELSGSRLAAQQQMEGLLAPHRPKEPAWFLATVGVSPDHQGKGLGSAVVLPGVEAAERAGVPAFLETSAPRNLPFYERLGFTVTADVEVPEGPRTWCMTRKPGA

SEQ ID NO: 17038 - protein, 592 aa, Artificial Sequence
  Synthetic Polypeptide
MALPVTALLLPLALLLHAARPEVQLLESGGGLVQPGGSLRLSCAASGFTFSSYAMSWVRQAPGKGLEWVSSISGSGDYIYYADSVKGRFTISRDISKNTLYLQMNSLRAEDTAVYYCAKEGTGANSSLADYRGQGTLVTVSSGGGSGGGSEVQVLESGGGLVQPGGSLRLSCAASGFTFSNFAMSWVRQAPGKGLEWVSTISGSAGTTDYADSVKGRFTISRDNSKKTLYLQMNSLRVEDTAVYYCADGRGPFFDYRGQGTLVTVSSGTGGGGSGGGGSGGGGSEFDIQMTQSPSSLSASVGDRVTITCKASDHINNWLAWYQQKPGQAPKLLIYGATTLETGVPSRFSGSGSGTDYTLTISSLQPEDFATYYCQQSWNTPWTFGQGTKLEIKRLEGKPIPNPLLGLDSTGSGEDLKNVFPPEVAVFEPSEAEISHTQKATLVCLATGFYPDHVELSWWVNGKEVHSGVCTDPQPLKEQPALNDSRYCLSSRLRVSATFWQNPRNHFRCQVQFYGLSENDEWTQDRAKPVTQIVSAEAWGRADCGFTSESYQQGVLSATILYEILLGKATLYAVLVSALVLMAMVKRKDSRG

SEQ ID NO: 17039 - protein, 908 aa, Artificial Sequence
  Synthetic Polypeptide
MALPVTALLLPLALLLHAARPEVQLLESGGGLVQPGGSLRLSCAASGFTFSSYAMSWVRQAPGKGLEWVSSISGSGDYIYYADSVKGRFTISRDISKNTLYLQMNSLRAEDTAVYYCAKEGTGANSSLADYRGQGTLVTVSSGGGSGGGSEVQVLESGGGLVQPGGSLRLSCAASGFTFSNFAMSWVRQAPGKGLEWVSTISGSAGTTDYADSVKGRFTISRDNSKKTLYLQMNSLRVEDTAVYYCADGRGPFFDYRGQGTLVTVSSGTGGGGSGGGGSGGGGSEFDIQMTQSPSSLSASVGDRVTITCKASDHINNWLAWYQQKPGQAPKLLIYGATTLETGVPSRFSGSGSGTDYTLTISSLQPEDFATYYCQQSWNTPWTFGQGTKLEIKRGGGGSGGGGSGGGGSQVQLQQPGAELVKPGASVKMSCKASGYAFSSYWINWMKQKPGQGLEWIGQIYPGDGDTNYNGKFKGRATLTADTSSSTAYMQLSSLTSEDSAVYFCARSITTVVGCAMDYWGQGTSVTVSSTRGSGIQNPDPAVYQLRDSKSSDKSVCLFTDFDSQTNVSQSKDSDVYITDKTVLDMRSMDFKSNSAVAWSNKSDFACANAFNNSIIPEDTFFPSSDVPCDVKLVEKSFETDTNLNFQNLSVIGFRILLLKVAGFNLLMTLRLWSSRAKRSGSGVKQTLNFDLLKLAGDVESNPGPSRGHMTEYKPTVRLATRDDVPRAVRTLAAAFADYPATRHTVDPDRHIERVTELQELFLTRVGLDIGKVWVADDGAAVAVWTTPESVEAGAVFAEIGPRMAELSGSRLAAQQQMEGLLAPHRPKEPAWFLATVGVSPDHQGKGLGSAVVLPGVEAAERAGVPAFLETSAPRNLPFYERLGFTVTADVEVPEGPRTWCMTRKPGA

SEQ ID NO: 17040 - protein, 940 aa, Artificial Sequence
  Synthetic Polypeptide
MALPVTALLLPLALLLHAARPEVQLLESGGGLVQPGGSLRLSCAASGFTFSSYAMSWVRQAPGKGLEWVSSISGSGDYIYYADSVKGRFTISRDISKNTLYLQMNSLRAEDTAVYYCAKEGTGANSSLADYRGQGTLVTVSSGGGSGGGSEVQVLESGGGLVQPGGSLRLSCAASGFTFSNFAMSWVRQAPGKGLEWVSTISGSAGTTDYADSVKGRFTISRDNSKKTLYLQMNSLRVEDTAVYYCADGRGPFFDYRGQGTLVTVSSGTGGGGSGGGGSGGGGSEFDIQMTQSPSSLSASVGDRVTITCKASDHINNWLAWYQQKPGQAPKLLIYGATTLETGVPSRFSGSGSGTDYTLTISSLQPEDFATYYCQQSWNTPWTFGQGTKLEIKRGGGGSGGGGSGGGGSQVQLQQPGAELVKPGASVKMSCKASGYAFSSYWINWMKQKPGQGLEWIGQIYPGDGDTNYNGKFKGRATLTADTSSSTAYMQLSSLTSEDSAVYFCARSITTVVGCAMDYWGQGTSVTVSSLEDLKNVFPPEVAVFEPSKAEIAHTQKATLVCLATGFYPDHVELSWWVNGKEVHSGVSTDPQPLKEQPALNDSRYCLSSRLRVSATFWQNPRNHFRCQVQFYGLSENDEWTQDRAKPVTQIVSAEAWGRADCGITSASYHQGVLSATILYEILLGKATLYAVLVSALVLMAMVKRKDSRGRAKRSGSGATNFSLLKQAGDVEENPGPTRGHMTEYKPTVRLATRDDVPRAVRTLAAAFADYPATRHTVDPDRHIERVTELQELFLTRVGLDIGKVWVADDGAAVAVWTTPESVEAGAVFAEIGPRMAELSGSRLAAQQQMEGLLAPHRPKEPAWFLATVGVSPDHQGKGLGSAVVLPGVEAAERAGVPAFLETSAPRNLPFYERLGFTVTADVEVPEGPRTWCMTRKPGA

SEQ ID NO: 17041 - protein, 1258 aa, Artificial Sequence
  Synthetic Polypeptide
MALPVTALLLPLALLLHAARPEVQLLESGGGLVQPGGSLRLSCAASGFTFSSYAMSWVRQAPGKGLEWVSSISGSGDYIYYADSVKGRFTISRDISKNTLYLQMNSLRAEDTAVYYCAKEGTGANSSLADYRGQGTLVTVSSGGGSGGGSEVQVLESGGGLVQPGGSLRLSCAASGFTFSNFAMSWVRQAPGKGLEWVSTISGSAGTTDYADSVKGRFTISRDNSKKTLYLQMNSLRVEDTAVYYCADGRGPFFDYRGQGTLVTVSSGTGGGGSGGGGSGGGGSEFDIQMTQSPSSLSASVGDRVTITCKASDHINNWLAWYQQKPGQAPKLLIYGATTLETGVPSRFSGSGSGTDYTLTISSLQPEDFATYYCQQSWNTPWTFGQGTKLEIKRLEIQNPDPAVYQLRDSKSSDKSVCLFTDFDSQTNVSQSKDSDVYITDKCVLDMRSMDFKSNSAVAWSNKSDFACANAFNNSIIPEDTFFPSSDVPCDVKLVEKSFETDTNLNFQNLSVIGFRILLLKVAGFNLLMTLRLWSSRAKRSGSGVKQTLNFDLLKLAGDVESNPGPTSMDWIWRILFLVGAATGAHSGPEVQLVESGGGLVQAGGSLRLSCAASGRTFSMGWFRQAPGKEREFVAAITYSGGSPYYADSVKGRFTISRDNAKNTVYLQMNSLKPEDTAVYYCAANPTYGSDWNAENWGQGTQVTVSSGSGGGGSGGGGSGGGGSFEQVQLQQPGAELVKPGASVKMSCKASGYAFSSYWINWMKQKPGQGLEWIGQIYPGDGDTNYNGKFKGRATLTADTSSSTAYMQLSSLTSEDSAVYFCARSITTVVGCAMDYWGQGTSVTVSSTREDLKNVFPPEVAVFEPSKAEIAHTQKATLVCLATGFYPDHVELSWWVNGKEVHSGVCTDPQPLKEQPALNDSRYCLSSRLRVSATFWQNPRNHFRCQVQFYGLSENDEWTQDRAKPVTQIVSAEAWGRADCGITSASYHQGVLSATILYEILLGKATLYAVLVSALVLMAMVKRKDSRGRAKRSGSGATNFSLLKQAGDVEENPGPSRGHMTEYKPTVRLATRDDVPRAVRTLAAAFADYPATRHTVDPDRHIERVTELQELFLTRVGLDIGKVWVADDGAAVAVWTTPESVEAGAVFAEIGPRMAELSGSRLAAQQQMEGLLAPHRPKEPAWFLATVGVSPDHQGKGLGSAVVLPGVEAAERAGVPAFLETSAPRNLPFYERLGFTVTADVEVPEGPRTWCMTRKPGA

SEQ ID NO: 17042 - protein, 1257 aa, Artificial Sequence
  Synthetic Polypeptide
MALPVTALLLPLALLLHAARPEVQLLESGGGLVQPGGSLRLSCAASGFTFSSYAMSWVRQAPGKGLEWVSSISGSGDYIYYADSVKGRFTISRDISKNTLYLQMNSLRAEDTAVYYCAKEGTGANSSLADYRGQGTLVTVSSGGGSGGGSEVQVLESGGGLVQPGGSLRLSCAASGFTFSNFAMSWVRQAPGKGLEWVSTISGSAGTTDYADSVKGRFTISRDNSKKTLYLQMNSLRVEDTAVYYCADGRGPFFDYRGQGTLVTVSSGTGGGGSGGGGSGGGGSEFDIQMTQSPSSLSASVGDRVTITCKASDHINNWLAWYQQKPGQAPKLLIYGATTLETGVPSRFSGSGSGTDYTLTISSLQPEDFATYYCQQSWNTPWTFGQGTKLEIKRLEDLKNVFPPEVAVFEPSKAEIAHTQKATLVCLATGFYPDHVELSWWVNGKEVHSGVCTDPQPLKEQPALNDSRYCLSSRLRVSATFWQNPRNHFRCQVQFYGLSENDEWTQDRAKPVTQIVSAEAWGRADCGITSASYHQGVLSATILYEILLGKATLYAVLVSALVLMAMVKRKDSRGRAKRSGSGATNFSLLKQAGDVEENPGPTSMDWIWRILFLVGAATGAHSGPEVQLVESGGGLVQAGGSLRLSCAASGRTFSMGWFRQAPGKEREFVAAITYSGGSPYYADSVKGRFTISRDNAKNTVYLQMNSLKPEDTAVYYCAANPTYGSDWNAENWGQGTQVTVSSGSGGGGSGGGGSGGGGSFEQVQLQQPGAELVKPGASVKMSCKASGYAFSSYWINWMKQKPGQGLEWIGQIYPGDGDTNYNGKFKGRATLTADTSSSTAYMQLSSLTSEDSAVYFCARSITTVVGCAMDYWGQGTSVTVSSTRIQNPDPAVYQLRDSKSSDKSVCLFTDFDSQTNVSQSKDSDVYITDKCVLDMRSMDFKSNSAVAWSNKSDFACANAFNNSIIPEDTFFPSSDVPCDVKLVEKSFETDTNLNFQNLSVIGFRILLLKVAGFNLLMTLRLWSSRAKRSGSGVKQTLNFDLLKLAGDVESNPGPSRGHMTEYKPTVRLATRDDVPRAVRTLAAAFADYPATRHTVDPDRHIERVTELQELFLTRVGLDIGKVWVADDGAAVAVWTTPESVEAGAVFAEIGPRMAELSGSRLAAQQQMEGLLAPHRPKEPAWFLATVGVSPDHQGKGLGSAVVLPGVEAAERAGVPAFLETSAPRNLPFYERLGFTVTADVEVPEGPRTWCMTRKPGA

SEQ ID NO: 17043 - protein, 1257 aa, Artificial Sequence
  Synthetic Polypeptide
MALPVTALLLPLALLLHAARPEVQLLESGGGLVQPGGSLRLSCAASGFTFSSYAMSWVRQAPGKGLEWVSSISGSGDYIYYADSVKGRFTISRDISKNTLYLQMNSLRAEDTAVYYCAKEGTGANSSLADYRGQGTLVTVSSGGGSGGGSEVQVLESGGGLVQPGGSLRLSCAASGFTFSNFAMSWVRQAPGKGLEWVSTISGSAGTTDYADSVKGRFTISRDNSKKTLYLQMNSLRVEDTAVYYCADGRGPFFDYRGQGTLVTVSSGTGGGGSGGGGSGGGGSEFDIQMTQSPSSLSASVGDRVTITCKASDHINNWLAWYQQKPGQAPKLLIYGATTLETGVPSRFSGSGSGTDYTLTISSLQPEDFATYYCQQSWNTPWTFGQGTKLEIKRLEDLKNVFPPEVAVFEPSEAEISHTQKATLVCLATGFYPDHVELSWWVNGKEVHSGVCTDPQPLKEQPALNDSRYCLSSRLRVSATFWQNPRNHFRCQVQFYGLSENDEWTQDRAKPVTQIVSAEAWGRADCGFTSESYQQGVLSATILYEILLGKATLYAVLVSALVLMAMVKRKDSRGRAKRSGSGATNFSLLKQAGDVEENPGPTSMDWIWRILFLVGAATGAHSGPEVQLVESGGGLVQAGGSLRLSCAASGRTFSMGWFRQAPGKEREFVAAITYSGGSPYYADSVKGRFTISRDNAKNTVYLQMNSLKPEDTAVYYCAANPTYGSDWNAENWGQGTQVTVSSGSGGGGSGGGGSGGGGSFEQVQLQQPGAELVKPGASVKMSCKASGYAFSSYWINWMKQKPGQGLEWIGQIYPGDGDTNYNGKFKGRATLTADTSSSTAYMQLSSLTSEDSAVYFCARSITTVVGCAMDYWGQGTSVTVSSTRIQNPDPAVYQLRDSKSSDKSVCLFTDFDSQTNVSQSKDSDVYITDKCVLDMRSMDFKSNSAVAWSNKSDFACANAFNNSIIPEDTFFPSPESSCDVKLVEKSFETDTNLNFQNLSVIGFRILLLKVAGFNLLMTLRLWSSRAKRSGSGVKQTLNFDLLKLAGDVESNPGPSRGHMTEYKPTVRLATRDDVPRAVRTLAAAFADYPATRHTVDPDRHIERVTELQELFLTRVGLDIGKVWVADDGAAVAVWTTPESVEAGAVFAEIGPRMAELSGSRLAAQQQMEGLLAPHRPKEPAWFLATVGVSPDHQGKGLGSAVVLPGVEAAERAGVPAFLETSAPRNLPFYERLGFTVTADVEVPEGPRTWCMTRKPGA

SEQ ID NO: 17044 - protein, 1024 aa, Artificial Sequence
  Synthetic Polypeptide
MALPVTALLLPLALLLHAARPEVQLLESGGGLVQPGGSLRLSCAASGFTFSSYAMSWVRQAPGKGLEWVSSISGSGDYIYYADSVKGRFTISRDISKNTLYLQMNSLRAEDTAVYYCAKEGTGANSSLADYRGQGTLVTVSSGGGSGGGSEVQVLESGGGLVQPGGSLRLSCAASGFTFSNFAMSWVRQAPGKGLEWVSTISGSAGTTDYADSVKGRFTISRDNSKKTLYLQMNSLRVEDTAVYYCADGRGPFFDYRGQGTLVTVSSGTGGGGSGGGGSGGGGSEFDIQMTQSPSSLSASVGDRVTITCKASDHINNWLAWYQQKPGQAPKLLIYGATTLETGVPSRFSGSGSGTDYTLTISSLQPEDFATYYCQQSWNTPWTFGQGTKLEIKRLEDLKNVFPPEVAVFEPSEAEISHTQKATLVCLATGFYPDHVELSWWVNGKEVHSGVCTDPQPLKEQPALNDSRYCLSSRLRVSATFWQNPRNHFRCQVQFYGLSENDEWTQDRAKPVTQIVSAEAWGRADCGFTSESYQQGVLSATILYEILLGKATLYAVLVSALVLMAMVKRKDSRGRAKRSGSGATNFSLLKQAGDVEENPGPTSMDWIWRILFLVGAATGAHSGPEVQLVESGGGLVQAGGSLRLSCAASGRTFSMGWFRQAPGKEREFVAAITYSGGSPYYADSVKGRFTISRDNAKNTVYLQMNSLKPEDTAVYYCAANPTYGSDWNAENWGQGTQVTVSSGSGGGGSGGGGSGGGGSFEQVQLQQPGAELVKPGASVKMSCKASGYAFSSYWINWMKQKPGQGLEWIGQIYPGDGDTNYNGKFKGRATLTADTSSSTAYMQLSSLTSEDSAVYFCARSITTVVGCAMDYWGQGTSVTVSSTRIQNPDPAVYQLRDSKSSDKSVCLFTDFDSQTNVSQSKDSDVYITDKCVLDMRSMDFKSNSAVAWSNKSDFACANAFNNSIIPEDTFFPSPESSCDVKLVEKSFETDTNLNFQNLSVIGFRILLLKVAGFNLLMTLRLWSS

SEQ ID NO: 17045 - protein, 1249 aa, Artificial Sequence
  Synthetic Polypeptide
MALPVTALLLPLALLLHAARPEVQLLESGGGLVQPGGSLRLSCAASGFTFSSYAMSWVRQAPGKGLEWVSSISGSGDYIYYADSVKGRFTISRDISKNTLYLQMNSLRAEDTAVYYCAKEGTGANSSLADYRGQGTLVTVSSGGGSGGGSEVQVLESGGGLVQPGGSLRLSCAASGFTFSNFAMSWVRQAPGKGLEWVSTISGSAGTTDYADSVKGRFTISRDNSKKTLYLQMNSLRVEDTAVYYCADGRGPFFDYRGQGTLVTVSSGTGGGGSGGGGSGGGGSEFDIQMTQSPSSLSASVGDRVTITCKASDHINNWLAWYQQKPGQAPKLLIYGATTLETGVPSRFSGSGSGTDYTLTISSLQPEDFATYYCQQSWNTPWTFGQGTKLEIKRLEDLKNVFPPEVAVFEPSEAEISHTQKATLVCLATGFYPDHVELSWWVNGKEVHSGVCTDPQPLKEQPALNDSRYCLSSRLRVSATFWQNPRNHFRCQVQFYGLSENDEWTQDRAKPVTQIVSAEAWGRADCGFTSESYQQGVLSATILYEILLGKATLYAVLVSALVLMAMVKRKDSRGRAKRSGSGATNFSLLKQAGDVEENPGPTSMDWIWRILFLVGAATGAHSGPEVQLVESGGGLVQAGGSLRLSCAASGRTFSMGWFRQAPGKEREFVAAITYSGGSPYYADSVKGRFTISRDNAKNTVYLQMNSLKPEDTAVYYCAANPTYGSDWNAENWGQGTQVTVSSGSGGGGSGGGGSGGGGSFEQVQLQQPGAELVKPGASVKMSCKASGYAFSSYWINWMKQKPGQGLEWIGQIYPGDGDTNYNGKFKGRATLTADTSSSTAYMQLSSLTSEDSAVYFCARSITTVVGCAMDYWGQGTSVTVSSTRIQNPDPAVYQLRDSKSSDKSVCLFTDFDSQTNVSQSKDSDVYITDKCVLDMRSMDFKSNSAVAWSNKSDFACANAFNNSIIPEDTFFPSPESSCDVKLVEKSFETDTNLNFQNLSVIGFRILLLKVAGFNLLMTLRLWSSRAKRSGSGVKQTLNFDLLKLAGDVESNPGPSRGGIHTMATYEVLCEVARKLGTDDREVVLFLLNVFIPQPTLAQLIGALRALKEEGRLTFPLLAECLFRAGRRDLLRDLLHLDPRFLERHLAGTMSYFSPYQLTVLHVDGELCARDIRSLIFLSKDTIGSRSTPQTFLHWVYCMENLDLLGPTDVDALMSMLRSLSRVDLQRQVQTLMGLHLSGPSHSQHYRHTP

SEQ ID NO: 17046 - protein, 1028 aa, Artificial Sequence
  Synthetic Polypeptide
MALPVTALLLPLALLLHAARPEVQLLESGGGLVQPGGSLRLSCAASGFTFSSYAMSWVRQAPGKGLEWVSSISGSGDYIYYADSVKGRFTISRDISKNTLYLQMNSLRAEDTAVYYCAKEGTGANSSLADYRGQGTLVTVSSGGGSGGGSEVQVLESGGGLVQPGGSLRLSCAASGFTFSNFAMSWVRQAPGKGLEWVSTISGSAGTTDYADSVKGRFTISRDNSKKTLYLQMNSLRVEDTAVYYCADGRGPFFDYRGQGTLVTVSSGTGGGGSGGGGSGGGGSEFDIQMTQSPSSLSASVGDRVTITCKASDHINNWLAWYQQKPGQAPKLLIYGATTLETGVPSRFSGSGSGTDYTLTISSLQPEDFATYYCQQSWNTPWTFGQGTKLEIKRLEIQNPDPAVYQLRDSKSSDKSVCLFTDFDSQTNVSQSKDSDVYITDKCVLDMRSMDFKSNSAVAWSNKSDFACANAFNNSIIPEDTFFPSPESSCDVKLVEKSFETDTNLNFQNLSVIGFRILLLKVAGFNLLMTLRLWSSRAKRSGSGVKQTLNFDLLKLAGDVESNPGPTSMDWIWRILFLVGAATGAHSGPEVQLVESGGGLVQAGGSLRLSCAASGRTFSMGWFRQAPGKEREFVAAITYSGGSPYYADSVKGRFTISRDNAKNTVYLQMNSLKPEDTAVYYCAANPTYGSDWNAENWGQGTQVTVSSGSGGGGSGGGGSGGGGSFEQVQLQQPGAELVKPGASVKMSCKASGYAFSSYWINWMKQKPGQGLEWIGQIYPGDGDTNYNGKFKGRATLTADTSSSTAYMQLSSLTSEDSAVYFCARSITTVVGCAMDYWGQGTSVTVSSTREDLKNVFPPEVAVFEPSEAEISHTQKATLVCLATGFYPDHVELSWWVNGKEVHSGVCTDPQPLKEQPALNDSRYCLSSRLRVSATFWQNPRNHFRCQVQFYGLSENDEWTQDRAKPVTQIVSAEAWGRADCGFTSESYQQGVLSATILYEILLGKATLYAVLVSALVLMAMVKRKDSRG

SEQ ID NO: 17047 - protein, 1250 aa, Artificial Sequence
  Synthetic Polypeptide
MALPVTALLLPLALLLHAARPEVQLLESGGGLVQPGGSLRLSCAASGFTFSSYAMSWVRQAPGKGLEWVSSISGSGDYIYYADSVKGRFTISRDISKNTLYLQMNSLRAEDTAVYYCAKEGTGANSSLADYRGQGTLVTVSSGGGSGGGSEVQVLESGGGLVQPGGSLRLSCAASGFTFSNFAMSWVRQAPGKGLEWVSTISGSAGTTDYADSVKGRFTISRDNSKKTLYLQMNSLRVEDTAVYYCADGRGPFFDYRGQGTLVTVSSGTGGGGSGGGGSGGGGSEFDIQMTQSPSSLSASVGDRVTITCKASDHINNWLAWYQQKPGQAPKLLIYGATTLETGVPSRFSGSGSGTDYTLTISSLQPEDFATYYCQQSWNTPWTFGQGTKLEIKRLEIQNPDPAVYQLRDSKSSDKSVCLFTDFDSQTNVSQSKDSDVYITDKCVLDMRSMDFKSNSAVAWSNKSDFACANAFNNSIIPEDTFFPSPESSCDVKLVEKSFETDTNLNFQNLSVIGFRILLLKVAGFNLLMTLRLWSSRAKRSGSGVKQTLNFDLLKLAGDVESNPGPTSMDWIWRILFLVGAATGAHSGPEVQLVESGGGLVQAGGSLRLSCAASGRTFSMGWFRQAPGKEREFVAAITYSGGSPYYADSVKGRFTISRDNAKNTVYLQMNSLKPEDTAVYYCAANPTYGSDWNAENWGQGTQVTVSSGSGGGGSGGGGSGGGGSFEQVQLQQPGAELVKPGASVKMSCKASGYAFSSYWINWMKQKPGQGLEWIGQIYPGDGDTNYNGKFKGRATLTADTSSSTAYMQLSSLTSEDSAVYFCARSITTVVGCAMDYWGQGTSVTVSSTREDLKNVFPPEVAVFEPSEAEISHTQKATLVCLATGFYPDHVELSWWVNGKEVHSGVCTDPQPLKEQPALNDSRYCLSSRLRVSATFWQNPRNHFRCQVQFYGLSENDEWTQDRAKPVTQIVSAEAWGRADCGFTSESYQQGVLSATILYEILLGKATLYAVLVSALVLMAMVKRKDSRGRAKRSGSGATNFSLLKQAGDVEENPGPSRGGIHTMATYEVLCEVARKLGTDDREVVLFLLNVFIPQPTLAQLIGALRALKEEGRLTFPLLAECLFRAGRRDLLRDLLHLDPRFLERHLAGTMSYFSPYQLTVLHVDGELCARDIRSLIFLSKDTIGSRSTPQTFLHWVYCMENLDLLGPTDVDALMSMLRSLSRVDLQRQVQTLMGLHLSGPSHSQHYRHTP

SEQ ID NO: 17048 - protein, 1257 aa, Artificial Sequence
  Synthetic Polypeptide
MALPVTALLLPLALLLHAARPEVQLLESGGGLVQPGGSLRLSCAASGFTFSSYAMSWVRQAPGKGLEWVSSISGSGDYIYYADSVKGRFTISRDISKNTLYLQMNSLRAEDTAVYYCAKEGTGANSSLADYRGQGTLVTVSSGGGSGGGSEVQVLESGGGLVQPGGSLRLSCAASGFTFSNFAMSWVRQAPGKGLEWVSTISGSAGTTDYADSVKGRFTISRDNSKKTLYLQMNSLRVEDTAVYYCADGRGPFFDYRGQGTLVTVSSGTGGGGSGGGGSGGGGSEFDIQMTQSPSSLSASVGDRVTITCKASDHINNWLAWYQQKPGQAPKLLIYGATTLETGVPSRFSGSGSGTDYTLTISSLQPEDFATYYCQQSWNTPWTFGQGTKLEIKRLEDLKNVFPPEVAVFEPSEAEISHTQKATLVCLATGFYPDHVELSWWVNGKEVHSGVSTDPQPLKEQPALNDSRYCLSSRLRVSATFWQNPRNHFRCQVQFYGLSENDEWTQDRAKPVTQIVSAEAWGRADCGFTSESYQQGVLSATILYEILLGKATLYAVLVSALVLMAMVKRKDSRGRAKRSGSGATNFSLLKQAGDVEENPGPTSMDWIWRILFLVGAATGAHSGPEVQLVESGGGLVQAGGSLRLSCAASGRTFSMGWFRQAPGKEREFVAAITYSGGSPYYADSVKGRFTISRDNAKNTVYLQMNSLKPEDTAVYYCAANPTYGSDWNAENWGQGTQVTVSSGSGGGGSGGGGSGGGGSFEQVQLQQPGAELVKPGASVKMSCKASGYAFSSYWINWMKQKPGQGLEWIGQIYPGDGDTNYNGKFKGRATLTADTSSSTAYMQLSSLTSEDSAVYFCARSITTVVGCAMDYWGQGTSVTVSSTRIQNPDPAVYQLRDSKSSDKSVCLFTDFDSQTNVSQSKDSDVYITDKTVLDMRSMDFKSNSAVAWSNKSDFACANAFNNSIIPEDTFFPSPESSCDVKLVEKSFETDTNLNFQNLSVIGFRILLLKVAGFNLLMTLRLWSSRAKRSGSGVKQTLNFDLLKLAGDVESNPGPSRGHMTEYKPTVRLATRDDVPRAVRTLAAAFADYPATRHTVDPDRHIERVTELQELFLTRVGLDIGKVWVADDGAAVAVWTTPESVEAGAVFAEIGPRMAELSGSRLAAQQQMEGLLAPHRPKEPAWFLATVGVSPDHQGKGLGSAVVLPGVEAAERAGVPAFLETSAPRNLPFYERLGFTVTADVEVPEGPRTWCMTRKPGA

SEQ ID NO: 17049 - protein, 1339 aa, Artificial Sequence
  Synthetic Polypeptide
MALPVTALLLPLALLLHAARPEVQLLESGGGLVQPGGSLRLSCAASGFTFSSYAMSWVRQAPGKGLEWVSSISGSGDYIYYADSVKGRFTISRDISKNTLYLQMNSLRAEDTAVYYCAKEGTGANSSLADYRGQGTLVTVSSGGGSGGGSEVQVLESGGGLVQPGGSLRLSCAASGFTFSNFAMSWVRQAPGKGLEWVSTISGSAGTTDYADSVKGRFTISRDNSKKTLYLQMNSLRVEDTAVYYCADGRGPFFDYRGQGTLVTVSSGTGGGGSGGGGSGGGGSEFDIQMTQSPSSLSASVGDRVTITCKASDHINNWLAWYQQKPGQAPKLLIYGATTLETGVPSRFSGSGSGTDYTLTISSLQPEDFATYYCQQSWNTPWTFGQGTKLEIKRLEDLKNVFPPEVAVFEPSEAEISHTQKATLVCLATGFYPDHVELSWWVNGKEVHSGVSTDPQPLKEQPALNDSRYCLSSRLRVSATFWQNPRNHFRCQVQFYGLSENDEWTQDRAKPVTQIVSAEAWGRADCGFTSESYQQGVLSATILYEILLGKATLYAVLVSALVLMAMVKRKDSRGRAKRSGSGATNFSLLKQAGDVEENPGPTSMDWIWRILFLVGAATGAHSGPEVQLVESGGGLVQAGGSLRLSCAASGRTFSMGWFRQAPGKEREFVAAITYSGGSPYYADSVKGRFTISRDNAKNTVYLQMNSLKPEDTAVYYCAANPTYGSDWNAENWGQGTQVTVSSGSGGGGSGGGGSGGGGSFEQVQLQQPGAELVKPGASVKMSCKASGYAFSSYWINWMKQKPGQGLEWIGQIYPGDGDTNYNGKFKGRATLTADTSSSTAYMQLSSLTSEDSAVYFCARSITTVVGCAMDYWGQGTSVTVSSTREQKLISEEDGSGTPFPSLAPPIMLLVDGKQQMVVVCLVLDVAPPGLDSPIWFSAGNGSALDAFTYGPSPATDGTWTNLAHLSLPSEELASWEPLVCHTGPGAEGHSRSTQPMHLSGEASTARTCPQEPLRGTPGGALWLGVLRLLLFKLLLFDLLLTCSCLCDPAGPLPSPATTTRLRALGSHRLHPATETGGREATSSPRPQPRDRRWGDTPPGRKPGSPVRAKRSGSGVKQTLNFDLLKLAGDVESNPGPSRGHMTEYKPTVRLATRDDVPRAVRTLAAAFADYPATRHTVDPDRHIERVTELQELFLTRVGLDIGKVWVADDGAAVAVWTTPESVEAGAVFAEIGPRMAELSGSRLAAQQQMEGLLAPHRPKEPAWFLATVGVSPDHQGKGLGSAVVLPGVEAAERAGVPAFLETSAPRNLPFYERLGFTVTADVEVPEGPRTWCMTRKPGA

SEQ ID NO: 17050 - protein, 1294 aa, Artificial Sequence
  Synthetic Polypeptide
MALPVTALLLPLALLLHAARPEVQLLESGGGLVQPGGSLRLSCAASGFTFSSYAMSWVRQAPGKGLEWVSSISGSGDYIYYADSVKGRFTISRDISKNTLYLQMNSLRAEDTAVYYCAKEGTGANSSLADYRGQGTLVTVSSGGGSGGGSEVQVLESGGGLVQPGGSLRLSCAASGFTFSNFAMSWVRQAPGKGLEWVSTISGSAGTTDYADSVKGRFTISRDNSKKTLYLQMNSLRVEDTAVYYCADGRGPFFDYRGQGTLVTVSSGTGGGGSGGGGSGGGGSEFDIQMTQSPSSLSASVGDRVTITCKASDHINNWLAWYQQKPGQAPKLLIYGATTLETGVPSRFSGSGSGTDYTLTISSLQPEDFATYYCQQSWNTPWTFGQGTKLEIKRLEGKPIPNPLLGLDSTGSGDKQLDADVSPKPTIFLPSIAETKLQKAGTYLCLLEKFFPDVIKIHWQEKKSNTILGSQEGNTMKTNDTYMKFSWLTVPEKSLDKEHRCIVRHENNKNGVDQEIIFPPIKTDVITMDPKDNCSKDANDTLLLQLTNTSAYYMYLLLLLKSVVYFAIITCCLLRRTAFCCNGEKSRAKRSGSGATNFSLLKQAGDVEENPGPTSMDWIWRILFLVGAATGAHSGPEVQLVESGGGLVQAGGSLRLSCAASGRTFSMGWFRQAPGKEREFVAAITYSGGSPYYADSVKGRFTISRDNAKNTVYLQMNSLKPEDTAVYYCAANPTYGSDWNAENWGQGTQVTVSSGSGGGGSGGGGSGGGGSFEQVQLQQPGAELVKPGASVKMSCKASGYAFSSYWINWMKQKPGQGLEWIGQIYPGDGDTNYNGKFKGRATLTADTSSSTAYMQLSSLTSEDSAVYFCARSITTVVGCAMDYWGQGTSVTVSSTREQKLISEEDGSGSQPHTKPSVFVMKNGTNVACLVKEFYPKDIRINLVSSKKITEFDPAIVISPSGKYNAVKLGKYEDSNSVTCSVQHDNKTVHSTDFEVKTDSTDHVKPKETENTKQPSKSCHKPKAIVHTEKVNMMSLTVLGLRMLFAKTVAVNFLLTAKLFFLRAKRSGSGVKQTLNFDLLKLAGDVESNPGPSRGHMTEYKPTVRLATRDDVPRAVRTLAAAFADYPATRHTVDPDRHIERVTELQELFLTRVGLDIGKVWVADDGAAVAVWTTPESVEAGAVFAEIGPRMAELSGSRLAAQQQMEGLLAPHRPKEPAWFLATVGVSPDHQGKGLGSAVVLPGVEAAERAGVPAFLETSAPRNLPFYERLGFTVTADVEVPEGPRTWCMTRKPGA

SEQ ID NO: 17051 - protein, 1032 aa, Artificial Sequence
  Synthetic Polypeptide
MALPVTALLLPLALLLHAARPEVQLLESGGGLVQPGGSLRLSCAASGFTFSSYAMSWVRQAPGKGLEWVSSISGSGDYIYYADSVKGRFTISRDISKNTLYLQMNSLRAEDTAVYYCAKEGTGANSSLADYRGQGTLVTVSSGGGSGGGSEVQVLESGGGLVQPGGSLRLSCAASGFTFSNFAMSWVRQAPGKGLEWVSTISGSAGTTDYADSVKGRFTISRDNSKKTLYLQMNSLRVEDTAVYYCADGRGPFFDYRGQGTLVTVSSGTGGGGSGGGGSGGGGSEFDIQMTQSPSSLSASVGDRVTITCKASDHINNWLAWYQQKPGQAPKLLIYGATTLETGVPSRFSGSGSGTDYTLTISSLQPEDFATYYCQQSWNTPWTFGQGTKLEIKRLESQPHTKPSVFVMKNGTNVACLVKEFYPKDIRINLVSSKKITEFDPAIVISPSGKYNAVKLGKYEDSNSVTCSVQHDNKTVHSTDFEVKTDSTDHVKPKETENTKQPSKSCHKPKAIVHTEKVNMMSLTVLGLRMLFAKTVAVNFLLTAKLFFLRAKRSGSGATNFSLLKQAGDVEENPGPTSMDWIWRILFLVGAATGAHSGPEVQLVESGGGLVQAGGSLRLSCAASGRTFSMGWFRQAPGKEREFVAAITYSGGSPYYADSVKGRFTISRDNAKNTVYLQMNSLKPEDTAVYYCAANPTYGSDWNAENWGQGTQVTVSSGSGGGGSGGGGSGGGGSFEQVQLQQPGAELVKPGASVKMSCKASGYAFSSYWINWMKQKPGQGLEWIGQIYPGDGDTNYNGKFKGRATLTADTSSSTAYMQLSSLTSEDSAVYFCARSITTVVGCAMDYWGQGTSVTVSSTRDKQLDADVSPKPTIFLPSIAETKLQKAGTYLCLLEKFFPDVIKIHWQEKKSNTILGSQEGNTMKTNDTYMKFSWLTVPEKSLDKEHRCIVRHENNKNGVDQEIIFPPIKTDVITMDPKDNCSKDANDTLLLQLTNTSAYYMYLLLLLKSVVYFAIITCCLLRRTAFCCNGEKS

SEQ ID NO: 17052 - protein, 1434 aa, Artificial Sequence
  Synthetic Polypeptide
MALPVTALLLPLALLLHAARPEVQLLESGGGLVQPGGSLRLSCAASGFTFSSYAMSWVRQAPGKGLEWVSSISGSGDYIYYADSVKGRFTISRDISKNTLYLQMNSLRAEDTAVYYCAKEGTGANSSLADYRGQGTLVTVSSGGGSGGGSEVQVLESGGGLVQPGGSLRLSCAASGFTFSNFAMSWVRQAPGKGLEWVSTISGSAGTTDYADSVKGRFTISRDNSKKTLYLQMNSLRVEDTAVYYCADGRGPFFDYRGQGTLVTVSSGTGGGGSGGGGSGGGGSEFDIQMTQSPSSLSASVGDRVTITCKASDHINNWLAWYQQKPGQAPKLLIYGATTLETGVPSRFSGSGSGTDYTLTISSLQPEDFATYYCQQSWNTPWTFGQGTKLEIKRGQPKANPTVTLFPPSSEELQANKATLVCLISDFYPGAVTVAWKADGSPVKAGVETTKPSKQSNNKYAASSYLSLTPEQWKSHRSYSCQVTHEGSTVEKTVAPTECSGSQSFGLLDPKLCYLLDGILFIYGVILTALFLRVKFSRSADAPAYQQGQNQLYNELNLGRREEYDVLDKRRGRDPEMGGKPQRRKNPQEGLYNELQKDKMAEAYSEIGMKGERRRGKGHDGLYQGLSTATKDTYDALHMQALPPRRAKRSGSGATNFSLLKQAGDVEENPGPTSMDWIWRILFLVGAATGAHSGPEVQLVESGGGLVQAGGSLRLSCAASGRTFSMGWFRQAPGKEREFVAAITYSGGSPYYADSVKGRFTISRDNAKNTVYLQMNSLKPEDTAVYYCAANPTYGSDWNAENWGQGTQVTVSSGSGGGGSGGGGSGGGGSFEQVQLQQPGAELVKPGASVKMSCKASGYAFSSYWINWMKQKPGQGLEWIGQIYPGDGDTNYNGKFKGRATLTADTSSSTAYMQLSSLTSEDSAVYFCARSITTVVGCAMDYWGQGTSVTVSSASTKGPSVFPLAPSSKSTSGGTAALGCLVKDYFPEPVTVSWNSGALTSGVHTFPAVLQSSGLYSLSSVVTVPSSSLGTQTYICNVNHKPSNTKVDKRVEPKSCGTQSFGLLDPKLCYLLDGILFIYGVILTALFLRVKFSRSADAPAYQQGQNQLYNELNLGRREEYDVLDKRRGRDPEMGGKPQRRKNPQEGLYNELQKDKMAEAYSEIGMKGERRRGKGHDGLYQGLSTATKDTYDALHMQALPPRRAKRSGSGVKQTLNFDLLKLAGDVESNPGPSRGHMTEYKPTVRLATRDDVPRAVRTLAAAFADYPATRHTVDPDRHIERVTELQELFLTRVGLDIGKVWVADDGAAVAVWTTPESVEAGAVFAEIGPRMAELSGSRLAAQQQMEGLLAPHRPKEPAWFLATVGVSPDHQGKGLGSAVVLPGVEAAERAGVPAFLETSAPRNLPFYERLGFTVTADVEVPEGPRTWCMTRKPGA

SEQ ID NO: 17053 - protein, 1220 aa, Artificial Sequence
  Synthetic Polypeptide
MALPVTALLLPLALLLHAARPEVQLLESGGGLVQPGGSLRLSCAASGFTFSSYAMSWVRQAPGKGLEWVSSISGSGDYIYYADSVKGRFTISRDISKNTLYLQMNSLRAEDTAVYYCAKEGTGANSSLADYRGQGTLVTVSSGGGSGGGSEVQVLESGGGLVQPGGSLRLSCAASGFTFSNFAMSWVRQAPGKGLEWVSTISGSAGTTDYADSVKGRFTISRDNSKKTLYLQMNSLRVEDTAVYYCADGRGPFFDYRGQGTLVTVSSGTGGGGSGGGGSGGGGSEFDIQMTQSPSSLSASVGDRVTITCKASDHINNWLAWYQQKPGQAPKLLIYGATTLETGVPSRFSGSGSGTDYTLTISSLQPEDFATYYCQQSWNTPWTFGQGTKLEIKRLEDLKNVFPPEVAVFEPSEAEISHTQKATLVCLATGFYPDHVELSWWVNGKEVHSGVSTDPQPLKEQPALNDSRYCLSSRLRVSATFWQNPRNHFRCQVQFYGLSENDEWTQDRAKPVTQIVSAEAWGRADCGSQSFGLLDPKLCYLLDGILFIYGVILTALFLRVKFSRSADAPAYQQGQNQLYNELNLGRREEYDVLDKRRGRDPEMGGKPQRRKNPQEGLYNELQKDKMAEAYSEIGMKGERRRGKGHDGLYQGLSTATKDTYDALHMQALPPRRAKRSGSGATNFSLLKQAGDVEENPGPTSMDWIWRILFLVGAATGAHSGPEVQLVESGGGLVQAGGSLRLSCAASGRTFSMGWFRQAPGKEREFVAAITYSGGSPYYADSVKGRFTISRDNAKNTVYLQMNSLKPEDTAVYYCAANPTYGSDWNAENWGQGTQVTVSSGSGGGGSGGGGSGGGGSFEQVQLQQPGAELVKPGASVKMSCKASGYAFSSYWINWMKQKPGQGLEWIGQIYPGDGDTNYNGKFKGRATLTADTSSSTAYMQLSSLTSEDSAVYFCARSITTVVGCAMDYWGQGTSVTVSSTRIQNPDPAVYQLRDSKSSDKSVCLFTDFDSQTNVSQSKDSDVYITDKTVLDMRSMDFKSNSAVAWSNKSDFACANAFNNSIIPEDTFFPSPESSCGTQSFGLLDPKLCYLLDGILFIYGVILTALFLRVKFSRSADAPAYQQGQNQLYNELNLGRREEYDVLDKRRGRDPEMGGKPQRRKNPQEGLYNELQKDKMAEAYSEIGMKGERRRGKGHDGLYQGLSTATKDTYDALHMQALPPR

SEQ ID NO: 17054 - protein, 1220 aa, Artificial Sequence
  Synthetic Polypeptide
MALPVTALLLPLALLLHAARPEVQLLESGGGLVQPGGSLRLSCAASGFTFSSYAMSWVRQAPGKGLEWVSSISGSGDYIYYADSVKGRFTISRDISKNTLYLQMNSLRAEDTAVYYCAKEGTGANSSLADYRGQGTLVTVSSGGGSGGGSEVQVLESGGGLVQPGGSLRLSCAASGFTFSNFAMSWVRQAPGKGLEWVSTISGSAGTTDYADSVKGRFTISRDNSKKTLYLQMNSLRVEDTAVYYCADGRGPFFDYRGQGTLVTVSSGTGGGGSGGGGSGGGGSEFDIQMTQSPSSLSASVGDRVTITCKASDHINNWLAWYQQKPGQAPKLLIYGATTLETGVPSRFSGSGSGTDYTLTISSLQPEDFATYYCQQSWNTPWTFGQGTKLEIKRLEDLKNVFPPEVAVFEPSKAEIAHTQKATLVCLATGFYPDHVELSWWVNGKEVHSGVCTDPQPLKEQPALNDSRYCLSSRLRVSATFWQNPRNHFRCQVQFYGLSENDEWTQDRAKPVTQIVSAEAWGRADCGSQSFGLLDPKLCYLLDGILFIYGVILTALFLRVKFSRSADAPAYQQGQNQLYNELNLGRREEYDVLDKRRGRDPEMGGKPQRRKNPQEGLYNELQKDKMAEAYSEIGMKGERRRGKGHDGLYQGLSTATKDTYDALHMQALPPRRAKRSGSGATNFSLLKQAGDVEENPGPTSMDWIWRILFLVGAATGAHSGPEVQLVESGGGLVQAGGSLRLSCAASGRTFSMGWFRQAPGKEREFVAAITYSGGSPYYADSVKGRFTISRDNAKNTVYLQMNSLKPEDTAVYYCAANPTYGSDWNAENWGQGTQVTVSSGSGGGGSGGGGSGGGGSFEQVQLQQPGAELVKPGASVKMSCKASGYAFSSYWINWMKQKPGQGLEWIGQIYPGDGDTNYNGKFKGRATLTADTSSSTAYMQLSSLTSEDSAVYFCARSITTVVGCAMDYWGQGTSVTVSSTRIQNPDPAVYQLRDSKSSDKSVCLFTDFDSQTNVSQSKDSDVYITDKCVLDMRSMDFKSNSAVAWSNKSDFACANAFNNSIIPEDTFFPSSDVPCGTQSFGLLDPKLCYLLDGILFIYGVILTALFLRVKFSRSADAPAYQQGQNQLYNELNLGRREEYDVLDKRRGRDPEMGGKPQRRKNPQEGLYNELQKDKMAEAYSEIGMKGERRRGKGHDGLYQGLSTATKDTYDALHMQALPPR

SEQ ID NO: 17055 - protein, 1291 aa, Artificial Sequence
  Synthetic Polypeptide
MALPVTALLLPLALLLHAARPEVQLLESGGGLVQPGGSLRLSCAASGFTFSSYAMSWVRQAPGKGLEWVSSISGSGDYIYYADSVKGRFTISRDISKNTLYLQMNSLRAEDTAVYYCAKEGTGANSSLADYRGQGTLVTVSSGGGSGGGSEVQVLESGGGLVQPGGSLRLSCAASGFTFSNFAMSWVRQAPGKGLEWVSTISGSAGTTDYADSVKGRFTISRDNSKKTLYLQMNSLRVEDTAVYYCADGRGPFFDYRGQGTLVTVSSGTGGGGSGGGGSGGGGSEFDIQMTQSPSSLSASVGDRVTITCKASDHINNWLAWYQQKPGQAPKLLIYGATTLETGVPSRFSGSGSGTDYTLTISSLQPEDFATYYCQQSWNTPWTFGQGTKLEIKRLEGKPIPNPLLGLDSTGSGEDLKNVFPPEVAVFEPSEAEISHTQKATLVCLATGFYPDHVELSWWVNGKEVHSGVSTDPQPLKEQPALNDSRYCLSSRLRVSATFWQNPRNHFRCQVQFYGLSENDEWTQDRAKPVTQIVSAEAWGRADCGSQSFGLLDPKLCYLLDGILFIYGVILTALFLRVKFSRSADAPAYQQGQNQLYNELNLGRREEYDVLDKRRGRDPEMGGKPQRRKNPQEGLYNELQKDKMAEAYSEIGMKGERRRGKGHDGLYQGLSTATKDTYDALHMQALPPRRAKRSGSGATNFSLLKQAGDVEENPGPTSMDWIWRILFLVGAATGAHSGPEVQLVESGGGLVQAGGSLRLSCAASGRTFSMGWFRQAPGKEREFVAAITYSGGSPYYADSVKGRFTISRDNAKNTVYLQMNSLKPEDTAVYYCAANPTYGSDWNAENWGQGTQVTVSSGSGGGGSGGGGSGGGGSFEQVQLQQPGAELVKPGASVKMSCKASGYAFSSYWINWMKQKPGQGLEWIGQIYPGDGDTNYNGKFKGRATLTADTSSSTAYMQLSSLTSEDSAVYFCARSITTVVGCAMDYWGQGTSVTVSSTREQKLISEEDGSGIQNPDPAVYQLRDSKSSDKSVCLFTDFDSQTNVSQSKDSDVYITDKTVLDMRSMDFKSNSAVAWSNKSDFACANAFNNSIIPEDTFFPSPESSCGTQSFGLLDPKLCYLLDGILFIYGVILTALFLRSKRSRLLHSDYMNMTPRRPGPTRKHYQPYAPPRDFAAYRSRVKFSRSADAPAYQQGQNQLYNELNLGRREEYDVLDKRRGRDPEMGGKPQRRKNPQEGLYNELQKDKMAEAYSEIGMKGERRRGKGHDGLYQGLSTATKDTYDALHMQALPPR

SEQ ID NO: 17056 - protein, 1332 aa, Artificial Sequence
  Synthetic Polypeptide
MALPVTALLLPLALLLHAARPEVQLLESGGGLVQPGGSLRLSCAASGFTFSSYAMSWVRQAPGKGLEWVSSISGSGDYIYYADSVKGRFTISRDISKNTLYLQMNSLRAEDTAVYYCAKEGTGANSSLADYRGQGTLVTVSSGGGSGGGSEVQVLESGGGLVQPGGSLRLSCAASGFTFSNFAMSWVRQAPGKGLEWVSTISGSAGTTDYADSVKGRFTISRDNSKKTLYLQMNSLRVEDTAVYYCADGRGPFFDYRGQGTLVTVSSGTGGGGSGGGGSGGGGSEFDIQMTQSPSSLSASVGDRVTITCKASDHINNWLAWYQQKPGQAPKLLIYGATTLETGVPSRFSGSGSGTDYTLTISSLQPEDFATYYCQQSWNTPWTFGQGTKLEIKRLEGKPIPNPLLGLDSTGSGEDLKNVFPPEVAVFEPSEAEISHTQKATLVCLATGFYPDHVELSWWVNGKEVHSGVSTDPQPLKEQPALNDSRYCLSSRLRVSATFWQNPRNHFRCQVQFYGLSENDEWTQDRAKPVTQIVSAEAWGRADCGSQSFGLLDPKLCYLLDGILFIYGVILTALFLRSKRSRLLHSDYMNMTPRRPGPTRKHYQPYAPPRDFAAYRSRVKFSRSADAPAYQQGQNQLYNELNLGRREEYDVLDKRRGRDPEMGGKPQRRKNPQEGLYNELQKDKMAEAYSEIGMKGERRRGKGHDGLYQGLSTATKDTYDALHMQALPPRRAKRSGSGATNFSLLKQAGDVEENPGPTSMDWIWRILFLVGAATGAHSGPEVQLVESGGGLVQAGGSLRLSCAASGRTFSMGWFRQAPGKEREFVAAITYSGGSPYYADSVKGRFTISRDNAKNTVYLQMNSLKPEDTAVYYCAANPTYGSDWNAENWGQGTQVTVSSGSGGGGSGGGGSGGGGSFEQVQLQQPGAELVKPGASVKMSCKASGYAFSSYWINWMKQKPGQGLEWIGQIYPGDGDTNYNGKFKGRATLTADTSSSTAYMQLSSLTSEDSAVYFCARSITTVVGCAMDYWGQGTSVTVSSTREQKLISEEDGSGIQNPDPAVYQLRDSKSSDKSVCLFTDFDSQTNVSQSKDSDVYITDKTVLDMRSMDFKSNSAVAWSNKSDFACANAFNNSIIPEDTFFPSPESSCGTQSFGLLDPKLCYLLDGILFIYGVILTALFLRSKRSRLLHSDYMNMTPRRPGPTRKHYQPYAPPRDFAAYRSRVKFSRSADAPAYQQGQNQLYNELNLGRREEYDVLDKRRGRDPEMGGKPQRRKNPQEGLYNELQKDKMAEAYSEIGMKGERRRGKGHDGLYQGLSTATKDTYDALHMQALPPR

SEQ ID NO: 17057 - protein, 1293 aa, Artificial Sequence
  Synthetic Polypeptide
MALPVTALLLPLALLLHAARPEVQLLESGGGLVQPGGSLRLSCAASGFTFSSYAMSWVRQAPGKGLEWVSSISGSGDYIYYADSVKGRFTISRDISKNTLYLQMNSLRAEDTAVYYCAKEGTGANSSLADYRGQGTLVTVSSGGGSGGGSEVQVLESGGGLVQPGGSLRLSCAASGFTFSNFAMSWVRQAPGKGLEWVSTISGSAGTTDYADSVKGRFTISRDNSKKTLYLQMNSLRVEDTAVYYCADGRGPFFDYRGQGTLVTVSSGTGGGGSGGGGSGGGGSEFDIQMTQSPSSLSASVGDRVTITCKASDHINNWLAWYQQKPGQAPKLLIYGATTLETGVPSRFSGSGSGTDYTLTISSLQPEDFATYYCQQSWNTPWTFGQGTKLEIKRLEGKPIPNPLLGLDSTGSGEDLKNVFPPEVAVFEPSEAEISHTQKATLVCLATGFYPDHVELSWWVNGKEVHSGVSTDPQPLKEQPALNDSRYCLSSRLRVSATFWQNPRNHFRCQVQFYGLSENDEWTQDRAKPVTQIVSAEAWGRADCGSQSFGLLDPKLCYLLDGILFIYGVILTALFLRVKFSRSADAPAYQQGQNQLYNELNLGRREEYDVLDKRRGRDPEMGGKPQRRKNPQEGLYNELQKDKMAEAYSEIGMKGERRRGKGHDGLYQGLSTATKDTYDALHMQALPPRRAKRSGSGATNFSLLKQAGDVEENPGPTSMDWIWRILFLVGAATGAHSGPEVQLVESGGGLVQAGGSLRLSCAASGRTFSMGWFRQAPGKEREFVAAITYSGGSPYYADSVKGRFTISRDNAKNTVYLQMNSLKPEDTAVYYCAANPTYGSDWNAENWGQGTQVTVSSGSGGGGSGGGGSGGGGSFEQVQLQQPGAELVKPGASVKMSCKASGYAFSSYWINWMKQKPGQGLEWIGQIYPGDGDTNYNGKFKGRATLTADTSSSTAYMQLSSLTSEDSAVYFCARSITTVVGCAMDYWGQGTSVTVSSTREQKLISEEDLGSGIQNPDPAVYQLRDSKSSDKSVCLFTDFDSQTNVSQSKDSDVYITDKTVLDMRSMDFKSNSAVAWSNKSDFACANAFNNSIIPEDTFFPSPESSCGTQSFGLLDPKLCYLLDGILFIYGVILTALFLKRGRKKLLYIFKQPFMRPVQTTQEEDGCSCRFPEEEEGGCELRVKFSRSADAPAYQQGQNQLYNELNLGRREEYDVLDKRRGRDPEMGGKPQRRKNPQEGLYNELQKDKMAEAYSEIGMKGERRRGKGHDGLYQGLSTATKDTYDALHMQALPPR

SEQ ID NO: 17058 - protein, 1335 aa, Artificial Sequence
  Synthetic Polypeptide
MALPVTALLLPLALLLHAARPEVQLLESGGGLVQPGGSLRLSCAASGFTFSSYAMSWVRQAPGKGLEWVSSISGSGDYIYYADSVKGRFTISRDISKNTLYLQMNSLRAEDTAVYYCAKEGTGANSSLADYRGQGTLVTVSSGGGSGGGSEVQVLESGGGLVQPGGSLRLSCAASGFTFSNFAMSWVRQAPGKGLEWVSTISGSAGTTDYADSVKGRFTISRDNSKKTLYLQMNSLRVEDTAVYYCADGRGPFFDYRGQGTLVTVSSGTGGGGSGGGGSGGGGSEFDIQMTQSPSSLSASVGDRVTITCKASDHINNWLAWYQQKPGQAPKLLIYGATTLETGVPSRFSGSGSGTDYTLTISSLQPEDFATYYCQQSWNTPWTFGQGTKLEIKRLEGKPIPNPLLGLDSTGSGEDLKNVFPPEVAVFEPSEAEISHTQKATLVCLATGFYPDHVELSWWVNGKEVHSGVSTDPQPLKEQPALNDSRYCLSSRLRVSATFWQNPRNHFRCQVQFYGLSENDEWTQDRAKPVTQIVSAEAWGRADCGSQSFGLLDPKLCYLLDGILFIYGVILTALFLKRGRKKLLYIFKQPFMRPVQTTQEEDGCSCRFPEEEEGGCELRVKFSRSADAPAYQQGQNQLYNELNLGRREEYDVLDKRRGRDPEMGGKPQRRKNPQEGLYNELQKDKMAEAYSEIGMKGERRRGKGHDGLYQGLSTATKDTYDALHMQALPPRRAKRSGSGATNFSLLKQAGDVEENPGPTSMDWIWRILFLVGAATGAHSGPEVQLVESGGGLVQAGGSLRLSCAASGRTFSMGWFRQAPGKEREFVAAITYSGGSPYYADSVKGRFTISRDNAKNTVYLQMNSLKPEDTAVYYCAANPTYGSDWNAENWGQGTQVTVSSGSGGGGSGGGGSGGGGSFEQVQLQQPGAELVKPGASVKMSCKASGYAFSSYWINWMKQKPGQGLEWIGQIYPGDGDTNYNGKFKGRATLTADTSSSTAYMQLSSLTSEDSAVYFCARSITTVVGCAMDYWGQGTSVTVSSTREQKLISEEDLGSGIQNPDPAVYQLRDSKSSDKSVCLFTDFDSQTNVSQSKDSDVYITDKTVLDMRSMDFKSNSAVAWSNKSDFACANAFNNSIIPEDTFFPSPESSCGTQSFGLLDPKLCYLLDGILFIYGVILTALFLKRGRKKLLYIFKQPFMRPVQTTQEEDGCSCRFPEEEEGGCELRVKFSRSADAPAYQQGQNQLYNELNLGRREEYDVLDKRRGRDPEMGGKPQRRKNPQEGLYNELQKDKMAEAYSEIGMKGERRRGKGHDGLYQGLSTATKDTYDALHMQALPPR

SEQ ID NO: 17059 - protein, 1225 aa, Artificial Sequence
  Synthetic Polypeptide
MALPVTALLLPLALLLHAARPEVQLLESGGGLVQPGGSLRLSCAASGFTFSSYAMSWVRQAPGKGLEWVSSISGSGDYIYYADSVKGRFTISRDISKNTLYLQMNSLRAEDTAVYYCAKEGTGANSSLADYRGQGTLVTVSSGGGSGGGSEVQVLESGGGLVQPGGSLRLSCAASGFTFSNFAMSWVRQAPGKGLEWVSTISGSAGTTDYADSVKGRFTISRDNSKKTLYLQMNSLRVEDTAVYYCADGRGPFFDYRGQGTLVTVSSGTGGGGSGGGGSGGGGSEFDIQMTQSPSSLSASVGDRVTITCKASDHINNWLAWYQQKPGQAPKLLIYGATTLETGVPSRFSGSGSGTDYTLTISSLQPEDFATYYCQQSWNTPWTFGQGTKLEIKRLEQSFGLLDPKLCYLLDGILFIYGVILTALFLRVKFSRSADAPAYQQGQNQLYNELNLGRREEYDVLDKRRGRDPEMGGKPQRRKNPQEGLYNELQKDKMAEAYSEIGMKGERRRGKGHDGLYQGLSTATKDTYDALHMQALPPRRAKRSGSGATNFSLLKQAGDVEENPGPTSMDWIWRILFLVGAATGAHSGPEVQLVESGGGLVQAGGSLRLSCAASGRTFSMGWFRQAPGKEREFVAAITYSGGSPYYADSVKGRFTISRDNAKNTVYLQMNSLKPEDTAVYYCAANPTYGSDWNAENWGQGTQVTVSSGSGGGGSGGGGSGGGGSFEQVQLQQPGAELVKPGASVKMSCKASGYAFSSYWINWMKQKPGQGLEWIGQIYPGDGDTNYNGKFKGRATLTADTSSSTAYMQLSSLTSEDSAVYFCARSITTVVGCAMDYWGQGTSVTVSSTRQSFGLLDPKLCYLLDGILFIYGVILTALFLRVKFSRSADAPAYQQGQNQLYNELNLGRREEYDVLDKRRGRDPEMGGKPQRRKNPQEGLYNELQKDKMAEAYSEIGMKGERRRGKGHDGLYQGLSTATKDTYDALHMQALPPRRAKRSGSGVKQTLNFDLLKLAGDVESNPGPSRGHMTEYKPTVRLATRDDVPRAVRTLAAAFADYPATRHTVDPDRHIERVTELQELFLTRVGLDIGKVWVADDGAAVAVWTTPESVEAGAVFAEIGPRMAELSGSRLAAQQQMEGLLAPHRPKEPAWFLATVGVSPDHQGKGLGSAVVLPGVEAAERAGVPAFLETSAPRNLPFYERLGFTVTADVEVPEGPRTWCMTRKPGA

SEQ ID NO: 17060 - protein, 1050 aa, Artificial Sequence
  Synthetic Polypeptide
MALPVTALLLPLALLLHAARPEVQLLESGGGLVQPGGSLRLSCAASGFTFSSYAMSWVRQAPGKGLEWVSSISGSGDYIYYADSVKGRFTISRDISKNTLYLQMNSLRAEDTAVYYCAKEGTGANSSLADYRGQGTLVTVSSGGGSGGGSEVQVLESGGGLVQPGGSLRLSCAASGFTFSNFAMSWVRQAPGKGLEWVSTISGSAGTTDYADSVKGRFTISRDNSKKTLYLQMNSLRVEDTAVYYCADGRGPFFDYRGQGTLVTVSSGTGGGGSGGGGSGGGGSEFDIQMTQSPSSLSASVGDRVTITCKASDHINNWLAWYQQKPGQAPKLLIYGATTLETGVPSRFSGSGSGTDYTLTISSLQPEDFATYYCQQSWNTPWTFGQGTKLEIKRLEGQPKANPTVTLFPPSSEELQANKATLVCLISDFYPGAVTVAWKADGSPVKAGVETTKPSKQSNNKYAASSYLSLTPEQWKSHRSYSCQVTHEGSTVEKTVAPTECSPIKTDVITMDPKDNCSKDANDTLLLQLTNTSAYYMYLLLLLKSVVYFAIITCCLLRRTAFCCNGEKSRAKRSGSGATNFSLLKQAGDVEENPGPTSMDWIWRILFLVGAATGAHSGPEVQLVESGGGLVQAGGSLRLSCAASGRTFSMGWFRQAPGKEREFVAAITYSGGSPYYADSVKGRFTISRDNAKNTVYLQMNSLKPEDTAVYYCAANPTYGSDWNAENWGQGTQVTVSSGSGGGGSGGGGSGGGGSFEQVQLQQPGAELVKPGASVKMSCKASGYAFSSYWINWMKQKPGQGLEWIGQIYPGDGDTNYNGKFKGRATLTADTSSSTAYMQLSSLTSEDSAVYFCARSITTVVGCAMDYWGQGTSVTVSSTRASTKGPSVFPLAPSSKSTSGGTAALGCLVKDYFPEPVTVSWNSGALTSGVHTFPAVLQSSGLYSLSSVVTVPSSSLGTQTYICNVNHKPSNTKVDKRVEPKSCEVKTDSTDHVKPKETENTKQPSKSCHKPKAIVHTEKVNMMSLTVLGLRMLFAKTVAVNFLLTAKLFFL

SEQ ID NO: 17061 - protein, 1028 aa, Artificial Sequence
  Synthetic Polypeptide
MALPVTALLLPLALLLHAARPEVQLLESGGGLVQPGGSLRLSCAASGFTFSSYAMSWVRQAPGKGLEWVSSISGSGDYIYYADSVKGRFTISRDISKNTLYLQMNSLRAEDTAVYYCAKEGTGANSSLADYRGQGTLVTVSSGGGSGGGSEVQVLESGGGLVQPGGSLRLSCAASGFTFSNFAMSWVRQAPGKGLEWVSTISGSAGTTDYADSVKGRFTISRDNSKKTLYLQMNSLRVEDTAVYYCADGRGPFFDYRGQGTLVTVSSGTGGGGSGGGGSGGGGSEFDIQMTQSPSSLSASVGDRVTITCKASDHINNWLAWYQQKPGQAPKLLIYGATTLETGVPSRFSGSGSGTDYTLTISSLQPEDFATYYCQQSWNTPWTFGQGTKLEIKRLEGQPKANPTVTLFPPSSEELQANKATLVCLISDFYPGAVTVAWKADGSPVKAGVETTKPSKQSNNKYAASSYLSLTPEQWKSHRSYSCQVTHEGSTVEKTVAPTECSGRADCGITSASYHQGVLSATILYEILLGKATLYAVLVSALVLMAMVKRKDSRGRAKRSGSGATNFSLLKQAGDVEENPGPTSMDWIWRILFLVGAATGAHSGPEVQLVESGGGLVQAGGSLRLSCAASGRTFSMGWFRQAPGKEREFVAAITYSGGSPYYADSVKGRFTISRDNAKNTVYLQMNSLKPEDTAVYYCAANPTYGSDWNAENWGQGTQVTVSSGSGGGGSGGGGSGGGGSFEQVQLQQPGAELVKPGASVKMSCKASGYAFSSYWINWMKQKPGQGLEWIGQIYPGDGDTNYNGKFKGRATLTADTSSSTAYMQLSSLTSEDSAVYFCARSITTVVGCAMDYWGQGTSVTVSSTRASTKGPSVFPLAPSSKSTSGGTAALGCLVKDYFPEPVTVSWNSGALTSGVHTFPAVLQSSGLYSLSSVVTVPSSSLGTQTYICNVNHKPSNTKVDKRVEPKSCIPEDTFFPSSDVPCDVKLVEKSFETDTNLNFQNLSVIGFRILLLKVAGFNLLMTLRLWSS

SEQ ID NO: 17062 - protein, 1028 aa, Artificial Sequence
  Synthetic Polypeptide
MALPVTALLLPLALLLHAARPEVQLLESGGGLVQPGGSLRLSCAASGFTFSSYAMSWVRQAPGKGLEWVSSISGSGDYIYYADSVKGRFTISRDISKNTLYLQMNSLRAEDTAVYYCAKEGTGANSSLADYRGQGTLVTVSSGGGSGGGSEVQVLESGGGLVQPGGSLRLSCAASGFTFSNFAMSWVRQAPGKGLEWVSTISGSAGTTDYADSVKGRFTISRDNSKKTLYLQMNSLRVEDTAVYYCADGRGPFFDYRGQGTLVTVSSGTGGGGSGGGGSGGGGSEFDIQMTQSPSSLSASVGDRVTITCKASDHINNWLAWYQQKPGQAPKLLIYGATTLETGVPSRFSGSGSGTDYTLTISSLQPEDFATYYCQQSWNTPWTFGQGTKLEIKRLEGQPKANPTVTLFPPSSEELQANKATLVCLISDFYPGAVTVAWKADGSPVKAGVETTKPSKQSNNKYAASSYLSLTPEQWKSHRSYSCQVTHEGSTVEKTVAPTECSGRADCGFTSESYQQGVLSATILYEILLGKATLYAVLVSALVLMAMVKRKDSRGRAKRSGSGATNFSLLKQAGDVEENPGPTSMDWIWRILFLVGAATGAHSGPEVQLVESGGGLVQAGGSLRLSCAASGRTFSMGWFRQAPGKEREFVAAITYSGGSPYYADSVKGRFTISRDNAKNTVYLQMNSLKPEDTAVYYCAANPTYGSDWNAENWGQGTQVTVSSGSGGGGSGGGGSGGGGSFEQVQLQQPGAELVKPGASVKMSCKASGYAFSSYWINWMKQKPGQGLEWIGQIYPGDGDTNYNGKFKGRATLTADTSSSTAYMQLSSLTSEDSAVYFCARSITTVVGCAMDYWGQGTSVTVSSTRASTKGPSVFPLAPSSKSTSGGTAALGCLVKDYFPEPVTVSWNSGALTSGVHTFPAVLQSSGLYSLSSVVTVPSSSLGTQTYICNVNHKPSNTKVDKRVEPKSCIPEDTFFPSPESSCDVKLVEKSFETDTNLNFQNLSVIGFRILLLKVAGFNLLMTLRLWSS

SEQ ID NO: 17063 - protein, 994 aa, Artificial Sequence
  Synthetic Polypeptide
MALPVTALLLPLALLLHAARPEVQLLESGGGLVQPGGSLRLSCAASGFTFSSYAMSWVRQAPGKGLEWVSSISGSGDYIYYADSVKGRFTISRDISKNTLYLQMNSLRAEDTAVYYCAKEGTGANSSLADYRGQGTLVTVSSGGGSGGGSEVQVLESGGGLVQPGGSLRLSCAASGFTFSNFAMSWVRQAPGKGLEWVSTISGSAGTTDYADSVKGRFTISRDNSKKTLYLQMNSLRVEDTAVYYCADGRGPFFDYRGQGTLVTVSSLEGQPKANPTVTLFPPSSEELQANKATLVCLISDFYPGAVTVAWKADGSPVKAGVETTKPSKQSNNKYAASSYLSLTPEQWKSHRSYSCQVTHEGSTVEKTVAPTECSGRADCGFTSESYQQGVLSATILYEILLGKATLYAVLVSALVLMAMVKRKDSRGRAKRSGSGATNFSLLKQAGDVEENPGPTSMDWIWRILFLVGAATGAHSGPEVQLVESGGGLVQAGGSLRLSCAASGRTFSMGWFRQAPGKEREFVAAITYSGGSPYYADSVKGRFTISRDNAKNTVYLQMNSLKPEDTAVYYCAANPTYGSDWNAENWGQGTQVTVSSTRASTKGPSVFPLAPSSKSTSGGTAALGCLVKDYFPEPVTVSWNSGALTSGVHTFPAVLQSSGLYSLSSVVTVPSSSLGTQTYICNVNHKPSNTKVDKRVEPKSCIPEDTFFPSPESSCDVKLVEKSFETDTNLNFQNLSVIGFRILLLKVAGFNLLMTLRLWSSRAKRSGSGVKQTLNFDLLKLAGDVESNPGPSRGHMTEYKPTVRLATRDDVPRAVRTLAAAFADYPATRHTVDPDRHIERVTELQELFLTRVGLDIGKVWVADDGAAVAVWTTPESVEAGAVFAEIGPRMAELSGSRLAAQQQMEGLLAPHRPKEPAWFLATVGVSPDHQGKGLGSAVVLPGVEAAERAGVPAFLETSAPRNLPFYERLGFTVTADVEVPEGPRTWCMTRKPGA

SEQ ID NO: 17064 - protein, 761 aa, Artificial Sequence
  Synthetic Polypeptide
MALPVTALLLPLALLLHAARPEVQLLESGGGLVQPGGSLRLSCAASGFTFSSYAMSWVRQAPGKGLEWVSSISGSGDYIYYADSVKGRFTISRDISKNTLYLQMNSLRAEDTAVYYCAKEGTGANSSLADYRGQGTLVTVSSGGGSGGGSEVQVLESGGGLVQPGGSLRLSCAASGFTFSNFAMSWVRQAPGKGLEWVSTISGSAGTTDYADSVKGRFTISRDNSKKTLYLQMNSLRVEDTAVYYCADGRGPFFDYRGQGTLVTVSSLEGQPKANPTVTLFPPSSEELQANKATLVCLISDFYPGAVTVAWKADGSPVKAGVETTKPSKQSNNKYAASSYLSLTPEQWKSHRSYSCQVTHEGSTVEKTVAPTECSGRADCGFTSESYQQGVLSATILYEILLGKATLYAVLVSALVLMAMVKRKDSRGRAKRSGSGATNFSLLKQAGDVEENPGPTSMDWIWRILFLVGAATGAHSGPEVQLVESGGGLVQAGGSLRLSCAASGRTFSMGWFRQAPGKEREFVAAITYSGGSPYYADSVKGRFTISRDNAKNTVYLQMNSLKPEDTAVYYCAANPTYGSDWNAENWGQGTQVTVSSTRASTKGPSVFPLAPSSKSTSGGTAALGCLVKDYFPEPVTVSWNSGALTSGVHTFPAVLQSSGLYSLSSVVTVPSSSLGTQTYICNVNHKPSNTKVDKRVEPKSCIPEDTFFPSPESSCDVKLVEKSFETDTNLNFQNLSVIGFRILLLKVAGFNLLMTLRLWSS

SEQ ID NO: 17065 - protein, 789 aa, Artificial Sequence
  Synthetic Polypeptide
MALPVTALLLPLALLLHAARPEVQLLESGGGLVQPGGSLRLSCAASGFTFSSYAMSWVRQAPGKGLEWVSSISGSGDYIYYADSVKGRFTISRDISKNTLYLQMNSLRAEDTAVYYCAKEGTGANSSLADYRGQGTLVTVSSGGGSGGGSEVQVLESGGGLVQPGGSLRLSCAASGFTFSNFAMSWVRQAPGKGLEWVSTISGSAGTTDYADSVKGRFTISRDNSKKTLYLQMNSLRVEDTAVYYCADGRGPFFDYRGQGTLVTVSSLEGSGRADCGFTSESYQQGVLSATILYEILLGKATLYAVLVSALVLMAMVKRKDSRGRAKRSGSGATNFSLLKQAGDVEENPGPTSMDWIWRILFLVGAATGAHSGPEVQLVESGGGLVQAGGSLRLSCAASGRTFSMGWFRQAPGKEREFVAAITYSGGSPYYADSVKGRFTISRDNAKNTVYLQMNSLKPEDTAVYYCAANPTYGSDWNAENWGQGTQVTVSSTRGSIPEDTFFPSPESSCDVKLVEKSFETDTNLNFQNLSVIGFRILLLKVAGFNLLMTLRLWSSRAKRSGSGVKQTLNFDLLKLAGDVESNPGPSRGHMTEYKPTVRLATRDDVPRAVRTLAAAFADYPATRHTVDPDRHIERVTELQELFLTRVGLDIGKVWVADDGAAVAVWTTPESVEAGAVFAEIGPRMAELSGSRLAAQQQMEGLLAPHRPKEPAWFLATVGVSPDHQGKGLGSAVVLPGVEAAERAGVPAFLETSAPRNLPFYERLGFTVTADVEVPEGPRTWCMTRKPGA

SEQ ID NO: 17066 - protein, 556 aa, Artificial Sequence
  Synthetic Polypeptide
MALPVTALLLPLALLLHAARPEVQLLESGGGLVQPGGSLRLSCAASGFTFSSYAMSWVRQAPGKGLEWVSSISGSGDYIYYADSVKGRFTISRDISKNTLYLQMNSLRAEDTAVYYCAKEGTGANSSLADYRGQGTLVTVSSGGGSGGGSEVQVLESGGGLVQPGGSLRLSCAASGFTFSNFAMSWVRQAPGKGLEWVSTISGSAGTTDYADSVKGRFTISRDNSKKTLYLQMNSLRVEDTAVYYCADGRGPFFDYRGQGTLVTVSSLEGSGRADCGFTSESYQQGVLSATILYEILLGKATLYAVLVSALVLMAMVKRKDSRGRAKRSGSGATNFSLLKQAGDVEENPGPTSMDWIWRILFLVGAATGAHSGPEVQLVESGGGLVQAGGSLRLSCAASGRTFSMGWFRQAPGKEREFVAAITYSGGSPYYADSVKGRFTISRDNAKNTVYLQMNSLKPEDTAVYYCAANPTYGSDWNAENWGQGTQVTVSSTRGSIPEDTFFPSPESSCDVKLVEKSFETDTNLNFQNLSVIGFRILLLKVAGFNLLMTLRLWSS

SEQ ID NO: 17067 - protein, 798 aa, Artificial Sequence
  Synthetic Polypeptide
MALPVTALLLPLALLLHAARPEVQLLESGGGLVQPGGSLRLSCAASGFTFSSYAMSWVRQAPGKGLEWVSSISGSGDYIYYADSVKGRFTISRDISKNTLYLQMNSLRAEDTAVYYCAKEGTGANSSLADYRGQGTLVTVSSGGGSGGGSEVQVLESGGGLVQPGGSLRLSCAASGFTFSNFAMSWVRQAPGKGLEWVSTISGSAGTTDYADSVKGRFTISRDNSKKTLYLQMNSLRVEDTAVYYCADGRGPFFDYRGQGTLVTVSSLEDKTHTCPPCPAGRADCGFTSESYQQGVLSATILYEILLGKATLYAVLVSALVLMAMVKRKDSRGRAKRSGSGATNFSLLKQAGDVEENPGPTSMDWIWRILFLVGAATGAHSGPEVQLVESGGGLVQAGGSLRLSCAASGRTFSMGWFRQAPGKEREFVAAITYSGGSPYYADSVKGRFTISRDNAKNTVYLQMNSLKPEDTAVYYCAANPTYGSDWNAENWGQGTQVTVSSTRGSIPEDTFFPSPESSCDVKLVEKSFETDTNLNFQNLSVIGFRILLLKVAGFNLLMTLRLWSSRAKRSGSGVKQTLNFDLLKLAGDVESNPGPSRGHMTEYKPTVRLATRDDVPRAVRTLAAAFADYPATRHTVDPDRHIERVTELQELFLTRVGLDIGKVWVADDGAAVAVWTTPESVEAGAVFAEIGPRMAELSGSRLAAQQQMEGLLAPHRPKEPAWFLATVGVSPDHQGKGLGSAVVLPGVEAAERAGVPAFLETSAPRNLPFYERLGFTVTADVEVPEGPRTWCMTRKPGA

SEQ ID NO: 17068 - protein, 798 aa, Artificial Sequence
  Synthetic Polypeptide
MALPVTALLLPLALLLHAARPEVQLLESGGGLVQPGGSLRLSCAASGFTFSSYAMSWVRQAPGKGLEWVSSISGSGDYIYYADSVKGRFTISRDISKNTLYLQMNSLRAEDTAVYYCAKEGTGANSSLADYRGQGTLVTVSSGGGSGGGSEVQVLESGGGLVQPGGSLRLSCAASGFTFSNFAMSWVRQAPGKGLEWVSTISGSAGTTDYADSVKGRFTISRDNSKKTLYLQMNSLRVEDTAVYYCADGRGPFFDYRGQGTLVTVSSLEGSGRADCGFTSESYQQGVLSATILYEILLGKATLYAVLVSALVLMAMVKRKDSRGRAKRSGSGATNFSLLKQAGDVEENPGPTSMDWIWRILFLVGAATGAHSGPEVQLVESGGGLVQAGGSLRLSCAASGRTFSMGWFRQAPGKEREFVAAITYSGGSPYYADSVKGRFTISRDNAKNTVYLQMNSLKPEDTAVYYCAANPTYGSDWNAENWGQGTQVTVSSTRDKTHTCPPCPAIPEDTFFPSPESSCDVKLVEKSFETDTNLNFQNLSVIGFRILLLKVAGFNLLMTLRLWSSRAKRSGSGVKQTLNFDLLKLAGDVESNPGPSRGHMTEYKPTVRLATRDDVPRAVRTLAAAFADYPATRHTVDPDRHIERVTELQELFLTRVGLDIGKVWVADDGAAVAVWTTPESVEAGAVFAEIGPRMAELSGSRLAAQQQMEGLLAPHRPKEPAWFLATVGVSPDHQGKGLGSAVVLPGVEAAERAGVPAFLETSAPRNLPFYERLGFTVTADVEVPEGPRTWCMTRKPGA

SEQ ID NO: 17069 - protein, 807 aa, Artificial Sequence
  Synthetic Polypeptide
MALPVTALLLPLALLLHAARPEVQLLESGGGLVQPGGSLRLSCAASGFTFSSYAMSWVRQAPGKGLEWVSSISGSGDYIYYADSVKGRFTISRDISKNTLYLQMNSLRAEDTAVYYCAKEGTGANSSLADYRGQGTLVTVSSGGGSGGGSEVQVLESGGGLVQPGGSLRLSCAASGFTFSNFAMSWVRQAPGKGLEWVSTISGSAGTTDYADSVKGRFTISRDNSKKTLYLQMNSLRVEDTAVYYCADGRGPFFDYRGQGTLVTVSSLEDKTHTCPPCPAGRADCGFTSESYQQGVLSATILYEILLGKATLYAVLVSALVLMAMVKRKDSRGRAKRSGSGATNFSLLKQAGDVEENPGPTSMDWIWRILFLVGAATGAHSGPEVQLVESGGGLVQAGGSLRLSCAASGRTFSMGWFRQAPGKEREFVAAITYSGGSPYYADSVKGRFTISRDNAKNTVYLQMNSLKPEDTAVYYCAANPTYGSDWNAENWGQGTQVTVSSTRDKTHTCPPCPAIPEDTFFPSPESSCDVKLVEKSFETDTNLNFQNLSVIGFRILLLKVAGFNLLMTLRLWSSRAKRSGSGVKQTLNFDLLKLAGDVESNPGPSRGHMTEYKPTVRLATRDDVPRAVRTLAAAFADYPATRHTVDPDRHIERVTELQELFLTRVGLDIGKVWVADDGAAVAVWTTPESVEAGAVFAEIGPRMAELSGSRLAAQQQMEGLLAPHRPKEPAWFLATVGVSPDHQGKGLGSAVVLPGVEAAERAGVPAFLETSAPRNLPFYERLGFTVTADVEVPEGPRTWCMTRKPGA

SEQ ID NO: 17070 - protein, 574 aa, Artificial Sequence
  Synthetic Polypeptide
MALPVTALLLPLALLLHAARPEVQLLESGGGLVQPGGSLRLSCAASGFTFSSYAMSWVRQAPGKGLEWVSSISGSGDYIYYADSVKGRFTISRDISKNTLYLQMNSLRAEDTAVYYCAKEGTGANSSLADYRGQGTLVTVSSGGGSGGGSEVQVLESGGGLVQPGGSLRLSCAASGFTFSNFAMSWVRQAPGKGLEWVSTISGSAGTTDYADSVKGRFTISRDNSKKTLYLQMNSLRVEDTAVYYCADGRGPFFDYRGQGTLVTVSSLEDKTHTCPPCPAGRADCGFTSESYQQGVLSATILYEILLGKATLYAVLVSALVLMAMVKRKDSRGRAKRSGSGATNFSLLKQAGDVEENPGPTSMDWIWRILFLVGAATGAHSGPEVQLVESGGGLVQAGGSLRLSCAASGRTFSMGWFRQAPGKEREFVAAITYSGGSPYYADSVKGRFTISRDNAKNTVYLQMNSLKPEDTAVYYCAANPTYGSDWNAENWGQGTQVTVSSTRDKTHTCPPCPAIPEDTFFPSPESSCDVKLVEKSFETDTNLNFQNLSVIGFRILLLKVAGFNLLMTLRLWSS

SEQ ID NO: 17071 - protein, 565 aa, Artificial Sequence
  Synthetic Polypeptide
MALPVTALLLPLALLLHAARPEVQLLESGGGLVQPGGSLRLSCAASGFTFSSYAMSWVRQAPGKGLEWVSSISGSGDYIYYADSVKGRFTISRDISKNTLYLQMNSLRAEDTAVYYCAKEGTGANSSLADYRGQGTLVTVSSGGGSGGGSEVQVLESGGGLVQPGGSLRLSCAASGFTFSNFAMSWVRQAPGKGLEWVSTISGSAGTTDYADSVKGRFTISRDNSKKTLYLQMNSLRVEDTAVYYCADGRGPFFDYRGQGTLVTVSSLEGSGRADCGFTSESYQQGVLSATILYEILLGKATLYAVLVSALVLMAMVKRKDSRGRAKRSGSGATNFSLLKQAGDVEENPGPTSMDWIWRILFLVGAATGAHSGPEVQLVESGGGLVQAGGSLRLSCAASGRTFSMGWFRQAPGKEREFVAAITYSGGSPYYADSVKGRFTISRDNAKNTVYLQMNSLKPEDTAVYYCAANPTYGSDWNAENWGQGTQVTVSSTRDKTHTCPPCPAIPEDTFFPSPESSCDVKLVEKSFETDTNLNFQNLSVIGFRILLLKVAGFNLLMTLRLWSS

SEQ ID NO: 17072 - protein, 1016 aa, Artificial Sequence
  Synthetic Polypeptide
MALPVTALLLPLALLLHAARPEVQLLESGGGLVQPGGSLRLSCAASGFTFSSYAMSWVRQAPGKGLEWVSSISGSGDYIYYADSVKGRFTISRDISKNTLYLQMNSLRAEDTAVYYCAKEGTGANSSLADYRGQGTLVTVSSGGGSGGGSEVQVLESGGGLVQPGGSLRLSCAASGFTFSNFAMSWVRQAPGKGLEWVSTISGSAGTTDYADSVKGRFTISRDNSKKTLYLQMNSLRVEDTAVYYCADGRGPFFDYRGQGTLVTVSSLEGQPKANPTVTLFPPSSEELQANKATLVCLISDFYPGAVTVAWKADGSPVKAGVETTKPSKQSNNKYAASSYLSLTPEQWKSHRSYSCQVTHEGSTVEKTVAPTECSPIKTDVITMDPKDNCSKDANDTLLLQLTNTSAYYMYLLLLLKSVVYFAIITCCLLRRTAFCCNGEKSRAKRSGSGATNFSLLKQAGDVEENPGPTSMDWIWRILFLVGAATGAHSGPEVQLVESGGGLVQAGGSLRLSCAASGRTFSMGWFRQAPGKEREFVAAITYSGGSPYYADSVKGRFTISRDNAKNTVYLQMNSLKPEDTAVYYCAANPTYGSDWNAENWGQGTQVTVSSTRASTKGPSVFPLAPSSKSTSGGTAALGCLVKDYFPEPVTVSWNSGALTSGVHTFPAVLQSSGLYSLSSVVTVPSSSLGTQTYICNVNHKPSNTKVDKRVEPKSCEVKTDSTDHVKPKETENTKQPSKSCHKPKAIVHTEKVNMMSLTVLGLRMLFAKTVAVNFLLTAKLFFLRAKRSGSGVKQTLNFDLLKLAGDVESNPGPSRGHMTEYKPTVRLATRDDVPRAVRTLAAAFADYPATRHTVDPDRHIERVTELQELFLTRVGLDIGKVWVADDGAAVAVWTTPESVEAGAVFAEIGPRMAELSGSRLAAQQQMEGLLAPHRPKEPAWFLATVGVSPDHQGKGLGSAVVLPGVEAAERAGVPAFLETSAPRNLPFYERLGFTVTADVEVPEGPRTWCMTRKPGA

SEQ ID NO: 17073 - protein, 783 aa, Artificial Sequence
  Synthetic Polypeptide
MALPVTALLLPLALLLHAARPEVQLLESGGGLVQPGGSLRLSCAASGFTFSSYAMSWVRQAPGKGLEWVSSISGSGDYIYYADSVKGRFTISRDISKNTLYLQMNSLRAEDTAVYYCAKEGTGANSSLADYRGQGTLVTVSSGGGSGGGSEVQVLESGGGLVQPGGSLRLSCAASGFTFSNFAMSWVRQAPGKGLEWVSTISGSAGTTDYADSVKGRFTISRDNSKKTLYLQMNSLRVEDTAVYYCADGRGPFFDYRGQGTLVTVSSLEGQPKANPTVTLFPPSSEELQANKATLVCLISDFYPGAVTVAWKADGSPVKAGVETTKPSKQSNNKYAASSYLSLTPEQWKSHRSYSCQVTHEGSTVEKTVAPTECSPIKTDVITMDPKDNCSKDANDTLLLQLTNTSAYYMYLLLLLKSVVYFAIITCCLLRRTAFCCNGEKSRAKRSGSGATNFSLLKQAGDVEENPGPTSMDWIWRILFLVGAATGAHSGPEVQLVESGGGLVQAGGSLRLSCAASGRTFSMGWFRQAPGKEREFVAAITYSGGSPYYADSVKGRFTISRDNAKNTVYLQMNSLKPEDTAVYYCAANPTYGSDWNAENWGQGTQVTVSSTRASTKGPSVFPLAPSSKSTSGGTAALGCLVKDYFPEPVTVSWNSGALTSGVHTFPAVLQSSGLYSLSSVVTVPSSSLGTQTYICNVNHKPSNTKVDKRVEPKSCEVKTDSTDHVKPKETENTKQPSKSCHKPKAIVHTEKVNMMSLTVLGLRMLFAKTVAVNFLLTAKLFFL

SEQ ID NO: 17074 - protein, 811 aa, Artificial Sequence
  Synthetic Polypeptide
MALPVTALLLPLALLLHAARPEVQLLESGGGLVQPGGSLRLSCAASGFTFSSYAMSWVRQAPGKGLEWVSSISGSGDYIYYADSVKGRFTISRDISKNTLYLQMNSLRAEDTAVYYCAKEGTGANSSLADYRGQGTLVTVSSGGGSGGGSEVQVLESGGGLVQPGGSLRLSCAASGFTFSNFAMSWVRQAPGKGLEWVSTISGSAGTTDYADSVKGRFTISRDNSKKTLYLQMNSLRVEDTAVYYCADGRGPFFDYRGQGTLVTVSSLEGSPIKTDVITMDPKDNCSKDANDTLLLQLTNTSAYYMYLLLLLKSVVYFAIITCCLLRRTAFCCNGEKSRAKRSGSGATNFSLLKQAGDVEENPGPTSMDWIWRILFLVGAATGAHSGPEVQLVESGGGLVQAGGSLRLSCAASGRTFSMGWFRQAPGKEREFVAAITYSGGSPYYADSVKGRFTISRDNAKNTVYLQMNSLKPEDTAVYYCAANPTYGSDWNAENWGQGTQVTVSSTRGSEVKTDSTDHVKPKETENTKQPSKSCHKPKAIVHTEKVNMMSLTVLGLRMLFAKTVAVNFLLTAKLFFLRAKRSGSGVKQTLNFDLLKLAGDVESNPGPSRGHMTEYKPTVRLATRDDVPRAVRTLAAAFADYPATRHTVDPDRHIERVTELQELFLTRVGLDIGKVWVADDGAAVAVWTTPESVEAGAVFAEIGPRMAELSGSRLAAQQQMEGLLAPHRPKEPAWFLATVGVSPDHQGKGLGSAVVLPGVEAAERAGVPAFLETSAPRNLPFYERLGFTVTADVEVPEGPRTWCMTRKPGA

SEQ ID NO: 17075 - protein, 578 aa, Artificial Sequence
  Synthetic Polypeptide
MALPVTALLLPLALLLHAARPEVQLLESGGGLVQPGGSLRLSCAASGFTFSSYAMSWVRQAPGKGLEWVSSISGSGDYIYYADSVKGRFTISRDISKNTLYLQMNSLRAEDTAVYYCAKEGTGANSSLADYRGQGTLVTVSSGGGSGGGSEVQVLESGGGLVQPGGSLRLSCAASGFTFSNFAMSWVRQAPGKGLEWVSTISGSAGTTDYADSVKGRFTISRDNSKKTLYLQMNSLRVEDTAVYYCADGRGPFFDYRGQGTLVTVSSLEGSPIKTDVITMDPKDNCSKDANDTLLLQLTNTSAYYMYLLLLLKSVVYFAIITCCLLRRTAFCCNGEKSRAKRSGSGATNFSLLKQAGDVEENPGPTSMDWIWRILFLVGAATGAHSGPEVQLVESGGGLVQAGGSLRLSCAASGRTFSMGWFRQAPGKEREFVAAITYSGGSPYYADSVKGRFTISRDNAKNTVYLQMNSLKPEDTAVYYCAANPTYGSDWNAENWGQGTQVTVSSTRGSEVKTDSTDHVKPKETENTKQPSKSCHKPKAIVHTEKVNMMSLTVLGLRMLFAKTVAVNFLLTAKLFFL

SEQ ID NO: 17076 - protein, 820 aa, Artificial Sequence
  Synthetic Polypeptide
MALPVTALLLPLALLLHAARPEVQLLESGGGLVQPGGSLRLSCAASGFTFSSYAMSWVRQAPGKGLEWVSSISGSGDYIYYADSVKGRFTISRDISKNTLYLQMNSLRAEDTAVYYCAKEGTGANSSLADYRGQGTLVTVSSGGGSGGGSEVQVLESGGGLVQPGGSLRLSCAASGFTFSNFAMSWVRQAPGKGLEWVSTISGSAGTTDYADSVKGRFTISRDNSKKTLYLQMNSLRVEDTAVYYCADGRGPFFDYRGQGTLVTVSSLEDKTHTCPPCPAPIKTDVITMDPKDNCSKDANDTLLLQLTNTSAYYMYLLLLLKSVVYFAIITCCLLRRTAFCCNGEKSRAKRSGSGATNFSLLKQAGDVEENPGPTSMDWIWRILFLVGAATGAHSGPEVQLVESGGGLVQAGGSLRLSCAASGRTFSMGWFRQAPGKEREFVAAITYSGGSPYYADSVKGRFTISRDNAKNTVYLQMNSLKPEDTAVYYCAANPTYGSDWNAENWGQGTQVTVSSTRGSEVKTDSTDHVKPKETENTKQPSKSCHKPKAIVHTEKVNMMSLTVLGLRMLFAKTVAVNFLLTAKLFFLRAKRSGSGVKQTLNFDLLKLAGDVESNPGPSRGHMTEYKPTVRLATRDDVPRAVRTLAAAFADYPATRHTVDPDRHIERVTELQELFLTRVGLDIGKVWVADDGAAVAVWTTPESVEAGAVFAEIGPRMAELSGSRLAAQQQMEGLLAPHRPKEPAWFLATVGVSPDHQGKGLGSAVVLPGVEAAERAGVPAFLETSAPRNLPFYERLGFTVTADVEVPEGPRTWCMTRKPGA

SEQ ID NO: 17077 - protein, 820 aa, Artificial Sequence
  Synthetic Polypeptide
MALPVTALLLPLALLLHAARPEVQLLESGGGLVQPGGSLRLSCAASGFTFSSYAMSWVRQAPGKGLEWVSSISGSGDYIYYADSVKGRFTISRDISKNTLYLQMNSLRAEDTAVYYCAKEGTGANSSLADYRGQGTLVTVSSGGGSGGGSEVQVLESGGGLVQPGGSLRLSCAASGFTFSNFAMSWVRQAPGKGLEWVSTISGSAGTTDYADSVKGRFTISRDNSKKTLYLQMNSLRVEDTAVYYCADGRGPFFDYRGQGTLVTVSSLEGSPIKTDVITMDPKDNCSKDANDTLLLQLTNTSAYYMYLLLLLKSVVYFAIITCCLLRRTAFCCNGEKSRAKRSGSGATNFSLLKQAGDVEENPGPTSMDWIWRILFLVGAATGAHSGPEVQLVESGGGLVQAGGSLRLSCAASGRTFSMGWFRQAPGKEREFVAAITYSGGSPYYADSVKGRFTISRDNAKNTVYLQMNSLKPEDTAVYYCAANPTYGSDWNAENWGQGTQVTVSSTRDKTHTCPPCPAEVKTDSTDHVKPKETENTKQPSKSCHKPKAIVHTEKVNMMSLTVLGLRMLFAKTVAVNFLLTAKLFFLRAKRSGSGVKQTLNFDLLKLAGDVESNPGPSRGHMTEYKPTVRLATRDDVPRAVRTLAAAFADYPATRHTVDPDRHIERVTELQELFLTRVGLDIGKVWVADDGAAVAVWTTPESVEAGAVFAEIGPRMAELSGSRLAAQQQMEGLLAPHRPKEPAWFLATVGVSPDHQGKGLGSAVVLPGVEAAERAGVPAFLETSAPRNLPFYERLGFTVTADVEVPEGPRTWCMTRKPGA

SEQ ID NO: 17078 - protein, 829 aa, Artificial Sequence
  Synthetic Polypeptide
MALPVTALLLPLALLLHAARPEVQLLESGGGLVQPGGSLRLSCAASGFTFSSYAMSWVRQAPGKGLEWVSSISGSGDYIYYADSVKGRFTISRDISKNTLYLQMNSLRAEDTAVYYCAKEGTGANSSLADYRGQGTLVTVSSGGGSGGGSEVQVLESGGGLVQPGGSLRLSCAASGFTFSNFAMSWVRQAPGKGLEWVSTISGSAGTTDYADSVKGRFTISRDNSKKTLYLQMNSLRVEDTAVYYCADGRGPFFDYRGQGTLVTVSSLEDKTHTCPPCPAPIKTDVITMDPKDNCSKDANDTLLLQLTNTSAYYMYLLLLLKSVVYFAIITCCLLRRTAFCCNGEKSRAKRSGSGATNFSLLKQAGDVEENPGPTSMDWIWRILFLVGAATGAHSGPEVQLVESGGGLVQAGGSLRLSCAASGRTFSMGWFRQAPGKEREFVAAITYSGGSPYYADSVKGRFTISRDNAKNTVYLQMNSLKPEDTAVYYCAANPTYGSDWNAENWGQGTQVTVSSTRDKTHTCPPCPAEVKTDSTDHVKPKETENTKQPSKSCHKPKAIVHTEKVNMMSLTVLGLRMLFAKTVAVNFLLTAKLFFLRAKRSGSGVKQTLNFDLLKLAGDVESNPGPSRGHMTEYKPTVRLATRDDVPRAVRTLAAAFADYPATRHTVDPDRHIERVTELQELFLTRVGLDIGKVWVADDGAAVAVWTTPESVEAGAVFAEIGPRMAELSGSRLAAQQQMEGLLAPHRPKEPAWFLATVGVSPDHQGKGLGSAVVLPGVEAAERAGVPAFLETSAPRNLPFYERLGFTVTADVEVPEGPRTWCMTRKPGA

SEQ ID NO: 17079 - protein, 596 aa, Artificial Sequence
  Synthetic Polypeptide
MALPVTALLLPLALLLHAARPEVQLLESGGGLVQPGGSLRLSCAASGFTFSSYAMSWVRQAPGKGLEWVSSISGSGDYIYYADSVKGRFTISRDISKNTLYLQMNSLRAEDTAVYYCAKEGTGANSSLADYRGQGTLVTVSSGGGSGGGSEVQVLESGGGLVQPGGSLRLSCAASGFTFSNFAMSWVRQAPGKGLEWVSTISGSAGTTDYADSVKGRFTISRDNSKKTLYLQMNSLRVEDTAVYYCADGRGPFFDYRGQGTLVTVSSLEDKTHTCPPCPAPIKTDVITMDPKDNCSKDANDTLLLQLTNTSAYYMYLLLLLKSVVYFAIITCCLLRRTAFCCNGEKSRAKRSGSGATNFSLLKQAGDVEENPGPTSMDWIWRILFLVGAATGAHSGPEVQLVESGGGLVQAGGSLRLSCAASGRTFSMGWFRQAPGKEREFVAAITYSGGSPYYADSVKGRFTISRDNAKNTVYLQMNSLKPEDTAVYYCAANPTYGSDWNAENWGQGTQVTVSSTRDKTHTCPPCPAEVKTDSTDHVKPKETENTKQPSKSCHKPKAIVHTEKVNMMSLTVLGLRMLFAKTVAVNFLLTAKLFFL

SEQ ID NO: 17080 - protein, 587 aa, Artificial Sequence
  Synthetic Polypeptide
MALPVTALLLPLALLLHAARPEVQLLESGGGLVQPGGSLRLSCAASGFTFSSYAMSWVRQAPGKGLEWVSSISGSGDYIYYADSVKGRFTISRDISKNTLYLQMNSLRAEDTAVYYCAKEGTGANSSLADYRGQGTLVTVSSGGGSGGGSEVQVLESGGGLVQPGGSLRLSCAASGFTFSNFAMSWVRQAPGKGLEWVSTISGSAGTTDYADSVKGRFTISRDNSKKTLYLQMNSLRVEDTAVYYCADGRGPFFDYRGQGTLVTVSSLEGSPIKTDVITMDPKDNCSKDANDTLLLQLTNTSAYYMYLLLLLKSVVYFAIITCCLLRRTAFCCNGEKSRAKRSGSGATNFSLLKQAGDVEENPGPTSMDWIWRILFLVGAATGAHSGPEVQLVESGGGLVQAGGSLRLSCAASGRTFSMGWFRQAPGKEREFVAAITYSGGSPYYADSVKGRFTISRDNAKNTVYLQMNSLKPEDTAVYYCAANPTYGSDWNAENWGQGTQVTVSSTRDKTHTCPPCPAEVKTDSTDHVKPKETENTKQPSKSCHKPKAIVHTEKVNMMSLTVLGLRMLFAKTVAVNFLLTAKLFFL

SEQ ID NO: 17081 - protein, 803 aa, Artificial Sequence
  Synthetic Polypeptide
MALPVTALLLPLALLLHAARPEVQLLESGGGLVQPGGSLRLSCAASGFTFSSYAMSWVRQAPGKGLEWVSSISGSGDYIYYADSVKGRFTISRDISKNTLYLQMNSLRAEDTAVYYCAKEGTGANSSLADYRGQGTLVTVSSGGGSGGGSEVQVLESGGGLVQPGGSLRLSCAASGFTFSNFAMSWVRQAPGKGLEWVSTISGSAGTTDYADSVKGRFTISRDNSKKTLYLQMNSLRVEDTAVYYCADGRGPFFDYRGQGTLVTVSSLEGSMDPKDNCSKDANDTLLLQLTNTSAYYMYLLLLLKSVVYFAIITCCLLRRTAFCCNGEKSRAKRSGSGATNFSLLKQAGDVEENPGPTSMDWIWRILFLVGAATGAHSGPEVQLVESGGGLVQAGGSLRLSCAASGRTFSMGWFRQAPGKEREFVAAITYSGGSPYYADSVKGRFTISRDNAKNTVYLQMNSLKPEDTAVYYCAANPTYGSDWNAENWGQGTQVTVSSTRGSEVKTDSTDHVKPKETENTKQPSKSCHKPKAIVHTEKVNMMSLTVLGLRMLFAKTVAVNFLLTAKLFFLRAKRSGSGVKQTLNFDLLKLAGDVESNPGPSRGHMTEYKPTVRLATRDDVPRAVRTLAAAFADYPATRHTVDPDRHIERVTELQELFLTRVGLDIGKVWVADDGAAVAVWTTPESVEAGAVFAEIGPRMAELSGSRLAAQQQMEGLLAPHRPKEPAWFLATVGVSPDHQGKGLGSAVVLPGVEAAERAGVPAFLETSAPRNLPFYERLGFTVTADVEVPEGPRTWCMTRKPGA

SEQ ID NO: 17082 - protein, 804 aa, Artificial Sequence
  Synthetic Polypeptide
MALPVTALLLPLALLLHAARPEVQLLESGGGLVQPGGSLRLSCAASGFTFSSYAMSWVRQAPGKGLEWVSSISGSGDYIYYADSVKGRFTISRDISKNTLYLQMNSLRAEDTAVYYCAKEGTGANSSLADYRGQGTLVTVSSGGGSGGGSEVQVLESGGGLVQPGGSLRLSCAASGFTFSNFAMSWVRQAPGKGLEWVSTISGSAGTTDYADSVKGRFTISRDNSKKTLYLQMNSLRVEDTAVYYCADGRGPFFDYRGQGTLVTVSSLEGSPIKTDVITMDPKDNCSKDANDTLLLQLTNTSAYYMYLLLLLKSVVYFAIITCCLLRRTAFCCNGEKSRAKRSGSGATNFSLLKQAGDVEENPGPTSMDWIWRILFLVGAATGAHSGPEVQLVESGGGLVQAGGSLRLSCAASGRTFSMGWFRQAPGKEREFVAAITYSGGSPYYADSVKGRFTISRDNAKNTVYLQMNSLKPEDTAVYYCAANPTYGSDWNAENWGQGTQVTVSSTRGSDHVKPKETENTKQPSKSCHKPKAIVHTEKVNMMSLTVLGLRMLFAKTVAVNFLLTAKLFFLRAKRSGSGVKQTLNFDLLKLAGDVESNPGPSRGHMTEYKPTVRLATRDDVPRAVRTLAAAFADYPATRHTVDPDRHIERVTELQELFLTRVGLDIGKVWVADDGAAVAVWTTPESVEAGAVFAEIGPRMAELSGSRLAAQQQMEGLLAPHRPKEPAWFLATVGVSPDHQGKGLGSAVVLPGVEAAERAGVPAFLETSAPRNLPFYERLGFTVTADVEVPEGPRTWCMTRKPGA

SEQ ID NO: 17083 - protein, 796 aa, Artificial Sequence
  Synthetic Polypeptide
MALPVTALLLPLALLLHAARPEVQLLESGGGLVQPGGSLRLSCAASGFTFSSYAMSWVRQAPGKGLEWVSSISGSGDYIYYADSVKGRFTISRDISKNTLYLQMNSLRAEDTAVYYCAKEGTGANSSLADYRGQGTLVTVSSGGGSGGGSEVQVLESGGGLVQPGGSLRLSCAASGFTFSNFAMSWVRQAPGKGLEWVSTISGSAGTTDYADSVKGRFTISRDNSKKTLYLQMNSLRVEDTAVYYCADGRGPFFDYRGQGTLVTVSSLEGSMDPKDNCSKDANDTLLLQLTNTSAYYMYLLLLLKSVVYFAIITCCLLRRTAFCCNGEKSRAKRSGSGATNFSLLKQAGDVEENPGPTSMDWIWRILFLVGAATGAHSGPEVQLVESGGGLVQAGGSLRLSCAASGRTFSMGWFRQAPGKEREFVAAITYSGGSPYYADSVKGRFTISRDNAKNTVYLQMNSLKPEDTAVYYCAANPTYGSDWNAENWGQGTQVTVSSTRGSDHVKPKETENTKQPSKSCHKPKAIVHTEKVNMMSLTVLGLRMLFAKTVAVNFLLTAKLFFLRAKRSGSGVKQTLNFDLLKLAGDVESNPGPSRGHMTEYKPTVRLATRDDVPRAVRTLAAAFADYPATRHTVDPDRHIERVTELQELFLTRVGLDIGKVWVADDGAAVAVWTTPESVEAGAVFAEIGPRMAELSGSRLAAQQQMEGLLAPHRPKEPAWFLATVGVSPDHQGKGLGSAVVLPGVEAAERAGVPAFLETSAPRNLPFYERLGFTVTADVEVPEGPRTWCMTRKPGA

SEQ ID NO: 17084 - protein, 442 aa, Artificial Sequence
  Synthetic Polypeptide
MALPVTALLLPLALLLHAARPEVQLLESGGGLVQPGGSLRLSCAASGFTFSSYAMSWVRQAPGKGLEWVSSISGSGDYIYYADSVKGRFTISRDISKNTLYLQMNSLRAEDTAVYYCAKEGTGANSSLADYRGQGTLVTVSSGGGSGGGSEVQVLESGGGLVQPGGSLRLSCAASGFTFSNFAMSWVRQAPGKGLEWVSTISGSAGTTDYADSVKGRFTISRDNSKKTLYLQMNSLRVEDTAVYYCADGRGPFFDYRGQGTLVTVSSLEGQPKANPTVTLFPPSSEELQANKATLVCLISDFYPGAVTVAWKADGSPVKAGVETTKPSKQSNNKYAASSYLSLTPEQWKSHRSYSCQVTHEGSTVEKTVAPTECSPIKTDVITMDPKDNCSKDANDTLLLQLTNTSAYYMYLLLLLKSVVYFAIITCCLLRRTAFCCNGEKS

SEQ ID NO: 17085 - protein, 767 aa, Artificial Sequence
  Synthetic Polypeptide
MDWIWRILFLVGAATGAHSQLQLQESGPGLVKPSETLSLTCTVSGGSISSGDYYWGWIRQPPGKGLEWIGSISYSGSTYYNPSLKSRVTISVDTSRNQFSLKLSSVTAADTAVYYCTREDSSNWRSRGQGTLVTVSSSGGGGSGGGGSEVQLVESGGGLVQAGGSLRLSCAASGRTFSMGWFRQAPGKEREFVAAITYSGGSPYYADSVKGRFTISRDNAKNTVYLQMNSLKPEDTAVYYCAANPTYGSDWNAENWGQGTQVTVSSGSGGGGSGGGGSGGGGSFEQVQLQQPGAELVKPGASVKMSCKASGYAFSSYWINWMKQKPGQGLEWIGQIYPGDGDTNYNGKFKGRATLTADTSSSTAYMQLSSLTSEDSAVYFCARSITTVVGCAMDYWGQGTSVTVSSGGGGSGGGGSGGGGSDIQMTQSPSSLSASVGDRVTITCKASDHINNWLAWYQQKPGQAPKLLIYGATTLETGVPSRFSGSGSGTDYTLTISSLQPEDFATYYCQQSWNTPWTFGQGTKLEIKRTREQKLISEEDLAKPTTTPAPRPPTPAPTIASQPLSLRPEACRPAAGGAVHTRGLDFACDIYIWAPLAGTCGVLLLSLVITLYCKRGRKKLLYIFKQPFMRPVQTTQEEDGCSCRFPEEEEGGCELRVKFSRSADAPAYQQGQNQLYNELNLGRREEYDVLDKRRGRDPEMGGKPRRKNPQEGLYNELQKDKMAEAYSEIGMKGERRRGKGHDGLYQGLSTATKDTYDALHMQALPPR

SEQ ID NO: 17086 - protein, 1120 aa, Artificial Sequence
  Synthetic Polypeptide
MALPVTALLLPLALLLHAARPDIQMTQSPSSLSASVGDRVTITCKASDHINNWLAWYQQKPGQAPKLLIYGATTLETGVPSRFSGSGSGTDYTLTISSLQPEDFATYYCQQSWNTPWTFGQGTKLEIKRLEIQNPDPAVYQLRDSKSSDKSVCLFTDFDSQTNVSQSKDSDVYITDKCVLDMRSMDFKSNSAVAWSNKSDFACANAFNNSIIPEDTFFPSSDVPCDVKLVEKSFETDTNLNFQNLSVIGFRILLLKVAGFNLLMTLRLWSSRAKRSGSGVKQTLNFDLLKLAGDVESNPGPTSMDWIWRILFLVGAATGAHSQLQLQESGPGLVKPSETLSLTCTVSGGSISSGDYYWGWIRQPPGKGLEWIGSISYSGSTYYNPSLKSRVTISVDTSRNQFSLKLSSVTAADTAVYYCTREDSSNWRSRGQGTLVTVSSSGGGGSGGGGSEVQLVESGGGLVQAGGSLRLSCAASGRTFSMGWFRQAPGKEREFVAAITYSGGSPYYADSVKGRFTISRDNAKNTVYLQMNSLKPEDTAVYYCAANPTYGSDWNAENWGQGTQVTVSSGSGGGGSGGGGSGGGGSFEQVQLQQPGAELVKPGASVKMSCKASGYAFSSYWINWMKQKPGQGLEWIGQIYPGDGDTNYNGKFKGRATLTADTSSSTAYMQLSSLTSEDSAVYFCARSITTVVGCAMDYWGQGTSVTVSSTREDLKNVFPPEVAVFEPSKAEIAHTQKATLVCLATGFYPDHVELSWWVNGKEVHSGVCTDPQPLKEQPALNDSRYCLSSRLRVSATFWQNPRNHFRCQVQFYGLSENDEWTQDRAKPVTQIVSAEAWGRADCGITSASYHQGVLSATILYEILLGKATLYAVLVSALVLMAMVKRKDSRGRAKRSGSGATNFSLLKQAGDVEENPGPSRGHMTEYKPTVRLATRDDVPRAVRTLAAAFADYPATRHTVDPDRHIERVTELQELFLTRVGLDIGKVWVADDGAAVAVWTTPESVEAGAVFAEIGPRMAELSGSRLAAQQQMEGLLAPHRPKEPAWFLATVGVSPDHQGKGLGSAVVLPGVEAAERAGVPAFLETSAPRNLPFYERLGFTVTADVEVPEGPRTWCMTRKPGA

SEQ ID NO: 17087 - protein, 1119 aa, Artificial Sequence
  Synthetic Polypeptide
MALPVTALLLPLALLLHAARPDIQMTQSPSSLSASVGDRVTITCKASDHINNWLAWYQQKPGQAPKLLIYGATTLETGVPSRFSGSGSGTDYTLTISSLQPEDFATYYCQQSWNTPWTFGQGTKLEIKRLEDLKNVFPPEVAVFEPSKAEIAHTQKATLVCLATGFYPDHVELSWWVNGKEVHSGVCTDPQPLKEQPALNDSRYCLSSRLRVSATFWQNPRNHFRCQVQFYGLSENDEWTQDRAKPVTQIVSAEAWGRADCGITSASYHQGVLSATILYEILLGKATLYAVLVSALVLMAMVKRKDSRGRAKRSGSGATNFSLLKQAGDVEENPGPTSMDWIWRILFLVGAATGAHSQLQLQESGPGLVKPSETLSLTCTVSGGSISSGDYYWGWIRQPPGKGLEWIGSISYSGSTYYNPSLKSRVTISVDTSRNQFSLKLSSVTAADTAVYYCTREDSSNWRSRGQGTLVTVSSSGGGGSGGGGSEVQLVESGGGLVQAGGSLRLSCAASGRTFSMGWFRQAPGKEREFVAAITYSGGSPYYADSVKGRFTISRDNAKNTVYLQMNSLKPEDTAVYYCAANPTYGSDWNAENWGQGTQVTVSSGSGGGGSGGGGSGGGGSFEQVQLQQPGAELVKPGASVKMSCKASGYAFSSYWINWMKQKPGQGLEWIGQIYPGDGDTNYNGKFKGRATLTADTSSSTAYMQLSSLTSEDSAVYFCARSITTVVGCAMDYWGQGTSVTVSSTRIQNPDPAVYQLRDSKSSDKSVCLFTDFDSQTNVSQSKDSDVYITDKCVLDMRSMDFKSNSAVAWSNKSDFACANAFNNSIIPEDTFFPSSDVPCDVKLVEKSFETDTNLNFQNLSVIGFRILLLKVAGFNLLMTLRLWSSRAKRSGSGVKQTLNFDLLKLAGDVESNPGPSRGHMTEYKPTVRLATRDDVPRAVRTLAAAFADYPATRHTVDPDRHIERVTELQELFLTRVGLDIGKVWVADDGAAVAVWTTPESVEAGAVFAEIGPRMAELSGSRLAAQQQMEGLLAPHRPKEPAWFLATVGVSPDHQGKGLGSAVVLPGVEAAERAGVPAFLETSAPRNLPFYERLGFTVTADVEVPEGPRTWCMTRKPGA

SEQ ID NO: 17088 - protein, 1119 aa, Artificial Sequence
  Synthetic Polypeptide
MALPVTALLLPLALLLHAARPDIQMTQSPSSLSASVGDRVTITCKASDHINNWLAWYQQKPGQAPKLLIYGATTLETGVPSRFSGSGSGTDYTLTISSLQPEDFATYYCQQSWNTPWTFGQGTKLEIKRLEDLKNVFPPEVAVFEPSEAEISHTQKATLVCLATGFYPDHVELSWWVNGKEVHSGVCTDPQPLKEQPALNDSRYCLSSRLRVSATFWQNPRNHFRCQVQFYGLSENDEWTQDRAKPVTQIVSAEAWGRADCGFTSESYQQGVLSATILYEILLGKATLYAVLVSALVLMAMVKRKDSRGRAKRSGSGATNFSLLKQAGDVEENPGPTSMDWIWRILFLVGAATGAHSQLQLQESGPGLVKPSETLSLTCTVSGGSISSGDYYWGWIRQPPGKGLEWIGSISYSGSTYYNPSLKSRVTISVDTSRNQFSLKLSSVTAADTAVYYCTREDSSNWRSRGQGTLVTVSSSGGGGSGGGGSEVQLVESGGGLVQAGGSLRLSCAASGRTFSMGWFRQAPGKEREFVAAITYSGGSPYYADSVKGRFTISRDNAKNTVYLQMNSLKPEDTAVYYCAANPTYGSDWNAENWGQGTQVTVSSGSGGGGSGGGGSGGGGSFEQVQLQQPGAELVKPGASVKMSCKASGYAFSSYWINWMKQKPGQGLEWIGQIYPGDGDTNYNGKFKGRATLTADTSSSTAYMQLSSLTSEDSAVYFCARSITTVVGCAMDYWGQGTSVTVSSTRIQNPDPAVYQLRDSKSSDKSVCLFTDFDSQTNVSQSKDSDVYITDKCVLDMRSMDFKSNSAVAWSNKSDFACANAFNNSIIPEDTFFPSPESSCDVKLVEKSFETDTNLNFQNLSVIGFRILLLKVAGFNLLMTLRLWSSRAKRSGSGVKQTLNFDLLKLAGDVESNPGPSRGHMTEYKPTVRLATRDDVPRAVRTLAAAFADYPATRHTVDPDRHIERVTELQELFLTRVGLDIGKVWVADDGAAVAVWTTPESVEAGAVFAEIGPRMAELSGSRLAAQQQMEGLLAPHRPKEPAWFLATVGVSPDHQGKGLGSAVVLPGVEAAERAGVPAFLETSAPRNLPFYERLGFTVTADVEVPEGPRTWCMTRKPGA

SEQ ID NO: 17089 - protein, 886 aa, Artificial Sequence
  Synthetic Polypeptide
MALPVTALLLPLALLLHAARPDIQMTQSPSSLSASVGDRVTITCKASDHINNWLAWYQQKPGQAPKLLIYGATTLETGVPSRFSGSGSGTDYTLTISSLQPEDFATYYCQQSWNTPWTFGQGTKLEIKRLEDLKNVFPPEVAVFEPSEAEISHTQKATLVCLATGFYPDHVELSWWVNGKEVHSGVCTDPQPLKEQPALNDSRYCLSSRLRVSATFWQNPRNHFRCQVQFYGLSENDEWTQDRAKPVTQIVSAEAWGRADCGFTSESYQQGVLSATILYEILLGKATLYAVLVSALVLMAMVKRKDSRGRAKRSGSGATNFSLLKQAGDVEENPGPTSMDWIWRILFLVGAATGAHSQLQLQESGPGLVKPSETLSLTCTVSGGSISSGDYYWGWIRQPPGKGLEWIGSISYSGSTYYNPSLKSRVTISVDTSRNQFSLKLSSVTAADTAVYYCTREDSSNWRSRGQGTLVTVSSSGGGGSGGGGSEVQLVESGGGLVQAGGSLRLSCAASGRTFSMGWFRQAPGKEREFVAAITYSGGSPYYADSVKGRFTISRDNAKNTVYLQMNSLKPEDTAVYYCAANPTYGSDWNAENWGQGTQVTVSSGSGGGGSGGGGSGGGGSFEQVQLQQPGAELVKPGASVKMSCKASGYAFSSYWINWMKQKPGQGLEWIGQIYPGDGDTNYNGKFKGRATLTADTSSSTAYMQLSSLTSEDSAVYFCARSITTVVGCAMDYWGQGTSVTVSSTRIQNPDPAVYQLRDSKSSDKSVCLFTDFDSQTNVSQSKDSDVYITDKCVLDMRSMDFKSNSAVAWSNKSDFACANAFNNSIIPEDTFFPSPESSCDVKLVEKSFETDTNLNFQNLSVIGFRILLLKVAGFNLLMTLRLWSS

SEQ ID NO: 17090 - protein, 1111 aa, Artificial Sequence
  Synthetic Polypeptide
MALPVTALLLPLALLLHAARPDIQMTQSPSSLSASVGDRVTITCKASDHINNWLAWYQQKPGQAPKLLIYGATTLETGVPSRFSGSGSGTDYTLTISSLQPEDFATYYCQQSWNTPWTFGQGTKLEIKRLEDLKNVFPPEVAVFEPSEAEISHTQKATLVCLATGFYPDHVELSWWVNGKEVHSGVCTDPQPLKEQPALNDSRYCLSSRLRVSATFWQNPRNHFRCQVQFYGLSENDEWTQDRAKPVTQIVSAEAWGRADCGFTSESYQQGVLSATILYEILLGKATLYAVLVSALVLMAMVKRKDSRGRAKRSGSGATNFSLLKQAGDVEENPGPTSMDWIWRILFLVGAATGAHSQLQLQESGPGLVKPSETLSLTCTVSGGSISSGDYYWGWIRQPPGKGLEWIGSISYSGSTYYNPSLKSRVTISVDTSRNQFSLKLSSVTAADTAVYYCTREDSSNWRSRGQGTLVTVSSSGGGGSGGGGSEVQLVESGGGLVQAGGSLRLSCAASGRTFSMGWFRQAPGKEREFVAAITYSGGSPYYADSVKGRFTISRDNAKNTVYLQMNSLKPEDTAVYYCAANPTYGSDWNAENWGQGTQVTVSSGSGGGGSGGGGSGGGGSFEQVQLQQPGAELVKPGASVKMSCKASGYAFSSYWINWMKQKPGQGLEWIGQIYPGDGDTNYNGKFKGRATLTADTSSSTAYMQLSSLTSEDSAVYFCARSITTVVGCAMDYWGQGTSVTVSSTRIQNPDPAVYQLRDSKSSDKSVCLFTDFDSQTNVSQSKDSDVYITDKCVLDMRSMDFKSNSAVAWSNKSDFACANAFNNSIIPEDTFFPSPESSCDVKLVEKSFETDTNLNFQNLSVIGFRILLLKVAGFNLLMTLRLWSSRAKRSGSGVKQTLNFDLLKLAGDVESNPGPSRGGIHTMATYEVLCEVARKLGTDDREVVLFLLNVFIPQPTLAQLIGALRALKEEGRLTFPLLAECLFRAGRRDLLRDLLHLDPRFLERHLAGTMSYFSPYQLTVLHVDGELCARDIRSLIFLSKDTIGSRSTPQTFLHWVYCMENLDLLGPTDVDALMSMLRSLSRVDLQRQVQTLMGLHLSGPSHSQHYRHTP

SEQ ID NO: 17091 - protein, 890 aa, Artificial Sequence
  Synthetic Polypeptide
MALPVTALLLPLALLLHAARPDIQMTQSPSSLSASVGDRVTITCKASDHINNWLAWYQQKPGQAPKLLIYGATTLETGVPSRFSGSGSGTDYTLTISSLQPEDFATYYCQQSWNTPWTFGQGTKLEIKRLEIQNPDPAVYQLRDSKSSDKSVCLFTDFDSQTNVSQSKDSDVYITDKCVLDMRSMDFKSNSAVAWSNKSDFACANAFNNSIIPEDTFFPSPESSCDVKLVEKSFETDTNLNFQNLSVIGFRILLLKVAGFNLLMTLRLWSSRAKRSGSGVKQTLNFDLLKLAGDVESNPGPTSMDWIWRILFLVGAATGAHSQLQLQESGPGLVKPSETLSLTCTVSGGSISSGDYYWGWIRQPPGKGLEWIGSISYSGSTYYNPSLKSRVTISVDTSRNQFSLKLSSVTAADTAVYYCTREDSSNWRSRGQGTLVTVSSSGGGGSGGGGSEVQLVESGGGLVQAGGSLRLSCAASGRTFSMGWFRQAPGKEREFVAAITYSGGSPYYADSVKGRFTISRDNAKNTVYLQMNSLKPEDTAVYYCAANPTYGSDWNAENWGQGTQVTVSSGSGGGGSGGGGSGGGGSFEQVQLQQPGAELVKPGASVKMSCKASGYAFSSYWINWMKQKPGQGLEWIGQIYPGDGDTNYNGKFKGRATLTADTSSSTAYMQLSSLTSEDSAVYFCARSITTVVGCAMDYWGQGTSVTVSSTREDLKNVFPPEVAVFEPSEAEISHTQKATLVCLATGFYPDHVELSWWVNGKEVHSGVCTDPQPLKEQPALNDSRYCLSSRLRVSATFWQNPRNHFRCQVQFYGLSENDEWTQDRAKPVTQIVSAEAWGRADCGFTSESYQQGVLSATILYEILLGKATLYAVLVSALVLMAMVKRKDSRG

SEQ ID NO: 17092 - protein, 1112 aa, Artificial Sequence
  Synthetic Polypeptide
MALPVTALLLPLALLLHAARPDIQMTQSPSSLSASVGDRVTITCKASDHINNWLAWYQQKPGQAPKLLIYGATTLETGVPSRFSGSGSGTDYTLTISSLQPEDFATYYCQQSWNTPWTFGQGTKLEIKRLEIQNPDPAVYQLRDSKSSDKSVCLFTDFDSQTNVSQSKDSDVYITDKCVLDMRSMDFKSNSAVAWSNKSDFACANAFNNSIIPEDTFFPSPESSCDVKLVEKSFETDTNLNFQNLSVIGFRILLLKVAGFNLLMTLRLWSSRAKRSGSGVKQTLNFDLLKLAGDVESNPGPTSMDWIWRILFLVGAATGAHSQLQLQESGPGLVKPSETLSLTCTVSGGSISSGDYYWGWIRQPPGKGLEWIGSISYSGSTYYNPSLKSRVTISVDTSRNQFSLKLSSVTAADTAVYYCTREDSSNWRSRGQGTLVTVSSSGGGGSGGGGSEVQLVESGGGLVQAGGSLRLSCAASGRTFSMGWFRQAPGKEREFVAAITYSGGSPYYADSVKGRFTISRDNAKNTVYLQMNSLKPEDTAVYYCAANPTYGSDWNAENWGQGTQVTVSSGSGGGGSGGGGSGGGGSFEQVQLQQPGAELVKPGASVKMSCKASGYAFSSYWINWMKQKPGQGLEWIGQIYPGDGDTNYNGKFKGRATLTADTSSSTAYMQLSSLTSEDSAVYFCARSITTVVGCAMDYWGQGTSVTVSSTREDLKNVFPPEVAVFEPSEAEISHTQKATLVCLATGFYPDHVELSWWVNGKEVHSGVCTDPQPLKEQPALNDSRYCLSSRLRVSATFWQNPRNHFRCQVQFYGLSENDEWTQDRAKPVTQIVSAEAWGRADCGFTSESYQQGVLSATILYEILLGKATLYAVLVSALVLMAMVKRKDSRGRAKRSGSGATNFSLLKQAGDVEENPGPSRGGIHTMATYEVLCEVARKLGTDDREVVLFLLNVFIPQPTLAQLIGALRALKEEGRLTFPLLAECLFRAGRRDLLRDLLHLDPRFLERHLAGTMSYFSPYQLTVLHVDGELCARDIRSLIFLSKDTIGSRSTPQTFLHWVYCMENLDLLGPTDVDALMSMLRSLSRVDLQRQVQTLMGLHLSGPSHSQHYRHTP

SEQ ID NO: 17093 - protein, 1119 aa, Artificial Sequence
  Synthetic Polypeptide
MALPVTALLLPLALLLHAARPDIQMTQSPSSLSASVGDRVTITCKASDHINNWLAWYQQKPGQAPKLLIYGATTLETGVPSRFSGSGSGTDYTLTISSLQPEDFATYYCQQSWNTPWTFGQGTKLEIKRLEDLKNVFPPEVAVFEPSEAEISHTQKATLVCLATGFYPDHVELSWWVNGKEVHSGVSTDPQPLKEQPALNDSRYCLSSRLRVSATFWQNPRNHFRCQVQFYGLSENDEWTQDRAKPVTQIVSAEAWGRADCGFTSESYQQGVLSATILYEILLGKATLYAVLVSALVLMAMVKRKDSRGRAKRSGSGATNFSLLKQAGDVEENPGPTSMDWIWRILFLVGAATGAHSQLQLQESGPGLVKPSETLSLTCTVSGGSISSGDYYWGWIRQPPGKGLEWIGSISYSGSTYYNPSLKSRVTISVDTSRNQFSLKLSSVTAADTAVYYCTREDSSNWRSRGQGTLVTVSSSGGGGSGGGGSEVQLVESGGGLVQAGGSLRLSCAASGRTFSMGWFRQAPGKEREFVAAITYSGGSPYYADSVKGRFTISRDNAKNTVYLQMNSLKPEDTAVYYCAANPTYGSDWNAENWGQGTQVTVSSGSGGGGSGGGGSGGGGSFEQVQLQQPGAELVKPGASVKMSCKASGYAFSSYWINWMKQKPGQGLEWIGQIYPGDGDTNYNGKFKGRATLTADTSSSTAYMQLSSLTSEDSAVYFCARSITTVVGCAMDYWGQGTSVTVSSTRIQNPDPAVYQLRDSKSSDKSVCLFTDFDSQTNVSQSKDSDVYITDKTVLDMRSMDFKSNSAVAWSNKSDFACANAFNNSIIPEDTFFPSPESSCDVKLVEKSFETDTNLNFQNLSVIGFRILLLKVAGFNLLMTLRLWSSRAKRSGSGVKQTLNFDLLKLAGDVESNPGPSRGHMTEYKPTVRLATRDDVPRAVRTLAAAFADYPATRHTVDPDRHIERVTELQELFLTRVGLDIGKVWVADDGAAVAVWTTPESVEAGAVFAEIGPRMAELSGSRLAAQQQMEGLLAPHRPKEPAWFLATVGVSPDHQGKGLGSAVVLPGVEAAERAGVPAFLETSAPRNLPFYERLGFTVTADVEVPEGPRTWCMTRKPGA

SEQ ID NO: 17094 - protein, 1201 aa, Artificial Sequence
  Synthetic Polypeptide
MALPVTALLLPLALLLHAARPDIQMTQSPSSLSASVGDRVTITCKASDHINNWLAWYQQKPGQAPKLLIYGATTLETGVPSRFSGSGSGTDYTLTISSLQPEDFATYYCQQSWNTPWTFGQGTKLEIKRLEDLKNVFPPEVAVFEPSEAEISHTQKATLVCLATGFYPDHVELSWWVNGKEVHSGVSTDPQPLKEQPALNDSRYCLSSRLRVSATFWQNPRNHFRCQVQFYGLSENDEWTQDRAKPVTQIVSAEAWGRADCGFTSESYQQGVLSATILYEILLGKATLYAVLVSALVLMAMVKRKDSRGRAKRSGSGATNFSLLKQAGDVEENPGPTSMDWIWRILFLVGAATGAHSQLQLQESGPGLVKPSETLSLTCTVSGGSISSGDYYWGWIRQPPGKGLEWIGSISYSGSTYYNPSLKSRVTISVDTSRNQFSLKLSSVTAADTAVYYCTREDSSNWRSRGQGTLVTVSSSGGGGSGGGGSEVQLVESGGGLVQAGGSLRLSCAASGRTFSMGWFRQAPGKEREFVAAITYSGGSPYYADSVKGRFTISRDNAKNTVYLQMNSLKPEDTAVYYCAANPTYGSDWNAENWGQGTQVTVSSGSGGGGSGGGGSGGGGSFEQVQLQQPGAELVKPGASVKMSCKASGYAFSSYWINWMKQKPGQGLEWIGQIYPGDGDTNYNGKFKGRATLTADTSSSTAYMQLSSLTSEDSAVYFCARSITTVVGCAMDYWGQGTSVTVSSTREQKLISEEDGSGTPFPSLAPPIMLLVDGKQQMVVVCLVLDVAPPGLDSPIWFSAGNGSALDAFTYGPSPATDGTWTNLAHLSLPSEELASWEPLVCHTGPGAEGHSRSTQPMHLSGEASTARTCPQEPLRGTPGGALWLGVLRLLLFKLLLFDLLLTCSCLCDPAGPLPSPATTTRLRALGSHRLHPATETGGREATSSPRPQPRDRRWGDTPPGRKPGSPVRAKRSGSGVKQTLNFDLLKLAGDVESNPGPSRGHMTEYKPTVRLATRDDVPRAVRTLAAAFADYPATRHTVDPDRHIERVTELQELFLTRVGLDIGKVWVADDGAAVAVWTTPESVEAGAVFAEIGPRMAELSGSRLAAQQQMEGLLAPHRPKEPAWFLATVGVSPDHQGKGLGSAVVLPGVEAAERAGVPAFLETSAPRNLPFYERLGFTVTADVEVPEGPRTWCMTRKPGA

SEQ ID NO: 17095 - protein, 1156 aa, Artificial Sequence
  Synthetic Polypeptide
MALPVTALLLPLALLLHAARPDIQMTQSPSSLSASVGDRVTITCKASDHINNWLAWYQQKPGQAPKLLIYGATTLETGVPSRFSGSGSGTDYTLTISSLQPEDFATYYCQQSWNTPWTFGQGTKLEIKRLEGKPIPNPLLGLDSTGSGDKQLDADVSPKPTIFLPSIAETKLQKAGTYLCLLEKFFPDVIKIHWQEKKSNTILGSQEGNTMKTNDTYMKFSWLTVPEKSLDKEHRCIVRHENNKNGVDQEIIFPPIKTDVITMDPKDNCSKDANDTLLLQLTNTSAYYMYLLLLLKSVVYFAIITCCLLRRTAFCCNGEKSRAKRSGSGATNFSLLKQAGDVEENPGPTSMDWIWRILFLVGAATGAHSQLQLQESGPGLVKPSETLSLTCTVSGGSISSGDYYWGWIRQPPGKGLEWIGSISYSGSTYYNPSLKSRVTISVDTSRNQFSLKLSSVTAADTAVYYCTREDSSNWRSRGQGTLVTVSSSGGGGSGGGGSEVQLVESGGGLVQAGGSLRLSCAASGRTFSMGWFRQAPGKEREFVAAITYSGGSPYYADSVKGRFTISRDNAKNTVYLQMNSLKPEDTAVYYCAANPTYGSDWNAENWGQGTQVTVSSGSGGGGSGGGGSGGGGSFEQVQLQQPGAELVKPGASVKMSCKASGYAFSSYWINWMKQKPGQGLEWIGQIYPGDGDTNYNGKFKGRATLTADTSSSTAYMQLSSLTSEDSAVYFCARSITTVVGCAMDYWGQGTSVTVSSTREQKLISEEDGSGSQPHTKPSVFVMKNGTNVACLVKEFYPKDIRINLVSSKKITEFDPAIVISPSGKYNAVKLGKYEDSNSVTCSVQHDNKTVHSTDFEVKTDSTDHVKPKETENTKQPSKSCHKPKAIVHTEKVNMMSLTVLGLRMLFAKTVAVNFLLTAKLFFLRAKRSGSGVKQTLNFDLLKLAGDVESNPGPSRGHMTEYKPTVRLATRDDVPRAVRTLAAAFADYPATRHTVDPDRHIERVTELQELFLTRVGLDIGKVWVADDGAAVAVWTTPESVEAGAVFAEIGPRMAELSGSRLAAQQQMEGLLAPHRPKEPAWFLATVGVSPDHQGKGLGSAVVLPGVEAAERAGVPAFLETSAPRNLPFYERLGFTVTADVEVPEGPRTWCMTRKPGA

SEQ ID NO: 17096 - protein, 894 aa, Artificial Sequence
  Synthetic Polypeptide
MALPVTALLLPLALLLHAARPDIQMTQSPSSLSASVGDRVTITCKASDHINNWLAWYQQKPGQAPKLLIYGATTLETGVPSRFSGSGSGTDYTLTISSLQPEDFATYYCQQSWNTPWTFGQGTKLEIKRLESQPHTKPSVFVMKNGTNVACLVKEFYPKDIRINLVSSKKITEFDPAIVISPSGKYNAVKLGKYEDSNSVTCSVQHDNKTVHSTDFEVKTDSTDHVKPKETENTKQPSKSCHKPKAIVHTEKVNMMSLTVLGLRMLFAKTVAVNFLLTAKLFFLRAKRSGSGATNFSLLKQAGDVEENPGPTSMDWIWRILFLVGAATGAHSQLQLQESGPGLVKPSETLSLTCTVSGGSISSGDYYWGWIRQPPGKGLEWIGSISYSGSTYYNPSLKSRVTISVDTSRNQFSLKLSSVTAADTAVYYCTREDSSNWRSRGQGTLVTVSSSGGGGSGGGGSEVQLVESGGGLVQAGGSLRLSCAASGRTFSMGWFRQAPGKEREFVAAITYSGGSPYYADSVKGRFTISRDNAKNTVYLQMNSLKPEDTAVYYCAANPTYGSDWNAENWGQGTQVTVSSGSGGGGSGGGGSGGGGSFEQVQLQQPGAELVKPGASVKMSCKASGYAFSSYWINWMKQKPGQGLEWIGQIYPGDGDTNYNGKFKGRATLTADTSSSTAYMQLSSLTSEDSAVYFCARSITTVVGCAMDYWGQGTSVTVSSTRDKQLDADVSPKPTIFLPSIAETKLQKAGTYLCLLEKFFPDVIKIHWQEKKSNTILGSQEGNTMKTNDTYMKFSWLTVPEKSLDKEHRCIVRHENNKNGVDQEIIFPPIKTDVITMDPKDNCSKDANDTLLLQLTNTSAYYMYLLLLLKSVVYFAIITCCLLRRTAFCCNGEKS

SEQ ID NO: 17097 - protein, 1296 aa, Artificial Sequence
  Synthetic Polypeptide
MALPVTALLLPLALLLHAARPDIQMTQSPSSLSASVGDRVTITCKASDHINNWLAWYQQKPGQAPKLLIYGATTLETGVPSRFSGSGSGTDYTLTISSLQPEDFATYYCQQSWNTPWTFGQGTKLEIKRGQPKANPTVTLFPPSSEELQANKATLVCLISDFYPGAVTVAWKADGSPVKAGVETTKPSKQSNNKYAASSYLSLTPEQWKSHRSYSCQVTHEGSTVEKTVAPTECSGSQSFGLLDPKLCYLLDGILFIYGVILTALFLRVKFSRSADAPAYQQGQNQLYNELNLGRREEYDVLDKRRGRDPEMGGKPQRRKNPQEGLYNELQKDKMAEAYSEIGMKGERRRGKGHDGLYQGLSTATKDTYDALHMQALPPRRAKRSGSGATNFSLLKQAGDVEENPGPTSMDWIWRILFLVGAATGAHSQLQLQESGPGLVKPSETLSLTCTVSGGSISSGDYYWGWIRQPPGKGLEWIGSISYSGSTYYNPSLKSRVTISVDTSRNQFSLKLSSVTAADTAVYYCTREDSSNWRSRGQGTLVTVSSSGGGGSGGGGSEVQLVESGGGLVQAGGSLRLSCAASGRTFSMGWFRQAPGKEREFVAAITYSGGSPYYADSVKGRFTISRDNAKNTVYLQMNSLKPEDTAVYYCAANPTYGSDWNAENWGQGTQVTVSSGSGGGGSGGGGSGGGGSFEQVQLQQPGAELVKPGASVKMSCKASGYAFSSYWINWMKQKPGQGLEWIGQIYPGDGDTNYNGKFKGRATLTADTSSSTAYMQLSSLTSEDSAVYFCARSITTVVGCAMDYWGQGTSVTVSSASTKGPSVFPLAPSSKSTSGGTAALGCLVKDYFPEPVTVSWNSGALTSGVHTFPAVLQSSGLYSLSSVVTVPSSSLGTQTYICNVNHKPSNTKVDKRVEPKSCGTQSFGLLDPKLCYLLDGILFIYGVILTALFLRVKFSRSADAPAYQQGQNQLYNELNLGRREEYDVLDKRRGRDPEMGGKPQRRKNPQEGLYNELQKDKMAEAYSEIGMKGERRRGKGHDGLYQGLSTATKDTYDALHMQALPPRRAKRSGSGVKQTLNFDLLKLAGDVESNPGPSRGHMTEYKPTVRLATRDDVPRAVRTLAAAFADYPATRHTVDPDRHIERVTELQELFLTRVGLDIGKVWVADDGAAVAVWTTPESVEAGAVFAEIGPRMAELSGSRLAAQQQMEGLLAPHRPKEPAWFLATVGVSPDHQGKGLGSAVVLPGVEAAERAGVPAFLETSAPRNLPFYERLGFTVTADVEVPEGPRTWCMTRKPGA

SEQ ID NO: 17098 - protein, 1082 aa, Artificial Sequence
  Synthetic Polypeptide
MALPVTALLLPLALLLHAARPDIQMTQSPSSLSASVGDRVTITCKASDHINNWLAWYQQKPGQAPKLLIYGATTLETGVPSRFSGSGSGTDYTLTISSLQPEDFATYYCQQSWNTPWTFGQGTKLEIKRLEDLKNVFPPEVAVFEPSEAEISHTQKATLVCLATGFYPDHVELSWWVNGKEVHSGVSTDPQPLKEQPALNDSRYCLSSRLRVSATFWQNPRNHFRCQVQFYGLSENDEWTQDRAKPVTQIVSAEAWGRADCGSQSFGLLDPKLCYLLDGILFIYGVILTALFLRVKFSRSADAPAYQQGQNQLYNELNLGRREEYDVLDKRRGRDPEMGGKPQRRKNPQEGLYNELQKDKMAEAYSEIGMKGERRRGKGHDGLYQGLSTATKDTYDALHMQALPPRRAKRSGSGATNFSLLKQAGDVEENPGPTSMDWIWRILFLVGAATGAHSQLQLQESGPGLVKPSETLSLTCTVSGGSISSGDYYWGWIRQPPGKGLEWIGSISYSGSTYYNPSLKSRVTISVDTSRNQFSLKLSSVTAADTAVYYCTREDSSNWRSRGQGTLVTVSSSGGGGSGGGGSEVQLVESGGGLVQAGGSLRLSCAASGRTFSMGWFRQAPGKEREFVAAITYSGGSPYYADSVKGRFTISRDNAKNTVYLQMNSLKPEDTAVYYCAANPTYGSDWNAENWGQGTQVTVSSGSGGGGSGGGGSGGGGSFEQVQLQQPGAELVKPGASVKMSCKASGYAFSSYWINWMKQKPGQGLEWIGQIYPGDGDTNYNGKFKGRATLTADTSSSTAYMQLSSLTSEDSAVYFCARSITTVVGCAMDYWGQGTSVTVSSTRIQNPDPAVYQLRDSKSSDKSVCLFTDFDSQTNVSQSKDSDVYITDKTVLDMRSMDFKSNSAVAWSNKSDFACANAFNNSIIPEDTFFPSPESSCGTQSFGLLDPKLCYLLDGILFIYGVILTALFLRVKFSRSADAPAYQQGQNQLYNELNLGRREEYDVLDKRRGRDPEMGGKPQRRKNPQEGLYNELQKDKMAEAYSEIGMKGERRRGKGHDGLYQGLSTATKDTYDALHMQALPPR

SEQ ID NO: 17099 - protein, 1082 aa, Artificial Sequence
  Synthetic Polypeptide
MALPVTALLLPLALLLHAARPDIQMTQSPSSLSASVGDRVTITCKASDHINNWLAWYQQKPGQAPKLLIYGATTLETGVPSRFSGSGSGTDYTLTISSLQPEDFATYYCQQSWNTPWTFGQGTKLEIKRLEDLKNVFPPEVAVFEPSKAEIAHTQKATLVCLATGFYPDHVELSWWVNGKEVHSGVCTDPQPLKEQPALNDSRYCLSSRLRVSATFWQNPRNHFRCQVQFYGLSENDEWTQDRAKPVTQIVSAEAWGRADCGSQSFGLLDPKLCYLLDGILFIYGVILTALFLRVKFSRSADAPAYQQGQNQLYNELNLGRREEYDVLDKRRGRDPEMGGKPQRRKNPQEGLYNELQKDKMAEAYSEIGMKGERRRGKGHDGLYQGLSTATKDTYDALHMQALPPRRAKRSGSGATNFSLLKQAGDVEENPGPTSMDWIWRILFLVGAATGAHSQLQLQESGPGLVKPSETLSLTCTVSGGSISSGDYYWGWIRQPPGKGLEWIGSISYSGSTYYNPSLKSRVTISVDTSRNQFSLKLSSVTAADTAVYYCTREDSSNWRSRGQGTLVTVSSSGGGGSGGGGSEVQLVESGGGLVQAGGSLRLSCAASGRTFSMGWFRQAPGKEREFVAAITYSGGSPYYADSVKGRFTISRDNAKNTVYLQMNSLKPEDTAVYYCAANPTYGSDWNAENWGQGTQVTVSSGSGGGGSGGGGSGGGGSFEQVQLQQPGAELVKPGASVKMSCKASGYAFSSYWINWMKQKPGQGLEWIGQIYPGDGDTNYNGKFKGRATLTADTSSSTAYMQLSSLTSEDSAVYFCARSITTVVGCAMDYWGQGTSVTVSSTRIQNPDPAVYQLRDSKSSDKSVCLFTDFDSQTNVSQSKDSDVYITDKCVLDMRSMDFKSNSAVAWSNKSDFACANAFNNSIIPEDTFFPSSDVPCGTQSFGLLDPKLCYLLDGILFIYGVILTALFLRVKFSRSADAPAYQQGQNQLYNELNLGRREEYDVLDKRRGRDPEMGGKPQRRKNPQEGLYNELQKDKMAEAYSEIGMKGERRRGKGHDGLYQGLSTATKDTYDALHMQALPPR

SEQ ID NO: 17100 - protein, 1153 aa, Artificial Sequence
  Synthetic Polypeptide
MALPVTALLLPLALLLHAARPDIQMTQSPSSLSASVGDRVTITCKASDHINNWLAWYQQKPGQAPKLLIYGATTLETGVPSRFSGSGSGTDYTLTISSLQPEDFATYYCQQSWNTPWTFGQGTKLEIKRLEGKPIPNPLLGLDSTGSGEDLKNVFPPEVAVFEPSEAEISHTQKATLVCLATGFYPDHVELSWWVNGKEVHSGVSTDPQPLKEQPALNDSRYCLSSRLRVSATFWQNPRNHFRCQVQFYGLSENDEWTQDRAKPVTQIVSAEAWGRADCGSQSFGLLDPKLCYLLDGILFIYGVILTALFLRVKFSRSADAPAYQQGQNQLYNELNLGRREEYDVLDKRRGRDPEMGGKPQRRKNPQEGLYNELQKDKMAEAYSEIGMKGERRRGKGHDGLYQGLSTATKDTYDALHMQALPPRRAKRSGSGATNFSLLKQAGDVEENPGPTSMDWIWRILFLVGAATGAHSQLQLQESGPGLVKPSETLSLTCTVSGGSISSGDYYWGWIRQPPGKGLEWIGSISYSGSTYYNPSLKSRVTISVDTSRNQFSLKLSSVTAADTAVYYCTREDSSNWRSRGQGTLVTVSSSGGGGSGGGGSEVQLVESGGGLVQAGGSLRLSCAASGRTFSMGWFRQAPGKEREFVAAITYSGGSPYYADSVKGRFTISRDNAKNTVYLQMNSLKPEDTAVYYCAANPTYGSDWNAENWGQGTQVTVSSGSGGGGSGGGGSGGGGSFEQVQLQQPGAELVKPGASVKMSCKASGYAFSSYWINWMKQKPGQGLEWIGQIYPGDGDTNYNGKFKGRATLTADTSSSTAYMQLSSLTSEDSAVYFCARSITTVVGCAMDYWGQGTSVTVSSTREQKLISEEDGSGIQNPDPAVYQLRDSKSSDKSVCLFTDFDSQTNVSQSKDSDVYITDKTVLDMRSMDFKSNSAVAWSNKSDFACANAFNNSIIPEDTFFPSPESSCGTQSFGLLDPKLCYLLDGILFIYGVILTALFLRSKRSRLLHSDYMNMTPRRPGPTRKHYQPYAPPRDFAAYRSRVKFSRSADAPAYQQGQNQLYNELNLGRREEYDVLDKRRGRDPEMGGKPQRRKNPQEGLYNELQKDKMAEAYSEIGMKGERRRGKGHDGLYQGLSTATKDTYDALHMQALPPR

SEQ ID NO: 17101 - protein, 1194 aa, Artificial Sequence
  Synthetic Polypeptide
MALPVTALLLPLALLLHAARPDIQMTQSPSSLSASVGDRVTITCKASDHINNWLAWYQQKPGQAPKLLIYGATTLETGVPSRFSGSGSGTDYTLTISSLQPEDFATYYCQQSWNTPWTFGQGTKLEIKRLEGKPIPNPLLGLDSTGSGEDLKNVFPPEVAVFEPSEAEISHTQKATLVCLATGFYPDHVELSWWVNGKEVHSGVSTDPQPLKEQPALNDSRYCLSSRLRVSATFWQNPRNHFRCQVQFYGLSENDEWTQDRAKPVTQIVSAEAWGRADCGSQSFGLLDPKLCYLLDGILFIYGVILTALFLRSKRSRLLHSDYMNMTPRRPGPTRKHYQPYAPPRDFAAYRSRVKFSRSADAPAYQQGQNQLYNELNLGRREEYDVLDKRRGRDPEMGGKPQRRKNPQEGLYNELQKDKMAEAYSEIGMKGERRRGKGHDGLYQGLSTATKDTYDALHMQALPPRRAKRSGSGATNFSLLKQAGDVEENPGPTSMDWIWRILFLVGAATGAHSQLQLQESGPGLVKPSETLSLTCTVSGGSISSGDYYWGWIRQPPGKGLEWIGSISYSGSTYYNPSLKSRVTISVDTSRNQFSLKLSSVTAADTAVYYCTREDSSNWRSRGQGTLVTVSSSGGGGSGGGGSEVQLVESGGGLVQAGGSLRLSCAASGRTFSMGWFRQAPGKEREFVAAITYSGGSPYYADSVKGRFTISRDNAKNTVYLQMNSLKPEDTAVYYCAANPTYGSDWNAENWGQGTQVTVSSGSGGGGSGGGGSGGGGSFEQVQLQQPGAELVKPGASVKMSCKASGYAFSSYWINWMKQKPGQGLEWIGQIYPGDGDTNYNGKFKGRATLTADTSSSTAYMQLSSLTSEDSAVYFCARSITTVVGCAMDYWGQGTSVTVSSTREQKLISEEDGSGIQNPDPAVYQLRDSKSSDKSVCLFTDFDSQTNVSQSKDSDVYITDKTVLDMRSMDFKSNSAVAWSNKSDFACANAFNNSIIPEDTFFPSPESSCGTQSFGLLDPKLCYLLDGILFIYGVILTALFLRSKRSRLLHSDYMNMTPRRPGPTRKHYQPYAPPRDFAAYRSRVKFSRSADAPAYQQGQNQLYNELNLGRREEYDVLDKRRGRDPEMGGKPQRRKNPQEGLYNELQKDKMAEAYSEIGMKGERRRGKGHDGLYQGLSTATKDTYDALHMQALPPR

SEQ ID NO: 17102 - protein, 1155 aa, Artificial Sequence
  Synthetic Polypeptide
MALPVTALLLPLALLLHAARPDIQMTQSPSSLSASVGDRVTITCKASDHINNWLAWYQQKPGQAPKLLIYGATTLETGVPSRFSGSGSGTDYTLTISSLQPEDFATYYCQQSWNTPWTFGQGTKLEIKRLEGKPIPNPLLGLDSTGSGEDLKNVFPPEVAVFEPSEAEISHTQKATLVCLATGFYPDHVELSWWVNGKEVHSGVSTDPQPLKEQPALNDSRYCLSSRLRVSATFWQNPRNHFRCQVQFYGLSENDEWTQDRAKPVTQIVSAEAWGRADCGSQSFGLLDPKLCYLLDGILFIYGVILTALFLRVKFSRSADAPAYQQGQNQLYNELNLGRREEYDVLDKRRGRDPEMGGKPQRRKNPQEGLYNELQKDKMAEAYSEIGMKGERRRGKGHDGLYQGLSTATKDTYDALHMQALPPRRAKRSGSGATNFSLLKQAGDVEENPGPTSMDWIWRILFLVGAATGAHSQLQLQESGPGLVKPSETLSLTCTVSGGSISSGDYYWGWIRQPPGKGLEWIGSISYSGSTYYNPSLKSRVTISVDTSRNQFSLKLSSVTAADTAVYYCTREDSSNWRSRGQGTLVTVSSSGGGGSGGGGSEVQLVESGGGLVQAGGSLRLSCAASGRTFSMGWFRQAPGKEREFVAAITYSGGSPYYADSVKGRFTISRDNAKNTVYLQMNSLKPEDTAVYYCAANPTYGSDWNAENWGQGTQVTVSSGSGGGGSGGGGSGGGGSFEQVQLQQPGAELVKPGASVKMSCKASGYAFSSYWINWMKQKPGQGLEWIGQIYPGDGDTNYNGKFKGRATLTADTSSSTAYMQLSSLTSEDSAVYFCARSITTVVGCAMDYWGQGTSVTVSSTREQKLISEEDLGSGIQNPDPAVYQLRDSKSSDKSVCLFTDFDSQTNVSQSKDSDVYITDKTVLDMRSMDFKSNSAVAWSNKSDFACANAFNNSIIPEDTFFPSPESSCGTQSFGLLDPKLCYLLDGILFIYGVILTALFLKRGRKKLLYIFKQPFMRPVQTTQEEDGCSCRFPEEEEGGCELRVKFSRSADAPAYQQGQNQLYNELNLGRREEYDVLDKRRGRDPEMGGKPQRRKNPQEGLYNELQKDKMAEAYSEIGMKGERRRGKGHDGLYQGLSTATKDTYDALHMQALPPR

SEQ ID NO: 17103 - protein, 1197 aa, Artificial Sequence
  Synthetic Polypeptide
MALPVTALLLPLALLLHAARPDIQMTQSPSSLSASVGDRVTITCKASDHINNWLAWYQQKPGQAPKLLIYGATTLETGVPSRFSGSGSGTDYTLTISSLQPEDFATYYCQQSWNTPWTFGQGTKLEIKRLEGKPIPNPLLGLDSTGSGEDLKNVFPPEVAVFEPSEAEISHTQKATLVCLATGFYPDHVELSWWVNGKEVHSGVSTDPQPLKEQPALNDSRYCLSSRLRVSATFWQNPRNHFRCQVQFYGLSENDEWTQDRAKPVTQIVSAEAWGRADCGSQSFGLLDPKLCYLLDGILFIYGVILTALFLKRGRKKLLYIFKQPFMRPVQTTQEEDGCSCRFPEEEEGGCELRVKFSRSADAPAYQQGQNQLYNELNLGRREEYDVLDKRRGRDPEMGGKPQRRKNPQEGLYNELQKDKMAEAYSEIGMKGERRRGKGHDGLYQGLSTATKDTYDALHMQALPPRRAKRSGSGATNFSLLKQAGDVEENPGPTSMDWIWRILFLVGAATGAHSQLQLQESGPGLVKPSETLSLTCTVSGGSISSGDYYWGWIRQPPGKGLEWIGSISYSGSTYYNPSLKSRVTISVDTSRNQFSLKLSSVTAADTAVYYCTREDSSNWRSRGQGTLVTVSSSGGGGSGGGGSEVQLVESGGGLVQAGGSLRLSCAASGRTFSMGWFRQAPGKEREFVAAITYSGGSPYYADSVKGRFTISRDNAKNTVYLQMNSLKPEDTAVYYCAANPTYGSDWNAENWGQGTQVTVSSGSGGGGSGGGGSGGGGSFEQVQLQQPGAELVKPGASVKMSCKASGYAFSSYWINWMKQKPGQGLEWIGQIYPGDGDTNYNGKFKGRATLTADTSSSTAYMQLSSLTSEDSAVYFCARSITTVVGCAMDYWGQGTSVTVSSTREQKLISEEDLGSGIQNPDPAVYQLRDSKSSDKSVCLFTDFDSQTNVSQSKDSDVYITDKTVLDMRSMDFKSNSAVAWSNKSDFACANAFNNSIIPEDTFFPSPESSCGTQSFGLLDPKLCYLLDGILFIYGVILTALFLKRGRKKLLYIFKQPFMRPVQTTQEEDGCSCRFPEEEEGGCELRVKFSRSADAPAYQQGQNQLYNELNLGRREEYDVLDKRRGRDPEMGGKPQRRKNPQEGLYNELQKDKMAEAYSEIGMKGERRRGKGHDGLYQGLSTATKDTYDALHMQALPPR

SEQ ID NO: 17104 - protein, 1087 aa, Artificial Sequence
  Synthetic Polypeptide
MALPVTALLLPLALLLHAARPDIQMTQSPSSLSASVGDRVTITCKASDHINNWLAWYQQKPGQAPKLLIYGATTLETGVPSRFSGSGSGTDYTLTISSLQPEDFATYYCQQSWNTPWTFGQGTKLEIKRLEQSFGLLDPKLCYLLDGILFIYGVILTALFLRVKFSRSADAPAYQQGQNQLYNELNLGRREEYDVLDKRRGRDPEMGGKPQRRKNPQEGLYNELQKDKMAEAYSEIGMKGERRRGKGHDGLYQGLSTATKDTYDALHMQALPPRRAKRSGSGATNFSLLKQAGDVEENPGPTSMDWIWRILFLVGAATGAHSQLQLQESGPGLVKPSETLSLTCTVSGGSISSGDYYWGWIRQPPGKGLEWIGSISYSGSTYYNPSLKSRVTISVDTSRNQFSLKLSSVTAADTAVYYCTREDSSNWRSRGQGTLVTVSSSGGGGSGGGGSEVQLVESGGGLVQAGGSLRLSCAASGRTFSMGWFRQAPGKEREFVAAITYSGGSPYYADSVKGRFTISRDNAKNTVYLQMNSLKPEDTAVYYCAANPTYGSDWNAENWGQGTQVTVSSGSGGGGSGGGGSGGGGSFEQVQLQQPGAELVKPGASVKMSCKASGYAFSSYWINWMKQKPGQGLEWIGQIYPGDGDTNYNGKFKGRATLTADTSSSTAYMQLSSLTSEDSAVYFCARSITTVVGCAMDYWGQGTSVTVSSTRQSFGLLDPKLCYLLDGILFIYGVILTALFLRVKFSRSADAPAYQQGQNQLYNELNLGRREEYDVLDKRRGRDPEMGGKPQRRKNPQEGLYNELQKDKMAEAYSEIGMKGERRRGKGHDGLYQGLSTATKDTYDALHMQALPPRRAKRSGSGVKQTLNFDLLKLAGDVESNPGPSRGHMTEYKPTVRLATRDDVPRAVRTLAAAFADYPATRHTVDPDRHIERVTELQELFLTRVGLDIGKVWVADDGAAVAVWTTPESVEAGAVFAEIGPRMAELSGSRLAAQQQMEGLLAPHRPKEPAWFLATVGVSPDHQGKGLGSAVVLPGVEAAERAGVPAFLETSAPRNLPFYERLGFTVTADVEVPEGPRTWCMTRKPGA

SEQ ID NO: 17105 - protein, 912 aa, Artificial Sequence
  Synthetic Polypeptide
MALPVTALLLPLALLLHAARPDIQMTQSPSSLSASVGDRVTITCKASDHINNWLAWYQQKPGQAPKLLIYGATTLETGVPSRFSGSGSGTDYTLTISSLQPEDFATYYCQQSWNTPWTFGQGTKLEIKRLEGQPKANPTVTLFPPSSEELQANKATLVCLISDFYPGAVTVAWKADGSPVKAGVETTKPSKQSNNKYAASSYLSLTPEQWKSHRSYSCQVTHEGSTVEKTVAPTECSPIKTDVITMDPKDNCSKDANDTLLLQLTNTSAYYMYLLLLLKSVVYFAIITCCLLRRTAFCCNGEKSRAKRSGSGATNFSLLKQAGDVEENPGPTSMDWIWRILFLVGAATGAHSQLQLQESGPGLVKPSETLSLTCTVSGGSISSGDYYWGWIRQPPGKGLEWIGSISYSGSTYYNPSLKSRVTISVDTSRNQFSLKLSSVTAADTAVYYCTREDSSNWRSRGQGTLVTVSSSGGGGSGGGGSEVQLVESGGGLVQAGGSLRLSCAASGRTFSMGWFRQAPGKEREFVAAITYSGGSPYYADSVKGRFTISRDNAKNTVYLQMNSLKPEDTAVYYCAANPTYGSDWNAENWGQGTQVTVSSGSGGGGSGGGGSGGGGSFEQVQLQQPGAELVKPGASVKMSCKASGYAFSSYWINWMKQKPGQGLEWIGQIYPGDGDTNYNGKFKGRATLTADTSSSTAYMQLSSLTSEDSAVYFCARSITTVVGCAMDYWGQGTSVTVSSTRASTKGPSVFPLAPSSKSTSGGTAALGCLVKDYFPEPVTVSWNSGALTSGVHTFPAVLQSSGLYSLSSVVTVPSSSLGTQTYICNVNHKPSNTKVDKRVEPKSCEVKTDSTDHVKPKETENTKQPSKSCHKPKAIVHTEKVNMMSLTVLGLRMLFAKTVAVNFLLTAKLFFL

SEQ ID NO: 17106 - protein, 890 aa, Artificial Sequence
  Synthetic Polypeptide
MALPVTALLLPLALLLHAARPDIQMTQSPSSLSASVGDRVTITCKASDHINNWLAWYQQKPGQAPKLLIYGATTLETGVPSRFSGSGSGTDYTLTISSLQPEDFATYYCQQSWNTPWTFGQGTKLEIKRLEGQPKANPTVTLFPPSSEELQANKATLVCLISDFYPGAVTVAWKADGSPVKAGVETTKPSKQSNNKYAASSYLSLTPEQWKSHRSYSCQVTHEGSTVEKTVAPTECSGRADCGITSASYHQGVLSATILYEILLGKATLYAVLVSALVLMAMVKRKDSRGRAKRSGSGATNFSLLKQAGDVEENPGPTSMDWIWRILFLVGAATGAHSQLQLQESGPGLVKPSETLSLTCTVSGGSISSGDYYWGWIRQPPGKGLEWIGSISYSGSTYYNPSLKSRVTISVDTSRNQFSLKLSSVTAADTAVYYCTREDSSNWRSRGQGTLVTVSSSGGGGSGGGGSEVQLVESGGGLVQAGGSLRLSCAASGRTFSMGWFRQAPGKEREFVAAITYSGGSPYYADSVKGRFTISRDNAKNTVYLQMNSLKPEDTAVYYCAANPTYGSDWNAENWGQGTQVTVSSGSGGGGSGGGGSGGGGSFEQVQLQQPGAELVKPGASVKMSCKASGYAFSSYWINWMKQKPGQGLEWIGQIYPGDGDTNYNGKFKGRATLTADTSSSTAYMQLSSLTSEDSAVYFCARSITTVVGCAMDYWGQGTSVTVSSTRASTKGPSVFPLAPSSKSTSGGTAALGCLVKDYFPEPVTVSWNSGALTSGVHTFPAVLQSSGLYSLSSVVTVPSSSLGTQTYICNVNHKPSNTKVDKRVEPKSCIPEDTFFPSSDVPCDVKLVEKSFETDTNLNFQNLSVIGFRILLLKVAGFNLLMTLRLWSS

SEQ ID NO: 17107 - protein, 890 aa, Artificial Sequence
  Synthetic Polypeptide
MALPVTALLLPLALLLHAARPDIQMTQSPSSLSASVGDRVTITCKASDHINNWLAWYQQKPGQAPKLLIYGATTLETGVPSRFSGSGSGTDYTLTISSLQPEDFATYYCQQSWNTPWTFGQGTKLEIKRLEGQPKANPTVTLFPPSSEELQANKATLVCLISDFYPGAVTVAWKADGSPVKAGVETTKPSKQSNNKYAASSYLSLTPEQWKSHRSYSCQVTHEGSTVEKTVAPTECSGRADCGFTSESYQQGVLSATILYEILLGKATLYAVLVSALVLMAMVKRKDSRGRAKRSGSGATNFSLLKQAGDVEENPGPTSMDWIWRILFLVGAATGAHSQLQLQESGPGLVKPSETLSLTCTVSGGSISSGDYYWGWIRQPPGKGLEWIGSISYSGSTYYNPSLKSRVTISVDTSRNQFSLKLSSVTAADTAVYYCTREDSSNWRSRGQGTLVTVSSSGGGGSGGGGSEVQLVESGGGLVQAGGSLRLSCAASGRTFSMGWFRQAPGKEREFVAAITYSGGSPYYADSVKGRFTISRDNAKNTVYLQMNSLKPEDTAVYYCAANPTYGSDWNAENWGQGTQVTVSSGSGGGGSGGGGSGGGGSFEQVQLQQPGAELVKPGASVKMSCKASGYAFSSYWINWMKQKPGQGLEWIGQIYPGDGDTNYNGKFKGRATLTADTSSSTAYMQLSSLTSEDSAVYFCARSITTVVGCAMDYWGQGTSVTVSSTRASTKGPSVFPLAPSSKSTSGGTAALGCLVKDYFPEPVTVSWNSGALTSGVHTFPAVLQSSGLYSLSSVVTVPSSSLGTQTYICNVNHKPSNTKVDKRVEPKSCIPEDTFFPSPESSCDVKLVEKSFETDTNLNFQNLSVIGFRILLLKVAGFNLLMTLRLWSS

SEQ ID NO: 17108 - protein, 720 aa, Artificial Sequence
  Synthetic Polypeptide
MDWIWRILFLVGAATGAHSQLQLQESGPGLVKPSETLSLTCTVSGGSISSGDYYWGWIRQPPGKGLEWIGSISYSGSTYYNPSLKSRVTISVDTSRNQFSLKLSSVTAADTAVYYCTREDSSNWRSRGQGTLVTVSSSGGGGSGGGGSEVQLVESGGGLVQAGGSLRLSCAASGRTFSMGWFRQAPGKEREFVAAITYSGGSPYYADSVKGRFTISRDNAKNTVYLQMNSLKPEDTAVYYCAANPTYGSDWNAENWGQGTQVTVSSGSGGGGSGGGGSGGGGSFEQVQLQQPGAELVKPGASVKMSCKASGYAFSSYWINWMKQKPGQGLEWIGQIYPGDGDTNYNGKFKGRATLTADTSSSTAYMQLSSLTSEDSAVYFCARSITTVVGCAMDYWGQGTSVTVSSGGGGSGGGGSGGGGSDIQMTQSPSSLSASVGDRVTITCKASDHINNWLAWYQQKPGQAPKLLIYGATTLETGVPSRFSGSGSGTDYTLTISSLQPEDFATYYCQQSWNTPWTFGQGTKLEIKRTRGGGSDGNEEMGGITQTPYKVSISGTTVILTCPQYPGSEILWQHNDKNIGGDEDDKNIGSDEDHLSLKEFSELEQSGYYVCYPRGSKPEDANFYLYLRARVCENCMEMDVMSVATIVIVDICITGGLLLLVYYWSKNRKAKAKPVTRGAGAGGRQRGQNKERPPPVPNPDYEPIRKGQRDLYSGLNQRRI

SEQ ID NO: 17109 - protein, 685 aa, Artificial Sequence
  Synthetic Polypeptide
MDWIWRILFLVGAATGAHSQLQLQESGPGLVKPSETLSLTCTVSGGSISSGDYYWGWIRQPPGKGLEWIGSISYSGSTYYNPSLKSRVTISVDTSRNQFSLKLSSVTAADTAVYYCTREDSSNWRSRGQGTLVTVSSSGGGGSGGGGSEVQLVESGGGLVQAGGSLRLSCAASGRTFSMGWFRQAPGKEREFVAAITYSGGSPYYADSVKGRFTISRDNAKNTVYLQMNSLKPEDTAVYYCAANPTYGSDWNAENWGQGTQVTVSSGSGGGGSGGGGSGGGGSFEQVQLQQPGAELVKPGASVKMSCKASGYAFSSYWINWMKQKPGQGLEWIGQIYPGDGDTNYNGKFKGRATLTADTSSSTAYMQLSSLTSEDSAVYFCARSITTVVGCAMDYWGQGTSVTVSSGGGGSGGGGSGGGGSDIQMTQSPSSLSASVGDRVTITCKASDHINNWLAWYQQKPGQAPKLLIYGATTLETGVPSRFSGSGSGTDYTLTISSLQPEDFATYYCQQSWNTPWTFGQGTKLEIKRTRGGGSFKIPIEELEDRVFVNCNTSITWVEGTVGTLLSDITRLDLGKRILDPRGIYRCNGTDIYKDKESTVQVHYRMCQSCVELDPATVAGIIVTDVIATLLLALGVFCFAGHETGRLSGAADTQALLRNDQVYQPLRDRDDAQYSHLGGNWARNK

SEQ ID NO: 17110 - protein, 695 aa, Artificial Sequence
  Synthetic Polypeptide
MDWIWRILFLVGAATGAHSQLQLQESGPGLVKPSETLSLTCTVSGGSISSGDYYWGWIRQPPGKGLEWIGSISYSGSTYYNPSLKSRVTISVDTSRNQFSLKLSSVTAADTAVYYCTREDSSNWRSRGQGTLVTVSSSGGGGSGGGGSEVQLVESGGGLVQAGGSLRLSCAASGRTFSMGWFRQAPGKEREFVAAITYSGGSPYYADSVKGRFTISRDNAKNTVYLQMNSLKPEDTAVYYCAANPTYGSDWNAENWGQGTQVTVSSGSGGGGSGGGGSGGGGSFEQVQLQQPGAELVKPGASVKMSCKASGYAFSSYWINWMKQKPGQGLEWIGQIYPGDGDTNYNGKFKGRATLTADTSSSTAYMQLSSLTSEDSAVYFCARSITTVVGCAMDYWGQGTSVTVSSGGGGSGGGGSGGGGSDIQMTQSPSSLSASVGDRVTITCKASDHINNWLAWYQQKPGQAPKLLIYGATTLETGVPSRFSGSGSGTDYTLTISSLQPEDFATYYCQQSWNTPWTFGQGTKLEIKRTRGGGSQSIKGNHLVKVYDYQEDGSVLLTCDAEAKNITWFKDGKMIGFLTEDKKKWNLGSNAKDPRGMYQCKGSQNKSKPLQVYYRMCQNCIELNAATISGFLFAEIVSIFVLAVGVYFIAGQDGVRQSRASDKQTLLPNDQLYQPLKDREDDQYSHLQGNQLRRN

SEQ ID NO: 17111 - protein, 678 aa, Artificial Sequence
  Synthetic Polypeptide
MDWIWRILFLVGAATGAHSQLQLQESGPGLVKPSETLSLTCTVSGGSISSGDYYWGWIRQPPGKGLEWIGSISYSGSTYYNPSLKSRVTISVDTSRNQFSLKLSSVTAADTAVYYCTREDSSNWRSRGQGTLVTVSSSGGGGSGGGGSEVQLVESGGGLVQAGGSLRLSCAASGRTFSMGWFRQAPGKEREFVAAITYSGGSPYYADSVKGRFTISRDNAKNTVYLQMNSLKPEDTAVYYCAANPTYGSDWNAENWGQGTQVTVSSGSGGGGSGGGGSGGGGSFEQVQLQQPGAELVKPGASVKMSCKASGYAFSSYWINWMKQKPGQGLEWIGQIYPGDGDTNYNGKFKGRATLTADTSSSTAYMQLSSLTSEDSAVYFCARSITTVVGCAMDYWGQGTSVTVSSGGGGSGGGGSGGGGSDIQMTQSPSSLSASVGDRVTITCKASDHINNWLAWYQQKPGQAPKLLIYGATTLETGVPSRFSGSGSGTDYTLTISSLQPEDFATYYCQQSWNTPWTFGQGTKLEIKRTRGGGSQSFGLLDPKLCYLLDGILFIYGVILTALFLRVKFSRSADAPAYQQGQNQLYNELNLGRREEYDVLDKRRGRDPEMGGKPQRRKNPQEGLYNELQKDKMAEAYSEIGMKGERRRGKGHDGLYQGLSTATKDTYDALHMQALPPR

SEQ ID NO: 17112 - protein, 714 aa, Artificial Sequence
  Synthetic Polypeptide
MDWIWRILFLVGAATGAHSQLQLQESGPGLVKPSETLSLTCTVSGGSISSGDYYWGWIRQPPGKGLEWIGSISYSGSTYYNPSLKSRVTISVDTSRNQFSLKLSSVTAADTAVYYCTREDSSNWRSRGQGTLVTVSSSGGGGSGGGGSEVQLVESGGGLVQAGGSLRLSCAASGRTFSMGWFRQAPGKEREFVAAITYSGGSPYYADSVKGRFTISRDNAKNTVYLQMNSLKPEDTAVYYCAANPTYGSDWNAENWGQGTQVTVSSGSGGGGSGGGGSGGGGSFEQVQLQQPGAELVKPGASVKMSCKASGYAFSSYWINWMKQKPGQGLEWIGQIYPGDGDTNYNGKFKGRATLTADTSSSTAYMQLSSLTSEDSAVYFCARSITTVVGCAMDYWGQGTSVTVSSTRIQNPDPAVYQLRDSKSSDKSVCLFTDFDSQTNVSQSKDSDVYITDKTVLDMRSMDFKSNSAVAWSNKSDFACANAFNNSIIPEDTFFPSPESSCDVKLVEKSFETDTNLNFQNLSVIGFRILLLKVAGFNLLMTLRLWSSRAKRSGSGVKQTLNFDLLKLAGDVESNPGPSRGHMAKPLSQEESTLIERATATINSIPISEDYSVASAALSSDGRIFTGVNVYHFTGGPCAELVVLGTAAAAAAGNLTCIVAIGNENRGILSPCGRCRQVLLDLHPGIKAIVKDSDGQPTAVGIRELLPSGYVWEG

SEQ ID NO: 17113 - protein, 548 aa, Artificial Sequence
  Synthetic Polypeptide
MDWIWRILFLVGAATGAHSQLQLQESGPGLVKPSETLSLTCTVSGGSISSGDYYWGWIRQPPGKGLEWIGSISYSGSTYYNPSLKSRVTISVDTSRNQFSLKLSSVTAADTAVYYCTREDSSNWRSRGQGTLVTVSSSGGGGSGGGGSEVQLVESGGGLVQAGGSLRLSCAASGRTFSMGWFRQAPGKEREFVAAITYSGGSPYYADSVKGRFTISRDNAKNTVYLQMNSLKPEDTAVYYCAANPTYGSDWNAENWGQGTQVTVSSGSGGGGSGGGGSGGGGSFEQVQLQQPGAELVKPGASVKMSCKASGYAFSSYWINWMKQKPGQGLEWIGQIYPGDGDTNYNGKFKGRATLTADTSSSTAYMQLSSLTSEDSAVYFCARSITTVVGCAMDYWGQGTSVTVSSTRIQNPDPAVYQLRDSKSSDKSVCLFTDFDSQTNVSQSKDSDVYITDKTVLDMRSMDFKSNSAVAWSNKSDFACANAFNNSIIPEDTFFPSPESSCDVKLVEKSFETDTNLNFQNLSVIGFRILLLKVAGFNLLMTLRLWSS

SEQ ID NO: 17114 - protein, 726 aa, Artificial Sequence
  Synthetic Polypeptide
MDWIWRILFLVGAATGAHSQLQLQESGPGLVKPSETLSLTCTVSGGSISSGDYYWGWIRQPPGKGLEWIGSISYSGSTYYNPSLKSRVTISVDTSRNQFSLKLSSVTAADTAVYYCTREDSSNWRSRGQGTLVTVSSSGGGGSGGGGSEVQLVESGGGLVQAGGSLRLSCAASGRTFSMGWFRQAPGKEREFVAAITYSGGSPYYADSVKGRFTISRDNAKNTVYLQMNSLKPEDTAVYYCAANPTYGSDWNAENWGQGTQVTVSSGSGGGGSGGGGSGGGGSFEQVQLQQPGAELVKPGASVKMSCKASGYAFSSYWINWMKQKPGQGLEWIGQIYPGDGDTNYNGKFKGRATLTADTSSSTAYMQLSSLTSEDSAVYFCARSITTVVGCAMDYWGQGTSVTVSSTREQKLISEEDGSGIQNPDPAVYQLRDSKSSDKSVCLFTDFDSQTNVSQSKDSDVYITDKCVLDMRSMDFKSNSAVAWSNKSDFACANAFNNSIIPEDTFFPSPESSCDVKLVEKSFETDTNLNFQNLSVIGFRILLLKVAGFNLLMTLRLWSSRAKRSGSGVKQTLNFDLLKLAGDVESNPGPSRGHMAKPLSQEESTLIERATATINSIPISEDYSVASAALSSDGRIFTGVNVYHFTGGPCAELVVLGTAAAAAAGNLTCIVAIGNENRGILSPCGRCRQVLLDLHPGIKAIVKDSDGQPTAVGIRELLPSGYVWEG

SEQ ID NO: 17115 - protein, 560 aa, Artificial Sequence
  Synthetic Polypeptide
MDWIWRILFLVGAATGAHSQLQLQESGPGLVKPSETLSLTCTVSGGSISSGDYYWGWIRQPPGKGLEWIGSISYSGSTYYNPSLKSRVTISVDTSRNQFSLKLSSVTAADTAVYYCTREDSSNWRSRGQGTLVTVSSSGGGGSGGGGSEVQLVESGGGLVQAGGSLRLSCAASGRTFSMGWFRQAPGKEREFVAAITYSGGSPYYADSVKGRFTISRDNAKNTVYLQMNSLKPEDTAVYYCAANPTYGSDWNAENWGQGTQVTVSSGSGGGGSGGGGSGGGGSFEQVQLQQPGAELVKPGASVKMSCKASGYAFSSYWINWMKQKPGQGLEWIGQIYPGDGDTNYNGKFKGRATLTADTSSSTAYMQLSSLTSEDSAVYFCARSITTVVGCAMDYWGQGTSVTVSSTREQKLISEEDGSGIQNPDPAVYQLRDSKSSDKSVCLFTDFDSQTNVSQSKDSDVYITDKCVLDMRSMDFKSNSAVAWSNKSDFACANAFNNSIIPEDTFFPSPESSCDVKLVEKSFETDTNLNFQNLSVIGFRILLLKVAGFNLLMTLRLWSS

SEQ ID NO: 17116 - protein, 1385 aa, Artificial Sequence
  Synthetic Polypeptide
MALPVTALLLPLALLLHAARPEVQLLESGGGLVQPGGSLRLSCAASGFTFSSYAMSWVRQAPGKGLEWVSSISGSGDYIYYADSVKGRFTISRDISKNTLYLQMNSLRAEDTAVYYCAKEGTGANSSLADYRGQGTLVTVSSGGGSGGGSEVQVLESGGGLVQPGGSLRLSCAASGFTFSNFAMSWVRQAPGKGLEWVSTISGSAGTTDYADSVKGRFTISRDNSKKTLYLQMNSLRVEDTAVYYCADGRGPFFDYRGQGTLVTVSSGTGGGGSGGGGSGGGGSEFDIQMTQSPSSLSASVGDRVTITCKASDHINNWLAWYQQKPGQAPKLLIYGATTLETGVPSRFSGSGSGTDYTLTISSLQPEDFATYYCQQSWNTPWTFGQGTKLEIKRLEIQNPDPAVYQLRDSKSSDKSVCLFTDFDSQTNVSQSKDSDVYITDKCVLDMRSMDFKSNSAVAWSNKSDFACANAFNNSIIPEDTFFPSSDVPCDVKLVEKSFETDTNLNFQNLSVIGFRILLLKVAGFNLLMTLRLWSSRAKRSGSGVKQTLNFDLLKLAGDVESNPGPTSMDWIWRILFLVGAATGAHSQLQLQESGPGLVKPSETLSLTCTVSGGSISSGDYYWGWIRQPPGKGLEWIGSISYSGSTYYNPSLKSRVTISVDTSRNQFSLKLSSVTAADTAVYYCTREDSSNWRSRGQGTLVTVSSSGGGGSGGGGSEVQLVESGGGLVQAGGSLRLSCAASGRTFSMGWFRQAPGKEREFVAAITYSGGSPYYADSVKGRFTISRDNAKNTVYLQMNSLKPEDTAVYYCAANPTYGSDWNAENWGQGTQVTVSSGSGGGGSGGGGSGGGGSFEQVQLQQPGAELVKPGASVKMSCKASGYAFSSYWINWMKQKPGQGLEWIGQIYPGDGDTNYNGKFKGRATLTADTSSSTAYMQLSSLTSEDSAVYFCARSITTVVGCAMDYWGQGTSVTVSSTREDLKNVFPPEVAVFEPSKAEIAHTQKATLVCLATGFYPDHVELSWWVNGKEVHSGVCTDPQPLKEQPALNDSRYCLSSRLRVSATFWQNPRNHFRCQVQFYGLSENDEWTQDRAKPVTQIVSAEAWGRADCGITSASYHQGVLSATILYEILLGKATLYAVLVSALVLMAMVKRKDSRGRAKRSGSGATNFSLLKQAGDVEENPGPSRGHMTEYKPTVRLATRDDVPRAVRTLAAAFADYPATRHTVDPDRHIERVTELQELFLTRVGLDIGKVWVADDGAAVAVWTTPESVEAGAVFAEIGPRMAELSGSRLAAQQQMEGLLAPHRPKEPAWFLATVGVSPDHQGKGLGSAVVLPGVEAAERAGVPAFLETSAPRNLPFYERLGFTVTADVEVPEGPRTWCMTRKPGA

SEQ ID NO: 17117 - protein, 1384 aa, Artificial Sequence
  Synthetic Polypeptide
MALPVTALLLPLALLLHAARPEVQLLESGGGLVQPGGSLRLSCAASGFTFSSYAMSWVRQAPGKGLEWVSSISGSGDYIYYADSVKGRFTISRDISKNTLYLQMNSLRAEDTAVYYCAKEGTGANSSLADYRGQGTLVTVSSGGGSGGGSEVQVLESGGGLVQPGGSLRLSCAASGFTFSNFAMSWVRQAPGKGLEWVSTISGSAGTTDYADSVKGRFTISRDNSKKTLYLQMNSLRVEDTAVYYCADGRGPFFDYRGQGTLVTVSSGTGGGGSGGGGSGGGGSEFDIQMTQSPSSLSASVGDRVTITCKASDHINNWLAWYQQKPGQAPKLLIYGATTLETGVPSRFSGSGSGTDYTLTISSLQPEDFATYYCQQSWNTPWTFGQGTKLEIKRLEDLKNVFPPEVAVFEPSKAEIAHTQKATLVCLATGFYPDHVELSWWVNGKEVHSGVCTDPQPLKEQPALNDSRYCLSSRLRVSATFWQNPRNHFRCQVQFYGLSENDEWTQDRAKPVTQIVSAEAWGRADCGITSASYHQGVLSATILYEILLGKATLYAVLVSALVLMAMVKRKDSRGRAKRSGSGATNFSLLKQAGDVEENPGPTSMDWIWRILFLVGAATGAHSQLQLQESGPGLVKPSETLSLTCTVSGGSISSGDYYWGWIRQPPGKGLEWIGSISYSGSTYYNPSLKSRVTISVDTSRNQFSLKLSSVTAADTAVYYCTREDSSNWRSRGQGTLVTVSSSGGGGSGGGGSEVQLVESGGGLVQAGGSLRLSCAASGRTFSMGWFRQAPGKEREFVAAITYSGGSPYYADSVKGRFTISRDNAKNTVYLQMNSLKPEDTAVYYCAANPTYGSDWNAENWGQGTQVTVSSGSGGGGSGGGGSGGGGSFEQVQLQQPGAELVKPGASVKMSCKASGYAFSSYWINWMKQKPGQGLEWIGQIYPGDGDTNYNGKFKGRATLTADTSSSTAYMQLSSLTSEDSAVYFCARSITTVVGCAMDYWGQGTSVTVSSTRIQNPDPAVYQLRDSKSSDKSVCLFTDFDSQTNVSQSKDSDVYITDKCVLDMRSMDFKSNSAVAWSNKSDFACANAFNNSIIPEDTFFPSSDVPCDVKLVEKSFETDTNLNFQNLSVIGFRILLLKVAGFNLLMTLRLWSSRAKRSGSGVKQTLNFDLLKLAGDVESNPGPSRGHMTEYKPTVRLATRDDVPRAVRTLAAAFADYPATRHTVDPDRHIERVTELQELFLTRVGLDIGKVWVADDGAAVAVWTTPESVEAGAVFAEIGPRMAELSGSRLAAQQQMEGLLAPHRPKEPAWFLATVGVSPDHQGKGLGSAVVLPGVEAAERAGVPAFLETSAPRNLPFYERLGFTVTADVEVPEGPRTWCMTRKPGA

SEQ ID NO: 17118 - protein, 1384 aa, Artificial Sequence
  Synthetic Polypeptide
MALPVTALLLPLALLLHAARPEVQLLESGGGLVQPGGSLRLSCAASGFTFSSYAMSWVRQAPGKGLEWVSSISGSGDYIYYADSVKGRFTISRDISKNTLYLQMNSLRAEDTAVYYCAKEGTGANSSLADYRGQGTLVTVSSGGGSGGGSEVQVLESGGGLVQPGGSLRLSCAASGFTFSNFAMSWVRQAPGKGLEWVSTISGSAGTTDYADSVKGRFTISRDNSKKTLYLQMNSLRVEDTAVYYCADGRGPFFDYRGQGTLVTVSSGTGGGGSGGGGSGGGGSEFDIQMTQSPSSLSASVGDRVTITCKASDHINNWLAWYQQKPGQAPKLLIYGATTLETGVPSRFSGSGSGTDYTLTISSLQPEDFATYYCQQSWNTPWTFGQGTKLEIKRLEDLKNVFPPEVAVFEPSEAEISHTQKATLVCLATGFYPDHVELSWWVNGKEVHSGVCTDPQPLKEQPALNDSRYCLSSRLRVSATFWQNPRNHFRCQVQFYGLSENDEWTQDRAKPVTQIVSAEAWGRADCGFTSESYQQGVLSATILYEILLGKATLYAVLVSALVLMAMVKRKDSRGRAKRSGSGATNFSLLKQAGDVEENPGPTSMDWIWRILFLVGAATGAHSQLQLQESGPGLVKPSETLSLTCTVSGGSISSGDYYWGWIRQPPGKGLEWIGSISYSGSTYYNPSLKSRVTISVDTSRNQFSLKLSSVTAADTAVYYCTREDSSNWRSRGQGTLVTVSSSGGGGSGGGGSEVQLVESGGGLVQAGGSLRLSCAASGRTFSMGWFRQAPGKEREFVAAITYSGGSPYYADSVKGRFTISRDNAKNTVYLQMNSLKPEDTAVYYCAANPTYGSDWNAENWGQGTQVTVSSGSGGGGSGGGGSGGGGSFEQVQLQQPGAELVKPGASVKMSCKASGYAFSSYWINWMKQKPGQGLEWIGQIYPGDGDTNYNGKFKGRATLTADTSSSTAYMQLSSLTSEDSAVYFCARSITTVVGCAMDYWGQGTSVTVSSTRIQNPDPAVYQLRDSKSSDKSVCLFTDFDSQTNVSQSKDSDVYITDKCVLDMRSMDFKSNSAVAWSNKSDFACANAFNNSIIPEDTFFPSPESSCDVKLVEKSFETDTNLNFQNLSVIGFRILLLKVAGFNLLMTLRLWSSRAKRSGSGVKQTLNFDLLKLAGDVESNPGPSRGHMTEYKPTVRLATRDDVPRAVRTLAAAFADYPATRHTVDPDRHIERVTELQELFLTRVGLDIGKVWVADDGAAVAVWTTPESVEAGAVFAEIGPRMAELSGSRLAAQQQMEGLLAPHRPKEPAWFLATVGVSPDHQGKGLGSAVVLPGVEAAERAGVPAFLETSAPRNLPFYERLGFTVTADVEVPEGPRTWCMTRKPGA

SEQ ID NO: 17119 - protein, 1151 aa, Artificial Sequence
  Synthetic Polypeptide
MALPVTALLLPLALLLHAARPEVQLLESGGGLVQPGGSLRLSCAASGFTFSSYAMSWVRQAPGKGLEWVSSISGSGDYIYYADSVKGRFTISRDISKNTLYLQMNSLRAEDTAVYYCAKEGTGANSSLADYRGQGTLVTVSSGGGSGGGSEVQVLESGGGLVQPGGSLRLSCAASGFTFSNFAMSWVRQAPGKGLEWVSTISGSAGTTDYADSVKGRFTISRDNSKKTLYLQMNSLRVEDTAVYYCADGRGPFFDYRGQGTLVTVSSGTGGGGSGGGGSGGGGSEFDIQMTQSPSSLSASVGDRVTITCKASDHINNWLAWYQQKPGQAPKLLIYGATTLETGVPSRFSGSGSGTDYTLTISSLQPEDFATYYCQQSWNTPWTFGQGTKLEIKRLEDLKNVFPPEVAVFEPSEAEISHTQKATLVCLATGFYPDHVELSWWVNGKEVHSGVCTDPQPLKEQPALNDSRYCLSSRLRVSATFWQNPRNHFRCQVQFYGLSENDEWTQDRAKPVTQIVSAEAWGRADCGFTSESYQQGVLSATILYEILLGKATLYAVLVSALVLMAMVKRKDSRGRAKRSGSGATNFSLLKQAGDVEENPGPTSMDWIWRILFLVGAATGAHSQLQLQESGPGLVKPSETLSLTCTVSGGSISSGDYYWGWIRQPPGKGLEWIGSISYSGSTYYNPSLKSRVTISVDTSRNQFSLKLSSVTAADTAVYYCTREDSSNWRSRGQGTLVTVSSSGGGGSGGGGSEVQLVESGGGLVQAGGSLRLSCAASGRTFSMGWFRQAPGKEREFVAAITYSGGSPYYADSVKGRFTISRDNAKNTVYLQMNSLKPEDTAVYYCAANPTYGSDWNAENWGQGTQVTVSSGSGGGGSGGGGSGGGGSFEQVQLQQPGAELVKPGASVKMSCKASGYAFSSYWINWMKQKPGQGLEWIGQIYPGDGDTNYNGKFKGRATLTADTSSSTAYMQLSSLTSEDSAVYFCARSITTVVGCAMDYWGQGTSVTVSSTRIQNPDPAVYQLRDSKSSDKSVCLFTDFDSQTNVSQSKDSDVYITDKCVLDMRSMDFKSNSAVAWSNKSDFACANAFNNSIIPEDTFFPSPESSCDVKLVEKSFETDTNLNFQNLSVIGFRILLLKVAGFNLLMTLRLWSS

SEQ ID NO: 17120 - protein, 1376 aa, Artificial Sequence
  Synthetic Polypeptide
MALPVTALLLPLALLLHAARPEVQLLESGGGLVQPGGSLRLSCAASGFTFSSYAMSWVRQAPGKGLEWVSSISGSGDYIYYADSVKGRFTISRDISKNTLYLQMNSLRAEDTAVYYCAKEGTGANSSLADYRGQGTLVTVSSGGGSGGGSEVQVLESGGGLVQPGGSLRLSCAASGFTFSNFAMSWVRQAPGKGLEWVSTISGSAGTTDYADSVKGRFTISRDNSKKTLYLQMNSLRVEDTAVYYCADGRGPFFDYRGQGTLVTVSSGTGGGGSGGGGSGGGGSEFDIQMTQSPSSLSASVGDRVTITCKASDHINNWLAWYQQKPGQAPKLLIYGATTLETGVPSRFSGSGSGTDYTLTISSLQPEDFATYYCQQSWNTPWTFGQGTKLEIKRLEDLKNVFPPEVAVFEPSEAEISHTQKATLVCLATGFYPDHVELSWWVNGKEVHSGVCTDPQPLKEQPALNDSRYCLSSRLRVSATFWQNPRNHFRCQVQFYGLSENDEWTQDRAKPVTQIVSAEAWGRADCGFTSESYQQGVLSATILYEILLGKATLYAVLVSALVLMAMVKRKDSRGRAKRSGSGATNFSLLKQAGDVEENPGPTSMDWIWRILFLVGAATGAHSQLQLQESGPGLVKPSETLSLTCTVSGGSISSGDYYWGWIRQPPGKGLEWIGSISYSGSTYYNPSLKSRVTISVDTSRNQFSLKLSSVTAADTAVYYCTREDSSNWRSRGQGTLVTVSSSGGGGSGGGGSEVQLVESGGGLVQAGGSLRLSCAASGRTFSMGWFRQAPGKEREFVAAITYSGGSPYYADSVKGRFTISRDNAKNTVYLQMNSLKPEDTAVYYCAANPTYGSDWNAENWGQGTQVTVSSGSGGGGSGGGGSGGGGSFEQVQLQQPGAELVKPGASVKMSCKASGYAFSSYWINWMKQKPGQGLEWIGQIYPGDGDTNYNGKFKGRATLTADTSSSTAYMQLSSLTSEDSAVYFCARSITTVVGCAMDYWGQGTSVTVSSTRIQNPDPAVYQLRDSKSSDKSVCLFTDFDSQTNVSQSKDSDVYITDKCVLDMRSMDFKSNSAVAWSNKSDFACANAFNNSIIPEDTFFPSPESSCDVKLVEKSFETDTNLNFQNLSVIGFRILLLKVAGFNLLMTLRLWSSRAKRSGSGVKQTLNFDLLKLAGDVESNPGPSRGGIHTMATYEVLCEVARKLGTDDREVVLFLLNVFIPQPTLAQLIGALRALKEEGRLTFPLLAECLFRAGRRDLLRDLLHLDPRFLERHLAGTMSYFSPYQLTVLHVDGELCARDIRSLIFLSKDTIGSRSTPQTFLHWVYCMENLDLLGPTDVDALMSMLRSLSRVDLQRQVQTLMGLHLSGPSHSQHYRHTP

SEQ ID NO: 17121 - protein, 1155 aa, Artificial Sequence
  Synthetic Polypeptide
MALPVTALLLPLALLLHAARPEVQLLESGGGLVQPGGSLRLSCAASGFTFSSYAMSWVRQAPGKGLEWVSSISGSGDYIYYADSVKGRFTISRDISKNTLYLQMNSLRAEDTAVYYCAKEGTGANSSLADYRGQGTLVTVSSGGGSGGGSEVQVLESGGGLVQPGGSLRLSCAASGFTFSNFAMSWVRQAPGKGLEWVSTISGSAGTTDYADSVKGRFTISRDNSKKTLYLQMNSLRVEDTAVYYCADGRGPFFDYRGQGTLVTVSSGTGGGGSGGGGSGGGGSEFDIQMTQSPSSLSASVGDRVTITCKASDHINNWLAWYQQKPGQAPKLLIYGATTLETGVPSRFSGSGSGTDYTLTISSLQPEDFATYYCQQSWNTPWTFGQGTKLEIKRLEIQNPDPAVYQLRDSKSSDKSVCLFTDFDSQTNVSQSKDSDVYITDKCVLDMRSMDFKSNSAVAWSNKSDFACANAFNNSIIPEDTFFPSPESSCDVKLVEKSFETDTNLNFQNLSVIGFRILLLKVAGFNLLMTLRLWSSRAKRSGSGVKQTLNFDLLKLAGDVESNPGPTSMDWIWRILFLVGAATGAHSQLQLQESGPGLVKPSETLSLTCTVSGGSISSGDYYWGWIRQPPGKGLEWIGSISYSGSTYYNPSLKSRVTISVDTSRNQFSLKLSSVTAADTAVYYCTREDSSNWRSRGQGTLVTVSSSGGGGSGGGGSEVQLVESGGGLVQAGGSLRLSCAASGRTFSMGWFRQAPGKEREFVAAITYSGGSPYYADSVKGRFTISRDNAKNTVYLQMNSLKPEDTAVYYCAANPTYGSDWNAENWGQGTQVTVSSGSGGGGSGGGGSGGGGSFEQVQLQQPGAELVKPGASVKMSCKASGYAFSSYWINWMKQKPGQGLEWIGQIYPGDGDTNYNGKFKGRATLTADTSSSTAYMQLSSLTSEDSAVYFCARSITTVVGCAMDYWGQGTSVTVSSTREDLKNVFPPEVAVFEPSEAEISHTQKATLVCLATGFYPDHVELSWWVNGKEVHSGVCTDPQPLKEQPALNDSRYCLSSRLRVSATFWQNPRNHFRCQVQFYGLSENDEWTQDRAKPVTQIVSAEAWGRADCGFTSESYQQGVLSATILYEILLGKATLYAVLVSALVLMAMVKRKDSRG

SEQ ID NO: 17122 - protein, 1377 aa, Artificial Sequence
  Synthetic Polypeptide
MALPVTALLLPLALLLHAARPEVQLLESGGGLVQPGGSLRLSCAASGFTFSSYAMSWVRQAPGKGLEWVSSISGSGDYIYYADSVKGRFTISRDISKNTLYLQMNSLRAEDTAVYYCAKEGTGANSSLADYRGQGTLVTVSSGGGSGGGSEVQVLESGGGLVQPGGSLRLSCAASGFTFSNFAMSWVRQAPGKGLEWVSTISGSAGTTDYADSVKGRFTISRDNSKKTLYLQMNSLRVEDTAVYYCADGRGPFFDYRGQGTLVTVSSGTGGGGSGGGGSGGGGSEFDIQMTQSPSSLSASVGDRVTITCKASDHINNWLAWYQQKPGQAPKLLIYGATTLETGVPSRFSGSGSGTDYTLTISSLQPEDFATYYCQQSWNTPWTFGQGTKLEIKRLEIQNPDPAVYQLRDSKSSDKSVCLFTDFDSQTNVSQSKDSDVYITDKCVLDMRSMDFKSNSAVAWSNKSDFACANAFNNSIIPEDTFFPSPESSCDVKLVEKSFETDTNLNFQNLSVIGFRILLLKVAGFNLLMTLRLWSSRAKRSGSGVKQTLNFDLLKLAGDVESNPGPTSMDWIWRILFLVGAATGAHSQLQLQESGPGLVKPSETLSLTCTVSGGSISSGDYYWGWIRQPPGKGLEWIGSISYSGSTYYNPSLKSRVTISVDTSRNQFSLKLSSVTAADTAVYYCTREDSSNWRSRGQGTLVTVSSSGGGGSGGGGSEVQLVESGGGLVQAGGSLRLSCAASGRTFSMGWFRQAPGKEREFVAAITYSGGSPYYADSVKGRFTISRDNAKNTVYLQMNSLKPEDTAVYYCAANPTYGSDWNAENWGQGTQVTVSSGSGGGGSGGGGSGGGGSFEQVQLQQPGAELVKPGASVKMSCKASGYAFSSYWINWMKQKPGQGLEWIGQIYPGDGDTNYNGKFKGRATLTADTSSSTAYMQLSSLTSEDSAVYFCARSITTVVGCAMDYWGQGTSVTVSSTREDLKNVFPPEVAVFEPSEAEISHTQKATLVCLATGFYPDHVELSWWVNGKEVHSGVCTDPQPLKEQPALNDSRYCLSSRLRVSATFWQNPRNHFRCQVQFYGLSENDEWTQDRAKPVTQIVSAEAWGRADCGFTSESYQQGVLSATILYEILLGKATLYAVLVSALVLMAMVKRKDSRGRAKRSGSGATNFSLLKQAGDVEENPGPSRGGIHTMATYEVLCEVARKLGTDDREVVLFLLNVFIPQPTLAQLIGALRALKEEGRLTFPLLAECLFRAGRRDLLRDLLHLDPRFLERHLAGTMSYFSPYQLTVLHVDGELCARDIRSLIFLSKDTIGSRSTPQTFLHWVYCMENLDLLGPTDVDALMSMLRSLSRVDLQRQVQTLMGLHLSGPSHSQHYRHTP

SEQ ID NO: 17123 - protein, 1384 aa, Artificial Sequence
  Synthetic Polypeptide
MALPVTALLLPLALLLHAARPEVQLLESGGGLVQPGGSLRLSCAASGFTFSSYAMSWVRQAPGKGLEWVSSISGSGDYIYYADSVKGRFTISRDISKNTLYLQMNSLRAEDTAVYYCAKEGTGANSSLADYRGQGTLVTVSSGGGSGGGSEVQVLESGGGLVQPGGSLRLSCAASGFTFSNFAMSWVRQAPGKGLEWVSTISGSAGTTDYADSVKGRFTISRDNSKKTLYLQMNSLRVEDTAVYYCADGRGPFFDYRGQGTLVTVSSGTGGGGSGGGGSGGGGSEFDIQMTQSPSSLSASVGDRVTITCKASDHINNWLAWYQQKPGQAPKLLIYGATTLETGVPSRFSGSGSGTDYTLTISSLQPEDFATYYCQQSWNTPWTFGQGTKLEIKRLEDLKNVFPPEVAVFEPSEAEISHTQKATLVCLATGFYPDHVELSWWVNGKEVHSGVSTDPQPLKEQPALNDSRYCLSSRLRVSATFWQNPRNHFRCQVQFYGLSENDEWTQDRAKPVTQIVSAEAWGRADCGFTSESYQQGVLSATILYEILLGKATLYAVLVSALVLMAMVKRKDSRGRAKRSGSGATNFSLLKQAGDVEENPGPTSMDWIWRILFLVGAATGAHSQLQLQESGPGLVKPSETLSLTCTVSGGSISSGDYYWGWIRQPPGKGLEWIGSISYSGSTYYNPSLKSRVTISVDTSRNQFSLKLSSVTAADTAVYYCTREDSSNWRSRGQGTLVTVSSSGGGGSGGGGSEVQLVESGGGLVQAGGSLRLSCAASGRTFSMGWFRQAPGKEREFVAAITYSGGSPYYADSVKGRFTISRDNAKNTVYLQMNSLKPEDTAVYYCAANPTYGSDWNAENWGQGTQVTVSSGSGGGGSGGGGSGGGGSFEQVQLQQPGAELVKPGASVKMSCKASGYAFSSYWINWMKQKPGQGLEWIGQIYPGDGDTNYNGKFKGRATLTADTSSSTAYMQLSSLTSEDSAVYFCARSITTVVGCAMDYWGQGTSVTVSSTRIQNPDPAVYQLRDSKSSDKSVCLFTDFDSQTNVSQSKDSDVYITDKTVLDMRSMDFKSNSAVAWSNKSDFACANAFNNSIIPEDTFFPSPESSCDVKLVEKSFETDTNLNFQNLSVIGFRILLLKVAGFNLLMTLRLWSSRAKRSGSGVKQTLNFDLLKLAGDVESNPGPSRGHMTEYKPTVRLATRDDVPRAVRTLAAAFADYPATRHTVDPDRHIERVTELQELFLTRVGLDIGKVWVADDGAAVAVWTTPESVEAGAVFAEIGPRMAELSGSRLAAQQQMEGLLAPHRPKEPAWFLATVGVSPDHQGKGLGSAVVLPGVEAAERAGVPAFLETSAPRNLPFYERLGFTVTADVEVPEGPRTWCMTRKPGA

SEQ ID NO: 17124 - protein, 1466 aa, Artificial Sequence
  Synthetic Polypeptide
MALPVTALLLPLALLLHAARPEVQLLESGGGLVQPGGSLRLSCAASGFTFSSYAMSWVRQAPGKGLEWVSSISGSGDYIYYADSVKGRFTISRDISKNTLYLQMNSLRAEDTAVYYCAKEGTGANSSLADYRGQGTLVTVSSGGGSGGGSEVQVLESGGGLVQPGGSLRLSCAASGFTFSNFAMSWVRQAPGKGLEWVSTISGSAGTTDYADSVKGRFTISRDNSKKTLYLQMNSLRVEDTAVYYCADGRGPFFDYRGQGTLVTVSSGTGGGGSGGGGSGGGGSEFDIQMTQSPSSLSASVGDRVTITCKASDHINNWLAWYQQKPGQAPKLLIYGATTLETGVPSRFSGSGSGTDYTLTISSLQPEDFATYYCQQSWNTPWTFGQGTKLEIKRLEDLKNVFPPEVAVFEPSEAEISHTQKATLVCLATGFYPDHVELSWWVNGKEVHSGVSTDPQPLKEQPALNDSRYCLSSRLRVSATFWQNPRNHFRCQVQFYGLSENDEWTQDRAKPVTQIVSAEAWGRADCGFTSESYQQGVLSATILYEILLGKATLYAVLVSALVLMAMVKRKDSRGRAKRSGSGATNFSLLKQAGDVEENPGPTSMDWIWRILFLVGAATGAHSQLQLQESGPGLVKPSETLSLTCTVSGGSISSGDYYWGWIRQPPGKGLEWIGSISYSGSTYYNPSLKSRVTISVDTSRNQFSLKLSSVTAADTAVYYCTREDSSNWRSRGQGTLVTVSSSGGGGSGGGGSEVQLVESGGGLVQAGGSLRLSCAASGRTFSMGWFRQAPGKEREFVAAITYSGGSPYYADSVKGRFTISRDNAKNTVYLQMNSLKPEDTAVYYCAANPTYGSDWNAENWGQGTQVTVSSGSGGGGSGGGGSGGGGSFEQVQLQQPGAELVKPGASVKMSCKASGYAFSSYWINWMKQKPGQGLEWIGQIYPGDGDTNYNGKFKGRATLTADTSSSTAYMQLSSLTSEDSAVYFCARSITTVVGCAMDYWGQGTSVTVSSTREQKLISEEDGSGTPFPSLAPPIMLLVDGKQQMVVVCLVLDVAPPGLDSPIWFSAGNGSALDAFTYGPSPATDGTWTNLAHLSLPSEELASWEPLVCHTGPGAEGHSRSTQPMHLSGEASTARTCPQEPLRGTPGGALWLGVLRLLLFKLLLFDLLLTCSCLCDPAGPLPSPATTTRLRALGSHRLHPATETGGREATSSPRPQPRDRRWGDTPPGRKPGSPVRAKRSGSGVKQTLNFDLLKLAGDVESNPGPSRGHMTEYKPTVRLATRDDVPRAVRTLAAAFADYPATRHTVDPDRHIERVTELQELFLTRVGLDIGKVWVADDGAAVAVWTTPESVEAGAVFAEIGPRMAELSGSRLAAQQQMEGLLAPHRPKEPAWFLATVGVSPDHQGKGLGSAVVLPGVEAAERAGVPAFLETSAPRNLPFYERLGFTVTADVEVPEGPRTWCMTRKPGA

SEQ ID NO: 17125 - protein, 1421 aa, Artificial Sequence
  Synthetic Polypeptide
MALPVTALLLPLALLLHAARPEVQLLESGGGLVQPGGSLRLSCAASGFTFSSYAMSWVRQAPGKGLEWVSSISGSGDYIYYADSVKGRFTISRDISKNTLYLQMNSLRAEDTAVYYCAKEGTGANSSLADYRGQGTLVTVSSGGGSGGGSEVQVLESGGGLVQPGGSLRLSCAASGFTFSNFAMSWVRQAPGKGLEWVSTISGSAGTTDYADSVKGRFTISRDNSKKTLYLQMNSLRVEDTAVYYCADGRGPFFDYRGQGTLVTVSSGTGGGGSGGGGSGGGGSEFDIQMTQSPSSLSASVGDRVTITCKASDHINNWLAWYQQKPGQAPKLLIYGATTLETGVPSRFSGSGSGTDYTLTISSLQPEDFATYYCQQSWNTPWTFGQGTKLEIKRLEGKPIPNPLLGLDSTGSGDKQLDADVSPKPTIFLPSIAETKLQKAGTYLCLLEKFFPDVIKIHWQEKKSNTILGSQEGNTMKTNDTYMKFSWLTVPEKSLDKEHRCIVRHENNKNGVDQEIIFPPIKTDVITMDPKDNCSKDANDTLLLQLTNTSAYYMYLLLLLKSVVYFAIITCCLLRRTAFCCNGEKSRAKRSGSGATNFSLLKQAGDVEENPGPTSMDWIWRILFLVGAATGAHSQLQLQESGPGLVKPSETLSLTCTVSGGSISSGDYYWGWIRQPPGKGLEWIGSISYSGSTYYNPSLKSRVTISVDTSRNQFSLKLSSVTAADTAVYYCTREDSSNWRSRGQGTLVTVSSSGGGGSGGGGSEVQLVESGGGLVQAGGSLRLSCAASGRTFSMGWFRQAPGKEREFVAAITYSGGSPYYADSVKGRFTISRDNAKNTVYLQMNSLKPEDTAVYYCAANPTYGSDWNAENWGQGTQVTVSSGSGGGGSGGGGSGGGGSFEQVQLQQPGAELVKPGASVKMSCKASGYAFSSYWINWMKQKPGQGLEWIGQIYPGDGDTNYNGKFKGRATLTADTSSSTAYMQLSSLTSEDSAVYFCARSITTVVGCAMDYWGQGTSVTVSSTREQKLISEEDGSGSQPHTKPSVFVMKNGTNVACLVKEFYPKDIRINLVSSKKITEFDPAIVISPSGKYNAVKLGKYEDSNSVTCSVQHDNKTVHSTDFEVKTDSTDHVKPKETENTKQPSKSCHKPKAIVHTEKVNMMSLTVLGLRMLFAKTVAVNFLLTAKLFFLRAKRSGSGVKQTLNFDLLKLAGDVESNPGPSRGHMTEYKPTVRLATRDDVPRAVRTLAAAFADYPATRHTVDPDRHIERVTELQELFLTRVGLDIGKVWVADDGAAVAVWTTPESVEAGAVFAEIGPRMAELSGSRLAAQQQMEGLLAPHRPKEPAWFLATVGVSPDHQGKGLGSAVVLPGVEAAERAGVPAFLETSAPRNLPFYERLGFTVTADVEVPEGPRTWCMTRKPGA

SEQ ID NO: 17126 - protein, 1159 aa, Artificial Sequence
  Synthetic Polypeptide
MALPVTALLLPLALLLHAARPEVQLLESGGGLVQPGGSLRLSCAASGFTFSSYAMSWVRQAPGKGLEWVSSISGSGDYIYYADSVKGRFTISRDISKNTLYLQMNSLRAEDTAVYYCAKEGTGANSSLADYRGQGTLVTVSSGGGSGGGSEVQVLESGGGLVQPGGSLRLSCAASGFTFSNFAMSWVRQAPGKGLEWVSTISGSAGTTDYADSVKGRFTISRDNSKKTLYLQMNSLRVEDTAVYYCADGRGPFFDYRGQGTLVTVSSGTGGGGSGGGGSGGGGSEFDIQMTQSPSSLSASVGDRVTITCKASDHINNWLAWYQQKPGQAPKLLIYGATTLETGVPSRFSGSGSGTDYTLTISSLQPEDFATYYCQQSWNTPWTFGQGTKLEIKRLESQPHTKPSVFVMKNGTNVACLVKEFYPKDIRINLVSSKKITEFDPAIVISPSGKYNAVKLGKYEDSNSVTCSVQHDNKTVHSTDFEVKTDSTDHVKPKETENTKQPSKSCHKPKAIVHTEKVNMMSLTVLGLRMLFAKTVAVNFLLTAKLFFLRAKRSGSGATNFSLLKQAGDVEENPGPTSMDWIWRILFLVGAATGAHSQLQLQESGPGLVKPSETLSLTCTVSGGSISSGDYYWGWIRQPPGKGLEWIGSISYSGSTYYNPSLKSRVTISVDTSRNQFSLKLSSVTAADTAVYYCTREDSSNWRSRGQGTLVTVSSSGGGGSGGGGSEVQLVESGGGLVQAGGSLRLSCAASGRTFSMGWFRQAPGKEREFVAAITYSGGSPYYADSVKGRFTISRDNAKNTVYLQMNSLKPEDTAVYYCAANPTYGSDWNAENWGQGTQVTVSSGSGGGGSGGGGSGGGGSFEQVQLQQPGAELVKPGASVKMSCKASGYAFSSYWINWMKQKPGQGLEWIGQIYPGDGDTNYNGKFKGRATLTADTSSSTAYMQLSSLTSEDSAVYFCARSITTVVGCAMDYWGQGTSVTVSSTRDKQLDADVSPKPTIFLPSIAETKLQKAGTYLCLLEKFFPDVIKIHWQEKKSNTILGSQEGNTMKTNDTYMKFSWLTVPEKSLDKEHRCIVRHENNKNGVDQEIIFPPIKTDVITMDPKDNCSKDANDTLLLQLTNTSAYYMYLLLLLKSVVYFAIITCCLLRRTAFCCNGEKS

SEQ ID NO: 17127 - protein, 1561 aa, Artificial Sequence
  Synthetic Polypeptide
MALPVTALLLPLALLLHAARPEVQLLESGGGLVQPGGSLRLSCAASGFTFSSYAMSWVRQAPGKGLEWVSSISGSGDYIYYADSVKGRFTISRDISKNTLYLQMNSLRAEDTAVYYCAKEGTGANSSLADYRGQGTLVTVSSGGGSGGGSEVQVLESGGGLVQPGGSLRLSCAASGFTFSNFAMSWVRQAPGKGLEWVSTISGSAGTTDYADSVKGRFTISRDNSKKTLYLQMNSLRVEDTAVYYCADGRGPFFDYRGQGTLVTVSSGTGGGGSGGGGSGGGGSEFDIQMTQSPSSLSASVGDRVTITCKASDHINNWLAWYQQKPGQAPKLLIYGATTLETGVPSRFSGSGSGTDYTLTISSLQPEDFATYYCQQSWNTPWTFGQGTKLEIKRGQPKANPTVTLFPPSSEELQANKATLVCLISDFYPGAVTVAWKADGSPVKAGVETTKPSKQSNNKYAASSYLSLTPEQWKSHRSYSCQVTHEGSTVEKTVAPTECSGSQSFGLLDPKLCYLLDGILFIYGVILTALFLRVKFSRSADAPAYQQGQNQLYNELNLGRREEYDVLDKRRGRDPEMGGKPQRRKNPQEGLYNELQKDKMAEAYSEIGMKGERRRGKGHDGLYQGLSTATKDTYDALHMQALPPRRAKRSGSGATNFSLLKQAGDVEENPGPTSMDWIWRILFLVGAATGAHSQLQLQESGPGLVKPSETLSLTCTVSGGSISSGDYYWGWIRQPPGKGLEWIGSISYSGSTYYNPSLKSRVTISVDTSRNQFSLKLSSVTAADTAVYYCTREDSSNWRSRGQGTLVTVSSSGGGGSGGGGSEVQLVESGGGLVQAGGSLRLSCAASGRTFSMGWFRQAPGKEREFVAAITYSGGSPYYADSVKGRFTISRDNAKNTVYLQMNSLKPEDTAVYYCAANPTYGSDWNAENWGQGTQVTVSSGSGGGGSGGGGSGGGGSFEQVQLQQPGAELVKPGASVKMSCKASGYAFSSYWINWMKQKPGQGLEWIGQIYPGDGDTNYNGKFKGRATLTADTSSSTAYMQLSSLTSEDSAVYFCARSITTVVGCAMDYWGQGTSVTVSSASTKGPSVFPLAPSSKSTSGGTAALGCLVKDYFPEPVTVSWNSGALTSGVHTFPAVLQSSGLYSLSSVVTVPSSSLGTQTYICNVNHKPSNTKVDKRVEPKSCGTQSFGLLDPKLCYLLDGILFIYGVILTALFLRVKFSRSADAPAYQQGQNQLYNELNLGRREEYDVLDKRRGRDPEMGGKPQRRKNPQEGLYNELQKDKMAEAYSEIGMKGERRRGKGHDGLYQGLSTATKDTYDALHMQALPPRRAKRSGSGVKQTLNFDLLKLAGDVESNPGPSRGHMTEYKPTVRLATRDDVPRAVRTLAAAFADYPATRHTVDPDRHIERVTELQELFLTRVGLDIGKVWVADDGAAVAVWTTPESVEAGAVFAEIGPRMAELSGSRLAAQQQMEGLLAPHRPKEPAWFLATVGVSPDHQGKGLGSAVVLPGVEAAERAGVPAFLETSAPRNLPFYERLGFTVTADVEVPEGPRTWCMTRKPGA

SEQ ID NO: 17128 - protein, 1347 aa, Artificial Sequence
  Synthetic Polypeptide
MALPVTALLLPLALLLHAARPEVQLLESGGGLVQPGGSLRLSCAASGFTFSSYAMSWVRQAPGKGLEWVSSISGSGDYIYYADSVKGRFTISRDISKNTLYLQMNSLRAEDTAVYYCAKEGTGANSSLADYRGQGTLVTVSSGGGSGGGSEVQVLESGGGLVQPGGSLRLSCAASGFTFSNFAMSWVRQAPGKGLEWVSTISGSAGTTDYADSVKGRFTISRDNSKKTLYLQMNSLRVEDTAVYYCADGRGPFFDYRGQGTLVTVSSGTGGGGSGGGGSGGGGSEFDIQMTQSPSSLSASVGDRVTITCKASDHINNWLAWYQQKPGQAPKLLIYGATTLETGVPSRFSGSGSGTDYTLTISSLQPEDFATYYCQQSWNTPWTFGQGTKLEIKRLEDLKNVFPPEVAVFEPSEAEISHTQKATLVCLATGFYPDHVELSWWVNGKEVHSGVSTDPQPLKEQPALNDSRYCLSSRLRVSATFWQNPRNHFRCQVQFYGLSENDEWTQDRAKPVTQIVSAEAWGRADCGSQSFGLLDPKLCYLLDGILFIYGVILTALFLRVKFSRSADAPAYQQGQNQLYNELNLGRREEYDVLDKRRGRDPEMGGKPQRRKNPQEGLYNELQKDKMAEAYSEIGMKGERRRGKGHDGLYQGLSTATKDTYDALHMQALPPRRAKRSGSGATNFSLLKQAGDVEENPGPTSMDWIWRILFLVGAATGAHSQLQLQESGPGLVKPSETLSLTCTVSGGSISSGDYYWGWIRQPPGKGLEWIGSISYSGSTYYNPSLKSRVTISVDTSRNQFSLKLSSVTAADTAVYYCTREDSSNWRSRGQGTLVTVSSSGGGGSGGGGSEVQLVESGGGLVQAGGSLRLSCAASGRTFSMGWFRQAPGKEREFVAAITYSGGSPYYADSVKGRFTISRDNAKNTVYLQMNSLKPEDTAVYYCAANPTYGSDWNAENWGQGTQVTVSSGSGGGGSGGGGSGGGGSFEQVQLQQPGAELVKPGASVKMSCKASGYAFSSYWINWMKQKPGQGLEWIGQIYPGDGDTNYNGKFKGRATLTADTSSSTAYMQLSSLTSEDSAVYFCARSITTVVGCAMDYWGQGTSVTVSSTRIQNPDPAVYQLRDSKSSDKSVCLFTDFDSQTNVSQSKDSDVYITDKTVLDMRSMDFKSNSAVAWSNKSDFACANAFNNSIIPEDTFFPSPESSCGTQSFGLLDPKLCYLLDGILFIYGVILTALFLRVKFSRSADAPAYQQGQNQLYNELNLGRREEYDVLDKRRGRDPEMGGKPQRRKNPQEGLYNELQKDKMAEAYSEIGMKGERRRGKGHDGLYQGLSTATKDTYDALHMQALPPR

SEQ ID NO: 17129 - protein, 1347 aa, Artificial Sequence
  Synthetic Polypeptide
MALPVTALLLPLALLLHAARPEVQLLESGGGLVQPGGSLRLSCAASGFTFSSYAMSWVRQAPGKGLEWVSSISGSGDYIYYADSVKGRFTISRDISKNTLYLQMNSLRAEDTAVYYCAKEGTGANSSLADYRGQGTLVTVSSGGGSGGGSEVQVLESGGGLVQPGGSLRLSCAASGFTFSNFAMSWVRQAPGKGLEWVSTISGSAGTTDYADSVKGRFTISRDNSKKTLYLQMNSLRVEDTAVYYCADGRGPFFDYRGQGTLVTVSSGTGGGGSGGGGSGGGGSEFDIQMTQSPSSLSASVGDRVTITCKASDHINNWLAWYQQKPGQAPKLLIYGATTLETGVPSRFSGSGSGTDYTLTISSLQPEDFATYYCQQSWNTPWTFGQGTKLEIKRLEDLKNVFPPEVAVFEPSKAEIAHTQKATLVCLATGFYPDHVELSWWVNGKEVHSGVCTDPQPLKEQPALNDSRYCLSSRLRVSATFWQNPRNHFRCQVQFYGLSENDEWTQDRAKPVTQIVSAEAWGRADCGSQSFGLLDPKLCYLLDGILFIYGVILTALFLRVKFSRSADAPAYQQGQNQLYNELNLGRREEYDVLDKRRGRDPEMGGKPQRRKNPQEGLYNELQKDKMAEAYSEIGMKGERRRGKGHDGLYQGLSTATKDTYDALHMQALPPRRAKRSGSGATNFSLLKQAGDVEENPGPTSMDWIWRILFLVGAATGAHSQLQLQESGPGLVKPSETLSLTCTVSGGSISSGDYYWGWIRQPPGKGLEWIGSISYSGSTYYNPSLKSRVTISVDTSRNQFSLKLSSVTAADTAVYYCTREDSSNWRSRGQGTLVTVSSSGGGGSGGGGSEVQLVESGGGLVQAGGSLRLSCAASGRTFSMGWFRQAPGKEREFVAAITYSGGSPYYADSVKGRFTISRDNAKNTVYLQMNSLKPEDTAVYYCAANPTYGSDWNAENWGQGTQVTVSSGSGGGGSGGGGSGGGGSFEQVQLQQPGAELVKPGASVKMSCKASGYAFSSYWINWMKQKPGQGLEWIGQIYPGDGDTNYNGKFKGRATLTADTSSSTAYMQLSSLTSEDSAVYFCARSITTVVGCAMDYWGQGTSVTVSSTRIQNPDPAVYQLRDSKSSDKSVCLFTDFDSQTNVSQSKDSDVYITDKCVLDMRSMDFKSNSAVAWSNKSDFACANAFNNSIIPEDTFFPSSDVPCGTQSFGLLDPKLCYLLDGILFIYGVILTALFLRVKFSRSADAPAYQQGQNQLYNELNLGRREEYDVLDKRRGRDPEMGGKPQRRKNPQEGLYNELQKDKMAEAYSEIGMKGERRRGKGHDGLYQGLSTATKDTYDALHMQALPPR

SEQ ID NO: 17130 - protein, 1418 aa, Artificial Sequence
  Synthetic Polypeptide
MALPVTALLLPLALLLHAARPEVQLLESGGGLVQPGGSLRLSCAASGFTFSSYAMSWVRQAPGKGLEWVSSISGSGDYIYYADSVKGRFTISRDISKNTLYLQMNSLRAEDTAVYYCAKEGTGANSSLADYRGQGTLVTVSSGGGSGGGSEVQVLESGGGLVQPGGSLRLSCAASGFTFSNFAMSWVRQAPGKGLEWVSTISGSAGTTDYADSVKGRFTISRDNSKKTLYLQMNSLRVEDTAVYYCADGRGPFFDYRGQGTLVTVSSGTGGGGSGGGGSGGGGSEFDIQMTQSPSSLSASVGDRVTITCKASDHINNWLAWYQQKPGQAPKLLIYGATTLETGVPSRFSGSGSGTDYTLTISSLQPEDFATYYCQQSWNTPWTFGQGTKLEIKRLEGKPIPNPLLGLDSTGSGEDLKNVFPPEVAVFEPSEAEISHTQKATLVCLATGFYPDHVELSWWVNGKEVHSGVSTDPQPLKEQPALNDSRYCLSSRLRVSATFWQNPRNHFRCQVQFYGLSENDEWTQDRAKPVTQIVSAEAWGRADCGSQSFGLLDPKLCYLLDGILFIYGVILTALFLRVKFSRSADAPAYQQGQNQLYNELNLGRREEYDVLDKRRGRDPEMGGKPQRRKNPQEGLYNELQKDKMAEAYSEIGMKGERRRGKGHDGLYQGLSTATKDTYDALHMQALPPRRAKRSGSGATNFSLLKQAGDVEENPGPTSMDWIWRILFLVGAATGAHSQLQLQESGPGLVKPSETLSLTCTVSGGSISSGDYYWGWIRQPPGKGLEWIGSISYSGSTYYNPSLKSRVTISVDTSRNQFSLKLSSVTAADTAVYYCTREDSSNWRSRGQGTLVTVSSSGGGGSGGGGSEVQLVESGGGLVQAGGSLRLSCAASGRTFSMGWFRQAPGKEREFVAAITYSGGSPYYADSVKGRFTISRDNAKNTVYLQMNSLKPEDTAVYYCAANPTYGSDWNAENWGQGTQVTVSSGSGGGGSGGGGSGGGGSFEQVQLQQPGAELVKPGASVKMSCKASGYAFSSYWINWMKQKPGQGLEWIGQIYPGDGDTNYNGKFKGRATLTADTSSSTAYMQLSSLTSEDSAVYFCARSITTVVGCAMDYWGQGTSVTVSSTREQKLISEEDGSGIQNPDPAVYQLRDSKSSDKSVCLFTDFDSQTNVSQSKDSDVYITDKTVLDMRSMDFKSNSAVAWSNKSDFACANAFNNSIIPEDTFFPSPESSCGTQSFGLLDPKLCYLLDGILFIYGVILTALFLRSKRSRLLHSDYMNMTPRRPGPTRKHYQPYAPPRDFAAYRSRVKFSRSADAPAYQQGQNQLYNELNLGRREEYDVLDKRRGRDPEMGGKPQRRKNPQEGLYNELQKDKMAEAYSEIGMKGERRRGKGHDGLYQGLSTATKDTYDALHMQALPPR

SEQ ID NO: 17131 - protein, 1459 aa, Artificial Sequence
  Synthetic Polypeptide
MALPVTALLLPLALLLHAARPEVQLLESGGGLVQPGGSLRLSCAASGFTFSSYAMSWVRQAPGKGLEWVSSISGSGDYIYYADSVKGRFTISRDISKNTLYLQMNSLRAEDTAVYYCAKEGTGANSSLADYRGQGTLVTVSSGGGSGGGSEVQVLESGGGLVQPGGSLRLSCAASGFTFSNFAMSWVRQAPGKGLEWVSTISGSAGTTDYADSVKGRFTISRDNSKKTLYLQMNSLRVEDTAVYYCADGRGPFFDYRGQGTLVTVSSGTGGGGSGGGGSGGGGSEFDIQMTQSPSSLSASVGDRVTITCKASDHINNWLAWYQQKPGQAPKLLIYGATTLETGVPSRFSGSGSGTDYTLTISSLQPEDFATYYCQQSWNTPWTFGQGTKLEIKRLEGKPIPNPLLGLDSTGSGEDLKNVFPPEVAVFEPSEAEISHTQKATLVCLATGFYPDHVELSWWVNGKEVHSGVSTDPQPLKEQPALNDSRYCLSSRLRVSATFWQNPRNHFRCQVQFYGLSENDEWTQDRAKPVTQIVSAEAWGRADCGSQSFGLLDPKLCYLLDGILFIYGVILTALFLRSKRSRLLHSDYMNMTPRRPGPTRKHYQPYAPPRDFAAYRSRVKFSRSADAPAYQQGQNQLYNELNLGRREEYDVLDKRRGRDPEMGGKPQRRKNPQEGLYNELQKDKMAEAYSEIGMKGERRRGKGHDGLYQGLSTATKDTYDALHMQALPPRRAKRSGSGATNFSLLKQAGDVEENPGPTSMDWIWRILFLVGAATGAHSQLQLQESGPGLVKPSETLSLTCTVSGGSISSGDYYWGWIRQPPGKGLEWIGSISYSGSTYYNPSLKSRVTISVDTSRNQFSLKLSSVTAADTAVYYCTREDSSNWRSRGQGTLVTVSSSGGGGSGGGGSEVQLVESGGGLVQAGGSLRLSCAASGRTFSMGWFRQAPGKEREFVAAITYSGGSPYYADSVKGRFTISRDNAKNTVYLQMNSLKPEDTAVYYCAANPTYGSDWNAENWGQGTQVTVSSGSGGGGSGGGGSGGGGSFEQVQLQQPGAELVKPGASVKMSCKASGYAFSSYWINWMKQKPGQGLEWIGQIYPGDGDTNYNGKFKGRATLTADTSSSTAYMQLSSLTSEDSAVYFCARSITTVVGCAMDYWGQGTSVTVSSTREQKLISEEDGSGIQNPDPAVYQLRDSKSSDKSVCLFTDFDSQTNVSQSKDSDVYITDKTVLDMRSMDFKSNSAVAWSNKSDFACANAFNNSIIPEDTFFPSPESSCGTQSFGLLDPKLCYLLDGILFIYGVILTALFLRSKRSRLLHSDYMNMTPRRPGPTRKHYQPYAPPRDFAAYRSRVKFSRSADAPAYQQGQNQLYNELNLGRREEYDVLDKRRGRDPEMGGKPQRRKNPQEGLYNELQKDKMAEAYSEIGMKGERRRGKGHDGLYQGLSTATKDTYDALHMQALPPR

SEQ ID NO: 17132 - protein, 1420 aa, Artificial Sequence
  Synthetic Polypeptide
MALPVTALLLPLALLLHAARPEVQLLESGGGLVQPGGSLRLSCAASGFTFSSYAMSWVRQAPGKGLEWVSSISGSGDYIYYADSVKGRFTISRDISKNTLYLQMNSLRAEDTAVYYCAKEGTGANSSLADYRGQGTLVTVSSGGGSGGGSEVQVLESGGGLVQPGGSLRLSCAASGFTFSNFAMSWVRQAPGKGLEWVSTISGSAGTTDYADSVKGRFTISRDNSKKTLYLQMNSLRVEDTAVYYCADGRGPFFDYRGQGTLVTVSSGTGGGGSGGGGSGGGGSEFDIQMTQSPSSLSASVGDRVTITCKASDHINNWLAWYQQKPGQAPKLLIYGATTLETGVPSRFSGSGSGTDYTLTISSLQPEDFATYYCQQSWNTPWTFGQGTKLEIKRLEGKPIPNPLLGLDSTGSGEDLKNVFPPEVAVFEPSEAEISHTQKATLVCLATGFYPDHVELSWWVNGKEVHSGVSTDPQPLKEQPALNDSRYCLSSRLRVSATFWQNPRNHFRCQVQFYGLSENDEWTQDRAKPVTQIVSAEAWGRADCGSQSFGLLDPKLCYLLDGILFIYGVILTALFLRVKFSRSADAPAYQQGQNQLYNELNLGRREEYDVLDKRRGRDPEMGGKPQRRKNPQEGLYNELQKDKMAEAYSEIGMKGERRRGKGHDGLYQGLSTATKDTYDALHMQALPPRRAKRSGSGATNFSLLKQAGDVEENPGPTSMDWIWRILFLVGAATGAHSQLQLQESGPGLVKPSETLSLTCTVSGGSISSGDYYWGWIRQPPGKGLEWIGSISYSGSTYYNPSLKSRVTISVDTSRNQFSLKLSSVTAADTAVYYCTREDSSNWRSRGQGTLVTVSSSGGGGSGGGGSEVQLVESGGGLVQAGGSLRLSCAASGRTFSMGWFRQAPGKEREFVAAITYSGGSPYYADSVKGRFTISRDNAKNTVYLQMNSLKPEDTAVYYCAANPTYGSDWNAENWGQGTQVTVSSGSGGGGSGGGGSGGGGSFEQVQLQQPGAELVKPGASVKMSCKASGYAFSSYWINWMKQKPGQGLEWIGQIYPGDGDTNYNGKFKGRATLTADTSSSTAYMQLSSLTSEDSAVYFCARSITTVVGCAMDYWGQGTSVTVSSTREQKLISEEDLGSGIQNPDPAVYQLRDSKSSDKSVCLFTDFDSQTNVSQSKDSDVYITDKTVLDMRSMDFKSNSAVAWSNKSDFACANAFNNSIIPEDTFFPSPESSCGTQSFGLLDPKLCYLLDGILFIYGVILTALFLKRGRKKLLYIFKQPFMRPVQTTQEEDGCSCRFPEEEEGGCELRVKFSRSADAPAYQQGQNQLYNELNLGRREEYDVLDKRRGRDPEMGGKPQRRKNPQEGLYNELQKDKMAEAYSEIGMKGERRRGKGHDGLYQGLSTATKDTYDALHMQALPPR

SEQ ID NO: 17133 - protein, 1462 aa, Artificial Sequence
  Synthetic Polypeptide
MALPVTALLLPLALLLHAARPEVQLLESGGGLVQPGGSLRLSCAASGFTFSSYAMSWVRQAPGKGLEWVSSISGSGDYIYYADSVKGRFTISRDISKNTLYLQMNSLRAEDTAVYYCAKEGTGANSSLADYRGQGTLVTVSSGGGSGGGSEVQVLESGGGLVQPGGSLRLSCAASGFTFSNFAMSWVRQAPGKGLEWVSTISGSAGTTDYADSVKGRFTISRDNSKKTLYLQMNSLRVEDTAVYYCADGRGPFFDYRGQGTLVTVSSGTGGGGSGGGGSGGGGSEFDIQMTQSPSSLSASVGDRVTITCKASDHINNWLAWYQQKPGQAPKLLIYGATTLETGVPSRFSGSGSGTDYTLTISSLQPEDFATYYCQQSWNTPWTFGQGTKLEIKRLEGKPIPNPLLGLDSTGSGEDLKNVFPPEVAVFEPSEAEISHTQKATLVCLATGFYPDHVELSWWVNGKEVHSGVSTDPQPLKEQPALNDSRYCLSSRLRVSATFWQNPRNHFRCQVQFYGLSENDEWTQDRAKPVTQIVSAEAWGRADCGSQSFGLLDPKLCYLLDGILFIYGVILTALFLKRGRKKLLYIFKQPFMRPVQTTQEEDGCSCRFPEEEEGGCELRVKFSRSADAPAYQQGQNQLYNELNLGRREEYDVLDKRRGRDPEMGGKPQRRKNPQEGLYNELQKDKMAEAYSEIGMKGERRRGKGHDGLYQGLSTATKDTYDALHMQALPPRRAKRSGSGATNFSLLKQAGDVEENPGPTSMDWIWRILFLVGAATGAHSQLQLQESGPGLVKPSETLSLTCTVSGGSISSGDYYWGWIRQPPGKGLEWIGSISYSGSTYYNPSLKSRVTISVDTSRNQFSLKLSSVTAADTAVYYCTREDSSNWRSRGQGTLVTVSSSGGGGSGGGGSEVQLVESGGGLVQAGGSLRLSCAASGRTFSMGWFRQAPGKEREFVAAITYSGGSPYYADSVKGRFTISRDNAKNTVYLQMNSLKPEDTAVYYCAANPTYGSDWNAENWGQGTQVTVSSGSGGGGSGGGGSGGGGSFEQVQLQQPGAELVKPGASVKMSCKASGYAFSSYWINWMKQKPGQGLEWIGQIYPGDGDTNYNGKFKGRATLTADTSSSTAYMQLSSLTSEDSAVYFCARSITTVVGCAMDYWGQGTSVTVSSTREQKLISEEDLGSGIQNPDPAVYQLRDSKSSDKSVCLFTDFDSQTNVSQSKDSDVYITDKTVLDMRSMDFKSNSAVAWSNKSDFACANAFNNSIIPEDTFFPSPESSCGTQSFGLLDPKLCYLLDGILFIYGVILTALFLKRGRKKLLYIFKQPFMRPVQTTQEEDGCSCRFPEEEEGGCELRVKFSRSADAPAYQQGQNQLYNELNLGRREEYDVLDKRRGRDPEMGGKPQRRKNPQEGLYNELQKDKMAEAYSEIGMKGERRRGKGHDGLYQGLSTATKDTYDALHMQALPPR

SEQ ID NO: 17134 - protein, 1352 aa, Artificial Sequence
  Synthetic Polypeptide
MALPVTALLLPLALLLHAARPEVQLLESGGGLVQPGGSLRLSCAASGFTFSSYAMSWVRQAPGKGLEWVSSISGSGDYIYYADSVKGRFTISRDISKNTLYLQMNSLRAEDTAVYYCAKEGTGANSSLADYRGQGTLVTVSSGGGSGGGSEVQVLESGGGLVQPGGSLRLSCAASGFTFSNFAMSWVRQAPGKGLEWVSTISGSAGTTDYADSVKGRFTISRDNSKKTLYLQMNSLRVEDTAVYYCADGRGPFFDYRGQGTLVTVSSGTGGGGSGGGGSGGGGSEFDIQMTQSPSSLSASVGDRVTITCKASDHINNWLAWYQQKPGQAPKLLIYGATTLETGVPSRFSGSGSGTDYTLTISSLQPEDFATYYCQQSWNTPWTFGQGTKLEIKRLEQSFGLLDPKLCYLLDGILFIYGVILTALFLRVKFSRSADAPAYQQGQNQLYNELNLGRREEYDVLDKRRGRDPEMGGKPQRRKNPQEGLYNELQKDKMAEAYSEIGMKGERRRGKGHDGLYQGLSTATKDTYDALHMQALPPRRAKRSGSGATNFSLLKQAGDVEENPGPTSMDWIWRILFLVGAATGAHSQLQLQESGPGLVKPSETLSLTCTVSGGSISSGDYYWGWIRQPPGKGLEWIGSISYSGSTYYNPSLKSRVTISVDTSRNQFSLKLSSVTAADTAVYYCTREDSSNWRSRGQGTLVTVSSSGGGGSGGGGSEVQLVESGGGLVQAGGSLRLSCAASGRTFSMGWFRQAPGKEREFVAAITYSGGSPYYADSVKGRFTISRDNAKNTVYLQMNSLKPEDTAVYYCAANPTYGSDWNAENWGQGTQVTVSSGSGGGGSGGGGSGGGGSFEQVQLQQPGAELVKPGASVKMSCKASGYAFSSYWINWMKQKPGQGLEWIGQIYPGDGDTNYNGKFKGRATLTADTSSSTAYMQLSSLTSEDSAVYFCARSITTVVGCAMDYWGQGTSVTVSSTRQSFGLLDPKLCYLLDGILFIYGVILTALFLRVKFSRSADAPAYQQGQNQLYNELNLGRREEYDVLDKRRGRDPEMGGKPQRRKNPQEGLYNELQKDKMAEAYSEIGMKGERRRGKGHDGLYQGLSTATKDTYDALHMQALPPRRAKRSGSGVKQTLNFDLLKLAGDVESNPGPSRGHMTEYKPTVRLATRDDVPRAVRTLAAAFADYPATRHTVDPDRHIERVTELQELFLTRVGLDIGKVWVADDGAAVAVWTTPESVEAGAVFAEIGPRMAELSGSRLAAQQQMEGLLAPHRPKEPAWFLATVGVSPDHQGKGLGSAVVLPGVEAAERAGVPAFLETSAPRNLPFYERLGFTVTADVEVPEGPRTWCMTRKPGA

SEQ ID NO: 17135 - protein, 1177 aa, Artificial Sequence
  Synthetic Polypeptide
MALPVTALLLPLALLLHAARPEVQLLESGGGLVQPGGSLRLSCAASGFTFSSYAMSWVRQAPGKGLEWVSSISGSGDYIYYADSVKGRFTISRDISKNTLYLQMNSLRAEDTAVYYCAKEGTGANSSLADYRGQGTLVTVSSGGGSGGGSEVQVLESGGGLVQPGGSLRLSCAASGFTFSNFAMSWVRQAPGKGLEWVSTISGSAGTTDYADSVKGRFTISRDNSKKTLYLQMNSLRVEDTAVYYCADGRGPFFDYRGQGTLVTVSSGTGGGGSGGGGSGGGGSEFDIQMTQSPSSLSASVGDRVTITCKASDHINNWLAWYQQKPGQAPKLLIYGATTLETGVPSRFSGSGSGTDYTLTISSLQPEDFATYYCQQSWNTPWTFGQGTKLEIKRLEGQPKANPTVTLFPPSSEELQANKATLVCLISDFYPGAVTVAWKADGSPVKAGVETTKPSKQSNNKYAASSYLSLTPEQWKSHRSYSCQVTHEGSTVEKTVAPTECSPIKTDVITMDPKDNCSKDANDTLLLQLTNTSAYYMYLLLLLKSVVYFAIITCCLLRRTAFCCNGEKSRAKRSGSGATNFSLLKQAGDVEENPGPTSMDWIWRILFLVGAATGAHSQLQLQESGPGLVKPSETLSLTCTVSGGSISSGDYYWGWIRQPPGKGLEWIGSISYSGSTYYNPSLKSRVTISVDTSRNQFSLKLSSVTAADTAVYYCTREDSSNWRSRGQGTLVTVSSSGGGGSGGGGSEVQLVESGGGLVQAGGSLRLSCAASGRTFSMGWFRQAPGKEREFVAAITYSGGSPYYADSVKGRFTISRDNAKNTVYLQMNSLKPEDTAVYYCAANPTYGSDWNAENWGQGTQVTVSSGSGGGGSGGGGSGGGGSFEQVQLQQPGAELVKPGASVKMSCKASGYAFSSYWINWMKQKPGQGLEWIGQIYPGDGDTNYNGKFKGRATLTADTSSSTAYMQLSSLTSEDSAVYFCARSITTVVGCAMDYWGQGTSVTVSSTRASTKGPSVFPLAPSSKSTSGGTAALGCLVKDYFPEPVTVSWNSGALTSGVHTFPAVLQSSGLYSLSSVVTVPSSSLGTQTYICNVNHKPSNTKVDKRVEPKSCEVKTDSTDHVKPKETENTKQPSKSCHKPKAIVHTEKVNMMSLTVLGLRMLFAKTVAVNFLLTAKLFFL

SEQ ID NO: 17136 - protein, 1155 aa, Artificial Sequence
  Synthetic Polypeptide
MALPVTALLLPLALLLHAARPEVQLLESGGGLVQPGGSLRLSCAASGFTFSSYAMSWVRQAPGKGLEWVSSISGSGDYIYYADSVKGRFTISRDISKNTLYLQMNSLRAEDTAVYYCAKEGTGANSSLADYRGQGTLVTVSSGGGSGGGSEVQVLESGGGLVQPGGSLRLSCAASGFTFSNFAMSWVRQAPGKGLEWVSTISGSAGTTDYADSVKGRFTISRDNSKKTLYLQMNSLRVEDTAVYYCADGRGPFFDYRGQGTLVTVSSGTGGGGSGGGGSGGGGSEFDIQMTQSPSSLSASVGDRVTITCKASDHINNWLAWYQQKPGQAPKLLIYGATTLETGVPSRFSGSGSGTDYTLTISSLQPEDFATYYCQQSWNTPWTFGQGTKLEIKRLEGQPKANPTVTLFPPSSEELQANKATLVCLISDFYPGAVTVAWKADGSPVKAGVETTKPSKQSNNKYAASSYLSLTPEQWKSHRSYSCQVTHEGSTVEKTVAPTECSGRADCGITSASYHQGVLSATILYEILLGKATLYAVLVSALVLMAMVKRKDSRGRAKRSGSGATNFSLLKQAGDVEENPGPTSMDWIWRILFLVGAATGAHSQLQLQESGPGLVKPSETLSLTCTVSGGSISSGDYYWGWIRQPPGKGLEWIGSISYSGSTYYNPSLKSRVTISVDTSRNQFSLKLSSVTAADTAVYYCTREDSSNWRSRGQGTLVTVSSSGGGGSGGGGSEVQLVESGGGLVQAGGSLRLSCAASGRTFSMGWFRQAPGKEREFVAAITYSGGSPYYADSVKGRFTISRDNAKNTVYLQMNSLKPEDTAVYYCAANPTYGSDWNAENWGQGTQVTVSSGSGGGGSGGGGSGGGGSFEQVQLQQPGAELVKPGASVKMSCKASGYAFSSYWINWMKQKPGQGLEWIGQIYPGDGDTNYNGKFKGRATLTADTSSSTAYMQLSSLTSEDSAVYFCARSITTVVGCAMDYWGQGTSVTVSSTRASTKGPSVFPLAPSSKSTSGGTAALGCLVKDYFPEPVTVSWNSGALTSGVHTFPAVLQSSGLYSLSSVVTVPSSSLGTQTYICNVNHKPSNTKVDKRVEPKSCIPEDTFFPSSDVPCDVKLVEKSFETDTNLNFQNLSVIGFRILLLKVAGFNLLMTLRLWSS

SEQ ID NO: 17137 - protein, 1155 aa, Artificial Sequence
  Synthetic Polypeptide
MALPVTALLLPLALLLHAARPEVQLLESGGGLVQPGGSLRLSCAASGFTFSSYAMSWVRQAPGKGLEWVSSISGSGDYIYYADSVKGRFTISRDISKNTLYLQMNSLRAEDTAVYYCAKEGTGANSSLADYRGQGTLVTVSSGGGSGGGSEVQVLESGGGLVQPGGSLRLSCAASGFTFSNFAMSWVRQAPGKGLEWVSTISGSAGTTDYADSVKGRFTISRDNSKKTLYLQMNSLRVEDTAVYYCADGRGPFFDYRGQGTLVTVSSGTGGGGSGGGGSGGGGSEFDIQMTQSPSSLSASVGDRVTITCKASDHINNWLAWYQQKPGQAPKLLIYGATTLETGVPSRFSGSGSGTDYTLTISSLQPEDFATYYCQQSWNTPWTFGQGTKLEIKRLEGQPKANPTVTLFPPSSEELQANKATLVCLISDFYPGAVTVAWKADGSPVKAGVETTKPSKQSNNKYAASSYLSLTPEQWKSHRSYSCQVTHEGSTVEKTVAPTECSGRADCGFTSESYQQGVLSATILYEILLGKATLYAVLVSALVLMAMVKRKDSRGRAKRSGSGATNFSLLKQAGDVEENPGPTSMDWIWRILFLVGAATGAHSQLQLQESGPGLVKPSETLSLTCTVSGGSISSGDYYWGWIRQPPGKGLEWIGSISYSGSTYYNPSLKSRVTISVDTSRNQFSLKLSSVTAADTAVYYCTREDSSNWRSRGQGTLVTVSSSGGGGSGGGGSEVQLVESGGGLVQAGGSLRLSCAASGRTFSMGWFRQAPGKEREFVAAITYSGGSPYYADSVKGRFTISRDNAKNTVYLQMNSLKPEDTAVYYCAANPTYGSDWNAENWGQGTQVTVSSGSGGGGSGGGGSGGGGSFEQVQLQQPGAELVKPGASVKMSCKASGYAFSSYWINWMKQKPGQGLEWIGQIYPGDGDTNYNGKFKGRATLTADTSSSTAYMQLSSLTSEDSAVYFCARSITTVVGCAMDYWGQGTSVTVSSTRASTKGPSVFPLAPSSKSTSGGTAALGCLVKDYFPEPVTVSWNSGALTSGVHTFPAVLQSSGLYSLSSVVTVPSSSLGTQTYICNVNHKPSNTKVDKRVEPKSCIPEDTFFPSPESSCDVKLVEKSFETDTNLNFQNLSVIGFRILLLKVAGFNLLMTLRLWSS

SEQ ID NO: 17138 - protein, 1121 aa, Artificial Sequence
  Synthetic Polypeptide
MALPVTALLLPLALLLHAARPEVQLLESGGGLVQPGGSLRLSCAASGFTFSSYAMSWVRQAPGKGLEWVSSISGSGDYIYYADSVKGRFTISRDISKNTLYLQMNSLRAEDTAVYYCAKEGTGANSSLADYRGQGTLVTVSSGGGSGGGSEVQVLESGGGLVQPGGSLRLSCAASGFTFSNFAMSWVRQAPGKGLEWVSTISGSAGTTDYADSVKGRFTISRDNSKKTLYLQMNSLRVEDTAVYYCADGRGPFFDYRGQGTLVTVSSLEGQPKANPTVTLFPPSSEELQANKATLVCLISDFYPGAVTVAWKADGSPVKAGVETTKPSKQSNNKYAASSYLSLTPEQWKSHRSYSCQVTHEGSTVEKTVAPTECSGRADCGFTSESYQQGVLSATILYEILLGKATLYAVLVSALVLMAMVKRKDSRGRAKRSGSGATNFSLLKQAGDVEENPGPTSMDWIWRILFLVGAATGAHSQLQLQESGPGLVKPSETLSLTCTVSGGSISSGDYYWGWIRQPPGKGLEWIGSISYSGSTYYNPSLKSRVTISVDTSRNQFSLKLSSVTAADTAVYYCTREDSSNWRSRGQGTLVTVSSSGGGGSGGGGSEVQLVESGGGLVQAGGSLRLSCAASGRTFSMGWFRQAPGKEREFVAAITYSGGSPYYADSVKGRFTISRDNAKNTVYLQMNSLKPEDTAVYYCAANPTYGSDWNAENWGQGTQVTVSSTRASTKGPSVFPLAPSSKSTSGGTAALGCLVKDYFPEPVTVSWNSGALTSGVHTFPAVLQSSGLYSLSSVVTVPSSSLGTQTYICNVNHKPSNTKVDKRVEPKSCIPEDTFFPSPESSCDVKLVEKSFETDTNLNFQNLSVIGFRILLLKVAGFNLLMTLRLWSSRAKRSGSGVKQTLNFDLLKLAGDVESNPGPSRGHMTEYKPTVRLATRDDVPRAVRTLAAAFADYPATRHTVDPDRHIERVTELQELFLTRVGLDIGKVWVADDGAAVAVWTTPESVEAGAVFAEIGPRMAELSGSRLAAQQQMEGLLAPHRPKEPAWFLATVGVSPDHQGKGLGSAVVLPGVEAAERAGVPAFLETSAPRNLPFYERLGFTVTADVEVPEGPRTWCMTRKPGA

SEQ ID NO: 17139 - protein, 888 aa, Artificial Sequence
  Synthetic Polypeptide
MALPVTALLLPLALLLHAARPEVQLLESGGGLVQPGGSLRLSCAASGFTFSSYAMSWVRQAPGKGLEWVSSISGSGDYIYYADSVKGRFTISRDISKNTLYLQMNSLRAEDTAVYYCAKEGTGANSSLADYRGQGTLVTVSSGGGSGGGSEVQVLESGGGLVQPGGSLRLSCAASGFTFSNFAMSWVRQAPGKGLEWVSTISGSAGTTDYADSVKGRFTISRDNSKKTLYLQMNSLRVEDTAVYYCADGRGPFFDYRGQGTLVTVSSLEGQPKANPTVTLFPPSSEELQANKATLVCLISDFYPGAVTVAWKADGSPVKAGVETTKPSKQSNNKYAASSYLSLTPEQWKSHRSYSCQVTHEGSTVEKTVAPTECSGRADCGFTSESYQQGVLSATILYEILLGKATLYAVLVSALVLMAMVKRKDSRGRAKRSGSGATNFSLLKQAGDVEENPGPTSMDWIWRILFLVGAATGAHSQLQLQESGPGLVKPSETLSLTCTVSGGSISSGDYYWGWIRQPPGKGLEWIGSISYSGSTYYNPSLKSRVTISVDTSRNQFSLKLSSVTAADTAVYYCTREDSSNWRSRGQGTLVTVSSSGGGGSGGGGSEVQLVESGGGLVQAGGSLRLSCAASGRTFSMGWFRQAPGKEREFVAAITYSGGSPYYADSVKGRFTISRDNAKNTVYLQMNSLKPEDTAVYYCAANPTYGSDWNAENWGQGTQVTVSSTRASTKGPSVFPLAPSSKSTSGGTAALGCLVKDYFPEPVTVSWNSGALTSGVHTFPAVLQSSGLYSLSSVVTVPSSSLGTQTYICNVNHKPSNTKVDKRVEPKSCIPEDTFFPSPESSCDVKLVEKSFETDTNLNFQNLSVIGFRILLLKVAGFNLLMTLRLWSS

SEQ ID NO: 17140 - protein, 916 aa, Artificial Sequence
  Synthetic Polypeptide
MALPVTALLLPLALLLHAARPEVQLLESGGGLVQPGGSLRLSCAASGFTFSSYAMSWVRQAPGKGLEWVSSISGSGDYIYYADSVKGRFTISRDISKNTLYLQMNSLRAEDTAVYYCAKEGTGANSSLADYRGQGTLVTVSSGGGSGGGSEVQVLESGGGLVQPGGSLRLSCAASGFTFSNFAMSWVRQAPGKGLEWVSTISGSAGTTDYADSVKGRFTISRDNSKKTLYLQMNSLRVEDTAVYYCADGRGPFFDYRGQGTLVTVSSLEGSGRADCGFTSESYQQGVLSATILYEILLGKATLYAVLVSALVLMAMVKRKDSRGRAKRSGSGATNFSLLKQAGDVEENPGPTSMDWIWRILFLVGAATGAHSQLQLQESGPGLVKPSETLSLTCTVSGGSISSGDYYWGWIRQPPGKGLEWIGSISYSGSTYYNPSLKSRVTISVDTSRNQFSLKLSSVTAADTAVYYCTREDSSNWRSRGQGTLVTVSSSGGGGSGGGGSEVQLVESGGGLVQAGGSLRLSCAASGRTFSMGWFRQAPGKEREFVAAITYSGGSPYYADSVKGRFTISRDNAKNTVYLQMNSLKPEDTAVYYCAANPTYGSDWNAENWGQGTQVTVSSTRGSIPEDTFFPSPESSCDVKLVEKSFETDTNLNFQNLSVIGFRILLLKVAGFNLLMTLRLWSSRAKRSGSGVKQTLNFDLLKLAGDVESNPGPSRGHMTEYKPTVRLATRDDVPRAVRTLAAAFADYPATRHTVDPDRHIERVTELQELFLTRVGLDIGKVWVADDGAAVAVWTTPESVEAGAVFAEIGPRMAELSGSRLAAQQQMEGLLAPHRPKEPAWFLATVGVSPDHQGKGLGSAVVLPGVEAAERAGVPAFLETSAPRNLPFYERLGFTVTADVEVPEGPRTWCMTRKPGA

SEQ ID NO: 17141 - protein, 683 aa, Artificial Sequence
  Synthetic Polypeptide
MALPVTALLLPLALLLHAARPEVQLLESGGGLVQPGGSLRLSCAASGFTFSSYAMSWVRQAPGKGLEWVSSISGSGDYIYYADSVKGRFTISRDISKNTLYLQMNSLRAEDTAVYYCAKEGTGANSSLADYRGQGTLVTVSSGGGSGGGSEVQVLESGGGLVQPGGSLRLSCAASGFTFSNFAMSWVRQAPGKGLEWVSTISGSAGTTDYADSVKGRFTISRDNSKKTLYLQMNSLRVEDTAVYYCADGRGPFFDYRGQGTLVTVSSLEGSGRADCGFTSESYQQGVLSATILYEILLGKATLYAVLVSALVLMAMVKRKDSRGRAKRSGSGATNFSLLKQAGDVEENPGPTSMDWIWRILFLVGAATGAHSQLQLQESGPGLVKPSETLSLTCTVSGGSISSGDYYWGWIRQPPGKGLEWIGSISYSGSTYYNPSLKSRVTISVDTSRNQFSLKLSSVTAADTAVYYCTREDSSNWRSRGQGTLVTVSSSGGGGSGGGGSEVQLVESGGGLVQAGGSLRLSCAASGRTFSMGWFRQAPGKEREFVAAITYSGGSPYYADSVKGRFTISRDNAKNTVYLQMNSLKPEDTAVYYCAANPTYGSDWNAENWGQGTQVTVSSTRGSIPEDTFFPSPESSCDVKLVEKSFETDTNLNFQNLSVIGFRILLLKVAGFNLLMTLRLWSS

SEQ ID NO: 17142 - protein, 925 aa, Artificial Sequence
  Synthetic Polypeptide
MALPVTALLLPLALLLHAARPEVQLLESGGGLVQPGGSLRLSCAASGFTFSSYAMSWVRQAPGKGLEWVSSISGSGDYIYYADSVKGRFTISRDISKNTLYLQMNSLRAEDTAVYYCAKEGTGANSSLADYRGQGTLVTVSSGGGSGGGSEVQVLESGGGLVQPGGSLRLSCAASGFTFSNFAMSWVRQAPGKGLEWVSTISGSAGTTDYADSVKGRFTISRDNSKKTLYLQMNSLRVEDTAVYYCADGRGPFFDYRGQGTLVTVSSLEDKTHTCPPCPAGRADCGFTSESYQQGVLSATILYEILLGKATLYAVLVSALVLMAMVKRKDSRGRAKRSGSGATNFSLLKQAGDVEENPGPTSMDWIWRILFLVGAATGAHSQLQLQESGPGLVKPSETLSLTCTVSGGSISSGDYYWGWIRQPPGKGLEWIGSISYSGSTYYNPSLKSRVTISVDTSRNQFSLKLSSVTAADTAVYYCTREDSSNWRSRGQGTLVTVSSSGGGGSGGGGSEVQLVESGGGLVQAGGSLRLSCAASGRTFSMGWFRQAPGKEREFVAAITYSGGSPYYADSVKGRFTISRDNAKNTVYLQMNSLKPEDTAVYYCAANPTYGSDWNAENWGQGTQVTVSSTRGSIPEDTFFPSPESSCDVKLVEKSFETDTNLNFQNLSVIGFRILLLKVAGFNLLMTLRLWSSRAKRSGSGVKQTLNFDLLKLAGDVESNPGPSRGHMTEYKPTVRLATRDDVPRAVRTLAAAFADYPATRHTVDPDRHIERVTELQELFLTRVGLDIGKVWVADDGAAVAVWTTPESVEAGAVFAEIGPRMAELSGSRLAAQQQMEGLLAPHRPKEPAWFLATVGVSPDHQGKGLGSAVVLPGVEAAERAGVPAFLETSAPRNLPFYERLGFTVTADVEVPEGPRTWCMTRKPGA

SEQ ID NO: 17143 - protein, 925 aa, Artificial Sequence
  Synthetic Polypeptide
MALPVTALLLPLALLLHAARPEVQLLESGGGLVQPGGSLRLSCAASGFTFSSYAMSWVRQAPGKGLEWVSSISGSGDYIYYADSVKGRFTISRDISKNTLYLQMNSLRAEDTAVYYCAKEGTGANSSLADYRGQGTLVTVSSGGGSGGGSEVQVLESGGGLVQPGGSLRLSCAASGFTFSNFAMSWVRQAPGKGLEWVSTISGSAGTTDYADSVKGRFTISRDNSKKTLYLQMNSLRVEDTAVYYCADGRGPFFDYRGQGTLVTVSSLEGSGRADCGFTSESYQQGVLSATILYEILLGKATLYAVLVSALVLMAMVKRKDSRGRAKRSGSGATNFSLLKQAGDVEENPGPTSMDWIWRILFLVGAATGAHSQLQLQESGPGLVKPSETLSLTCTVSGGSISSGDYYWGWIRQPPGKGLEWIGSISYSGSTYYNPSLKSRVTISVDTSRNQFSLKLSSVTAADTAVYYCTREDSSNWRSRGQGTLVTVSSSGGGGSGGGGSEVQLVESGGGLVQAGGSLRLSCAASGRTFSMGWFRQAPGKEREFVAAITYSGGSPYYADSVKGRFTISRDNAKNTVYLQMNSLKPEDTAVYYCAANPTYGSDWNAENWGQGTQVTVSSTRDKTHTCPPCPAIPEDTFFPSPESSCDVKLVEKSFETDTNLNFQNLSVIGFRILLLKVAGFNLLMTLRLWSSRAKRSGSGVKQTLNFDLLKLAGDVESNPGPSRGHMTEYKPTVRLATRDDVPRAVRTLAAAFADYPATRHTVDPDRHIERVTELQELFLTRVGLDIGKVWVADDGAAVAVWTTPESVEAGAVFAEIGPRMAELSGSRLAAQQQMEGLLAPHRPKEPAWFLATVGVSPDHQGKGLGSAVVLPGVEAAERAGVPAFLETSAPRNLPFYERLGFTVTADVEVPEGPRTWCMTRKPGA

SEQ ID NO: 17144 - protein, 934 aa, Artificial Sequence
  Synthetic Polypeptide
MALPVTALLLPLALLLHAARPEVQLLESGGGLVQPGGSLRLSCAASGFTFSSYAMSWVRQAPGKGLEWVSSISGSGDYIYYADSVKGRFTISRDISKNTLYLQMNSLRAEDTAVYYCAKEGTGANSSLADYRGQGTLVTVSSGGGSGGGSEVQVLESGGGLVQPGGSLRLSCAASGFTFSNFAMSWVRQAPGKGLEWVSTISGSAGTTDYADSVKGRFTISRDNSKKTLYLQMNSLRVEDTAVYYCADGRGPFFDYRGQGTLVTVSSLEDKTHTCPPCPAGRADCGFTSESYQQGVLSATILYEILLGKATLYAVLVSALVLMAMVKRKDSRGRAKRSGSGATNFSLLKQAGDVEENPGPTSMDWIWRILFLVGAATGAHSQLQLQESGPGLVKPSETLSLTCTVSGGSISSGDYYWGWIRQPPGKGLEWIGSISYSGSTYYNPSLKSRVTISVDTSRNQFSLKLSSVTAADTAVYYCTREDSSNWRSRGQGTLVTVSSSGGGGSGGGGSEVQLVESGGGLVQAGGSLRLSCAASGRTFSMGWFRQAPGKEREFVAAITYSGGSPYYADSVKGRFTISRDNAKNTVYLQMNSLKPEDTAVYYCAANPTYGSDWNAENWGQGTQVTVSSTRDKTHTCPPCPAIPEDTFFPSPESSCDVKLVEKSFETDTNLNFQNLSVIGFRILLLKVAGFNLLMTLRLWSSRAKRSGSGVKQTLNFDLLKLAGDVESNPGPSRGHMTEYKPTVRLATRDDVPRAVRTLAAAFADYPATRHTVDPDRHIERVTELQELFLTRVGLDIGKVWVADDGAAVAVWTTPESVEAGAVFAEIGPRMAELSGSRLAAQQQMEGLLAPHRPKEPAWFLATVGVSPDHQGKGLGSAVVLPGVEAAERAGVPAFLETSAPRNLPFYERLGFTVTADVEVPEGPRTWCMTRKPGA

SEQ ID NO: 17145 - protein, 701 aa, Artificial Sequence
  Synthetic Polypeptide
MALPVTALLLPLALLLHAARPEVQLLESGGGLVQPGGSLRLSCAASGFTFSSYAMSWVRQAPGKGLEWVSSISGSGDYIYYADSVKGRFTISRDISKNTLYLQMNSLRAEDTAVYYCAKEGTGANSSLADYRGQGTLVTVSSGGGSGGGSEVQVLESGGGLVQPGGSLRLSCAASGFTFSNFAMSWVRQAPGKGLEWVSTISGSAGTTDYADSVKGRFTISRDNSKKTLYLQMNSLRVEDTAVYYCADGRGPFFDYRGQGTLVTVSSLEDKTHTCPPCPAGRADCGFTSESYQQGVLSATILYEILLGKATLYAVLVSALVLMAMVKRKDSRGRAKRSGSGATNFSLLKQAGDVEENPGPTSMDWIWRILFLVGAATGAHSQLQLQESGPGLVKPSETLSLTCTVSGGSISSGDYYWGWIRQPPGKGLEWIGSISYSGSTYYNPSLKSRVTISVDTSRNQFSLKLSSVTAADTAVYYCTREDSSNWRSRGQGTLVTVSSSGGGGSGGGGSEVQLVESGGGLVQAGGSLRLSCAASGRTFSMGWFRQAPGKEREFVAAITYSGGSPYYADSVKGRFTISRDNAKNTVYLQMNSLKPEDTAVYYCAANPTYGSDWNAENWGQGTQVTVSSTRDKTHTCPPCPAIPEDTFFPSPESSCDVKLVEKSFETDTNLNFQNLSVIGFRILLLKVAGFNLLMTLRLWSS

SEQ ID NO: 17146 - protein, 692 aa, Artificial Sequence
  Synthetic Polypeptide
MALPVTALLLPLALLLHAARPEVQLLESGGGLVQPGGSLRLSCAASGFTFSSYAMSWVRQAPGKGLEWVSSISGSGDYIYYADSVKGRFTISRDISKNTLYLQMNSLRAEDTAVYYCAKEGTGANSSLADYRGQGTLVTVSSGGGSGGGSEVQVLESGGGLVQPGGSLRLSCAASGFTFSNFAMSWVRQAPGKGLEWVSTISGSAGTTDYADSVKGRFTISRDNSKKTLYLQMNSLRVEDTAVYYCADGRGPFFDYRGQGTLVTVSSLEGSGRADCGFTSESYQQGVLSATILYEILLGKATLYAVLVSALVLMAMVKRKDSRGRAKRSGSGATNFSLLKQAGDVEENPGPTSMDWIWRILFLVGAATGAHSQLQLQESGPGLVKPSETLSLTCTVSGGSISSGDYYWGWIRQPPGKGLEWIGSISYSGSTYYNPSLKSRVTISVDTSRNQFSLKLSSVTAADTAVYYCTREDSSNWRSRGQGTLVTVSSSGGGGSGGGGSEVQLVESGGGLVQAGGSLRLSCAASGRTFSMGWFRQAPGKEREFVAAITYSGGSPYYADSVKGRFTISRDNAKNTVYLQMNSLKPEDTAVYYCAANPTYGSDWNAENWGQGTQVTVSSTRDKTHTCPPCPAIPEDTFFPSPESSCDVKLVEKSFETDTNLNFQNLSVIGFRILLLKVAGFNLLMTLRLWSS

SEQ ID NO: 17147 - protein, 1143 aa, Artificial Sequence
  Synthetic Polypeptide
MALPVTALLLPLALLLHAARPEVQLLESGGGLVQPGGSLRLSCAASGFTFSSYAMSWVRQAPGKGLEWVSSISGSGDYIYYADSVKGRFTISRDISKNTLYLQMNSLRAEDTAVYYCAKEGTGANSSLADYRGQGTLVTVSSGGGSGGGSEVQVLESGGGLVQPGGSLRLSCAASGFTFSNFAMSWVRQAPGKGLEWVSTISGSAGTTDYADSVKGRFTISRDNSKKTLYLQMNSLRVEDTAVYYCADGRGPFFDYRGQGTLVTVSSLEGQPKANPTVTLFPPSSEELQANKATLVCLISDFYPGAVTVAWKADGSPVKAGVETTKPSKQSNNKYAASSYLSLTPEQWKSHRSYSCQVTHEGSTVEKTVAPTECSPIKTDVITMDPKDNCSKDANDTLLLQLTNTSAYYMYLLLLLKSVVYFAIITCCLLRRTAFCCNGEKSRAKRSGSGATNFSLLKQAGDVEENPGPTSMDWIWRILFLVGAATGAHSQLQLQESGPGLVKPSETLSLTCTVSGGSISSGDYYWGWIRQPPGKGLEWIGSISYSGSTYYNPSLKSRVTISVDTSRNQFSLKLSSVTAADTAVYYCTREDSSNWRSRGQGTLVTVSSSGGGGSGGGGSEVQLVESGGGLVQAGGSLRLSCAASGRTFSMGWFRQAPGKEREFVAAITYSGGSPYYADSVKGRFTISRDNAKNTVYLQMNSLKPEDTAVYYCAANPTYGSDWNAENWGQGTQVTVSSTRASTKGPSVFPLAPSSKSTSGGTAALGCLVKDYFPEPVTVSWNSGALTSGVHTFPAVLQSSGLYSLSSVVTVPSSSLGTQTYICNVNHKPSNTKVDKRVEPKSCEVKTDSTDHVKPKETENTKQPSKSCHKPKAIVHTEKVNMMSLTVLGLRMLFAKTVAVNFLLTAKLFFLRAKRSGSGVKQTLNFDLLKLAGDVESNPGPSRGHMTEYKPTVRLATRDDVPRAVRTLAAAFADYPATRHTVDPDRHIERVTELQELFLTRVGLDIGKVWVADDGAAVAVWTTPESVEAGAVFAEIGPRMAELSGSRLAAQQQMEGLLAPHRPKEPAWFLATVGVSPDHQGKGLGSAVVLPGVEAAERAGVPAFLETSAPRNLPFYERLGFTVTADVEVPEGPRTWCMTRKPGA

SEQ ID NO: 17148 - protein, 910 aa, Artificial Sequence
  Synthetic Polypeptide
MALPVTALLLPLALLLHAARPEVQLLESGGGLVQPGGSLRLSCAASGFTFSSYAMSWVRQAPGKGLEWVSSISGSGDYIYYADSVKGRFTISRDISKNTLYLQMNSLRAEDTAVYYCAKEGTGANSSLADYRGQGTLVTVSSGGGSGGGSEVQVLESGGGLVQPGGSLRLSCAASGFTFSNFAMSWVRQAPGKGLEWVSTISGSAGTTDYADSVKGRFTISRDNSKKTLYLQMNSLRVEDTAVYYCADGRGPFFDYRGQGTLVTVSSLEGQPKANPTVTLFPPSSEELQANKATLVCLISDFYPGAVTVAWKADGSPVKAGVETTKPSKQSNNKYAASSYLSLTPEQWKSHRSYSCQVTHEGSTVEKTVAPTECSPIKTDVITMDPKDNCSKDANDTLLLQLTNTSAYYMYLLLLLKSVVYFAIITCCLLRRTAFCCNGEKSRAKRSGSGATNFSLLKQAGDVEENPGPTSMDWIWRILFLVGAATGAHSQLQLQESGPGLVKPSETLSLTCTVSGGSISSGDYYWGWIRQPPGKGLEWIGSISYSGSTYYNPSLKSRVTISVDTSRNQFSLKLSSVTAADTAVYYCTREDSSNWRSRGQGTLVTVSSSGGGGSGGGGSEVQLVESGGGLVQAGGSLRLSCAASGRTFSMGWFRQAPGKEREFVAAITYSGGSPYYADSVKGRFTISRDNAKNTVYLQMNSLKPEDTAVYYCAANPTYGSDWNAENWGQGTQVTVSSTRASTKGPSVFPLAPSSKSTSGGTAALGCLVKDYFPEPVTVSWNSGALTSGVHTFPAVLQSSGLYSLSSVVTVPSSSLGTQTYICNVNHKPSNTKVDKRVEPKSCEVKTDSTDHVKPKETENTKQPSKSCHKPKAIVHTEKVNMMSLTVLGLRMLFAKTVAVNFLLTAKLFFL

SEQ ID NO: 17149 - protein, 938 aa, Artificial Sequence
  Synthetic Polypeptide
MALPVTALLLPLALLLHAARPEVQLLESGGGLVQPGGSLRLSCAASGFTFSSYAMSWVRQAPGKGLEWVSSISGSGDYIYYADSVKGRFTISRDISKNTLYLQMNSLRAEDTAVYYCAKEGTGANSSLADYRGQGTLVTVSSGGGSGGGSEVQVLESGGGLVQPGGSLRLSCAASGFTFSNFAMSWVRQAPGKGLEWVSTISGSAGTTDYADSVKGRFTISRDNSKKTLYLQMNSLRVEDTAVYYCADGRGPFFDYRGQGTLVTVSSLEGSPIKTDVITMDPKDNCSKDANDTLLLQLTNTSAYYMYLLLLLKSVVYFAIITCCLLRRTAFCCNGEKSRAKRSGSGATNFSLLKQAGDVEENPGPTSMDWIWRILFLVGAATGAHSQLQLQESGPGLVKPSETLSLTCTVSGGSISSGDYYWGWIRQPPGKGLEWIGSISYSGSTYYNPSLKSRVTISVDTSRNQFSLKLSSVTAADTAVYYCTREDSSNWRSRGQGTLVTVSSSGGGGSGGGGSEVQLVESGGGLVQAGGSLRLSCAASGRTFSMGWFRQAPGKEREFVAAITYSGGSPYYADSVKGRFTISRDNAKNTVYLQMNSLKPEDTAVYYCAANPTYGSDWNAENWGQGTQVTVSSTRGSEVKTDSTDHVKPKETENTKQPSKSCHKPKAIVHTEKVNMMSLTVLGLRMLFAKTVAVNFLLTAKLFFLRAKRSGSGVKQTLNFDLLKLAGDVESNPGPSRGHMTEYKPTVRLATRDDVPRAVRTLAAAFADYPATRHTVDPDRHIERVTELQELFLTRVGLDIGKVWVADDGAAVAVWTTPESVEAGAVFAEIGPRMAELSGSRLAAQQQMEGLLAPHRPKEPAWFLATVGVSPDHQGKGLGSAVVLPGVEAAERAGVPAFLETSAPRNLPFYERLGFTVTADVEVPEGPRTWCMTRKPGA

SEQ ID NO: 17150 - protein, 705 aa, Artificial Sequence
  Synthetic Polypeptide
MALPVTALLLPLALLLHAARPEVQLLESGGGLVQPGGSLRLSCAASGFTFSSYAMSWVRQAPGKGLEWVSSISGSGDYIYYADSVKGRFTISRDISKNTLYLQMNSLRAEDTAVYYCAKEGTGANSSLADYRGQGTLVTVSSGGGSGGGSEVQVLESGGGLVQPGGSLRLSCAASGFTFSNFAMSWVRQAPGKGLEWVSTISGSAGTTDYADSVKGRFTISRDNSKKTLYLQMNSLRVEDTAVYYCADGRGPFFDYRGQGTLVTVSSLEGSPIKTDVITMDPKDNCSKDANDTLLLQLTNTSAYYMYLLLLLKSVVYFAIITCCLLRRTAFCCNGEKSRAKRSGSGATNFSLLKQAGDVEENPGPTSMDWIWRILFLVGAATGAHSQLQLQESGPGLVKPSETLSLTCTVSGGSISSGDYYWGWIRQPPGKGLEWIGSISYSGSTYYNPSLKSRVTISVDTSRNQFSLKLSSVTAADTAVYYCTREDSSNWRSRGQGTLVTVSSSGGGGSGGGGSEVQLVESGGGLVQAGGSLRLSCAASGRTFSMGWFRQAPGKEREFVAAITYSGGSPYYADSVKGRFTISRDNAKNTVYLQMNSLKPEDTAVYYCAANPTYGSDWNAENWGQGTQVTVSSTRGSEVKTDSTDHVKPKETENTKQPSKSCHKPKAIVHTEKVNMMSLTVLGLRMLFAKTVAVNFLLTAKLFFL

SEQ ID NO: 17151 - protein, 723 aa, Artificial Sequence
  Synthetic Polypeptide
MALPVTALLLPLALLLHAARPEVQLLESGGGLVQPGGSLRLSCAASGFTFSSYAMSWVRQAPGKGLEWVSSISGSGDYIYYADSVKGRFTISRDISKNTLYLQMNSLRAEDTAVYYCAKEGTGANSSLADYRGQGTLVTVSSGGGSGGGSEVQVLESGGGLVQPGGSLRLSCAASGFTFSNFAMSWVRQAPGKGLEWVSTISGSAGTTDYADSVKGRFTISRDNSKKTLYLQMNSLRVEDTAVYYCADGRGPFFDYRGQGTLVTVSSLEDKTHTCPPCPAPIKTDVITMDPKDNCSKDANDTLLLQLTNTSAYYMYLLLLLKSVVYFAIITCCLLRRTAFCCNGEKSRAKRSGSGATNFSLLKQAGDVEENPGPTSMDWIWRILFLVGAATGAHSQLQLQESGPGLVKPSETLSLTCTVSGGSISSGDYYWGWIRQPPGKGLEWIGSISYSGSTYYNPSLKSRVTISVDTSRNQFSLKLSSVTAADTAVYYCTREDSSNWRSRGQGTLVTVSSSGGGGSGGGGSEVQLVESGGGLVQAGGSLRLSCAASGRTFSMGWFRQAPGKEREFVAAITYSGGSPYYADSVKGRFTISRDNAKNTVYLQMNSLKPEDTAVYYCAANPTYGSDWNAENWGQGTQVTVSSTRDKTHTCPPCPAEVKTDSTDHVKPKETENTKQPSKSCHKPKAIVHTEKVNMMSLTVLGLRMLFAKTVAVNFLLTAKLFFL

SEQ ID NO: 17152 - protein, 431 aa, Artificial Sequence
  Synthetic Polypeptide
MDWIWRILFLVGAATGAHSQLQLQESGPGLVKPSETLSLTCTVSGGSISSGDYYWGWIRQPPGKGLEWIGSISYSGSTYYNPSLKSRVTISVDTSRNQFSLKLSSVTAADTAVYYCTREDSSNWRSRGQGTLVTVSSSGGGGSGGGGSEVQLVESGGGLVQAGGSLRLSCAASGRTFSMGWFRQAPGKEREFVAAITYSGGSPYYADSVKGRFTISRDNAKNTVYLQMNSLKPEDTAVYYCAANPTYGSDWNAENWGQGTQVTVSSTRASTKGPSVFPLAPSSKSTSGGTAALGCLVKDYFPEPVTVSWNSGALTSGVHTFPAVLQSSGLYSLSSVVTVPSSSLGTQTYICNVNHKPSNTKVDKRVEPKSCIPEDTFFPSPESSCDVKLVEKSFETDTNLNFQNLSVIGFRILLLKVAGFNLLMTLRLWSS

SEQ ID NO: 17153 - protein, 439 aa, Artificial Sequence
  Synthetic Polypeptide
MDWIWRILFLVGAATGAHSQLQLQESGPGLVKPSETLSLTCTVSGGSISSGDYYWGWIRQPPGKGLEWIGSISYSGSTYYNPSLKSRVTISVDTSRNQFSLKLSSVTAADTAVYYCTREDSSNWRSRGQGTLVTVSSSGGGGSGGGGSEVQLVESGGGLVQAGGSLRLSCAASGRTFSMGWFRQAPGKEREFVAAITYSGGSPYYADSVKGRFTISRDNAKNTVYLQMNSLKPEDTAVYYCAANPTYGSDWNAENWGQGTQVTVSSTRASTKGPSVFPLAPSSKSTSGGTAALGCLVKDYFPEPVTVSWNSGALTSGVHTFPAVLQSSGLYSLSSVVTVPSSSLGTQTYICNVNHKPSNTKVDKRVEPKSCEVKTDSTDHVKPKETENTKQPSKSCHKPKAIVHTEKVNMMSLTVLGLRMLFAKTVAVNFLLTAKLFFL

SEQ ID NO: 17154 - protein, 736 aa, Artificial Sequence
  Synthetic Polypeptide
MALPVTALLLPLALLLHAARPQLQLQESGPGLVKPSETLSLTCTVSGDSISSGDYYWGWIRQPPGKGLEWIGHIYYSGVTYYNPSLKSRVTISVDTSRNQFSLKLSSVTAADTAVYYCTREDSSNWRSRGQGTLVTVSSLESGGGGSFEVQLVESGGGVVQPGRSLRLSCAASGFSFSGYGMHWVRQAPGKGLEWVAYISYDGSNKYYADSVKGRFTISRDNSKNTLYLQMNSLRAEDTAVYYCAKDPAWGLRLGESSSYDFDIWGQGTMVTVSSTREQKLISEEDLAKPTTTPAPRPPTPAPTIASQPLSLRPEACRPAAGGAVHTRGLDFACDIYIWAPLAGTCGVLLLSLVITLYCKRGRKKLLYIFKQPFMRPVQTTQEEDGCSCRFPEEEEGGCELRVKFSRSADAPAYQQGQNQLYNELNLGRREEYDVLDKRRGRDPEMGGKPRRKNPQEGLYNELQKDKMAEAYSEIGMKGERRRGKGHDGLYQGLSTATKDTYDALHMQALPPRSSGSGEGRGSLLTCGDVEENPGPHMTEYKPTVRLATRDDVPRAVRTLAAAFADYPATRHTVDPDRHIERVTELQELFLTRVGLDIGKVWVADDGAAVAVWTTPESVEAGAVFAEIGPRMAELSGSRLAAQQQMEGLLAPHRPKEPAWFLATVGVSPDHQGKGLGSAVVLPGVEAAERAGVPAFLETSAPRNLPFYERLGFTVTADVEVPEGPRTWCMTRKPGA

SEQ ID NO: 17155 - protein, 730 aa, Artificial Sequence
  Synthetic Polypeptide
MALPVTALLLPLALLLHAARPQLQLQESGPGLVKPSETLSLTCTVSGDSISSGDYYWGWIRQPPGKGLEWIGHIYYSGVTYYNPSLKSRVTISVDTSRNQFSLKLSSVTAADTAVYYCTREDSSNWRSRGQGTLVTVSSLESGGGGSFEVQLVESGGGVVQPGRSLRLSCAASGFSFSGYGMHWVRQAPGKGLEWVAYISYDGSNKYYADSVKGRFTISRDNSKNTLYLQMNSLRAEDTAVYYCAKDPAWGLRLGESSSYDFDIWGQGTMVTVSSTREQKLISEEDLKIEVMYPPPYLDNEKSNGTIIHVKGKHLCPSPLFPGPSKPFWVLVVVGGVLACYSLLVTVAFIIFWVRSKRSRLLHSDYMNMTPRRPGPTRKHYQPYAPPRDFAAYRSRVKFSRSADAPAYQQGQNQLYNELNLGRREEYDVLDKRRGRDPEMGGKPRRKNPQEGLYNELQKDKMAEAYSEIGMKGERRRGKGHDGLYQGLSTATKDTYDALHMQALPPRSSGSGEGRGSLLTCGDVEENPGPHMTEYKPTVRLATRDDVPRAVRTLAAAFADYPATRHTVDPDRHIERVTELQELFLTRVGLDIGKVWVADDGAAVAVWTTPESVEAGAVFAEIGPRMAELSGSRLAAQQQMEGLLAPHRPKEPAWFLATVGVSPDHQGKGLGSAVVLPGVEAAERAGVPAFLETSAPRNLPFYERLGFTVTADVEVPEGPRTWCMTRKPGA

SEQ ID NO: 17156 - protein, 507 aa, Artificial Sequence
  Synthetic Polypeptide
MALPVTALLLPLALLLHAARPQLQLQESGPGLVKPSETLSLTCTVSGDSISSGDYYWGWIRQPPGKGLEWIGHIYYSGVTYYNPSLKSRVTISVDTSRNQFSLKLSSVTAADTAVYYCTREDSSNWRSRGQGTLVTVSSLESGGGGSFEVQLVESGGGVVQPGRSLRLSCAASGFSFSGYGMHWVRQAPGKGLEWVAYISYDGSNKYYADSVKGRFTISRDNSKNTLYLQMNSLRAEDTAVYYCAKDPAWGLRLGESSSYDFDIWGQGTMVTVSSTREQKLISEEDLKIEVMYPPPYLDNEKSNGTIIHVKGKHLCPSPLFPGPSKPFWVLVVVGGVLACYSLLVTVAFIIFWVRSKRSRLLHSDYMNMTPRRPGPTRKHYQPYAPPRDFAAYRSRVKFSRSADAPAYQQGQNQLYNELNLGRREEYDVLDKRRGRDPEMGGKPRRKNPQEGLYNELQKDKMAEAYSEIGMKGERRRGKGHDGLYQGLSTATKDTYDALHMQALPPR

SEQ ID NO: 17157 - protein, 513 aa, Artificial Sequence
  Synthetic Polypeptide
MALPVTALLLPLALLLHAARPQLQLQESGPGLVKPSETLSLTCTVSGDSISSGDYYWGWIRQPPGKGLEWIGHIYYSGVTYYNPSLKSRVTISVDTSRNQFSLKLSSVTAADTAVYYCTREDSSNWRSRGQGTLVTVSSLESGGGGSFEVQLVESGGGVVQPGRSLRLSCAASGFSFSGYGMHWVRQAPGKGLEWVAYISYDGSNKYYADSVKGRFTISRDNSKNTLYLQMNSLRAEDTAVYYCAKDPAWGLRLGESSSYDFDIWGQGTMVTVSSTREQKLISEEDLAKPTTTPAPRPPTPAPTIASQPLSLRPEACRPAAGGAVHTRGLDFACDIYIWAPLAGTCGVLLLSLVITLYCKRGRKKLLYIFKQPFMRPVQTTQEEDGCSCRFPEEEEGGCELRVKFSRSADAPAYQQGQNQLYNELNLGRREEYDVLDKRRGRDPEMGGKPRRKNPQEGLYNELQKDKMAEAYSEIGMKGERRRGKGHDGLYQGLSTATKDTYDALHMQALPPR

SEQ ID NO: 17158 - protein, 514 aa, Artificial Sequence
  Synthetic Polypeptide
MALPVTALLLPLALLLHAARPEVQLVESGGGVVQPGRSLRLSCAASGFSFSGYGMHWVRQAPGKGLEWVAYISYDGSNKYYADSVKGRFTISRDNSKNTLYLQMNSLRAEDTAVYYCAKDPAWGLRLGESSSYDFDIWGQGTMVTVSSLESGGGGSFEQLQLQESGPGLVKPSETLSLTCTVSGDSISSGDYYWGWIRQPPGKGLEWIGHIYYSGVTYYNPSLKSRVTISVDTSRNQFSLKLSSVTAADTAVYYCTREDSSNWRSRGQGTLVTVSSTREQKLISEEDLAKPTTTPAPRPPTPAPTIASQPLSLRPEACRPAAGGAVHTRGLDFACDIYIWAPLAGTCGVLLLSLVITLYCKRGRKKLLYIFKQPFMRPVQTTQEEDGCSCRFPEEEEGGCELRVKFSRSADAPAYQQGQNQLYNELNLGRREEYDVLDKRRGRDPEMGGKPRRKNPQEGLYNELQKDKMAEAYSEIGMKGERRRGKGHDGLYQGLSTATKDTYDALHMQALPPR

SEQ ID NO: 17159 - protein, 926 aa, Artificial Sequence
  Synthetic Polypeptide
MALPVTALLLPLALLLHAARPQLQLQESGPGLVKPSETLSLTCTVSGDSISSGDYYWGWIRQPPGKGLEWIGHIYYSGVTYYNPSLKSRVTISVDTSRNQFSLKLSSVTAADTAVYYCTREDSSNWRSRGQGTLVTVSSLESGGGGSFEVQLVESGGGVVQPGRSLRLSCAASGFSFSGYGMHWVRQAPGKGLEWVAYISYDGSNKYYADSVKGRFTISRDNSKNTLYLQMNSLRAEDTAVYYCAKDPAWGLRLGESSSYDFDIWGQGTMVTVSSTREQKLISEEDLAKPTTTPAPRPPTPAPTIASQPLSLRPEACRPAAGGAVHTRGLDFACDIYIWAPLAGTCGVLLLSLVITLYCGRARVKFSRSADAPAYQQGQNQLYNELNLGRREEYDVLDKRRGRDPEMGGKPRRKNPQEGLYNELQKDKMAEAYSEIGMKGERRRGKGHDGLYQGLSTATKDTYDALHMQALPPRSRGSGATNFSLLKQAGDVEENPGPGIHMATYEVLCEVARKLGTDDREVVLFLLNVFIPQPTLAQLIGALRALKEEGRLTFPLLAECLFRAGRRDLLRDLLHLDPRFLERHLAGTMSYFSPYQLTVLHVDGELCARDIRSLIFLSKDTIGSRSTPQTFLHWVYCMENLDLLGPTDVDALMSMLRSLSRVDLQRQVQTLMGLHLSGPSHSQHYRHTPLETDFYDYKDDDDKTSGSGEGRGSLLTCGDVEENPGPHMTEYKPTVRLATRDDVPRAVRTLAAAFADYPATRHTVDPDRHIERVTELQELFLTRVGLDIGKVWVADDGAAVAVWTTPESVEAGAVFAEIGPRMAELSGSRLAAQQQMEGLLAPHRPKEPAWFLATVGVSPDHQGKGLGSAVVLPGVEAAERAGVPAFLETSAPRNLPFYERLGFTVTADVEVPEGPRTWCMTRKPGA

SEQ ID NO: 17160 - protein, 871 aa, Artificial Sequence
  Synthetic Polypeptide
MALPVTALLLPLALLLHAARPQLQLQESGPGLVKPSETLSLTCTVSGDSISSGDYYWGWIRQPPGKGLEWIGHIYYSGVTYYNPSLKSRVTISVDTSRNQFSLKLSSVTAADTAVYYCTREDSSNWRSRGQGTLVTVSSLEIQNPDPAVYQLRDSKSSDKSVCLFTDFDSQTNVSQSKDSDVYITDKCVLDMRSMDFKSNSAVAWSNKSDFACANAFNNSIIPEDTFFPSSDVPCDVKLVEKSFETDTNLNFQNLSVIGFRILLLKVAGFNLLMTLRLWSSRAKRSGSGVKQTLNFDLLKLAGDVESNPGPTSMDWIWRILFLVGAATGAHSFEVQLVESGGGVVQPGRSLRLSCAASGFSFSGYGMHWVRQAPGKGLEWVAYISYDGSNKYYADSVKGRFTISRDNSKNTLYLQMNSLRAEDTAVYYCAKDPAWGLRLGESSSYDFDIWGQGTMVTVSSTREDLKNVFPPEVAVFEPSKAEIAHTQKATLVCLATGFYPDHVELSWWVNGKEVHSGVCTDPQPLKEQPALNDSRYCLSSRLRVSATFWQNPRNHFRCQVQFYGLSENDEWTQDRAKPVTQIVSAEAWGRADCGITSASYHQGVLSATILYEILLGKATLYAVLVSALVLMAMVKRKDSRGRAKRSGSGATNFSLLKQAGDVEENPGPSRGHMTEYKPTVRLATRDDVPRAVRTLAAAFADYPATRHTVDPDRHIERVTELQELFLTRVGLDIGKVWVADDGAAVAVWTTPESVEAGAVFAEIGPRMAELSGSRLAAQQQMEGLLAPHRPKEPAWFLATVGVSPDHQGKGLGSAVVLPGVEAAERAGVPAFLETSAPRNLPFYERLGFTVTADVEVPEGPRTWCMTRKPGA

SEQ ID NO: 17161 - protein, 870 aa, Artificial Sequence
  Synthetic Polypeptide
MALPVTALLLPLALLLHAARPQLQLQESGPGLVKPSETLSLTCTVSGDSISSGDYYWGWIRQPPGKGLEWIGHIYYSGVTYYNPSLKSRVTISVDTSRNQFSLKLSSVTAADTAVYYCTREDSSNWRSRGQGTLVTVSSLEDLKNVFPPEVAVFEPSKAEIAHTQKATLVCLATGFYPDHVELSWWVNGKEVHSGVCTDPQPLKEQPALNDSRYCLSSRLRVSATFWQNPRNHFRCQVQFYGLSENDEWTQDRAKPVTQIVSAEAWGRADCGITSASYHQGVLSATILYEILLGKATLYAVLVSALVLMAMVKRKDSRGRAKRSGSGATNFSLLKQAGDVEENPGPTSMDWIWRILFLVGAATGAHSFEVQLVESGGGVVQPGRSLRLSCAASGFSFSGYGMHWVRQAPGKGLEWVAYISYDGSNKYYADSVKGRFTISRDNSKNTLYLQMNSLRAEDTAVYYCAKDPAWGLRLGESSSYDFDIWGQGTMVTVSSTRIQNPDPAVYQLRDSKSSDKSVCLFTDFDSQTNVSQSKDSDVYITDKCVLDMRSMDFKSNSAVAWSNKSDFACANAFNNSIIPEDTFFPSSDVPCDVKLVEKSFETDTNLNFQNLSVIGFRILLLKVAGFNLLMTLRLWSSRAKRSGSGVKQTLNFDLLKLAGDVESNPGPSRGHMTEYKPTVRLATRDDVPRAVRTLAAAFADYPATRHTVDPDRHIERVTELQELFLTRVGLDIGKVWVADDGAAVAVWTTPESVEAGAVFAEIGPRMAELSGSRLAAQQQMEGLLAPHRPKEPAWFLATVGVSPDHQGKGLGSAVVLPGVEAAERAGVPAFLETSAPRNLPFYERLGFTVTADVEVPEGPRTWCMTRKPGA

SEQ ID NO: 17162 - protein, 637 aa, Artificial Sequence
  Synthetic Polypeptide
MALPVTALLLPLALLLHAARPQLQLQESGPGLVKPSETLSLTCTVSGDSISSGDYYWGWIRQPPGKGLEWIGHIYYSGVTYYNPSLKSRVTISVDTSRNQFSLKLSSVTAADTAVYYCTREDSSNWRSRGQGTLVTVSSLEDLKNVFPPEVAVFEPSEAEISHTQKATLVCLATGFYPDHVELSWWVNGKEVHSGVCTDPQPLKEQPALNDSRYCLSSRLRVSATFWQNPRNHFRCQVQFYGLSENDEWTQDRAKPVTQIVSAEAWGRADCGFTSESYQQGVLSATILYEILLGKATLYAVLVSALVLMAMVKRKDSRGRAKRSGSGATNFSLLKQAGDVEENPGPTSMDWIWRILFLVGAATGAHSFEVQLVESGGGVVQPGRSLRLSCAASGFSFSGYGMHWVRQAPGKGLEWVAYISYDGSNKYYADSVKGRFTISRDNSKNTLYLQMNSLRAEDTAVYYCAKDPAWGLRLGESSSYDFDIWGQGTMVTVSSTRIQNPDPAVYQLRDSKSSDKSVCLFTDFDSQTNVSQSKDSDVYITDKCVLDMRSMDFKSNSAVAWSNKSDFACANAFNNSIIPEDTFFPSPESSCDVKLVEKSFETDTNLNFQNLSVIGFRILLLKVAGFNLLMTLRLWSS

SEQ ID NO: 17163 - protein, 862 aa, Artificial Sequence
  Synthetic Polypeptide
MALPVTALLLPLALLLHAARPQLQLQESGPGLVKPSETLSLTCTVSGDSISSGDYYWGWIRQPPGKGLEWIGHIYYSGVTYYNPSLKSRVTISVDTSRNQFSLKLSSVTAADTAVYYCTREDSSNWRSRGQGTLVTVSSLEDLKNVFPPEVAVFEPSEAEISHTQKATLVCLATGFYPDHVELSWWVNGKEVHSGVCTDPQPLKEQPALNDSRYCLSSRLRVSATFWQNPRNHFRCQVQFYGLSENDEWTQDRAKPVTQIVSAEAWGRADCGFTSESYQQGVLSATILYEILLGKATLYAVLVSALVLMAMVKRKDSRGRAKRSGSGATNFSLLKQAGDVEENPGPTSMDWIWRILFLVGAATGAHSFEVQLVESGGGVVQPGRSLRLSCAASGFSFSGYGMHWVRQAPGKGLEWVAYISYDGSNKYYADSVKGRFTISRDNSKNTLYLQMNSLRAEDTAVYYCAKDPAWGLRLGESSSYDFDIWGQGTMVTVSSTRIQNPDPAVYQLRDSKSSDKSVCLFTDFDSQTNVSQSKDSDVYITDKCVLDMRSMDFKSNSAVAWSNKSDFACANAFNNSIIPEDTFFPSPESSCDVKLVEKSFETDTNLNFQNLSVIGFRILLLKVAGFNLLMTLRLWSSRAKRSGSGVKQTLNFDLLKLAGDVESNPGPSRGGIHTMATYEVLCEVARKLGTDDREVVLFLLNVFIPQPTLAQLIGALRALKEEGRLTFPLLAECLFRAGRRDLLRDLLHLDPRFLERHLAGTMSYFSPYQLTVLHVDGELCARDIRSLIFLSKDTIGSRSTPQTFLHWVYCMENLDLLGPTDVDALMSMLRSLSRVDLQRQVQTLMGLHLSGPSHSQHYRHTP

SEQ ID NO: 17164 - protein, 641 aa, Artificial Sequence
  Synthetic Polypeptide
MALPVTALLLPLALLLHAARPQLQLQESGPGLVKPSETLSLTCTVSGDSISSGDYYWGWIRQPPGKGLEWIGHIYYSGVTYYNPSLKSRVTISVDTSRNQFSLKLSSVTAADTAVYYCTREDSSNWRSRGQGTLVTVSSLEIQNPDPAVYQLRDSKSSDKSVCLFTDFDSQTNVSQSKDSDVYITDKCVLDMRSMDFKSNSAVAWSNKSDFACANAFNNSIIPEDTFFPSPESSCDVKLVEKSFETDTNLNFQNLSVIGFRILLLKVAGFNLLMTLRLWSSRAKRSGSGVKQTLNFDLLKLAGDVESNPGPTSMDWIWRILFLVGAATGAHSFEVQLVESGGGVVQPGRSLRLSCAASGFSFSGYGMHWVRQAPGKGLEWVAYISYDGSNKYYADSVKGRFTISRDNSKNTLYLQMNSLRAEDTAVYYCAKDPAWGLRLGESSSYDFDIWGQGTMVTVSSTREDLKNVFPPEVAVFEPSEAEISHTQKATLVCLATGFYPDHVELSWWVNGKEVHSGVCTDPQPLKEQPALNDSRYCLSSRLRVSATFWQNPRNHFRCQVQFYGLSENDEWTQDRAKPVTQIVSAEAWGRADCGFTSESYQQGVLSATILYEILLGKATLYAVLVSALVLMAMVKRKDSRG

SEQ ID NO: 17165 - protein, 863 aa, Artificial Sequence
  Synthetic Polypeptide
MALPVTALLLPLALLLHAARPQLQLQESGPGLVKPSETLSLTCTVSGDSISSGDYYWGWIRQPPGKGLEWIGHIYYSGVTYYNPSLKSRVTISVDTSRNQFSLKLSSVTAADTAVYYCTREDSSNWRSRGQGTLVTVSSLEIQNPDPAVYQLRDSKSSDKSVCLFTDFDSQTNVSQSKDSDVYITDKCVLDMRSMDFKSNSAVAWSNKSDFACANAFNNSIIPEDTFFPSPESSCDVKLVEKSFETDTNLNFQNLSVIGFRILLLKVAGFNLLMTLRLWSSRAKRSGSGVKQTLNFDLLKLAGDVESNPGPTSMDWIWRILFLVGAATGAHSFEVQLVESGGGVVQPGRSLRLSCAASGFSFSGYGMHWVRQAPGKGLEWVAYISYDGSNKYYADSVKGRFTISRDNSKNTLYLQMNSLRAEDTAVYYCAKDPAWGLRLGESSSYDFDIWGQGTMVTVSSTREDLKNVFPPEVAVFEPSEAEISHTQKATLVCLATGFYPDHVELSWWVNGKEVHSGVCTDPQPLKEQPALNDSRYCLSSRLRVSATFWQNPRNHFRCQVQFYGLSENDEWTQDRAKPVTQIVSAEAWGRADCGFTSESYQQGVLSATILYEILLGKATLYAVLVSALVLMAMVKRKDSRGRAKRSGSGATNFSLLKQAGDVEENPGPSRGGIHTMATYEVLCEVARKLGTDDREVVLFLLNVFIPQPTLAQLIGALRALKEEGRLTFPLLAECLFRAGRRDLLRDLLHLDPRFLERHLAGTMSYFSPYQLTVLHVDGELCARDIRSLIFLSKDTIGSRSTPQTFLHWVYCMENLDLLGPTDVDALMSMLRSLSRVDLQRQVQTLMGLHLSGPSHSQHYRHTP

SEQ ID NO: 17166 - protein, 910 aa, Artificial Sequence
  Synthetic Polypeptide
MALPVTALLLPLALLLHAARPLEGKPIPNPLLGLDSTGSGEDLKNVFPPEVAVFEPSKAEIAHTQKATLVCLATGFYPDHVELSWWVNGKEVHSGVCTDPQPLKEQPALNDSRYCLSSRLRVSATFWQNPRNHFRCQVQFYGLSENDEWTQDRAKPVTQIVSAEAWGRADCGITSASYHQGVLSATILYEILLGKATLYAVLVSALVLMAMVKRKDSRGRAKRSGSGATNFSLLKQAGDVEENPGPTSMALPVTALLLPLALLLHAARPQLQLQESGPGLVKPSETLSLTCTVSGDSISSGDYYWGWIRQPPGKGLEWIGHIYYSGVTYYNPSLKSRVTISVDTSRNQFSLKLSSVTAADTAVYYCTREDSSNWRSRGQGTLVTVSSLESGGGGSFEVQLVESGGGVVQPGRSLRLSCAASGFSFSGYGMHWVRQAPGKGLEWVAYISYDGSNKYYADSVKGRFTISRDNSKNTLYLQMNSLRAEDTAVYYCAKDPAWGLRLGESSSYDFDIWGQGTMVTVSSTREQKLISEEDGSGIQNPDPAVYQLRDSKSSDKSVCLFTDFDSQTNVSQSKDSDVYITDKCVLDMRSMDFKSNSAVAWSNKSDFACANAFNNSIIPEDTFFPSSDVPCDVKLVEKSFETDTNLNFQNLSVIGFRILLLKVAGFNLLMTLRLWSSRAKRSGSGVKQTLNFDLLKLAGDVESNPGPSRGHMTEYKPTVRLATRDDVPRAVRTLAAAFADYPATRHTVDPDRHIERVTELQELFLTRVGLDIGKVWVADDGAAVAVWTTPESVEAGAVFAEIGPRMAELSGSRLAAQQQMEGLLAPHRPKEPAWFLATVGVSPDHQGKGLGSAVVLPGVEAAERAGVPAFLETSAPRNLPFYERLGFTVTADVEVPEGPRTWCMTRKPGA

SEQ ID NO: 17167 - protein, 911 aa, Artificial Sequence
  Synthetic Polypeptide
MALPVTALLLPLALLLHAARPLEQKLISEEDLGSGDRPDPAVYQLRDSKSSDKSVCLFTDFDSQTNVSQSKDSDVYITDKCVLDMRSMDFKSNSAVAWSNKSDFACANAFNNSIIPEDTFFPSPESSCDVKLVEKSFETDTNLNFQNLSVIGFRILLLKVAGFNLLMTLRLWSSSSRAKRSGSGVKQTLNFDLLKLAGDVESNPGPTSMALPVTALLLPLALLLHAARPQLQLQESGPGLVKPSETLSLTCTVSGDSISSGDYYWGWIRQPPGKGLEWIGHIYYSGVTYYNPSLKSRVTISVDTSRNQFSLKLSSVTAADTAVYYCTREDSSNWRSRGQGTLVTVSSLESGGGGSFEVQLVESGGGVVQPGRSLRLSCAASGFSFSGYGMHWVRQAPGKGLEWVAYISYDGSNKYYADSVKGRFTISRDNSKNTLYLQMNSLRAEDTAVYYCAKDPAWGLRLGESSSYDFDIWGQGTMVTVSSTRGKPIPNPLLGLDSTGSGEDLKNVFPPEVAVFEPSEAEISHTQKATLVCLATGFYPDHVELSWWVNGKEVHSGVCTDPQPLKEQPALNDSRYCLSSRLRVSATFWQNPRNHFRCQVQFYGLSENDEWTQDRAKPVTQIVSAEAWGRADCGFTSESYQQGVLSATILYEILLGKATLYAVLVSALVLMAMVKRKDSRGRAKRSGSGATNFSLLKQAGDVEENPGPSRGHMTEYKPTVRLATRDDVPRAVRTLAAAFADYPATRHTVDPDRHIERVTELQELFLTRVGLDIGKVWVADDGAAVAVWTTPESVEAGAVFAEIGPRMAELSGSRLAAQQQMEGLLAPHRPKEPAWFLATVGVSPDHQGKGLGSAVVLPGVEAAERAGVPAFLETSAPRNLPFYERLGFTVTADVEVPEGPRTWCMTRKPGA

SEQ ID NO: 17168 - protein, 870 aa, Artificial Sequence
  Synthetic Polypeptide
MALPVTALLLPLALLLHAARPQLQLQESGPGLVKPSETLSLTCTVSGDSISSGDYYWGWIRQPPGKGLEWIGHIYYSGVTYYNPSLKSRVTISVDTSRNQFSLKLSSVTAADTAVYYCTREDSSNWRSRGQGTLVTVSSLEDLKNVFPPEVAVFEPSEAEISHTQKATLVCLATGFYPDHVELSWWVNGKEVHSGVSTDPQPLKEQPALNDSRYCLSSRLRVSATFWQNPRNHFRCQVQFYGLSENDEWTQDRAKPVTQIVSAEAWGRADCGFTSESYQQGVLSATILYEILLGKATLYAVLVSALVLMAMVKRKDSRGRAKRSGSGATNFSLLKQAGDVEENPGPTSMDWIWRILFLVGAATGAHSFEVQLVESGGGVVQPGRSLRLSCAASGFSFSGYGMHWVRQAPGKGLEWVAYISYDGSNKYYADSVKGRFTISRDNSKNTLYLQMNSLRAEDTAVYYCAKDPAWGLRLGESSSYDFDIWGQGTMVTVSSTRIQNPDPAVYQLRDSKSSDKSVCLFTDFDSQTNVSQSKDSDVYITDKTVLDMRSMDFKSNSAVAWSNKSDFACANAFNNSIIPEDTFFPSPESSCDVKLVEKSFETDTNLNFQNLSVIGFRILLLKVAGFNLLMTLRLWSSRAKRSGSGVKQTLNFDLLKLAGDVESNPGPSRGHMTEYKPTVRLATRDDVPRAVRTLAAAFADYPATRHTVDPDRHIERVTELQELFLTRVGLDIGKVWVADDGAAVAVWTTPESVEAGAVFAEIGPRMAELSGSRLAAQQQMEGLLAPHRPKEPAWFLATVGVSPDHQGKGLGSAVVLPGVEAAERAGVPAFLETSAPRNLPFYERLGFTVTADVEVPEGPRTWCMTRKPGA

SEQ ID NO: 17169 - protein, 952 aa, Artificial Sequence
  Synthetic Polypeptide
MALPVTALLLPLALLLHAARPQLQLQESGPGLVKPSETLSLTCTVSGDSISSGDYYWGWIRQPPGKGLEWIGHIYYSGVTYYNPSLKSRVTISVDTSRNQFSLKLSSVTAADTAVYYCTREDSSNWRSRGQGTLVTVSSLEDLKNVFPPEVAVFEPSEAEISHTQKATLVCLATGFYPDHVELSWWVNGKEVHSGVSTDPQPLKEQPALNDSRYCLSSRLRVSATFWQNPRNHFRCQVQFYGLSENDEWTQDRAKPVTQIVSAEAWGRADCGFTSESYQQGVLSATILYEILLGKATLYAVLVSALVLMAMVKRKDSRGRAKRSGSGATNFSLLKQAGDVEENPGPTSMDWIWRILFLVGAATGAHSFEVQLVESGGGVVQPGRSLRLSCAASGFSFSGYGMHWVRQAPGKGLEWVAYISYDGSNKYYADSVKGRFTISRDNSKNTLYLQMNSLRAEDTAVYYCAKDPAWGLRLGESSSYDFDIWGQGTMVTVSSTREQKLISEEDGSGTPFPSLAPPIMLLVDGKQQMVVVCLVLDVAPPGLDSPIWFSAGNGSALDAFTYGPSPATDGTWTNLAHLSLPSEELASWEPLVCHTGPGAEGHSRSTQPMHLSGEASTARTCPQEPLRGTPGGALWLGVLRLLLFKLLLFDLLLTCSCLCDPAGPLPSPATTTRLRALGSHRLHPATETGGREATSSPRPQPRDRRWGDTPPGRKPGSPVRAKRSGSGVKQTLNFDLLKLAGDVESNPGPSRGHMTEYKPTVRLATRDDVPRAVRTLAAAFADYPATRHTVDPDRHIERVTELQELFLTRVGLDIGKVWVADDGAAVAVWTTPESVEAGAVFAEIGPRMAELSGSRLAAQQQMEGLLAPHRPKEPAWFLATVGVSPDHQGKGLGSAVVLPGVEAAERAGVPAFLETSAPRNLPFYERLGFTVTADVEVPEGPRTWCMTRKPGA

SEQ ID NO: 17170 - protein, 965 aa, Artificial Sequence
  Synthetic Polypeptide
MALPVTALLLPLALLLHAARPLEDLKNVFPPEVAVFEPSEAEISHTQKATLVCLATGFYPDHVELSWWVNGKEVHSGVSTDPQPLKEQPALNDSRYCLSSRLRVSATFWQNPRNHFRCQVQFYGLSENDEWTQDRAKPVTQIVSAEAWGRADCGFTSESYQQGVLSATILYEILLGKATLYAVLVSALVLMAMVKRKDSRGRAKRSGSGATNFSLLKQAGDVEENPGPTSMALPVTALLLPLALLLHAARPQLQLQESGPGLVKPSETLSLTCTVSGDSISSGDYYWGWIRQPPGKGLEWIGHIYYSGVTYYNPSLKSRVTISVDTSRNQFSLKLSSVTAADTAVYYCTREDSSNWRSRGQGTLVTVSSLESGGGGSFEVQLVESGGGVVQPGRSLRLSCAASGFSFSGYGMHWVRQAPGKGLEWVAYISYDGSNKYYADSVKGRFTISRDNSKNTLYLQMNSLRAEDTAVYYCAKDPAWGLRLGESSSYDFDIWGQGTMVTVSSTREQKLISEEDLGSGTPFPSLAPPIMLLVDGKQQMVVVCLVLDVAPPGLDSPIWFSAGNGSALDAFTYGPSPATDGTWTNLAHLSLPSEELASWEPLVCHTGPGAEGHSRSTQPMHLSGEASTARTCPQEPLRGTPGGALWLGVLRLLLFKLLLFDLLLTCSCLCDPAGPLPSPATTTRLRALGSHRLHPATETGGREATSSPRPQPRDRRWGDTPPGRKPGSPVRAKRSGSGVKQTLNFDLLKLAGDVESNPGPSRSRGHMTEYKPTVRLATRDDVPRAVRTLAAAFADYPATRHTVDPDRHIERVTELQELFLTRVGLDIGKVWVADDGAAVAVWTTPESVEAGAVFAEIGPRMAELSGSRLAAQQQMEGLLAPHRPKEPAWFLATVGVSPDHQGKGLGSAVVLPGVEAAERAGVPAFLETSAPRNLPFYERLGFTVTADVEVPEGPRTWCMTRKPGA

SEQ ID NO: 17171 - protein, 907 aa, Artificial Sequence
  Synthetic Polypeptide
MALPVTALLLPLALLLHAARPQLQLQESGPGLVKPSETLSLTCTVSGDSISSGDYYWGWIRQPPGKGLEWIGHIYYSGVTYYNPSLKSRVTISVDTSRNQFSLKLSSVTAADTAVYYCTREDSSNWRSRGQGTLVTVSSLEGKPIPNPLLGLDSTGSGDKQLDADVSPKPTIFLPSIAETKLQKAGTYLCLLEKFFPDVIKIHWQEKKSNTILGSQEGNTMKTNDTYMKFSWLTVPEKSLDKEHRCIVRHENNKNGVDQEIIFPPIKTDVITMDPKDNCSKDANDTLLLQLTNTSAYYMYLLLLLKSVVYFAIITCCLLRRTAFCCNGEKSRAKRSGSGATNFSLLKQAGDVEENPGPTSMDWIWRILFLVGAATGAHSFEVQLVESGGGVVQPGRSLRLSCAASGFSFSGYGMHWVRQAPGKGLEWVAYISYDGSNKYYADSVKGRFTISRDNSKNTLYLQMNSLRAEDTAVYYCAKDPAWGLRLGESSSYDFDIWGQGTMVTVSSTREQKLISEEDGSGSQPHTKPSVFVMKNGTNVACLVKEFYPKDIRINLVSSKKITEFDPAIVISPSGKYNAVKLGKYEDSNSVTCSVQHDNKTVHSTDFEVKTDSTDHVKPKETENTKQPSKSCHKPKAIVHTEKVNMMSLTVLGLRMLFAKTVAVNFLLTAKLFFLRAKRSGSGVKQTLNFDLLKLAGDVESNPGPSRGHMTEYKPTVRLATRDDVPRAVRTLAAAFADYPATRHTVDPDRHIERVTELQELFLTRVGLDIGKVWVADDGAAVAVWTTPESVEAGAVFAEIGPRMAELSGSRLAAQQQMEGLLAPHRPKEPAWFLATVGVSPDHQGKGLGSAVVLPGVEAAERAGVPAFLETSAPRNLPFYERLGFTVTADVEVPEGPRTWCMTRKPGA

SEQ ID NO: 17172 - protein, 645 aa, Artificial Sequence
  Synthetic Polypeptide
MALPVTALLLPLALLLHAARPQLQLQESGPGLVKPSETLSLTCTVSGDSISSGDYYWGWIRQPPGKGLEWIGHIYYSGVTYYNPSLKSRVTISVDTSRNQFSLKLSSVTAADTAVYYCTREDSSNWRSRGQGTLVTVSSLESQPHTKPSVFVMKNGTNVACLVKEFYPKDIRINLVSSKKITEFDPAIVISPSGKYNAVKLGKYEDSNSVTCSVQHDNKTVHSTDFEVKTDSTDHVKPKETENTKQPSKSCHKPKAIVHTEKVNMMSLTVLGLRMLFAKTVAVNFLLTAKLFFLRAKRSGSGATNFSLLKQAGDVEENPGPTSMDWIWRILFLVGAATGAHSFEVQLVESGGGVVQPGRSLRLSCAASGFSFSGYGMHWVRQAPGKGLEWVAYISYDGSNKYYADSVKGRFTISRDNSKNTLYLQMNSLRAEDTAVYYCAKDPAWGLRLGESSSYDFDIWGQGTMVTVSSTRDKQLDADVSPKPTIFLPSIAETKLQKAGTYLCLLEKFFPDVIKIHWQEKKSNTILGSQEGNTMKTNDTYMKFSWLTVPEKSLDKEHRCIVRHENNKNGVDQEIIFPPIKTDVITMDPKDNCSKDANDTLLLQLTNTSAYYMYLLLLLKSVVYFAIITCCLLRRTAFCCNGEKS

SEQ ID NO: 17173 - protein, 917 aa, Artificial Sequence
  Synthetic Polypeptide
MALPVTALLLPLALLLHAARPLEGKPIPNPLLGLDSTGSGDKQLDADVSPKPTIFLPSIAETKLQKAGTYLCLLEKFFPDVIKIHWQEKKSNTILGSQEGNTMKTNDTYMKFSWLTVPEKSLDKEHRCIVRHENNKNGVDQEIIFPPIKTDVITMDPKDNCSKDANDTLLLQLTNTSAYYMYLLLLLKSVVYFAIITCCLLRRTAFCCNGEKSRAKRSGSGATNFSLLKQAGDVEENPGPTSMALPVTALLLPLALLLHAARPQLQLQESGPGLVKPSETLSLTCTVSGDSISSGDYYWGWIRQPPGKGLEWIGHIYYSGVTYYNPSLKSRVTISVDTSRNQFSLKLSSVTAADTAVYYCTREDSSNWRSRGQGTLVTVSSLESGGGGSFEVQLVESGGGVVQPGRSLRLSCAASGFSFSGYGMHWVRQAPGKGLEWVAYISYDGSNKYYADSVKGRFTISRDNSKNTLYLQMNSLRAEDTAVYYCAKDPAWGLRLGESSSYDFDIWGQGTMVTVSSTREQKLISEEDGSGSQPHTKPSVFVMKNGTNVACLVKEFYPKDIRINLVSSKKITEFDPAIVISPSGKYNAVKLGKYEDSNSVTCSVQHDNKTVHSTDFEVKTDSTDHVKPKETENTKQPSKSCHKPKAIVHTEKVNMMSLTVLGLRMLFAKTVAVNFLLTAKLFFLRAKRSGSGVKQTLNFDLLKLAGDVESNPGPSRGHMTEYKPTVRLATRDDVPRAVRTLAAAFADYPATRHTVDPDRHIERVTELQELFLTRVGLDIGKVWVADDGAAVAVWTTPESVEAGAVFAEIGPRMAELSGSRLAAQQQMEGLLAPHRPKEPAWFLATVGVSPDHQGKGLGSAVVLPGVEAAERAGVPAFLETSAPRNLPFYERLGFTVTADVEVPEGPRTWCMTRKPGA

SEQ ID NO: 17174 - protein, 1047 aa, Artificial Sequence
  Synthetic Polypeptide
MALPVTALLLPLALLLHAARPQLQLQESGPGLVKPSETLSLTCTVSGDSISSGDYYWGWIRQPPGKGLEWIGHIYYSGVTYYNPSLKSRVTISVDTSRNQFSLKLSSVTAADTAVYYCTREDSSNWRSRGQGTLVTVSSGQPKANPTVTLFPPSSEELQANKATLVCLISDFYPGAVTVAWKADGSPVKAGVETTKPSKQSNNKYAASSYLSLTPEQWKSHRSYSCQVTHEGSTVEKTVAPTECSGSQSFGLLDPKLCYLLDGILFIYGVILTALFLRVKFSRSADAPAYQQGQNQLYNELNLGRREEYDVLDKRRGRDPEMGGKPQRRKNPQEGLYNELQKDKMAEAYSEIGMKGERRRGKGHDGLYQGLSTATKDTYDALHMQALPPRRAKRSGSGATNFSLLKQAGDVEENPGPTSMDWIWRILFLVGAATGAHSFEVQLVESGGGVVQPGRSLRLSCAASGFSFSGYGMHWVRQAPGKGLEWVAYISYDGSNKYYADSVKGRFTISRDNSKNTLYLQMNSLRAEDTAVYYCAKDPAWGLRLGESSSYDFDIWGQGTMVTVSSASTKGPSVFPLAPSSKSTSGGTAALGCLVKDYFPEPVTVSWNSGALTSGVHTFPAVLQSSGLYSLSSVVTVPSSSLGTQTYICNVNHKPSNTKVDKRVEPKSCGTQSFGLLDPKLCYLLDGILFIYGVILTALFLRVKFSRSADAPAYQQGQNQLYNELNLGRREEYDVLDKRRGRDPEMGGKPQRRKNPQEGLYNELQKDKMAEAYSEIGMKGERRRGKGHDGLYQGLSTATKDTYDALHMQALPPRRAKRSGSGVKQTLNFDLLKLAGDVESNPGPSRGHMTEYKPTVRLATRDDVPRAVRTLAAAFADYPATRHTVDPDRHIERVTELQELFLTRVGLDIGKVWVADDGAAVAVWTTPESVEAGAVFAEIGPRMAELSGSRLAAQQQMEGLLAPHRPKEPAWFLATVGVSPDHQGKGLGSAVVLPGVEAAERAGVPAFLETSAPRNLPFYERLGFTVTADVEVPEGPRTWCMTRKPGA

SEQ ID NO: 17175 - protein, 833 aa, Artificial Sequence
  Synthetic Polypeptide
MALPVTALLLPLALLLHAARPQLQLQESGPGLVKPSETLSLTCTVSGDSISSGDYYWGWIRQPPGKGLEWIGHIYYSGVTYYNPSLKSRVTISVDTSRNQFSLKLSSVTAADTAVYYCTREDSSNWRSRGQGTLVTVSSLEDLKNVFPPEVAVFEPSEAEISHTQKATLVCLATGFYPDHVELSWWVNGKEVHSGVSTDPQPLKEQPALNDSRYCLSSRLRVSATFWQNPRNHFRCQVQFYGLSENDEWTQDRAKPVTQIVSAEAWGRADCGSQSFGLLDPKLCYLLDGILFIYGVILTALFLRVKFSRSADAPAYQQGQNQLYNELNLGRREEYDVLDKRRGRDPEMGGKPQRRKNPQEGLYNELQKDKMAEAYSEIGMKGERRRGKGHDGLYQGLSTATKDTYDALHMQALPPRRAKRSGSGATNFSLLKQAGDVEENPGPTSMDWIWRILFLVGAATGAHSFEVQLVESGGGVVQPGRSLRLSCAASGFSFSGYGMHWVRQAPGKGLEWVAYISYDGSNKYYADSVKGRFTISRDNSKNTLYLQMNSLRAEDTAVYYCAKDPAWGLRLGESSSYDFDIWGQGTMVTVSSTRIQNPDPAVYQLRDSKSSDKSVCLFTDFDSQTNVSQSKDSDVYITDKTVLDMRSMDFKSNSAVAWSNKSDFACANAFNNSIIPEDTFFPSPESSCGTQSFGLLDPKLCYLLDGILFIYGVILTALFLRVKFSRSADAPAYQQGQNQLYNELNLGRREEYDVLDKRRGRDPEMGGKPQRRKNPQEGLYNELQKDKMAEAYSEIGMKGERRRGKGHDGLYQGLSTATKDTYDALHMQALPPR

SEQ ID NO: 17176 - protein, 833 aa, Artificial Sequence
  Synthetic Polypeptide
MALPVTALLLPLALLLHAARPQLQLQESGPGLVKPSETLSLTCTVSGDSISSGDYYWGWIRQPPGKGLEWIGHIYYSGVTYYNPSLKSRVTISVDTSRNQFSLKLSSVTAADTAVYYCTREDSSNWRSRGQGTLVTVSSLEDLKNVFPPEVAVFEPSKAEIAHTQKATLVCLATGFYPDHVELSWWVNGKEVHSGVCTDPQPLKEQPALNDSRYCLSSRLRVSATFWQNPRNHFRCQVQFYGLSENDEWTQDRAKPVTQIVSAEAWGRADCGSQSFGLLDPKLCYLLDGILFIYGVILTALFLRVKFSRSADAPAYQQGQNQLYNELNLGRREEYDVLDKRRGRDPEMGGKPQRRKNPQEGLYNELQKDKMAEAYSEIGMKGERRRGKGHDGLYQGLSTATKDTYDALHMQALPPRRAKRSGSGATNFSLLKQAGDVEENPGPTSMDWIWRILFLVGAATGAHSFEVQLVESGGGVVQPGRSLRLSCAASGFSFSGYGMHWVRQAPGKGLEWVAYISYDGSNKYYADSVKGRFTISRDNSKNTLYLQMNSLRAEDTAVYYCAKDPAWGLRLGESSSYDFDIWGQGTMVTVSSTRIQNPDPAVYQLRDSKSSDKSVCLFTDFDSQTNVSQSKDSDVYITDKCVLDMRSMDFKSNSAVAWSNKSDFACANAFNNSIIPEDTFFPSSDVPCGTQSFGLLDPKLCYLLDGILFIYGVILTALFLRVKFSRSADAPAYQQGQNQLYNELNLGRREEYDVLDKRRGRDPEMGGKPQRRKNPQEGLYNELQKDKMAEAYSEIGMKGERRRGKGHDGLYQGLSTATKDTYDALHMQALPPR

SEQ ID NO: 17177 - protein, 904 aa, Artificial Sequence
  Synthetic Polypeptide
MALPVTALLLPLALLLHAARPQLQLQESGPGLVKPSETLSLTCTVSGDSISSGDYYWGWIRQPPGKGLEWIGHIYYSGVTYYNPSLKSRVTISVDTSRNQFSLKLSSVTAADTAVYYCTREDSSNWRSRGQGTLVTVSSLEGKPIPNPLLGLDSTGSGEDLKNVFPPEVAVFEPSEAEISHTQKATLVCLATGFYPDHVELSWWVNGKEVHSGVSTDPQPLKEQPALNDSRYCLSSRLRVSATFWQNPRNHFRCQVQFYGLSENDEWTQDRAKPVTQIVSAEAWGRADCGSQSFGLLDPKLCYLLDGILFIYGVILTALFLRVKFSRSADAPAYQQGQNQLYNELNLGRREEYDVLDKRRGRDPEMGGKPQRRKNPQEGLYNELQKDKMAEAYSEIGMKGERRRGKGHDGLYQGLSTATKDTYDALHMQALPPRRAKRSGSGATNFSLLKQAGDVEENPGPTSMDWIWRILFLVGAATGAHSFEVQLVESGGGVVQPGRSLRLSCAASGFSFSGYGMHWVRQAPGKGLEWVAYISYDGSNKYYADSVKGRFTISRDNSKNTLYLQMNSLRAEDTAVYYCAKDPAWGLRLGESSSYDFDIWGQGTMVTVSSTREQKLISEEDGSGIQNPDPAVYQLRDSKSSDKSVCLFTDFDSQTNVSQSKDSDVYITDKTVLDMRSMDFKSNSAVAWSNKSDFACANAFNNSIIPEDTFFPSPESSCGTQSFGLLDPKLCYLLDGILFIYGVILTALFLRSKRSRLLHSDYMNMTPRRPGPTRKHYQPYAPPRDFAAYRSRVKFSRSADAPAYQQGQNQLYNELNLGRREEYDVLDKRRGRDPEMGGKPQRRKNPQEGLYNELQKDKMAEAYSEIGMKGERRRGKGHDGLYQGLSTATKDTYDALHMQALPPR

SEQ ID NO: 17178 - protein, 945 aa, Artificial Sequence
  Synthetic Polypeptide
MALPVTALLLPLALLLHAARPQLQLQESGPGLVKPSETLSLTCTVSGDSISSGDYYWGWIRQPPGKGLEWIGHIYYSGVTYYNPSLKSRVTISVDTSRNQFSLKLSSVTAADTAVYYCTREDSSNWRSRGQGTLVTVSSLEGKPIPNPLLGLDSTGSGEDLKNVFPPEVAVFEPSEAEISHTQKATLVCLATGFYPDHVELSWWVNGKEVHSGVSTDPQPLKEQPALNDSRYCLSSRLRVSATFWQNPRNHFRCQVQFYGLSENDEWTQDRAKPVTQIVSAEAWGRADCGSQSFGLLDPKLCYLLDGILFIYGVILTALFLRSKRSRLLHSDYMNMTPRRPGPTRKHYQPYAPPRDFAAYRSRVKFSRSADAPAYQQGQNQLYNELNLGRREEYDVLDKRRGRDPEMGGKPQRRKNPQEGLYNELQKDKMAEAYSEIGMKGERRRGKGHDGLYQGLSTATKDTYDALHMQALPPRRAKRSGSGATNFSLLKQAGDVEENPGPTSMDWIWRILFLVGAATGAHSFEVQLVESGGGVVQPGRSLRLSCAASGFSFSGYGMHWVRQAPGKGLEWVAYISYDGSNKYYADSVKGRFTISRDNSKNTLYLQMNSLRAEDTAVYYCAKDPAWGLRLGESSSYDFDIWGQGTMVTVSSTREQKLISEEDGSGIQNPDPAVYQLRDSKSSDKSVCLFTDFDSQTNVSQSKDSDVYITDKTVLDMRSMDFKSNSAVAWSNKSDFACANAFNNSIIPEDTFFPSPESSCGTQSFGLLDPKLCYLLDGILFIYGVILTALFLRSKRSRLLHSDYMNMTPRRPGPTRKHYQPYAPPRDFAAYRSRVKFSRSADAPAYQQGQNQLYNELNLGRREEYDVLDKRRGRDPEMGGKPQRRKNPQEGLYNELQKDKMAEAYSEIGMKGERRRGKGHDGLYQGLSTATKDTYDALHMQALPPR

SEQ ID NO: 17179 - protein, 906 aa, Artificial Sequence
  Synthetic Polypeptide
MALPVTALLLPLALLLHAARPQLQLQESGPGLVKPSETLSLTCTVSGDSISSGDYYWGWIRQPPGKGLEWIGHIYYSGVTYYNPSLKSRVTISVDTSRNQFSLKLSSVTAADTAVYYCTREDSSNWRSRGQGTLVTVSSLEGKPIPNPLLGLDSTGSGEDLKNVFPPEVAVFEPSEAEISHTQKATLVCLATGFYPDHVELSWWVNGKEVHSGVSTDPQPLKEQPALNDSRYCLSSRLRVSATFWQNPRNHFRCQVQFYGLSENDEWTQDRAKPVTQIVSAEAWGRADCGSQSFGLLDPKLCYLLDGILFIYGVILTALFLRVKFSRSADAPAYQQGQNQLYNELNLGRREEYDVLDKRRGRDPEMGGKPQRRKNPQEGLYNELQKDKMAEAYSEIGMKGERRRGKGHDGLYQGLSTATKDTYDALHMQALPPRRAKRSGSGATNFSLLKQAGDVEENPGPTSMDWIWRILFLVGAATGAHSFEVQLVESGGGVVQPGRSLRLSCAASGFSFSGYGMHWVRQAPGKGLEWVAYISYDGSNKYYADSVKGRFTISRDNSKNTLYLQMNSLRAEDTAVYYCAKDPAWGLRLGESSSYDFDIWGQGTMVTVSSTREQKLISEEDLGSGIQNPDPAVYQLRDSKSSDKSVCLFTDFDSQTNVSQSKDSDVYITDKTVLDMRSMDFKSNSAVAWSNKSDFACANAFNNSIIPEDTFFPSPESSCGTQSFGLLDPKLCYLLDGILFIYGVILTALFLKRGRKKLLYIFKQPFMRPVQTTQEEDGCSCRFPEEEEGGCELRVKFSRSADAPAYQQGQNQLYNELNLGRREEYDVLDKRRGRDPEMGGKPQRRKNPQEGLYNELQKDKMAEAYSEIGMKGERRRGKGHDGLYQGLSTATKDTYDALHMQALPPR

SEQ ID NO: 17180 - protein, 948 aa, Artificial Sequence
  Synthetic Polypeptide
MALPVTALLLPLALLLHAARPQLQLQESGPGLVKPSETLSLTCTVSGDSISSGDYYWGWIRQPPGKGLEWIGHIYYSGVTYYNPSLKSRVTISVDTSRNQFSLKLSSVTAADTAVYYCTREDSSNWRSRGQGTLVTVSSLEGKPIPNPLLGLDSTGSGEDLKNVFPPEVAVFEPSEAEISHTQKATLVCLATGFYPDHVELSWWVNGKEVHSGVSTDPQPLKEQPALNDSRYCLSSRLRVSATFWQNPRNHFRCQVQFYGLSENDEWTQDRAKPVTQIVSAEAWGRADCGSQSFGLLDPKLCYLLDGILFIYGVILTALFLKRGRKKLLYIFKQPFMRPVQTTQEEDGCSCRFPEEEEGGCELRVKFSRSADAPAYQQGQNQLYNELNLGRREEYDVLDKRRGRDPEMGGKPQRRKNPQEGLYNELQKDKMAEAYSEIGMKGERRRGKGHDGLYQGLSTATKDTYDALHMQALPPRRAKRSGSGATNFSLLKQAGDVEENPGPTSMDWIWRILFLVGAATGAHSFEVQLVESGGGVVQPGRSLRLSCAASGFSFSGYGMHWVRQAPGKGLEWVAYISYDGSNKYYADSVKGRFTISRDNSKNTLYLQMNSLRAEDTAVYYCAKDPAWGLRLGESSSYDFDIWGQGTMVTVSSTREQKLISEEDLGSGIQNPDPAVYQLRDSKSSDKSVCLFTDFDSQTNVSQSKDSDVYITDKTVLDMRSMDFKSNSAVAWSNKSDFACANAFNNSIIPEDTFFPSPESSCGTQSFGLLDPKLCYLLDGILFIYGVILTALFLKRGRKKLLYIFKQPFMRPVQTTQEEDGCSCRFPEEEEGGCELRVKFSRSADAPAYQQGQNQLYNELNLGRREEYDVLDKRRGRDPEMGGKPQRRKNPQEGLYNELQKDKMAEAYSEIGMKGERRRGKGHDGLYQGLSTATKDTYDALHMQALPPR

SEQ ID NO: 17181 - protein, 838 aa, Artificial Sequence
  Synthetic Polypeptide
MALPVTALLLPLALLLHAARPQLQLQESGPGLVKPSETLSLTCTVSGDSISSGDYYWGWIRQPPGKGLEWIGHIYYSGVTYYNPSLKSRVTISVDTSRNQFSLKLSSVTAADTAVYYCTREDSSNWRSRGQGTLVTVSSLEQSFGLLDPKLCYLLDGILFIYGVILTALFLRVKFSRSADAPAYQQGQNQLYNELNLGRREEYDVLDKRRGRDPEMGGKPQRRKNPQEGLYNELQKDKMAEAYSEIGMKGERRRGKGHDGLYQGLSTATKDTYDALHMQALPPRRAKRSGSGATNFSLLKQAGDVEENPGPTSMDWIWRILFLVGAATGAHSFEVQLVESGGGVVQPGRSLRLSCAASGFSFSGYGMHWVRQAPGKGLEWVAYISYDGSNKYYADSVKGRFTISRDNSKNTLYLQMNSLRAEDTAVYYCAKDPAWGLRLGESSSYDFDIWGQGTMVTVSSTRQSFGLLDPKLCYLLDGILFIYGVILTALFLRVKFSRSADAPAYQQGQNQLYNELNLGRREEYDVLDKRRGRDPEMGGKPQRRKNPQEGLYNELQKDKMAEAYSEIGMKGERRRGKGHDGLYQGLSTATKDTYDALHMQALPPRRAKRSGSGVKQTLNFDLLKLAGDVESNPGPSRGHMTEYKPTVRLATRDDVPRAVRTLAAAFADYPATRHTVDPDRHIERVTELQELFLTRVGLDIGKVWVADDGAAVAVWTTPESVEAGAVFAEIGPRMAELSGSRLAAQQQMEGLLAPHRPKEPAWFLATVGVSPDHQGKGLGSAVVLPGVEAAERAGVPAFLETSAPRNLPFYERLGFTVTADVEVPEGPRTWCMTRKPGA

SEQ ID NO: 17182 - protein, 663 aa, Artificial Sequence
  Synthetic Polypeptide
MALPVTALLLPLALLLHAARPQLQLQESGPGLVKPSETLSLTCTVSGDSISSGDYYWGWIRQPPGKGLEWIGHIYYSGVTYYNPSLKSRVTISVDTSRNQFSLKLSSVTAADTAVYYCTREDSSNWRSRGQGTLVTVSSLEGQPKANPTVTLFPPSSEELQANKATLVCLISDFYPGAVTVAWKADGSPVKAGVETTKPSKQSNNKYAASSYLSLTPEQWKSHRSYSCQVTHEGSTVEKTVAPTECSPIKTDVITMDPKDNCSKDANDTLLLQLTNTSAYYMYLLLLLKSVVYFAIITCCLLRRTAFCCNGEKSRAKRSGSGATNFSLLKQAGDVEENPGPTSMDWIWRILFLVGAATGAHSFEVQLVESGGGVVQPGRSLRLSCAASGFSFSGYGMHWVRQAPGKGLEWVAYISYDGSNKYYADSVKGRFTISRDNSKNTLYLQMNSLRAEDTAVYYCAKDPAWGLRLGESSSYDFDIWGQGTMVTVSSTRASTKGPSVFPLAPSSKSTSGGTAALGCLVKDYFPEPVTVSWNSGALTSGVHTFPAVLQSSGLYSLSSVVTVPSSSLGTQTYICNVNHKPSNTKVDKRVEPKSCEVKTDSTDHVKPKETENTKQPSKSCHKPKAIVHTEKVNMMSLTVLGLRMLFAKTVAVNFLLTAKLFFL

SEQ ID NO: 17183 - protein, 641 aa, Artificial Sequence
  Synthetic Polypeptide
MALPVTALLLPLALLLHAARPQLQLQESGPGLVKPSETLSLTCTVSGDSISSGDYYWGWIRQPPGKGLEWIGHIYYSGVTYYNPSLKSRVTISVDTSRNQFSLKLSSVTAADTAVYYCTREDSSNWRSRGQGTLVTVSSLEGQPKANPTVTLFPPSSEELQANKATLVCLISDFYPGAVTVAWKADGSPVKAGVETTKPSKQSNNKYAASSYLSLTPEQWKSHRSYSCQVTHEGSTVEKTVAPTECSGRADCGITSASYHQGVLSATILYEILLGKATLYAVLVSALVLMAMVKRKDSRGRAKRSGSGATNFSLLKQAGDVEENPGPTSMDWIWRILFLVGAATGAHSFEVQLVESGGGVVQPGRSLRLSCAASGFSFSGYGMHWVRQAPGKGLEWVAYISYDGSNKYYADSVKGRFTISRDNSKNTLYLQMNSLRAEDTAVYYCAKDPAWGLRLGESSSYDFDIWGQGTMVTVSSTRASTKGPSVFPLAPSSKSTSGGTAALGCLVKDYFPEPVTVSWNSGALTSGVHTFPAVLQSSGLYSLSSVVTVPSSSLGTQTYICNVNHKPSNTKVDKRVEPKSCIPEDTFFPSSDVPCDVKLVEKSFETDTNLNFQNLSVIGFRILLLKVAGFNLLMTLRLWSS

SEQ ID NO: 17184 - protein, 641 aa, Artificial Sequence
  Synthetic Polypeptide
MALPVTALLLPLALLLHAARPQLQLQESGPGLVKPSETLSLTCTVSGDSISSGDYYWGWIRQPPGKGLEWIGHIYYSGVTYYNPSLKSRVTISVDTSRNQFSLKLSSVTAADTAVYYCTREDSSNWRSRGQGTLVTVSSLEGQPKANPTVTLFPPSSEELQANKATLVCLISDFYPGAVTVAWKADGSPVKAGVETTKPSKQSNNKYAASSYLSLTPEQWKSHRSYSCQVTHEGSTVEKTVAPTECSGRADCGFTSESYQQGVLSATILYEILLGKATLYAVLVSALVLMAMVKRKDSRGRAKRSGSGATNFSLLKQAGDVEENPGPTSMDWIWRILFLVGAATGAHSFEVQLVESGGGVVQPGRSLRLSCAASGFSFSGYGMHWVRQAPGKGLEWVAYISYDGSNKYYADSVKGRFTISRDNSKNTLYLQMNSLRAEDTAVYYCAKDPAWGLRLGESSSYDFDIWGQGTMVTVSSTRASTKGPSVFPLAPSSKSTSGGTAALGCLVKDYFPEPVTVSWNSGALTSGVHTFPAVLQSSGLYSLSSVVTVPSSSLGTQTYICNVNHKPSNTKVDKRVEPKSCIPEDTFFPSPESSCDVKLVEKSFETDTNLNFQNLSVIGFRILLLKVAGFNLLMTLRLWSS

SEQ ID NO: 17185 - protein, 462 aa, Artificial Sequence
  Synthetic Polypeptide
MALPVTALLLPLALLLHAARPQLQLQESGPGLVKPSETLSLTCTVSGDSISSGDYYWGWIRQPPGKGLEWIGHIYYSGVTYYNPSLKSRVTISVDTSRNQFSLKLSSVTAADTAVYYCTREDSSNWRSRGQGTLVTVSSLESGGGGSFEVQLVESGGGVVQPGRSLRLSCAASGFSFSGYGMHWVRQAPGKGLEWVAYISYDGSNKYYADSVKGRFTISRDNSKNTLYLQMNSLRAEDTAVYYCAKDPAWGLRLGESSSYDFDIWGQGTMVTVSSTRDGNEEMGGITQTPYKVSISGTTVILTCPQYPGSEILWQHNDKNIGGDEDDKNIGSDEDHLSLKEFSELEQSGYYVCYPRGSKPEDANFYLYLRARVCENCMEMDVMSVATIVIVDICITGGLLLLVYYWSKNRKAKAKPVTRGAGAGGRQRGQNKERPPPVPNPDYEPIRKGQRDLYSGLNQRRI

SEQ ID NO: 17186 - protein, 427 aa, Artificial Sequence
  Synthetic Polypeptide
MALPVTALLLPLALLLHAARPQLQLQESGPGLVKPSETLSLTCTVSGDSISSGDYYWGWIRQPPGKGLEWIGHIYYSGVTYYNPSLKSRVTISVDTSRNQFSLKLSSVTAADTAVYYCTREDSSNWRSRGQGTLVTVSSLESGGGGSFEVQLVESGGGVVQPGRSLRLSCAASGFSFSGYGMHWVRQAPGKGLEWVAYISYDGSNKYYADSVKGRFTISRDNSKNTLYLQMNSLRAEDTAVYYCAKDPAWGLRLGESSSYDFDIWGQGTMVTVSSTRFKIPIEELEDRVFVNCNTSITWVEGTVGTLLSDITRLDLGKRILDPRGIYRCNGTDIYKDKESTVQVHYRMCQSCVELDPATVAGIIVTDVIATLLLALGVFCFAGHETGRLSGAADTQALLRNDQVYQPLRDRDDAQYSHLGGNWARNK

SEQ ID NO: 17187 - protein, 437 aa, Artificial Sequence
  Synthetic Polypeptide
MALPVTALLLPLALLLHAARPQLQLQESGPGLVKPSETLSLTCTVSGDSISSGDYYWGWIRQPPGKGLEWIGHIYYSGVTYYNPSLKSRVTISVDTSRNQFSLKLSSVTAADTAVYYCTREDSSNWRSRGQGTLVTVSSLESGGGGSFEVQLVESGGGVVQPGRSLRLSCAASGFSFSGYGMHWVRQAPGKGLEWVAYISYDGSNKYYADSVKGRFTISRDNSKNTLYLQMNSLRAEDTAVYYCAKDPAWGLRLGESSSYDFDIWGQGTMVTVSSTRQSIKGNHLVKVYDYQEDGSVLLTCDAEAKNITWFKDGKMIGFLTEDKKKWNLGSNAKDPRGMYQCKGSQNKSKPLQVYYRMCQNCIELNAATISGFLFAEIVSIFVLAVGVYFIAGQDGVRQSRASDKQTLLPNDQLYQPLKDREDDQYSHLQGNQLRRN

SEQ ID NO: 17188 - protein, 420 aa, Artificial Sequence
  Synthetic Polypeptide
MALPVTALLLPLALLLHAARPQLQLQESGPGLVKPSETLSLTCTVSGDSISSGDYYWGWIRQPPGKGLEWIGHIYYSGVTYYNPSLKSRVTISVDTSRNQFSLKLSSVTAADTAVYYCTREDSSNWRSRGQGTLVTVSSLESGGGGSFEVQLVESGGGVVQPGRSLRLSCAASGFSFSGYGMHWVRQAPGKGLEWVAYISYDGSNKYYADSVKGRFTISRDNSKNTLYLQMNSLRAEDTAVYYCAKDPAWGLRLGESSSYDFDIWGQGTMVTVSSTRQSFGLLDPKLCYLLDGILFIYGVILTALFLRVKFSRSADAPAYQQGQNQLYNELNLGRREEYDVLDKRRGRDPEMGGKPQRRKNPQEGLYNELQKDKMAEAYSEIGMKGERRRGKGHDGLYQGLSTATKDTYDALHMQALPPR

SEQ ID NO: 17189 - protein, 463 aa, Artificial Sequence
  Synthetic Polypeptide
MALPVTALLLPLALLLHAARPEVQLVESGGGVVQPGRSLRLSCAASGFSFSGYGMHWVRQAPGKGLEWVAYISYDGSNKYYADSVKGRFTISRDNSKNTLYLQMNSLRAEDTAVYYCAKDPAWGLRLGESSSYDFDIWGQGTMVTVSSLESGGGGSFEQLQLQESGPGLVKPSETLSLTCTVSGDSISSGDYYWGWIRQPPGKGLEWIGHIYYSGVTYYNPSLKSRVTISVDTSRNQFSLKLSSVTAADTAVYYCTREDSSNWRSRGQGTLVTVSSTRDGNEEMGGITQTPYKVSISGTTVILTCPQYPGSEILWQHNDKNIGGDEDDKNIGSDEDHLSLKEFSELEQSGYYVCYPRGSKPEDANFYLYLRARVCENCMEMDVMSVATIVIVDICITGGLLLLVYYWSKNRKAKAKPVTRGAGAGGRQRGQNKERPPPVPNPDYEPIRKGQRDLYSGLNQRRI

SEQ ID NO: 17190 - protein, 428 aa, Artificial Sequence
  Synthetic Polypeptide
MALPVTALLLPLALLLHAARPEVQLVESGGGVVQPGRSLRLSCAASGFSFSGYGMHWVRQAPGKGLEWVAYISYDGSNKYYADSVKGRFTISRDNSKNTLYLQMNSLRAEDTAVYYCAKDPAWGLRLGESSSYDFDIWGQGTMVTVSSLESGGGGSFEQLQLQESGPGLVKPSETLSLTCTVSGDSISSGDYYWGWIRQPPGKGLEWIGHIYYSGVTYYNPSLKSRVTISVDTSRNQFSLKLSSVTAADTAVYYCTREDSSNWRSRGQGTLVTVSSTRFKIPIEELEDRVFVNCNTSITWVEGTVGTLLSDITRLDLGKRILDPRGIYRCNGTDIYKDKESTVQVHYRMCQSCVELDPATVAGIIVTDVIATLLLALGVFCFAGHETGRLSGAADTQALLRNDQVYQPLRDRDDAQYSHLGGNWARNK

SEQ ID NO: 17191 - protein, 438 aa, Artificial Sequence
  Synthetic Polypeptide
MALPVTALLLPLALLLHAARPEVQLVESGGGVVQPGRSLRLSCAASGFSFSGYGMHWVRQAPGKGLEWVAYISYDGSNKYYADSVKGRFTISRDNSKNTLYLQMNSLRAEDTAVYYCAKDPAWGLRLGESSSYDFDIWGQGTMVTVSSLESGGGGSFEQLQLQESGPGLVKPSETLSLTCTVSGDSISSGDYYWGWIRQPPGKGLEWIGHIYYSGVTYYNPSLKSRVTISVDTSRNQFSLKLSSVTAADTAVYYCTREDSSNWRSRGQGTLVTVSSTRQSIKGNHLVKVYDYQEDGSVLLTCDAEAKNITWFKDGKMIGFLTEDKKKWNLGSNAKDPRGMYQCKGSQNKSKPLQVYYRMCQNCIELNAATISGFLFAEIVSIFVLAVGVYFIAGQDGVRQSRASDKQTLLPNDQLYQPLKDREDDQYSHLQGNQLRRN

SEQ ID NO: 17192 - protein, 421 aa, Artificial Sequence
  Synthetic Polypeptide
MALPVTALLLPLALLLHAARPEVQLVESGGGVVQPGRSLRLSCAASGFSFSGYGMHWVRQAPGKGLEWVAYISYDGSNKYYADSVKGRFTISRDNSKNTLYLQMNSLRAEDTAVYYCAKDPAWGLRLGESSSYDFDIWGQGTMVTVSSLESGGGGSFEQLQLQESGPGLVKPSETLSLTCTVSGDSISSGDYYWGWIRQPPGKGLEWIGHIYYSGVTYYNPSLKSRVTISVDTSRNQFSLKLSSVTAADTAVYYCTREDSSNWRSRGQGTLVTVSSTRQSFGLLDPKLCYLLDGILFIYGVILTALFLRVKFSRSADAPAYQQGQNQLYNELNLGRREEYDVLDKRRGRDPEMGGKPQRRKNPQEGLYNELQKDKMAEAYSEIGMKGERRRGKGHDGLYQGLSTATKDTYDALHMQALPPR

SEQ ID NO: 17193 - protein, 653 aa, Artificial Sequence
  Synthetic Polypeptide
MALPVTALLLPLALLLHAARPQLQLQESGPGLVKPSETLSLTCTVSGDSISSGDYYWGWIRQPPGKGLEWIGHIYYSGVTYYNPSLKSRVTISVDTSRNQFSLKLSSVTAADTAVYYCTREDSSNWRSRGQGTLVTVSSLESGGGGSFEVQLVESGGGVVQPGRSLRLSCAASGFSFSGYGMHWVRQAPGKGLEWVAYISYDGSNKYYADSVKGRFTISRDNSKNTLYLQMNSLRAEDTAVYYCAKDPAWGLRLGESSSYDFDIWGQGTMVTVSSTRGSGIQNPDPAVYQLRDSKSSDKSVCLFTDFDSQTNVSQSKDSDVYITDKTVLDMRSMDFKSNSAVAWSNKSDFACANAFNNSIIPEDTFFPSPESSCDVKLVEKSFETDTNLNFQNLSVIGFRILLLKVAGFNLLMTLRLWSSRAKRSGSGVKQTLNFDLLKLAGDVESNPGPSRGHMTEYKPTVRLATRDDVPRAVRTLAAAFADYPATRHTVDPDRHIERVTELQELFLTRVGLDIGKVWVADDGAAVAVWTTPESVEAGAVFAEIGPRMAELSGSRLAAQQQMEGLLAPHRPKEPAWFLATVGVSPDHQGKGLGSAVVLPGVEAAERAGVPAFLETSAPRNLPFYERLGFTVTADVEVPEGPRTWCMTRKPGA

SEQ ID NO: 17194 - protein, 685 aa, Artificial Sequence
  Synthetic Polypeptide
MALPVTALLLPLALLLHAARPQLQLQESGPGLVKPSETLSLTCTVSGDSISSGDYYWGWIRQPPGKGLEWIGHIYYSGVTYYNPSLKSRVTISVDTSRNQFSLKLSSVTAADTAVYYCTREDSSNWRSRGQGTLVTVSSLESGGGGSFEVQLVESGGGVVQPGRSLRLSCAASGFSFSGYGMHWVRQAPGKGLEWVAYISYDGSNKYYADSVKGRFTISRDNSKNTLYLQMNSLRAEDTAVYYCAKDPAWGLRLGESSSYDFDIWGQGTMVTVSSLEDLKNVFPPEVAVFEPSEAEISHTQKATLVCLATGFYPDHVELSWWVNGKEVHSGVSTDPQPLKEQPALNDSRYCLSSRLRVSATFWQNPRNHFRCQVQFYGLSENDEWTQDRAKPVTQIVSAEAWGRADCGFTSESYQQGVLSATILYEILLGKATLYAVLVSALVLMAMVKRKDSRGRAKRSGSGATNFSLLKQAGDVEENPGPTRGHMTEYKPTVRLATRDDVPRAVRTLAAAFADYPATRHTVDPDRHIERVTELQELFLTRVGLDIGKVWVADDGAAVAVWTTPESVEAGAVFAEIGPRMAELSGSRLAAQQQMEGLLAPHRPKEPAWFLATVGVSPDHQGKGLGSAVVLPGVEAAERAGVPAFLETSAPRNLPFYERLGFTVTADVEVPEGPRTWCMTRKPGA

SEQ ID NO: 17195 - protein, 735 aa, Artificial Sequence
  Synthetic Polypeptide
MALPVTALLLPLALLLHAARPQLQLQESGPGLVKPSETLSLTCTVSGDSISSGDYYWGWIRQPPGKGLEWIGHIYYSGVTYYNPSLKSRVTISVDTSRNQFSLKLSSVTAADTAVYYCTREDSSNWRSRGQGTLVTVSSLESGGGGSFEVQLVESGGGVVQPGRSLRLSCAASGFSFSGYGMHWVRQAPGKGLEWVAYISYDGSNKYYADSVKGRFTISRDNSKNTLYLQMNSLRAEDTAVYYCAKDPAWGLRLGESSSYDFDIWGQGTMVTVSSTREQKLISEEDLGSGTPFPSLAPPIMLLVDGKQQMVVVCLVLDVAPPGLDSPIWFSAGNGSALDAFTYGPSPATDGTWTNLAHLSLPSEELASWEPLVCHTGPGAEGHSRSTQPMHLSGEASTARTCPQEPLRGTPGGALWLGVLRLLLFKLLLFDLLLTCSCLCDPAGPLPSPATTTRLRALGSHRLHPATETGGREATSSPRPQPRDRRWGDTPPGRKPGSPVRAKRSGSGVKQTLNFDLLKLAGDVESNPGPSRSRGHMTEYKPTVRLATRDDVPRAVRTLAAAFADYPATRHTVDPDRHIERVTELQELFLTRVGLDIGKVWVADDGAAVAVWTTPESVEAGAVFAEIGPRMAELSGSRLAAQQQMEGLLAPHRPKEPAWFLATVGVSPDHQGKGLGSAVVLPGVEAAERAGVPAFLETSAPRNLPFYERLGFTVTADVEVPEGPRTWCMTRKPGA

SEQ ID NO: 17196 - protein, 549 aa, Artificial Sequence
  Synthetic Polypeptide
MALPVTALLLPLALLLHAARPQLQLQESGPGLVKPSETLSLTCTVSGDSISSGDYYWGWIRQPPGKGLEWIGHIYYSGVTYYNPSLKSRVTISVDTSRNQFSLKLSSVTAADTAVYYCTREDSSNWRSRGQGTLVTVSSLEDLKNVFPPEVAVFEPSEAEISHTQKATLVCLATGFYPDHVELSWWVNGKEVHSGVSTDPQPLKEQPALNDSRYCLSSRLRVSATFWQNPRNHFRCQVQFYGLSENDEWTQDRAKPVTQIVSAEAWGRADCGFTSESYQQGVLSATILYEILLGKATLYAVLVSALVLMAMVKRKDSRGRAKRSGSGATNFSLLKQAGDVEENPGPTRGHMTEYKPTVRLATRDDVPRAVRTLAAAFADYPATRHTVDPDRHIERVTELQELFLTRVGLDIGKVWVADDGAAVAVWTTPESVEAGAVFAEIGPRMAELSGSRLAAQQQMEGLLAPHRPKEPAWFLATVGVSPDHQGKGLGSAVVLPGVEAAERAGVPAFLETSAPRNLPFYERLGFTVTADVEVPEGPRTWCMTRKPGA

SEQ ID NO: 17197 - protein, 319 aa, Artificial Sequence
  Synthetic Polypeptide
MALPVTALLLPLALLLHAARPQLQLQESGPGLVKPSETLSLTCTVSGDSISSGDYYWGWIRQPPGKGLEWIGHIYYSGVTYYNPSLKSRVTISVDTSRNQFSLKLSSVTAADTAVYYCTREDSSNWRSRGQGTLVTVSSLEDLKNVFPPEVAVFEPSEAEISHTQKATLVCLATGFYPDHVELSWWVNGKEVHSGVSTDPQPLKEQPALNDSRYCLSSRLRVSATFWQNPRNHFRCQVQFYGLSENDEWTQDRAKPVTQIVSAEAWGRADCGFTSESYQQGVLSATILYEILLGKATLYAVLVSALVLMAMVKRKDSRG

SEQ ID NO: 17198 - protein, 455 aa, Artificial Sequence
  Synthetic Polypeptide
MDWIWRILFLVGAATGAHSFEVQLVESGGGVVQPGRSLRLSCAASGFSFSGYGMHWVRQAPGKGLEWVAYISYDGSNKYYADSVKGRFTISRDNSKNTLYLQMNSLRAEDTAVYYCAKDPAWGLRLGESSSYDFDIWGQGTMVTVSSTRIQNPDPAVYQLRDSKSSDKSVCLFTDFDSQTNVSQSKDSDVYITDKTVLDMRSMDFKSNSAVAWSNKSDFACANAFNNSIIPEDTFFPSPESSCDVKLVEKSFETDTNLNFQNLSVIGFRILLLKVAGFNLLMTLRLWSSRAKRSGSGVKQTLNFDLLKLAGDVESNPGPSRGHMAKPLSQEESTLIERATATINSIPISEDYSVASAALSSDGRIFTGVNVYHFTGGPCAELVVLGTAAAAAAGNLTCIVAIGNENRGILSPCGRCRQVLLDLHPGIKAIVKDSDGQPTAVGIRELLPSGYVWEG

SEQ ID NO: 17199 - protein, 289 aa, Artificial Sequence
  Synthetic Polypeptide
MDWIWRILFLVGAATGAHSFEVQLVESGGGVVQPGRSLRLSCAASGFSFSGYGMHWVRQAPGKGLEWVAYISYDGSNKYYADSVKGRFTISRDNSKNTLYLQMNSLRAEDTAVYYCAKDPAWGLRLGESSSYDFDIWGQGTMVTVSSTRIQNPDPAVYQLRDSKSSDKSVCLFTDFDSQTNVSQSKDSDVYITDKTVLDMRSMDFKSNSAVAWSNKSDFACANAFNNSIIPEDTFFPSPESSCDVKLVEKSFETDTNLNFQNLSVIGFRILLLKVAGFNLLMTLRLWSS

SEQ ID NO: 17200 - protein, 567 aa, Artificial Sequence
  Synthetic Polypeptide
MALPVTALLLPLALLLHAARPQLQLQESGPGLVKPSETLSLTCTVSGDSISSGDYYWGWIRQPPGKGLEWIGHIYYSGVTYYNPSLKSRVTISVDTSRNQFSLKLSSVTAADTAVYYCTREDSSNWRSRGQGTLVTVSSLEGKPIPNPLLGLDSTGSGEDLKNVFPPEVAVFEPSEAEISHTQKATLVCLATGFYPDHVELSWWVNGKEVHSGVCTDPQPLKEQPALNDSRYCLSSRLRVSATFWQNPRNHFRCQVQFYGLSENDEWTQDRAKPVTQIVSAEAWGRADCGFTSESYQQGVLSATILYEILLGKATLYAVLVSALVLMAMVKRKDSRGRAKRSGSGATNFSLLKQAGDVEENPGPTRGHMTEYKPTVRLATRDDVPRAVRTLAAAFADYPATRHTVDPDRHIERVTELQELFLTRVGLDIGKVWVADDGAAVAVWTTPESVEAGAVFAEIGPRMAELSGSRLAAQQQMEGLLAPHRPKEPAWFLATVGVSPDHQGKGLGSAVVLPGVEAAERAGVPAFLETSAPRNLPFYERLGFTVTADVEVPEGPRTWCMTRKPGA

SEQ ID NO: 17201 - protein, 337 aa, Artificial Sequence
  Synthetic Polypeptide
MALPVTALLLPLALLLHAARPQLQLQESGPGLVKPSETLSLTCTVSGDSISSGDYYWGWIRQPPGKGLEWIGHIYYSGVTYYNPSLKSRVTISVDTSRNQFSLKLSSVTAADTAVYYCTREDSSNWRSRGQGTLVTVSSLEGKPIPNPLLGLDSTGSGEDLKNVFPPEVAVFEPSEAEISHTQKATLVCLATGFYPDHVELSWWVNGKEVHSGVCTDPQPLKEQPALNDSRYCLSSRLRVSATFWQNPRNHFRCQVQFYGLSENDEWTQDRAKPVTQIVSAEAWGRADCGFTSESYQQGVLSATILYEILLGKATLYAVLVSALVLMAMVKRKDSRG

SEQ ID NO: 17202 - protein, 467 aa, Artificial Sequence
  Synthetic Polypeptide
MDWIWRILFLVGAATGAHSFEVQLVESGGGVVQPGRSLRLSCAASGFSFSGYGMHWVRQAPGKGLEWVAYISYDGSNKYYADSVKGRFTISRDNSKNTLYLQMNSLRAEDTAVYYCAKDPAWGLRLGESSSYDFDIWGQGTMVTVSSTREQKLISEEDGSGIQNPDPAVYQLRDSKSSDKSVCLFTDFDSQTNVSQSKDSDVYITDKCVLDMRSMDFKSNSAVAWSNKSDFACANAFNNSIIPEDTFFPSPESSCDVKLVEKSFETDTNLNFQNLSVIGFRILLLKVAGFNLLMTLRLWSSRAKRSGSGVKQTLNFDLLKLAGDVESNPGPSRGHMAKPLSQEESTLIERATATINSIPISEDYSVASAALSSDGRIFTGVNVYHFTGGPCAELVVLGTAAAAAAGNLTCIVAIGNENRGILSPCGRCRQVLLDLHPGIKAIVKDSDGQPTAVGIRELLPSGYVWEG

SEQ ID NO: 17203 - protein, 301 aa, Artificial Sequence
  Synthetic Polypeptide
MDWIWRILFLVGAATGAHSFEVQLVESGGGVVQPGRSLRLSCAASGFSFSGYGMHWVRQAPGKGLEWVAYISYDGSNKYYADSVKGRFTISRDNSKNTLYLQMNSLRAEDTAVYYCAKDPAWGLRLGESSSYDFDIWGQGTMVTVSSTREQKLISEEDGSGIQNPDPAVYQLRDSKSSDKSVCLFTDFDSQTNVSQSKDSDVYITDKCVLDMRSMDFKSNSAVAWSNKSDFACANAFNNSIIPEDTFFPSPESSCDVKLVEKSFETDTNLNFQNLSVIGFRILLLKVAGFNLLMTLRLWSS

SEQ ID NO: 17204 - protein, 653 aa, Artificial Sequence
  Synthetic Polypeptide
MALPVTALLLPLALLLHAARPQLQLQESGPGLVKPSETLSLTCTVSGDSISSGDYYWGWIRQPPGKGLEWIGHIYYSGVTYYNPSLKSRVTISVDTSRNQFSLKLSSVTAADTAVYYCTREDSSNWRSRGQGTLVTVSSLESGGGGSFEVQLVESGGGVVQPGRSLRLSCAASGFSFSGYGMHWVRQAPGKGLEWVAYISYDGSNKYYADSVKGRFTISRDNSKNTLYLQMNSLRAEDTAVYYCAKDPAWGLRLGESSSYDFDIWGQGTMVTVSSTRGSGIQNPDPAVYQLRDSKSSDKSVCLFTDFDSQTNVSQSKDSDVYITDKTVLDMRSMDFKSNSAVAWSNKSDFACANAFNNSIIPEDTFFPSSDVPCDVKLVEKSFETDTNLNFQNLSVIGFRILLLKVAGFNLLMTLRLWSSRAKRSGSGVKQTLNFDLLKLAGDVESNPGPSRGHMTEYKPTVRLATRDDVPRAVRTLAAAFADYPATRHTVDPDRHIERVTELQELFLTRVGLDIGKVWVADDGAAVAVWTTPESVEAGAVFAEIGPRMAELSGSRLAAQQQMEGLLAPHRPKEPAWFLATVGVSPDHQGKGLGSAVVLPGVEAAERAGVPAFLETSAPRNLPFYERLGFTVTADVEVPEGPRTWCMTRKPGA

SEQ ID NO: 17205 - protein, 685 aa, Artificial Sequence
  Synthetic Polypeptide
MALPVTALLLPLALLLHAARPQLQLQESGPGLVKPSETLSLTCTVSGDSISSGDYYWGWIRQPPGKGLEWIGHIYYSGVTYYNPSLKSRVTISVDTSRNQFSLKLSSVTAADTAVYYCTREDSSNWRSRGQGTLVTVSSLESGGGGSFEVQLVESGGGVVQPGRSLRLSCAASGFSFSGYGMHWVRQAPGKGLEWVAYISYDGSNKYYADSVKGRFTISRDNSKNTLYLQMNSLRAEDTAVYYCAKDPAWGLRLGESSSYDFDIWGQGTMVTVSSLEDLKNVFPPEVAVFEPSKAEIAHTQKATLVCLATGFYPDHVELSWWVNGKEVHSGVSTDPQPLKEQPALNDSRYCLSSRLRVSATFWQNPRNHFRCQVQFYGLSENDEWTQDRAKPVTQIVSAEAWGRADCGITSASYHQGVLSATILYEILLGKATLYAVLVSALVLMAMVKRKDSRGRAKRSGSGATNFSLLKQAGDVEENPGPTRGHMTEYKPTVRLATRDDVPRAVRTLAAAFADYPATRHTVDPDRHIERVTELQELFLTRVGLDIGKVWVADDGAAVAVWTTPESVEAGAVFAEIGPRMAELSGSRLAAQQQMEGLLAPHRPKEPAWFLATVGVSPDHQGKGLGSAVVLPGVEAAERAGVPAFLETSAPRNLPFYERLGFTVTADVEVPEGPRTWCMTRKPGA

SEQ ID NO: 17206 - protein, 708 aa, Artificial Sequence
  Synthetic Polypeptide
MALPVTALLLPLALLLHAARPQLQLQESGPGLVKPSETLSLTCTVSGDSISSGDYYWGWIRQPPGKGLEWIGHIYYSGVTYYNPSLKSRVTISVDTSRNQFSLKLSSVTAADTAVYYCTREDSSNWRSRGQGTLVTVSSLESGGGGSFEVQLVESGGGVVQPGRSLRLSCAASGFSFSGYGMHWVRQAPGKGLEWVAYISYDGSNKYYADSVKGRFTISRDNSKNTLYLQMNSLRAEDTAVYYCAKDPAWGLRLGESSSYDFDIWGQGTMVTVSSTRGSGGGGSGGGGSGDGNEEMGGITQTPYKVSISGTTVILTCPQYPGSEILWQHNDKNIGGDEDDKNIGSDEDHLSLKEFSELEQSGYYVCYPRGSKPEDANFYLYLRARVCENCMEMDVMSVATIVIVDICITGGLLLLVYYWSKNRKAKAKPVTRGAGAGGRQRGQNKERPPPVPNPDYEPIRKGQRDLYSGLNQRRIRAKRSGSGVKQTLNFDLLKLAGDVESNPGPSRGHMTEYKPTVRLATRDDVPRAVRTLAAAFADYPATRHTVDPDRHIERVTELQELFLTRVGLDIGKVWVADDGAAVAVWTTPESVEAGAVFAEIGPRMAELSGSRLAAQQQMEGLLAPHRPKEPAWFLATVGVSPDHQGKGLGSAVVLPGVEAAERAGVPAFLETSAPRNLPFYERLGFTVTADVEVPEGPRTWCMTRKPGA

SEQ ID NO: 17207 - protein, 673 aa, Artificial Sequence
  Synthetic Polypeptide
MALPVTALLLPLALLLHAARPQLQLQESGPGLVKPSETLSLTCTVSGDSISSGDYYWGWIRQPPGKGLEWIGHIYYSGVTYYNPSLKSRVTISVDTSRNQFSLKLSSVTAADTAVYYCTREDSSNWRSRGQGTLVTVSSLESGGGGSFEVQLVESGGGVVQPGRSLRLSCAASGFSFSGYGMHWVRQAPGKGLEWVAYISYDGSNKYYADSVKGRFTISRDNSKNTLYLQMNSLRAEDTAVYYCAKDPAWGLRLGESSSYDFDIWGQGTMVTVSSTRGSGGGGSGGGGSGFKIPIEELEDRVFVNCNTSITWVEGTVGTLLSDITRLDLGKRILDPRGIYRCNGTDIYKDKESTVQVHYRMCQSCVELDPATVAGIIVTDVIATLLLALGVFCFAGHETGRLSGAADTQALLRNDQVYQPLRDRDDAQYSHLGGNWARNKRAKRSGSGVKQTLNFDLLKLAGDVESNPGPSRGHMTEYKPTVRLATRDDVPRAVRTLAAAFADYPATRHTVDPDRHIERVTELQELFLTRVGLDIGKVWVADDGAAVAVWTTPESVEAGAVFAEIGPRMAELSGSRLAAQQQMEGLLAPHRPKEPAWFLATVGVSPDHQGKGLGSAVVLPGVEAAERAGVPAFLETSAPRNLPFYERLGFTVTADVEVPEGPRTWCMTRKPGA

SEQ ID NO: 17208 - protein, 683 aa, Artificial Sequence
  Synthetic Polypeptide
MALPVTALLLPLALLLHAARPQLQLQESGPGLVKPSETLSLTCTVSGDSISSGDYYWGWIRQPPGKGLEWIGHIYYSGVTYYNPSLKSRVTISVDTSRNQFSLKLSSVTAADTAVYYCTREDSSNWRSRGQGTLVTVSSLESGGGGSFEVQLVESGGGVVQPGRSLRLSCAASGFSFSGYGMHWVRQAPGKGLEWVAYISYDGSNKYYADSVKGRFTISRDNSKNTLYLQMNSLRAEDTAVYYCAKDPAWGLRLGESSSYDFDIWGQGTMVTVSSTRGSGGGGSGGGGSGQSIKGNHLVKVYDYQEDGSVLLTCDAEAKNITWFKDGKMIGFLTEDKKKWNLGSNAKDPRGMYQCKGSQNKSKPLQVYYRMCQNCIELNAATISGFLFAEIVSIFVLAVGVYFIAGQDGVRQSRASDKQTLLPNDQLYQPLKDREDDQYSHLQGNQLRRNRAKRSGSGVKQTLNFDLLKLAGDVESNPGPSRGHMTEYKPTVRLATRDDVPRAVRTLAAAFADYPATRHTVDPDRHIERVTELQELFLTRVGLDIGKVWVADDGAAVAVWTTPESVEAGAVFAEIGPRMAELSGSRLAAQQQMEGLLAPHRPKEPAWFLATVGVSPDHQGKGLGSAVVLPGVEAAERAGVPAFLETSAPRNLPFYERLGFTVTADVEVPEGPRTWCMTRKPGA

SEQ ID NO: 17209 - protein, 666 aa, Artificial Sequence
  Synthetic Polypeptide
MALPVTALLLPLALLLHAARPQLQLQESGPGLVKPSETLSLTCTVSGDSISSGDYYWGWIRQPPGKGLEWIGHIYYSGVTYYNPSLKSRVTISVDTSRNQFSLKLSSVTAADTAVYYCTREDSSNWRSRGQGTLVTVSSLESGGGGSFEVQLVESGGGVVQPGRSLRLSCAASGFSFSGYGMHWVRQAPGKGLEWVAYISYDGSNKYYADSVKGRFTISRDNSKNTLYLQMNSLRAEDTAVYYCAKDPAWGLRLGESSSYDFDIWGQGTMVTVSSTRGSGGGGSGGGGSGQSFGLLDPKLCYLLDGILFIYGVILTALFLRVKFSRSADAPAYQQGQNQLYNELNLGRREEYDVLDKRRGRDPEMGGKPQRRKNPQEGLYNELQKDKMAEAYSEIGMKGERRRGKGHDGLYQGLSTATKDTYDALHMQALPPRRAKRSGSGVKQTLNFDLLKLAGDVESNPGPSRGHMTEYKPTVRLATRDDVPRAVRTLAAAFADYPATRHTVDPDRHIERVTELQELFLTRVGLDIGKVWVADDGAAVAVWTTPESVEAGAVFAEIGPRMAELSGSRLAAQQQMEGLLAPHRPKEPAWFLATVGVSPDHQGKGLGSAVVLPGVEAAERAGVPAFLETSAPRNLPFYERLGFTVTADVEVPEGPRTWCMTRKPGA

SEQ ID NO: 17210 - protein, 874 aa, Artificial Sequence
  Synthetic Polypeptide
MALPVTALLLPLALLLHAARPQLQLQESGPGLVKPSETLSLTCTVSGDSISSGDYYWGWIRQPPGKGLEWIGHIYYSGVTYYNPSLKSRVTISVDTSRNQFSLKLSSVTAADTAVYYCTREDSSNWRSRGQGTLVTVSSLEGQPKANPTVTLFPPSSEELQANKATLVCLISDFYPGAVTVAWKADGSPVKAGVETTKPSKQSNNKYAASSYLSLTPEQWKSHRSYSCQVTHEGSTVEKTVAPTECSGRADCGFTSESYQQGVLSATILYEILLGKATLYAVLVSALVLMAMVKRKDSRGRAKRSGSGATNFSLLKQAGDVEENPGPTSMDWIWRILFLVGAATGAHSFEVQLVESGGGVVQPGRSLRLSCAASGFSFSGYGMHWVRQAPGKGLEWVAYISYDGSNKYYADSVKGRFTISRDNSKNTLYLQMNSLRAEDTAVYYCAKDPAWGLRLGESSSYDFDIWGQGTMVTVSSTRASTKGPSVFPLAPSSKSTSGGTAALGCLVKDYFPEPVTVSWNSGALTSGVHTFPAVLQSSGLYSLSSVVTVPSSSLGTQTYICNVNHKPSNTKVDKRVEPKSCIPEDTFFPSPESSCDVKLVEKSFETDTNLNFQNLSVIGFRILLLKVAGFNLLMTLRLWSSRAKRSGSGVKQTLNFDLLKLAGDVESNPGPSRGHMTEYKPTVRLATRDDVPRAVRTLAAAFADYPATRHTVDPDRHIERVTELQELFLTRVGLDIGKVWVADDGAAVAVWTTPESVEAGAVFAEIGPRMAELSGSRLAAQQQMEGLLAPHRPKEPAWFLATVGVSPDHQGKGLGSAVVLPGVEAAERAGVPAFLETSAPRNLPFYERLGFTVTADVEVPEGPRTWCMTRKPGA

SEQ ID NO: 17211 - protein, 641 aa, Artificial Sequence; identical to SEQ ID NO: 17184
  Synthetic Polypeptide

SEQ ID NO: 17212 - protein, 669 aa, Artificial Sequence
  Synthetic Polypeptide
MALPVTALLLPLALLLHAARPQLQLQESGPGLVKPSETLSLTCTVSGDSISSGDYYWGWIRQPPGKGLEWIGHIYYSGVTYYNPSLKSRVTISVDTSRNQFSLKLSSVTAADTAVYYCTREDSSNWRSRGQGTLVTVSSLEGSGRADCGFTSESYQQGVLSATILYEILLGKATLYAVLVSALVLMAMVKRKDSRGRAKRSGSGATNFSLLKQAGDVEENPGPTSMDWIWRILFLVGAATGAHSFEVQLVESGGGVVQPGRSLRLSCAASGFSFSGYGMHWVRQAPGKGLEWVAYISYDGSNKYYADSVKGRFTISRDNSKNTLYLQMNSLRAEDTAVYYCAKDPAWGLRLGESSSYDFDIWGQGTMVTVSSTRGSIPEDTFFPSPESSCDVKLVEKSFETDTNLNFQNLSVIGFRILLLKVAGFNLLMTLRLWSSRAKRSGSGVKQTLNFDLLKLAGDVESNPGPSRGHMTEYKPTVRLATRDDVPRAVRTLAAAFADYPATRHTVDPDRHIERVTELQELFLTRVGLDIGKVWVADDGAAVAVWTTPESVEAGAVFAEIGPRMAELSGSRLAAQQQMEGLLAPHRPKEPAWFLATVGVSPDHQGKGLGSAVVLPGVEAAERAGVPAFLETSAPRNLPFYERLGFTVTADVEVPEGPRTWCMTRKPGA

SEQ ID NO: 17213 - protein, 436 aa, Artificial Sequence
  Synthetic Polypeptide
MALPVTALLLPLALLLHAARPQLQLQESGPGLVKPSETLSLTCTVSGDSISSGDYYWGWIRQPPGKGLEWIGHIYYSGVTYYNPSLKSRVTISVDTSRNQFSLKLSSVTAADTAVYYCTREDSSNWRSRGQGTLVTVSSLEGSGRADCGFTSESYQQGVLSATILYEILLGKATLYAVLVSALVLMAMVKRKDSRGRAKRSGSGATNFSLLKQAGDVEENPGPTSMDWIWRILFLVGAATGAHSFEVQLVESGGGVVQPGRSLRLSCAASGFSFSGYGMHWVRQAPGKGLEWVAYISYDGSNKYYADSVKGRFTISRDNSKNTLYLQMNSLRAEDTAVYYCAKDPAWGLRLGESSSYDFDIWGQGTMVTVSSTRGSIPEDTFFPSPESSCDVKLVEKSFETDTNLNFQNLSVIGFRILLLKVAGFNLLMTLRLWSS

SEQ ID NO: 17214 - protein, 678 aa, Artificial Sequence
  Synthetic Polypeptide
MALPVTALLLPLALLLHAARPQLQLQESGPGLVKPSETLSLTCTVSGDSISSGDYYWGWIRQPPGKGLEWIGHIYYSGVTYYNPSLKSRVTISVDTSRNQFSLKLSSVTAADTAVYYCTREDSSNWRSRGQGTLVTVSSLEDKTHTCPPCPAGRADCGFTSESYQQGVLSATILYEILLGKATLYAVLVSALVLMAMVKRKDSRGRAKRSGSGATNFSLLKQAGDVEENPGPTSMDWIWRILFLVGAATGAHSFEVQLVESGGGVVQPGRSLRLSCAASGFSFSGYGMHWVRQAPGKGLEWVAYISYDGSNKYYADSVKGRFTISRDNSKNTLYLQMNSLRAEDTAVYYCAKDPAWGLRLGESSSYDFDIWGQGTMVTVSSTRGSIPEDTFFPSPESSCDVKLVEKSFETDTNLNFQNLSVIGFRILLLKVAGFNLLMTLRLWSSRAKRSGSGVKQTLNFDLLKLAGDVESNPGPSRGHMTEYKPTVRLATRDDVPRAVRTLAAAFADYPATRHTVDPDRHIERVTELQELFLTRVGLDIGKVWVADDGAAVAVWTTPESVEAGAVFAEIGPRMAELSGSRLAAQQQMEGLLAPHRPKEPAWFLATVGVSPDHQGKGLGSAVVLPGVEAAERAGVPAFLETSAPRNLPFYERLGFTVTADVEVPEGPRTWCMTRKPGA

SEQ ID NO: 17215 - protein, 678 aa, Artificial Sequence
  Synthetic Polypeptide
MALPVTALLLPLALLLHAARPQLQLQESGPGLVKPSETLSLTCTVSGDSISSGDYYWGWIRQPPGKGLEWIGHIYYSGVTYYNPSLKSRVTISVDTSRNQFSLKLSSVTAADTAVYYCTREDSSNWRSRGQGTLVTVSSLEGSGRADCGFTSESYQQGVLSATILYEILLGKATLYAVLVSALVLMAMVKRKDSRGRAKRSGSGATNFSLLKQAGDVEENPGPTSMDWIWRILFLVGAATGAHSFEVQLVESGGGVVQPGRSLRLSCAASGFSFSGYGMHWVRQAPGKGLEWVAYISYDGSNKYYADSVKGRFTISRDNSKNTLYLQMNSLRAEDTAVYYCAKDPAWGLRLGESSSYDFDIWGQGTMVTVSSTRDKTHTCPPCPAIPEDTFFPSPESSCDVKLVEKSFETDTNLNFQNLSVIGFRILLLKVAGFNLLMTLRLWSSRAKRSGSGVKQTLNFDLLKLAGDVESNPGPSRGHMTEYKPTVRLATRDDVPRAVRTLAAAFADYPATRHTVDPDRHIERVTELQELFLTRVGLDIGKVWVADDGAAVAVWTTPESVEAGAVFAEIGPRMAELSGSRLAAQQQMEGLLAPHRPKEPAWFLATVGVSPDHQGKGLGSAVVLPGVEAAERAGVPAFLETSAPRNLPFYERLGFTVTADVEVPEGPRTWCMTRKPGA

SEQ ID NO: 17216 - protein, 687 aa, Artificial Sequence
  Synthetic Polypeptide
MALPVTALLLPLALLLHAARPQLQLQESGPGLVKPSETLSLTCTVSGDSISSGDYYWGWIRQPPGKGLEWIGHIYYSGVTYYNPSLKSRVTISVDTSRNQFSLKLSSVTAADTAVYYCTREDSSNWRSRGQGTLVTVSSLEDKTHTCPPCPAGRADCGFTSESYQQGVLSATILYEILLGKATLYAVLVSALVLMAMVKRKDSRGRAKRSGSGATNFSLLKQAGDVEENPGPTSMDWIWRILFLVGAATGAHSFEVQLVESGGGVVQPGRSLRLSCAASGFSFSGYGMHWVRQAPGKGLEWVAYISYDGSNKYYADSVKGRFTISRDNSKNTLYLQMNSLRAEDTAVYYCAKDPAWGLRLGESSSYDFDIWGQGTMVTVSSTRDKTHTCPPCPAIPEDTFFPSPESSCDVKLVEKSFETDTNLNFQNLSVIGFRILLLKVAGFNLLMTLRLWSSRAKRSGSGVKQTLNFDLLKLAGDVESNPGPSRGHMTEYKPTVRLATRDDVPRAVRTLAAAFADYPATRHTVDPDRHIERVTELQELFLTRVGLDIGKVWVADDGAAVAVWTTPESVEAGAVFAEIGPRMAELSGSRLAAQQQMEGLLAPHRPKEPAWFLATVGVSPDHQGKGLGSAVVLPGVEAAERAGVPAFLETSAPRNLPFYERLGFTVTADVEVPEGPRTWCMTRKPGA

SEQ ID NO: 17217 - protein, 454 aa, Artificial Sequence
  Synthetic Polypeptide
MALPVTALLLPLALLLHAARPQLQLQESGPGLVKPSETLSLTCTVSGDSISSGDYYWGWIRQPPGKGLEWIGHIYYSGVTYYNPSLKSRVTISVDTSRNQFSLKLSSVTAADTAVYYCTREDSSNWRSRGQGTLVTVSSLEDKTHTCPPCPAGRADCGFTSESYQQGVLSATILYEILLGKATLYAVLVSALVLMAMVKRKDSRGRAKRSGSGATNFSLLKQAGDVEENPGPTSMDWIWRILFLVGAATGAHSFEVQLVESGGGVVQPGRSLRLSCAASGFSFSGYGMHWVRQAPGKGLEWVAYISYDGSNKYYADSVKGRFTISRDNSKNTLYLQMNSLRAEDTAVYYCAKDPAWGLRLGESSSYDFDIWGQGTMVTVSSTRDKTHTCPPCPAIPEDTFFPSPESSCDVKLVEKSFETDTNLNFQNLSVIGFRILLLKVAGFNLLMTLRLWSS

SEQ ID NO: 17218 - protein, 445 aa, Artificial Sequence
  Synthetic Polypeptide
MALPVTALLLPLALLLHAARPQLQLQESGPGLVKPSETLSLTCTVSGDSISSGDYYWGWIRQPPGKGLEWIGHIYYSGVTYYNPSLKSRVTISVDTSRNQFSLKLSSVTAADTAVYYCTREDSSNWRSRGQGTLVTVSSLEGSGRADCGFTSESYQQGVLSATILYEILLGKATLYAVLVSALVLMAMVKRKDSRGRAKRSGSGATNFSLLKQAGDVEENPGPTSMDWIWRILFLVGAATGAHSFEVQLVESGGGVVQPGRSLRLSCAASGFSFSGYGMHWVRQAPGKGLEWVAYISYDGSNKYYADSVKGRFTISRDNSKNTLYLQMNSLRAEDTAVYYCAKDPAWGLRLGESSSYDFDIWGQGTMVTVSSTRDKTHTCPPCPAIPEDTFFPSPESSCDVKLVEKSFETDTNLNFQNLSVIGFRILLLKVAGFNLLMTLRLWSS

SEQ ID NO: 17219 - protein, 896 aa, Artificial Sequence
  Synthetic Polypeptide
MALPVTALLLPLALLLHAARPQLQLQESGPGLVKPSETLSLTCTVSGDSISSGDYYWGWIRQPPGKGLEWIGHIYYSGVTYYNPSLKSRVTISVDTSRNQFSLKLSSVTAADTAVYYCTREDSSNWRSRGQGTLVTVSSLEGQPKANPTVTLFPPSSEELQANKATLVCLISDFYPGAVTVAWKADGSPVKAGVETTKPSKQSNNKYAASSYLSLTPEQWKSHRSYSCQVTHEGSTVEKTVAPTECSPIKTDVITMDPKDNCSKDANDTLLLQLTNTSAYYMYLLLLLKSVVYFAIITCCLLRRTAFCCNGEKSRAKRSGSGATNFSLLKQAGDVEENPGPTSMDWIWRILFLVGAATGAHSFEVQLVESGGGVVQPGRSLRLSCAASGFSFSGYGMHWVRQAPGKGLEWVAYISYDGSNKYYADSVKGRFTISRDNSKNTLYLQMNSLRAEDTAVYYCAKDPAWGLRLGESSSYDFDIWGQGTMVTVSSTRASTKGPSVFPLAPSSKSTSGGTAALGCLVKDYFPEPVTVSWNSGALTSGVHTFPAVLQSSGLYSLSSVVTVPSSSLGTQTYICNVNHKPSNTKVDKRVEPKSCEVKTDSTDHVKPKETENTKQPSKSCHKPKAIVHTEKVNMMSLTVLGLRMLFAKTVAVNFLLTAKLFFLRAKRSGSGVKQTLNFDLLKLAGDVESNPGPSRGHMTEYKPTVRLATRDDVPRAVRTLAAAFADYPATRHTVDPDRHIERVTELQELFLTRVGLDIGKVWVADDGAAVAVWTTPESVEAGAVFAEIGPRMAELSGSRLAAQQQMEGLLAPHRPKEPAWFLATVGVSPDHQGKGLGSAVVLPGVEAAERAGVPAFLETSAPRNLPFYERLGFTVTADVEVPEGPRTWCMTRKPGA

SEQ ID NO: 17220 - protein, 663 aa, Artificial Sequence; identical to SEQ ID NO: 17182
  Synthetic Polypeptide

SEQ ID NO: 17221 - protein, 691 aa, Artificial Sequence
  Synthetic Polypeptide
MALPVTALLLPLALLLHAARPQLQLQESGPGLVKPSETLSLTCTVSGDSISSGDYYWGWIRQPPGKGLEWIGHIYYSGVTYYNPSLKSRVTISVDTSRNQFSLKLSSVTAADTAVYYCTREDSSNWRSRGQGTLVTVSSLEGSPIKTDVITMDPKDNCSKDANDTLLLQLTNTSAYYMYLLLLLKSVVYFAIITCCLLRRTAFCCNGEKSRAKRSGSGATNFSLLKQAGDVEENPGPTSMDWIWRILFLVGAATGAHSFEVQLVESGGGVVQPGRSLRLSCAASGFSFSGYGMHWVRQAPGKGLEWVAYISYDGSNKYYADSVKGRFTISRDNSKNTLYLQMNSLRAEDTAVYYCAKDPAWGLRLGESSSYDFDIWGQGTMVTVSSTRGSEVKTDSTDHVKPKETENTKQPSKSCHKPKAIVHTEKVNMMSLTVLGLRMLFAKTVAVNFLLTAKLFFLRAKRSGSGVKQTLNFDLLKLAGDVESNPGPSRGHMTEYKPTVRLATRDDVPRAVRTLAAAFADYPATRHTVDPDRHIERVTELQELFLTRVGLDIGKVWVADDGAAVAVWTTPESVEAGAVFAEIGPRMAELSGSRLAAQQQMEGLLAPHRPKEPAWFLATVGVSPDHQGKGLGSAVVLPGVEAAERAGVPAFLETSAPRNLPFYERLGFTVTADVEVPEGPRTWCMTRKPGA

SEQ ID NO: 17222 - protein, 458 aa, Artificial Sequence
  Synthetic Polypeptide
MALPVTALLLPLALLLHAARPQLQLQESGPGLVKPSETLSLTCTVSGDSISSGDYYWGWIRQPPGKGLEWIGHIYYSGVTYYNPSLKSRVTISVDTSRNQFSLKLSSVTAADTAVYYCTREDSSNWRSRGQGTLVTVSSLEGSPIKTDVITMDPKDNCSKDANDTLLLQLTNTSAYYMYLLLLLKSVVYFAIITCCLLRRTAFCCNGEKSRAKRSGSGATNFSLLKQAGDVEENPGPTSMDWIWRILFLVGAATGAHSFEVQLVESGGGVVQPGRSLRLSCAASGFSFSGYGMHWVRQAPGKGLEWVAYISYDGSNKYYADSVKGRFTISRDNSKNTLYLQMNSLRAEDTAVYYCAKDPAWGLRLGESSSYDFDIWGQGTMVTVSSTRGSEVKTDSTDHVKPKETENTKQPSKSCHKPKAIVHTEKVNMMSLTVLGLRMLFAKTVAVNFLLTAKLFFL

SEQ ID NO: 17223 - protein, 700 aa, Artificial Sequence
  Synthetic Polypeptide
MALPVTALLLPLALLLHAARPQLQLQESGPGLVKPSETLSLTCTVSGDSISSGDYYWGWIRQPPGKGLEWIGHIYYSGVTYYNPSLKSRVTISVDTSRNQFSLKLSSVTAADTAVYYCTREDSSNWRSRGQGTLVTVSSLEDKTHTCPPCPAPIKTDVITMDPKDNCSKDANDTLLLQLTNTSAYYMYLLLLLKSVVYFAIITCCLLRRTAFCCNGEKSRAKRSGSGATNFSLLKQAGDVEENPGPTSMDWIWRILFLVGAATGAHSFEVQLVESGGGVVQPGRSLRLSCAASGFSFSGYGMHWVRQAPGKGLEWVAYISYDGSNKYYADSVKGRFTISRDNSKNTLYLQMNSLRAEDTAVYYCAKDPAWGLRLGESSSYDFDIWGQGTMVTVSSTRGSEVKTDSTDHVKPKETENTKQPSKSCHKPKAIVHTEKVNMMSLTVLGLRMLFAKTVAVNFLLTAKLFFLRAKRSGSGVKQTLNFDLLKLAGDVESNPGPSRGHMTEYKPTVRLATRDDVPRAVRTLAAAFADYPATRHTVDPDRHIERVTELQELFLTRVGLDIGKVWVADDGAAVAVWTTPESVEAGAVFAEIGPRMAELSGSRLAAQQQMEGLLAPHRPKEPAWFLATVGVSPDHQGKGLGSAVVLPGVEAAERAGVPAFLETSAPRNLPFYERLGFTVTADVEVPEGPRTWCMTRKPGA

SEQ ID NO: 17224 - protein, 700 aa, Artificial Sequence
  Synthetic Polypeptide
MALPVTALLLPLALLLHAARPQLQLQESGPGLVKPSETLSLTCTVSGDSISSGDYYWGWIRQPPGKGLEWIGHIYYSGVTYYNPSLKSRVTISVDTSRNQFSLKLSSVTAADTAVYYCTREDSSNWRSRGQGTLVTVSSLEGSPIKTDVITMDPKDNCSKDANDTLLLQLTNTSAYYMYLLLLLKSVVYFAIITCCLLRRTAFCCNGEKSRAKRSGSGATNFSLLKQAGDVEENPGPTSMDWIWRILFLVGAATGAHSFEVQLVESGGGVVQPGRSLRLSCAASGFSFSGYGMHWVRQAPGKGLEWVAYISYDGSNKYYADSVKGRFTISRDNSKNTLYLQMNSLRAEDTAVYYCAKDPAWGLRLGESSSYDFDIWGQGTMVTVSSTRDKTHTCPPCPAEVKTDSTDHVKPKETENTKQPSKSCHKPKAIVHTEKVNMMSLTVLGLRMLFAKTVAVNFLLTAKLFFLRAKRSGSGVKQTLNFDLLKLAGDVESNPGPSRGHMTEYKPTVRLATRDDVPRAVRTLAAAFADYPATRHTVDPDRHIERVTELQELFLTRVGLDIGKVWVADDGAAVAVWTTPESVEAGAVFAEIGPRMAELSGSRLAAQQQMEGLLAPHRPKEPAWFLATVGVSPDHQGKGLGSAVVLPGVEAAERAGVPAFLETSAPRNLPFYERLGFTVTADVEVPEGPRTWCMTRKPGA

SEQ ID NO: 17225 - protein, 709 aa, Artificial Sequence
  Synthetic Polypeptide
MALPVTALLLPLALLLHAARPQLQLQESGPGLVKPSETLSLTCTVSGDSISSGDYYWGWIRQPPGKGLEWIGHIYYSGVTYYNPSLKSRVTISVDTSRNQFSLKLSSVTAADTAVYYCTREDSSNWRSRGQGTLVTVSSLEDKTHTCPPCPAPIKTDVITMDPKDNCSKDANDTLLLQLTNTSAYYMYLLLLLKSVVYFAIITCCLLRRTAFCCNGEKSRAKRSGSGATNFSLLKQAGDVEENPGPTSMDWIWRILFLVGAATGAHSFEVQLVESGGGVVQPGRSLRLSCAASGFSFSGYGMHWVRQAPGKGLEWVAYISYDGSNKYYADSVKGRFTISRDNSKNTLYLQMNSLRAEDTAVYYCAKDPAWGLRLGESSSYDFDIWGQGTMVTVSSTRDKTHTCPPCPAEVKTDSTDHVKPKETENTKQPSKSCHKPKAIVHTEKVNMMSLTVLGLRMLFAKTVAVNFLLTAKLFFLRAKRSGSGVKQTLNFDLLKLAGDVESNPGPSRGHMTEYKPTVRLATRDDVPRAVRTLAAAFADYPATRHTVDPDRHIERVTELQELFLTRVGLDIGKVWVADDGAAVAVWTTPESVEAGAVFAEIGPRMAELSGSRLAAQQQMEGLLAPHRPKEPAWFLATVGVSPDHQGKGLGSAVVLPGVEAAERAGVPAFLETSAPRNLPFYERLGFTVTADVEVPEGPRTWCMTRKPGA

SEQ ID NO: 17226 - protein, 476 aa, Artificial Sequence
  Synthetic Polypeptide
MALPVTALLLPLALLLHAARPQLQLQESGPGLVKPSETLSLTCTVSGDSISSGDYYWGWIRQPPGKGLEWIGHIYYSGVTYYNPSLKSRVTISVDTSRNQFSLKLSSVTAADTAVYYCTREDSSNWRSRGQGTLVTVSSLEDKTHTCPPCPAPIKTDVITMDPKDNCSKDANDTLLLQLTNTSAYYMYLLLLLKSVVYFAIITCCLLRRTAFCCNGEKSRAKRSGSGATNFSLLKQAGDVEENPGPTSMDWIWRILFLVGAATGAHSFEVQLVESGGGVVQPGRSLRLSCAASGFSFSGYGMHWVRQAPGKGLEWVAYISYDGSNKYYADSVKGRFTISRDNSKNTLYLQMNSLRAEDTAVYYCAKDPAWGLRLGESSSYDFDIWGQGTMVTVSSTRDKTHTCPPCPAEVKTDSTDHVKPKETENTKQPSKSCHKPKAIVHTEKVNMMSLTVLGLRMLFAKTVAVNFLLTAKLFFL

SEQ ID NO: 17227 - protein, 722 aa, Artificial Sequence
  Synthetic Polypeptide
MALPVTALLLPLALLLHAARPQLQLQESGPGLVKPSETLSLTCTVSGDSISSGDYYWGWIRQPPGKGLEWIGHIYYSGVTYYNPSLKSRVTISVDTSRNQFSLKLSSVTAADTAVYYCTREDSSNWRSRGQGTLVTVSSLESGGGGSFEVQLLESGGGLVQPGGSLRLSCAASGFSFSSYALSWVRQAPGKGLEWVSSIGENDGTTDYADAVKGRFTISRDNSKNTLYLQMNSLRVEDTAVYYCVKDGVHWGQGTLVTVSSTREQKLISEEDLAKPTTTPAPRPPTPAPTIASQPLSLRPEACRPAAGGAVHTRGLDFACDIYIWAPLAGTCGVLLLSLVITLYCKRGRKKLLYIFKQPFMRPVQTTQEEDGCSCRFPEEEEGGCELRVKFSRSADAPAYQQGQNQLYNELNLGRREEYDVLDKRRGRDPEMGGKPRRKNPQEGLYNELQKDKMAEAYSEIGMKGERRRGKGHDGLYQGLSTATKDTYDALHMQALPPRSSGSGEGRGSLLTCGDVEENPGPHMTEYKPTVRLATRDDVPRAVRTLAAAFADYPATRHTVDPDRHIERVTELQELFLTRVGLDIGKVWVADDGAAVAVWTTPESVEAGAVFAEIGPRMAELSGSRLAAQQQMEGLLAPHRPKEPAWFLATVGVSPDHQGKGLGSAVVLPGVEAAERAGVPAFLETSAPRNLPFYERLGFTVTADVEVPEGPRTWCMTRKPGA

SEQ ID NO: 17228 - protein, 716 aa, Artificial Sequence
  Synthetic Polypeptide
MALPVTALLLPLALLLHAARPQLQLQESGPGLVKPSETLSLTCTVSGDSISSGDYYWGWIRQPPGKGLEWIGHIYYSGVTYYNPSLKSRVTISVDTSRNQFSLKLSSVTAADTAVYYCTREDSSNWRSRGQGTLVTVSSLESGGGGSFEVQLLESGGGLVQPGGSLRLSCAASGFSFSSYALSWVRQAPGKGLEWVSSIGENDGTTDYADAVKGRFTISRDNSKNTLYLQMNSLRVEDTAVYYCVKDGVHWGQGTLVTVSSTREQKLISEEDLKIEVMYPPPYLDNEKSNGTIIHVKGKHLCPSPLFPGPSKPFWVLVVVGGVLACYSLLVTVAFIIFWVRSKRSRLLHSDYMNMTPRRPGPTRKHYQPYAPPRDFAAYRSRVKFSRSADAPAYQQGQNQLYNELNLGRREEYDVLDKRRGRDPEMGGKPRRKNPQEGLYNELQKDKMAEAYSEIGMKGERRRGKGHDGLYQGLSTATKDTYDALHMQALPPRSSGSGEGRGSLLTCGDVEENPGPHMTEYKPTVRLATRDDVPRAVRTLAAAFADYPATRHTVDPDRHIERVTELQELFLTRVGLDIGKVWVADDGAAVAVWTTPESVEAGAVFAEIGPRMAELSGSRLAAQQQMEGLLAPHRPKEPAWFLATVGVSPDHQGKGLGSAVVLPGVEAAERAGVPAFLETSAPRNLPFYERLGFTVTADVEVPEGPRTWCMTRKPGA

SEQ ID NO: 17229 - protein, 493 aa, Artificial Sequence
  Synthetic Polypeptide
MALPVTALLLPLALLLHAARPQLQLQESGPGLVKPSETLSLTCTVSGDSISSGDYYWGWIRQPPGKGLEWIGHIYYSGVTYYNPSLKSRVTISVDTSRNQFSLKLSSVTAADTAVYYCTREDSSNWRSRGQGTLVTVSSLESGGGGSFEVQLLESGGGLVQPGGSLRLSCAASGFSFSSYALSWVRQAPGKGLEWVSSIGENDGTTDYADAVKGRFTISRDNSKNTLYLQMNSLRVEDTAVYYCVKDGVHWGQGTLVTVSSTREQKLISEEDLKIEVMYPPPYLDNEKSNGTIIHVKGKHLCPSPLFPGPSKPFWVLVVVGGVLACYSLLVTVAFIIFWVRSKRSRLLHSDYMNMTPRRPGPTRKHYQPYAPPRDFAAYRSRVKFSRSADAPAYQQGQNQLYNELNLGRREEYDVLDKRRGRDPEMGGKPRRKNPQEGLYNELQKDKMAEAYSEIGMKGERRRGKGHDGLYQGLSTATKDTYDALHMQALPPR

SEQ ID NO: 17230 - protein, 499 aa, Artificial Sequence
  Synthetic Polypeptide
MALPVTALLLPLALLLHAARPQLQLQESGPGLVKPSETLSLTCTVSGDSISSGDYYWGWIRQPPGKGLEWIGHIYYSGVTYYNPSLKSRVTISVDTSRNQFSLKLSSVTAADTAVYYCTREDSSNWRSRGQGTLVTVSSLESGGGGSFEVQLLESGGGLVQPGGSLRLSCAASGFSFSSYALSWVRQAPGKGLEWVSSIGENDGTTDYADAVKGRFTISRDNSKNTLYLQMNSLRVEDTAVYYCVKDGVHWGQGTLVTVSSTREQKLISEEDLAKPTTTPAPRPPTPAPTIASQPLSLRPEACRPAAGGAVHTRGLDFACDIYIWAPLAGTCGVLLLSLVITLYCKRGRKKLLYIFKQPFMRPVQTTQEEDGCSCRFPEEEEGGCELRVKFSRSADAPAYQQGQNQLYNELNLGRREEYDVLDKRRGRDPEMGGKPRRKNPQEGLYNELQKDKMAEAYSEIGMKGERRRGKGHDGLYQGLSTATKDTYDALHMQALPPR

SEQ ID NO: 17231 - protein, 500 aa, Artificial Sequence
  Synthetic Polypeptide
MALPVTALLLPLALLLHAARPEVQLLESGGGLVQPGGSLRLSCAASGFSFSSYALSWVRQAPGKGLEWVSSIGENDGTTDYADAVKGRFTISRDNSKNTLYLQMNSLRVEDTAVYYCVKDGVHWGQGTLVTVSSLESGGGGSFEQLQLQESGPGLVKPSETLSLTCTVSGDSISSGDYYWGWIRQPPGKGLEWIGHIYYSGVTYYNPSLKSRVTISVDTSRNQFSLKLSSVTAADTAVYYCTREDSSNWRSRGQGTLVTVSSTREQKLISEEDLAKPTTTPAPRPPTPAPTIASQPLSLRPEACRPAAGGAVHTRGLDFACDIYIWAPLAGTCGVLLLSLVITLYCKRGRKKLLYIFKQPFMRPVQTTQEEDGCSCRFPEEEEGGCELRVKFSRSADAPAYQQGQNQLYNELNLGRREEYDVLDKRRGRDPEMGGKPRRKNPQEGLYNELQKDKMAEAYSEIGMKGERRRGKGHDGLYQGLSTATKDTYDALHMQALPPR

SEQ ID NO: 17232 - protein, 912 aa, Artificial Sequence
  Synthetic Polypeptide
MALPVTALLLPLALLLHAARPQLQLQESGPGLVKPSETLSLTCTVSGDSISSGDYYWGWIRQPPGKGLEWIGHIYYSGVTYYNPSLKSRVTISVDTSRNQFSLKLSSVTAADTAVYYCTREDSSNWRSRGQGTLVTVSSLESGGGGSFEVQLLESGGGLVQPGGSLRLSCAASGFSFSSYALSWVRQAPGKGLEWVSSIGENDGTTDYADAVKGRFTISRDNSKNTLYLQMNSLRVEDTAVYYCVKDGVHWGQGTLVTVSSTREQKLISEEDLAKPTTTPAPRPPTPAPTIASQPLSLRPEACRPAAGGAVHTRGLDFACDIYIWAPLAGTCGVLLLSLVITLYCGRARVKFSRSADAPAYQQGQNQLYNELNLGRREEYDVLDKRRGRDPEMGGKPRRKNPQEGLYNELQKDKMAEAYSEIGMKGERRRGKGHDGLYQGLSTATKDTYDALHMQALPPRSRGSGATNFSLLKQAGDVEENPGPGIHMATYEVLCEVARKLGTDDREVVLFLLNVFIPQPTLAQLIGALRALKEEGRLTFPLLAECLFRAGRRDLLRDLLHLDPRFLERHLAGTMSYFSPYQLTVLHVDGELCARDIRSLIFLSKDTIGSRSTPQTFLHWVYCMENLDLLGPTDVDALMSMLRSLSRVDLQRQVQTLMGLHLSGPSHSQHYRHTPLETDFYDYKDDDDKTSGSGEGRGSLLTCGDVEENPGPHMTEYKPTVRLATRDDVPRAVRTLAAAFADYPATRHTVDPDRHIERVTELQELFLTRVGLDIGKVWVADDGAAVAVWTTPESVEAGAVFAEIGPRMAELSGSRLAAQQQMEGLLAPHRPKEPAWFLATVGVSPDHQGKGLGSAVVLPGVEAAERAGVPAFLETSAPRNLPFYERLGFTVTADVEVPEGPRTWCMTRKPGA

SEQ ID NO: 17233 - protein, 857 aa, Artificial Sequence
  Synthetic Polypeptide
MALPVTALLLPLALLLHAARPQLQLQESGPGLVKPSETLSLTCTVSGDSISSGDYYWGWIRQPPGKGLEWIGHIYYSGVTYYNPSLKSRVTISVDTSRNQFSLKLSSVTAADTAVYYCTREDSSNWRSRGQGTLVTVSSLEIQNPDPAVYQLRDSKSSDKSVCLFTDFDSQTNVSQSKDSDVYITDKCVLDMRSMDFKSNSAVAWSNKSDFACANAFNNSIIPEDTFFPSSDVPCDVKLVEKSFETDTNLNFQNLSVIGFRILLLKVAGFNLLMTLRLWSSRAKRSGSGVKQTLNFDLLKLAGDVESNPGPTSMDWIWRILFLVGAATGAHSFEVQLLESGGGLVQPGGSLRLSCAASGFSFSSYALSWVRQAPGKGLEWVSSIGENDGTTDYADAVKGRFTISRDNSKNTLYLQMNSLRVEDTAVYYCVKDGVHWGQGTLVTVSSTREDLKNVFPPEVAVFEPSKAEIAHTQKATLVCLATGFYPDHVELSWWVNGKEVHSGVCTDPQPLKEQPALNDSRYCLSSRLRVSATFWQNPRNHFRCQVQFYGLSENDEWTQDRAKPVTQIVSAEAWGRADCGITSASYHQGVLSATILYEILLGKATLYAVLVSALVLMAMVKRKDSRGRAKRSGSGATNFSLLKQAGDVEENPGPSRGHMTEYKPTVRLATRDDVPRAVRTLAAAFADYPATRHTVDPDRHIERVTELQELFLTRVGLDIGKVWVADDGAAVAVWTTPESVEAGAVFAEIGPRMAELSGSRLAAQQQMEGLLAPHRPKEPAWFLATVGVSPDHQGKGLGSAVVLPGVEAAERAGVPAFLETSAPRNLPFYERLGFTVTADVEVPEGPRTWCMTRKPGA

SEQ ID NO: 17234 - protein, 856 aa, Artificial Sequence
  Synthetic Polypeptide
MALPVTALLLPLALLLHAARPQLQLQESGPGLVKPSETLSLTCTVSGDSISSGDYYWGWIRQPPGKGLEWIGHIYYSGVTYYNPSLKSRVTISVDTSRNQFSLKLSSVTAADTAVYYCTREDSSNWRSRGQGTLVTVSSLEDLKNVFPPEVAVFEPSKAEIAHTQKATLVCLATGFYPDHVELSWWVNGKEVHSGVCTDPQPLKEQPALNDSRYCLSSRLRVSATFWQNPRNHFRCQVQFYGLSENDEWTQDRAKPVTQIVSAEAWGRADCGITSASYHQGVLSATILYEILLGKATLYAVLVSALVLMAMVKRKDSRGRAKRSGSGATNFSLLKQAGDVEENPGPTSMDWIWRILFLVGAATGAHSFEVQLLESGGGLVQPGGSLRLSCAASGFSFSSYALSWVRQAPGKGLEWVSSIGENDGTTDYADAVKGRFTISRDNSKNTLYLQMNSLRVEDTAVYYCVKDGVHWGQGTLVTVSSTRIQNPDPAVYQLRDSKSSDKSVCLFTDFDSQTNVSQSKDSDVYITDKCVLDMRSMDFKSNSAVAWSNKSDFACANAFNNSIIPEDTFFPSSDVPCDVKLVEKSFETDTNLNFQNLSVIGFRILLLKVAGFNLLMTLRLWSSRAKRSGSGVKQTLNFDLLKLAGDVESNPGPSRGHMTEYKPTVRLATRDDVPRAVRTLAAAFADYPATRHTVDPDRHIERVTELQELFLTRVGLDIGKVWVADDGAAVAVWTTPESVEAGAVFAEIGPRMAELSGSRLAAQQQMEGLLAPHRPKEPAWFLATVGVSPDHQGKGLGSAVVLPGVEAAERAGVPAFLETSAPRNLPFYERLGFTVTADVEVPEGPRTWCMTRKPGA

SEQ ID NO: 17235 - protein, 623 aa, Artificial Sequence
  Synthetic Polypeptide
MALPVTALLLPLALLLHAARPQLQLQESGPGLVKPSETLSLTCTVSGDSISSGDYYWGWIRQPPGKGLEWIGHIYYSGVTYYNPSLKSRVTISVDTSRNQFSLKLSSVTAADTAVYYCTREDSSNWRSRGQGTLVTVSSLEDLKNVFPPEVAVFEPSEAEISHTQKATLVCLATGFYPDHVELSWWVNGKEVHSGVCTDPQPLKEQPALNDSRYCLSSRLRVSATFWQNPRNHFRCQVQFYGLSENDEWTQDRAKPVTQIVSAEAWGRADCGFTSESYQQGVLSATILYEILLGKATLYAVLVSALVLMAMVKRKDSRGRAKRSGSGATNFSLLKQAGDVEENPGPTSMDWIWRILFLVGAATGAHSFEVQLLESGGGLVQPGGSLRLSCAASGFSFSSYALSWVRQAPGKGLEWVSSIGENDGTTDYADAVKGRFTISRDNSKNTLYLQMNSLRVEDTAVYYCVKDGVHWGQGTLVTVSSTRIQNPDPAVYQLRDSKSSDKSVCLFTDFDSQTNVSQSKDSDVYITDKCVLDMRSMDFKSNSAVAWSNKSDFACANAFNNSIIPEDTFFPSPESSCDVKLVEKSFETDTNLNFQNLSVIGFRILLLKVAGFNLLMTLRLWSS

SEQ ID NO: 17236 - protein, 848 aa, Artificial Sequence
  Synthetic Polypeptide
MALPVTALLLPLALLLHAARPQLQLQESGPGLVKPSETLSLTCTVSGDSISSGDYYWGWIRQPPGKGLEWIGHIYYSGVTYYNPSLKSRVTISVDTSRNQFSLKLSSVTAADTAVYYCTREDSSNWRSRGQGTLVTVSSLEDLKNVFPPEVAVFEPSEAEISHTQKATLVCLATGFYPDHVELSWWVNGKEVHSGVCTDPQPLKEQPALNDSRYCLSSRLRVSATFWQNPRNHFRCQVQFYGLSENDEWTQDRAKPVTQIVSAEAWGRADCGFTSESYQQGVLSATILYEILLGKATLYAVLVSALVLMAMVKRKDSRGRAKRSGSGATNFSLLKQAGDVEENPGPTSMDWIWRILFLVGAATGAHSFEVQLLESGGGLVQPGGSLRLSCAASGFSFSSYALSWVRQAPGKGLEWVSSIGENDGTTDYADAVKGRFTISRDNSKNTLYLQMNSLRVEDTAVYYCVKDGVHWGQGTLVTVSSTRIQNPDPAVYQLRDSKSSDKSVCLFTDFDSQTNVSQSKDSDVYITDKCVLDMRSMDFKSNSAVAWSNKSDFACANAFNNSIIPEDTFFPSPESSCDVKLVEKSFETDTNLNFQNLSVIGFRILLLKVAGFNLLMTLRLWSSRAKRSGSGVKQTLNFDLLKLAGDVESNPGPSRGGIHTMATYEVLCEVARKLGTDDREVVLFLLNVFIPQPTLAQLIGALRALKEEGRLTFPLLAECLFRAGRRDLLRDLLHLDPRFLERHLAGTMSYFSPYQLTVLHVDGELCARDIRSLIFLSKDTIGSRSTPQTFLHWVYCMENLDLLGPTDVDALMSMLRSLSRVDLQRQVQTLMGLHLSGPSHSQHYRHTP

SEQ ID NO: 17237 - protein, 627 aa, Artificial Sequence
  Synthetic Polypeptide
MALPVTALLLPLALLLHAARPQLQLQESGPGLVKPSETLSLTCTVSGDSISSGDYYWGWIRQPPGKGLEWIGHIYYSGVTYYNPSLKSRVTISVDTSRNQFSLKLSSVTAADTAVYYCTREDSSNWRSRGQGTLVTVSSLEIQNPDPAVYQLRDSKSSDKSVCLFTDFDSQTNVSQSKDSDVYITDKCVLDMRSMDFKSNSAVAWSNKSDFACANAFNNSIIPEDTFFPSPESSCDVKLVEKSFETDTNLNFQNLSVIGFRILLLKVAGFNLLMTLRLWSSRAKRSGSGVKQTLNFDLLKLAGDVESNPGPTSMDWIWRILFLVGAATGAHSFEVQLLESGGGLVQPGGSLRLSCAASGFSFSSYALSWVRQAPGKGLEWVSSIGENDGTTDYADAVKGRFTISRDNSKNTLYLQMNSLRVEDTAVYYCVKDGVHWGQGTLVTVSSTREDLKNVFPPEVAVFEPSEAEISHTQKATLVCLATGFYPDHVELSWWVNGKEVHSGVCTDPQPLKEQPALNDSRYCLSSRLRVSATFWQNPRNHFRCQVQFYGLSENDEWTQDRAKPVTQIVSAEAWGRADCGFTSESYQQGVLSATILYEILLGKATLYAVLVSALVLMAMVKRKDSRG

SEQ ID NO: 17238 - protein, 849 aa, Artificial Sequence
  Synthetic Polypeptide
MALPVTALLLPLALLLHAARPQLQLQESGPGLVKPSETLSLTCTVSGDSISSGDYYWGWIRQPPGKGLEWIGHIYYSGVTYYNPSLKSRVTISVDTSRNQFSLKLSSVTAADTAVYYCTREDSSNWRSRGQGTLVTVSSLEIQNPDPAVYQLRDSKSSDKSVCLFTDFDSQTNVSQSKDSDVYITDKCVLDMRSMDFKSNSAVAWSNKSDFACANAFNNSIIPEDTFFPSPESSCDVKLVEKSFETDTNLNFQNLSVIGFRILLLKVAGFNLLMTLRLWSSRAKRSGSGVKQTLNFDLLKLAGDVESNPGPTSMDWIWRILFLVGAATGAHSFEVQLLESGGGLVQPGGSLRLSCAASGFSFSSYALSWVRQAPGKGLEWVSSIGENDGTTDYADAVKGRFTISRDNSKNTLYLQMNSLRVEDTAVYYCVKDGVHWGQGTLVTVSSTREDLKNVFPPEVAVFEPSEAEISHTQKATLVCLATGFYPDHVELSWWVNGKEVHSGVCTDPQPLKEQPALNDSRYCLSSRLRVSATFWQNPRNHFRCQVQFYGLSENDEWTQDRAKPVTQIVSAEAWGRADCGFTSESYQQGVLSATILYEILLGKATLYAVLVSALVLMAMVKRKDSRGRAKRSGSGATNFSLLKQAGDVEENPGPSRGGIHTMATYEVLCEVARKLGTDDREVVLFLLNVFIPQPTLAQLIGALRALKEEGRLTFPLLAECLFRAGRRDLLRDLLHLDPRFLERHLAGTMSYFSPYQLTVLHVDGELCARDIRSLIFLSKDTIGSRSTPQTFLHWVYCMENLDLLGPTDVDALMSMLRSLSRVDLQRQVQTLMGLHLSGPSHSQHYRHTP

SEQ ID NO: 17239 - protein, 896 aa, Artificial Sequence
  Synthetic Polypeptide
MALPVTALLLPLALLLHAARPLEGKPIPNPLLGLDSTGSGEDLKNVFPPEVAVFEPSKAEIAHTQKATLVCLATGFYPDHVELSWWVNGKEVHSGVCTDPQPLKEQPALNDSRYCLSSRLRVSATFWQNPRNHFRCQVQFYGLSENDEWTQDRAKPVTQIVSAEAWGRADCGITSASYHQGVLSATILYEILLGKATLYAVLVSALVLMAMVKRKDSRGRAKRSGSGATNFSLLKQAGDVEENPGPTSMALPVTALLLPLALLLHAARPQLQLQESGPGLVKPSETLSLTCTVSGDSISSGDYYWGWIRQPPGKGLEWIGHIYYSGVTYYNPSLKSRVTISVDTSRNQFSLKLSSVTAADTAVYYCTREDSSNWRSRGQGTLVTVSSLESGGGGSFEVQLLESGGGLVQPGGSLRLSCAASGFSFSSYALSWVRQAPGKGLEWVSSIGENDGTTDYADAVKGRFTISRDNSKNTLYLQMNSLRVEDTAVYYCVKDGVHWGQGTLVTVSSTREQKLISEEDGSGIQNPDPAVYQLRDSKSSDKSVCLFTDFDSQTNVSQSKDSDVYITDKCVLDMRSMDFKSNSAVAWSNKSDFACANAFNNSIIPEDTFFPSSDVPCDVKLVEKSFETDTNLNFQNLSVIGFRILLLKVAGFNLLMTLRLWSSRAKRSGSGVKQTLNFDLLKLAGDVESNPGPSRGHMTEYKPTVRLATRDDVPRAVRTLAAAFADYPATRHTVDPDRHIERVTELQELFLTRVGLDIGKVWVADDGAAVAVWTTPESVEAGAVFAEIGPRMAELSGSRLAAQQQMEGLLAPHRPKEPAWFLATVGVSPDHQGKGLGSAVVLPGVEAAERAGVPAFLETSAPRNLPFYERLGFTVTADVEVPEGPRTWCMTRKPGA

SEQ ID NO: 17240 - protein, 897 aa, Artificial Sequence
  Synthetic Polypeptide
MALPVTALLLPLALLLHAARPLEQKLISEEDLGSGDRPDPAVYQLRDSKSSDKSVCLFTDFDSQTNVSQSKDSDVYITDKCVLDMRSMDFKSNSAVAWSNKSDFACANAFNNSIIPEDTFFPSPESSCDVKLVEKSFETDTNLNFQNLSVIGFRILLLKVAGFNLLMTLRLWSSSSRAKRSGSGVKQTLNFDLLKLAGDVESNPGPTSMALPVTALLLPLALLLHAARPQLQLQESGPGLVKPSETLSLTCTVSGDSISSGDYYWGWIRQPPGKGLEWIGHIYYSGVTYYNPSLKSRVTISVDTSRNQFSLKLSSVTAADTAVYYCTREDSSNWRSRGQGTLVTVSSLESGGGGSFEVQLLESGGGLVQPGGSLRLSCAASGFSFSSYALSWVRQAPGKGLEWVSSIGENDGTTDYADAVKGRFTISRDNSKNTLYLQMNSLRVEDTAVYYCVKDGVHWGQGTLVTVSSTRGKPIPNPLLGLDSTGSGEDLKNVFPPEVAVFEPSEAEISHTQKATLVCLATGFYPDHVELSWWVNGKEVHSGVCTDPQPLKEQPALNDSRYCLSSRLRVSATFWQNPRNHFRCQVQFYGLSENDEWTQDRAKPVTQIVSAEAWGRADCGFTSESYQQGVLSATILYEILLGKATLYAVLVSALVLMAMVKRKDSRGRAKRSGSGATNFSLLKQAGDVEENPGPSRGHMTEYKPTVRLATRDDVPRAVRTLAAAFADYPATRHTVDPDRHIERVTELQELFLTRVGLDIGKVWVADDGAAVAVWTTPESVEAGAVFAEIGPRMAELSGSRLAAQQQMEGLLAPHRPKEPAWFLATVGVSPDHQGKGLGSAVVLPGVEAAERAGVPAFLETSAPRNLPFYERLGFTVTADVEVPEGPRTWCMTRKPGA

SEQ ID NO: 17241 - protein, 856 aa, Artificial Sequence
  Synthetic Polypeptide
MALPVTALLLPLALLLHAARPQLQLQESGPGLVKPSETLSLTCTVSGDSISSGDYYWGWIRQPPGKGLEWIGHIYYSGVTYYNPSLKSRVTISVDTSRNQFSLKLSSVTAADTAVYYCTREDSSNWRSRGQGTLVTVSSLEDLKNVFPPEVAVFEPSEAEISHTQKATLVCLATGFYPDHVELSWWVNGKEVHSGVSTDPQPLKEQPALNDSRYCLSSRLRVSATFWQNPRNHFRCQVQFYGLSENDEWTQDRAKPVTQIVSAEAWGRADCGFTSESYQQGVLSATILYEILLGKATLYAVLVSALVLMAMVKRKDSRGRAKRSGSGATNFSLLKQAGDVEENPGPTSMDWIWRILFLVGAATGAHSFEVQLLESGGGLVQPGGSLRLSCAASGFSFSSYALSWVRQAPGKGLEWVSSIGENDGTTDYADAVKGRFTISRDNSKNTLYLQMNSLRVEDTAVYYCVKDGVHWGQGTLVTVSSTRIQNPDPAVYQLRDSKSSDKSVCLFTDFDSQTNVSQSKDSDVYITDKTVLDMRSMDFKSNSAVAWSNKSDFACANAFNNSIIPEDTFFPSPESSCDVKLVEKSFETDTNLNFQNLSVIGFRILLLKVAGFNLLMTLRLWSSRAKRSGSGVKQTLNFDLLKLAGDVESNPGPSRGHMTEYKPTVRLATRDDVPRAVRTLAAAFADYPATRHTVDPDRHIERVTELQELFLTRVGLDIGKVWVADDGAAVAVWTTPESVEAGAVFAEIGPRMAELSGSRLAAQQQMEGLLAPHRPKEPAWFLATVGVSPDHQGKGLGSAVVLPGVEAAERAGVPAFLETSAPRNLPFYERLGFTVTADVEVPEGPRTWCMTRKPGA

SEQ ID NO: 17242 - protein, 938 aa, Artificial Sequence
  Synthetic Polypeptide
MALPVTALLLPLALLLHAARPQLQLQESGPGLVKPSETLSLTCTVSGDSISSGDYYWGWIRQPPGKGLEWIGHIYYSGVTYYNPSLKSRVTISVDTSRNQFSLKLSSVTAADTAVYYCTREDSSNWRSRGQGTLVTVSSLEDLKNVFPPEVAVFEPSEAEISHTQKATLVCLATGFYPDHVELSWWVNGKEVHSGVSTDPQPLKEQPALNDSRYCLSSRLRVSATFWQNPRNHFRCQVQFYGLSENDEWTQDRAKPVTQIVSAEAWGRADCGFTSESYQQGVLSATILYEILLGKATLYAVLVSALVLMAMVKRKDSRGRAKRSGSGATNFSLLKQAGDVEENPGPTSMDWIWRILFLVGAATGAHSFEVQLLESGGGLVQPGGSLRLSCAASGFSFSSYALSWVRQAPGKGLEWVSSIGENDGTTDYADAVKGRFTISRDNSKNTLYLQMNSLRVEDTAVYYCVKDGVHWGQGTLVTVSSTREQKLISEEDGSGTPFPSLAPPIMLLVDGKQQMVVVCLVLDVAPPGLDSPIWFSAGNGSALDAFTYGPSPATDGTWTNLAHLSLPSEELASWEPLVCHTGPGAEGHSRSTQPMHLSGEASTARTCPQEPLRGTPGGALWLGVLRLLLFKLLLFDLLLTCSCLCDPAGPLPSPATTTRLRALGSHRLHPATETGGREATSSPRPQPRDRRWGDTPPGRKPGSPVRAKRSGSGVKQTLNFDLLKLAGDVESNPGPSRGHMTEYKPTVRLATRDDVPRAVRTLAAAFADYPATRHTVDPDRHIERVTELQELFLTRVGLDIGKVWVADDGAAVAVWTTPESVEAGAVFAEIGPRMAELSGSRLAAQQQMEGLLAPHRPKEPAWFLATVGVSPDHQGKGLGSAVVLPGVEAAERAGVPAFLETSAPRNLPFYERLGFTVTADVEVPEGPRTWCMTRKPGA

SEQ ID NO: 17243 - protein, 951 aa, Artificial Sequence
  Synthetic Polypeptide
MALPVTALLLPLALLLHAARPLEDLKNVFPPEVAVFEPSEAEISHTQKATLVCLATGFYPDHVELSWWVNGKEVHSGVSTDPQPLKEQPALNDSRYCLSSRLRVSATFWQNPRNHFRCQVQFYGLSENDEWTQDRAKPVTQIVSAEAWGRADCGFTSESYQQGVLSATILYEILLGKATLYAVLVSALVLMAMVKRKDSRGRAKRSGSGATNFSLLKQAGDVEENPGPTSMALPVTALLLPLALLLHAARPQLQLQESGPGLVKPSETLSLTCTVSGDSISSGDYYWGWIRQPPGKGLEWIGHIYYSGVTYYNPSLKSRVTISVDTSRNQFSLKLSSVTAADTAVYYCTREDSSNWRSRGQGTLVTVSSLESGGGGSFEVQLLESGGGLVQPGGSLRLSCAASGFSFSSYALSWVRQAPGKGLEWVSSIGENDGTTDYADAVKGRFTISRDNSKNTLYLQMNSLRVEDTAVYYCVKDGVHWGQGTLVTVSSTREQKLISEEDLGSGTPFPSLAPPIMLLVDGKQQMVVVCLVLDVAPPGLDSPIWFSAGNGSALDAFTYGPSPATDGTWTNLAHLSLPSEELASWEPLVCHTGPGAEGHSRSTQPMHLSGEASTARTCPQEPLRGTPGGALWLGVLRLLLFKLLLFDLLLTCSCLCDPAGPLPSPATTTRLRALGSHRLHPATETGGREATSSPRPQPRDRRWGDTPPGRKPGSPVRAKRSGSGVKQTLNFDLLKLAGDVESNPGPSRSRGHMTEYKPTVRLATRDDVPRAVRTLAAAFADYPATRHTVDPDRHIERVTELQELFLTRVGLDIGKVWVADDGAAVAVWTTPESVEAGAVFAEIGPRMAELSGSRLAAQQQMEGLLAPHRPKEPAWFLATVGVSPDHQGKGLGSAVVLPGVEAAERAGVPAFLETSAPRNLPFYERLGFTVTADVEVPEGPRTWCMTRKPGA

SEQ ID NO: 17244 - protein, 893 aa, Artificial Sequence
  Synthetic Polypeptide
MALPVTALLLPLALLLHAARPQLQLQESGPGLVKPSETLSLTCTVSGDSISSGDYYWGWIRQPPGKGLEWIGHIYYSGVTYYNPSLKSRVTISVDTSRNQFSLKLSSVTAADTAVYYCTREDSSNWRSRGQGTLVTVSSLEGKPIPNPLLGLDSTGSGDKQLDADVSPKPTIFLPSIAETKLQKAGTYLCLLEKFFPDVIKIHWQEKKSNTILGSQEGNTMKTNDTYMKFSWLTVPEKSLDKEHRCIVRHENNKNGVDQEIIFPPIKTDVITMDPKDNCSKDANDTLLLQLTNTSAYYMYLLLLLKSVVYFAIITCCLLRRTAFCCNGEKSRAKRSGSGATNFSLLKQAGDVEENPGPTSMDWIWRILFLVGAATGAHSFEVQLLESGGGLVQPGGSLRLSCAASGFSFSSYALSWVRQAPGKGLEWVSSIGENDGTTDYADAVKGRFTISRDNSKNTLYLQMNSLRVEDTAVYYCVKDGVHWGQGTLVTVSSTREQKLISEEDGSGSQPHTKPSVFVMKNGTNVACLVKEFYPKDIRINLVSSKKITEFDPAIVISPSGKYNAVKLGKYEDSNSVTCSVQHDNKTVHSTDFEVKTDSTDHVKPKETENTKQPSKSCHKPKAIVHTEKVNMMSLTVLGLRMLFAKTVAVNFLLTAKLFFLRAKRSGSGVKQTLNFDLLKLAGDVESNPGPSRGHMTEYKPTVRLATRDDVPRAVRTLAAAFADYPATRHTVDPDRHIERVTELQELFLTRVGLDIGKVWVADDGAAVAVWTTPESVEAGAVFAEIGPRMAELSGSRLAAQQQMEGLLAPHRPKEPAWFLATVGVSPDHQGKGLGSAVVLPGVEAAERAGVPAFLETSAPRNLPFYERLGFTVTADVEVPEGPRTWCMTRKPGA

SEQ ID NO: 17245 - protein, 631 aa, Artificial Sequence
  Synthetic Polypeptide
MALPVTALLLPLALLLHAARPQLQLQESGPGLVKPSETLSLTCTVSGDSISSGDYYWGWIRQPPGKGLEWIGHIYYSGVTYYNPSLKSRVTISVDTSRNQFSLKLSSVTAADTAVYYCTREDSSNWRSRGQGTLVTVSSLESQPHTKPSVFVMKNGTNVACLVKEFYPKDIRINLVSSKKITEFDPAIVISPSGKYNAVKLGKYEDSNSVTCSVQHDNKTVHSTDFEVKTDSTDHVKPKETENTKQPSKSCHKPKAIVHTEKVNMMSLTVLGLRMLFAKTVAVNFLLTAKLFFLRAKRSGSGATNFSLLKQAGDVEENPGPTSMDWIWRILFLVGAATGAHSFEVQLLESGGGLVQPGGSLRLSCAASGFSFSSYALSWVRQAPGKGLEWVSSIGENDGTTDYADAVKGRFTISRDNSKNTLYLQMNSLRVEDTAVYYCVKDGVHWGQGTLVTVSSTRDKQLDADVSPKPTIFLPSIAETKLQKAGTYLCLLEKFFPDVIKIHWQEKKSNTILGSQEGNTMKTNDTYMKFSWLTVPEKSLDKEHRCIVRHENNKNGVDQEIIFPPIKTDVITMDPKDNCSKDANDTLLLQLTNTSAYYMYLLLLLKSVVYFAIITCCLLRRTAFCCNGEKS

SEQ ID NO: 17246 - protein, 903 aa, Artificial Sequence
  Synthetic Polypeptide
MALPVTALLLPLALLLHAARPLEGKPIPNPLLGLDSTGSGDKQLDADVSPKPTIFLPSIAETKLQKAGTYLCLLEKFFPDVIKIHWQEKKSNTILGSQEGNTMKTNDTYMKFSWLTVPEKSLDKEHRCIVRHENNKNGVDQEIIFPPIKTDVITMDPKDNCSKDANDTLLLQLTNTSAYYMYLLLLLKSVVYFAIITCCLLRRTAFCCNGEKSRAKRSGSGATNFSLLKQAGDVEENPGPTSMALPVTALLLPLALLLHAARPQLQLQESGPGLVKPSETLSLTCTVSGDSISSGDYYWGWIRQPPGKGLEWIGHIYYSGVTYYNPSLKSRVTISVDTSRNQFSLKLSSVTAADTAVYYCTREDSSNWRSRGQGTLVTVSSLESGGGGSFEVQLLESGGGLVQPGGSLRLSCAASGFSFSSYALSWVRQAPGKGLEWVSSIGENDGTTDYADAVKGRFTISRDNSKNTLYLQMNSLRVEDTAVYYCVKDGVHWGQGTLVTVSSTREQKLISEEDGSGSQPHTKPSVFVMKNGTNVACLVKEFYPKDIRINLVSSKKITEFDPAIVISPSGKYNAVKLGKYEDSNSVTCSVQHDNKTVHSTDFEVKTDSTDHVKPKETENTKQPSKSCHKPKAIVHTEKVNMMSLTVLGLRMLFAKTVAVNFLLTAKLFFLRAKRSGSGVKQTLNFDLLKLAGDVESNPGPSRGHMTEYKPTVRLATRDDVPRAVRTLAAAFADYPATRHTVDPDRHIERVTELQELFLTRVGLDIGKVWVADDGAAVAVWTTPESVEAGAVFAEIGPRMAELSGSRLAAQQQMEGLLAPHRPKEPAWFLATVGVSPDHQGKGLGSAVVLPGVEAAERAGVPAFLETSAPRNLPFYERLGFTVTADVEVPEGPRTWCMTRKPGA

SEQ ID NO: 17247 - protein, 1033 aa, Artificial Sequence
  Synthetic Polypeptide
MALPVTALLLPLALLLHAARPQLQLQESGPGLVKPSETLSLTCTVSGDSISSGDYYWGWIRQPPGKGLEWIGHIYYSGVTYYNPSLKSRVTISVDTSRNQFSLKLSSVTAADTAVYYCTREDSSNWRSRGQGTLVTVSSGQPKANPTVTLFPPSSEELQANKATLVCLISDFYPGAVTVAWKADGSPVKAGVETTKPSKQSNNKYAASSYLSLTPEQWKSHRSYSCQVTHEGSTVEKTVAPTECSGSQSFGLLDPKLCYLLDGILFIYGVILTALFLRVKFSRSADAPAYQQGQNQLYNELNLGRREEYDVLDKRRGRDPEMGGKPQRRKNPQEGLYNELQKDKMAEAYSEIGMKGERRRGKGHDGLYQGLSTATKDTYDALHMQALPPRRAKRSGSGATNFSLLKQAGDVEENPGPTSMDWIWRILFLVGAATGAHSFEVQLLESGGGLVQPGGSLRLSCAASGFSFSSYALSWVRQAPGKGLEWVSSIGENDGTTDYADAVKGRFTISRDNSKNTLYLQMNSLRVEDTAVYYCVKDGVHWGQGTLVTVSSASTKGPSVFPLAPSSKSTSGGTAALGCLVKDYFPEPVTVSWNSGALTSGVHTFPAVLQSSGLYSLSSVVTVPSSSLGTQTYICNVNHKPSNTKVDKRVEPKSCGTQSFGLLDPKLCYLLDGILFIYGVILTALFLRVKFSRSADAPAYQQGQNQLYNELNLGRREEYDVLDKRRGRDPEMGGKPQRRKNPQEGLYNELQKDKMAEAYSEIGMKGERRRGKGHDGLYQGLSTATKDTYDALHMQALPPRRAKRSGSGVKQTLNFDLLKLAGDVESNPGPSRGHMTEYKPTVRLATRDDVPRAVRTLAAAFADYPATRHTVDPDRHIERVTELQELFLTRVGLDIGKVWVADDGAAVAVWTTPESVEAGAVFAEIGPRMAELSGSRLAAQQQMEGLLAPHRPKEPAWFLATVGVSPDHQGKGLGSAVVLPGVEAAERAGVPAFLETSAPRNLPFYERLGFTVTADVEVPEGPRTWCMTRKPGA

SEQ ID NO: 17248 - protein, 819 aa, Artificial Sequence
  Synthetic Polypeptide
MALPVTALLLPLALLLHAARPQLQLQESGPGLVKPSETLSLTCTVSGDSISSGDYYWGWIRQPPGKGLEWIGHIYYSGVTYYNPSLKSRVTISVDTSRNQFSLKLSSVTAADTAVYYCTREDSSNWRSRGQGTLVTVSSLEDLKNVFPPEVAVFEPSEAEISHTQKATLVCLATGFYPDHVELSWWVNGKEVHSGVSTDPQPLKEQPALNDSRYCLSSRLRVSATFWQNPRNHFRCQVQFYGLSENDEWTQDRAKPVTQIVSAEAWGRADCGSQSFGLLDPKLCYLLDGILFIYGVILTALFLRVKFSRSADAPAYQQGQNQLYNELNLGRREEYDVLDKRRGRDPEMGGKPQRRKNPQEGLYNELQKDKMAEAYSEIGMKGERRRGKGHDGLYQGLSTATKDTYDALHMQALPPRRAKRSGSGATNFSLLKQAGDVEENPGPTSMDWIWRILFLVGAATGAHSFEVQLLESGGGLVQPGGSLRLSCAASGFSFSSYALSWVRQAPGKGLEWVSSIGENDGTTDYADAVKGRFTISRDNSKNTLYLQMNSLRVEDTAVYYCVKDGVHWGQGTLVTVSSTRIQNPDPAVYQLRDSKSSDKSVCLFTDFDSQTNVSQSKDSDVYITDKTVLDMRSMDFKSNSAVAWSNKSDFACANAFNNSIIPEDTFFPSPESSCGTQSFGLLDPKLCYLLDGILFIYGVILTALFLRVKFSRSADAPAYQQGQNQLYNELNLGRREEYDVLDKRRGRDPEMGGKPQRRKNPQEGLYNELQKDKMAEAYSEIGMKGERRRGKGHDGLYQGLSTATKDTYDALHMQALPPR

SEQ ID NO: 17249 - protein, 819 aa, Artificial Sequence
  Synthetic Polypeptide
MALPVTALLLPLALLLHAARPQLQLQESGPGLVKPSETLSLTCTVSGDSISSGDYYWGWIRQPPGKGLEWIGHIYYSGVTYYNPSLKSRVTISVDTSRNQFSLKLSSVTAADTAVYYCTREDSSNWRSRGQGTLVTVSSLEDLKNVFPPEVAVFEPSKAEIAHTQKATLVCLATGFYPDHVELSWWVNGKEVHSGVCTDPQPLKEQPALNDSRYCLSSRLRVSATFWQNPRNHFRCQVQFYGLSENDEWTQDRAKPVTQIVSAEAWGRADCGSQSFGLLDPKLCYLLDGILFIYGVILTALFLRVKFSRSADAPAYQQGQNQLYNELNLGRREEYDVLDKRRGRDPEMGGKPQRRKNPQEGLYNELQKDKMAEAYSEIGMKGERRRGKGHDGLYQGLSTATKDTYDALHMQALPPRRAKRSGSGATNFSLLKQAGDVEENPGPTSMDWIWRILFLVGAATGAHSFEVQLLESGGGLVQPGGSLRLSCAASGFSFSSYALSWVRQAPGKGLEWVSSIGENDGTTDYADAVKGRFTISRDNSKNTLYLQMNSLRVEDTAVYYCVKDGVHWGQGTLVTVSSTRIQNPDPAVYQLRDSKSSDKSVCLFTDFDSQTNVSQSKDSDVYITDKCVLDMRSMDFKSNSAVAWSNKSDFACANAFNNSIIPEDTFFPSSDVPCGTQSFGLLDPKLCYLLDGILFIYGVILTALFLRVKFSRSADAPAYQQGQNQLYNELNLGRREEYDVLDKRRGRDPEMGGKPQRRKNPQEGLYNELQKDKMAEAYSEIGMKGERRRGKGHDGLYQGLSTATKDTYDALHMQALPPR

SEQ ID NO: 17250 - protein, 890 aa, Artificial Sequence
  Synthetic Polypeptide
MALPVTALLLPLALLLHAARPQLQLQESGPGLVKPSETLSLTCTVSGDSISSGDYYWGWIRQPPGKGLEWIGHIYYSGVTYYNPSLKSRVTISVDTSRNQFSLKLSSVTAADTAVYYCTREDSSNWRSRGQGTLVTVSSLEGKPIPNPLLGLDSTGSGEDLKNVFPPEVAVFEPSEAEISHTQKATLVCLATGFYPDHVELSWWVNGKEVHSGVSTDPQPLKEQPALNDSRYCLSSRLRVSATFWQNPRNHFRCQVQFYGLSENDEWTQDRAKPVTQIVSAEAWGRADCGSQSFGLLDPKLCYLLDGILFIYGVILTALFLRVKFSRSADAPAYQQGQNQLYNELNLGRREEYDVLDKRRGRDPEMGGKPQRRKNPQEGLYNELQKDKMAEAYSEIGMKGERRRGKGHDGLYQGLSTATKDTYDALHMQALPPRRAKRSGSGATNFSLLKQAGDVEENPGPTSMDWIWRILFLVGAATGAHSFEVQLLESGGGLVQPGGSLRLSCAASGFSFSSYALSWVRQAPGKGLEWVSSIGENDGTTDYADAVKGRFTISRDNSKNTLYLQMNSLRVEDTAVYYCVKDGVHWGQGTLVTVSSTREQKLISEEDGSGIQNPDPAVYQLRDSKSSDKSVCLFTDFDSQTNVSQSKDSDVYITDKTVLDMRSMDFKSNSAVAWSNKSDFACANAFNNSIIPEDTFFPSPESSCGTQSFGLLDPKLCYLLDGILFIYGVILTALFLRSKRSRLLHSDYMNMTPRRPGPTRKHYQPYAPPRDFAAYRSRVKFSRSADAPAYQQGQNQLYNELNLGRREEYDVLDKRRGRDPEMGGKPQRRKNPQEGLYNELQKDKMAEAYSEIGMKGERRRGKGHDGLYQGLSTATKDTYDALHMQALPPR

SEQ ID NO: 17251 - protein, 931 aa, Artificial Sequence
  Synthetic Polypeptide
MALPVTALLLPLALLLHAARPQLQLQESGPGLVKPSETLSLTCTVSGDSISSGDYYWGWIRQPPGKGLEWIGHIYYSGVTYYNPSLKSRVTISVDTSRNQFSLKLSSVTAADTAVYYCTREDSSNWRSRGQGTLVTVSSLEGKPIPNPLLGLDSTGSGEDLKNVFPPEVAVFEPSEAEISHTQKATLVCLATGFYPDHVELSWWVNGKEVHSGVSTDPQPLKEQPALNDSRYCLSSRLRVSATFWQNPRNHFRCQVQFYGLSENDEWTQDRAKPVTQIVSAEAWGRADCGSQSFGLLDPKLCYLLDGILFIYGVILTALFLRSKRSRLLHSDYMNMTPRRPGPTRKHYQPYAPPRDFAAYRSRVKFSRSADAPAYQQGQNQLYNELNLGRREEYDVLDKRRGRDPEMGGKPQRRKNPQEGLYNELQKDKMAEAYSEIGMKGERRRGKGHDGLYQGLSTATKDTYDALHMQALPPRRAKRSGSGATNFSLLKQAGDVEENPGPTSMDWIWRILFLVGAATGAHSFEVQLLESGGGLVQPGGSLRLSCAASGFSFSSYALSWVRQAPGKGLEWVSSIGENDGTTDYADAVKGRFTISRDNSKNTLYLQMNSLRVEDTAVYYCVKDGVHWGQGTLVTVSSTREQKLISEEDGSGIQNPDPAVYQLRDSKSSDKSVCLFTDFDSQTNVSQSKDSDVYITDKTVLDMRSMDFKSNSAVAWSNKSDFACANAFNNSIIPEDTFFPSPESSCGTQSFGLLDPKLCYLLDGILFIYGVILTALFLRSKRSRLLHSDYMNMTPRRPGPTRKHYQPYAPPRDFAAYRSRVKFSRSADAPAYQQGQNQLYNELNLGRREEYDVLDKRRGRDPEMGGKPQRRKNPQEGLYNELQKDKMAEAYSEIGMKGERRRGKGHDGLYQGLSTATKDTYDALHMQALPPR

SEQ ID NO: 17252 - protein, 892 aa, Artificial Sequence
  Synthetic Polypeptide
MALPVTALLLPLALLLHAARPQLQLQESGPGLVKPSETLSLTCTVSGDSISSGDYYWGWIRQPPGKGLEWIGHIYYSGVTYYNPSLKSRVTISVDTSRNQFSLKLSSVTAADTAVYYCTREDSSNWRSRGQGTLVTVSSLEGKPIPNPLLGLDSTGSGEDLKNVFPPEVAVFEPSEAEISHTQKATLVCLATGFYPDHVELSWWVNGKEVHSGVSTDPQPLKEQPALNDSRYCLSSRLRVSATFWQNPRNHFRCQVQFYGLSENDEWTQDRAKPVTQIVSAEAWGRADCGSQSFGLLDPKLCYLLDGILFIYGVILTALFLRVKFSRSADAPAYQQGQNQLYNELNLGRREEYDVLDKRRGRDPEMGGKPQRRKNPQEGLYNELQKDKMAEAYSEIGMKGERRRGKGHDGLYQGLSTATKDTYDALHMQALPPRRAKRSGSGATNFSLLKQAGDVEENPGPTSMDWIWRILFLVGAATGAHSFEVQLLESGGGLVQPGGSLRLSCAASGFSFSSYALSWVRQAPGKGLEWVSSIGENDGTTDYADAVKGRFTISRDNSKNTLYLQMNSLRVEDTAVYYCVKDGVHWGQGTLVTVSSTREQKLISEEDLGSGIQNPDPAVYQLRDSKSSDKSVCLFTDFDSQTNVSQSKDSDVYITDKTVLDMRSMDFKSNSAVAWSNKSDFACANAFNNSIIPEDTFFPSPESSCGTQSFGLLDPKLCYLLDGILFIYGVILTALFLKRGRKKLLYIFKQPFMRPVQTTQEEDGCSCRFPEEEEGGCELRVKFSRSADAPAYQQGQNQLYNELNLGRREEYDVLDKRRGRDPEMGGKPQRRKNPQEGLYNELQKDKMAEAYSEIGMKGERRRGKGHDGLYQGLSTATKDTYDALHMQALPPR

SEQ ID NO: 17253 - protein, 934 aa, Artificial Sequence
  Synthetic Polypeptide
MALPVTALLLPLALLLHAARPQLQLQESGPGLVKPSETLSLTCTVSGDSISSGDYYWGWIRQPPGKGLEWIGHIYYSGVTYYNPSLKSRVTISVDTSRNQFSLKLSSVTAADTAVYYCTREDSSNWRSRGQGTLVTVSSLEGKPIPNPLLGLDSTGSGEDLKNVFPPEVAVFEPSEAEISHTQKATLVCLATGFYPDHVELSWWVNGKEVHSGVSTDPQPLKEQPALNDSRYCLSSRLRVSATFWQNPRNHFRCQVQFYGLSENDEWTQDRAKPVTQIVSAEAWGRADCGSQSFGLLDPKLCYLLDGILFIYGVILTALFLKRGRKKLLYIFKQPFMRPVQTTQEEDGCSCRFPEEEEGGCELRVKFSRSADAPAYQQGQNQLYNELNLGRREEYDVLDKRRGRDPEMGGKPQRRKNPQEGLYNELQKDKMAEAYSEIGMKGERRRGKGHDGLYQGLSTATKDTYDALHMQALPPRRAKRSGSGATNFSLLKQAGDVEENPGPTSMDWIWRILFLVGAATGAHSFEVQLLESGGGLVQPGGSLRLSCAASGFSFSSYALSWVRQAPGKGLEWVSSIGENDGTTDYADAVKGRFTISRDNSKNTLYLQMNSLRVEDTAVYYCVKDGVHWGQGTLVTVSSTREQKLISEEDLGSGIQNPDPAVYQLRDSKSSDKSVCLFTDFDSQTNVSQSKDSDVYITDKTVLDMRSMDFKSNSAVAWSNKSDFACANAFNNSIIPEDTFFPSPESSCGTQSFGLLDPKLCYLLDGILFIYGVILTALFLKRGRKKLLYIFKQPFMRPVQTTQEEDGCSCRFPEEEEGGCELRVKFSRSADAPAYQQGQNQLYNELNLGRREEYDVLDKRRGRDPEMGGKPQRRKNPQEGLYNELQKDKMAEAYSEIGMKGERRRGKGHDGLYQGLSTATKDTYDALHMQALPPR

SEQ ID NO: 17254 - protein, 824 aa, Artificial Sequence
  Synthetic Polypeptide
MALPVTALLLPLALLLHAARPQLQLQESGPGLVKPSETLSLTCTVSGDSISSGDYYWGWIRQPPGKGLEWIGHIYYSGVTYYNPSLKSRVTISVDTSRNQFSLKLSSVTAADTAVYYCTREDSSNWRSRGQGTLVTVSSLEQSFGLLDPKLCYLLDGILFIYGVILTALFLRVKFSRSADAPAYQQGQNQLYNELNLGRREEYDVLDKRRGRDPEMGGKPQRRKNPQEGLYNELQKDKMAEAYSEIGMKGERRRGKGHDGLYQGLSTATKDTYDALHMQALPPRRAKRSGSGATNFSLLKQAGDVEENPGPTSMDWIWRILFLVGAATGAHSFEVQLLESGGGLVQPGGSLRLSCAASGFSFSSYALSWVRQAPGKGLEWVSSIGENDGTTDYADAVKGRFTISRDNSKNTLYLQMNSLRVEDTAVYYCVKDGVHWGQGTLVTVSSTRQSFGLLDPKLCYLLDGILFIYGVILTALFLRVKFSRSADAPAYQQGQNQLYNELNLGRREEYDVLDKRRGRDPEMGGKPQRRKNPQEGLYNELQKDKMAEAYSEIGMKGERRRGKGHDGLYQGLSTATKDTYDALHMQALPPRRAKRSGSGVKQTLNFDLLKLAGDVESNPGPSRGHMTEYKPTVRLATRDDVPRAVRTLAAAFADYPATRHTVDPDRHIERVTELQELFLTRVGLDIGKVWVADDGAAVAVWTTPESVEAGAVFAEIGPRMAELSGSRLAAQQQMEGLLAPHRPKEPAWFLATVGVSPDHQGKGLGSAVVLPGVEAAERAGVPAFLETSAPRNLPFYERLGFTVTADVEVPEGPRTWCMTRKPGA

SEQ ID NO: 17255 - protein, 649 aa, Artificial Sequence
  Synthetic Polypeptide
MALPVTALLLPLALLLHAARPQLQLQESGPGLVKPSETLSLTCTVSGDSISSGDYYWGWIRQPPGKGLEWIGHIYYSGVTYYNPSLKSRVTISVDTSRNQFSLKLSSVTAADTAVYYCTREDSSNWRSRGQGTLVTVSSLEGQPKANPTVTLFPPSSEELQANKATLVCLISDFYPGAVTVAWKADGSPVKAGVETTKPSKQSNNKYAASSYLSLTPEQWKSHRSYSCQVTHEGSTVEKTVAPTECSPIKTDVITMDPKDNCSKDANDTLLLQLTNTSAYYMYLLLLLKSVVYFAIITCCLLRRTAFCCNGEKSRAKRSGSGATNFSLLKQAGDVEENPGPTSMDWIWRILFLVGAATGAHSFEVQLLESGGGLVQPGGSLRLSCAASGFSFSSYALSWVRQAPGKGLEWVSSIGENDGTTDYADAVKGRFTISRDNSKNTLYLQMNSLRVEDTAVYYCVKDGVHWGQGTLVTVSSTRASTKGPSVFPLAPSSKSTSGGTAALGCLVKDYFPEPVTVSWNSGALTSGVHTFPAVLQSSGLYSLSSVVTVPSSSLGTQTYICNVNHKPSNTKVDKRVEPKSCEVKTDSTDHVKPKETENTKQPSKSCHKPKAIVHTEKVNMMSLTVLGLRMLFAKTVAVNFLLTAKLFFL

SEQ ID NO: 17256 - protein, 627 aa, Artificial Sequence
  Synthetic Polypeptide
MALPVTALLLPLALLLHAARPQLQLQESGPGLVKPSETLSLTCTVSGDSISSGDYYWGWIRQPPGKGLEWIGHIYYSGVTYYNPSLKSRVTISVDTSRNQFSLKLSSVTAADTAVYYCTREDSSNWRSRGQGTLVTVSSLEGQPKANPTVTLFPPSSEELQANKATLVCLISDFYPGAVTVAWKADGSPVKAGVETTKPSKQSNNKYAASSYLSLTPEQWKSHRSYSCQVTHEGSTVEKTVAPTECSGRADCGITSASYHQGVLSATILYEILLGKATLYAVLVSALVLMAMVKRKDSRGRAKRSGSGATNFSLLKQAGDVEENPGPTSMDWIWRILFLVGAATGAHSFEVQLLESGGGLVQPGGSLRLSCAASGFSFSSYALSWVRQAPGKGLEWVSSIGENDGTTDYADAVKGRFTISRDNSKNTLYLQMNSLRVEDTAVYYCVKDGVHWGQGTLVTVSSTRASTKGPSVFPLAPSSKSTSGGTAALGCLVKDYFPEPVTVSWNSGALTSGVHTFPAVLQSSGLYSLSSVVTVPSSSLGTQTYICNVNHKPSNTKVDKRVEPKSCIPEDTFFPSSDVPCDVKLVEKSFETDTNLNFQNLSVIGFRILLLKVAGFNLLMTLRLWSS

SEQ ID NO: 17257 - protein, 627 aa, Artificial Sequence
  Synthetic Polypeptide
MALPVTALLLPLALLLHAARPQLQLQESGPGLVKPSETLSLTCTVSGDSISSGDYYWGWIRQPPGKGLEWIGHIYYSGVTYYNPSLKSRVTISVDTSRNQFSLKLSSVTAADTAVYYCTREDSSNWRSRGQGTLVTVSSLEGQPKANPTVTLFPPSSEELQANKATLVCLISDFYPGAVTVAWKADGSPVKAGVETTKPSKQSNNKYAASSYLSLTPEQWKSHRSYSCQVTHEGSTVEKTVAPTECSGRADCGFTSESYQQGVLSATILYEILLGKATLYAVLVSALVLMAMVKRKDSRGRAKRSGSGATNFSLLKQAGDVEENPGPTSMDWIWRILFLVGAATGAHSFEVQLLESGGGLVQPGGSLRLSCAASGFSFSSYALSWVRQAPGKGLEWVSSIGENDGTTDYADAVKGRFTISRDNSKNTLYLQMNSLRVEDTAVYYCVKDGVHWGQGTLVTVSSTRASTKGPSVFPLAPSSKSTSGGTAALGCLVKDYFPEPVTVSWNSGALTSGVHTFPAVLQSSGLYSLSSVVTVPSSSLGTQTYICNVNHKPSNTKVDKRVEPKSCIPEDTFFPSPESSCDVKLVEKSFETDTNLNFQNLSVIGFRILLLKVAGFNLLMTLRLWSS

SEQ ID NO: 17258 - protein, 448 aa, Artificial Sequence
  Synthetic Polypeptide
MALPVTALLLPLALLLHAARPQLQLQESGPGLVKPSETLSLTCTVSGDSISSGDYYWGWIRQPPGKGLEWIGHIYYSGVTYYNPSLKSRVTISVDTSRNQFSLKLSSVTAADTAVYYCTREDSSNWRSRGQGTLVTVSSLESGGGGSFEVQLLESGGGLVQPGGSLRLSCAASGFSFSSYALSWVRQAPGKGLEWVSSIGENDGTTDYADAVKGRFTISRDNSKNTLYLQMNSLRVEDTAVYYCVKDGVHWGQGTLVTVSSTRDGNEEMGGITQTPYKVSISGTTVILTCPQYPGSEILWQHNDKNIGGDEDDKNIGSDEDHLSLKEFSELEQSGYYVCYPRGSKPEDANFYLYLRARVCENCMEMDVMSVATIVIVDICITGGLLLLVYYWSKNRKAKAKPVTRGAGAGGRQRGQNKERPPPVPNPDYEPIRKGQRDLYSGLNQRRI

SEQ ID NO: 17259 - protein, 413 aa, Artificial Sequence
  Synthetic Polypeptide
MALPVTALLLPLALLLHAARPQLQLQESGPGLVKPSETLSLTCTVSGDSISSGDYYWGWIRQPPGKGLEWIGHIYYSGVTYYNPSLKSRVTISVDTSRNQFSLKLSSVTAADTAVYYCTREDSSNWRSRGQGTLVTVSSLESGGGGSFEVQLLESGGGLVQPGGSLRLSCAASGFSFSSYALSWVRQAPGKGLEWVSSIGENDGTTDYADAVKGRFTISRDNSKNTLYLQMNSLRVEDTAVYYCVKDGVHWGQGTLVTVSSTRFKIPIEELEDRVFVNCNTSITWVEGTVGTLLSDITRLDLGKRILDPRGIYRCNGTDIYKDKESTVQVHYRMCQSCVELDPATVAGIIVTDVIATLLLALGVFCFAGHETGRLSGAADTQALLRNDQVYQPLRDRDDAQYSHLGGNWARNK

SEQ ID NO: 17260 - protein, 423 aa, Artificial Sequence
  Synthetic Polypeptide
MALPVTALLLPLALLLHAARPQLQLQESGPGLVKPSETLSLTCTVSGDSISSGDYYWGWIRQPPGKGLEWIGHIYYSGVTYYNPSLKSRVTISVDTSRNQFSLKLSSVTAADTAVYYCTREDSSNWRSRGQGTLVTVSSLESGGGGSFEVQLLESGGGLVQPGGSLRLSCAASGFSFSSYALSWVRQAPGKGLEWVSSIGENDGTTDYADAVKGRFTISRDNSKNTLYLQMNSLRVEDTAVYYCVKDGVHWGQGTLVTVSSTRQSIKGNHLVKVYDYQEDGSVLLTCDAEAKNITWFKDGKMIGFLTEDKKKWNLGSNAKDPRGMYQCKGSQNKSKPLQVYYRMCQNCIELNAATISGFLFAEIVSIFVLAVGVYFIAGQDGVRQSRASDKQTLLPNDQLYQPLKDREDDQYSHLQGNQLRRN

SEQ ID NO: 17261 - protein, 406 aa, Artificial Sequence
  Synthetic Polypeptide
MALPVTALLLPLALLLHAARPQLQLQESGPGLVKPSETLSLTCTVSGDSISSGDYYWGWIRQPPGKGLEWIGHIYYSGVTYYNPSLKSRVTISVDTSRNQFSLKLSSVTAADTAVYYCTREDSSNWRSRGQGTLVTVSSLESGGGGSFEVQLLESGGGLVQPGGSLRLSCAASGFSFSSYALSWVRQAPGKGLEWVSSIGENDGTTDYADAVKGRFTISRDNSKNTLYLQMNSLRVEDTAVYYCVKDGVHWGQGTLVTVSSTRQSFGLLDPKLCYLLDGILFIYGVILTALFLRVKFSRSADAPAYQQGQNQLYNELNLGRREEYDVLDKRRGRDPEMGGKPQRRKNPQEGLYNELQKDKMAEAYSEIGMKGERRRGKGHDGLYQGLSTATKDTYDALHMQALPPR

SEQ ID NO: 17262 - protein, 449 aa, Artificial Sequence
  Synthetic Polypeptide
MALPVTALLLPLALLLHAARPEVQLLESGGGLVQPGGSLRLSCAASGFSFSSYALSWVRQAPGKGLEWVSSIGENDGTTDYADAVKGRFTISRDNSKNTLYLQMNSLRVEDTAVYYCVKDGVHWGQGTLVTVSSLESGGGGSFEQLQLQESGPGLVKPSETLSLTCTVSGDSISSGDYYWGWIRQPPGKGLEWIGHIYYSGVTYYNPSLKSRVTISVDTSRNQFSLKLSSVTAADTAVYYCTREDSSNWRSRGQGTLVTVSSTRDGNEEMGGITQTPYKVSISGTTVILTCPQYPGSEILWQHNDKNIGGDEDDKNIGSDEDHLSLKEFSELEQSGYYVCYPRGSKPEDANFYLYLRARVCENCMEMDVMSVATIVIVDICITGGLLLLVYYWSKNRKAKAKPVTRGAGAGGRQRGQNKERPPPVPNPDYEPIRKGQRDLYSGLNQRRI

SEQ ID NO: 17263 - protein, 414 aa, Artificial Sequence
  Synthetic Polypeptide
MALPVTALLLPLALLLHAARPEVQLLESGGGLVQPGGSLRLSCAASGFSFSSYALSWVRQAPGKGLEWVSSIGENDGTTDYADAVKGRFTISRDNSKNTLYLQMNSLRVEDTAVYYCVKDGVHWGQGTLVTVSSLESGGGGSFEQLQLQESGPGLVKPSETLSLTCTVSGDSISSGDYYWGWIRQPPGKGLEWIGHIYYSGVTYYNPSLKSRVTISVDTSRNQFSLKLSSVTAADTAVYYCTREDSSNWRSRGQGTLVTVSSTRFKIPIEELEDRVFVNCNTSITWVEGTVGTLLSDITRLDLGKRILDPRGIYRCNGTDIYKDKESTVQVHYRMCQSCVELDPATVAGIIVTDVIATLLLALGVFCFAGHETGRLSGAADTQALLRNDQVYQPLRDRDDAQYSHLGGNWARNK

SEQ ID NO: 17264 - protein, 424 aa, Artificial Sequence
  Synthetic Polypeptide
MALPVTALLLPLALLLHAARPEVQLLESGGGLVQPGGSLRLSCAASGFSFSSYALSWVRQAPGKGLEWVSSIGENDGTTDYADAVKGRFTISRDNSKNTLYLQMNSLRVEDTAVYYCVKDGVHWGQGTLVTVSSLESGGGGSFEQLQLQESGPGLVKPSETLSLTCTVSGDSISSGDYYWGWIRQPPGKGLEWIGHIYYSGVTYYNPSLKSRVTISVDTSRNQFSLKLSSVTAADTAVYYCTREDSSNWRSRGQGTLVTVSSTRQSIKGNHLVKVYDYQEDGSVLLTCDAEAKNITWFKDGKMIGFLTEDKKKWNLGSNAKDPRGMYQCKGSQNKSKPLQVYYRMCQNCIELNAATISGFLFAEIVSIFVLAVGVYFIAGQDGVRQSRASDKQTLLPNDQLYQPLKDREDDQYSHLQGNQLRRN

SEQ ID NO: 17265 - protein, 407 aa, Artificial Sequence
  Synthetic Polypeptide
MALPVTALLLPLALLLHAARPEVQLLESGGGLVQPGGSLRLSCAASGFSFSSYALSWVRQAPGKGLEWVSSIGENDGTTDYADAVKGRFTISRDNSKNTLYLQMNSLRVEDTAVYYCVKDGVHWGQGTLVTVSSLESGGGGSFEQLQLQESGPGLVKPSETLSLTCTVSGDSISSGDYYWGWIRQPPGKGLEWIGHIYYSGVTYYNPSLKSRVTISVDTSRNQFSLKLSSVTAADTAVYYCTREDSSNWRSRGQGTLVTVSSTRQSFGLLDPKLCYLLDGILFIYGVILTALFLRVKFSRSADAPAYQQGQNQLYNELNLGRREEYDVLDKRRGRDPEMGGKPQRRKNPQEGLYNELQKDKMAEAYSEIGMKGERRRGKGHDGLYQGLSTATKDTYDALHMQALPPR

SEQ ID NO: 17266 - protein, 639 aa, Artificial Sequence
  Synthetic Polypeptide
MALPVTALLLPLALLLHAARPQLQLQESGPGLVKPSETLSLTCTVSGDSISSGDYYWGWIRQPPGKGLEWIGHIYYSGVTYYNPSLKSRVTISVDTSRNQFSLKLSSVTAADTAVYYCTREDSSNWRSRGQGTLVTVSSLESGGGGSFEVQLLESGGGLVQPGGSLRLSCAASGFSFSSYALSWVRQAPGKGLEWVSSIGENDGTTDYADAVKGRFTISRDNSKNTLYLQMNSLRVEDTAVYYCVKDGVHWGQGTLVTVSSTRGSGIQNPDPAVYQLRDSKSSDKSVCLFTDFDSQTNVSQSKDSDVYITDKTVLDMRSMDFKSNSAVAWSNKSDFACANAFNNSIIPEDTFFPSPESSCDVKLVEKSFETDTNLNFQNLSVIGFRILLLKVAGFNLLMTLRLWSSRAKRSGSGVKQTLNFDLLKLAGDVESNPGPSRGHMTEYKPTVRLATRDDVPRAVRTLAAAFADYPATRHTVDPDRHIERVTELQELFLTRVGLDIGKVWVADDGAAVAVWTTPESVEAGAVFAEIGPRMAELSGSRLAAQQQMEGLLAPHRPKEPAWFLATVGVSPDHQGKGLGSAVVLPGVEAAERAGVPAFLETSAPRNLPFYERLGFTVTADVEVPEGPRTWCMTRKPGA

SEQ ID NO: 17267 - protein, 671 aa, Artificial Sequence
  Synthetic Polypeptide
MALPVTALLLPLALLLHAARPQLQLQESGPGLVKPSETLSLTCTVSGDSISSGDYYWGWIRQPPGKGLEWIGHIYYSGVTYYNPSLKSRVTISVDTSRNQFSLKLSSVTAADTAVYYCTREDSSNWRSRGQGTLVTVSSLESGGGGSFEVQLLESGGGLVQPGGSLRLSCAASGFSFSSYALSWVRQAPGKGLEWVSSIGENDGTTDYADAVKGRFTISRDNSKNTLYLQMNSLRVEDTAVYYCVKDGVHWGQGTLVTVSSLEDLKNVFPPEVAVFEPSEAEISHTQKATLVCLATGFYPDHVELSWWVNGKEVHSGVSTDPQPLKEQPALNDSRYCLSSRLRVSATFWQNPRNHFRCQVQFYGLSENDEWTQDRAKPVTQIVSAEAWGRADCGFTSESYQQGVLSATILYEILLGKATLYAVLVSALVLMAMVKRKDSRGRAKRSGSGATNFSLLKQAGDVEENPGPTRGHMTEYKPTVRLATRDDVPRAVRTLAAAFADYPATRHTVDPDRHIERVTELQELFLTRVGLDIGKVWVADDGAAVAVWTTPESVEAGAVFAEIGPRMAELSGSRLAAQQQMEGLLAPHRPKEPAWFLATVGVSPDHQGKGLGSAVVLPGVEAAERAGVPAFLETSAPRNLPFYERLGFTVTADVEVPEGPRTWCMTRKPGA

SEQ ID NO: 17268 - protein, 721 aa, Artificial Sequence
  Synthetic Polypeptide
MALPVTALLLPLALLLHAARPQLQLQESGPGLVKPSETLSLTCTVSGDSISSGDYYWGWIRQPPGKGLEWIGHIYYSGVTYYNPSLKSRVTISVDTSRNQFSLKLSSVTAADTAVYYCTREDSSNWRSRGQGTLVTVSSLESGGGGSFEVQLLESGGGLVQPGGSLRLSCAASGFSFSSYALSWVRQAPGKGLEWVSSIGENDGTTDYADAVKGRFTISRDNSKNTLYLQMNSLRVEDTAVYYCVKDGVHWGQGTLVTVSSTREQKLISEEDLGSGTPFPSLAPPIMLLVDGKQQMVVVCLVLDVAPPGLDSPIWFSAGNGSALDAFTYGPSPATDGTWTNLAHLSLPSEELASWEPLVCHTGPGAEGHSRSTQPMHLSGEASTARTCPQEPLRGTPGGALWLGVLRLLLFKLLLFDLLLTCSCLCDPAGPLPSPATTTRLRALGSHRLHPATETGGREATSSPRPQPRDRRWGDTPPGRKPGSPVRAKRSGSGVKQTLNFDLLKLAGDVESNPGPSRSRGHMTEYKPTVRLATRDDVPRAVRTLAAAFADYPATRHTVDPDRHIERVTELQELFLTRVGLDIGKVWVADDGAAVAVWTTPESVEAGAVFAEIGPRMAELSGSRLAAQQQMEGLLAPHRPKEPAWFLATVGVSPDHQGKGLGSAVVLPGVEAAERAGVPAFLETSAPRNLPFYERLGFTVTADVEVPEGPRTWCMTRKPGA

SEQ ID NO: 17269 - protein, 549 aa, Artificial Sequence; identical to SEQ ID NO: 17196
  Synthetic Polypeptide

SEQ ID NO: 17270 - protein, 319 aa, Artificial Sequence; identical to SEQ ID NO: 17197
  Synthetic Polypeptide

SEQ ID NO: 17271 - protein, 441 aa, Artificial Sequence
  Synthetic Polypeptide
MDWIWRILFLVGAATGAHSFEVQLLESGGGLVQPGGSLRLSCAASGFSFSSYALSWVRQAPGKGLEWVSSIGENDGTTDYADAVKGRFTISRDNSKNTLYLQMNSLRVEDTAVYYCVKDGVHWGQGTLVTVSSTRIQNPDPAVYQLRDSKSSDKSVCLFTDFDSQTNVSQSKDSDVYITDKTVLDMRSMDFKSNSAVAWSNKSDFACANAFNNSIIPEDTFFPSPESSCDVKLVEKSFETDTNLNFQNLSVIGFRILLLKVAGFNLLMTLRLWSSRAKRSGSGVKQTLNFDLLKLAGDVESNPGPSRGHMAKPLSQEESTLIERATATINSIPISEDYSVASAALSSDGRIFTGVNVYHFTGGPCAELVVLGTAAAAAAGNLTCIVAIGNENRGILSPCGRCRQVLLDLHPGIKAIVKDSDGQPTAVGIRELLPSGYVWEG

SEQ ID NO: 17272 - protein, 275 aa, Artificial Sequence
  Synthetic Polypeptide
MDWIWRILFLVGAATGAHSFEVQLLESGGGLVQPGGSLRLSCAASGFSFSSYALSWVRQAPGKGLEWVSSIGENDGTTDYADAVKGRFTISRDNSKNTLYLQMNSLRVEDTAVYYCVKDGVHWGQGTLVTVSSTRIQNPDPAVYQLRDSKSSDKSVCLFTDFDSQTNVSQSKDSDVYITDKTVLDMRSMDFKSNSAVAWSNKSDFACANAFNNSIIPEDTFFPSPESSCDVKLVEKSFETDTNLNFQNLSVIGFRILLLKVAGFNLLMTLRLWSS

SEQ ID NO: 17273 - protein, 567 aa, Artificial Sequence; identical to SEQ ID NO: 17200
  Synthetic Polypeptide

SEQ ID NO: 17274 - protein, 337 aa, Artificial Sequence; identical to SEQ ID NO: 17201
  Synthetic Polypeptide

SEQ ID NO: 17275 - protein, 453 aa, Artificial Sequence
  Synthetic Polypeptide
MDWIWRILFLVGAATGAHSFEVQLLESGGGLVQPGGSLRLSCAASGFSFSSYALSWVRQAPGKGLEWVSSIGENDGTTDYADAVKGRFTISRDNSKNTLYLQMNSLRVEDTAVYYCVKDGVHWGQGTLVTVSSTREQKLISEEDGSGIQNPDPAVYQLRDSKSSDKSVCLFTDFDSQTNVSQSKDSDVYITDKCVLDMRSMDFKSNSAVAWSNKSDFACANAFNNSIIPEDTFFPSPESSCDVKLVEKSFETDTNLNFQNLSVIGFRILLLKVAGFNLLMTLRLWSSRAKRSGSGVKQTLNFDLLKLAGDVESNPGPSRGHMAKPLSQEESTLIERATATINSIPISEDYSVASAALSSDGRIFTGVNVYHFTGGPCAELVVLGTAAAAAAGNLTCIVAIGNENRGILSPCGRCRQVLLDLHPGIKAIVKDSDGQPTAVGIRELLPSGYVWEG

SEQ ID NO: 17276 - protein, 287 aa, Artificial Sequence
  Synthetic Polypeptide
MDWIWRILFLVGAATGAHSFEVQLLESGGGLVQPGGSLRLSCAASGFSFSSYALSWVRQAPGKGLEWVSSIGENDGTTDYADAVKGRFTISRDNSKNTLYLQMNSLRVEDTAVYYCVKDGVHWGQGTLVTVSSTREQKLISEEDGSGIQNPDPAVYQLRDSKSSDKSVCLFTDFDSQTNVSQSKDSDVYITDKCVLDMRSMDFKSNSAVAWSNKSDFACANAFNNSIIPEDTFFPSPESSCDVKLVEKSFETDTNLNFQNLSVIGFRILLLKVAGFNLLMTLRLWSS

SEQ ID NO: 17277 - protein, 639 aa, Artificial Sequence
  Synthetic Polypeptide
MALPVTALLLPLALLLHAARPQLQLQESGPGLVKPSETLSLTCTVSGDSISSGDYYWGWIRQPPGKGLEWIGHIYYSGVTYYNPSLKSRVTISVDTSRNQFSLKLSSVTAADTAVYYCTREDSSNWRSRGQGTLVTVSSLESGGGGSFEVQLLESGGGLVQPGGSLRLSCAASGFSFSSYALSWVRQAPGKGLEWVSSIGENDGTTDYADAVKGRFTISRDNSKNTLYLQMNSLRVEDTAVYYCVKDGVHWGQGTLVTVSSTRGSGIQNPDPAVYQLRDSKSSDKSVCLFTDFDSQTNVSQSKDSDVYITDKTVLDMRSMDFKSNSAVAWSNKSDFACANAFNNSIIPEDTFFPSSDVPCDVKLVEKSFETDTNLNFQNLSVIGFRILLLKVAGFNLLMTLRLWSSRAKRSGSGVKQTLNFDLLKLAGDVESNPGPSRGHMTEYKPTVRLATRDDVPRAVRTLAAAFADYPATRHTVDPDRHIERVTELQELFLTRVGLDIGKVWVADDGAAVAVWTTPESVEAGAVFAEIGPRMAELSGSRLAAQQQMEGLLAPHRPKEPAWFLATVGVSPDHQGKGLGSAVVLPGVEAAERAGVPAFLETSAPRNLPFYERLGFTVTADVEVPEGPRTWCMTRKPGA

SEQ ID NO: 17278 - protein, 671 aa, Artificial Sequence
  Synthetic Polypeptide
MALPVTALLLPLALLLHAARPQLQLQESGPGLVKPSETLSLTCTVSGDSISSGDYYWGWIRQPPGKGLEWIGHIYYSGVTYYNPSLKSRVTISVDTSRNQFSLKLSSVTAADTAVYYCTREDSSNWRSRGQGTLVTVSSLESGGGGSFEVQLLESGGGLVQPGGSLRLSCAASGFSFSSYALSWVRQAPGKGLEWVSSIGENDGTTDYADAVKGRFTISRDNSKNTLYLQMNSLRVEDTAVYYCVKDGVHWGQGTLVTVSSLEDLKNVFPPEVAVFEPSKAEIAHTQKATLVCLATGFYPDHVELSWWVNGKEVHSGVSTDPQPLKEQPALNDSRYCLSSRLRVSATFWQNPRNHFRCQVQFYGLSENDEWTQDRAKPVTQIVSAEAWGRADCGITSASYHQGVLSATILYEILLGKATLYAVLVSALVLMAMVKRKDSRGRAKRSGSGATNFSLLKQAGDVEENPGPTRGHMTEYKPTVRLATRDDVPRAVRTLAAAFADYPATRHTVDPDRHIERVTELQELFLTRVGLDIGKVWVADDGAAVAVWTTPESVEAGAVFAEIGPRMAELSGSRLAAQQQMEGLLAPHRPKEPAWFLATVGVSPDHQGKGLGSAVVLPGVEAAERAGVPAFLETSAPRNLPFYERLGFTVTADVEVPEGPRTWCMTRKPGA

SEQ ID NO: 17279 - protein, 694 aa, Artificial Sequence
  Synthetic Polypeptide
MALPVTALLLPLALLLHAARPQLQLQESGPGLVKPSETLSLTCTVSGDSISSGDYYWGWIRQPPGKGLEWIGHIYYSGVTYYNPSLKSRVTISVDTSRNQFSLKLSSVTAADTAVYYCTREDSSNWRSRGQGTLVTVSSLESGGGGSFEVQLLESGGGLVQPGGSLRLSCAASGFSFSSYALSWVRQAPGKGLEWVSSIGENDGTTDYADAVKGRFTISRDNSKNTLYLQMNSLRVEDTAVYYCVKDGVHWGQGTLVTVSSTRGSGGGGSGGGGSGDGNEEMGGITQTPYKVSISGTTVILTCPQYPGSEILWQHNDKNIGGDEDDKNIGSDEDHLSLKEFSELEQSGYYVCYPRGSKPEDANFYLYLRARVCENCMEMDVMSVATIVIVDICITGGLLLLVYYWSKNRKAKAKPVTRGAGAGGRQRGQNKERPPPVPNPDYEPIRKGQRDLYSGLNQRRIRAKRSGSGVKQTLNFDLLKLAGDVESNPGPSRGHMTEYKPTVRLATRDDVPRAVRTLAAAFADYPATRHTVDPDRHIERVTELQELFLTRVGLDIGKVWVADDGAAVAVWTTPESVEAGAVFAEIGPRMAELSGSRLAAQQQMEGLLAPHRPKEPAWFLATVGVSPDHQGKGLGSAVVLPGVEAAERAGVPAFLETSAPRNLPFYERLGFTVTADVEVPEGPRTWCMTRKPGA

SEQ ID NO: 17280 - protein, 659 aa, Artificial Sequence
  Synthetic Polypeptide
MALPVTALLLPLALLLHAARPQLQLQESGPGLVKPSETLSLTCTVSGDSISSGDYYWGWIRQPPGKGLEWIGHIYYSGVTYYNPSLKSRVTISVDTSRNQFSLKLSSVTAADTAVYYCTREDSSNWRSRGQGTLVTVSSLESGGGGSFEVQLLESGGGLVQPGGSLRLSCAASGFSFSSYALSWVRQAPGKGLEWVSSIGENDGTTDYADAVKGRFTISRDNSKNTLYLQMNSLRVEDTAVYYCVKDGVHWGQGTLVTVSSTRGSGGGGSGGGGSGFKIPIEELEDRVFVNCNTSITWVEGTVGTLLSDITRLDLGKRILDPRGIYRCNGTDIYKDKESTVQVHYRMCQSCVELDPATVAGIIVTDVIATLLLALGVFCFAGHETGRLSGAADTQALLRNDQVYQPLRDRDDAQYSHLGGNWARNKRAKRSGSGVKQTLNFDLLKLAGDVESNPGPSRGHMTEYKPTVRLATRDDVPRAVRTLAAAFADYPATRHTVDPDRHIERVTELQELFLTRVGLDIGKVWVADDGAAVAVWTTPESVEAGAVFAEIGPRMAELSGSRLAAQQQMEGLLAPHRPKEPAWFLATVGVSPDHQGKGLGSAVVLPGVEAAERAGVPAFLETSAPRNLPFYERLGFTVTADVEVPEGPRTWCMTRKPGA

SEQ ID NO: 17281 - protein, 669 aa, Artificial Sequence
  Synthetic Polypeptide
MALPVTALLLPLALLLHAARPQLQLQESGPGLVKPSETLSLTCTVSGDSISSGDYYWGWIRQPPGKGLEWIGHIYYSGVTYYNPSLKSRVTISVDTSRNQFSLKLSSVTAADTAVYYCTREDSSNWRSRGQGTLVTVSSLESGGGGSFEVQLLESGGGLVQPGGSLRLSCAASGFSFSSYALSWVRQAPGKGLEWVSSIGENDGTTDYADAVKGRFTISRDNSKNTLYLQMNSLRVEDTAVYYCVKDGVHWGQGTLVTVSSTRGSGGGGSGGGGSGQSIKGNHLVKVYDYQEDGSVLLTCDAEAKNITWFKDGKMIGFLTEDKKKWNLGSNAKDPRGMYQCKGSQNKSKPLQVYYRMCQNCIELNAATISGFLFAEIVSIFVLAVGVYFIAGQDGVRQSRASDKQTLLPNDQLYQPLKDREDDQYSHLQGNQLRRNRAKRSGSGVKQTLNFDLLKLAGDVESNPGPSRGHMTEYKPTVRLATRDDVPRAVRTLAAAFADYPATRHTVDPDRHIERVTELQELFLTRVGLDIGKVWVADDGAAVAVWTTPESVEAGAVFAEIGPRMAELSGSRLAAQQQMEGLLAPHRPKEPAWFLATVGVSPDHQGKGLGSAVVLPGVEAAERAGVPAFLETSAPRNLPFYERLGFTVTADVEVPEGPRTWCMTRKPGA

SEQ ID NO: 17282 - protein, 652 aa, Artificial Sequence
  Synthetic Polypeptide
MALPVTALLLPLALLLHAARPQLQLQESGPGLVKPSETLSLTCTVSGDSISSGDYYWGWIRQPPGKGLEWIGHIYYSGVTYYNPSLKSRVTISVDTSRNQFSLKLSSVTAADTAVYYCTREDSSNWRSRGQGTLVTVSSLESGGGGSFEVQLLESGGGLVQPGGSLRLSCAASGFSFSSYALSWVRQAPGKGLEWVSSIGENDGTTDYADAVKGRFTISRDNSKNTLYLQMNSLRVEDTAVYYCVKDGVHWGQGTLVTVSSTRGSGGGGSGGGGSGQSFGLLDPKLCYLLDGILFIYGVILTALFLRVKFSRSADAPAYQQGQNQLYNELNLGRREEYDVLDKRRGRDPEMGGKPQRRKNPQEGLYNELQKDKMAEAYSEIGMKGERRRGKGHDGLYQGLSTATKDTYDALHMQALPPRRAKRSGSGVKQTLNFDLLKLAGDVESNPGPSRGHMTEYKPTVRLATRDDVPRAVRTLAAAFADYPATRHTVDPDRHIERVTELQELFLTRVGLDIGKVWVADDGAAVAVWTTPESVEAGAVFAEIGPRMAELSGSRLAAQQQMEGLLAPHRPKEPAWFLATVGVSPDHQGKGLGSAVVLPGVEAAERAGVPAFLETSAPRNLPFYERLGFTVTADVEVPEGPRTWCMTRKPGA

SEQ ID NO: 17283 - protein, 860 aa, Artificial Sequence
  Synthetic Polypeptide
MALPVTALLLPLALLLHAARPQLQLQESGPGLVKPSETLSLTCTVSGDSISSGDYYWGWIRQPPGKGLEWIGHIYYSGVTYYNPSLKSRVTISVDTSRNQFSLKLSSVTAADTAVYYCTREDSSNWRSRGQGTLVTVSSLEGQPKANPTVTLFPPSSEELQANKATLVCLISDFYPGAVTVAWKADGSPVKAGVETTKPSKQSNNKYAASSYLSLTPEQWKSHRSYSCQVTHEGSTVEKTVAPTECSGRADCGFTSESYQQGVLSATILYEILLGKATLYAVLVSALVLMAMVKRKDSRGRAKRSGSGATNFSLLKQAGDVEENPGPTSMDWIWRILFLVGAATGAHSFEVQLLESGGGLVQPGGSLRLSCAASGFSFSSYALSWVRQAPGKGLEWVSSIGENDGTTDYADAVKGRFTISRDNSKNTLYLQMNSLRVEDTAVYYCVKDGVHWGQGTLVTVSSTRASTKGPSVFPLAPSSKSTSGGTAALGCLVKDYFPEPVTVSWNSGALTSGVHTFPAVLQSSGLYSLSSVVTVPSSSLGTQTYICNVNHKPSNTKVDKRVEPKSCIPEDTFFPSPESSCDVKLVEKSFETDTNLNFQNLSVIGFRILLLKVAGFNLLMTLRLWSSRAKRSGSGVKQTLNFDLLKLAGDVESNPGPSRGHMTEYKPTVRLATRDDVPRAVRTLAAAFADYPATRHTVDPDRHIERVTELQELFLTRVGLDIGKVWVADDGAAVAVWTTPESVEAGAVFAEIGPRMAELSGSRLAAQQQMEGLLAPHRPKEPAWFLATVGVSPDHQGKGLGSAVVLPGVEAAERAGVPAFLETSAPRNLPFYERLGFTVTADVEVPEGPRTWCMTRKPGA

SEQ ID NO: 17284 - protein, 627 aa, Artificial Sequence; identical to SEQ ID NO: 17257
  Synthetic Polypeptide

SEQ ID NO: 17285 - protein, 655 aa, Artificial Sequence
  Synthetic Polypeptide
MALPVTALLLPLALLLHAARPQLQLQESGPGLVKPSETLSLTCTVSGDSISSGDYYWGWIRQPPGKGLEWIGHIYYSGVTYYNPSLKSRVTISVDTSRNQFSLKLSSVTAADTAVYYCTREDSSNWRSRGQGTLVTVSSLEGSGRADCGFTSESYQQGVLSATILYEILLGKATLYAVLVSALVLMAMVKRKDSRGRAKRSGSGATNFSLLKQAGDVEENPGPTSMDWIWRILFLVGAATGAHSFEVQLLESGGGLVQPGGSLRLSCAASGFSFSSYALSWVRQAPGKGLEWVSSIGENDGTTDYADAVKGRFTISRDNSKNTLYLQMNSLRVEDTAVYYCVKDGVHWGQGTLVTVSSTRGSIPEDTFFPSPESSCDVKLVEKSFETDTNLNFQNLSVIGFRILLLKVAGFNLLMTLRLWSSRAKRSGSGVKQTLNFDLLKLAGDVESNPGPSRGHMTEYKPTVRLATRDDVPRAVRTLAAAFADYPATRHTVDPDRHIERVTELQELFLTRVGLDIGKVWVADDGAAVAVWTTPESVEAGAVFAEIGPRMAELSGSRLAAQQQMEGLLAPHRPKEPAWFLATVGVSPDHQGKGLGSAVVLPGVEAAERAGVPAFLETSAPRNLPFYERLGFTVTADVEVPEGPRTWCMTRKPGA

SEQ ID NO: 17286 - protein, 422 aa, Artificial Sequence
  Synthetic Polypeptide
MALPVTALLLPLALLLHAARPQLQLQESGPGLVKPSETLSLTCTVSGDSISSGDYYWGWIRQPPGKGLEWIGHIYYSGVTYYNPSLKSRVTISVDTSRNQFSLKLSSVTAADTAVYYCTREDSSNWRSRGQGTLVTVSSLEGSGRADCGFTSESYQQGVLSATILYEILLGKATLYAVLVSALVLMAMVKRKDSRGRAKRSGSGATNFSLLKQAGDVEENPGPTSMDWIWRILFLVGAATGAHSFEVQLLESGGGLVQPGGSLRLSCAASGFSFSSYALSWVRQAPGKGLEWVSSIGENDGTTDYADAVKGRFTISRDNSKNTLYLQMNSLRVEDTAVYYCVKDGVHWGQGTLVTVSSTRGSIPEDTFFPSPESSCDVKLVEKSFETDTNLNFQNLSVIGFRILLLKVAGFNLLMTLRLWSS

SEQ ID NO: 17287 - protein, 664 aa, Artificial Sequence
  Synthetic Polypeptide
MALPVTALLLPLALLLHAARPQLQLQESGPGLVKPSETLSLTCTVSGDSISSGDYYWGWIRQPPGKGLEWIGHIYYSGVTYYNPSLKSRVTISVDTSRNQFSLKLSSVTAADTAVYYCTREDSSNWRSRGQGTLVTVSSLEDKTHTCPPCPAGRADCGFTSESYQQGVLSATILYEILLGKATLYAVLVSALVLMAMVKRKDSRGRAKRSGSGATNFSLLKQAGDVEENPGPTSMDWIWRILFLVGAATGAHSFEVQLLESGGGLVQPGGSLRLSCAASGFSFSSYALSWVRQAPGKGLEWVSSIGENDGTTDYADAVKGRFTISRDNSKNTLYLQMNSLRVEDTAVYYCVKDGVHWGQGTLVTVSSTRGSIPEDTFFPSPESSCDVKLVEKSFETDTNLNFQNLSVIGFRILLLKVAGFNLLMTLRLWSSRAKRSGSGVKQTLNFDLLKLAGDVESNPGPSRGHMTEYKPTVRLATRDDVPRAVRTLAAAFADYPATRHTVDPDRHIERVTELQELFLTRVGLDIGKVWVADDGAAVAVWTTPESVEAGAVFAEIGPRMAELSGSRLAAQQQMEGLLAPHRPKEPAWFLATVGVSPDHQGKGLGSAVVLPGVEAAERAGVPAFLETSAPRNLPFYERLGFTVTADVEVPEGPRTWCMTRKPGA

SEQ ID NO: 17288 - protein, 664 aa, Artificial Sequence
  Synthetic Polypeptide
MALPVTALLLPLALLLHAARPQLQLQESGPGLVKPSETLSLTCTVSGDSISSGDYYWGWIRQPPGKGLEWIGHIYYSGVTYYNPSLKSRVTISVDTSRNQFSLKLSSVTAADTAVYYCTREDSSNWRSRGQGTLVTVSSLEGSGRADCGFTSESYQQGVLSATILYEILLGKATLYAVLVSALVLMAMVKRKDSRGRAKRSGSGATNFSLLKQAGDVEENPGPTSMDWIWRILFLVGAATGAHSFEVQLLESGGGLVQPGGSLRLSCAASGFSFSSYALSWVRQAPGKGLEWVSSIGENDGTTDYADAVKGRFTISRDNSKNTLYLQMNSLRVEDTAVYYCVKDGVHWGQGTLVTVSSTRDKTHTCPPCPAIPEDTFFPSPESSCDVKLVEKSFETDTNLNFQNLSVIGFRILLLKVAGFNLLMTLRLWSSRAKRSGSGVKQTLNFDLLKLAGDVESNPGPSRGHMTEYKPTVRLATRDDVPRAVRTLAAAFADYPATRHTVDPDRHIERVTELQELFLTRVGLDIGKVWVADDGAAVAVWTTPESVEAGAVFAEIGPRMAELSGSRLAAQQQMEGLLAPHRPKEPAWFLATVGVSPDHQGKGLGSAVVLPGVEAAERAGVPAFLETSAPRNLPFYERLGFTVTADVEVPEGPRTWCMTRKPGA

SEQ ID NO: 17289 - protein, 673 aa, Artificial Sequence
  Synthetic Polypeptide
MALPVTALLLPLALLLHAARPQLQLQESGPGLVKPSETLSLTCTVSGDSISSGDYYWGWIRQPPGKGLEWIGHIYYSGVTYYNPSLKSRVTISVDTSRNQFSLKLSSVTAADTAVYYCTREDSSNWRSRGQGTLVTVSSLEDKTHTCPPCPAGRADCGFTSESYQQGVLSATILYEILLGKATLYAVLVSALVLMAMVKRKDSRGRAKRSGSGATNFSLLKQAGDVEENPGPTSMDWIWRILFLVGAATGAHSFEVQLLESGGGLVQPGGSLRLSCAASGFSFSSYALSWVRQAPGKGLEWVSSIGENDGTTDYADAVKGRFTISRDNSKNTLYLQMNSLRVEDTAVYYCVKDGVHWGQGTLVTVSSTRDKTHTCPPCPAIPEDTFFPSPESSCDVKLVEKSFETDTNLNFQNLSVIGFRILLLKVAGFNLLMTLRLWSSRAKRSGSGVKQTLNFDLLKLAGDVESNPGPSRGHMTEYKPTVRLATRDDVPRAVRTLAAAFADYPATRHTVDPDRHIERVTELQELFLTRVGLDIGKVWVADDGAAVAVWTTPESVEAGAVFAEIGPRMAELSGSRLAAQQQMEGLLAPHRPKEPAWFLATVGVSPDHQGKGLGSAVVLPGVEAAERAGVPAFLETSAPRNLPFYERLGFTVTADVEVPEGPRTWCMTRKPGA

SEQ ID NO: 17290 - protein, 440 aa, Artificial Sequence
  Synthetic Polypeptide
MALPVTALLLPLALLLHAARPQLQLQESGPGLVKPSETLSLTCTVSGDSISSGDYYWGWIRQPPGKGLEWIGHIYYSGVTYYNPSLKSRVTISVDTSRNQFSLKLSSVTAADTAVYYCTREDSSNWRSRGQGTLVTVSSLEDKTHTCPPCPAGRADCGFTSESYQQGVLSATILYEILLGKATLYAVLVSALVLMAMVKRKDSRGRAKRSGSGATNFSLLKQAGDVEENPGPTSMDWIWRILFLVGAATGAHSFEVQLLESGGGLVQPGGSLRLSCAASGFSFSSYALSWVRQAPGKGLEWVSSIGENDGTTDYADAVKGRFTISRDNSKNTLYLQMNSLRVEDTAVYYCVKDGVHWGQGTLVTVSSTRDKTHTCPPCPAIPEDTFFPSPESSCDVKLVEKSFETDTNLNFQNLSVIGFRILLLKVAGFNLLMTLRLWSS

SEQ ID NO: 17291 - protein, 431 aa, Artificial Sequence
  Synthetic Polypeptide
MALPVTALLLPLALLLHAARPQLQLQESGPGLVKPSETLSLTCTVSGDSISSGDYYWGWIRQPPGKGLEWIGHIYYSGVTYYNPSLKSRVTISVDTSRNQFSLKLSSVTAADTAVYYCTREDSSNWRSRGQGTLVTVSSLEGSGRADCGFTSESYQQGVLSATILYEILLGKATLYAVLVSALVLMAMVKRKDSRGRAKRSGSGATNFSLLKQAGDVEENPGPTSMDWIWRILFLVGAATGAHSFEVQLLESGGGLVQPGGSLRLSCAASGFSFSSYALSWVRQAPGKGLEWVSSIGENDGTTDYADAVKGRFTISRDNSKNTLYLQMNSLRVEDTAVYYCVKDGVHWGQGTLVTVSSTRDKTHTCPPCPAIPEDTFFPSPESSCDVKLVEKSFETDTNLNFQNLSVIGFRILLLKVAGFNLLMTLRLWSS

SEQ ID NO: 17292 - protein, 882 aa, Artificial Sequence
  Synthetic Polypeptide
MALPVTALLLPLALLLHAARPQLQLQESGPGLVKPSETLSLTCTVSGDSISSGDYYWGWIRQPPGKGLEWIGHIYYSGVTYYNPSLKSRVTISVDTSRNQFSLKLSSVTAADTAVYYCTREDSSNWRSRGQGTLVTVSSLEGQPKANPTVTLFPPSSEELQANKATLVCLISDFYPGAVTVAWKADGSPVKAGVETTKPSKQSNNKYAASSYLSLTPEQWKSHRSYSCQVTHEGSTVEKTVAPTECSPIKTDVITMDPKDNCSKDANDTLLLQLTNTSAYYMYLLLLLKSVVYFAIITCCLLRRTAFCCNGEKSRAKRSGSGATNFSLLKQAGDVEENPGPTSMDWIWRILFLVGAATGAHSFEVQLLESGGGLVQPGGSLRLSCAASGFSFSSYALSWVRQAPGKGLEWVSSIGENDGTTDYADAVKGRFTISRDNSKNTLYLQMNSLRVEDTAVYYCVKDGVHWGQGTLVTVSSTRASTKGPSVFPLAPSSKSTSGGTAALGCLVKDYFPEPVTVSWNSGALTSGVHTFPAVLQSSGLYSLSSVVTVPSSSLGTQTYICNVNHKPSNTKVDKRVEPKSCEVKTDSTDHVKPKETENTKQPSKSCHKPKAIVHTEKVNMMSLTVLGLRMLFAKTVAVNFLLTAKLFFLRAKRSGSGVKQTLNFDLLKLAGDVESNPGPSRGHMTEYKPTVRLATRDDVPRAVRTLAAAFADYPATRHTVDPDRHIERVTELQELFLTRVGLDIGKVWVADDGAAVAVWTTPESVEAGAVFAEIGPRMAELSGSRLAAQQQMEGLLAPHRPKEPAWFLATVGVSPDHQGKGLGSAVVLPGVEAAERAGVPAFLETSAPRNLPFYERLGFTVTADVEVPEGPRTWCMTRKPGA

SEQ ID NO: 17293 - protein, 649 aa, Artificial Sequence; identical to SEQ ID NO: 17255
  Synthetic Polypeptide

SEQ ID NO: 17294 - protein, 677 aa, Artificial Sequence
  Synthetic Polypeptide
MALPVTALLLPLALLLHAARPQLQLQESGPGLVKPSETLSLTCTVSGDSISSGDYYWGWIRQPPGKGLEWIGHIYYSGVTYYNPSLKSRVTISVDTSRNQFSLKLSSVTAADTAVYYCTREDSSNWRSRGQGTLVTVSSLEGSPIKTDVITMDPKDNCSKDANDTLLLQLTNTSAYYMYLLLLLKSVVYFAIITCCLLRRTAFCCNGEKSRAKRSGSGATNFSLLKQAGDVEENPGPTSMDWIWRILFLVGAATGAHSFEVQLLESGGGLVQPGGSLRLSCAASGFSFSSYALSWVRQAPGKGLEWVSSIGENDGTTDYADAVKGRFTISRDNSKNTLYLQMNSLRVEDTAVYYCVKDGVHWGQGTLVTVSSTRGSEVKTDSTDHVKPKETENTKQPSKSCHKPKAIVHTEKVNMMSLTVLGLRMLFAKTVAVNFLLTAKLFFLRAKRSGSGVKQTLNFDLLKLAGDVESNPGPSRGHMTEYKPTVRLATRDDVPRAVRTLAAAFADYPATRHTVDPDRHIERVTELQELFLTRVGLDIGKVWVADDGAAVAVWTTPESVEAGAVFAEIGPRMAELSGSRLAAQQQMEGLLAPHRPKEPAWFLATVGVSPDHQGKGLGSAVVLPGVEAAERAGVPAFLETSAPRNLPFYERLGFTVTADVEVPEGPRTWCMTRKPGA

SEQ ID NO: 17295 - protein, 444 aa, Artificial Sequence
  Synthetic Polypeptide
MALPVTALLLPLALLLHAARPQLQLQESGPGLVKPSETLSLTCTVSGDSISSGDYYWGWIRQPPGKGLEWIGHIYYSGVTYYNPSLKSRVTISVDTSRNQFSLKLSSVTAADTAVYYCTREDSSNWRSRGQGTLVTVSSLEGSPIKTDVITMDPKDNCSKDANDTLLLQLTNTSAYYMYLLLLLKSVVYFAIITCCLLRRTAFCCNGEKSRAKRSGSGATNFSLLKQAGDVEENPGPTSMDWIWRILFLVGAATGAHSFEVQLLESGGGLVQPGGSLRLSCAASGFSFSSYALSWVRQAPGKGLEWVSSIGENDGTTDYADAVKGRFTISRDNSKNTLYLQMNSLRVEDTAVYYCVKDGVHWGQGTLVTVSSTRGSEVKTDSTDHVKPKETENTKQPSKSCHKPKAIVHTEKVNMMSLTVLGLRMLFAKTVAVNFLLTAKLFFL

SEQ ID NO: 17296 - protein, 686 aa, Artificial Sequence
  Synthetic Polypeptide
MALPVTALLLPLALLLHAARPQLQLQESGPGLVKPSETLSLTCTVSGDSISSGDYYWGWIRQPPGKGLEWIGHIYYSGVTYYNPSLKSRVTISVDTSRNQFSLKLSSVTAADTAVYYCTREDSSNWRSRGQGTLVTVSSLEDKTHTCPPCPAPIKTDVITMDPKDNCSKDANDTLLLQLTNTSAYYMYLLLLLKSVVYFAIITCCLLRRTAFCCNGEKSRAKRSGSGATNFSLLKQAGDVEENPGPTSMDWIWRILFLVGAATGAHSFEVQLLESGGGLVQPGGSLRLSCAASGFSFSSYALSWVRQAPGKGLEWVSSIGENDGTTDYADAVKGRFTISRDNSKNTLYLQMNSLRVEDTAVYYCVKDGVHWGQGTLVTVSSTRGSEVKTDSTDHVKPKETENTKQPSKSCHKPKAIVHTEKVNMMSLTVLGLRMLFAKTVAVNFLLTAKLFFLRAKRSGSGVKQTLNFDLLKLAGDVESNPGPSRGHMTEYKPTVRLATRDDVPRAVRTLAAAFADYPATRHTVDPDRHIERVTELQELFLTRVGLDIGKVWVADDGAAVAVWTTPESVEAGAVFAEIGPRMAELSGSRLAAQQQMEGLLAPHRPKEPAWFLATVGVSPDHQGKGLGSAVVLPGVEAAERAGVPAFLETSAPRNLPFYERLGFTVTADVEVPEGPRTWCMTRKPGA

SEQ ID NO: 17297 - protein, 686 aa, Artificial Sequence
  Synthetic Polypeptide
MALPVTALLLPLALLLHAARPQLQLQESGPGLVKPSETLSLTCTVSGDSISSGDYYWGWIRQPPGKGLEWIGHIYYSGVTYYNPSLKSRVTISVDTSRNQFSLKLSSVTAADTAVYYCTREDSSNWRSRGQGTLVTVSSLEGSPIKTDVITMDPKDNCSKDANDTLLLQLTNTSAYYMYLLLLLKSVVYFAIITCCLLRRTAFCCNGEKSRAKRSGSGATNFSLLKQAGDVEENPGPTSMDWIWRILFLVGAATGAHSFEVQLLESGGGLVQPGGSLRLSCAASGFSFSSYALSWVRQAPGKGLEWVSSIGENDGTTDYADAVKGRFTISRDNSKNTLYLQMNSLRVEDTAVYYCVKDGVHWGQGTLVTVSSTRDKTHTCPPCPAEVKTDSTDHVKPKETENTKQPSKSCHKPKAIVHTEKVNMMSLTVLGLRMLFAKTVAVNFLLTAKLFFLRAKRSGSGVKQTLNFDLLKLAGDVESNPGPSRGHMTEYKPTVRLATRDDVPRAVRTLAAAFADYPATRHTVDPDRHIERVTELQELFLTRVGLDIGKVWVADDGAAVAVWTTPESVEAGAVFAEIGPRMAELSGSRLAAQQQMEGLLAPHRPKEPAWFLATVGVSPDHQGKGLGSAVVLPGVEAAERAGVPAFLETSAPRNLPFYERLGFTVTADVEVPEGPRTWCMTRKPGA

SEQ ID NO: 17298 - protein, 695 aa, Artificial Sequence
  Synthetic Polypeptide
MALPVTALLLPLALLLHAARPQLQLQESGPGLVKPSETLSLTCTVSGDSISSGDYYWGWIRQPPGKGLEWIGHIYYSGVTYYNPSLKSRVTISVDTSRNQFSLKLSSVTAADTAVYYCTREDSSNWRSRGQGTLVTVSSLEDKTHTCPPCPAPIKTDVITMDPKDNCSKDANDTLLLQLTNTSAYYMYLLLLLKSVVYFAIITCCLLRRTAFCCNGEKSRAKRSGSGATNFSLLKQAGDVEENPGPTSMDWIWRILFLVGAATGAHSFEVQLLESGGGLVQPGGSLRLSCAASGFSFSSYALSWVRQAPGKGLEWVSSIGENDGTTDYADAVKGRFTISRDNSKNTLYLQMNSLRVEDTAVYYCVKDGVHWGQGTLVTVSSTRDKTHTCPPCPAEVKTDSTDHVKPKETENTKQPSKSCHKPKAIVHTEKVNMMSLTVLGLRMLFAKTVAVNFLLTAKLFFLRAKRSGSGVKQTLNFDLLKLAGDVESNPGPSRGHMTEYKPTVRLATRDDVPRAVRTLAAAFADYPATRHTVDPDRHIERVTELQELFLTRVGLDIGKVWVADDGAAVAVWTTPESVEAGAVFAEIGPRMAELSGSRLAAQQQMEGLLAPHRPKEPAWFLATVGVSPDHQGKGLGSAVVLPGVEAAERAGVPAFLETSAPRNLPFYERLGFTVTADVEVPEGPRTWCMTRKPGA

SEQ ID NO: 17299 - protein, 462 aa, Artificial Sequence
  Synthetic Polypeptide
MALPVTALLLPLALLLHAARPQLQLQESGPGLVKPSETLSLTCTVSGDSISSGDYYWGWIRQPPGKGLEWIGHIYYSGVTYYNPSLKSRVTISVDTSRNQFSLKLSSVTAADTAVYYCTREDSSNWRSRGQGTLVTVSSLEDKTHTCPPCPAPIKTDVITMDPKDNCSKDANDTLLLQLTNTSAYYMYLLLLLKSVVYFAIITCCLLRRTAFCCNGEKSRAKRSGSGATNFSLLKQAGDVEENPGPTSMDWIWRILFLVGAATGAHSFEVQLLESGGGLVQPGGSLRLSCAASGFSFSSYALSWVRQAPGKGLEWVSSIGENDGTTDYADAVKGRFTISRDNSKNTLYLQMNSLRVEDTAVYYCVKDGVHWGQGTLVTVSSTRDKTHTCPPCPAEVKTDSTDHVKPKETENTKQPSKSCHKPKAIVHTEKVNMMSLTVLGLRMLFAKTVAVNFLLTAKLFFL

SEQ ID NO: 17300 - protein, 725 aa, Artificial Sequence
  Synthetic Polypeptide
MALPVTALLLPLALLLHAARPQLQLQESGPGLVKPSETLSLTCTVSGDSISSGDYYWGWIRQPPGKGLEWIGHIYYSGVTYYNPSLKSRVTISVDTSRNQFSLKLSSVTAADTAVYYCTREDSSNWRSRGQGTLVTVSSLESGGGGSFEVQLVESGGGLVQPGGSLRLSCAASGFSFSDFWMSWVRQAPGKGLEWVATISQAGSEKDYVDSVKGRFTISRDNAKKSLYLQMNSLRAEDTAVYYCASGVYSFDYRGQGTLVTVSSTREQKLISEEDLAKPTTTPAPRPPTPAPTIASQPLSLRPEACRPAAGGAVHTRGLDFACDIYIWAPLAGTCGVLLLSLVITLYCKRGRKKLLYIFKQPFMRPVQTTQEEDGCSCRFPEEEEGGCELRVKFSRSADAPAYQQGQNQLYNELNLGRREEYDVLDKRRGRDPEMGGKPRRKNPQEGLYNELQKDKMAEAYSEIGMKGERRRGKGHDGLYQGLSTATKDTYDALHMQALPPRSSGSGEGRGSLLTCGDVEENPGPHMTEYKPTVRLATRDDVPRAVRTLAAAFADYPATRHTVDPDRHIERVTELQELFLTRVGLDIGKVWVADDGAAVAVWTTPESVEAGAVFAEIGPRMAELSGSRLAAQQQMEGLLAPHRPKEPAWFLATVGVSPDHQGKGLGSAVVLPGVEAAERAGVPAFLETSAPRNLPFYERLGFTVTADVEVPEGPRTWCMTRKPGA

SEQ ID NO: 17301 - protein, 719 aa, Artificial Sequence
  Synthetic Polypeptide
MALPVTALLLPLALLLHAARPQLQLQESGPGLVKPSETLSLTCTVSGDSISSGDYYWGWIRQPPGKGLEWIGHIYYSGVTYYNPSLKSRVTISVDTSRNQFSLKLSSVTAADTAVYYCTREDSSNWRSRGQGTLVTVSSLESGGGGSFEVQLVESGGGLVQPGGSLRLSCAASGFSFSDFWMSWVRQAPGKGLEWVATISQAGSEKDYVDSVKGRFTISRDNAKKSLYLQMNSLRAEDTAVYYCASGVYSFDYRGQGTLVTVSSTREQKLISEEDLKIEVMYPPPYLDNEKSNGTIIHVKGKHLCPSPLFPGPSKPFWVLVVVGGVLACYSLLVTVAFIIFWVRSKRSRLLHSDYMNMTPRRPGPTRKHYQPYAPPRDFAAYRSRVKFSRSADAPAYQQGQNQLYNELNLGRREEYDVLDKRRGRDPEMGGKPRRKNPQEGLYNELQKDKMAEAYSEIGMKGERRRGKGHDGLYQGLSTATKDTYDALHMQALPPRSSGSGEGRGSLLTCGDVEENPGPHMTEYKPTVRLATRDDVPRAVRTLAAAFADYPATRHTVDPDRHIERVTELQELFLTRVGLDIGKVWVADDGAAVAVWTTPESVEAGAVFAEIGPRMAELSGSRLAAQQQMEGLLAPHRPKEPAWFLATVGVSPDHQGKGLGSAVVLPGVEAAERAGVPAFLETSAPRNLPFYERLGFTVTADVEVPEGPRTWCMTRKPGA

SEQ ID NO: 17302 - protein, 496 aa, Artificial Sequence
  Synthetic Polypeptide
MALPVTALLLPLALLLHAARPQLQLQESGPGLVKPSETLSLTCTVSGDSISSGDYYWGWIRQPPGKGLEWIGHIYYSGVTYYNPSLKSRVTISVDTSRNQFSLKLSSVTAADTAVYYCTREDSSNWRSRGQGTLVTVSSLESGGGGSFEVQLVESGGGLVQPGGSLRLSCAASGFSFSDFWMSWVRQAPGKGLEWVATISQAGSEKDYVDSVKGRFTISRDNAKKSLYLQMNSLRAEDTAVYYCASGVYSFDYRGQGTLVTVSSTREQKLISEEDLKIEVMYPPPYLDNEKSNGTIIHVKGKHLCPSPLFPGPSKPFWVLVVVGGVLACYSLLVTVAFIIFWVRSKRSRLLHSDYMNMTPRRPGPTRKHYQPYAPPRDFAAYRSRVKFSRSADAPAYQQGQNQLYNELNLGRREEYDVLDKRRGRDPEMGGKPRRKNPQEGLYNELQKDKMAEAYSEIGMKGERRRGKGHDGLYQGLSTATKDTYDALHMQALPPR

SEQ ID NO: 17303 - protein, 502 aa, Artificial Sequence
  Synthetic Polypeptide
MALPVTALLLPLALLLHAARPQLQLQESGPGLVKPSETLSLTCTVSGDSISSGDYYWGWIRQPPGKGLEWIGHIYYSGVTYYNPSLKSRVTISVDTSRNQFSLKLSSVTAADTAVYYCTREDSSNWRSRGQGTLVTVSSLESGGGGSFEVQLVESGGGLVQPGGSLRLSCAASGFSFSDFWMSWVRQAPGKGLEWVATISQAGSEKDYVDSVKGRFTISRDNAKKSLYLQMNSLRAEDTAVYYCASGVYSFDYRGQGTLVTVSSTREQKLISEEDLAKPTTTPAPRPPTPAPTIASQPLSLRPEACRPAAGGAVHTRGLDFACDIYIWAPLAGTCGVLLLSLVITLYCKRGRKKLLYIFKQPFMRPVQTTQEEDGCSCRFPEEEEGGCELRVKFSRSADAPAYQQGQNQLYNELNLGRREEYDVLDKRRGRDPEMGGKPRRKNPQEGLYNELQKDKMAEAYSEIGMKGERRRGKGHDGLYQGLSTATKDTYDALHMQALPPR

SEQ ID NO: 17304 - protein, 503 aa, Artificial Sequence
  Synthetic Polypeptide
MALPVTALLLPLALLLHAARPEVQLVESGGGLVQPGGSLRLSCAASGFSFSDFWMSWVRQAPGKGLEWVATISQAGSEKDYVDSVKGRFTISRDNAKKSLYLQMNSLRAEDTAVYYCASGVYSFDYRGQGTLVTVSSLESGGGGSFEQLQLQESGPGLVKPSETLSLTCTVSGDSISSGDYYWGWIRQPPGKGLEWIGHIYYSGVTYYNPSLKSRVTISVDTSRNQFSLKLSSVTAADTAVYYCTREDSSNWRSRGQGTLVTVSSTREQKLISEEDLAKPTTTPAPRPPTPAPTIASQPLSLRPEACRPAAGGAVHTRGLDFACDIYIWAPLAGTCGVLLLSLVITLYCKRGRKKLLYIFKQPFMRPVQTTQEEDGCSCRFPEEEEGGCELRVKFSRSADAPAYQQGQNQLYNELNLGRREEYDVLDKRRGRDPEMGGKPRRKNPQEGLYNELQKDKMAEAYSEIGMKGERRRGKGHDGLYQGLSTATKDTYDALHMQALPPR

SEQ ID NO: 17305 - protein, 915 aa, Artificial Sequence
  Synthetic Polypeptide
MALPVTALLLPLALLLHAARPQLQLQESGPGLVKPSETLSLTCTVSGDSISSGDYYWGWIRQPPGKGLEWIGHIYYSGVTYYNPSLKSRVTISVDTSRNQFSLKLSSVTAADTAVYYCTREDSSNWRSRGQGTLVTVSSLESGGGGSFEVQLVESGGGLVQPGGSLRLSCAASGFSFSDFWMSWVRQAPGKGLEWVATISQAGSEKDYVDSVKGRFTISRDNAKKSLYLQMNSLRAEDTAVYYCASGVYSFDYRGQGTLVTVSSTREQKLISEEDLAKPTTTPAPRPPTPAPTIASQPLSLRPEACRPAAGGAVHTRGLDFACDIYIWAPLAGTCGVLLLSLVITLYCGRARVKFSRSADAPAYQQGQNQLYNELNLGRREEYDVLDKRRGRDPEMGGKPRRKNPQEGLYNELQKDKMAEAYSEIGMKGERRRGKGHDGLYQGLSTATKDTYDALHMQALPPRSRGSGATNFSLLKQAGDVEENPGPGIHMATYEVLCEVARKLGTDDREVVLFLLNVFIPQPTLAQLIGALRALKEEGRLTFPLLAECLFRAGRRDLLRDLLHLDPRFLERHLAGTMSYFSPYQLTVLHVDGELCARDIRSLIFLSKDTIGSRSTPQTFLHWVYCMENLDLLGPTDVDALMSMLRSLSRVDLQRQVQTLMGLHLSGPSHSQHYRHTPLETDFYDYKDDDDKTSGSGEGRGSLLTCGDVEENPGPHMTEYKPTVRLATRDDVPRAVRTLAAAFADYPATRHTVDPDRHIERVTELQELFLTRVGLDIGKVWVADDGAAVAVWTTPESVEAGAVFAEIGPRMAELSGSRLAAQQQMEGLLAPHRPKEPAWFLATVGVSPDHQGKGLGSAVVLPGVEAAERAGVPAFLETSAPRNLPFYERLGFTVTADVEVPEGPRTWCMTRKPGA

SEQ ID NO: 17306 - protein, 860 aa, Artificial Sequence
  Synthetic Polypeptide
MALPVTALLLPLALLLHAARPQLQLQESGPGLVKPSETLSLTCTVSGDSISSGDYYWGWIRQPPGKGLEWIGHIYYSGVTYYNPSLKSRVTISVDTSRNQFSLKLSSVTAADTAVYYCTREDSSNWRSRGQGTLVTVSSLEIQNPDPAVYQLRDSKSSDKSVCLFTDFDSQTNVSQSKDSDVYITDKCVLDMRSMDFKSNSAVAWSNKSDFACANAFNNSIIPEDTFFPSSDVPCDVKLVEKSFETDTNLNFQNLSVIGFRILLLKVAGFNLLMTLRLWSSRAKRSGSGVKQTLNFDLLKLAGDVESNPGPTSMDWIWRILFLVGAATGAHSFEVQLVESGGGLVQPGGSLRLSCAASGFSFSDFWMSWVRQAPGKGLEWVATISQAGSEKDYVDSVKGRFTISRDNAKKSLYLQMNSLRAEDTAVYYCASGVYSFDYRGQGTLVTVSSTREDLKNVFPPEVAVFEPSKAEIAHTQKATLVCLATGFYPDHVELSWWVNGKEVHSGVCTDPQPLKEQPALNDSRYCLSSRLRVSATFWQNPRNHFRCQVQFYGLSENDEWTQDRAKPVTQIVSAEAWGRADCGITSASYHQGVLSATILYEILLGKATLYAVLVSALVLMAMVKRKDSRGRAKRSGSGATNFSLLKQAGDVEENPGPSRGHMTEYKPTVRLATRDDVPRAVRTLAAAFADYPATRHTVDPDRHIERVTELQELFLTRVGLDIGKVWVADDGAAVAVWTTPESVEAGAVFAEIGPRMAELSGSRLAAQQQMEGLLAPHRPKEPAWFLATVGVSPDHQGKGLGSAVVLPGVEAAERAGVPAFLETSAPRNLPFYERLGFTVTADVEVPEGPRTWCMTRKPGA

SEQ ID NO: 17307 - protein, 859 aa, Artificial Sequence
  Synthetic Polypeptide
MALPVTALLLPLALLLHAARPQLQLQESGPGLVKPSETLSLTCTVSGDSISSGDYYWGWIRQPPGKGLEWIGHIYYSGVTYYNPSLKSRVTISVDTSRNQFSLKLSSVTAADTAVYYCTREDSSNWRSRGQGTLVTVSSLEDLKNVFPPEVAVFEPSKAEIAHTQKATLVCLATGFYPDHVELSWWVNGKEVHSGVCTDPQPLKEQPALNDSRYCLSSRLRVSATFWQNPRNHFRCQVQFYGLSENDEWTQDRAKPVTQIVSAEAWGRADCGITSASYHQGVLSATILYEILLGKATLYAVLVSALVLMAMVKRKDSRGRAKRSGSGATNFSLLKQAGDVEENPGPTSMDWIWRILFLVGAATGAHSFEVQLVESGGGLVQPGGSLRLSCAASGFSFSDFWMSWVRQAPGKGLEWVATISQAGSEKDYVDSVKGRFTISRDNAKKSLYLQMNSLRAEDTAVYYCASGVYSFDYRGQGTLVTVSSTRIQNPDPAVYQLRDSKSSDKSVCLFTDFDSQTNVSQSKDSDVYITDKCVLDMRSMDFKSNSAVAWSNKSDFACANAFNNSIIPEDTFFPSSDVPCDVKLVEKSFETDTNLNFQNLSVIGFRILLLKVAGFNLLMTLRLWSSRAKRSGSGVKQTLNFDLLKLAGDVESNPGPSRGHMTEYKPTVRLATRDDVPRAVRTLAAAFADYPATRHTVDPDRHIERVTELQELFLTRVGLDIGKVWVADDGAAVAVWTTPESVEAGAVFAEIGPRMAELSGSRLAAQQQMEGLLAPHRPKEPAWFLATVGVSPDHQGKGLGSAVVLPGVEAAERAGVPAFLETSAPRNLPFYERLGFTVTADVEVPEGPRTWCMTRKPGA

SEQ ID NO: 17308 - protein, 626 aa, Artificial Sequence
  Synthetic Polypeptide
MALPVTALLLPLALLLHAARPQLQLQESGPGLVKPSETLSLTCTVSGDSISSGDYYWGWIRQPPGKGLEWIGHIYYSGVTYYNPSLKSRVTISVDTSRNQFSLKLSSVTAADTAVYYCTREDSSNWRSRGQGTLVTVSSLEDLKNVFPPEVAVFEPSEAEISHTQKATLVCLATGFYPDHVELSWWVNGKEVHSGVCTDPQPLKEQPALNDSRYCLSSRLRVSATFWQNPRNHFRCQVQFYGLSENDEWTQDRAKPVTQIVSAEAWGRADCGFTSESYQQGVLSATILYEILLGKATLYAVLVSALVLMAMVKRKDSRGRAKRSGSGATNFSLLKQAGDVEENPGPTSMDWIWRILFLVGAATGAHSFEVQLVESGGGLVQPGGSLRLSCAASGFSFSDFWMSWVRQAPGKGLEWVATISQAGSEKDYVDSVKGRFTISRDNAKKSLYLQMNSLRAEDTAVYYCASGVYSFDYRGQGTLVTVSSTRIQNPDPAVYQLRDSKSSDKSVCLFTDFDSQTNVSQSKDSDVYITDKCVLDMRSMDFKSNSAVAWSNKSDFACANAFNNSIIPEDTFFPSPESSCDVKLVEKSFETDTNLNFQNLSVIGFRILLLKVAGFNLLMTLRLWSS

SEQ ID NO: 17309 - protein, 851 aa, Artificial Sequence
  Synthetic Polypeptide
MALPVTALLLPLALLLHAARPQLQLQESGPGLVKPSETLSLTCTVSGDSISSGDYYWGWIRQPPGKGLEWIGHIYYSGVTYYNPSLKSRVTISVDTSRNQFSLKLSSVTAADTAVYYCTREDSSNWRSRGQGTLVTVSSLEDLKNVFPPEVAVFEPSEAEISHTQKATLVCLATGFYPDHVELSWWVNGKEVHSGVCTDPQPLKEQPALNDSRYCLSSRLRVSATFWQNPRNHFRCQVQFYGLSENDEWTQDRAKPVTQIVSAEAWGRADCGFTSESYQQGVLSATILYEILLGKATLYAVLVSALVLMAMVKRKDSRGRAKRSGSGATNFSLLKQAGDVEENPGPTSMDWIWRILFLVGAATGAHSFEVQLVESGGGLVQPGGSLRLSCAASGFSFSDFWMSWVRQAPGKGLEWVATISQAGSEKDYVDSVKGRFTISRDNAKKSLYLQMNSLRAEDTAVYYCASGVYSFDYRGQGTLVTVSSTRIQNPDPAVYQLRDSKSSDKSVCLFTDFDSQTNVSQSKDSDVYITDKCVLDMRSMDFKSNSAVAWSNKSDFACANAFNNSIIPEDTFFPSPESSCDVKLVEKSFETDTNLNFQNLSVIGFRILLLKVAGFNLLMTLRLWSSRAKRSGSGVKQTLNFDLLKLAGDVESNPGPSRGGIHTMATYEVLCEVARKLGTDDREVVLFLLNVFIPQPTLAQLIGALRALKEEGRLTFPLLAECLFRAGRRDLLRDLLHLDPRFLERHLAGTMSYFSPYQLTVLHVDGELCARDIRSLIFLSKDTIGSRSTPQTFLHWVYCMENLDLLGPTDVDALMSMLRSLSRVDLQRQVQTLMGLHLSGPSHSQHYRHTP

SEQ ID NO: 17310 - protein, 630 aa, Artificial Sequence
  Synthetic Polypeptide
MALPVTALLLPLALLLHAARPQLQLQESGPGLVKPSETLSLTCTVSGDSISSGDYYWGWIRQPPGKGLEWIGHIYYSGVTYYNPSLKSRVTISVDTSRNQFSLKLSSVTAADTAVYYCTREDSSNWRSRGQGTLVTVSSLEIQNPDPAVYQLRDSKSSDKSVCLFTDFDSQTNVSQSKDSDVYITDKCVLDMRSMDFKSNSAVAWSNKSDFACANAFNNSIIPEDTFFPSPESSCDVKLVEKSFETDTNLNFQNLSVIGFRILLLKVAGFNLLMTLRLWSSRAKRSGSGVKQTLNFDLLKLAGDVESNPGPTSMDWIWRILFLVGAATGAHSFEVQLVESGGGLVQPGGSLRLSCAASGFSFSDFWMSWVRQAPGKGLEWVATISQAGSEKDYVDSVKGRFTISRDNAKKSLYLQMNSLRAEDTAVYYCASGVYSFDYRGQGTLVTVSSTREDLKNVFPPEVAVFEPSEAEISHTQKATLVCLATGFYPDHVELSWWVNGKEVHSGVCTDPQPLKEQPALNDSRYCLSSRLRVSATFWQNPRNHFRCQVQFYGLSENDEWTQDRAKPVTQIVSAEAWGRADCGFTSESYQQGVLSATILYEILLGKATLYAVLVSALVLMAMVKRKDSRG

SEQ ID NO: 17311 - protein, 852 aa, Artificial Sequence
  Synthetic Polypeptide
MALPVTALLLPLALLLHAARPQLQLQESGPGLVKPSETLSLTCTVSGDSISSGDYYWGWIRQPPGKGLEWIGHIYYSGVTYYNPSLKSRVTISVDTSRNQFSLKLSSVTAADTAVYYCTREDSSNWRSRGQGTLVTVSSLEIQNPDPAVYQLRDSKSSDKSVCLFTDFDSQTNVSQSKDSDVYITDKCVLDMRSMDFKSNSAVAWSNKSDFACANAFNNSIIPEDTFFPSPESSCDVKLVEKSFETDTNLNFQNLSVIGFRILLLKVAGFNLLMTLRLWSSRAKRSGSGVKQTLNFDLLKLAGDVESNPGPTSMDWIWRILFLVGAATGAHSFEVQLVESGGGLVQPGGSLRLSCAASGFSFSDFWMSWVRQAPGKGLEWVATISQAGSEKDYVDSVKGRFTISRDNAKKSLYLQMNSLRAEDTAVYYCASGVYSFDYRGQGTLVTVSSTREDLKNVFPPEVAVFEPSEAEISHTQKATLVCLATGFYPDHVELSWWVNGKEVHSGVCTDPQPLKEQPALNDSRYCLSSRLRVSATFWQNPRNHFRCQVQFYGLSENDEWTQDRAKPVTQIVSAEAWGRADCGFTSESYQQGVLSATILYEILLGKATLYAVLVSALVLMAMVKRKDSRGRAKRSGSGATNFSLLKQAGDVEENPGPSRGGIHTMATYEVLCEVARKLGTDDREVVLFLLNVFIPQPTLAQLIGALRALKEEGRLTFPLLAECLFRAGRRDLLRDLLHLDPRFLERHLAGTMSYFSPYQLTVLHVDGELCARDIRSLIFLSKDTIGSRSTPQTFLHWVYCMENLDLLGPTDVDALMSMLRSLSRVDLQRQVQTLMGLHLSGPSHSQHYRHTP

SEQ ID NO: 17312 - protein, 899 aa, Artificial Sequence
  Synthetic Polypeptide
MALPVTALLLPLALLLHAARPLEGKPIPNPLLGLDSTGSGEDLKNVFPPEVAVFEPSKAEIAHTQKATLVCLATGFYPDHVELSWWVNGKEVHSGVCTDPQPLKEQPALNDSRYCLSSRLRVSATFWQNPRNHFRCQVQFYGLSENDEWTQDRAKPVTQIVSAEAWGRADCGITSASYHQGVLSATILYEILLGKATLYAVLVSALVLMAMVKRKDSRGRAKRSGSGATNFSLLKQAGDVEENPGPTSMALPVTALLLPLALLLHAARPQLQLQESGPGLVKPSETLSLTCTVSGDSISSGDYYWGWIRQPPGKGLEWIGHIYYSGVTYYNPSLKSRVTISVDTSRNQFSLKLSSVTAADTAVYYCTREDSSNWRSRGQGTLVTVSSLESGGGGSFEVQLVESGGGLVQPGGSLRLSCAASGFSFSDFWMSWVRQAPGKGLEWVATISQAGSEKDYVDSVKGRFTISRDNAKKSLYLQMNSLRAEDTAVYYCASGVYSFDYRGQGTLVTVSSTREQKLISEEDGSGIQNPDPAVYQLRDSKSSDKSVCLFTDFDSQTNVSQSKDSDVYITDKCVLDMRSMDFKSNSAVAWSNKSDFACANAFNNSIIPEDTFFPSSDVPCDVKLVEKSFETDTNLNFQNLSVIGFRILLLKVAGFNLLMTLRLWSSRAKRSGSGVKQTLNFDLLKLAGDVESNPGPSRGHMTEYKPTVRLATRDDVPRAVRTLAAAFADYPATRHTVDPDRHIERVTELQELFLTRVGLDIGKVWVADDGAAVAVWTTPESVEAGAVFAEIGPRMAELSGSRLAAQQQMEGLLAPHRPKEPAWFLATVGVSPDHQGKGLGSAVVLPGVEAAERAGVPAFLETSAPRNLPFYERLGFTVTADVEVPEGPRTWCMTRKPGA

SEQ ID NO: 17313 - protein, 900 aa, Artificial Sequence
  Synthetic Polypeptide
MALPVTALLLPLALLLHAARPLEQKLISEEDLGSGDRPDPAVYQLRDSKSSDKSVCLFTDFDSQTNVSQSKDSDVYITDKCVLDMRSMDFKSNSAVAWSNKSDFACANAFNNSIIPEDTFFPSPESSCDVKLVEKSFETDTNLNFQNLSVIGFRILLLKVAGFNLLMTLRLWSSSSRAKRSGSGVKQTLNFDLLKLAGDVESNPGPTSMALPVTALLLPLALLLHAARPQLQLQESGPGLVKPSETLSLTCTVSGDSISSGDYYWGWIRQPPGKGLEWIGHIYYSGVTYYNPSLKSRVTISVDTSRNQFSLKLSSVTAADTAVYYCTREDSSNWRSRGQGTLVTVSSLESGGGGSFEVQLVESGGGLVQPGGSLRLSCAASGFSFSDFWMSWVRQAPGKGLEWVATISQAGSEKDYVDSVKGRFTISRDNAKKSLYLQMNSLRAEDTAVYYCASGVYSFDYRGQGTLVTVSSTRGKPIPNPLLGLDSTGSGEDLKNVFPPEVAVFEPSEAEISHTQKATLVCLATGFYPDHVELSWWVNGKEVHSGVCTDPQPLKEQPALNDSRYCLSSRLRVSATFWQNPRNHFRCQVQFYGLSENDEWTQDRAKPVTQIVSAEAWGRADCGFTSESYQQGVLSATILYEILLGKATLYAVLVSALVLMAMVKRKDSRGRAKRSGSGATNFSLLKQAGDVEENPGPSRGHMTEYKPTVRLATRDDVPRAVRTLAAAFADYPATRHTVDPDRHIERVTELQELFLTRVGLDIGKVWVADDGAAVAVWTTPESVEAGAVFAEIGPRMAELSGSRLAAQQQMEGLLAPHRPKEPAWFLATVGVSPDHQGKGLGSAVVLPGVEAAERAGVPAFLETSAPRNLPFYERLGFTVTADVEVPEGPRTWCMTRKPGA

SEQ ID NO: 17314 - protein, 859 aa, Artificial Sequence
  Synthetic Polypeptide
MALPVTALLLPLALLLHAARPQLQLQESGPGLVKPSETLSLTCTVSGDSISSGDYYWGWIRQPPGKGLEWIGHIYYSGVTYYNPSLKSRVTISVDTSRNQFSLKLSSVTAADTAVYYCTREDSSNWRSRGQGTLVTVSSLEDLKNVFPPEVAVFEPSEAEISHTQKATLVCLATGFYPDHVELSWWVNGKEVHSGVSTDPQPLKEQPALNDSRYCLSSRLRVSATFWQNPRNHFRCQVQFYGLSENDEWTQDRAKPVTQIVSAEAWGRADCGFTSESYQQGVLSATILYEILLGKATLYAVLVSALVLMAMVKRKDSRGRAKRSGSGATNFSLLKQAGDVEENPGPTSMDWIWRILFLVGAATGAHSFEVQLVESGGGLVQPGGSLRLSCAASGFSFSDFWMSWVRQAPGKGLEWVATISQAGSEKDYVDSVKGRFTISRDNAKKSLYLQMNSLRAEDTAVYYCASGVYSFDYRGQGTLVTVSSTRIQNPDPAVYQLRDSKSSDKSVCLFTDFDSQTNVSQSKDSDVYITDKTVLDMRSMDFKSNSAVAWSNKSDFACANAFNNSIIPEDTFFPSPESSCDVKLVEKSFETDTNLNFQNLSVIGFRILLLKVAGFNLLMTLRLWSSRAKRSGSGVKQTLNFDLLKLAGDVESNPGPSRGHMTEYKPTVRLATRDDVPRAVRTLAAAFADYPATRHTVDPDRHIERVTELQELFLTRVGLDIGKVWVADDGAAVAVWTTPESVEAGAVFAEIGPRMAELSGSRLAAQQQMEGLLAPHRPKEPAWFLATVGVSPDHQGKGLGSAVVLPGVEAAERAGVPAFLETSAPRNLPFYERLGFTVTADVEVPEGPRTWCMTRKPGA

SEQ ID NO: 17315 - protein, 941 aa, Artificial Sequence
  Synthetic Polypeptide
MALPVTALLLPLALLLHAARPQLQLQESGPGLVKPSETLSLTCTVSGDSISSGDYYWGWIRQPPGKGLEWIGHIYYSGVTYYNPSLKSRVTISVDTSRNQFSLKLSSVTAADTAVYYCTREDSSNWRSRGQGTLVTVSSLEDLKNVFPPEVAVFEPSEAEISHTQKATLVCLATGFYPDHVELSWWVNGKEVHSGVSTDPQPLKEQPALNDSRYCLSSRLRVSATFWQNPRNHFRCQVQFYGLSENDEWTQDRAKPVTQIVSAEAWGRADCGFTSESYQQGVLSATILYEILLGKATLYAVLVSALVLMAMVKRKDSRGRAKRSGSGATNFSLLKQAGDVEENPGPTSMDWIWRILFLVGAATGAHSFEVQLVESGGGLVQPGGSLRLSCAASGFSFSDFWMSWVRQAPGKGLEWVATISQAGSEKDYVDSVKGRFTISRDNAKKSLYLQMNSLRAEDTAVYYCASGVYSFDYRGQGTLVTVSSTREQKLISEEDGSGTPFPSLAPPIMLLVDGKQQMVVVCLVLDVAPPGLDSPIWFSAGNGSALDAFTYGPSPATDGTWTNLAHLSLPSEELASWEPLVCHTGPGAEGHSRSTQPMHLSGEASTARTCPQEPLRGTPGGALWLGVLRLLLFKLLLFDLLLTCSCLCDPAGPLPSPATTTRLRALGSHRLHPATETGGREATSSPRPQPRDRRWGDTPPGRKPGSPVRAKRSGSGVKQTLNFDLLKLAGDVESNPGPSRGHMTEYKPTVRLATRDDVPRAVRTLAAAFADYPATRHTVDPDRHIERVTELQELFLTRVGLDIGKVWVADDGAAVAVWTTPESVEAGAVFAEIGPRMAELSGSRLAAQQQMEGLLAPHRPKEPAWFLATVGVSPDHQGKGLGSAVVLPGVEAAERAGVPAFLETSAPRNLPFYERLGFTVTADVEVPEGPRTWCMTRKPGA

SEQ ID NO: 17316 - protein, 954 aa, Artificial Sequence
  Synthetic Polypeptide
MALPVTALLLPLALLLHAARPLEDLKNVFPPEVAVFEPSEAEISHTQKATLVCLATGFYPDHVELSWWVNGKEVHSGVSTDPQPLKEQPALNDSRYCLSSRLRVSATFWQNPRNHFRCQVQFYGLSENDEWTQDRAKPVTQIVSAEAWGRADCGFTSESYQQGVLSATILYEILLGKATLYAVLVSALVLMAMVKRKDSRGRAKRSGSGATNFSLLKQAGDVEENPGPTSMALPVTALLLPLALLLHAARPQLQLQESGPGLVKPSETLSLTCTVSGDSISSGDYYWGWIRQPPGKGLEWIGHIYYSGVTYYNPSLKSRVTISVDTSRNQFSLKLSSVTAADTAVYYCTREDSSNWRSRGQGTLVTVSSLESGGGGSFEVQLVESGGGLVQPGGSLRLSCAASGFSFSDFWMSWVRQAPGKGLEWVATISQAGSEKDYVDSVKGRFTISRDNAKKSLYLQMNSLRAEDTAVYYCASGVYSFDYRGQGTLVTVSSTREQKLISEEDLGSGTPFPSLAPPIMLLVDGKQQMVVVCLVLDVAPPGLDSPIWFSAGNGSALDAFTYGPSPATDGTWTNLAHLSLPSEELASWEPLVCHTGPGAEGHSRSTQPMHLSGEASTARTCPQEPLRGTPGGALWLGVLRLLLFKLLLFDLLLTCSCLCDPAGPLPSPATTTRLRALGSHRLHPATETGGREATSSPRPQPRDRRWGDTPPGRKPGSPVRAKRSGSGVKQTLNFDLLKLAGDVESNPGPSRSRGHMTEYKPTVRLATRDDVPRAVRTLAAAFADYPATRHTVDPDRHIERVTELQELFLTRVGLDIGKVWVADDGAAVAVWTTPESVEAGAVFAEIGPRMAELSGSRLAAQQQMEGLLAPHRPKEPAWFLATVGVSPDHQGKGLGSAVVLPGVEAAERAGVPAFLETSAPRNLPFYERLGFTVTADVEVPEGPRTWCMTRKPGA

SEQ ID NO: 17317 - protein, 896 aa, Artificial Sequence
  Synthetic Polypeptide
MALPVTALLLPLALLLHAARPQLQLQESGPGLVKPSETLSLTCTVSGDSISSGDYYWGWIRQPPGKGLEWIGHIYYSGVTYYNPSLKSRVTISVDTSRNQFSLKLSSVTAADTAVYYCTREDSSNWRSRGQGTLVTVSSLEGKPIPNPLLGLDSTGSGDKQLDADVSPKPTIFLPSIAETKLQKAGTYLCLLEKFFPDVIKIHWQEKKSNTILGSQEGNTMKTNDTYMKFSWLTVPEKSLDKEHRCIVRHENNKNGVDQEIIFPPIKTDVITMDPKDNCSKDANDTLLLQLTNTSAYYMYLLLLLKSVVYFAIITCCLLRRTAFCCNGEKSRAKRSGSGATNFSLLKQAGDVEENPGPTSMDWIWRILFLVGAATGAHSFEVQLVESGGGLVQPGGSLRLSCAASGFSFSDFWMSWVRQAPGKGLEWVATISQAGSEKDYVDSVKGRFTISRDNAKKSLYLQMNSLRAEDTAVYYCASGVYSFDYRGQGTLVTVSSTREQKLISEEDGSGSQPHTKPSVFVMKNGTNVACLVKEFYPKDIRINLVSSKKITEFDPAIVISPSGKYNAVKLGKYEDSNSVTCSVQHDNKTVHSTDFEVKTDSTDHVKPKETENTKQPSKSCHKPKAIVHTEKVNMMSLTVLGLRMLFAKTVAVNFLLTAKLFFLRAKRSGSGVKQTLNFDLLKLAGDVESNPGPSRGHMTEYKPTVRLATRDDVPRAVRTLAAAFADYPATRHTVDPDRHIERVTELQELFLTRVGLDIGKVWVADDGAAVAVWTTPESVEAGAVFAEIGPRMAELSGSRLAAQQQMEGLLAPHRPKEPAWFLATVGVSPDHQGKGLGSAVVLPGVEAAERAGVPAFLETSAPRNLPFYERLGFTVTADVEVPEGPRTWCMTRKPGA

SEQ ID NO: 17318 - protein, 634 aa, Artificial Sequence
  Synthetic Polypeptide
MALPVTALLLPLALLLHAARPQLQLQESGPGLVKPSETLSLTCTVSGDSISSGDYYWGWIRQPPGKGLEWIGHIYYSGVTYYNPSLKSRVTISVDTSRNQFSLKLSSVTAADTAVYYCTREDSSNWRSRGQGTLVTVSSLESQPHTKPSVFVMKNGTNVACLVKEFYPKDIRINLVSSKKITEFDPAIVISPSGKYNAVKLGKYEDSNSVTCSVQHDNKTVHSTDFEVKTDSTDHVKPKETENTKQPSKSCHKPKAIVHTEKVNMMSLTVLGLRMLFAKTVAVNFLLTAKLFFLRAKRSGSGATNFSLLKQAGDVEENPGPTSMDWIWRILFLVGAATGAHSFEVQLVESGGGLVQPGGSLRLSCAASGFSFSDFWMSWVRQAPGKGLEWVATISQAGSEKDYVDSVKGRFTISRDNAKKSLYLQMNSLRAEDTAVYYCASGVYSFDYRGQGTLVTVSSTRDKQLDADVSPKPTIFLPSIAETKLQKAGTYLCLLEKFFPDVIKIHWQEKKSNTILGSQEGNTMKTNDTYMKFSWLTVPEKSLDKEHRCIVRHENNKNGVDQEIIFPPIKTDVITMDPKDNCSKDANDTLLLQLTNTSAYYMYLLLLLKSVVYFAIITCCLLRRTAFCCNGEKS

SEQ ID NO: 17319 - protein, 906 aa, Artificial Sequence
  Synthetic Polypeptide
MALPVTALLLPLALLLHAARPLEGKPIPNPLLGLDSTGSGDKQLDADVSPKPTIFLPSIAETKLQKAGTYLCLLEKFFPDVIKIHWQEKKSNTILGSQEGNTMKTNDTYMKFSWLTVPEKSLDKEHRCIVRHENNKNGVDQEIIFPPIKTDVITMDPKDNCSKDANDTLLLQLTNTSAYYMYLLLLLKSVVYFAIITCCLLRRTAFCCNGEKSRAKRSGSGATNFSLLKQAGDVEENPGPTSMALPVTALLLPLALLLHAARPQLQLQESGPGLVKPSETLSLTCTVSGDSISSGDYYWGWIRQPPGKGLEWIGHIYYSGVTYYNPSLKSRVTISVDTSRNQFSLKLSSVTAADTAVYYCTREDSSNWRSRGQGTLVTVSSLESGGGGSFEVQLVESGGGLVQPGGSLRLSCAASGFSFSDFWMSWVRQAPGKGLEWVATISQAGSEKDYVDSVKGRFTISRDNAKKSLYLQMNSLRAEDTAVYYCASGVYSFDYRGQGTLVTVSSTREQKLISEEDGSGSQPHTKPSVFVMKNGTNVACLVKEFYPKDIRINLVSSKKITEFDPAIVISPSGKYNAVKLGKYEDSNSVTCSVQHDNKTVHSTDFEVKTDSTDHVKPKETENTKQPSKSCHKPKAIVHTEKVNMMSLTVLGLRMLFAKTVAVNFLLTAKLFFLRAKRSGSGVKQTLNFDLLKLAGDVESNPGPSRGHMTEYKPTVRLATRDDVPRAVRTLAAAFADYPATRHTVDPDRHIERVTELQELFLTRVGLDIGKVWVADDGAAVAVWTTPESVEAGAVFAEIGPRMAELSGSRLAAQQQMEGLLAPHRPKEPAWFLATVGVSPDHQGKGLGSAVVLPGVEAAERAGVPAFLETSAPRNLPFYERLGFTVTADVEVPEGPRTWCMTRKPGA

SEQ ID NO: 17320 - protein, 1036 aa, Artificial Sequence
  Synthetic Polypeptide
MALPVTALLLPLALLLHAARPQLQLQESGPGLVKPSETLSLTCTVSGDSISSGDYYWGWIRQPPGKGLEWIGHIYYSGVTYYNPSLKSRVTISVDTSRNQFSLKLSSVTAADTAVYYCTREDSSNWRSRGQGTLVTVSSGQPKANPTVTLFPPSSEELQANKATLVCLISDFYPGAVTVAWKADGSPVKAGVETTKPSKQSNNKYAASSYLSLTPEQWKSHRSYSCQVTHEGSTVEKTVAPTECSGSQSFGLLDPKLCYLLDGILFIYGVILTALFLRVKFSRSADAPAYQQGQNQLYNELNLGRREEYDVLDKRRGRDPEMGGKPQRRKNPQEGLYNELQKDKMAEAYSEIGMKGERRRGKGHDGLYQGLSTATKDTYDALHMQALPPRRAKRSGSGATNFSLLKQAGDVEENPGPTSMDWIWRILFLVGAATGAHSFEVQLVESGGGLVQPGGSLRLSCAASGFSFSDFWMSWVRQAPGKGLEWVATISQAGSEKDYVDSVKGRFTISRDNAKKSLYLQMNSLRAEDTAVYYCASGVYSFDYRGQGTLVTVSSASTKGPSVFPLAPSSKSTSGGTAALGCLVKDYFPEPVTVSWNSGALTSGVHTFPAVLQSSGLYSLSSVVTVPSSSLGTQTYICNVNHKPSNTKVDKRVEPKSCGTQSFGLLDPKLCYLLDGILFIYGVILTALFLRVKFSRSADAPAYQQGQNQLYNELNLGRREEYDVLDKRRGRDPEMGGKPQRRKNPQEGLYNELQKDKMAEAYSEIGMKGERRRGKGHDGLYQGLSTATKDTYDALHMQALPPRRAKRSGSGVKQTLNFDLLKLAGDVESNPGPSRGHMTEYKPTVRLATRDDVPRAVRTLAAAFADYPATRHTVDPDRHIERVTELQELFLTRVGLDIGKVWVADDGAAVAVWTTPESVEAGAVFAEIGPRMAELSGSRLAAQQQMEGLLAPHRPKEPAWFLATVGVSPDHQGKGLGSAVVLPGVEAAERAGVPAFLETSAPRNLPFYERLGFTVTADVEVPEGPRTWCMTRKPGA

SEQ ID NO: 17321 - protein, 822 aa, Artificial Sequence
  Synthetic Polypeptide
MALPVTALLLPLALLLHAARPQLQLQESGPGLVKPSETLSLTCTVSGDSISSGDYYWGWIRQPPGKGLEWIGHIYYSGVTYYNPSLKSRVTISVDTSRNQFSLKLSSVTAADTAVYYCTREDSSNWRSRGQGTLVTVSSLEDLKNVFPPEVAVFEPSEAEISHTQKATLVCLATGFYPDHVELSWWVNGKEVHSGVSTDPQPLKEQPALNDSRYCLSSRLRVSATFWQNPRNHFRCQVQFYGLSENDEWTQDRAKPVTQIVSAEAWGRADCGSQSFGLLDPKLCYLLDGILFIYGVILTALFLRVKFSRSADAPAYQQGQNQLYNELNLGRREEYDVLDKRRGRDPEMGGKPQRRKNPQEGLYNELQKDKMAEAYSEIGMKGERRRGKGHDGLYQGLSTATKDTYDALHMQALPPRRAKRSGSGATNFSLLKQAGDVEENPGPTSMDWIWRILFLVGAATGAHSFEVQLVESGGGLVQPGGSLRLSCAASGFSFSDFWMSWVRQAPGKGLEWVATISQAGSEKDYVDSVKGRFTISRDNAKKSLYLQMNSLRAEDTAVYYCASGVYSFDYRGQGTLVTVSSTRIQNPDPAVYQLRDSKSSDKSVCLFTDFDSQTNVSQSKDSDVYITDKTVLDMRSMDFKSNSAVAWSNKSDFACANAFNNSIIPEDTFFPSPESSCGTQSFGLLDPKLCYLLDGILFIYGVILTALFLRVKFSRSADAPAYQQGQNQLYNELNLGRREEYDVLDKRRGRDPEMGGKPQRRKNPQEGLYNELQKDKMAEAYSEIGMKGERRRGKGHDGLYQGLSTATKDTYDALHMQALPPR

SEQ ID NO: 17322 - protein, 822 aa, Artificial Sequence
  Synthetic Polypeptide
MALPVTALLLPLALLLHAARPQLQLQESGPGLVKPSETLSLTCTVSGDSISSGDYYWGWIRQPPGKGLEWIGHIYYSGVTYYNPSLKSRVTISVDTSRNQFSLKLSSVTAADTAVYYCTREDSSNWRSRGQGTLVTVSSLEDLKNVFPPEVAVFEPSKAEIAHTQKATLVCLATGFYPDHVELSWWVNGKEVHSGVCTDPQPLKEQPALNDSRYCLSSRLRVSATFWQNPRNHFRCQVQFYGLSENDEWTQDRAKPVTQIVSAEAWGRADCGSQSFGLLDPKLCYLLDGILFIYGVILTALFLRVKFSRSADAPAYQQGQNQLYNELNLGRREEYDVLDKRRGRDPEMGGKPQRRKNPQEGLYNELQKDKMAEAYSEIGMKGERRRGKGHDGLYQGLSTATKDTYDALHMQALPPRRAKRSGSGATNFSLLKQAGDVEENPGPTSMDWIWRILFLVGAATGAHSFEVQLVESGGGLVQPGGSLRLSCAASGFSFSDFWMSWVRQAPGKGLEWVATISQAGSEKDYVDSVKGRFTISRDNAKKSLYLQMNSLRAEDTAVYYCASGVYSFDYRGQGTLVTVSSTRIQNPDPAVYQLRDSKSSDKSVCLFTDFDSQTNVSQSKDSDVYITDKCVLDMRSMDFKSNSAVAWSNKSDFACANAFNNSIIPEDTFFPSSDVPCGTQSFGLLDPKLCYLLDGILFIYGVILTALFLRVKFSRSADAPAYQQGQNQLYNELNLGRREEYDVLDKRRGRDPEMGGKPQRRKNPQEGLYNELQKDKMAEAYSEIGMKGERRRGKGHDGLYQGLSTATKDTYDALHMQALPPR

SEQ ID NO: 17323 - protein, 893 aa, Artificial Sequence
  Synthetic Polypeptide
MALPVTALLLPLALLLHAARPQLQLQESGPGLVKPSETLSLTCTVSGDSISSGDYYWGWIRQPPGKGLEWIGHIYYSGVTYYNPSLKSRVTISVDTSRNQFSLKLSSVTAADTAVYYCTREDSSNWRSRGQGTLVTVSSLEGKPIPNPLLGLDSTGSGEDLKNVFPPEVAVFEPSEAEISHTQKATLVCLATGFYPDHVELSWWVNGKEVHSGVSTDPQPLKEQPALNDSRYCLSSRLRVSATFWQNPRNHFRCQVQFYGLSENDEWTQDRAKPVTQIVSAEAWGRADCGSQSFGLLDPKLCYLLDGILFIYGVILTALFLRVKFSRSADAPAYQQGQNQLYNELNLGRREEYDVLDKRRGRDPEMGGKPQRRKNPQEGLYNELQKDKMAEAYSEIGMKGERRRGKGHDGLYQGLSTATKDTYDALHMQALPPRRAKRSGSGATNFSLLKQAGDVEENPGPTSMDWIWRILFLVGAATGAHSFEVQLVESGGGLVQPGGSLRLSCAASGFSFSDFWMSWVRQAPGKGLEWVATISQAGSEKDYVDSVKGRFTISRDNAKKSLYLQMNSLRAEDTAVYYCASGVYSFDYRGQGTLVTVSSTREQKLISEEDGSGIQNPDPAVYQLRDSKSSDKSVCLFTDFDSQTNVSQSKDSDVYITDKTVLDMRSMDFKSNSAVAWSNKSDFACANAFNNSIIPEDTFFPSPESSCGTQSFGLLDPKLCYLLDGILFIYGVILTALFLRSKRSRLLHSDYMNMTPRRPGPTRKHYQPYAPPRDFAAYRSRVKFSRSADAPAYQQGQNQLYNELNLGRREEYDVLDKRRGRDPEMGGKPQRRKNPQEGLYNELQKDKMAEAYSEIGMKGERRRGKGHDGLYQGLSTATKDTYDALHMQALPPR

SEQ ID NO: 17324 - protein, 934 aa, Artificial Sequence
  Synthetic Polypeptide
MALPVTALLLPLALLLHAARPQLQLQESGPGLVKPSETLSLTCTVSGDSISSGDYYWGWIRQPPGKGLEWIGHIYYSGVTYYNPSLKSRVTISVDTSRNQFSLKLSSVTAADTAVYYCTREDSSNWRSRGQGTLVTVSSLEGKPIPNPLLGLDSTGSGEDLKNVFPPEVAVFEPSEAEISHTQKATLVCLATGFYPDHVELSWWVNGKEVHSGVSTDPQPLKEQPALNDSRYCLSSRLRVSATFWQNPRNHFRCQVQFYGLSENDEWTQDRAKPVTQIVSAEAWGRADCGSQSFGLLDPKLCYLLDGILFIYGVILTALFLRSKRSRLLHSDYMNMTPRRPGPTRKHYQPYAPPRDFAAYRSRVKFSRSADAPAYQQGQNQLYNELNLGRREEYDVLDKRRGRDPEMGGKPQRRKNPQEGLYNELQKDKMAEAYSEIGMKGERRRGKGHDGLYQGLSTATKDTYDALHMQALPPRRAKRSGSGATNFSLLKQAGDVEENPGPTSMDWIWRILFLVGAATGAHSFEVQLVESGGGLVQPGGSLRLSCAASGFSFSDFWMSWVRQAPGKGLEWVATISQAGSEKDYVDSVKGRFTISRDNAKKSLYLQMNSLRAEDTAVYYCASGVYSFDYRGQGTLVTVSSTREQKLISEEDGSGIQNPDPAVYQLRDSKSSDKSVCLFTDFDSQTNVSQSKDSDVYITDKTVLDMRSMDFKSNSAVAWSNKSDFACANAFNNSIIPEDTFFPSPESSCGTQSFGLLDPKLCYLLDGILFIYGVILTALFLRSKRSRLLHSDYMNMTPRRPGPTRKHYQPYAPPRDFAAYRSRVKFSRSADAPAYQQGQNQLYNELNLGRREEYDVLDKRRGRDPEMGGKPQRRKNPQEGLYNELQKDKMAEAYSEIGMKGERRRGKGHDGLYQGLSTATKDTYDALHMQALPPR

SEQ ID NO: 17325 - protein, 895 aa, Artificial Sequence
  Synthetic Polypeptide
MALPVTALLLPLALLLHAARPQLQLQESGPGLVKPSETLSLTCTVSGDSISSGDYYWGWIRQPPGKGLEWIGHIYYSGVTYYNPSLKSRVTISVDTSRNQFSLKLSSVTAADTAVYYCTREDSSNWRSRGQGTLVTVSSLEGKPIPNPLLGLDSTGSGEDLKNVFPPEVAVFEPSEAEISHTQKATLVCLATGFYPDHVELSWWVNGKEVHSGVSTDPQPLKEQPALNDSRYCLSSRLRVSATFWQNPRNHFRCQVQFYGLSENDEWTQDRAKPVTQIVSAEAWGRADCGSQSFGLLDPKLCYLLDGILFIYGVILTALFLRVKFSRSADAPAYQQGQNQLYNELNLGRREEYDVLDKRRGRDPEMGGKPQRRKNPQEGLYNELQKDKMAEAYSEIGMKGERRRGKGHDGLYQGLSTATKDTYDALHMQALPPRRAKRSGSGATNFSLLKQAGDVEENPGPTSMDWIWRILFLVGAATGAHSFEVQLVESGGGLVQPGGSLRLSCAASGFSFSDFWMSWVRQAPGKGLEWVATISQAGSEKDYVDSVKGRFTISRDNAKKSLYLQMNSLRAEDTAVYYCASGVYSFDYRGQGTLVTVSSTREQKLISEEDLGSGIQNPDPAVYQLRDSKSSDKSVCLFTDFDSQTNVSQSKDSDVYITDKTVLDMRSMDFKSNSAVAWSNKSDFACANAFNNSIIPEDTFFPSPESSCGTQSFGLLDPKLCYLLDGILFIYGVILTALFLKRGRKKLLYIFKQPFMRPVQTTQEEDGCSCRFPEEEEGGCELRVKFSRSADAPAYQQGQNQLYNELNLGRREEYDVLDKRRGRDPEMGGKPQRRKNPQEGLYNELQKDKMAEAYSEIGMKGERRRGKGHDGLYQGLSTATKDTYDALHMQALPPR

SEQ ID NO: 17326 - protein, 937 aa, Artificial Sequence
  Synthetic Polypeptide
MALPVTALLLPLALLLHAARPQLQLQESGPGLVKPSETLSLTCTVSGDSISSGDYYWGWIRQPPGKGLEWIGHIYYSGVTYYNPSLKSRVTISVDTSRNQFSLKLSSVTAADTAVYYCTREDSSNWRSRGQGTLVTVSSLEGKPIPNPLLGLDSTGSGEDLKNVFPPEVAVFEPSEAEISHTQKATLVCLATGFYPDHVELSWWVNGKEVHSGVSTDPQPLKEQPALNDSRYCLSSRLRVSATFWQNPRNHFRCQVQFYGLSENDEWTQDRAKPVTQIVSAEAWGRADCGSQSFGLLDPKLCYLLDGILFIYGVILTALFLKRGRKKLLYIFKQPFMRPVQTTQEEDGCSCRFPEEEEGGCELRVKFSRSADAPAYQQGQNQLYNELNLGRREEYDVLDKRRGRDPEMGGKPQRRKNPQEGLYNELQKDKMAEAYSEIGMKGERRRGKGHDGLYQGLSTATKDTYDALHMQALPPRRAKRSGSGATNFSLLKQAGDVEENPGPTSMDWIWRILFLVGAATGAHSFEVQLVESGGGLVQPGGSLRLSCAASGFSFSDFWMSWVRQAPGKGLEWVATISQAGSEKDYVDSVKGRFTISRDNAKKSLYLQMNSLRAEDTAVYYCASGVYSFDYRGQGTLVTVSSTREQKLISEEDLGSGIQNPDPAVYQLRDSKSSDKSVCLFTDFDSQTNVSQSKDSDVYITDKTVLDMRSMDFKSNSAVAWSNKSDFACANAFNNSIIPEDTFFPSPESSCGTQSFGLLDPKLCYLLDGILFIYGVILTALFLKRGRKKLLYIFKQPFMRPVQTTQEEDGCSCRFPEEEEGGCELRVKFSRSADAPAYQQGQNQLYNELNLGRREEYDVLDKRRGRDPEMGGKPQRRKNPQEGLYNELQKDKMAEAYSEIGMKGERRRGKGHDGLYQGLSTATKDTYDALHMQALPPR

SEQ ID NO: 17327 - protein, 827 aa, Artificial Sequence
  Synthetic Polypeptide
MALPVTALLLPLALLLHAARPQLQLQESGPGLVKPSETLSLTCTVSGDSISSGDYYWGWIRQPPGKGLEWIGHIYYSGVTYYNPSLKSRVTISVDTSRNQFSLKLSSVTAADTAVYYCTREDSSNWRSRGQGTLVTVSSLEQSFGLLDPKLCYLLDGILFIYGVILTALFLRVKFSRSADAPAYQQGQNQLYNELNLGRREEYDVLDKRRGRDPEMGGKPQRRKNPQEGLYNELQKDKMAEAYSEIGMKGERRRGKGHDGLYQGLSTATKDTYDALHMQALPPRRAKRSGSGATNFSLLKQAGDVEENPGPTSMDWIWRILFLVGAATGAHSFEVQLVESGGGLVQPGGSLRLSCAASGFSFSDFWMSWVRQAPGKGLEWVATISQAGSEKDYVDSVKGRFTISRDNAKKSLYLQMNSLRAEDTAVYYCASGVYSFDYRGQGTLVTVSSTRQSFGLLDPKLCYLLDGILFIYGVILTALFLRVKFSRSADAPAYQQGQNQLYNELNLGRREEYDVLDKRRGRDPEMGGKPQRRKNPQEGLYNELQKDKMAEAYSEIGMKGERRRGKGHDGLYQGLSTATKDTYDALHMQALPPRRAKRSGSGVKQTLNFDLLKLAGDVESNPGPSRGHMTEYKPTVRLATRDDVPRAVRTLAAAFADYPATRHTVDPDRHIERVTELQELFLTRVGLDIGKVWVADDGAAVAVWTTPESVEAGAVFAEIGPRMAELSGSRLAAQQQMEGLLAPHRPKEPAWFLATVGVSPDHQGKGLGSAVVLPGVEAAERAGVPAFLETSAPRNLPFYERLGFTVTADVEVPEGPRTWCMTRKPGA

SEQ ID NO: 17328 - protein, 652 aa, Artificial Sequence
  Synthetic Polypeptide
MALPVTALLLPLALLLHAARPQLQLQESGPGLVKPSETLSLTCTVSGDSISSGDYYWGWIRQPPGKGLEWIGHIYYSGVTYYNPSLKSRVTISVDTSRNQFSLKLSSVTAADTAVYYCTREDSSNWRSRGQGTLVTVSSLEGQPKANPTVTLFPPSSEELQANKATLVCLISDFYPGAVTVAWKADGSPVKAGVETTKPSKQSNNKYAASSYLSLTPEQWKSHRSYSCQVTHEGSTVEKTVAPTECSPIKTDVITMDPKDNCSKDANDTLLLQLTNTSAYYMYLLLLLKSVVYFAIITCCLLRRTAFCCNGEKSRAKRSGSGATNFSLLKQAGDVEENPGPTSMDWIWRILFLVGAATGAHSFEVQLVESGGGLVQPGGSLRLSCAASGFSFSDFWMSWVRQAPGKGLEWVATISQAGSEKDYVDSVKGRFTISRDNAKKSLYLQMNSLRAEDTAVYYCASGVYSFDYRGQGTLVTVSSTRASTKGPSVFPLAPSSKSTSGGTAALGCLVKDYFPEPVTVSWNSGALTSGVHTFPAVLQSSGLYSLSSVVTVPSSSLGTQTYICNVNHKPSNTKVDKRVEPKSCEVKTDSTDHVKPKETENTKQPSKSCHKPKAIVHTEKVNMMSLTVLGLRMLFAKTVAVNFLLTAKLFFL

SEQ ID NO: 17329 - protein, 630 aa, Artificial Sequence
  Synthetic Polypeptide
MALPVTALLLPLALLLHAARPQLQLQESGPGLVKPSETLSLTCTVSGDSISSGDYYWGWIRQPPGKGLEWIGHIYYSGVTYYNPSLKSRVTISVDTSRNQFSLKLSSVTAADTAVYYCTREDSSNWRSRGQGTLVTVSSLEGQPKANPTVTLFPPSSEELQANKATLVCLISDFYPGAVTVAWKADGSPVKAGVETTKPSKQSNNKYAASSYLSLTPEQWKSHRSYSCQVTHEGSTVEKTVAPTECSGRADCGITSASYHQGVLSATILYEILLGKATLYAVLVSALVLMAMVKRKDSRGRAKRSGSGATNFSLLKQAGDVEENPGPTSMDWIWRILFLVGAATGAHSFEVQLVESGGGLVQPGGSLRLSCAASGFSFSDFWMSWVRQAPGKGLEWVATISQAGSEKDYVDSVKGRFTISRDNAKKSLYLQMNSLRAEDTAVYYCASGVYSFDYRGQGTLVTVSSTRASTKGPSVFPLAPSSKSTSGGTAALGCLVKDYFPEPVTVSWNSGALTSGVHTFPAVLQSSGLYSLSSVVTVPSSSLGTQTYICNVNHKPSNTKVDKRVEPKSCIPEDTFFPSSDVPCDVKLVEKSFETDTNLNFQNLSVIGFRILLLKVAGFNLLMTLRLWSS

SEQ ID NO: 17330 - protein, 630 aa, Artificial Sequence
  Synthetic Polypeptide
MALPVTALLLPLALLLHAARPQLQLQESGPGLVKPSETLSLTCTVSGDSISSGDYYWGWIRQPPGKGLEWIGHIYYSGVTYYNPSLKSRVTISVDTSRNQFSLKLSSVTAADTAVYYCTREDSSNWRSRGQGTLVTVSSLEGQPKANPTVTLFPPSSEELQANKATLVCLISDFYPGAVTVAWKADGSPVKAGVETTKPSKQSNNKYAASSYLSLTPEQWKSHRSYSCQVTHEGSTVEKTVAPTECSGRADCGFTSESYQQGVLSATILYEILLGKATLYAVLVSALVLMAMVKRKDSRGRAKRSGSGATNFSLLKQAGDVEENPGPTSMDWIWRILFLVGAATGAHSFEVQLVESGGGLVQPGGSLRLSCAASGFSFSDFWMSWVRQAPGKGLEWVATISQAGSEKDYVDSVKGRFTISRDNAKKSLYLQMNSLRAEDTAVYYCASGVYSFDYRGQGTLVTVSSTRASTKGPSVFPLAPSSKSTSGGTAALGCLVKDYFPEPVTVSWNSGALTSGVHTFPAVLQSSGLYSLSSVVTVPSSSLGTQTYICNVNHKPSNTKVDKRVEPKSCIPEDTFFPSPESSCDVKLVEKSFETDTNLNFQNLSVIGFRILLLKVAGFNLLMTLRLWSS

SEQ ID NO: 17331 - protein, 451 aa, Artificial Sequence
  Synthetic Polypeptide
MALPVTALLLPLALLLHAARPQLQLQESGPGLVKPSETLSLTCTVSGDSISSGDYYWGWIRQPPGKGLEWIGHIYYSGVTYYNPSLKSRVTISVDTSRNQFSLKLSSVTAADTAVYYCTREDSSNWRSRGQGTLVTVSSLESGGGGSFEVQLVESGGGLVQPGGSLRLSCAASGFSFSDFWMSWVRQAPGKGLEWVATISQAGSEKDYVDSVKGRFTISRDNAKKSLYLQMNSLRAEDTAVYYCASGVYSFDYRGQGTLVTVSSTRDGNEEMGGITQTPYKVSISGTTVILTCPQYPGSEILWQHNDKNIGGDEDDKNIGSDEDHLSLKEFSELEQSGYYVCYPRGSKPEDANFYLYLRARVCENCMEMDVMSVATIVIVDICITGGLLLLVYYWSKNRKAKAKPVTRGAGAGGRQRGQNKERPPPVPNPDYEPIRKGQRDLYSGLNQRRI

SEQ ID NO: 17332 - protein, 416 aa, Artificial Sequence
  Synthetic Polypeptide
MALPVTALLLPLALLLHAARPQLQLQESGPGLVKPSETLSLTCTVSGDSISSGDYYWGWIRQPPGKGLEWIGHIYYSGVTYYNPSLKSRVTISVDTSRNQFSLKLSSVTAADTAVYYCTREDSSNWRSRGQGTLVTVSSLESGGGGSFEVQLVESGGGLVQPGGSLRLSCAASGFSFSDFWMSWVRQAPGKGLEWVATISQAGSEKDYVDSVKGRFTISRDNAKKSLYLQMNSLRAEDTAVYYCASGVYSFDYRGQGTLVTVSSTRFKIPIEELEDRVFVNCNTSITWVEGTVGTLLSDITRLDLGKRILDPRGIYRCNGTDIYKDKESTVQVHYRMCQSCVELDPATVAGIIVTDVIATLLLALGVFCFAGHETGRLSGAADTQALLRNDQVYQPLRDRDDAQYSHLGGNWARNK

SEQ ID NO: 17333 - protein, 426 aa, Artificial Sequence
  Synthetic Polypeptide
MALPVTALLLPLALLLHAARPQLQLQESGPGLVKPSETLSLTCTVSGDSISSGDYYWGWIRQPPGKGLEWIGHIYYSGVTYYNPSLKSRVTISVDTSRNQFSLKLSSVTAADTAVYYCTREDSSNWRSRGQGTLVTVSSLESGGGGSFEVQLVESGGGLVQPGGSLRLSCAASGFSFSDFWMSWVRQAPGKGLEWVATISQAGSEKDYVDSVKGRFTISRDNAKKSLYLQMNSLRAEDTAVYYCASGVYSFDYRGQGTLVTVSSTRQSIKGNHLVKVYDYQEDGSVLLTCDAEAKNITWFKDGKMIGFLTEDKKKWNLGSNAKDPRGMYQCKGSQNKSKPLQVYYRMCQNCIELNAATISGFLFAEIVSIFVLAVGVYFIAGQDGVRQSRASDKQTLLPNDQLYQPLKDREDDQYSHLQGNQLRRN

SEQ ID NO: 17334 - protein, 409 aa, Artificial Sequence
  Synthetic Polypeptide
MALPVTALLLPLALLLHAARPQLQLQESGPGLVKPSETLSLTCTVSGDSISSGDYYWGWIRQPPGKGLEWIGHIYYSGVTYYNPSLKSRVTISVDTSRNQFSLKLSSVTAADTAVYYCTREDSSNWRSRGQGTLVTVSSLESGGGGSFEVQLVESGGGLVQPGGSLRLSCAASGFSFSDFWMSWVRQAPGKGLEWVATISQAGSEKDYVDSVKGRFTISRDNAKKSLYLQMNSLRAEDTAVYYCASGVYSFDYRGQGTLVTVSSTRQSFGLLDPKLCYLLDGILFIYGVILTALFLRVKFSRSADAPAYQQGQNQLYNELNLGRREEYDVLDKRRGRDPEMGGKPQRRKNPQEGLYNELQKDKMAEAYSEIGMKGERRRGKGHDGLYQGLSTATKDTYDALHMQALPPR

SEQ ID NO: 17335 - protein, 452 aa, Artificial Sequence
  Synthetic Polypeptide
MALPVTALLLPLALLLHAARPEVQLVESGGGLVQPGGSLRLSCAASGFSFSDFWMSWVRQAPGKGLEWVATISQAGSEKDYVDSVKGRFTISRDNAKKSLYLQMNSLRAEDTAVYYCASGVYSFDYRGQGTLVTVSSLESGGGGSFEQLQLQESGPGLVKPSETLSLTCTVSGDSISSGDYYWGWIRQPPGKGLEWIGHIYYSGVTYYNPSLKSRVTISVDTSRNQFSLKLSSVTAADTAVYYCTREDSSNWRSRGQGTLVTVSSTRDGNEEMGGITQTPYKVSISGTTVILTCPQYPGSEILWQHNDKNIGGDEDDKNIGSDEDHLSLKEFSELEQSGYYVCYPRGSKPEDANFYLYLRARVCENCMEMDVMSVATIVIVDICITGGLLLLVYYWSKNRKAKAKPVTRGAGAGGRQRGQNKERPPPVPNPDYEPIRKGQRDLYSGLNQRRI

SEQ ID NO: 17336 - protein, 417 aa, Artificial Sequence
  Synthetic Polypeptide
MALPVTALLLPLALLLHAARPEVQLVESGGGLVQPGGSLRLSCAASGFSFSDFWMSWVRQAPGKGLEWVATISQAGSEKDYVDSVKGRFTISRDNAKKSLYLQMNSLRAEDTAVYYCASGVYSFDYRGQGTLVTVSSLESGGGGSFEQLQLQESGPGLVKPSETLSLTCTVSGDSISSGDYYWGWIRQPPGKGLEWIGHIYYSGVTYYNPSLKSRVTISVDTSRNQFSLKLSSVTAADTAVYYCTREDSSNWRSRGQGTLVTVSSTRFKIPIEELEDRVFVNCNTSITWVEGTVGTLLSDITRLDLGKRILDPRGIYRCNGTDIYKDKESTVQVHYRMCQSCVELDPATVAGIIVTDVIATLLLALGVFCFAGHETGRLSGAADTQALLRNDQVYQPLRDRDDAQYSHLGGNWARNK

SEQ ID NO: 17337 - protein, 427 aa, Artificial Sequence
  Synthetic Polypeptide
MALPVTALLLPLALLLHAARPEVQLVESGGGLVQPGGSLRLSCAASGFSFSDFWMSWVRQAPGKGLEWVATISQAGSEKDYVDSVKGRFTISRDNAKKSLYLQMNSLRAEDTAVYYCASGVYSFDYRGQGTLVTVSSLESGGGGSFEQLQLQESGPGLVKPSETLSLTCTVSGDSISSGDYYWGWIRQPPGKGLEWIGHIYYSGVTYYNPSLKSRVTISVDTSRNQFSLKLSSVTAADTAVYYCTREDSSNWRSRGQGTLVTVSSTRQSIKGNHLVKVYDYQEDGSVLLTCDAEAKNITWFKDGKMIGFLTEDKKKWNLGSNAKDPRGMYQCKGSQNKSKPLQVYYRMCQNCIELNAATISGFLFAEIVSIFVLAVGVYFIAGQDGVRQSRASDKQTLLPNDQLYQPLKDREDDQYSHLQGNQLRRN

SEQ ID NO: 17338 - protein, 410 aa, Artificial Sequence
  Synthetic Polypeptide
MALPVTALLLPLALLLHAARPEVQLVESGGGLVQPGGSLRLSCAASGFSFSDFWMSWVRQAPGKGLEWVATISQAGSEKDYVDSVKGRFTISRDNAKKSLYLQMNSLRAEDTAVYYCASGVYSFDYRGQGTLVTVSSLESGGGGSFEQLQLQESGPGLVKPSETLSLTCTVSGDSISSGDYYWGWIRQPPGKGLEWIGHIYYSGVTYYNPSLKSRVTISVDTSRNQFSLKLSSVTAADTAVYYCTREDSSNWRSRGQGTLVTVSSTRQSFGLLDPKLCYLLDGILFIYGVILTALFLRVKFSRSADAPAYQQGQNQLYNELNLGRREEYDVLDKRRGRDPEMGGKPQRRKNPQEGLYNELQKDKMAEAYSEIGMKGERRRGKGHDGLYQGLSTATKDTYDALHMQALPPR

SEQ ID NO: 17339 - protein, 642 aa, Artificial Sequence
  Synthetic Polypeptide
MALPVTALLLPLALLLHAARPQLQLQESGPGLVKPSETLSLTCTVSGDSISSGDYYWGWIRQPPGKGLEWIGHIYYSGVTYYNPSLKSRVTISVDTSRNQFSLKLSSVTAADTAVYYCTREDSSNWRSRGQGTLVTVSSLESGGGGSFEVQLVESGGGLVQPGGSLRLSCAASGFSFSDFWMSWVRQAPGKGLEWVATISQAGSEKDYVDSVKGRFTISRDNAKKSLYLQMNSLRAEDTAVYYCASGVYSFDYRGQGTLVTVSSTRGSGIQNPDPAVYQLRDSKSSDKSVCLFTDFDSQTNVSQSKDSDVYITDKTVLDMRSMDFKSNSAVAWSNKSDFACANAFNNSIIPEDTFFPSPESSCDVKLVEKSFETDTNLNFQNLSVIGFRILLLKVAGFNLLMTLRLWSSRAKRSGSGVKQTLNFDLLKLAGDVESNPGPSRGHMTEYKPTVRLATRDDVPRAVRTLAAAFADYPATRHTVDPDRHIERVTELQELFLTRVGLDIGKVWVADDGAAVAVWTTPESVEAGAVFAEIGPRMAELSGSRLAAQQQMEGLLAPHRPKEPAWFLATVGVSPDHQGKGLGSAVVLPGVEAAERAGVPAFLETSAPRNLPFYERLGFTVTADVEVPEGPRTWCMTRKPGA

SEQ ID NO: 17340 - protein, 674 aa, Artificial Sequence
  Synthetic Polypeptide
MALPVTALLLPLALLLHAARPQLQLQESGPGLVKPSETLSLTCTVSGDSISSGDYYWGWIRQPPGKGLEWIGHIYYSGVTYYNPSLKSRVTISVDTSRNQFSLKLSSVTAADTAVYYCTREDSSNWRSRGQGTLVTVSSLESGGGGSFEVQLVESGGGLVQPGGSLRLSCAASGFSFSDFWMSWVRQAPGKGLEWVATISQAGSEKDYVDSVKGRFTISRDNAKKSLYLQMNSLRAEDTAVYYCASGVYSFDYRGQGTLVTVSSLEDLKNVFPPEVAVFEPSEAEISHTQKATLVCLATGFYPDHVELSWWVNGKEVHSGVSTDPQPLKEQPALNDSRYCLSSRLRVSATFWQNPRNHFRCQVQFYGLSENDEWTQDRAKPVTQIVSAEAWGRADCGFTSESYQQGVLSATILYEILLGKATLYAVLVSALVLMAMVKRKDSRGRAKRSGSGATNFSLLKQAGDVEENPGPTRGHMTEYKPTVRLATRDDVPRAVRTLAAAFADYPATRHTVDPDRHIERVTELQELFLTRVGLDIGKVWVADDGAAVAVWTTPESVEAGAVFAEIGPRMAELSGSRLAAQQQMEGLLAPHRPKEPAWFLATVGVSPDHQGKGLGSAVVLPGVEAAERAGVPAFLETSAPRNLPFYERLGFTVTADVEVPEGPRTWCMTRKPGA

SEQ ID NO: 17341 - protein, 724 aa, Artificial Sequence
  Synthetic Polypeptide
MALPVTALLLPLALLLHAARPQLQLQESGPGLVKPSETLSLTCTVSGDSISSGDYYWGWIRQPPGKGLEWIGHIYYSGVTYYNPSLKSRVTISVDTSRNQFSLKLSSVTAADTAVYYCTREDSSNWRSRGQGTLVTVSSLESGGGGSFEVQLVESGGGLVQPGGSLRLSCAASGFSFSDFWMSWVRQAPGKGLEWVATISQAGSEKDYVDSVKGRFTISRDNAKKSLYLQMNSLRAEDTAVYYCASGVYSFDYRGQGTLVTVSSTREQKLISEEDLGSGTPFPSLAPPIMLLVDGKQQMVVVCLVLDVAPPGLDSPIWFSAGNGSALDAFTYGPSPATDGTWTNLAHLSLPSEELASWEPLVCHTGPGAEGHSRSTQPMHLSGEASTARTCPQEPLRGTPGGALWLGVLRLLLFKLLLFDLLLTCSCLCDPAGPLPSPATTTRLRALGSHRLHPATETGGREATSSPRPQPRDRRWGDTPPGRKPGSPVRAKRSGSGVKQTLNFDLLKLAGDVESNPGPSRSRGHMTEYKPTVRLATRDDVPRAVRTLAAAFADYPATRHTVDPDRHIERVTELQELFLTRVGLDIGKVWVADDGAAVAVWTTPESVEAGAVFAEIGPRMAELSGSRLAAQQQMEGLLAPHRPKEPAWFLATVGVSPDHQGKGLGSAVVLPGVEAAERAGVPAFLETSAPRNLPFYERLGFTVTADVEVPEGPRTWCMTRKPGA

SEQ ID NO: 17342 - protein, 549 aa, Artificial Sequence; identical to SEQ ID NO: 17196
  Synthetic Polypeptide

SEQ ID NO: 17343 - protein, 319 aa, Artificial Sequence; identical to SEQ ID NO: 17197
  Synthetic Polypeptide

SEQ ID NO: 17344 - protein, 444 aa, Artificial Sequence
  Synthetic Polypeptide
MDWIWRILFLVGAATGAHSFEVQLVESGGGLVQPGGSLRLSCAASGFSFSDFWMSWVRQAPGKGLEWVATISQAGSEKDYVDSVKGRFTISRDNAKKSLYLQMNSLRAEDTAVYYCASGVYSFDYRGQGTLVTVSSTRIQNPDPAVYQLRDSKSSDKSVCLFTDFDSQTNVSQSKDSDVYITDKTVLDMRSMDFKSNSAVAWSNKSDFACANAFNNSIIPEDTFFPSPESSCDVKLVEKSFETDTNLNFQNLSVIGFRILLLKVAGFNLLMTLRLWSSRAKRSGSGVKQTLNFDLLKLAGDVESNPGPSRGHMAKPLSQEESTLIERATATINSIPISEDYSVASAALSSDGRIFTGVNVYHFTGGPCAELVVLGTAAAAAAGNLTCIVAIGNENRGILSPCGRCRQVLLDLHPGIKAIVKDSDGQPTAVGIRELLPSGYVWEG

SEQ ID NO: 17345 - protein, 278 aa, Artificial Sequence
  Synthetic Polypeptide
MDWIWRILFLVGAATGAHSFEVQLVESGGGLVQPGGSLRLSCAASGFSFSDFWMSWVRQAPGKGLEWVATISQAGSEKDYVDSVKGRFTISRDNAKKSLYLQMNSLRAEDTAVYYCASGVYSFDYRGQGTLVTVSSTRIQNPDPAVYQLRDSKSSDKSVCLFTDFDSQTNVSQSKDSDVYITDKTVLDMRSMDFKSNSAVAWSNKSDFACANAFNNSIIPEDTFFPSPESSCDVKLVEKSFETDTNLNFQNLSVIGFRILLLKVAGFNLLMTLRLWSS

SEQ ID NO: 17346 - protein, 567 aa, Artificial Sequence; identical to SEQ ID NO: 17200
  Synthetic Polypeptide

SEQ ID NO: 17347 - protein, 337 aa, Artificial Sequence; identical to SEQ ID NO: 17201
  Synthetic Polypeptide

SEQ ID NO: 17348 - protein, 456 aa, Artificial Sequence
  Synthetic Polypeptide
MDWIWRILFLVGAATGAHSFEVQLVESGGGLVQPGGSLRLSCAASGFSFSDFWMSWVRQAPGKGLEWVATISQAGSEKDYVDSVKGRFTISRDNAKKSLYLQMNSLRAEDTAVYYCASGVYSFDYRGQGTLVTVSSTREQKLISEEDGSGIQNPDPAVYQLRDSKSSDKSVCLFTDFDSQTNVSQSKDSDVYITDKCVLDMRSMDFKSNSAVAWSNKSDFACANAFNNSIIPEDTFFPSPESSCDVKLVEKSFETDTNLNFQNLSVIGFRILLLKVAGFNLLMTLRLWSSRAKRSGSGVKQTLNFDLLKLAGDVESNPGPSRGHMAKPLSQEESTLIERATATINSIPISEDYSVASAALSSDGRIFTGVNVYHFTGGPCAELVVLGTAAAAAAGNLTCIVAIGNENRGILSPCGRCRQVLLDLHPGIKAIVKDSDGQPTAVGIRELLPSGYVWEG

SEQ ID NO: 17349 - protein, 290 aa, Artificial Sequence
  Synthetic Polypeptide
MDWIWRILFLVGAATGAHSFEVQLVESGGGLVQPGGSLRLSCAASGFSFSDFWMSWVRQAPGKGLEWVATISQAGSEKDYVDSVKGRFTISRDNAKKSLYLQMNSLRAEDTAVYYCASGVYSFDYRGQGTLVTVSSTREQKLISEEDGSGIQNPDPAVYQLRDSKSSDKSVCLFTDFDSQTNVSQSKDSDVYITDKCVLDMRSMDFKSNSAVAWSNKSDFACANAFNNSIIPEDTFFPSPESSCDVKLVEKSFETDTNLNFQNLSVIGFRILLLKVAGFNLLMTLRLWSS

SEQ ID NO: 17350 - protein, 642 aa, Artificial Sequence
  Synthetic Polypeptide
MALPVTALLLPLALLLHAARPQLQLQESGPGLVKPSETLSLTCTVSGDSISSGDYYWGWIRQPPGKGLEWIGHIYYSGVTYYNPSLKSRVTISVDTSRNQFSLKLSSVTAADTAVYYCTREDSSNWRSRGQGTLVTVSSLESGGGGSFEVQLVESGGGLVQPGGSLRLSCAASGFSFSDFWMSWVRQAPGKGLEWVATISQAGSEKDYVDSVKGRFTISRDNAKKSLYLQMNSLRAEDTAVYYCASGVYSFDYRGQGTLVTVSSTRGSGIQNPDPAVYQLRDSKSSDKSVCLFTDFDSQTNVSQSKDSDVYITDKTVLDMRSMDFKSNSAVAWSNKSDFACANAFNNSIIPEDTFFPSSDVPCDVKLVEKSFETDTNLNFQNLSVIGFRILLLKVAGFNLLMTLRLWSSRAKRSGSGVKQTLNFDLLKLAGDVESNPGPSRGHMTEYKPTVRLATRDDVPRAVRTLAAAFADYPATRHTVDPDRHIERVTELQELFLTRVGLDIGKVWVADDGAAVAVWTTPESVEAGAVFAEIGPRMAELSGSRLAAQQQMEGLLAPHRPKEPAWFLATVGVSPDHQGKGLGSAVVLPGVEAAERAGVPAFLETSAPRNLPFYERLGFTVTADVEVPEGPRTWCMTRKPGA

SEQ ID NO: 17351 - protein, 674 aa, Artificial Sequence
  Synthetic Polypeptide
MALPVTALLLPLALLLHAARPQLQLQESGPGLVKPSETLSLTCTVSGDSISSGDYYWGWIRQPPGKGLEWIGHIYYSGVTYYNPSLKSRVTISVDTSRNQFSLKLSSVTAADTAVYYCTREDSSNWRSRGQGTLVTVSSLESGGGGSFEVQLVESGGGLVQPGGSLRLSCAASGFSFSDFWMSWVRQAPGKGLEWVATISQAGSEKDYVDSVKGRFTISRDNAKKSLYLQMNSLRAEDTAVYYCASGVYSFDYRGQGTLVTVSSLEDLKNVFPPEVAVFEPSKAEIAHTQKATLVCLATGFYPDHVELSWWVNGKEVHSGVSTDPQPLKEQPALNDSRYCLSSRLRVSATFWQNPRNHFRCQVQFYGLSENDEWTQDRAKPVTQIVSAEAWGRADCGITSASYHQGVLSATILYEILLGKATLYAVLVSALVLMAMVKRKDSRGRAKRSGSGATNFSLLKQAGDVEENPGPTRGHMTEYKPTVRLATRDDVPRAVRTLAAAFADYPATRHTVDPDRHIERVTELQELFLTRVGLDIGKVWVADDGAAVAVWTTPESVEAGAVFAEIGPRMAELSGSRLAAQQQMEGLLAPHRPKEPAWFLATVGVSPDHQGKGLGSAVVLPGVEAAERAGVPAFLETSAPRNLPFYERLGFTVTADVEVPEGPRTWCMTRKPGA

SEQ ID NO: 17352 - protein, 697 aa, Artificial Sequence
  Synthetic Polypeptide
MALPVTALLLPLALLLHAARPQLQLQESGPGLVKPSETLSLTCTVSGDSISSGDYYWGWIRQPPGKGLEWIGHIYYSGVTYYNPSLKSRVTISVDTSRNQFSLKLSSVTAADTAVYYCTREDSSNWRSRGQGTLVTVSSLESGGGGSFEVQLVESGGGLVQPGGSLRLSCAASGFSFSDFWMSWVRQAPGKGLEWVATISQAGSEKDYVDSVKGRFTISRDNAKKSLYLQMNSLRAEDTAVYYCASGVYSFDYRGQGTLVTVSSTRGSGGGGSGGGGSGDGNEEMGGITQTPYKVSISGTTVILTCPQYPGSEILWQHNDKNIGGDEDDKNIGSDEDHLSLKEFSELEQSGYYVCYPRGSKPEDANFYLYLRARVCENCMEMDVMSVATIVIVDICITGGLLLLVYYWSKNRKAKAKPVTRGAGAGGRQRGQNKERPPPVPNPDYEPIRKGQRDLYSGLNQRRIRAKRSGSGVKQTLNFDLLKLAGDVESNPGPSRGHMTEYKPTVRLATRDDVPRAVRTLAAAFADYPATRHTVDPDRHIERVTELQELFLTRVGLDIGKVWVADDGAAVAVWTTPESVEAGAVFAEIGPRMAELSGSRLAAQQQMEGLLAPHRPKEPAWFLATVGVSPDHQGKGLGSAVVLPGVEAAERAGVPAFLETSAPRNLPFYERLGFTVTADVEVPEGPRTWCMTRKPGA

SEQ ID NO: 17353 - protein, 662 aa, Artificial Sequence
  Synthetic Polypeptide
MALPVTALLLPLALLLHAARPQLQLQESGPGLVKPSETLSLTCTVSGDSISSGDYYWGWIRQPPGKGLEWIGHIYYSGVTYYNPSLKSRVTISVDTSRNQFSLKLSSVTAADTAVYYCTREDSSNWRSRGQGTLVTVSSLESGGGGSFEVQLVESGGGLVQPGGSLRLSCAASGFSFSDFWMSWVRQAPGKGLEWVATISQAGSEKDYVDSVKGRFTISRDNAKKSLYLQMNSLRAEDTAVYYCASGVYSFDYRGQGTLVTVSSTRGSGGGGSGGGGSGFKIPIEELEDRVFVNCNTSITWVEGTVGTLLSDITRLDLGKRILDPRGIYRCNGTDIYKDKESTVQVHYRMCQSCVELDPATVAGIIVTDVIATLLLALGVFCFAGHETGRLSGAADTQALLRNDQVYQPLRDRDDAQYSHLGGNWARNKRAKRSGSGVKQTLNFDLLKLAGDVESNPGPSRGHMTEYKPTVRLATRDDVPRAVRTLAAAFADYPATRHTVDPDRHIERVTELQELFLTRVGLDIGKVWVADDGAAVAVWTTPESVEAGAVFAEIGPRMAELSGSRLAAQQQMEGLLAPHRPKEPAWFLATVGVSPDHQGKGLGSAVVLPGVEAAERAGVPAFLETSAPRNLPFYERLGFTVTADVEVPEGPRTWCMTRKPGA

SEQ ID NO: 17354 - protein, 672 aa, Artificial Sequence
  Synthetic Polypeptide
MALPVTALLLPLALLLHAARPQLQLQESGPGLVKPSETLSLTCTVSGDSISSGDYYWGWIRQPPGKGLEWIGHIYYSGVTYYNPSLKSRVTISVDTSRNQFSLKLSSVTAADTAVYYCTREDSSNWRSRGQGTLVTVSSLESGGGGSFEVQLVESGGGLVQPGGSLRLSCAASGFSFSDFWMSWVRQAPGKGLEWVATISQAGSEKDYVDSVKGRFTISRDNAKKSLYLQMNSLRAEDTAVYYCASGVYSFDYRGQGTLVTVSSTRGSGGGGSGGGGSGQSIKGNHLVKVYDYQEDGSVLLTCDAEAKNITWFKDGKMIGFLTEDKKKWNLGSNAKDPRGMYQCKGSQNKSKPLQVYYRMCQNCIELNAATISGFLFAEIVSIFVLAVGVYFIAGQDGVRQSRASDKQTLLPNDQLYQPLKDREDDQYSHLQGNQLRRNRAKRSGSGVKQTLNFDLLKLAGDVESNPGPSRGHMTEYKPTVRLATRDDVPRAVRTLAAAFADYPATRHTVDPDRHIERVTELQELFLTRVGLDIGKVWVADDGAAVAVWTTPESVEAGAVFAEIGPRMAELSGSRLAAQQQMEGLLAPHRPKEPAWFLATVGVSPDHQGKGLGSAVVLPGVEAAERAGVPAFLETSAPRNLPFYERLGFTVTADVEVPEGPRTWCMTRKPGA

SEQ ID NO: 17355 - protein, 655 aa, Artificial Sequence
  Synthetic Polypeptide
MALPVTALLLPLALLLHAARPQLQLQESGPGLVKPSETLSLTCTVSGDSISSGDYYWGWIRQPPGKGLEWIGHIYYSGVTYYNPSLKSRVTISVDTSRNQFSLKLSSVTAADTAVYYCTREDSSNWRSRGQGTLVTVSSLESGGGGSFEVQLVESGGGLVQPGGSLRLSCAASGFSFSDFWMSWVRQAPGKGLEWVATISQAGSEKDYVDSVKGRFTISRDNAKKSLYLQMNSLRAEDTAVYYCASGVYSFDYRGQGTLVTVSSTRGSGGGGSGGGGSGQSFGLLDPKLCYLLDGILFIYGVILTALFLRVKFSRSADAPAYQQGQNQLYNELNLGRREEYDVLDKRRGRDPEMGGKPQRRKNPQEGLYNELQKDKMAEAYSEIGMKGERRRGKGHDGLYQGLSTATKDTYDALHMQALPPRRAKRSGSGVKQTLNFDLLKLAGDVESNPGPSRGHMTEYKPTVRLATRDDVPRAVRTLAAAFADYPATRHTVDPDRHIERVTELQELFLTRVGLDIGKVWVADDGAAVAVWTTPESVEAGAVFAEIGPRMAELSGSRLAAQQQMEGLLAPHRPKEPAWFLATVGVSPDHQGKGLGSAVVLPGVEAAERAGVPAFLETSAPRNLPFYERLGFTVTADVEVPEGPRTWCMTRKPGA

SEQ ID NO: 17356 - protein, 863 aa, Artificial Sequence
  Synthetic Polypeptide
MALPVTALLLPLALLLHAARPQLQLQESGPGLVKPSETLSLTCTVSGDSISSGDYYWGWIRQPPGKGLEWIGHIYYSGVTYYNPSLKSRVTISVDTSRNQFSLKLSSVTAADTAVYYCTREDSSNWRSRGQGTLVTVSSLEGQPKANPTVTLFPPSSEELQANKATLVCLISDFYPGAVTVAWKADGSPVKAGVETTKPSKQSNNKYAASSYLSLTPEQWKSHRSYSCQVTHEGSTVEKTVAPTECSGRADCGFTSESYQQGVLSATILYEILLGKATLYAVLVSALVLMAMVKRKDSRGRAKRSGSGATNFSLLKQAGDVEENPGPTSMDWIWRILFLVGAATGAHSFEVQLVESGGGLVQPGGSLRLSCAASGFSFSDFWMSWVRQAPGKGLEWVATISQAGSEKDYVDSVKGRFTISRDNAKKSLYLQMNSLRAEDTAVYYCASGVYSFDYRGQGTLVTVSSTRASTKGPSVFPLAPSSKSTSGGTAALGCLVKDYFPEPVTVSWNSGALTSGVHTFPAVLQSSGLYSLSSVVTVPSSSLGTQTYICNVNHKPSNTKVDKRVEPKSCIPEDTFFPSPESSCDVKLVEKSFETDTNLNFQNLSVIGFRILLLKVAGFNLLMTLRLWSSRAKRSGSGVKQTLNFDLLKLAGDVESNPGPSRGHMTEYKPTVRLATRDDVPRAVRTLAAAFADYPATRHTVDPDRHIERVTELQELFLTRVGLDIGKVWVADDGAAVAVWTTPESVEAGAVFAEIGPRMAELSGSRLAAQQQMEGLLAPHRPKEPAWFLATVGVSPDHQGKGLGSAVVLPGVEAAERAGVPAFLETSAPRNLPFYERLGFTVTADVEVPEGPRTWCMTRKPGA

SEQ ID NO: 17357 - protein, 630 aa, Artificial Sequence; identical to SEQ ID NO: 17330
  Synthetic Polypeptide

SEQ ID NO: 17358 - protein, 658 aa, Artificial Sequence
  Synthetic Polypeptide
MALPVTALLLPLALLLHAARPQLQLQESGPGLVKPSETLSLTCTVSGDSISSGDYYWGWIRQPPGKGLEWIGHIYYSGVTYYNPSLKSRVTISVDTSRNQFSLKLSSVTAADTAVYYCTREDSSNWRSRGQGTLVTVSSLEGSGRADCGFTSESYQQGVLSATILYEILLGKATLYAVLVSALVLMAMVKRKDSRGRAKRSGSGATNFSLLKQAGDVEENPGPTSMDWIWRILFLVGAATGAHSFEVQLVESGGGLVQPGGSLRLSCAASGFSFSDFWMSWVRQAPGKGLEWVATISQAGSEKDYVDSVKGRFTISRDNAKKSLYLQMNSLRAEDTAVYYCASGVYSFDYRGQGTLVTVSSTRGSIPEDTFFPSPESSCDVKLVEKSFETDTNLNFQNLSVIGFRILLLKVAGFNLLMTLRLWSSRAKRSGSGVKQTLNFDLLKLAGDVESNPGPSRGHMTEYKPTVRLATRDDVPRAVRTLAAAFADYPATRHTVDPDRHIERVTELQELFLTRVGLDIGKVWVADDGAAVAVWTTPESVEAGAVFAEIGPRMAELSGSRLAAQQQMEGLLAPHRPKEPAWFLATVGVSPDHQGKGLGSAVVLPGVEAAERAGVPAFLETSAPRNLPFYERLGFTVTADVEVPEGPRTWCMTRKPGA

SEQ ID NO: 17359 - protein, 425 aa, Artificial Sequence
  Synthetic Polypeptide
MALPVTALLLPLALLLHAARPQLQLQESGPGLVKPSETLSLTCTVSGDSISSGDYYWGWIRQPPGKGLEWIGHIYYSGVTYYNPSLKSRVTISVDTSRNQFSLKLSSVTAADTAVYYCTREDSSNWRSRGQGTLVTVSSLEGSGRADCGFTSESYQQGVLSATILYEILLGKATLYAVLVSALVLMAMVKRKDSRGRAKRSGSGATNFSLLKQAGDVEENPGPTSMDWIWRILFLVGAATGAHSFEVQLVESGGGLVQPGGSLRLSCAASGFSFSDFWMSWVRQAPGKGLEWVATISQAGSEKDYVDSVKGRFTISRDNAKKSLYLQMNSLRAEDTAVYYCASGVYSFDYRGQGTLVTVSSTRGSIPEDTFFPSPESSCDVKLVEKSFETDTNLNFQNLSVIGFRILLLKVAGFNLLMTLRLWSS

SEQ ID NO: 17360 - protein, 667 aa, Artificial Sequence
  Synthetic Polypeptide
MALPVTALLLPLALLLHAARPQLQLQESGPGLVKPSETLSLTCTVSGDSISSGDYYWGWIRQPPGKGLEWIGHIYYSGVTYYNPSLKSRVTISVDTSRNQFSLKLSSVTAADTAVYYCTREDSSNWRSRGQGTLVTVSSLEDKTHTCPPCPAGRADCGFTSESYQQGVLSATILYEILLGKATLYAVLVSALVLMAMVKRKDSRGRAKRSGSGATNFSLLKQAGDVEENPGPTSMDWIWRILFLVGAATGAHSFEVQLVESGGGLVQPGGSLRLSCAASGFSFSDFWMSWVRQAPGKGLEWVATISQAGSEKDYVDSVKGRFTISRDNAKKSLYLQMNSLRAEDTAVYYCASGVYSFDYRGQGTLVTVSSTRGSIPEDTFFPSPESSCDVKLVEKSFETDTNLNFQNLSVIGFRILLLKVAGFNLLMTLRLWSSRAKRSGSGVKQTLNFDLLKLAGDVESNPGPSRGHMTEYKPTVRLATRDDVPRAVRTLAAAFADYPATRHTVDPDRHIERVTELQELFLTRVGLDIGKVWVADDGAAVAVWTTPESVEAGAVFAEIGPRMAELSGSRLAAQQQMEGLLAPHRPKEPAWFLATVGVSPDHQGKGLGSAVVLPGVEAAERAGVPAFLETSAPRNLPFYERLGFTVTADVEVPEGPRTWCMTRKPGA

SEQ ID NO: 17361 - protein, 667 aa, Artificial Sequence
  Synthetic Polypeptide
MALPVTALLLPLALLLHAARPQLQLQESGPGLVKPSETLSLTCTVSGDSISSGDYYWGWIRQPPGKGLEWIGHIYYSGVTYYNPSLKSRVTISVDTSRNQFSLKLSSVTAADTAVYYCTREDSSNWRSRGQGTLVTVSSLEGSGRADCGFTSESYQQGVLSATILYEILLGKATLYAVLVSALVLMAMVKRKDSRGRAKRSGSGATNFSLLKQAGDVEENPGPTSMDWIWRILFLVGAATGAHSFEVQLVESGGGLVQPGGSLRLSCAASGFSFSDFWMSWVRQAPGKGLEWVATISQAGSEKDYVDSVKGRFTISRDNAKKSLYLQMNSLRAEDTAVYYCASGVYSFDYRGQGTLVTVSSTRDKTHTCPPCPAIPEDTFFPSPESSCDVKLVEKSFETDTNLNFQNLSVIGFRILLLKVAGFNLLMTLRLWSSRAKRSGSGVKQTLNFDLLKLAGDVESNPGPSRGHMTEYKPTVRLATRDDVPRAVRTLAAAFADYPATRHTVDPDRHIERVTELQELFLTRVGLDIGKVWVADDGAAVAVWTTPESVEAGAVFAEIGPRMAELSGSRLAAQQQMEGLLAPHRPKEPAWFLATVGVSPDHQGKGLGSAVVLPGVEAAERAGVPAFLETSAPRNLPFYERLGFTVTADVEVPEGPRTWCMTRKPGA

SEQ ID NO: 17362 - protein, 676 aa, Artificial Sequence
  Synthetic Polypeptide
MALPVTALLLPLALLLHAARPQLQLQESGPGLVKPSETLSLTCTVSGDSISSGDYYWGWIRQPPGKGLEWIGHIYYSGVTYYNPSLKSRVTISVDTSRNQFSLKLSSVTAADTAVYYCTREDSSNWRSRGQGTLVTVSSLEDKTHTCPPCPAGRADCGFTSESYQQGVLSATILYEILLGKATLYAVLVSALVLMAMVKRKDSRGRAKRSGSGATNFSLLKQAGDVEENPGPTSMDWIWRILFLVGAATGAHSFEVQLVESGGGLVQPGGSLRLSCAASGFSFSDFWMSWVRQAPGKGLEWVATISQAGSEKDYVDSVKGRFTISRDNAKKSLYLQMNSLRAEDTAVYYCASGVYSFDYRGQGTLVTVSSTRDKTHTCPPCPAIPEDTFFPSPESSCDVKLVEKSFETDTNLNFQNLSVIGFRILLLKVAGFNLLMTLRLWSSRAKRSGSGVKQTLNFDLLKLAGDVESNPGPSRGHMTEYKPTVRLATRDDVPRAVRTLAAAFADYPATRHTVDPDRHIERVTELQELFLTRVGLDIGKVWVADDGAAVAVWTTPESVEAGAVFAEIGPRMAELSGSRLAAQQQMEGLLAPHRPKEPAWFLATVGVSPDHQGKGLGSAVVLPGVEAAERAGVPAFLETSAPRNLPFYERLGFTVTADVEVPEGPRTWCMTRKPGA

SEQ ID NO: 17363 - protein, 443 aa, Artificial Sequence
  Synthetic Polypeptide
MALPVTALLLPLALLLHAARPQLQLQESGPGLVKPSETLSLTCTVSGDSISSGDYYWGWIRQPPGKGLEWIGHIYYSGVTYYNPSLKSRVTISVDTSRNQFSLKLSSVTAADTAVYYCTREDSSNWRSRGQGTLVTVSSLEDKTHTCPPCPAGRADCGFTSESYQQGVLSATILYEILLGKATLYAVLVSALVLMAMVKRKDSRGRAKRSGSGATNFSLLKQAGDVEENPGPTSMDWIWRILFLVGAATGAHSFEVQLVESGGGLVQPGGSLRLSCAASGFSFSDFWMSWVRQAPGKGLEWVATISQAGSEKDYVDSVKGRFTISRDNAKKSLYLQMNSLRAEDTAVYYCASGVYSFDYRGQGTLVTVSSTRDKTHTCPPCPAIPEDTFFPSPESSCDVKLVEKSFETDTNLNFQNLSVIGFRILLLKVAGFNLLMTLRLWSS

SEQ ID NO: 17364 - protein, 434 aa, Artificial Sequence
  Synthetic Polypeptide
MALPVTALLLPLALLLHAARPQLQLQESGPGLVKPSETLSLTCTVSGDSISSGDYYWGWIRQPPGKGLEWIGHIYYSGVTYYNPSLKSRVTISVDTSRNQFSLKLSSVTAADTAVYYCTREDSSNWRSRGQGTLVTVSSLEGSGRADCGFTSESYQQGVLSATILYEILLGKATLYAVLVSALVLMAMVKRKDSRGRAKRSGSGATNFSLLKQAGDVEENPGPTSMDWIWRILFLVGAATGAHSFEVQLVESGGGLVQPGGSLRLSCAASGFSFSDFWMSWVRQAPGKGLEWVATISQAGSEKDYVDSVKGRFTISRDNAKKSLYLQMNSLRAEDTAVYYCASGVYSFDYRGQGTLVTVSSTRDKTHTCPPCPAIPEDTFFPSPESSCDVKLVEKSFETDTNLNFQNLSVIGFRILLLKVAGFNLLMTLRLWSS

SEQ ID NO: 17365 - protein, 885 aa, Artificial Sequence
  Synthetic Polypeptide
MALPVTALLLPLALLLHAARPQLQLQESGPGLVKPSETLSLTCTVSGDSISSGDYYWGWIRQPPGKGLEWIGHIYYSGVTYYNPSLKSRVTISVDTSRNQFSLKLSSVTAADTAVYYCTREDSSNWRSRGQGTLVTVSSLEGQPKANPTVTLFPPSSEELQANKATLVCLISDFYPGAVTVAWKADGSPVKAGVETTKPSKQSNNKYAASSYLSLTPEQWKSHRSYSCQVTHEGSTVEKTVAPTECSPIKTDVITMDPKDNCSKDANDTLLLQLTNTSAYYMYLLLLLKSVVYFAIITCCLLRRTAFCCNGEKSRAKRSGSGATNFSLLKQAGDVEENPGPTSMDWIWRILFLVGAATGAHSFEVQLVESGGGLVQPGGSLRLSCAASGFSFSDFWMSWVRQAPGKGLEWVATISQAGSEKDYVDSVKGRFTISRDNAKKSLYLQMNSLRAEDTAVYYCASGVYSFDYRGQGTLVTVSSTRASTKGPSVFPLAPSSKSTSGGTAALGCLVKDYFPEPVTVSWNSGALTSGVHTFPAVLQSSGLYSLSSVVTVPSSSLGTQTYICNVNHKPSNTKVDKRVEPKSCEVKTDSTDHVKPKETENTKQPSKSCHKPKAIVHTEKVNMMSLTVLGLRMLFAKTVAVNFLLTAKLFFLRAKRSGSGVKQTLNFDLLKLAGDVESNPGPSRGHMTEYKPTVRLATRDDVPRAVRTLAAAFADYPATRHTVDPDRHIERVTELQELFLTRVGLDIGKVWVADDGAAVAVWTTPESVEAGAVFAEIGPRMAELSGSRLAAQQQMEGLLAPHRPKEPAWFLATVGVSPDHQGKGLGSAVVLPGVEAAERAGVPAFLETSAPRNLPFYERLGFTVTADVEVPEGPRTWCMTRKPGA

SEQ ID NO: 17366 - protein, 652 aa, Artificial Sequence; identical to SEQ ID NO: 17328
  Synthetic Polypeptide

SEQ ID NO: 17367 - protein, 680 aa, Artificial Sequence
  Synthetic Polypeptide
MALPVTALLLPLALLLHAARPQLQLQESGPGLVKPSETLSLTCTVSGDSISSGDYYWGWIRQPPGKGLEWIGHIYYSGVTYYNPSLKSRVTISVDTSRNQFSLKLSSVTAADTAVYYCTREDSSNWRSRGQGTLVTVSSLEGSPIKTDVITMDPKDNCSKDANDTLLLQLTNTSAYYMYLLLLLKSVVYFAIITCCLLRRTAFCCNGEKSRAKRSGSGATNFSLLKQAGDVEENPGPTSMDWIWRILFLVGAATGAHSFEVQLVESGGGLVQPGGSLRLSCAASGFSFSDFWMSWVRQAPGKGLEWVATISQAGSEKDYVDSVKGRFTISRDNAKKSLYLQMNSLRAEDTAVYYCASGVYSFDYRGQGTLVTVSSTRGSEVKTDSTDHVKPKETENTKQPSKSCHKPKAIVHTEKVNMMSLTVLGLRMLFAKTVAVNFLLTAKLFFLRAKRSGSGVKQTLNFDLLKLAGDVESNPGPSRGHMTEYKPTVRLATRDDVPRAVRTLAAAFADYPATRHTVDPDRHIERVTELQELFLTRVGLDIGKVWVADDGAAVAVWTTPESVEAGAVFAEIGPRMAELSGSRLAAQQQMEGLLAPHRPKEPAWFLATVGVSPDHQGKGLGSAVVLPGVEAAERAGVPAFLETSAPRNLPFYERLGFTVTADVEVPEGPRTWCMTRKPGA

SEQ ID NO: 17368 - protein, 447 aa, Artificial Sequence
  Synthetic Polypeptide
MALPVTALLLPLALLLHAARPQLQLQESGPGLVKPSETLSLTCTVSGDSISSGDYYWGWIRQPPGKGLEWIGHIYYSGVTYYNPSLKSRVTISVDTSRNQFSLKLSSVTAADTAVYYCTREDSSNWRSRGQGTLVTVSSLEGSPIKTDVITMDPKDNCSKDANDTLLLQLTNTSAYYMYLLLLLKSVVYFAIITCCLLRRTAFCCNGEKSRAKRSGSGATNFSLLKQAGDVEENPGPTSMDWIWRILFLVGAATGAHSFEVQLVESGGGLVQPGGSLRLSCAASGFSFSDFWMSWVRQAPGKGLEWVATISQAGSEKDYVDSVKGRFTISRDNAKKSLYLQMNSLRAEDTAVYYCASGVYSFDYRGQGTLVTVSSTRGSEVKTDSTDHVKPKETENTKQPSKSCHKPKAIVHTEKVNMMSLTVLGLRMLFAKTVAVNFLLTAKLFFL

SEQ ID NO: 17369 - protein, 689 aa, Artificial Sequence
  Synthetic Polypeptide
MALPVTALLLPLALLLHAARPQLQLQESGPGLVKPSETLSLTCTVSGDSISSGDYYWGWIRQPPGKGLEWIGHIYYSGVTYYNPSLKSRVTISVDTSRNQFSLKLSSVTAADTAVYYCTREDSSNWRSRGQGTLVTVSSLEDKTHTCPPCPAPIKTDVITMDPKDNCSKDANDTLLLQLTNTSAYYMYLLLLLKSVVYFAIITCCLLRRTAFCCNGEKSRAKRSGSGATNFSLLKQAGDVEENPGPTSMDWIWRILFLVGAATGAHSFEVQLVESGGGLVQPGGSLRLSCAASGFSFSDFWMSWVRQAPGKGLEWVATISQAGSEKDYVDSVKGRFTISRDNAKKSLYLQMNSLRAEDTAVYYCASGVYSFDYRGQGTLVTVSSTRGSEVKTDSTDHVKPKETENTKQPSKSCHKPKAIVHTEKVNMMSLTVLGLRMLFAKTVAVNFLLTAKLFFLRAKRSGSGVKQTLNFDLLKLAGDVESNPGPSRGHMTEYKPTVRLATRDDVPRAVRTLAAAFADYPATRHTVDPDRHIERVTELQELFLTRVGLDIGKVWVADDGAAVAVWTTPESVEAGAVFAEIGPRMAELSGSRLAAQQQMEGLLAPHRPKEPAWFLATVGVSPDHQGKGLGSAVVLPGVEAAERAGVPAFLETSAPRNLPFYERLGFTVTADVEVPEGPRTWCMTRKPGA

SEQ ID NO: 17370 - protein, 689 aa, Artificial Sequence
  Synthetic Polypeptide
MALPVTALLLPLALLLHAARPQLQLQESGPGLVKPSETLSLTCTVSGDSISSGDYYWGWIRQPPGKGLEWIGHIYYSGVTYYNPSLKSRVTISVDTSRNQFSLKLSSVTAADTAVYYCTREDSSNWRSRGQGTLVTVSSLEGSPIKTDVITMDPKDNCSKDANDTLLLQLTNTSAYYMYLLLLLKSVVYFAIITCCLLRRTAFCCNGEKSRAKRSGSGATNFSLLKQAGDVEENPGPTSMDWIWRILFLVGAATGAHSFEVQLVESGGGLVQPGGSLRLSCAASGFSFSDFWMSWVRQAPGKGLEWVATISQAGSEKDYVDSVKGRFTISRDNAKKSLYLQMNSLRAEDTAVYYCASGVYSFDYRGQGTLVTVSSTRDKTHTCPPCPAEVKTDSTDHVKPKETENTKQPSKSCHKPKAIVHTEKVNMMSLTVLGLRMLFAKTVAVNFLLTAKLFFLRAKRSGSGVKQTLNFDLLKLAGDVESNPGPSRGHMTEYKPTVRLATRDDVPRAVRTLAAAFADYPATRHTVDPDRHIERVTELQELFLTRVGLDIGKVWVADDGAAVAVWTTPESVEAGAVFAEIGPRMAELSGSRLAAQQQMEGLLAPHRPKEPAWFLATVGVSPDHQGKGLGSAVVLPGVEAAERAGVPAFLETSAPRNLPFYERLGFTVTADVEVPEGPRTWCMTRKPGA

SEQ ID NO: 17371 - protein, 698 aa, Artificial Sequence
  Synthetic Polypeptide
MALPVTALLLPLALLLHAARPQLQLQESGPGLVKPSETLSLTCTVSGDSISSGDYYWGWIRQPPGKGLEWIGHIYYSGVTYYNPSLKSRVTISVDTSRNQFSLKLSSVTAADTAVYYCTREDSSNWRSRGQGTLVTVSSLEDKTHTCPPCPAPIKTDVITMDPKDNCSKDANDTLLLQLTNTSAYYMYLLLLLKSVVYFAIITCCLLRRTAFCCNGEKSRAKRSGSGATNFSLLKQAGDVEENPGPTSMDWIWRILFLVGAATGAHSFEVQLVESGGGLVQPGGSLRLSCAASGFSFSDFWMSWVRQAPGKGLEWVATISQAGSEKDYVDSVKGRFTISRDNAKKSLYLQMNSLRAEDTAVYYCASGVYSFDYRGQGTLVTVSSTRDKTHTCPPCPAEVKTDSTDHVKPKETENTKQPSKSCHKPKAIVHTEKVNMMSLTVLGLRMLFAKTVAVNFLLTAKLFFLRAKRSGSGVKQTLNFDLLKLAGDVESNPGPSRGHMTEYKPTVRLATRDDVPRAVRTLAAAFADYPATRHTVDPDRHIERVTELQELFLTRVGLDIGKVWVADDGAAVAVWTTPESVEAGAVFAEIGPRMAELSGSRLAAQQQMEGLLAPHRPKEPAWFLATVGVSPDHQGKGLGSAVVLPGVEAAERAGVPAFLETSAPRNLPFYERLGFTVTADVEVPEGPRTWCMTRKPGA

SEQ ID NO: 17372 - protein, 465 aa, Artificial Sequence
  Synthetic Polypeptide
MALPVTALLLPLALLLHAARPQLQLQESGPGLVKPSETLSLTCTVSGDSISSGDYYWGWIRQPPGKGLEWIGHIYYSGVTYYNPSLKSRVTISVDTSRNQFSLKLSSVTAADTAVYYCTREDSSNWRSRGQGTLVTVSSLEDKTHTCPPCPAPIKTDVITMDPKDNCSKDANDTLLLQLTNTSAYYMYLLLLLKSVVYFAIITCCLLRRTAFCCNGEKSRAKRSGSGATNFSLLKQAGDVEENPGPTSMDWIWRILFLVGAATGAHSFEVQLVESGGGLVQPGGSLRLSCAASGFSFSDFWMSWVRQAPGKGLEWVATISQAGSEKDYVDSVKGRFTISRDNAKKSLYLQMNSLRAEDTAVYYCASGVYSFDYRGQGTLVTVSSTRDKTHTCPPCPAEVKTDSTDHVKPKETENTKQPSKSCHKPKAIVHTEKVNMMSLTVLGLRMLFAKTVAVNFLLTAKLFFL

SEQ ID NO: 17373 - protein, 727 aa, Artificial Sequence
  Synthetic Polypeptide
MALPVTALLLPLALLLHAARPQLQLQESGPGLVKPSETLSLTCTVSGDSISSGDYYWGWIRQPPGKGLEWIGHIYYSGVTYYNPSLKSRVTISVDTSRNQFSLKLSSVTAADTAVYYCTREDSSNWRSRGQGTLVTVSSLESGGGGSFQVQLVESGGGLVQPGGSLRLSCAASGFTFTNHAMSWVRQAPGKGLELVSSISGNGRTTYYADSVKGRFTISRDISKNTLDLQMNSLRAEDTAVYYCAKDGGETLVDSRGQGTLVTVSSTREQKLISEEDLAKPTTTPAPRPPTPAPTIASQPLSLRPEACRPAAGGAVHTRGLDFACDIYIWAPLAGTCGVLLLSLVITLYCKRGRKKLLYIFKQPFMRPVQTTQEEDGCSCRFPEEEEGGCELRVKFSRSADAPAYQQGQNQLYNELNLGRREEYDVLDKRRGRDPEMGGKPRRKNPQEGLYNELQKDKMAEAYSEIGMKGERRRGKGHDGLYQGLSTATKDTYDALHMQALPPRSSGSGEGRGSLLTCGDVEENPGPHMTEYKPTVRLATRDDVPRAVRTLAAAFADYPATRHTVDPDRHIERVTELQELFLTRVGLDIGKVWVADDGAAVAVWTTPESVEAGAVFAEIGPRMAELSGSRLAAQQQMEGLLAPHRPKEPAWFLATVGVSPDHQGKGLGSAVVLPGVEAAERAGVPAFLETSAPRNLPFYERLGFTVTADVEVPEGPRTWCMTRKPGA

SEQ ID NO: 17374 - protein, 721 aa, Artificial Sequence
  Synthetic Polypeptide
MALPVTALLLPLALLLHAARPQLQLQESGPGLVKPSETLSLTCTVSGDSISSGDYYWGWIRQPPGKGLEWIGHIYYSGVTYYNPSLKSRVTISVDTSRNQFSLKLSSVTAADTAVYYCTREDSSNWRSRGQGTLVTVSSLESGGGGSFQVQLVESGGGLVQPGGSLRLSCAASGFTFTNHAMSWVRQAPGKGLELVSSISGNGRTTYYADSVKGRFTISRDISKNTLDLQMNSLRAEDTAVYYCAKDGGETLVDSRGQGTLVTVSSTREQKLISEEDLKIEVMYPPPYLDNEKSNGTIIHVKGKHLCPSPLFPGPSKPFWVLVVVGGVLACYSLLVTVAFIIFWVRSKRSRLLHSDYMNMTPRRPGPTRKHYQPYAPPRDFAAYRSRVKFSRSADAPAYQQGQNQLYNELNLGRREEYDVLDKRRGRDPEMGGKPRRKNPQEGLYNELQKDKMAEAYSEIGMKGERRRGKGHDGLYQGLSTATKDTYDALHMQALPPRSSGSGEGRGSLLTCGDVEENPGPHMTEYKPTVRLATRDDVPRAVRTLAAAFADYPATRHTVDPDRHIERVTELQELFLTRVGLDIGKVWVADDGAAVAVWTTPESVEAGAVFAEIGPRMAELSGSRLAAQQQMEGLLAPHRPKEPAWFLATVGVSPDHQGKGLGSAVVLPGVEAAERAGVPAFLETSAPRNLPFYERLGFTVTADVEVPEGPRTWCMTRKPGA

SEQ ID NO: 17375 - protein, 498 aa, Artificial Sequence
  Synthetic Polypeptide
MALPVTALLLPLALLLHAARPQLQLQESGPGLVKPSETLSLTCTVSGDSISSGDYYWGWIRQPPGKGLEWIGHIYYSGVTYYNPSLKSRVTISVDTSRNQFSLKLSSVTAADTAVYYCTREDSSNWRSRGQGTLVTVSSLESGGGGSFQVQLVESGGGLVQPGGSLRLSCAASGFTFTNHAMSWVRQAPGKGLELVSSISGNGRTTYYADSVKGRFTISRDISKNTLDLQMNSLRAEDTAVYYCAKDGGETLVDSRGQGTLVTVSSTREQKLISEEDLKIEVMYPPPYLDNEKSNGTIIHVKGKHLCPSPLFPGPSKPFWVLVVVGGVLACYSLLVTVAFIIFWVRSKRSRLLHSDYMNMTPRRPGPTRKHYQPYAPPRDFAAYRSRVKFSRSADAPAYQQGQNQLYNELNLGRREEYDVLDKRRGRDPEMGGKPRRKNPQEGLYNELQKDKMAEAYSEIGMKGERRRGKGHDGLYQGLSTATKDTYDALHMQALPPR

SEQ ID NO: 17376 - protein, 504 aa, Artificial Sequence
  Synthetic Polypeptide
MALPVTALLLPLALLLHAARPQLQLQESGPGLVKPSETLSLTCTVSGDSISSGDYYWGWIRQPPGKGLEWIGHIYYSGVTYYNPSLKSRVTISVDTSRNQFSLKLSSVTAADTAVYYCTREDSSNWRSRGQGTLVTVSSLESGGGGSFQVQLVESGGGLVQPGGSLRLSCAASGFTFTNHAMSWVRQAPGKGLELVSSISGNGRTTYYADSVKGRFTISRDISKNTLDLQMNSLRAEDTAVYYCAKDGGETLVDSRGQGTLVTVSSTREQKLISEEDLAKPTTTPAPRPPTPAPTIASQPLSLRPEACRPAAGGAVHTRGLDFACDIYIWAPLAGTCGVLLLSLVITLYCKRGRKKLLYIFKQPFMRPVQTTQEEDGCSCRFPEEEEGGCELRVKFSRSADAPAYQQGQNQLYNELNLGRREEYDVLDKRRGRDPEMGGKPRRKNPQEGLYNELQKDKMAEAYSEIGMKGERRRGKGHDGLYQGLSTATKDTYDALHMQALPPR

SEQ ID NO: 17377 - protein, 505 aa, Artificial Sequence
  Synthetic Polypeptide
MALPVTALLLPLALLLHAARPQVQLVESGGGLVQPGGSLRLSCAASGFTFTNHAMSWVRQAPGKGLELVSSISGNGRTTYYADSVKGRFTISRDISKNTLDLQMNSLRAEDTAVYYCAKDGGETLVDSRGQGTLVTVSSLESGGGGSFEQLQLQESGPGLVKPSETLSLTCTVSGDSISSGDYYWGWIRQPPGKGLEWIGHIYYSGVTYYNPSLKSRVTISVDTSRNQFSLKLSSVTAADTAVYYCTREDSSNWRSRGQGTLVTVSSTREQKLISEEDLAKPTTTPAPRPPTPAPTIASQPLSLRPEACRPAAGGAVHTRGLDFACDIYIWAPLAGTCGVLLLSLVITLYCKRGRKKLLYIFKQPFMRPVQTTQEEDGCSCRFPEEEEGGCELRVKFSRSADAPAYQQGQNQLYNELNLGRREEYDVLDKRRGRDPEMGGKPRRKNPQEGLYNELQKDKMAEAYSEIGMKGERRRGKGHDGLYQGLSTATKDTYDALHMQALPPR

SEQ ID NO: 17378 - protein, 917 aa, Artificial Sequence
  Synthetic Polypeptide
MALPVTALLLPLALLLHAARPQLQLQESGPGLVKPSETLSLTCTVSGDSISSGDYYWGWIRQPPGKGLEWIGHIYYSGVTYYNPSLKSRVTISVDTSRNQFSLKLSSVTAADTAVYYCTREDSSNWRSRGQGTLVTVSSLESGGGGSFQVQLVESGGGLVQPGGSLRLSCAASGFTFTNHAMSWVRQAPGKGLELVSSISGNGRTTYYADSVKGRFTISRDISKNTLDLQMNSLRAEDTAVYYCAKDGGETLVDSRGQGTLVTVSSTREQKLISEEDLAKPTTTPAPRPPTPAPTIASQPLSLRPEACRPAAGGAVHTRGLDFACDIYIWAPLAGTCGVLLLSLVITLYCGRARVKFSRSADAPAYQQGQNQLYNELNLGRREEYDVLDKRRGRDPEMGGKPRRKNPQEGLYNELQKDKMAEAYSEIGMKGERRRGKGHDGLYQGLSTATKDTYDALHMQALPPRSRGSGATNFSLLKQAGDVEENPGPGIHMATYEVLCEVARKLGTDDREVVLFLLNVFIPQPTLAQLIGALRALKEEGRLTFPLLAECLFRAGRRDLLRDLLHLDPRFLERHLAGTMSYFSPYQLTVLHVDGELCARDIRSLIFLSKDTIGSRSTPQTFLHWVYCMENLDLLGPTDVDALMSMLRSLSRVDLQRQVQTLMGLHLSGPSHSQHYRHTPLETDFYDYKDDDDKTSGSGEGRGSLLTCGDVEENPGPHMTEYKPTVRLATRDDVPRAVRTLAAAFADYPATRHTVDPDRHIERVTELQELFLTRVGLDIGKVWVADDGAAVAVWTTPESVEAGAVFAEIGPRMAELSGSRLAAQQQMEGLLAPHRPKEPAWFLATVGVSPDHQGKGLGSAVVLPGVEAAERAGVPAFLETSAPRNLPFYERLGFTVTADVEVPEGPRTWCMTRKPGA

SEQ ID NO: 17379 - protein, 862 aa, Artificial Sequence
  Synthetic Polypeptide
MALPVTALLLPLALLLHAARPQLQLQESGPGLVKPSETLSLTCTVSGDSISSGDYYWGWIRQPPGKGLEWIGHIYYSGVTYYNPSLKSRVTISVDTSRNQFSLKLSSVTAADTAVYYCTREDSSNWRSRGQGTLVTVSSLEIQNPDPAVYQLRDSKSSDKSVCLFTDFDSQTNVSQSKDSDVYITDKCVLDMRSMDFKSNSAVAWSNKSDFACANAFNNSIIPEDTFFPSSDVPCDVKLVEKSFETDTNLNFQNLSVIGFRILLLKVAGFNLLMTLRLWSSRAKRSGSGVKQTLNFDLLKLAGDVESNPGPTSMDWIWRILFLVGAATGAHSFQVQLVESGGGLVQPGGSLRLSCAASGFTFTNHAMSWVRQAPGKGLELVSSISGNGRTTYYADSVKGRFTISRDISKNTLDLQMNSLRAEDTAVYYCAKDGGETLVDSRGQGTLVTVSSTREDLKNVFPPEVAVFEPSKAEIAHTQKATLVCLATGFYPDHVELSWWVNGKEVHSGVCTDPQPLKEQPALNDSRYCLSSRLRVSATFWQNPRNHFRCQVQFYGLSENDEWTQDRAKPVTQIVSAEAWGRADCGITSASYHQGVLSATILYEILLGKATLYAVLVSALVLMAMVKRKDSRGRAKRSGSGATNFSLLKQAGDVEENPGPSRGHMTEYKPTVRLATRDDVPRAVRTLAAAFADYPATRHTVDPDRHIERVTELQELFLTRVGLDIGKVWVADDGAAVAVWTTPESVEAGAVFAEIGPRMAELSGSRLAAQQQMEGLLAPHRPKEPAWFLATVGVSPDHQGKGLGSAVVLPGVEAAERAGVPAFLETSAPRNLPFYERLGFTVTADVEVPEGPRTWCMTRKPGA

SEQ ID NO: 17380 - protein, 861 aa, Artificial Sequence
  Synthetic Polypeptide
MALPVTALLLPLALLLHAARPQLQLQESGPGLVKPSETLSLTCTVSGDSISSGDYYWGWIRQPPGKGLEWIGHIYYSGVTYYNPSLKSRVTISVDTSRNQFSLKLSSVTAADTAVYYCTREDSSNWRSRGQGTLVTVSSLEDLKNVFPPEVAVFEPSKAEIAHTQKATLVCLATGFYPDHVELSWWVNGKEVHSGVCTDPQPLKEQPALNDSRYCLSSRLRVSATFWQNPRNHFRCQVQFYGLSENDEWTQDRAKPVTQIVSAEAWGRADCGITSASYHQGVLSATILYEILLGKATLYAVLVSALVLMAMVKRKDSRGRAKRSGSGATNFSLLKQAGDVEENPGPTSMDWIWRILFLVGAATGAHSFQVQLVESGGGLVQPGGSLRLSCAASGFTFTNHAMSWVRQAPGKGLELVSSISGNGRTTYYADSVKGRFTISRDISKNTLDLQMNSLRAEDTAVYYCAKDGGETLVDSRGQGTLVTVSSTRIQNPDPAVYQLRDSKSSDKSVCLFTDFDSQTNVSQSKDSDVYITDKCVLDMRSMDFKSNSAVAWSNKSDFACANAFNNSIIPEDTFFPSSDVPCDVKLVEKSFETDTNLNFQNLSVIGFRILLLKVAGFNLLMTLRLWSSRAKRSGSGVKQTLNFDLLKLAGDVESNPGPSRGHMTEYKPTVRLATRDDVPRAVRTLAAAFADYPATRHTVDPDRHIERVTELQELFLTRVGLDIGKVWVADDGAAVAVWTTPESVEAGAVFAEIGPRMAELSGSRLAAQQQMEGLLAPHRPKEPAWFLATVGVSPDHQGKGLGSAVVLPGVEAAERAGVPAFLETSAPRNLPFYERLGFTVTADVEVPEGPRTWCMTRKPGA

SEQ ID NO: 17381 - protein, 628 aa, Artificial Sequence
  Synthetic Polypeptide
MALPVTALLLPLALLLHAARPQLQLQESGPGLVKPSETLSLTCTVSGDSISSGDYYWGWIRQPPGKGLEWIGHIYYSGVTYYNPSLKSRVTISVDTSRNQFSLKLSSVTAADTAVYYCTREDSSNWRSRGQGTLVTVSSLEDLKNVFPPEVAVFEPSEAEISHTQKATLVCLATGFYPDHVELSWWVNGKEVHSGVCTDPQPLKEQPALNDSRYCLSSRLRVSATFWQNPRNHFRCQVQFYGLSENDEWTQDRAKPVTQIVSAEAWGRADCGFTSESYQQGVLSATILYEILLGKATLYAVLVSALVLMAMVKRKDSRGRAKRSGSGATNFSLLKQAGDVEENPGPTSMDWIWRILFLVGAATGAHSFQVQLVESGGGLVQPGGSLRLSCAASGFTFTNHAMSWVRQAPGKGLELVSSISGNGRTTYYADSVKGRFTISRDISKNTLDLQMNSLRAEDTAVYYCAKDGGETLVDSRGQGTLVTVSSTRIQNPDPAVYQLRDSKSSDKSVCLFTDFDSQTNVSQSKDSDVYITDKCVLDMRSMDFKSNSAVAWSNKSDFACANAFNNSIIPEDTFFPSPESSCDVKLVEKSFETDTNLNFQNLSVIGFRILLLKVAGFNLLMTLRLWSS

SEQ ID NO: 17382 - protein, 853 aa, Artificial Sequence
  Synthetic Polypeptide
MALPVTALLLPLALLLHAARPQLQLQESGPGLVKPSETLSLTCTVSGDSISSGDYYWGWIRQPPGKGLEWIGHIYYSGVTYYNPSLKSRVTISVDTSRNQFSLKLSSVTAADTAVYYCTREDSSNWRSRGQGTLVTVSSLEDLKNVFPPEVAVFEPSEAEISHTQKATLVCLATGFYPDHVELSWWVNGKEVHSGVCTDPQPLKEQPALNDSRYCLSSRLRVSATFWQNPRNHFRCQVQFYGLSENDEWTQDRAKPVTQIVSAEAWGRADCGFTSESYQQGVLSATILYEILLGKATLYAVLVSALVLMAMVKRKDSRGRAKRSGSGATNFSLLKQAGDVEENPGPTSMDWIWRILFLVGAATGAHSFQVQLVESGGGLVQPGGSLRLSCAASGFTFTNHAMSWVRQAPGKGLELVSSISGNGRTTYYADSVKGRFTISRDISKNTLDLQMNSLRAEDTAVYYCAKDGGETLVDSRGQGTLVTVSSTRIQNPDPAVYQLRDSKSSDKSVCLFTDFDSQTNVSQSKDSDVYITDKCVLDMRSMDFKSNSAVAWSNKSDFACANAFNNSIIPEDTFFPSPESSCDVKLVEKSFETDTNLNFQNLSVIGFRILLLKVAGFNLLMTLRLWSSRAKRSGSGVKQTLNFDLLKLAGDVESNPGPSRGGIHTMATYEVLCEVARKLGTDDREVVLFLLNVFIPQPTLAQLIGALRALKEEGRLTFPLLAECLFRAGRRDLLRDLLHLDPRFLERHLAGTMSYFSPYQLTVLHVDGELCARDIRSLIFLSKDTIGSRSTPQTFLHWVYCMENLDLLGPTDVDALMSMLRSLSRVDLQRQVQTLMGLHLSGPSHSQHYRHTP

SEQ ID NO: 17383 - protein, 632 aa, Artificial Sequence
  Synthetic Polypeptide
MALPVTALLLPLALLLHAARPQLQLQESGPGLVKPSETLSLTCTVSGDSISSGDYYWGWIRQPPGKGLEWIGHIYYSGVTYYNPSLKSRVTISVDTSRNQFSLKLSSVTAADTAVYYCTREDSSNWRSRGQGTLVTVSSLEIQNPDPAVYQLRDSKSSDKSVCLFTDFDSQTNVSQSKDSDVYITDKCVLDMRSMDFKSNSAVAWSNKSDFACANAFNNSIIPEDTFFPSPESSCDVKLVEKSFETDTNLNFQNLSVIGFRILLLKVAGFNLLMTLRLWSSRAKRSGSGVKQTLNFDLLKLAGDVESNPGPTSMDWIWRILFLVGAATGAHSFQVQLVESGGGLVQPGGSLRLSCAASGFTFTNHAMSWVRQAPGKGLELVSSISGNGRTTYYADSVKGRFTISRDISKNTLDLQMNSLRAEDTAVYYCAKDGGETLVDSRGQGTLVTVSSTREDLKNVFPPEVAVFEPSEAEISHTQKATLVCLATGFYPDHVELSWWVNGKEVHSGVCTDPQPLKEQPALNDSRYCLSSRLRVSATFWQNPRNHFRCQVQFYGLSENDEWTQDRAKPVTQIVSAEAWGRADCGFTSESYQQGVLSATILYEILLGKATLYAVLVSALVLMAMVKRKDSRG

SEQ ID NO: 17384 - protein, 854 aa, Artificial Sequence
  Synthetic Polypeptide
MALPVTALLLPLALLLHAARPQLQLQESGPGLVKPSETLSLTCTVSGDSISSGDYYWGWIRQPPGKGLEWIGHIYYSGVTYYNPSLKSRVTISVDTSRNQFSLKLSSVTAADTAVYYCTREDSSNWRSRGQGTLVTVSSLEIQNPDPAVYQLRDSKSSDKSVCLFTDFDSQTNVSQSKDSDVYITDKCVLDMRSMDFKSNSAVAWSNKSDFACANAFNNSIIPEDTFFPSPESSCDVKLVEKSFETDTNLNFQNLSVIGFRILLLKVAGFNLLMTLRLWSSRAKRSGSGVKQTLNFDLLKLAGDVESNPGPTSMDWIWRILFLVGAATGAHSFQVQLVESGGGLVQPGGSLRLSCAASGFTFTNHAMSWVRQAPGKGLELVSSISGNGRTTYYADSVKGRFTISRDISKNTLDLQMNSLRAEDTAVYYCAKDGGETLVDSRGQGTLVTVSSTREDLKNVFPPEVAVFEPSEAEISHTQKATLVCLATGFYPDHVELSWWVNGKEVHSGVCTDPQPLKEQPALNDSRYCLSSRLRVSATFWQNPRNHFRCQVQFYGLSENDEWTQDRAKPVTQIVSAEAWGRADCGFTSESYQQGVLSATILYEILLGKATLYAVLVSALVLMAMVKRKDSRGRAKRSGSGATNFSLLKQAGDVEENPGPSRGGIHTMATYEVLCEVARKLGTDDREVVLFLLNVFIPQPTLAQLIGALRALKEEGRLTFPLLAECLFRAGRRDLLRDLLHLDPRFLERHLAGTMSYFSPYQLTVLHVDGELCARDIRSLIFLSKDTIGSRSTPQTFLHWVYCMENLDLLGPTDVDALMSMLRSLSRVDLQRQVQTLMGLHLSGPSHSQHYRHTP

SEQ ID NO: 17385 - protein, 901 aa, Artificial Sequence
  Synthetic Polypeptide
MALPVTALLLPLALLLHAARPLEGKPIPNPLLGLDSTGSGEDLKNVFPPEVAVFEPSKAEIAHTQKATLVCLATGFYPDHVELSWWVNGKEVHSGVCTDPQPLKEQPALNDSRYCLSSRLRVSATFWQNPRNHFRCQVQFYGLSENDEWTQDRAKPVTQIVSAEAWGRADCGITSASYHQGVLSATILYEILLGKATLYAVLVSALVLMAMVKRKDSRGRAKRSGSGATNFSLLKQAGDVEENPGPTSMALPVTALLLPLALLLHAARPQLQLQESGPGLVKPSETLSLTCTVSGDSISSGDYYWGWIRQPPGKGLEWIGHIYYSGVTYYNPSLKSRVTISVDTSRNQFSLKLSSVTAADTAVYYCTREDSSNWRSRGQGTLVTVSSLESGGGGSFQVQLVESGGGLVQPGGSLRLSCAASGFTFTNHAMSWVRQAPGKGLELVSSISGNGRTTYYADSVKGRFTISRDISKNTLDLQMNSLRAEDTAVYYCAKDGGETLVDSRGQGTLVTVSSTREQKLISEEDGSGIQNPDPAVYQLRDSKSSDKSVCLFTDFDSQTNVSQSKDSDVYITDKCVLDMRSMDFKSNSAVAWSNKSDFACANAFNNSIIPEDTFFPSSDVPCDVKLVEKSFETDTNLNFQNLSVIGFRILLLKVAGFNLLMTLRLWSSRAKRSGSGVKQTLNFDLLKLAGDVESNPGPSRGHMTEYKPTVRLATRDDVPRAVRTLAAAFADYPATRHTVDPDRHIERVTELQELFLTRVGLDIGKVWVADDGAAVAVWTTPESVEAGAVFAEIGPRMAELSGSRLAAQQQMEGLLAPHRPKEPAWFLATVGVSPDHQGKGLGSAVVLPGVEAAERAGVPAFLETSAPRNLPFYERLGFTVTADVEVPEGPRTWCMTRKPGA

SEQ ID NO: 17386 - protein, 902 aa, Artificial Sequence
  Synthetic Polypeptide
MALPVTALLLPLALLLHAARPLEQKLISEEDLGSGDRPDPAVYQLRDSKSSDKSVCLFTDFDSQTNVSQSKDSDVYITDKCVLDMRSMDFKSNSAVAWSNKSDFACANAFNNSIIPEDTFFPSPESSCDVKLVEKSFETDTNLNFQNLSVIGFRILLLKVAGFNLLMTLRLWSSSSRAKRSGSGVKQTLNFDLLKLAGDVESNPGPTSMALPVTALLLPLALLLHAARPQLQLQESGPGLVKPSETLSLTCTVSGDSISSGDYYWGWIRQPPGKGLEWIGHIYYSGVTYYNPSLKSRVTISVDTSRNQFSLKLSSVTAADTAVYYCTREDSSNWRSRGQGTLVTVSSLESGGGGSFQVQLVESGGGLVQPGGSLRLSCAASGFTFTNHAMSWVRQAPGKGLELVSSISGNGRTTYYADSVKGRFTISRDISKNTLDLQMNSLRAEDTAVYYCAKDGGETLVDSRGQGTLVTVSSTRGKPIPNPLLGLDSTGSGEDLKNVFPPEVAVFEPSEAEISHTQKATLVCLATGFYPDHVELSWWVNGKEVHSGVCTDPQPLKEQPALNDSRYCLSSRLRVSATFWQNPRNHFRCQVQFYGLSENDEWTQDRAKPVTQIVSAEAWGRADCGFTSESYQQGVLSATILYEILLGKATLYAVLVSALVLMAMVKRKDSRGRAKRSGSGATNFSLLKQAGDVEENPGPSRGHMTEYKPTVRLATRDDVPRAVRTLAAAFADYPATRHTVDPDRHIERVTELQELFLTRVGLDIGKVWVADDGAAVAVWTTPESVEAGAVFAEIGPRMAELSGSRLAAQQQMEGLLAPHRPKEPAWFLATVGVSPDHQGKGLGSAVVLPGVEAAERAGVPAFLETSAPRNLPFYERLGFTVTADVEVPEGPRTWCMTRKPGA

SEQ ID NO: 17387 - protein, 861 aa, Artificial Sequence
  Synthetic Polypeptide
MALPVTALLLPLALLLHAARPQLQLQESGPGLVKPSETLSLTCTVSGDSISSGDYYWGWIRQPPGKGLEWIGHIYYSGVTYYNPSLKSRVTISVDTSRNQFSLKLSSVTAADTAVYYCTREDSSNWRSRGQGTLVTVSSLEDLKNVFPPEVAVFEPSEAEISHTQKATLVCLATGFYPDHVELSWWVNGKEVHSGVSTDPQPLKEQPALNDSRYCLSSRLRVSATFWQNPRNHFRCQVQFYGLSENDEWTQDRAKPVTQIVSAEAWGRADCGFTSESYQQGVLSATILYEILLGKATLYAVLVSALVLMAMVKRKDSRGRAKRSGSGATNFSLLKQAGDVEENPGPTSMDWIWRILFLVGAATGAHSFQVQLVESGGGLVQPGGSLRLSCAASGFTFTNHAMSWVRQAPGKGLELVSSISGNGRTTYYADSVKGRFTISRDISKNTLDLQMNSLRAEDTAVYYCAKDGGETLVDSRGQGTLVTVSSTRIQNPDPAVYQLRDSKSSDKSVCLFTDFDSQTNVSQSKDSDVYITDKTVLDMRSMDFKSNSAVAWSNKSDFACANAFNNSIIPEDTFFPSPESSCDVKLVEKSFETDTNLNFQNLSVIGFRILLLKVAGFNLLMTLRLWSSRAKRSGSGVKQTLNFDLLKLAGDVESNPGPSRGHMTEYKPTVRLATRDDVPRAVRTLAAAFADYPATRHTVDPDRHIERVTELQELFLTRVGLDIGKVWVADDGAAVAVWTTPESVEAGAVFAEIGPRMAELSGSRLAAQQQMEGLLAPHRPKEPAWFLATVGVSPDHQGKGLGSAVVLPGVEAAERAGVPAFLETSAPRNLPFYERLGFTVTADVEVPEGPRTWCMTRKPGA

SEQ ID NO: 17388 - protein, 943 aa, Artificial Sequence
  Synthetic Polypeptide
MALPVTALLLPLALLLHAARPQLQLQESGPGLVKPSETLSLTCTVSGDSISSGDYYWGWIRQPPGKGLEWIGHIYYSGVTYYNPSLKSRVTISVDTSRNQFSLKLSSVTAADTAVYYCTREDSSNWRSRGQGTLVTVSSLEDLKNVFPPEVAVFEPSEAEISHTQKATLVCLATGFYPDHVELSWWVNGKEVHSGVSTDPQPLKEQPALNDSRYCLSSRLRVSATFWQNPRNHFRCQVQFYGLSENDEWTQDRAKPVTQIVSAEAWGRADCGFTSESYQQGVLSATILYEILLGKATLYAVLVSALVLMAMVKRKDSRGRAKRSGSGATNFSLLKQAGDVEENPGPTSMDWIWRILFLVGAATGAHSFQVQLVESGGGLVQPGGSLRLSCAASGFTFTNHAMSWVRQAPGKGLELVSSISGNGRTTYYADSVKGRFTISRDISKNTLDLQMNSLRAEDTAVYYCAKDGGETLVDSRGQGTLVTVSSTREQKLISEEDGSGTPFPSLAPPIMLLVDGKQQMVVVCLVLDVAPPGLDSPIWFSAGNGSALDAFTYGPSPATDGTWTNLAHLSLPSEELASWEPLVCHTGPGAEGHSRSTQPMHLSGEASTARTCPQEPLRGTPGGALWLGVLRLLLFKLLLFDLLLTCSCLCDPAGPLPSPATTTRLRALGSHRLHPATETGGREATSSPRPQPRDRRWGDTPPGRKPGSPVRAKRSGSGVKQTLNFDLLKLAGDVESNPGPSRGHMTEYKPTVRLATRDDVPRAVRTLAAAFADYPATRHTVDPDRHIERVTELQELFLTRVGLDIGKVWVADDGAAVAVWTTPESVEAGAVFAEIGPRMAELSGSRLAAQQQMEGLLAPHRPKEPAWFLATVGVSPDHQGKGLGSAVVLPGVEAAERAGVPAFLETSAPRNLPFYERLGFTVTADVEVPEGPRTWCMTRKPGA

SEQ ID NO: 17389 - protein, 956 aa, Artificial Sequence
  Synthetic Polypeptide
MALPVTALLLPLALLLHAARPLEDLKNVFPPEVAVFEPSEAEISHTQKATLVCLATGFYPDHVELSWWVNGKEVHSGVSTDPQPLKEQPALNDSRYCLSSRLRVSATFWQNPRNHFRCQVQFYGLSENDEWTQDRAKPVTQIVSAEAWGRADCGFTSESYQQGVLSATILYEILLGKATLYAVLVSALVLMAMVKRKDSRGRAKRSGSGATNFSLLKQAGDVEENPGPTSMALPVTALLLPLALLLHAARPQLQLQESGPGLVKPSETLSLTCTVSGDSISSGDYYWGWIRQPPGKGLEWIGHIYYSGVTYYNPSLKSRVTISVDTSRNQFSLKLSSVTAADTAVYYCTREDSSNWRSRGQGTLVTVSSLESGGGGSFQVQLVESGGGLVQPGGSLRLSCAASGFTFTNHAMSWVRQAPGKGLELVSSISGNGRTTYYADSVKGRFTISRDISKNTLDLQMNSLRAEDTAVYYCAKDGGETLVDSRGQGTLVTVSSTREQKLISEEDLGSGTPFPSLAPPIMLLVDGKQQMVVVCLVLDVAPPGLDSPIWFSAGNGSALDAFTYGPSPATDGTWTNLAHLSLPSEELASWEPLVCHTGPGAEGHSRSTQPMHLSGEASTARTCPQEPLRGTPGGALWLGVLRLLLFKLLLFDLLLTCSCLCDPAGPLPSPATTTRLRALGSHRLHPATETGGREATSSPRPQPRDRRWGDTPPGRKPGSPVRAKRSGSGVKQTLNFDLLKLAGDVESNPGPSRSRGHMTEYKPTVRLATRDDVPRAVRTLAAAFADYPATRHTVDPDRHIERVTELQELFLTRVGLDIGKVWVADDGAAVAVWTTPESVEAGAVFAEIGPRMAELSGSRLAAQQQMEGLLAPHRPKEPAWFLATVGVSPDHQGKGLGSAVVLPGVEAAERAGVPAFLETSAPRNLPFYERLGFTVTADVEVPEGPRTWCMTRKPGA

SEQ ID NO: 17390 - protein, 898 aa, Artificial Sequence
  Synthetic Polypeptide
MALPVTALLLPLALLLHAARPQLQLQESGPGLVKPSETLSLTCTVSGDSISSGDYYWGWIRQPPGKGLEWIGHIYYSGVTYYNPSLKSRVTISVDTSRNQFSLKLSSVTAADTAVYYCTREDSSNWRSRGQGTLVTVSSLEGKPIPNPLLGLDSTGSGDKQLDADVSPKPTIFLPSIAETKLQKAGTYLCLLEKFFPDVIKIHWQEKKSNTILGSQEGNTMKTNDTYMKFSWLTVPEKSLDKEHRCIVRHENNKNGVDQEIIFPPIKTDVITMDPKDNCSKDANDTLLLQLTNTSAYYMYLLLLLKSVVYFAIITCCLLRRTAFCCNGEKSRAKRSGSGATNFSLLKQAGDVEENPGPTSMDWIWRILFLVGAATGAHSFQVQLVESGGGLVQPGGSLRLSCAASGFTFTNHAMSWVRQAPGKGLELVSSISGNGRTTYYADSVKGRFTISRDISKNTLDLQMNSLRAEDTAVYYCAKDGGETLVDSRGQGTLVTVSSTREQKLISEEDGSGSQPHTKPSVFVMKNGTNVACLVKEFYPKDIRINLVSSKKITEFDPAIVISPSGKYNAVKLGKYEDSNSVTCSVQHDNKTVHSTDFEVKTDSTDHVKPKETENTKQPSKSCHKPKAIVHTEKVNMMSLTVLGLRMLFAKTVAVNFLLTAKLFFLRAKRSGSGVKQTLNFDLLKLAGDVESNPGPSRGHMTEYKPTVRLATRDDVPRAVRTLAAAFADYPATRHTVDPDRHIERVTELQELFLTRVGLDIGKVWVADDGAAVAVWTTPESVEAGAVFAEIGPRMAELSGSRLAAQQQMEGLLAPHRPKEPAWFLATVGVSPDHQGKGLGSAVVLPGVEAAERAGVPAFLETSAPRNLPFYERLGFTVTADVEVPEGPRTWCMTRKPGA

SEQ ID NO: 17391 - protein, 636 aa, Artificial Sequence
  Synthetic Polypeptide
MALPVTALLLPLALLLHAARPQLQLQESGPGLVKPSETLSLTCTVSGDSISSGDYYWGWIRQPPGKGLEWIGHIYYSGVTYYNPSLKSRVTISVDTSRNQFSLKLSSVTAADTAVYYCTREDSSNWRSRGQGTLVTVSSLESQPHTKPSVFVMKNGTNVACLVKEFYPKDIRINLVSSKKITEFDPAIVISPSGKYNAVKLGKYEDSNSVTCSVQHDNKTVHSTDFEVKTDSTDHVKPKETENTKQPSKSCHKPKAIVHTEKVNMMSLTVLGLRMLFAKTVAVNFLLTAKLFFLRAKRSGSGATNFSLLKQAGDVEENPGPTSMDWIWRILFLVGAATGAHSFQVQLVESGGGLVQPGGSLRLSCAASGFTFTNHAMSWVRQAPGKGLELVSSISGNGRTTYYADSVKGRFTISRDISKNTLDLQMNSLRAEDTAVYYCAKDGGETLVDSRGQGTLVTVSSTRDKQLDADVSPKPTIFLPSIAETKLQKAGTYLCLLEKFFPDVIKIHWQEKKSNTILGSQEGNTMKTNDTYMKFSWLTVPEKSLDKEHRCIVRHENNKNGVDQEIIFPPIKTDVITMDPKDNCSKDANDTLLLQLTNTSAYYMYLLLLLKSVVYFAIITCCLLRRTAFCCNGEKS

SEQ ID NO: 17392 - protein, 908 aa, Artificial Sequence
  Synthetic Polypeptide
MALPVTALLLPLALLLHAARPLEGKPIPNPLLGLDSTGSGDKQLDADVSPKPTIFLPSIAETKLQKAGTYLCLLEKFFPDVIKIHWQEKKSNTILGSQEGNTMKTNDTYMKFSWLTVPEKSLDKEHRCIVRHENNKNGVDQEIIFPPIKTDVITMDPKDNCSKDANDTLLLQLTNTSAYYMYLLLLLKSVVYFAIITCCLLRRTAFCCNGEKSRAKRSGSGATNFSLLKQAGDVEENPGPTSMALPVTALLLPLALLLHAARPQLQLQESGPGLVKPSETLSLTCTVSGDSISSGDYYWGWIRQPPGKGLEWIGHIYYSGVTYYNPSLKSRVTISVDTSRNQFSLKLSSVTAADTAVYYCTREDSSNWRSRGQGTLVTVSSLESGGGGSFQVQLVESGGGLVQPGGSLRLSCAASGFTFTNHAMSWVRQAPGKGLELVSSISGNGRTTYYADSVKGRFTISRDISKNTLDLQMNSLRAEDTAVYYCAKDGGETLVDSRGQGTLVTVSSTREQKLISEEDGSGSQPHTKPSVFVMKNGTNVACLVKEFYPKDIRINLVSSKKITEFDPAIVISPSGKYNAVKLGKYEDSNSVTCSVQHDNKTVHSTDFEVKTDSTDHVKPKETENTKQPSKSCHKPKAIVHTEKVNMMSLTVLGLRMLFAKTVAVNFLLTAKLFFLRAKRSGSGVKQTLNFDLLKLAGDVESNPGPSRGHMTEYKPTVRLATRDDVPRAVRTLAAAFADYPATRHTVDPDRHIERVTELQELFLTRVGLDIGKVWVADDGAAVAVWTTPESVEAGAVFAEIGPRMAELSGSRLAAQQQMEGLLAPHRPKEPAWFLATVGVSPDHQGKGLGSAVVLPGVEAAERAGVPAFLETSAPRNLPFYERLGFTVTADVEVPEGPRTWCMTRKPGA

SEQ ID NO: 17393 - protein, 1038 aa, Artificial Sequence
  Synthetic Polypeptide
MALPVTALLLPLALLLHAARPQLQLQESGPGLVKPSETLSLTCTVSGDSISSGDYYWGWIRQPPGKGLEWIGHIYYSGVTYYNPSLKSRVTISVDTSRNQFSLKLSSVTAADTAVYYCTREDSSNWRSRGQGTLVTVSSGQPKANPTVTLFPPSSEELQANKATLVCLISDFYPGAVTVAWKADGSPVKAGVETTKPSKQSNNKYAASSYLSLTPEQWKSHRSYSCQVTHEGSTVEKTVAPTECSGSQSFGLLDPKLCYLLDGILFIYGVILTALFLRVKFSRSADAPAYQQGQNQLYNELNLGRREEYDVLDKRRGRDPEMGGKPQRRKNPQEGLYNELQKDKMAEAYSEIGMKGERRRGKGHDGLYQGLSTATKDTYDALHMQALPPRRAKRSGSGATNFSLLKQAGDVEENPGPTSMDWIWRILFLVGAATGAHSFQVQLVESGGGLVQPGGSLRLSCAASGFTFTNHAMSWVRQAPGKGLELVSSISGNGRTTYYADSVKGRFTISRDISKNTLDLQMNSLRAEDTAVYYCAKDGGETLVDSRGQGTLVTVSSASTKGPSVFPLAPSSKSTSGGTAALGCLVKDYFPEPVTVSWNSGALTSGVHTFPAVLQSSGLYSLSSVVTVPSSSLGTQTYICNVNHKPSNTKVDKRVEPKSCGTQSFGLLDPKLCYLLDGILFIYGVILTALFLRVKFSRSADAPAYQQGQNQLYNELNLGRREEYDVLDKRRGRDPEMGGKPQRRKNPQEGLYNELQKDKMAEAYSEIGMKGERRRGKGHDGLYQGLSTATKDTYDALHMQALPPRRAKRSGSGVKQTLNFDLLKLAGDVESNPGPSRGHMTEYKPTVRLATRDDVPRAVRTLAAAFADYPATRHTVDPDRHIERVTELQELFLTRVGLDIGKVWVADDGAAVAVWTTPESVEAGAVFAEIGPRMAELSGSRLAAQQQMEGLLAPHRPKEPAWFLATVGVSPDHQGKGLGSAVVLPGVEAAERAGVPAFLETSAPRNLPFYERLGFTVTADVEVPEGPRTWCMTRKPGA

SEQ ID NO: 17394 - protein, 824 aa, Artificial Sequence
  Synthetic Polypeptide
MALPVTALLLPLALLLHAARPQLQLQESGPGLVKPSETLSLTCTVSGDSISSGDYYWGWIRQPPGKGLEWIGHIYYSGVTYYNPSLKSRVTISVDTSRNQFSLKLSSVTAADTAVYYCTREDSSNWRSRGQGTLVTVSSLEDLKNVFPPEVAVFEPSEAEISHTQKATLVCLATGFYPDHVELSWWVNGKEVHSGVSTDPQPLKEQPALNDSRYCLSSRLRVSATFWQNPRNHFRCQVQFYGLSENDEWTQDRAKPVTQIVSAEAWGRADCGSQSFGLLDPKLCYLLDGILFIYGVILTALFLRVKFSRSADAPAYQQGQNQLYNELNLGRREEYDVLDKRRGRDPEMGGKPQRRKNPQEGLYNELQKDKMAEAYSEIGMKGERRRGKGHDGLYQGLSTATKDTYDALHMQALPPRRAKRSGSGATNFSLLKQAGDVEENPGPTSMDWIWRILFLVGAATGAHSFQVQLVESGGGLVQPGGSLRLSCAASGFTFTNHAMSWVRQAPGKGLELVSSISGNGRTTYYADSVKGRFTISRDISKNTLDLQMNSLRAEDTAVYYCAKDGGETLVDSRGQGTLVTVSSTRIQNPDPAVYQLRDSKSSDKSVCLFTDFDSQTNVSQSKDSDVYITDKTVLDMRSMDFKSNSAVAWSNKSDFACANAFNNSIIPEDTFFPSPESSCGTQSFGLLDPKLCYLLDGILFIYGVILTALFLRVKFSRSADAPAYQQGQNQLYNELNLGRREEYDVLDKRRGRDPEMGGKPQRRKNPQEGLYNELQKDKMAEAYSEIGMKGERRRGKGHDGLYQGLSTATKDTYDALHMQALPPR

SEQ ID NO: 17395 - protein, 824 aa, Artificial Sequence
  Synthetic Polypeptide
MALPVTALLLPLALLLHAARPQLQLQESGPGLVKPSETLSLTCTVSGDSISSGDYYWGWIRQPPGKGLEWIGHIYYSGVTYYNPSLKSRVTISVDTSRNQFSLKLSSVTAADTAVYYCTREDSSNWRSRGQGTLVTVSSLEDLKNVFPPEVAVFEPSKAEIAHTQKATLVCLATGFYPDHVELSWWVNGKEVHSGVCTDPQPLKEQPALNDSRYCLSSRLRVSATFWQNPRNHFRCQVQFYGLSENDEWTQDRAKPVTQIVSAEAWGRADCGSQSFGLLDPKLCYLLDGILFIYGVILTALFLRVKFSRSADAPAYQQGQNQLYNELNLGRREEYDVLDKRRGRDPEMGGKPQRRKNPQEGLYNELQKDKMAEAYSEIGMKGERRRGKGHDGLYQGLSTATKDTYDALHMQALPPRRAKRSGSGATNFSLLKQAGDVEENPGPTSMDWIWRILFLVGAATGAHSFQVQLVESGGGLVQPGGSLRLSCAASGFTFTNHAMSWVRQAPGKGLELVSSISGNGRTTYYADSVKGRFTISRDISKNTLDLQMNSLRAEDTAVYYCAKDGGETLVDSRGQGTLVTVSSTRIQNPDPAVYQLRDSKSSDKSVCLFTDFDSQTNVSQSKDSDVYITDKCVLDMRSMDFKSNSAVAWSNKSDFACANAFNNSIIPEDTFFPSSDVPCGTQSFGLLDPKLCYLLDGILFIYGVILTALFLRVKFSRSADAPAYQQGQNQLYNELNLGRREEYDVLDKRRGRDPEMGGKPQRRKNPQEGLYNELQKDKMAEAYSEIGMKGERRRGKGHDGLYQGLSTATKDTYDALHMQALPPR

SEQ ID NO: 17396 - protein, 895 aa, Artificial Sequence
  Synthetic Polypeptide
MALPVTALLLPLALLLHAARPQLQLQESGPGLVKPSETLSLTCTVSGDSISSGDYYWGWIRQPPGKGLEWIGHIYYSGVTYYNPSLKSRVTISVDTSRNQFSLKLSSVTAADTAVYYCTREDSSNWRSRGQGTLVTVSSLEGKPIPNPLLGLDSTGSGEDLKNVFPPEVAVFEPSEAEISHTQKATLVCLATGFYPDHVELSWWVNGKEVHSGVSTDPQPLKEQPALNDSRYCLSSRLRVSATFWQNPRNHFRCQVQFYGLSENDEWTQDRAKPVTQIVSAEAWGRADCGSQSFGLLDPKLCYLLDGILFIYGVILTALFLRVKFSRSADAPAYQQGQNQLYNELNLGRREEYDVLDKRRGRDPEMGGKPQRRKNPQEGLYNELQKDKMAEAYSEIGMKGERRRGKGHDGLYQGLSTATKDTYDALHMQALPPRRAKRSGSGATNFSLLKQAGDVEENPGPTSMDWIWRILFLVGAATGAHSFQVQLVESGGGLVQPGGSLRLSCAASGFTFTNHAMSWVRQAPGKGLELVSSISGNGRTTYYADSVKGRFTISRDISKNTLDLQMNSLRAEDTAVYYCAKDGGETLVDSRGQGTLVTVSSTREQKLISEEDGSGIQNPDPAVYQLRDSKSSDKSVCLFTDFDSQTNVSQSKDSDVYITDKTVLDMRSMDFKSNSAVAWSNKSDFACANAFNNSIIPEDTFFPSPESSCGTQSFGLLDPKLCYLLDGILFIYGVILTALFLRSKRSRLLHSDYMNMTPRRPGPTRKHYQPYAPPRDFAAYRSRVKFSRSADAPAYQQGQNQLYNELNLGRREEYDVLDKRRGRDPEMGGKPQRRKNPQEGLYNELQKDKMAEAYSEIGMKGERRRGKGHDGLYQGLSTATKDTYDALHMQALPPR

SEQ ID NO: 17397 - protein, 936 aa, Artificial Sequence
  Synthetic Polypeptide
MALPVTALLLPLALLLHAARPQLQLQESGPGLVKPSETLSLTCTVSGDSISSGDYYWGWIRQPPGKGLEWIGHIYYSGVTYYNPSLKSRVTISVDTSRNQFSLKLSSVTAADTAVYYCTREDSSNWRSRGQGTLVTVSSLEGKPIPNPLLGLDSTGSGEDLKNVFPPEVAVFEPSEAEISHTQKATLVCLATGFYPDHVELSWWVNGKEVHSGVSTDPQPLKEQPALNDSRYCLSSRLRVSATFWQNPRNHFRCQVQFYGLSENDEWTQDRAKPVTQIVSAEAWGRADCGSQSFGLLDPKLCYLLDGILFIYGVILTALFLRSKRSRLLHSDYMNMTPRRPGPTRKHYQPYAPPRDFAAYRSRVKFSRSADAPAYQQGQNQLYNELNLGRREEYDVLDKRRGRDPEMGGKPQRRKNPQEGLYNELQKDKMAEAYSEIGMKGERRRGKGHDGLYQGLSTATKDTYDALHMQALPPRRAKRSGSGATNFSLLKQAGDVEENPGPTSMDWIWRILFLVGAATGAHSFQVQLVESGGGLVQPGGSLRLSCAASGFTFTNHAMSWVRQAPGKGLELVSSISGNGRTTYYADSVKGRFTISRDISKNTLDLQMNSLRAEDTAVYYCAKDGGETLVDSRGQGTLVTVSSTREQKLISEEDGSGIQNPDPAVYQLRDSKSSDKSVCLFTDFDSQTNVSQSKDSDVYITDKTVLDMRSMDFKSNSAVAWSNKSDFACANAFNNSIIPEDTFFPSPESSCGTQSFGLLDPKLCYLLDGILFIYGVILTALFLRSKRSRLLHSDYMNMTPRRPGPTRKHYQPYAPPRDFAAYRSRVKFSRSADAPAYQQGQNQLYNELNLGRREEYDVLDKRRGRDPEMGGKPQRRKNPQEGLYNELQKDKMAEAYSEIGMKGERRRGKGHDGLYQGLSTATKDTYDALHMQALPPR

SEQ ID NO: 17398 - protein, 897 aa, Artificial Sequence
  Synthetic Polypeptide
MALPVTALLLPLALLLHAARPQLQLQESGPGLVKPSETLSLTCTVSGDSISSGDYYWGWIRQPPGKGLEWIGHIYYSGVTYYNPSLKSRVTISVDTSRNQFSLKLSSVTAADTAVYYCTREDSSNWRSRGQGTLVTVSSLEGKPIPNPLLGLDSTGSGEDLKNVFPPEVAVFEPSEAEISHTQKATLVCLATGFYPDHVELSWWVNGKEVHSGVSTDPQPLKEQPALNDSRYCLSSRLRVSATFWQNPRNHFRCQVQFYGLSENDEWTQDRAKPVTQIVSAEAWGRADCGSQSFGLLDPKLCYLLDGILFIYGVILTALFLRVKFSRSADAPAYQQGQNQLYNELNLGRREEYDVLDKRRGRDPEMGGKPQRRKNPQEGLYNELQKDKMAEAYSEIGMKGERRRGKGHDGLYQGLSTATKDTYDALHMQALPPRRAKRSGSGATNFSLLKQAGDVEENPGPTSMDWIWRILFLVGAATGAHSFQVQLVESGGGLVQPGGSLRLSCAASGFTFTNHAMSWVRQAPGKGLELVSSISGNGRTTYYADSVKGRFTISRDISKNTLDLQMNSLRAEDTAVYYCAKDGGETLVDSRGQGTLVTVSSTREQKLISEEDLGSGIQNPDPAVYQLRDSKSSDKSVCLFTDFDSQTNVSQSKDSDVYITDKTVLDMRSMDFKSNSAVAWSNKSDFACANAFNNSIIPEDTFFPSPESSCGTQSFGLLDPKLCYLLDGILFIYGVILTALFLKRGRKKLLYIFKQPFMRPVQTTQEEDGCSCRFPEEEEGGCELRVKFSRSADAPAYQQGQNQLYNELNLGRREEYDVLDKRRGRDPEMGGKPQRRKNPQEGLYNELQKDKMAEAYSEIGMKGERRRGKGHDGLYQGLSTATKDTYDALHMQALPPR

SEQ ID NO: 17399 - protein, 939 aa, Artificial Sequence
  Synthetic Polypeptide
MALPVTALLLPLALLLHAARPQLQLQESGPGLVKPSETLSLTCTVSGDSISSGDYYWGWIRQPPGKGLEWIGHIYYSGVTYYNPSLKSRVTISVDTSRNQFSLKLSSVTAADTAVYYCTREDSSNWRSRGQGTLVTVSSLEGKPIPNPLLGLDSTGSGEDLKNVFPPEVAVFEPSEAEISHTQKATLVCLATGFYPDHVELSWWVNGKEVHSGVSTDPQPLKEQPALNDSRYCLSSRLRVSATFWQNPRNHFRCQVQFYGLSENDEWTQDRAKPVTQIVSAEAWGRADCGSQSFGLLDPKLCYLLDGILFIYGVILTALFLKRGRKKLLYIFKQPFMRPVQTTQEEDGCSCRFPEEEEGGCELRVKFSRSADAPAYQQGQNQLYNELNLGRREEYDVLDKRRGRDPEMGGKPQRRKNPQEGLYNELQKDKMAEAYSEIGMKGERRRGKGHDGLYQGLSTATKDTYDALHMQALPPRRAKRSGSGATNFSLLKQAGDVEENPGPTSMDWIWRILFLVGAATGAHSFQVQLVESGGGLVQPGGSLRLSCAASGFTFTNHAMSWVRQAPGKGLELVSSISGNGRTTYYADSVKGRFTISRDISKNTLDLQMNSLRAEDTAVYYCAKDGGETLVDSRGQGTLVTVSSTREQKLISEEDLGSGIQNPDPAVYQLRDSKSSDKSVCLFTDFDSQTNVSQSKDSDVYITDKTVLDMRSMDFKSNSAVAWSNKSDFACANAFNNSIIPEDTFFPSPESSCGTQSFGLLDPKLCYLLDGILFIYGVILTALFLKRGRKKLLYIFKQPFMRPVQTTQEEDGCSCRFPEEEEGGCELRVKFSRSADAPAYQQGQNQLYNELNLGRREEYDVLDKRRGRDPEMGGKPQRRKNPQEGLYNELQKDKMAEAYSEIGMKGERRRGKGHDGLYQGLSTATKDTYDALHMQALPPR

SEQ ID NO: 17400 - protein, 829 aa, Artificial Sequence
  Synthetic Polypeptide
MALPVTALLLPLALLLHAARPQLQLQESGPGLVKPSETLSLTCTVSGDSISSGDYYWGWIRQPPGKGLEWIGHIYYSGVTYYNPSLKSRVTISVDTSRNQFSLKLSSVTAADTAVYYCTREDSSNWRSRGQGTLVTVSSLEQSFGLLDPKLCYLLDGILFIYGVILTALFLRVKFSRSADAPAYQQGQNQLYNELNLGRREEYDVLDKRRGRDPEMGGKPQRRKNPQEGLYNELQKDKMAEAYSEIGMKGERRRGKGHDGLYQGLSTATKDTYDALHMQALPPRRAKRSGSGATNFSLLKQAGDVEENPGPTSMDWIWRILFLVGAATGAHSFQVQLVESGGGLVQPGGSLRLSCAASGFTFTNHAMSWVRQAPGKGLELVSSISGNGRTTYYADSVKGRFTISRDISKNTLDLQMNSLRAEDTAVYYCAKDGGETLVDSRGQGTLVTVSSTRQSFGLLDPKLCYLLDGILFIYGVILTALFLRVKFSRSADAPAYQQGQNQLYNELNLGRREEYDVLDKRRGRDPEMGGKPQRRKNPQEGLYNELQKDKMAEAYSEIGMKGERRRGKGHDGLYQGLSTATKDTYDALHMQALPPRRAKRSGSGVKQTLNFDLLKLAGDVESNPGPSRGHMTEYKPTVRLATRDDVPRAVRTLAAAFADYPATRHTVDPDRHIERVTELQELFLTRVGLDIGKVWVADDGAAVAVWTTPESVEAGAVFAEIGPRMAELSGSRLAAQQQMEGLLAPHRPKEPAWFLATVGVSPDHQGKGLGSAVVLPGVEAAERAGVPAFLETSAPRNLPFYERLGFTVTADVEVPEGPRTWCMTRKPGA

SEQ ID NO: 17401 - protein, 654 aa, Artificial Sequence
  Synthetic Polypeptide
MALPVTALLLPLALLLHAARPQLQLQESGPGLVKPSETLSLTCTVSGDSISSGDYYWGWIRQPPGKGLEWIGHIYYSGVTYYNPSLKSRVTISVDTSRNQFSLKLSSVTAADTAVYYCTREDSSNWRSRGQGTLVTVSSLEGQPKANPTVTLFPPSSEELQANKATLVCLISDFYPGAVTVAWKADGSPVKAGVETTKPSKQSNNKYAASSYLSLTPEQWKSHRSYSCQVTHEGSTVEKTVAPTECSPIKTDVITMDPKDNCSKDANDTLLLQLTNTSAYYMYLLLLLKSVVYFAIITCCLLRRTAFCCNGEKSRAKRSGSGATNFSLLKQAGDVEENPGPTSMDWIWRILFLVGAATGAHSFQVQLVESGGGLVQPGGSLRLSCAASGFTFTNHAMSWVRQAPGKGLELVSSISGNGRTTYYADSVKGRFTISRDISKNTLDLQMNSLRAEDTAVYYCAKDGGETLVDSRGQGTLVTVSSTRASTKGPSVFPLAPSSKSTSGGTAALGCLVKDYFPEPVTVSWNSGALTSGVHTFPAVLQSSGLYSLSSVVTVPSSSLGTQTYICNVNHKPSNTKVDKRVEPKSCEVKTDSTDHVKPKETENTKQPSKSCHKPKAIVHTEKVNMMSLTVLGLRMLFAKTVAVNFLLTAKLFFL

SEQ ID NO: 17402 - protein, 632 aa, Artificial Sequence
  Synthetic Polypeptide
MALPVTALLLPLALLLHAARPQLQLQESGPGLVKPSETLSLTCTVSGDSISSGDYYWGWIRQPPGKGLEWIGHIYYSGVTYYNPSLKSRVTISVDTSRNQFSLKLSSVTAADTAVYYCTREDSSNWRSRGQGTLVTVSSLEGQPKANPTVTLFPPSSEELQANKATLVCLISDFYPGAVTVAWKADGSPVKAGVETTKPSKQSNNKYAASSYLSLTPEQWKSHRSYSCQVTHEGSTVEKTVAPTECSGRADCGITSASYHQGVLSATILYEILLGKATLYAVLVSALVLMAMVKRKDSRGRAKRSGSGATNFSLLKQAGDVEENPGPTSMDWIWRILFLVGAATGAHSFQVQLVESGGGLVQPGGSLRLSCAASGFTFTNHAMSWVRQAPGKGLELVSSISGNGRTTYYADSVKGRFTISRDISKNTLDLQMNSLRAEDTAVYYCAKDGGETLVDSRGQGTLVTVSSTRASTKGPSVFPLAPSSKSTSGGTAALGCLVKDYFPEPVTVSWNSGALTSGVHTFPAVLQSSGLYSLSSVVTVPSSSLGTQTYICNVNHKPSNTKVDKRVEPKSCIPEDTFFPSSDVPCDVKLVEKSFETDTNLNFQNLSVIGFRILLLKVAGFNLLMTLRLWSS

SEQ ID NO: 17403 - protein, 632 aa, Artificial Sequence
  Synthetic Polypeptide
MALPVTALLLPLALLLHAARPQLQLQESGPGLVKPSETLSLTCTVSGDSISSGDYYWGWIRQPPGKGLEWIGHIYYSGVTYYNPSLKSRVTISVDTSRNQFSLKLSSVTAADTAVYYCTREDSSNWRSRGQGTLVTVSSLEGQPKANPTVTLFPPSSEELQANKATLVCLISDFYPGAVTVAWKADGSPVKAGVETTKPSKQSNNKYAASSYLSLTPEQWKSHRSYSCQVTHEGSTVEKTVAPTECSGRADCGFTSESYQQGVLSATILYEILLGKATLYAVLVSALVLMAMVKRKDSRGRAKRSGSGATNFSLLKQAGDVEENPGPTSMDWIWRILFLVGAATGAHSFQVQLVESGGGLVQPGGSLRLSCAASGFTFTNHAMSWVRQAPGKGLELVSSISGNGRTTYYADSVKGRFTISRDISKNTLDLQMNSLRAEDTAVYYCAKDGGETLVDSRGQGTLVTVSSTRASTKGPSVFPLAPSSKSTSGGTAALGCLVKDYFPEPVTVSWNSGALTSGVHTFPAVLQSSGLYSLSSVVTVPSSSLGTQTYICNVNHKPSNTKVDKRVEPKSCIPEDTFFPSPESSCDVKLVEKSFETDTNLNFQNLSVIGFRILLLKVAGFNLLMTLRLWSS

SEQ ID NO: 17404 - protein, 453 aa, Artificial Sequence
  Synthetic Polypeptide
MALPVTALLLPLALLLHAARPQLQLQESGPGLVKPSETLSLTCTVSGDSISSGDYYWGWIRQPPGKGLEWIGHIYYSGVTYYNPSLKSRVTISVDTSRNQFSLKLSSVTAADTAVYYCTREDSSNWRSRGQGTLVTVSSLESGGGGSFQVQLVESGGGLVQPGGSLRLSCAASGFTFTNHAMSWVRQAPGKGLELVSSISGNGRTTYYADSVKGRFTISRDISKNTLDLQMNSLRAEDTAVYYCAKDGGETLVDSRGQGTLVTVSSTRDGNEEMGGITQTPYKVSISGTTVILTCPQYPGSEILWQHNDKNIGGDEDDKNIGSDEDHLSLKEFSELEQSGYYVCYPRGSKPEDANFYLYLRARVCENCMEMDVMSVATIVIVDICITGGLLLLVYYWSKNRKAKAKPVTRGAGAGGRQRGQNKERPPPVPNPDYEPIRKGQRDLYSGLNQRRI

SEQ ID NO: 17405 - protein, 418 aa, Artificial Sequence
  Synthetic Polypeptide
MALPVTALLLPLALLLHAARPQLQLQESGPGLVKPSETLSLTCTVSGDSISSGDYYWGWIRQPPGKGLEWIGHIYYSGVTYYNPSLKSRVTISVDTSRNQFSLKLSSVTAADTAVYYCTREDSSNWRSRGQGTLVTVSSLESGGGGSFQVQLVESGGGLVQPGGSLRLSCAASGFTFTNHAMSWVRQAPGKGLELVSSISGNGRTTYYADSVKGRFTISRDISKNTLDLQMNSLRAEDTAVYYCAKDGGETLVDSRGQGTLVTVSSTRFKIPIEELEDRVFVNCNTSITWVEGTVGTLLSDITRLDLGKRILDPRGIYRCNGTDIYKDKESTVQVHYRMCQSCVELDPATVAGIIVTDVIATLLLALGVFCFAGHETGRLSGAADTQALLRNDQVYQPLRDRDDAQYSHLGGNWARNK

SEQ ID NO: 17406 - protein, 428 aa, Artificial Sequence
  Synthetic Polypeptide
MALPVTALLLPLALLLHAARPQLQLQESGPGLVKPSETLSLTCTVSGDSISSGDYYWGWIRQPPGKGLEWIGHIYYSGVTYYNPSLKSRVTISVDTSRNQFSLKLSSVTAADTAVYYCTREDSSNWRSRGQGTLVTVSSLESGGGGSFQVQLVESGGGLVQPGGSLRLSCAASGFTFTNHAMSWVRQAPGKGLELVSSISGNGRTTYYADSVKGRFTISRDISKNTLDLQMNSLRAEDTAVYYCAKDGGETLVDSRGQGTLVTVSSTRQSIKGNHLVKVYDYQEDGSVLLTCDAEAKNITWFKDGKMIGFLTEDKKKWNLGSNAKDPRGMYQCKGSQNKSKPLQVYYRMCQNCIELNAATISGFLFAEIVSIFVLAVGVYFIAGQDGVRQSRASDKQTLLPNDQLYQPLKDREDDQYSHLQGNQLRRN

SEQ ID NO: 17407 - protein, 411 aa, Artificial Sequence
  Synthetic Polypeptide
MALPVTALLLPLALLLHAARPQLQLQESGPGLVKPSETLSLTCTVSGDSISSGDYYWGWIRQPPGKGLEWIGHIYYSGVTYYNPSLKSRVTISVDTSRNQFSLKLSSVTAADTAVYYCTREDSSNWRSRGQGTLVTVSSLESGGGGSFQVQLVESGGGLVQPGGSLRLSCAASGFTFTNHAMSWVRQAPGKGLELVSSISGNGRTTYYADSVKGRFTISRDISKNTLDLQMNSLRAEDTAVYYCAKDGGETLVDSRGQGTLVTVSSTRQSFGLLDPKLCYLLDGILFIYGVILTALFLRVKFSRSADAPAYQQGQNQLYNELNLGRREEYDVLDKRRGRDPEMGGKPQRRKNPQEGLYNELQKDKMAEAYSEIGMKGERRRGKGHDGLYQGLSTATKDTYDALHMQALPPR

SEQ ID NO: 17408 - protein, 454 aa, Artificial Sequence
  Synthetic Polypeptide
MALPVTALLLPLALLLHAARPQVQLVESGGGLVQPGGSLRLSCAASGFTFTNHAMSWVRQAPGKGLELVSSISGNGRTTYYADSVKGRFTISRDISKNTLDLQMNSLRAEDTAVYYCAKDGGETLVDSRGQGTLVTVSSLESGGGGSFEQLQLQESGPGLVKPSETLSLTCTVSGDSISSGDYYWGWIRQPPGKGLEWIGHIYYSGVTYYNPSLKSRVTISVDTSRNQFSLKLSSVTAADTAVYYCTREDSSNWRSRGQGTLVTVSSTRDGNEEMGGITQTPYKVSISGTTVILTCPQYPGSEILWQHNDKNIGGDEDDKNIGSDEDHLSLKEFSELEQSGYYVCYPRGSKPEDANFYLYLRARVCENCMEMDVMSVATIVIVDICITGGLLLLVYYWSKNRKAKAKPVTRGAGAGGRQRGQNKERPPPVPNPDYEPIRKGQRDLYSGLNQRRI

SEQ ID NO: 17409 - protein, 419 aa, Artificial Sequence
  Synthetic Polypeptide
MALPVTALLLPLALLLHAARPQVQLVESGGGLVQPGGSLRLSCAASGFTFTNHAMSWVRQAPGKGLELVSSISGNGRTTYYADSVKGRFTISRDISKNTLDLQMNSLRAEDTAVYYCAKDGGETLVDSRGQGTLVTVSSLESGGGGSFEQLQLQESGPGLVKPSETLSLTCTVSGDSISSGDYYWGWIRQPPGKGLEWIGHIYYSGVTYYNPSLKSRVTISVDTSRNQFSLKLSSVTAADTAVYYCTREDSSNWRSRGQGTLVTVSSTRFKIPIEELEDRVFVNCNTSITWVEGTVGTLLSDITRLDLGKRILDPRGIYRCNGTDIYKDKESTVQVHYRMCQSCVELDPATVAGIIVTDVIATLLLALGVFCFAGHETGRLSGAADTQALLRNDQVYQPLRDRDDAQYSHLGGNWARNK

SEQ ID NO: 17410 - protein, 429 aa, Artificial Sequence
  Synthetic Polypeptide
MALPVTALLLPLALLLHAARPQVQLVESGGGLVQPGGSLRLSCAASGFTFTNHAMSWVRQAPGKGLELVSSISGNGRTTYYADSVKGRFTISRDISKNTLDLQMNSLRAEDTAVYYCAKDGGETLVDSRGQGTLVTVSSLESGGGGSFEQLQLQESGPGLVKPSETLSLTCTVSGDSISSGDYYWGWIRQPPGKGLEWIGHIYYSGVTYYNPSLKSRVTISVDTSRNQFSLKLSSVTAADTAVYYCTREDSSNWRSRGQGTLVTVSSTRQSIKGNHLVKVYDYQEDGSVLLTCDAEAKNITWFKDGKMIGFLTEDKKKWNLGSNAKDPRGMYQCKGSQNKSKPLQVYYRMCQNCIELNAATISGFLFAEIVSIFVLAVGVYFIAGQDGVRQSRASDKQTLLPNDQLYQPLKDREDDQYSHLQGNQLRRN

SEQ ID NO: 17411 - protein, 412 aa, Artificial Sequence
  Synthetic Polypeptide
MALPVTALLLPLALLLHAARPQVQLVESGGGLVQPGGSLRLSCAASGFTFTNHAMSWVRQAPGKGLELVSSISGNGRTTYYADSVKGRFTISRDISKNTLDLQMNSLRAEDTAVYYCAKDGGETLVDSRGQGTLVTVSSLESGGGGSFEQLQLQESGPGLVKPSETLSLTCTVSGDSISSGDYYWGWIRQPPGKGLEWIGHIYYSGVTYYNPSLKSRVTISVDTSRNQFSLKLSSVTAADTAVYYCTREDSSNWRSRGQGTLVTVSSTRQSFGLLDPKLCYLLDGILFIYGVILTALFLRVKFSRSADAPAYQQGQNQLYNELNLGRREEYDVLDKRRGRDPEMGGKPQRRKNPQEGLYNELQKDKMAEAYSEIGMKGERRRGKGHDGLYQGLSTATKDTYDALHMQALPPR

SEQ ID NO: 17412 - protein, 644 aa, Artificial Sequence
  Synthetic Polypeptide
MALPVTALLLPLALLLHAARPQLQLQESGPGLVKPSETLSLTCTVSGDSISSGDYYWGWIRQPPGKGLEWIGHIYYSGVTYYNPSLKSRVTISVDTSRNQFSLKLSSVTAADTAVYYCTREDSSNWRSRGQGTLVTVSSLESGGGGSFQVQLVESGGGLVQPGGSLRLSCAASGFTFTNHAMSWVRQAPGKGLELVSSISGNGRTTYYADSVKGRFTISRDISKNTLDLQMNSLRAEDTAVYYCAKDGGETLVDSRGQGTLVTVSSTRGSGIQNPDPAVYQLRDSKSSDKSVCLFTDFDSQTNVSQSKDSDVYITDKTVLDMRSMDFKSNSAVAWSNKSDFACANAFNNSIIPEDTFFPSPESSCDVKLVEKSFETDTNLNFQNLSVIGFRILLLKVAGFNLLMTLRLWSSRAKRSGSGVKQTLNFDLLKLAGDVESNPGPSRGHMTEYKPTVRLATRDDVPRAVRTLAAAFADYPATRHTVDPDRHIERVTELQELFLTRVGLDIGKVWVADDGAAVAVWTTPESVEAGAVFAEIGPRMAELSGSRLAAQQQMEGLLAPHRPKEPAWFLATVGVSPDHQGKGLGSAVVLPGVEAAERAGVPAFLETSAPRNLPFYERLGFTVTADVEVPEGPRTWCMTRKPGA

SEQ ID NO: 17413 - protein, 676 aa, Artificial Sequence
  Synthetic Polypeptide
MALPVTALLLPLALLLHAARPQLQLQESGPGLVKPSETLSLTCTVSGDSISSGDYYWGWIRQPPGKGLEWIGHIYYSGVTYYNPSLKSRVTISVDTSRNQFSLKLSSVTAADTAVYYCTREDSSNWRSRGQGTLVTVSSLESGGGGSFQVQLVESGGGLVQPGGSLRLSCAASGFTFTNHAMSWVRQAPGKGLELVSSISGNGRTTYYADSVKGRFTISRDISKNTLDLQMNSLRAEDTAVYYCAKDGGETLVDSRGQGTLVTVSSLEDLKNVFPPEVAVFEPSEAEISHTQKATLVCLATGFYPDHVELSWWVNGKEVHSGVSTDPQPLKEQPALNDSRYCLSSRLRVSATFWQNPRNHFRCQVQFYGLSENDEWTQDRAKPVTQIVSAEAWGRADCGFTSESYQQGVLSATILYEILLGKATLYAVLVSALVLMAMVKRKDSRGRAKRSGSGATNFSLLKQAGDVEENPGPTRGHMTEYKPTVRLATRDDVPRAVRTLAAAFADYPATRHTVDPDRHIERVTELQELFLTRVGLDIGKVWVADDGAAVAVWTTPESVEAGAVFAEIGPRMAELSGSRLAAQQQMEGLLAPHRPKEPAWFLATVGVSPDHQGKGLGSAVVLPGVEAAERAGVPAFLETSAPRNLPFYERLGFTVTADVEVPEGPRTWCMTRKPGA

SEQ ID NO: 17414 - protein, 726 aa, Artificial Sequence
  Synthetic Polypeptide
MALPVTALLLPLALLLHAARPQLQLQESGPGLVKPSETLSLTCTVSGDSISSGDYYWGWIRQPPGKGLEWIGHIYYSGVTYYNPSLKSRVTISVDTSRNQFSLKLSSVTAADTAVYYCTREDSSNWRSRGQGTLVTVSSLESGGGGSFQVQLVESGGGLVQPGGSLRLSCAASGFTFTNHAMSWVRQAPGKGLELVSSISGNGRTTYYADSVKGRFTISRDISKNTLDLQMNSLRAEDTAVYYCAKDGGETLVDSRGQGTLVTVSSTREQKLISEEDLGSGTPFPSLAPPIMLLVDGKQQMVVVCLVLDVAPPGLDSPIWFSAGNGSALDAFTYGPSPATDGTWTNLAHLSLPSEELASWEPLVCHTGPGAEGHSRSTQPMHLSGEASTARTCPQEPLRGTPGGALWLGVLRLLLFKLLLFDLLLTCSCLCDPAGPLPSPATTTRLRALGSHRLHPATETGGREATSSPRPQPRDRRWGDTPPGRKPGSPVRAKRSGSGVKQTLNFDLLKLAGDVESNPGPSRSRGHMTEYKPTVRLATRDDVPRAVRTLAAAFADYPATRHTVDPDRHIERVTELQELFLTRVGLDIGKVWVADDGAAVAVWTTPESVEAGAVFAEIGPRMAELSGSRLAAQQQMEGLLAPHRPKEPAWFLATVGVSPDHQGKGLGSAVVLPGVEAAERAGVPAFLETSAPRNLPFYERLGFTVTADVEVPEGPRTWCMTRKPGA

SEQ ID NO: 17415 - protein, 549 aa, Artificial Sequence; identical to SEQ ID NO: 17196
  Synthetic Polypeptide

SEQ ID NO: 17416 - protein, 319 aa, Artificial Sequence; identical to SEQ ID NO: 17197
  Synthetic Polypeptide

SEQ ID NO: 17417 - protein, 446 aa, Artificial Sequence
  Synthetic Polypeptide
MDWIWRILFLVGAATGAHSFQVQLVESGGGLVQPGGSLRLSCAASGFTFTNHAMSWVRQAPGKGLELVSSISGNGRTTYYADSVKGRFTISRDISKNTLDLQMNSLRAEDTAVYYCAKDGGETLVDSRGQGTLVTVSSTRIQNPDPAVYQLRDSKSSDKSVCLFTDFDSQTNVSQSKDSDVYITDKTVLDMRSMDFKSNSAVAWSNKSDFACANAFNNSIIPEDTFFPSPESSCDVKLVEKSFETDTNLNFQNLSVIGFRILLLKVAGFNLLMTLRLWSSRAKRSGSGVKQTLNFDLLKLAGDVESNPGPSRGHMAKPLSQEESTLIERATATINSIPISEDYSVASAALSSDGRIFTGVNVYHFTGGPCAELVVLGTAAAAAAGNLTCIVAIGNENRGILSPCGRCRQVLLDLHPGIKAIVKDSDGQPTAVGIRELLPSGYVWEG

SEQ ID NO: 17418 - protein, 280 aa, Artificial Sequence
  Synthetic Polypeptide
MDWIWRILFLVGAATGAHSFQVQLVESGGGLVQPGGSLRLSCAASGFTFTNHAMSWVRQAPGKGLELVSSISGNGRTTYYADSVKGRFTISRDISKNTLDLQMNSLRAEDTAVYYCAKDGGETLVDSRGQGTLVTVSSTRIQNPDPAVYQLRDSKSSDKSVCLFTDFDSQTNVSQSKDSDVYITDKTVLDMRSMDFKSNSAVAWSNKSDFACANAFNNSIIPEDTFFPSPESSCDVKLVEKSFETDTNLNFQNLSVIGFRILLLKVAGFNLLMTLRLWSS

SEQ ID NO: 17419 - protein, 567 aa, Artificial Sequence; identical to SEQ ID NO: 17200
  Synthetic Polypeptide

SEQ ID NO: 17420 - protein, 337 aa, Artificial Sequence; identical to SEQ ID NO: 17201
  Synthetic Polypeptide

SEQ ID NO: 17421 - protein, 458 aa, Artificial Sequence
  Synthetic Polypeptide
MDWIWRILFLVGAATGAHSFQVQLVESGGGLVQPGGSLRLSCAASGFTFTNHAMSWVRQAPGKGLELVSSISGNGRTTYYADSVKGRFTISRDISKNTLDLQMNSLRAEDTAVYYCAKDGGETLVDSRGQGTLVTVSSTREQKLISEEDGSGIQNPDPAVYQLRDSKSSDKSVCLFTDFDSQTNVSQSKDSDVYITDKCVLDMRSMDFKSNSAVAWSNKSDFACANAFNNSIIPEDTFFPSPESSCDVKLVEKSFETDTNLNFQNLSVIGFRILLLKVAGFNLLMTLRLWSSRAKRSGSGVKQTLNFDLLKLAGDVESNPGPSRGHMAKPLSQEESTLIERATATINSIPISEDYSVASAALSSDGRIFTGVNVYHFTGGPCAELVVLGTAAAAAAGNLTCIVAIGNENRGILSPCGRCRQVLLDLHPGIKAIVKDSDGQPTAVGIRELLPSGYVWEG

SEQ ID NO: 17422 - protein, 292 aa, Artificial Sequence
  Synthetic Polypeptide
MDWIWRILFLVGAATGAHSFQVQLVESGGGLVQPGGSLRLSCAASGFTFTNHAMSWVRQAPGKGLELVSSISGNGRTTYYADSVKGRFTISRDISKNTLDLQMNSLRAEDTAVYYCAKDGGETLVDSRGQGTLVTVSSTREQKLISEEDGSGIQNPDPAVYQLRDSKSSDKSVCLFTDFDSQTNVSQSKDSDVYITDKCVLDMRSMDFKSNSAVAWSNKSDFACANAFNNSIIPEDTFFPSPESSCDVKLVEKSFETDTNLNFQNLSVIGFRILLLKVAGFNLLMTLRLWSS

SEQ ID NO: 17423 - protein, 644 aa, Artificial Sequence
  Synthetic Polypeptide
MALPVTALLLPLALLLHAARPQLQLQESGPGLVKPSETLSLTCTVSGDSISSGDYYWGWIRQPPGKGLEWIGHIYYSGVTYYNPSLKSRVTISVDTSRNQFSLKLSSVTAADTAVYYCTREDSSNWRSRGQGTLVTVSSLESGGGGSFQVQLVESGGGLVQPGGSLRLSCAASGFTFTNHAMSWVRQAPGKGLELVSSISGNGRTTYYADSVKGRFTISRDISKNTLDLQMNSLRAEDTAVYYCAKDGGETLVDSRGQGTLVTVSSTRGSGIQNPDPAVYQLRDSKSSDKSVCLFTDFDSQTNVSQSKDSDVYITDKTVLDMRSMDFKSNSAVAWSNKSDFACANAFNNSIIPEDTFFPSSDVPCDVKLVEKSFETDTNLNFQNLSVIGFRILLLKVAGFNLLMTLRLWSSRAKRSGSGVKQTLNFDLLKLAGDVESNPGPSRGHMTEYKPTVRLATRDDVPRAVRTLAAAFADYPATRHTVDPDRHIERVTELQELFLTRVGLDIGKVWVADDGAAVAVWTTPESVEAGAVFAEIGPRMAELSGSRLAAQQQMEGLLAPHRPKEPAWFLATVGVSPDHQGKGLGSAVVLPGVEAAERAGVPAFLETSAPRNLPFYERLGFTVTADVEVPEGPRTWCMTRKPGA

SEQ ID NO: 17424 - protein, 676 aa, Artificial Sequence
  Synthetic Polypeptide
MALPVTALLLPLALLLHAARPQLQLQESGPGLVKPSETLSLTCTVSGDSISSGDYYWGWIRQPPGKGLEWIGHIYYSGVTYYNPSLKSRVTISVDTSRNQFSLKLSSVTAADTAVYYCTREDSSNWRSRGQGTLVTVSSLESGGGGSFQVQLVESGGGLVQPGGSLRLSCAASGFTFTNHAMSWVRQAPGKGLELVSSISGNGRTTYYADSVKGRFTISRDISKNTLDLQMNSLRAEDTAVYYCAKDGGETLVDSRGQGTLVTVSSLEDLKNVFPPEVAVFEPSKAEIAHTQKATLVCLATGFYPDHVELSWWVNGKEVHSGVSTDPQPLKEQPALNDSRYCLSSRLRVSATFWQNPRNHFRCQVQFYGLSENDEWTQDRAKPVTQIVSAEAWGRADCGITSASYHQGVLSATILYEILLGKATLYAVLVSALVLMAMVKRKDSRGRAKRSGSGATNFSLLKQAGDVEENPGPTRGHMTEYKPTVRLATRDDVPRAVRTLAAAFADYPATRHTVDPDRHIERVTELQELFLTRVGLDIGKVWVADDGAAVAVWTTPESVEAGAVFAEIGPRMAELSGSRLAAQQQMEGLLAPHRPKEPAWFLATVGVSPDHQGKGLGSAVVLPGVEAAERAGVPAFLETSAPRNLPFYERLGFTVTADVEVPEGPRTWCMTRKPGA

SEQ ID NO: 17425 - protein, 699 aa, Artificial Sequence
  Synthetic Polypeptide
MALPVTALLLPLALLLHAARPQLQLQESGPGLVKPSETLSLTCTVSGDSISSGDYYWGWIRQPPGKGLEWIGHIYYSGVTYYNPSLKSRVTISVDTSRNQFSLKLSSVTAADTAVYYCTREDSSNWRSRGQGTLVTVSSLESGGGGSFQVQLVESGGGLVQPGGSLRLSCAASGFTFTNHAMSWVRQAPGKGLELVSSISGNGRTTYYADSVKGRFTISRDISKNTLDLQMNSLRAEDTAVYYCAKDGGETLVDSRGQGTLVTVSSTRGSGGGGSGGGGSGDGNEEMGGITQTPYKVSISGTTVILTCPQYPGSEILWQHNDKNIGGDEDDKNIGSDEDHLSLKEFSELEQSGYYVCYPRGSKPEDANFYLYLRARVCENCMEMDVMSVATIVIVDICITGGLLLLVYYWSKNRKAKAKPVTRGAGAGGRQRGQNKERPPPVPNPDYEPIRKGQRDLYSGLNQRRIRAKRSGSGVKQTLNFDLLKLAGDVESNPGPSRGHMTEYKPTVRLATRDDVPRAVRTLAAAFADYPATRHTVDPDRHIERVTELQELFLTRVGLDIGKVWVADDGAAVAVWTTPESVEAGAVFAEIGPRMAELSGSRLAAQQQMEGLLAPHRPKEPAWFLATVGVSPDHQGKGLGSAVVLPGVEAAERAGVPAFLETSAPRNLPFYERLGFTVTADVEVPEGPRTWCMTRKPGA

SEQ ID NO: 17426 - protein, 664 aa, Artificial Sequence
  Synthetic Polypeptide
MALPVTALLLPLALLLHAARPQLQLQESGPGLVKPSETLSLTCTVSGDSISSGDYYWGWIRQPPGKGLEWIGHIYYSGVTYYNPSLKSRVTISVDTSRNQFSLKLSSVTAADTAVYYCTREDSSNWRSRGQGTLVTVSSLESGGGGSFQVQLVESGGGLVQPGGSLRLSCAASGFTFTNHAMSWVRQAPGKGLELVSSISGNGRTTYYADSVKGRFTISRDISKNTLDLQMNSLRAEDTAVYYCAKDGGETLVDSRGQGTLVTVSSTRGSGGGGSGGGGSGFKIPIEELEDRVFVNCNTSITWVEGTVGTLLSDITRLDLGKRILDPRGIYRCNGTDIYKDKESTVQVHYRMCQSCVELDPATVAGIIVTDVIATLLLALGVFCFAGHETGRLSGAADTQALLRNDQVYQPLRDRDDAQYSHLGGNWARNKRAKRSGSGVKQTLNFDLLKLAGDVESNPGPSRGHMTEYKPTVRLATRDDVPRAVRTLAAAFADYPATRHTVDPDRHIERVTELQELFLTRVGLDIGKVWVADDGAAVAVWTTPESVEAGAVFAEIGPRMAELSGSRLAAQQQMEGLLAPHRPKEPAWFLATVGVSPDHQGKGLGSAVVLPGVEAAERAGVPAFLETSAPRNLPFYERLGFTVTADVEVPEGPRTWCMTRKPGA

SEQ ID NO: 17427 - protein, 674 aa, Artificial Sequence
  Synthetic Polypeptide
MALPVTALLLPLALLLHAARPQLQLQESGPGLVKPSETLSLTCTVSGDSISSGDYYWGWIRQPPGKGLEWIGHIYYSGVTYYNPSLKSRVTISVDTSRNQFSLKLSSVTAADTAVYYCTREDSSNWRSRGQGTLVTVSSLESGGGGSFQVQLVESGGGLVQPGGSLRLSCAASGFTFTNHAMSWVRQAPGKGLELVSSISGNGRTTYYADSVKGRFTISRDISKNTLDLQMNSLRAEDTAVYYCAKDGGETLVDSRGQGTLVTVSSTRGSGGGGSGGGGSGQSIKGNHLVKVYDYQEDGSVLLTCDAEAKNITWFKDGKMIGFLTEDKKKWNLGSNAKDPRGMYQCKGSQNKSKPLQVYYRMCQNCIELNAATISGFLFAEIVSIFVLAVGVYFIAGQDGVRQSRASDKQTLLPNDQLYQPLKDREDDQYSHLQGNQLRRNRAKRSGSGVKQTLNFDLLKLAGDVESNPGPSRGHMTEYKPTVRLATRDDVPRAVRTLAAAFADYPATRHTVDPDRHIERVTELQELFLTRVGLDIGKVWVADDGAAVAVWTTPESVEAGAVFAEIGPRMAELSGSRLAAQQQMEGLLAPHRPKEPAWFLATVGVSPDHQGKGLGSAVVLPGVEAAERAGVPAFLETSAPRNLPFYERLGFTVTADVEVPEGPRTWCMTRKPGA

SEQ ID NO: 17428 - protein, 657 aa, Artificial Sequence
  Synthetic Polypeptide
MALPVTALLLPLALLLHAARPQLQLQESGPGLVKPSETLSLTCTVSGDSISSGDYYWGWIRQPPGKGLEWIGHIYYSGVTYYNPSLKSRVTISVDTSRNQFSLKLSSVTAADTAVYYCTREDSSNWRSRGQGTLVTVSSLESGGGGSFQVQLVESGGGLVQPGGSLRLSCAASGFTFTNHAMSWVRQAPGKGLELVSSISGNGRTTYYADSVKGRFTISRDISKNTLDLQMNSLRAEDTAVYYCAKDGGETLVDSRGQGTLVTVSSTRGSGGGGSGGGGSGQSFGLLDPKLCYLLDGILFIYGVILTALFLRVKFSRSADAPAYQQGQNQLYNELNLGRREEYDVLDKRRGRDPEMGGKPQRRKNPQEGLYNELQKDKMAEAYSEIGMKGERRRGKGHDGLYQGLSTATKDTYDALHMQALPPRRAKRSGSGVKQTLNFDLLKLAGDVESNPGPSRGHMTEYKPTVRLATRDDVPRAVRTLAAAFADYPATRHTVDPDRHIERVTELQELFLTRVGLDIGKVWVADDGAAVAVWTTPESVEAGAVFAEIGPRMAELSGSRLAAQQQMEGLLAPHRPKEPAWFLATVGVSPDHQGKGLGSAVVLPGVEAAERAGVPAFLETSAPRNLPFYERLGFTVTADVEVPEGPRTWCMTRKPGA

SEQ ID NO: 17429 - protein, 865 aa, Artificial Sequence
  Synthetic Polypeptide
MALPVTALLLPLALLLHAARPQLQLQESGPGLVKPSETLSLTCTVSGDSISSGDYYWGWIRQPPGKGLEWIGHIYYSGVTYYNPSLKSRVTISVDTSRNQFSLKLSSVTAADTAVYYCTREDSSNWRSRGQGTLVTVSSLEGQPKANPTVTLFPPSSEELQANKATLVCLISDFYPGAVTVAWKADGSPVKAGVETTKPSKQSNNKYAASSYLSLTPEQWKSHRSYSCQVTHEGSTVEKTVAPTECSGRADCGFTSESYQQGVLSATILYEILLGKATLYAVLVSALVLMAMVKRKDSRGRAKRSGSGATNFSLLKQAGDVEENPGPTSMDWIWRILFLVGAATGAHSFQVQLVESGGGLVQPGGSLRLSCAASGFTFTNHAMSWVRQAPGKGLELVSSISGNGRTTYYADSVKGRFTISRDISKNTLDLQMNSLRAEDTAVYYCAKDGGETLVDSRGQGTLVTVSSTRASTKGPSVFPLAPSSKSTSGGTAALGCLVKDYFPEPVTVSWNSGALTSGVHTFPAVLQSSGLYSLSSVVTVPSSSLGTQTYICNVNHKPSNTKVDKRVEPKSCIPEDTFFPSPESSCDVKLVEKSFETDTNLNFQNLSVIGFRILLLKVAGFNLLMTLRLWSSRAKRSGSGVKQTLNFDLLKLAGDVESNPGPSRGHMTEYKPTVRLATRDDVPRAVRTLAAAFADYPATRHTVDPDRHIERVTELQELFLTRVGLDIGKVWVADDGAAVAVWTTPESVEAGAVFAEIGPRMAELSGSRLAAQQQMEGLLAPHRPKEPAWFLATVGVSPDHQGKGLGSAVVLPGVEAAERAGVPAFLETSAPRNLPFYERLGFTVTADVEVPEGPRTWCMTRKPGA

SEQ ID NO: 17430 - protein, 632 aa, Artificial Sequence; identical to SEQ ID NO: 17403
  Synthetic Polypeptide

SEQ ID NO: 17431 - protein, 660 aa, Artificial Sequence
  Synthetic Polypeptide
MALPVTALLLPLALLLHAARPQLQLQESGPGLVKPSETLSLTCTVSGDSISSGDYYWGWIRQPPGKGLEWIGHIYYSGVTYYNPSLKSRVTISVDTSRNQFSLKLSSVTAADTAVYYCTREDSSNWRSRGQGTLVTVSSLEGSGRADCGFTSESYQQGVLSATILYEILLGKATLYAVLVSALVLMAMVKRKDSRGRAKRSGSGATNFSLLKQAGDVEENPGPTSMDWIWRILFLVGAATGAHSFQVQLVESGGGLVQPGGSLRLSCAASGFTFTNHAMSWVRQAPGKGLELVSSISGNGRTTYYADSVKGRFTISRDISKNTLDLQMNSLRAEDTAVYYCAKDGGETLVDSRGQGTLVTVSSTRGSIPEDTFFPSPESSCDVKLVEKSFETDTNLNFQNLSVIGFRILLLKVAGFNLLMTLRLWSSRAKRSGSGVKQTLNFDLLKLAGDVESNPGPSRGHMTEYKPTVRLATRDDVPRAVRTLAAAFADYPATRHTVDPDRHIERVTELQELFLTRVGLDIGKVWVADDGAAVAVWTTPESVEAGAVFAEIGPRMAELSGSRLAAQQQMEGLLAPHRPKEPAWFLATVGVSPDHQGKGLGSAVVLPGVEAAERAGVPAFLETSAPRNLPFYERLGFTVTADVEVPEGPRTWCMTRKPGA

SEQ ID NO: 17432 - protein, 427 aa, Artificial Sequence
  Synthetic Polypeptide
MALPVTALLLPLALLLHAARPQLQLQESGPGLVKPSETLSLTCTVSGDSISSGDYYWGWIRQPPGKGLEWIGHIYYSGVTYYNPSLKSRVTISVDTSRNQFSLKLSSVTAADTAVYYCTREDSSNWRSRGQGTLVTVSSLEGSGRADCGFTSESYQQGVLSATILYEILLGKATLYAVLVSALVLMAMVKRKDSRGRAKRSGSGATNFSLLKQAGDVEENPGPTSMDWIWRILFLVGAATGAHSFQVQLVESGGGLVQPGGSLRLSCAASGFTFTNHAMSWVRQAPGKGLELVSSISGNGRTTYYADSVKGRFTISRDISKNTLDLQMNSLRAEDTAVYYCAKDGGETLVDSRGQGTLVTVSSTRGSIPEDTFFPSPESSCDVKLVEKSFETDTNLNFQNLSVIGFRILLLKVAGFNLLMTLRLWSS

SEQ ID NO: 17433 - protein, 669 aa, Artificial Sequence
  Synthetic Polypeptide
MALPVTALLLPLALLLHAARPQLQLQESGPGLVKPSETLSLTCTVSGDSISSGDYYWGWIRQPPGKGLEWIGHIYYSGVTYYNPSLKSRVTISVDTSRNQFSLKLSSVTAADTAVYYCTREDSSNWRSRGQGTLVTVSSLEDKTHTCPPCPAGRADCGFTSESYQQGVLSATILYEILLGKATLYAVLVSALVLMAMVKRKDSRGRAKRSGSGATNFSLLKQAGDVEENPGPTSMDWIWRILFLVGAATGAHSFQVQLVESGGGLVQPGGSLRLSCAASGFTFTNHAMSWVRQAPGKGLELVSSISGNGRTTYYADSVKGRFTISRDISKNTLDLQMNSLRAEDTAVYYCAKDGGETLVDSRGQGTLVTVSSTRGSIPEDTFFPSPESSCDVKLVEKSFETDTNLNFQNLSVIGFRILLLKVAGFNLLMTLRLWSSRAKRSGSGVKQTLNFDLLKLAGDVESNPGPSRGHMTEYKPTVRLATRDDVPRAVRTLAAAFADYPATRHTVDPDRHIERVTELQELFLTRVGLDIGKVWVADDGAAVAVWTTPESVEAGAVFAEIGPRMAELSGSRLAAQQQMEGLLAPHRPKEPAWFLATVGVSPDHQGKGLGSAVVLPGVEAAERAGVPAFLETSAPRNLPFYERLGFTVTADVEVPEGPRTWCMTRKPGA

SEQ ID NO: 17434 - protein, 669 aa, Artificial Sequence
  Synthetic Polypeptide
MALPVTALLLPLALLLHAARPQLQLQESGPGLVKPSETLSLTCTVSGDSISSGDYYWGWIRQPPGKGLEWIGHIYYSGVTYYNPSLKSRVTISVDTSRNQFSLKLSSVTAADTAVYYCTREDSSNWRSRGQGTLVTVSSLEGSGRADCGFTSESYQQGVLSATILYEILLGKATLYAVLVSALVLMAMVKRKDSRGRAKRSGSGATNFSLLKQAGDVEENPGPTSMDWIWRILFLVGAATGAHSFQVQLVESGGGLVQPGGSLRLSCAASGFTFTNHAMSWVRQAPGKGLELVSSISGNGRTTYYADSVKGRFTISRDISKNTLDLQMNSLRAEDTAVYYCAKDGGETLVDSRGQGTLVTVSSTRDKTHTCPPCPAIPEDTFFPSPESSCDVKLVEKSFETDTNLNFQNLSVIGFRILLLKVAGFNLLMTLRLWSSRAKRSGSGVKQTLNFDLLKLAGDVESNPGPSRGHMTEYKPTVRLATRDDVPRAVRTLAAAFADYPATRHTVDPDRHIERVTELQELFLTRVGLDIGKVWVADDGAAVAVWTTPESVEAGAVFAEIGPRMAELSGSRLAAQQQMEGLLAPHRPKEPAWFLATVGVSPDHQGKGLGSAVVLPGVEAAERAGVPAFLETSAPRNLPFYERLGFTVTADVEVPEGPRTWCMTRKPGA

SEQ ID NO: 17435 - protein, 678 aa, Artificial Sequence
  Synthetic Polypeptide
MALPVTALLLPLALLLHAARPQLQLQESGPGLVKPSETLSLTCTVSGDSISSGDYYWGWIRQPPGKGLEWIGHIYYSGVTYYNPSLKSRVTISVDTSRNQFSLKLSSVTAADTAVYYCTREDSSNWRSRGQGTLVTVSSLEDKTHTCPPCPAGRADCGFTSESYQQGVLSATILYEILLGKATLYAVLVSALVLMAMVKRKDSRGRAKRSGSGATNFSLLKQAGDVEENPGPTSMDWIWRILFLVGAATGAHSFQVQLVESGGGLVQPGGSLRLSCAASGFTFTNHAMSWVRQAPGKGLELVSSISGNGRTTYYADSVKGRFTISRDISKNTLDLQMNSLRAEDTAVYYCAKDGGETLVDSRGQGTLVTVSSTRDKTHTCPPCPAIPEDTFFPSPESSCDVKLVEKSFETDTNLNFQNLSVIGFRILLLKVAGFNLLMTLRLWSSRAKRSGSGVKQTLNFDLLKLAGDVESNPGPSRGHMTEYKPTVRLATRDDVPRAVRTLAAAFADYPATRHTVDPDRHIERVTELQELFLTRVGLDIGKVWVADDGAAVAVWTTPESVEAGAVFAEIGPRMAELSGSRLAAQQQMEGLLAPHRPKEPAWFLATVGVSPDHQGKGLGSAVVLPGVEAAERAGVPAFLETSAPRNLPFYERLGFTVTADVEVPEGPRTWCMTRKPGA

SEQ ID NO: 17436 - protein, 445 aa, Artificial Sequence
  Synthetic Polypeptide
MALPVTALLLPLALLLHAARPQLQLQESGPGLVKPSETLSLTCTVSGDSISSGDYYWGWIRQPPGKGLEWIGHIYYSGVTYYNPSLKSRVTISVDTSRNQFSLKLSSVTAADTAVYYCTREDSSNWRSRGQGTLVTVSSLEDKTHTCPPCPAGRADCGFTSESYQQGVLSATILYEILLGKATLYAVLVSALVLMAMVKRKDSRGRAKRSGSGATNFSLLKQAGDVEENPGPTSMDWIWRILFLVGAATGAHSFQVQLVESGGGLVQPGGSLRLSCAASGFTFTNHAMSWVRQAPGKGLELVSSISGNGRTTYYADSVKGRFTISRDISKNTLDLQMNSLRAEDTAVYYCAKDGGETLVDSRGQGTLVTVSSTRDKTHTCPPCPAIPEDTFFPSPESSCDVKLVEKSFETDTNLNFQNLSVIGFRILLLKVAGFNLLMTLRLWSS

SEQ ID NO: 17437 - protein, 436 aa, Artificial Sequence
  Synthetic Polypeptide
MALPVTALLLPLALLLHAARPQLQLQESGPGLVKPSETLSLTCTVSGDSISSGDYYWGWIRQPPGKGLEWIGHIYYSGVTYYNPSLKSRVTISVDTSRNQFSLKLSSVTAADTAVYYCTREDSSNWRSRGQGTLVTVSSLEGSGRADCGFTSESYQQGVLSATILYEILLGKATLYAVLVSALVLMAMVKRKDSRGRAKRSGSGATNFSLLKQAGDVEENPGPTSMDWIWRILFLVGAATGAHSFQVQLVESGGGLVQPGGSLRLSCAASGFTFTNHAMSWVRQAPGKGLELVSSISGNGRTTYYADSVKGRFTISRDISKNTLDLQMNSLRAEDTAVYYCAKDGGETLVDSRGQGTLVTVSSTRDKTHTCPPCPAIPEDTFFPSPESSCDVKLVEKSFETDTNLNFQNLSVIGFRILLLKVAGFNLLMTLRLWSS

SEQ ID NO: 17438 - protein, 887 aa, Artificial Sequence
  Synthetic Polypeptide
MALPVTALLLPLALLLHAARPQLQLQESGPGLVKPSETLSLTCTVSGDSISSGDYYWGWIRQPPGKGLEWIGHIYYSGVTYYNPSLKSRVTISVDTSRNQFSLKLSSVTAADTAVYYCTREDSSNWRSRGQGTLVTVSSLEGQPKANPTVTLFPPSSEELQANKATLVCLISDFYPGAVTVAWKADGSPVKAGVETTKPSKQSNNKYAASSYLSLTPEQWKSHRSYSCQVTHEGSTVEKTVAPTECSPIKTDVITMDPKDNCSKDANDTLLLQLTNTSAYYMYLLLLLKSVVYFAIITCCLLRRTAFCCNGEKSRAKRSGSGATNFSLLKQAGDVEENPGPTSMDWIWRILFLVGAATGAHSFQVQLVESGGGLVQPGGSLRLSCAASGFTFTNHAMSWVRQAPGKGLELVSSISGNGRTTYYADSVKGRFTISRDISKNTLDLQMNSLRAEDTAVYYCAKDGGETLVDSRGQGTLVTVSSTRASTKGPSVFPLAPSSKSTSGGTAALGCLVKDYFPEPVTVSWNSGALTSGVHTFPAVLQSSGLYSLSSVVTVPSSSLGTQTYICNVNHKPSNTKVDKRVEPKSCEVKTDSTDHVKPKETENTKQPSKSCHKPKAIVHTEKVNMMSLTVLGLRMLFAKTVAVNFLLTAKLFFLRAKRSGSGVKQTLNFDLLKLAGDVESNPGPSRGHMTEYKPTVRLATRDDVPRAVRTLAAAFADYPATRHTVDPDRHIERVTELQELFLTRVGLDIGKVWVADDGAAVAVWTTPESVEAGAVFAEIGPRMAELSGSRLAAQQQMEGLLAPHRPKEPAWFLATVGVSPDHQGKGLGSAVVLPGVEAAERAGVPAFLETSAPRNLPFYERLGFTVTADVEVPEGPRTWCMTRKPGA

SEQ ID NO: 17439 - protein, 654 aa, Artificial Sequence; identical to SEQ ID NO: 17401
  Synthetic Polypeptide

SEQ ID NO: 17440 - protein, 682 aa, Artificial Sequence
  Synthetic Polypeptide
MALPVTALLLPLALLLHAARPQLQLQESGPGLVKPSETLSLTCTVSGDSISSGDYYWGWIRQPPGKGLEWIGHIYYSGVTYYNPSLKSRVTISVDTSRNQFSLKLSSVTAADTAVYYCTREDSSNWRSRGQGTLVTVSSLEGSPIKTDVITMDPKDNCSKDANDTLLLQLTNTSAYYMYLLLLLKSVVYFAIITCCLLRRTAFCCNGEKSRAKRSGSGATNFSLLKQAGDVEENPGPTSMDWIWRILFLVGAATGAHSFQVQLVESGGGLVQPGGSLRLSCAASGFTFTNHAMSWVRQAPGKGLELVSSISGNGRTTYYADSVKGRFTISRDISKNTLDLQMNSLRAEDTAVYYCAKDGGETLVDSRGQGTLVTVSSTRGSEVKTDSTDHVKPKETENTKQPSKSCHKPKAIVHTEKVNMMSLTVLGLRMLFAKTVAVNFLLTAKLFFLRAKRSGSGVKQTLNFDLLKLAGDVESNPGPSRGHMTEYKPTVRLATRDDVPRAVRTLAAAFADYPATRHTVDPDRHIERVTELQELFLTRVGLDIGKVWVADDGAAVAVWTTPESVEAGAVFAEIGPRMAELSGSRLAAQQQMEGLLAPHRPKEPAWFLATVGVSPDHQGKGLGSAVVLPGVEAAERAGVPAFLETSAPRNLPFYERLGFTVTADVEVPEGPRTWCMTRKPGA

SEQ ID NO: 17441 - protein, 449 aa, Artificial Sequence
  Synthetic Polypeptide
MALPVTALLLPLALLLHAARPQLQLQESGPGLVKPSETLSLTCTVSGDSISSGDYYWGWIRQPPGKGLEWIGHIYYSGVTYYNPSLKSRVTISVDTSRNQFSLKLSSVTAADTAVYYCTREDSSNWRSRGQGTLVTVSSLEGSPIKTDVITMDPKDNCSKDANDTLLLQLTNTSAYYMYLLLLLKSVVYFAIITCCLLRRTAFCCNGEKSRAKRSGSGATNFSLLKQAGDVEENPGPTSMDWIWRILFLVGAATGAHSFQVQLVESGGGLVQPGGSLRLSCAASGFTFTNHAMSWVRQAPGKGLELVSSISGNGRTTYYADSVKGRFTISRDISKNTLDLQMNSLRAEDTAVYYCAKDGGETLVDSRGQGTLVTVSSTRGSEVKTDSTDHVKPKETENTKQPSKSCHKPKAIVHTEKVNMMSLTVLGLRMLFAKTVAVNFLLTAKLFFL

SEQ ID NO: 17442 - protein, 691 aa, Artificial Sequence
  Synthetic Polypeptide
MALPVTALLLPLALLLHAARPQLQLQESGPGLVKPSETLSLTCTVSGDSISSGDYYWGWIRQPPGKGLEWIGHIYYSGVTYYNPSLKSRVTISVDTSRNQFSLKLSSVTAADTAVYYCTREDSSNWRSRGQGTLVTVSSLEDKTHTCPPCPAPIKTDVITMDPKDNCSKDANDTLLLQLTNTSAYYMYLLLLLKSVVYFAIITCCLLRRTAFCCNGEKSRAKRSGSGATNFSLLKQAGDVEENPGPTSMDWIWRILFLVGAATGAHSFQVQLVESGGGLVQPGGSLRLSCAASGFTFTNHAMSWVRQAPGKGLELVSSISGNGRTTYYADSVKGRFTISRDISKNTLDLQMNSLRAEDTAVYYCAKDGGETLVDSRGQGTLVTVSSTRGSEVKTDSTDHVKPKETENTKQPSKSCHKPKAIVHTEKVNMMSLTVLGLRMLFAKTVAVNFLLTAKLFFLRAKRSGSGVKQTLNFDLLKLAGDVESNPGPSRGHMTEYKPTVRLATRDDVPRAVRTLAAAFADYPATRHTVDPDRHIERVTELQELFLTRVGLDIGKVWVADDGAAVAVWTTPESVEAGAVFAEIGPRMAELSGSRLAAQQQMEGLLAPHRPKEPAWFLATVGVSPDHQGKGLGSAVVLPGVEAAERAGVPAFLETSAPRNLPFYERLGFTVTADVEVPEGPRTWCMTRKPGA

SEQ ID NO: 17443 - protein, 691 aa, Artificial Sequence
  Synthetic Polypeptide
MALPVTALLLPLALLLHAARPQLQLQESGPGLVKPSETLSLTCTVSGDSISSGDYYWGWIRQPPGKGLEWIGHIYYSGVTYYNPSLKSRVTISVDTSRNQFSLKLSSVTAADTAVYYCTREDSSNWRSRGQGTLVTVSSLEGSPIKTDVITMDPKDNCSKDANDTLLLQLTNTSAYYMYLLLLLKSVVYFAIITCCLLRRTAFCCNGEKSRAKRSGSGATNFSLLKQAGDVEENPGPTSMDWIWRILFLVGAATGAHSFQVQLVESGGGLVQPGGSLRLSCAASGFTFTNHAMSWVRQAPGKGLELVSSISGNGRTTYYADSVKGRFTISRDISKNTLDLQMNSLRAEDTAVYYCAKDGGETLVDSRGQGTLVTVSSTRDKTHTCPPCPAEVKTDSTDHVKPKETENTKQPSKSCHKPKAIVHTEKVNMMSLTVLGLRMLFAKTVAVNFLLTAKLFFLRAKRSGSGVKQTLNFDLLKLAGDVESNPGPSRGHMTEYKPTVRLATRDDVPRAVRTLAAAFADYPATRHTVDPDRHIERVTELQELFLTRVGLDIGKVWVADDGAAVAVWTTPESVEAGAVFAEIGPRMAELSGSRLAAQQQMEGLLAPHRPKEPAWFLATVGVSPDHQGKGLGSAVVLPGVEAAERAGVPAFLETSAPRNLPFYERLGFTVTADVEVPEGPRTWCMTRKPGA

SEQ ID NO: 17444 - protein, 700 aa, Artificial Sequence
  Synthetic Polypeptide
MALPVTALLLPLALLLHAARPQLQLQESGPGLVKPSETLSLTCTVSGDSISSGDYYWGWIRQPPGKGLEWIGHIYYSGVTYYNPSLKSRVTISVDTSRNQFSLKLSSVTAADTAVYYCTREDSSNWRSRGQGTLVTVSSLEDKTHTCPPCPAPIKTDVITMDPKDNCSKDANDTLLLQLTNTSAYYMYLLLLLKSVVYFAIITCCLLRRTAFCCNGEKSRAKRSGSGATNFSLLKQAGDVEENPGPTSMDWIWRILFLVGAATGAHSFQVQLVESGGGLVQPGGSLRLSCAASGFTFTNHAMSWVRQAPGKGLELVSSISGNGRTTYYADSVKGRFTISRDISKNTLDLQMNSLRAEDTAVYYCAKDGGETLVDSRGQGTLVTVSSTRDKTHTCPPCPAEVKTDSTDHVKPKETENTKQPSKSCHKPKAIVHTEKVNMMSLTVLGLRMLFAKTVAVNFLLTAKLFFLRAKRSGSGVKQTLNFDLLKLAGDVESNPGPSRGHMTEYKPTVRLATRDDVPRAVRTLAAAFADYPATRHTVDPDRHIERVTELQELFLTRVGLDIGKVWVADDGAAVAVWTTPESVEAGAVFAEIGPRMAELSGSRLAAQQQMEGLLAPHRPKEPAWFLATVGVSPDHQGKGLGSAVVLPGVEAAERAGVPAFLETSAPRNLPFYERLGFTVTADVEVPEGPRTWCMTRKPGA

SEQ ID NO: 17445 - protein, 467 aa, Artificial Sequence
  Synthetic Polypeptide
MALPVTALLLPLALLLHAARPQLQLQESGPGLVKPSETLSLTCTVSGDSISSGDYYWGWIRQPPGKGLEWIGHIYYSGVTYYNPSLKSRVTISVDTSRNQFSLKLSSVTAADTAVYYCTREDSSNWRSRGQGTLVTVSSLEDKTHTCPPCPAPIKTDVITMDPKDNCSKDANDTLLLQLTNTSAYYMYLLLLLKSVVYFAIITCCLLRRTAFCCNGEKSRAKRSGSGATNFSLLKQAGDVEENPGPTSMDWIWRILFLVGAATGAHSFQVQLVESGGGLVQPGGSLRLSCAASGFTFTNHAMSWVRQAPGKGLELVSSISGNGRTTYYADSVKGRFTISRDISKNTLDLQMNSLRAEDTAVYYCAKDGGETLVDSRGQGTLVTVSSTRDKTHTCPPCPAEVKTDSTDHVKPKETENTKQPSKSCHKPKAIVHTEKVNMMSLTVLGLRMLFAKTVAVNFLLTAKLFFL

SEQ ID NO: 17446 - protein, 728 aa, Artificial Sequence
  Synthetic Polypeptide
MALPVTALLLPLALLLHAARPQLQLQESGPGLVKPSETLSLTCTVSGDSISSGDYYWGWIRQPPGKGLEWIGHIYYSGVTYYNPSLKSRVTISVDTSRNQFSLKLSSVTAADTAVYYCTREDSSNWRSRGQGTLVTVSSLESGGGGSFEVQLLESGGGLIQPGGSLRLSCAASGFTFSSHAMTWVRQAPGKGLEWVSAISGSGDYTHYADSVKGRFTISRDNSKNTVYLQMNSLRAEDSAVYYCAKDEDGGSLLGHRGQGTLVTVSSTREQKLISEEDLAKPTTTPAPRPPTPAPTIASQPLSLRPEACRPAAGGAVHTRGLDFACDIYIWAPLAGTCGVLLLSLVITLYCKRGRKKLLYIFKQPFMRPVQTTQEEDGCSCRFPEEEEGGCELRVKFSRSADAPAYQQGQNQLYNELNLGRREEYDVLDKRRGRDPEMGGKPRRKNPQEGLYNELQKDKMAEAYSEIGMKGERRRGKGHDGLYQGLSTATKDTYDALHMQALPPRSSGSGEGRGSLLTCGDVEENPGPHMTEYKPTVRLATRDDVPRAVRTLAAAFADYPATRHTVDPDRHIERVTELQELFLTRVGLDIGKVWVADDGAAVAVWTTPESVEAGAVFAEIGPRMAELSGSRLAAQQQMEGLLAPHRPKEPAWFLATVGVSPDHQGKGLGSAVVLPGVEAAERAGVPAFLETSAPRNLPFYERLGFTVTADVEVPEGPRTWCMTRKPGA

SEQ ID NO: 17447 - protein, 722 aa, Artificial Sequence
  Synthetic Polypeptide
MALPVTALLLPLALLLHAARPQLQLQESGPGLVKPSETLSLTCTVSGDSISSGDYYWGWIRQPPGKGLEWIGHIYYSGVTYYNPSLKSRVTISVDTSRNQFSLKLSSVTAADTAVYYCTREDSSNWRSRGQGTLVTVSSLESGGGGSFEVQLLESGGGLIQPGGSLRLSCAASGFTFSSHAMTWVRQAPGKGLEWVSAISGSGDYTHYADSVKGRFTISRDNSKNTVYLQMNSLRAEDSAVYYCAKDEDGGSLLGHRGQGTLVTVSSTREQKLISEEDLKIEVMYPPPYLDNEKSNGTIIHVKGKHLCPSPLFPGPSKPFWVLVVVGGVLACYSLLVTVAFIIFWVRSKRSRLLHSDYMNMTPRRPGPTRKHYQPYAPPRDFAAYRSRVKFSRSADAPAYQQGQNQLYNELNLGRREEYDVLDKRRGRDPEMGGKPRRKNPQEGLYNELQKDKMAEAYSEIGMKGERRRGKGHDGLYQGLSTATKDTYDALHMQALPPRSSGSGEGRGSLLTCGDVEENPGPHMTEYKPTVRLATRDDVPRAVRTLAAAFADYPATRHTVDPDRHIERVTELQELFLTRVGLDIGKVWVADDGAAVAVWTTPESVEAGAVFAEIGPRMAELSGSRLAAQQQMEGLLAPHRPKEPAWFLATVGVSPDHQGKGLGSAVVLPGVEAAERAGVPAFLETSAPRNLPFYERLGFTVTADVEVPEGPRTWCMTRKPGA

SEQ ID NO: 17448 - protein, 499 aa, Artificial Sequence
  Synthetic Polypeptide
MALPVTALLLPLALLLHAARPQLQLQESGPGLVKPSETLSLTCTVSGDSISSGDYYWGWIRQPPGKGLEWIGHIYYSGVTYYNPSLKSRVTISVDTSRNQFSLKLSSVTAADTAVYYCTREDSSNWRSRGQGTLVTVSSLESGGGGSFEVQLLESGGGLIQPGGSLRLSCAASGFTFSSHAMTWVRQAPGKGLEWVSAISGSGDYTHYADSVKGRFTISRDNSKNTVYLQMNSLRAEDSAVYYCAKDEDGGSLLGHRGQGTLVTVSSTREQKLISEEDLKIEVMYPPPYLDNEKSNGTIIHVKGKHLCPSPLFPGPSKPFWVLVVVGGVLACYSLLVTVAFIIFWVRSKRSRLLHSDYMNMTPRRPGPTRKHYQPYAPPRDFAAYRSRVKFSRSADAPAYQQGQNQLYNELNLGRREEYDVLDKRRGRDPEMGGKPRRKNPQEGLYNELQKDKMAEAYSEIGMKGERRRGKGHDGLYQGLSTATKDTYDALHMQALPPR

SEQ ID NO: 17449 - protein, 505 aa, Artificial Sequence
  Synthetic Polypeptide
MALPVTALLLPLALLLHAARPQLQLQESGPGLVKPSETLSLTCTVSGDSISSGDYYWGWIRQPPGKGLEWIGHIYYSGVTYYNPSLKSRVTISVDTSRNQFSLKLSSVTAADTAVYYCTREDSSNWRSRGQGTLVTVSSLESGGGGSFEVQLLESGGGLIQPGGSLRLSCAASGFTFSSHAMTWVRQAPGKGLEWVSAISGSGDYTHYADSVKGRFTISRDNSKNTVYLQMNSLRAEDSAVYYCAKDEDGGSLLGHRGQGTLVTVSSTREQKLISEEDLAKPTTTPAPRPPTPAPTIASQPLSLRPEACRPAAGGAVHTRGLDFACDIYIWAPLAGTCGVLLLSLVITLYCKRGRKKLLYIFKQPFMRPVQTTQEEDGCSCRFPEEEEGGCELRVKFSRSADAPAYQQGQNQLYNELNLGRREEYDVLDKRRGRDPEMGGKPRRKNPQEGLYNELQKDKMAEAYSEIGMKGERRRGKGHDGLYQGLSTATKDTYDALHMQALPPR

SEQ ID NO: 17450 - protein, 506 aa, Artificial Sequence
  Synthetic Polypeptide
MALPVTALLLPLALLLHAARPEVQLLESGGGLIQPGGSLRLSCAASGFTFSSHAMTWVRQAPGKGLEWVSAISGSGDYTHYADSVKGRFTISRDNSKNTVYLQMNSLRAEDSAVYYCAKDEDGGSLLGHRGQGTLVTVSSLESGGGGSFEQLQLQESGPGLVKPSETLSLTCTVSGDSISSGDYYWGWIRQPPGKGLEWIGHIYYSGVTYYNPSLKSRVTISVDTSRNQFSLKLSSVTAADTAVYYCTREDSSNWRSRGQGTLVTVSSTREQKLISEEDLAKPTTTPAPRPPTPAPTIASQPLSLRPEACRPAAGGAVHTRGLDFACDIYIWAPLAGTCGVLLLSLVITLYCKRGRKKLLYIFKQPFMRPVQTTQEEDGCSCRFPEEEEGGCELRVKFSRSADAPAYQQGQNQLYNELNLGRREEYDVLDKRRGRDPEMGGKPRRKNPQEGLYNELQKDKMAEAYSEIGMKGERRRGKGHDGLYQGLSTATKDTYDALHMQALPPR

SEQ ID NO: 17451 - protein, 918 aa, Artificial Sequence
  Synthetic Polypeptide
MALPVTALLLPLALLLHAARPQLQLQESGPGLVKPSETLSLTCTVSGDSISSGDYYWGWIRQPPGKGLEWIGHIYYSGVTYYNPSLKSRVTISVDTSRNQFSLKLSSVTAADTAVYYCTREDSSNWRSRGQGTLVTVSSLESGGGGSFEVQLLESGGGLIQPGGSLRLSCAASGFTFSSHAMTWVRQAPGKGLEWVSAISGSGDYTHYADSVKGRFTISRDNSKNTVYLQMNSLRAEDSAVYYCAKDEDGGSLLGHRGQGTLVTVSSTREQKLISEEDLAKPTTTPAPRPPTPAPTIASQPLSLRPEACRPAAGGAVHTRGLDFACDIYIWAPLAGTCGVLLLSLVITLYCGRARVKFSRSADAPAYQQGQNQLYNELNLGRREEYDVLDKRRGRDPEMGGKPRRKNPQEGLYNELQKDKMAEAYSEIGMKGERRRGKGHDGLYQGLSTATKDTYDALHMQALPPRSRGSGATNFSLLKQAGDVEENPGPGIHMATYEVLCEVARKLGTDDREVVLFLLNVFIPQPTLAQLIGALRALKEEGRLTFPLLAECLFRAGRRDLLRDLLHLDPRFLERHLAGTMSYFSPYQLTVLHVDGELCARDIRSLIFLSKDTIGSRSTPQTFLHWVYCMENLDLLGPTDVDALMSMLRSLSRVDLQRQVQTLMGLHLSGPSHSQHYRHTPLETDFYDYKDDDDKTSGSGEGRGSLLTCGDVEENPGPHMTEYKPTVRLATRDDVPRAVRTLAAAFADYPATRHTVDPDRHIERVTELQELFLTRVGLDIGKVWVADDGAAVAVWTTPESVEAGAVFAEIGPRMAELSGSRLAAQQQMEGLLAPHRPKEPAWFLATVGVSPDHQGKGLGSAVVLPGVEAAERAGVPAFLETSAPRNLPFYERLGFTVTADVEVPEGPRTWCMTRKPGA

SEQ ID NO: 17452 - protein, 863 aa, Artificial Sequence
  Synthetic Polypeptide
MALPVTALLLPLALLLHAARPQLQLQESGPGLVKPSETLSLTCTVSGDSISSGDYYWGWIRQPPGKGLEWIGHIYYSGVTYYNPSLKSRVTISVDTSRNQFSLKLSSVTAADTAVYYCTREDSSNWRSRGQGTLVTVSSLEIQNPDPAVYQLRDSKSSDKSVCLFTDFDSQTNVSQSKDSDVYITDKCVLDMRSMDFKSNSAVAWSNKSDFACANAFNNSIIPEDTFFPSSDVPCDVKLVEKSFETDTNLNFQNLSVIGFRILLLKVAGFNLLMTLRLWSSRAKRSGSGVKQTLNFDLLKLAGDVESNPGPTSMDWIWRILFLVGAATGAHSFEVQLLESGGGLIQPGGSLRLSCAASGFTFSSHAMTWVRQAPGKGLEWVSAISGSGDYTHYADSVKGRFTISRDNSKNTVYLQMNSLRAEDSAVYYCAKDEDGGSLLGHRGQGTLVTVSSTREDLKNVFPPEVAVFEPSKAEIAHTQKATLVCLATGFYPDHVELSWWVNGKEVHSGVCTDPQPLKEQPALNDSRYCLSSRLRVSATFWQNPRNHFRCQVQFYGLSENDEWTQDRAKPVTQIVSAEAWGRADCGITSASYHQGVLSATILYEILLGKATLYAVLVSALVLMAMVKRKDSRGRAKRSGSGATNFSLLKQAGDVEENPGPSRGHMTEYKPTVRLATRDDVPRAVRTLAAAFADYPATRHTVDPDRHIERVTELQELFLTRVGLDIGKVWVADDGAAVAVWTTPESVEAGAVFAEIGPRMAELSGSRLAAQQQMEGLLAPHRPKEPAWFLATVGVSPDHQGKGLGSAVVLPGVEAAERAGVPAFLETSAPRNLPFYERLGFTVTADVEVPEGPRTWCMTRKPGA

SEQ ID NO: 17453 - protein, 862 aa, Artificial Sequence
  Synthetic Polypeptide
MALPVTALLLPLALLLHAARPQLQLQESGPGLVKPSETLSLTCTVSGDSISSGDYYWGWIRQPPGKGLEWIGHIYYSGVTYYNPSLKSRVTISVDTSRNQFSLKLSSVTAADTAVYYCTREDSSNWRSRGQGTLVTVSSLEDLKNVFPPEVAVFEPSKAEIAHTQKATLVCLATGFYPDHVELSWWVNGKEVHSGVCTDPQPLKEQPALNDSRYCLSSRLRVSATFWQNPRNHFRCQVQFYGLSENDEWTQDRAKPVTQIVSAEAWGRADCGITSASYHQGVLSATILYEILLGKATLYAVLVSALVLMAMVKRKDSRGRAKRSGSGATNFSLLKQAGDVEENPGPTSMDWIWRILFLVGAATGAHSFEVQLLESGGGLIQPGGSLRLSCAASGFTFSSHAMTWVRQAPGKGLEWVSAISGSGDYTHYADSVKGRFTISRDNSKNTVYLQMNSLRAEDSAVYYCAKDEDGGSLLGHRGQGTLVTVSSTRIQNPDPAVYQLRDSKSSDKSVCLFTDFDSQTNVSQSKDSDVYITDKCVLDMRSMDFKSNSAVAWSNKSDFACANAFNNSIIPEDTFFPSSDVPCDVKLVEKSFETDTNLNFQNLSVIGFRILLLKVAGFNLLMTLRLWSSRAKRSGSGVKQTLNFDLLKLAGDVESNPGPSRGHMTEYKPTVRLATRDDVPRAVRTLAAAFADYPATRHTVDPDRHIERVTELQELFLTRVGLDIGKVWVADDGAAVAVWTTPESVEAGAVFAEIGPRMAELSGSRLAAQQQMEGLLAPHRPKEPAWFLATVGVSPDHQGKGLGSAVVLPGVEAAERAGVPAFLETSAPRNLPFYERLGFTVTADVEVPEGPRTWCMTRKPGA

SEQ ID NO: 17454 - protein, 629 aa, Artificial Sequence
  Synthetic Polypeptide
MALPVTALLLPLALLLHAARPQLQLQESGPGLVKPSETLSLTCTVSGDSISSGDYYWGWIRQPPGKGLEWIGHIYYSGVTYYNPSLKSRVTISVDTSRNQFSLKLSSVTAADTAVYYCTREDSSNWRSRGQGTLVTVSSLEDLKNVFPPEVAVFEPSEAEISHTQKATLVCLATGFYPDHVELSWWVNGKEVHSGVCTDPQPLKEQPALNDSRYCLSSRLRVSATFWQNPRNHFRCQVQFYGLSENDEWTQDRAKPVTQIVSAEAWGRADCGFTSESYQQGVLSATILYEILLGKATLYAVLVSALVLMAMVKRKDSRGRAKRSGSGATNFSLLKQAGDVEENPGPTSMDWIWRILFLVGAATGAHSFEVQLLESGGGLIQPGGSLRLSCAASGFTFSSHAMTWVRQAPGKGLEWVSAISGSGDYTHYADSVKGRFTISRDNSKNTVYLQMNSLRAEDSAVYYCAKDEDGGSLLGHRGQGTLVTVSSTRIQNPDPAVYQLRDSKSSDKSVCLFTDFDSQTNVSQSKDSDVYITDKCVLDMRSMDFKSNSAVAWSNKSDFACANAFNNSIIPEDTFFPSPESSCDVKLVEKSFETDTNLNFQNLSVIGFRILLLKVAGFNLLMTLRLWSS

SEQ ID NO: 17455 - protein, 854 aa, Artificial Sequence
  Synthetic Polypeptide
MALPVTALLLPLALLLHAARPQLQLQESGPGLVKPSETLSLTCTVSGDSISSGDYYWGWIRQPPGKGLEWIGHIYYSGVTYYNPSLKSRVTISVDTSRNQFSLKLSSVTAADTAVYYCTREDSSNWRSRGQGTLVTVSSLEDLKNVFPPEVAVFEPSEAEISHTQKATLVCLATGFYPDHVELSWWVNGKEVHSGVCTDPQPLKEQPALNDSRYCLSSRLRVSATFWQNPRNHFRCQVQFYGLSENDEWTQDRAKPVTQIVSAEAWGRADCGFTSESYQQGVLSATILYEILLGKATLYAVLVSALVLMAMVKRKDSRGRAKRSGSGATNFSLLKQAGDVEENPGPTSMDWIWRILFLVGAATGAHSFEVQLLESGGGLIQPGGSLRLSCAASGFTFSSHAMTWVRQAPGKGLEWVSAISGSGDYTHYADSVKGRFTISRDNSKNTVYLQMNSLRAEDSAVYYCAKDEDGGSLLGHRGQGTLVTVSSTRIQNPDPAVYQLRDSKSSDKSVCLFTDFDSQTNVSQSKDSDVYITDKCVLDMRSMDFKSNSAVAWSNKSDFACANAFNNSIIPEDTFFPSPESSCDVKLVEKSFETDTNLNFQNLSVIGFRILLLKVAGFNLLMTLRLWSSRAKRSGSGVKQTLNFDLLKLAGDVESNPGPSRGGIHTMATYEVLCEVARKLGTDDREVVLFLLNVFIPQPTLAQLIGALRALKEEGRLTFPLLAECLFRAGRRDLLRDLLHLDPRFLERHLAGTMSYFSPYQLTVLHVDGELCARDIRSLIFLSKDTIGSRSTPQTFLHWVYCMENLDLLGPTDVDALMSMLRSLSRVDLQRQVQTLMGLHLSGPSHSQHYRHTP

SEQ ID NO: 17456 - protein, 633 aa, Artificial Sequence
  Synthetic Polypeptide
MALPVTALLLPLALLLHAARPQLQLQESGPGLVKPSETLSLTCTVSGDSISSGDYYWGWIRQPPGKGLEWIGHIYYSGVTYYNPSLKSRVTISVDTSRNQFSLKLSSVTAADTAVYYCTREDSSNWRSRGQGTLVTVSSLEIQNPDPAVYQLRDSKSSDKSVCLFTDFDSQTNVSQSKDSDVYITDKCVLDMRSMDFKSNSAVAWSNKSDFACANAFNNSIIPEDTFFPSPESSCDVKLVEKSFETDTNLNFQNLSVIGFRILLLKVAGFNLLMTLRLWSSRAKRSGSGVKQTLNFDLLKLAGDVESNPGPTSMDWIWRILFLVGAATGAHSFEVQLLESGGGLIQPGGSLRLSCAASGFTFSSHAMTWVRQAPGKGLEWVSAISGSGDYTHYADSVKGRFTISRDNSKNTVYLQMNSLRAEDSAVYYCAKDEDGGSLLGHRGQGTLVTVSSTREDLKNVFPPEVAVFEPSEAEISHTQKATLVCLATGFYPDHVELSWWVNGKEVHSGVCTDPQPLKEQPALNDSRYCLSSRLRVSATFWQNPRNHFRCQVQFYGLSENDEWTQDRAKPVTQIVSAEAWGRADCGFTSESYQQGVLSATILYEILLGKATLYAVLVSALVLMAMVKRKDSRG

SEQ ID NO: 17457 - protein, 855 aa, Artificial Sequence
  Synthetic Polypeptide
MALPVTALLLPLALLLHAARPQLQLQESGPGLVKPSETLSLTCTVSGDSISSGDYYWGWIRQPPGKGLEWIGHIYYSGVTYYNPSLKSRVTISVDTSRNQFSLKLSSVTAADTAVYYCTREDSSNWRSRGQGTLVTVSSLEIQNPDPAVYQLRDSKSSDKSVCLFTDFDSQTNVSQSKDSDVYITDKCVLDMRSMDFKSNSAVAWSNKSDFACANAFNNSIIPEDTFFPSPESSCDVKLVEKSFETDTNLNFQNLSVIGFRILLLKVAGFNLLMTLRLWSSRAKRSGSGVKQTLNFDLLKLAGDVESNPGPTSMDWIWRILFLVGAATGAHSFEVQLLESGGGLIQPGGSLRLSCAASGFTFSSHAMTWVRQAPGKGLEWVSAISGSGDYTHYADSVKGRFTISRDNSKNTVYLQMNSLRAEDSAVYYCAKDEDGGSLLGHRGQGTLVTVSSTREDLKNVFPPEVAVFEPSEAEISHTQKATLVCLATGFYPDHVELSWWVNGKEVHSGVCTDPQPLKEQPALNDSRYCLSSRLRVSATFWQNPRNHFRCQVQFYGLSENDEWTQDRAKPVTQIVSAEAWGRADCGFTSESYQQGVLSATILYEILLGKATLYAVLVSALVLMAMVKRKDSRGRAKRSGSGATNFSLLKQAGDVEENPGPSRGGIHTMATYEVLCEVARKLGTDDREVVLFLLNVFIPQPTLAQLIGALRALKEEGRLTFPLLAECLFRAGRRDLLRDLLHLDPRFLERHLAGTMSYFSPYQLTVLHVDGELCARDIRSLIFLSKDTIGSRSTPQTFLHWVYCMENLDLLGPTDVDALMSMLRSLSRVDLQRQVQTLMGLHLSGPSHSQHYRHTP

SEQ ID NO: 17458 - protein, 902 aa, Artificial Sequence
  Synthetic Polypeptide
MALPVTALLLPLALLLHAARPLEGKPIPNPLLGLDSTGSGEDLKNVFPPEVAVFEPSKAEIAHTQKATLVCLATGFYPDHVELSWWVNGKEVHSGVCTDPQPLKEQPALNDSRYCLSSRLRVSATFWQNPRNHFRCQVQFYGLSENDEWTQDRAKPVTQIVSAEAWGRADCGITSASYHQGVLSATILYEILLGKATLYAVLVSALVLMAMVKRKDSRGRAKRSGSGATNFSLLKQAGDVEENPGPTSMALPVTALLLPLALLLHAARPQLQLQESGPGLVKPSETLSLTCTVSGDSISSGDYYWGWIRQPPGKGLEWIGHIYYSGVTYYNPSLKSRVTISVDTSRNQFSLKLSSVTAADTAVYYCTREDSSNWRSRGQGTLVTVSSLESGGGGSFEVQLLESGGGLIQPGGSLRLSCAASGFTFSSHAMTWVRQAPGKGLEWVSAISGSGDYTHYADSVKGRFTISRDNSKNTVYLQMNSLRAEDSAVYYCAKDEDGGSLLGHRGQGTLVTVSSTREQKLISEEDGSGIQNPDPAVYQLRDSKSSDKSVCLFTDFDSQTNVSQSKDSDVYITDKCVLDMRSMDFKSNSAVAWSNKSDFACANAFNNSIIPEDTFFPSSDVPCDVKLVEKSFETDTNLNFQNLSVIGFRILLLKVAGFNLLMTLRLWSSRAKRSGSGVKQTLNFDLLKLAGDVESNPGPSRGHMTEYKPTVRLATRDDVPRAVRTLAAAFADYPATRHTVDPDRHIERVTELQELFLTRVGLDIGKVWVADDGAAVAVWTTPESVEAGAVFAEIGPRMAELSGSRLAAQQQMEGLLAPHRPKEPAWFLATVGVSPDHQGKGLGSAVVLPGVEAAERAGVPAFLETSAPRNLPFYERLGFTVTADVEVPEGPRTWCMTRKPGA

SEQ ID NO: 17459 - protein, 903 aa, Artificial Sequence
  Synthetic Polypeptide
MALPVTALLLPLALLLHAARPLEQKLISEEDLGSGDRPDPAVYQLRDSKSSDKSVCLFTDFDSQTNVSQSKDSDVYITDKCVLDMRSMDFKSNSAVAWSNKSDFACANAFNNSIIPEDTFFPSPESSCDVKLVEKSFETDTNLNFQNLSVIGFRILLLKVAGFNLLMTLRLWSSSSRAKRSGSGVKQTLNFDLLKLAGDVESNPGPTSMALPVTALLLPLALLLHAARPQLQLQESGPGLVKPSETLSLTCTVSGDSISSGDYYWGWIRQPPGKGLEWIGHIYYSGVTYYNPSLKSRVTISVDTSRNQFSLKLSSVTAADTAVYYCTREDSSNWRSRGQGTLVTVSSLESGGGGSFEVQLLESGGGLIQPGGSLRLSCAASGFTFSSHAMTWVRQAPGKGLEWVSAISGSGDYTHYADSVKGRFTISRDNSKNTVYLQMNSLRAEDSAVYYCAKDEDGGSLLGHRGQGTLVTVSSTRGKPIPNPLLGLDSTGSGEDLKNVFPPEVAVFEPSEAEISHTQKATLVCLATGFYPDHVELSWWVNGKEVHSGVCTDPQPLKEQPALNDSRYCLSSRLRVSATFWQNPRNHFRCQVQFYGLSENDEWTQDRAKPVTQIVSAEAWGRADCGFTSESYQQGVLSATILYEILLGKATLYAVLVSALVLMAMVKRKDSRGRAKRSGSGATNFSLLKQAGDVEENPGPSRGHMTEYKPTVRLATRDDVPRAVRTLAAAFADYPATRHTVDPDRHIERVTELQELFLTRVGLDIGKVWVADDGAAVAVWTTPESVEAGAVFAEIGPRMAELSGSRLAAQQQMEGLLAPHRPKEPAWFLATVGVSPDHQGKGLGSAVVLPGVEAAERAGVPAFLETSAPRNLPFYERLGFTVTADVEVPEGPRTWCMTRKPGA

SEQ ID NO: 17460 - protein, 862 aa, Artificial Sequence
  Synthetic Polypeptide
MALPVTALLLPLALLLHAARPQLQLQESGPGLVKPSETLSLTCTVSGDSISSGDYYWGWIRQPPGKGLEWIGHIYYSGVTYYNPSLKSRVTISVDTSRNQFSLKLSSVTAADTAVYYCTREDSSNWRSRGQGTLVTVSSLEDLKNVFPPEVAVFEPSEAEISHTQKATLVCLATGFYPDHVELSWWVNGKEVHSGVSTDPQPLKEQPALNDSRYCLSSRLRVSATFWQNPRNHFRCQVQFYGLSENDEWTQDRAKPVTQIVSAEAWGRADCGFTSESYQQGVLSATILYEILLGKATLYAVLVSALVLMAMVKRKDSRGRAKRSGSGATNFSLLKQAGDVEENPGPTSMDWIWRILFLVGAATGAHSFEVQLLESGGGLIQPGGSLRLSCAASGFTFSSHAMTWVRQAPGKGLEWVSAISGSGDYTHYADSVKGRFTISRDNSKNTVYLQMNSLRAEDSAVYYCAKDEDGGSLLGHRGQGTLVTVSSTRIQNPDPAVYQLRDSKSSDKSVCLFTDFDSQTNVSQSKDSDVYITDKTVLDMRSMDFKSNSAVAWSNKSDFACANAFNNSIIPEDTFFPSPESSCDVKLVEKSFETDTNLNFQNLSVIGFRILLLKVAGFNLLMTLRLWSSRAKRSGSGVKQTLNFDLLKLAGDVESNPGPSRGHMTEYKPTVRLATRDDVPRAVRTLAAAFADYPATRHTVDPDRHIERVTELQELFLTRVGLDIGKVWVADDGAAVAVWTTPESVEAGAVFAEIGPRMAELSGSRLAAQQQMEGLLAPHRPKEPAWFLATVGVSPDHQGKGLGSAVVLPGVEAAERAGVPAFLETSAPRNLPFYERLGFTVTADVEVPEGPRTWCMTRKPGA

SEQ ID NO: 17461 - protein, 944 aa, Artificial Sequence
  Synthetic Polypeptide
MALPVTALLLPLALLLHAARPQLQLQESGPGLVKPSETLSLTCTVSGDSISSGDYYWGWIRQPPGKGLEWIGHIYYSGVTYYNPSLKSRVTISVDTSRNQFSLKLSSVTAADTAVYYCTREDSSNWRSRGQGTLVTVSSLEDLKNVFPPEVAVFEPSEAEISHTQKATLVCLATGFYPDHVELSWWVNGKEVHSGVSTDPQPLKEQPALNDSRYCLSSRLRVSATFWQNPRNHFRCQVQFYGLSENDEWTQDRAKPVTQIVSAEAWGRADCGFTSESYQQGVLSATILYEILLGKATLYAVLVSALVLMAMVKRKDSRGRAKRSGSGATNFSLLKQAGDVEENPGPTSMDWIWRILFLVGAATGAHSFEVQLLESGGGLIQPGGSLRLSCAASGFTFSSHAMTWVRQAPGKGLEWVSAISGSGDYTHYADSVKGRFTISRDNSKNTVYLQMNSLRAEDSAVYYCAKDEDGGSLLGHRGQGTLVTVSSTREQKLISEEDGSGTPFPSLAPPIMLLVDGKQQMVVVCLVLDVAPPGLDSPIWFSAGNGSALDAFTYGPSPATDGTWTNLAHLSLPSEELASWEPLVCHTGPGAEGHSRSTQPMHLSGEASTARTCPQEPLRGTPGGALWLGVLRLLLFKLLLFDLLLTCSCLCDPAGPLPSPATTTRLRALGSHRLHPATETGGREATSSPRPQPRDRRWGDTPPGRKPGSPVRAKRSGSGVKQTLNFDLLKLAGDVESNPGPSRGHMTEYKPTVRLATRDDVPRAVRTLAAAFADYPATRHTVDPDRHIERVTELQELFLTRVGLDIGKVWVADDGAAVAVWTTPESVEAGAVFAEIGPRMAELSGSRLAAQQQMEGLLAPHRPKEPAWFLATVGVSPDHQGKGLGSAVVLPGVEAAERAGVPAFLETSAPRNLPFYERLGFTVTADVEVPEGPRTWCMTRKPGA

SEQ ID NO: 17462 - protein, 957 aa, Artificial Sequence
  Synthetic Polypeptide
MALPVTALLLPLALLLHAARPLEDLKNVFPPEVAVFEPSEAEISHTQKATLVCLATGFYPDHVELSWWVNGKEVHSGVSTDPQPLKEQPALNDSRYCLSSRLRVSATFWQNPRNHFRCQVQFYGLSENDEWTQDRAKPVTQIVSAEAWGRADCGFTSESYQQGVLSATILYEILLGKATLYAVLVSALVLMAMVKRKDSRGRAKRSGSGATNFSLLKQAGDVEENPGPTSMALPVTALLLPLALLLHAARPQLQLQESGPGLVKPSETLSLTCTVSGDSISSGDYYWGWIRQPPGKGLEWIGHIYYSGVTYYNPSLKSRVTISVDTSRNQFSLKLSSVTAADTAVYYCTREDSSNWRSRGQGTLVTVSSLESGGGGSFEVQLLESGGGLIQPGGSLRLSCAASGFTFSSHAMTWVRQAPGKGLEWVSAISGSGDYTHYADSVKGRFTISRDNSKNTVYLQMNSLRAEDSAVYYCAKDEDGGSLLGHRGQGTLVTVSSTREQKLISEEDLGSGTPFPSLAPPIMLLVDGKQQMVVVCLVLDVAPPGLDSPIWFSAGNGSALDAFTYGPSPATDGTWTNLAHLSLPSEELASWEPLVCHTGPGAEGHSRSTQPMHLSGEASTARTCPQEPLRGTPGGALWLGVLRLLLFKLLLFDLLLTCSCLCDPAGPLPSPATTTRLRALGSHRLHPATETGGREATSSPRPQPRDRRWGDTPPGRKPGSPVRAKRSGSGVKQTLNFDLLKLAGDVESNPGPSRSRGHMTEYKPTVRLATRDDVPRAVRTLAAAFADYPATRHTVDPDRHIERVTELQELFLTRVGLDIGKVWVADDGAAVAVWTTPESVEAGAVFAEIGPRMAELSGSRLAAQQQMEGLLAPHRPKEPAWFLATVGVSPDHQGKGLGSAVVLPGVEAAERAGVPAFLETSAPRNLPFYERLGFTVTADVEVPEGPRTWCMTRKPGA

SEQ ID NO: 17463 - protein, 899 aa, Artificial Sequence
  Synthetic Polypeptide
MALPVTALLLPLALLLHAARPQLQLQESGPGLVKPSETLSLTCTVSGDSISSGDYYWGWIRQPPGKGLEWIGHIYYSGVTYYNPSLKSRVTISVDTSRNQFSLKLSSVTAADTAVYYCTREDSSNWRSRGQGTLVTVSSLEGKPIPNPLLGLDSTGSGDKQLDADVSPKPTIFLPSIAETKLQKAGTYLCLLEKFFPDVIKIHWQEKKSNTILGSQEGNTMKTNDTYMKFSWLTVPEKSLDKEHRCIVRHENNKNGVDQEIIFPPIKTDVITMDPKDNCSKDANDTLLLQLTNTSAYYMYLLLLLKSVVYFAIITCCLLRRTAFCCNGEKSRAKRSGSGATNFSLLKQAGDVEENPGPTSMDWIWRILFLVGAATGAHSFEVQLLESGGGLIQPGGSLRLSCAASGFTFSSHAMTWVRQAPGKGLEWVSAISGSGDYTHYADSVKGRFTISRDNSKNTVYLQMNSLRAEDSAVYYCAKDEDGGSLLGHRGQGTLVTVSSTREQKLISEEDGSGSQPHTKPSVFVMKNGTNVACLVKEFYPKDIRINLVSSKKITEFDPAIVISPSGKYNAVKLGKYEDSNSVTCSVQHDNKTVHSTDFEVKTDSTDHVKPKETENTKQPSKSCHKPKAIVHTEKVNMMSLTVLGLRMLFAKTVAVNFLLTAKLFFLRAKRSGSGVKQTLNFDLLKLAGDVESNPGPSRGHMTEYKPTVRLATRDDVPRAVRTLAAAFADYPATRHTVDPDRHIERVTELQELFLTRVGLDIGKVWVADDGAAVAVWTTPESVEAGAVFAEIGPRMAELSGSRLAAQQQMEGLLAPHRPKEPAWFLATVGVSPDHQGKGLGSAVVLPGVEAAERAGVPAFLETSAPRNLPFYERLGFTVTADVEVPEGPRTWCMTRKPGA

SEQ ID NO: 17464 - protein, 637 aa, Artificial Sequence
  Synthetic Polypeptide
MALPVTALLLPLALLLHAARPQLQLQESGPGLVKPSETLSLTCTVSGDSISSGDYYWGWIRQPPGKGLEWIGHIYYSGVTYYNPSLKSRVTISVDTSRNQFSLKLSSVTAADTAVYYCTREDSSNWRSRGQGTLVTVSSLESQPHTKPSVFVMKNGTNVACLVKEFYPKDIRINLVSSKKITEFDPAIVISPSGKYNAVKLGKYEDSNSVTCSVQHDNKTVHSTDFEVKTDSTDHVKPKETENTKQPSKSCHKPKAIVHTEKVNMMSLTVLGLRMLFAKTVAVNFLLTAKLFFLRAKRSGSGATNFSLLKQAGDVEENPGPTSMDWIWRILFLVGAATGAHSFEVQLLESGGGLIQPGGSLRLSCAASGFTFSSHAMTWVRQAPGKGLEWVSAISGSGDYTHYADSVKGRFTISRDNSKNTVYLQMNSLRAEDSAVYYCAKDEDGGSLLGHRGQGTLVTVSSTRDKQLDADVSPKPTIFLPSIAETKLQKAGTYLCLLEKFFPDVIKIHWQEKKSNTILGSQEGNTMKTNDTYMKFSWLTVPEKSLDKEHRCIVRHENNKNGVDQEIIFPPIKTDVITMDPKDNCSKDANDTLLLQLTNTSAYYMYLLLLLKSVVYFAIITCCLLRRTAFCCNGEKS

SEQ ID NO: 17465 - protein, 909 aa, Artificial Sequence
  Synthetic Polypeptide
MALPVTALLLPLALLLHAARPLEGKPIPNPLLGLDSTGSGDKQLDADVSPKPTIFLPSIAETKLQKAGTYLCLLEKFFPDVIKIHWQEKKSNTILGSQEGNTMKTNDTYMKFSWLTVPEKSLDKEHRCIVRHENNKNGVDQEIIFPPIKTDVITMDPKDNCSKDANDTLLLQLTNTSAYYMYLLLLLKSVVYFAIITCCLLRRTAFCCNGEKSRAKRSGSGATNFSLLKQAGDVEENPGPTSMALPVTALLLPLALLLHAARPQLQLQESGPGLVKPSETLSLTCTVSGDSISSGDYYWGWIRQPPGKGLEWIGHIYYSGVTYYNPSLKSRVTISVDTSRNQFSLKLSSVTAADTAVYYCTREDSSNWRSRGQGTLVTVSSLESGGGGSFEVQLLESGGGLIQPGGSLRLSCAASGFTFSSHAMTWVRQAPGKGLEWVSAISGSGDYTHYADSVKGRFTISRDNSKNTVYLQMNSLRAEDSAVYYCAKDEDGGSLLGHRGQGTLVTVSSTREQKLISEEDGSGSQPHTKPSVFVMKNGTNVACLVKEFYPKDIRINLVSSKKITEFDPAIVISPSGKYNAVKLGKYEDSNSVTCSVQHDNKTVHSTDFEVKTDSTDHVKPKETENTKQPSKSCHKPKAIVHTEKVNMMSLTVLGLRMLFAKTVAVNFLLTAKLFFLRAKRSGSGVKQTLNFDLLKLAGDVESNPGPSRGHMTEYKPTVRLATRDDVPRAVRTLAAAFADYPATRHTVDPDRHIERVTELQELFLTRVGLDIGKVWVADDGAAVAVWTTPESVEAGAVFAEIGPRMAELSGSRLAAQQQMEGLLAPHRPKEPAWFLATVGVSPDHQGKGLGSAVVLPGVEAAERAGVPAFLETSAPRNLPFYERLGFTVTADVEVPEGPRTWCMTRKPGA

SEQ ID NO: 17466 - protein, 1039 aa, Artificial Sequence
  Synthetic Polypeptide
MALPVTALLLPLALLLHAARPQLQLQESGPGLVKPSETLSLTCTVSGDSISSGDYYWGWIRQPPGKGLEWIGHIYYSGVTYYNPSLKSRVTISVDTSRNQFSLKLSSVTAADTAVYYCTREDSSNWRSRGQGTLVTVSSGQPKANPTVTLFPPSSEELQANKATLVCLISDFYPGAVTVAWKADGSPVKAGVETTKPSKQSNNKYAASSYLSLTPEQWKSHRSYSCQVTHEGSTVEKTVAPTECSGSQSFGLLDPKLCYLLDGILFIYGVILTALFLRVKFSRSADAPAYQQGQNQLYNELNLGRREEYDVLDKRRGRDPEMGGKPQRRKNPQEGLYNELQKDKMAEAYSEIGMKGERRRGKGHDGLYQGLSTATKDTYDALHMQALPPRRAKRSGSGATNFSLLKQAGDVEENPGPTSMDWIWRILFLVGAATGAHSFEVQLLESGGGLIQPGGSLRLSCAASGFTFSSHAMTWVRQAPGKGLEWVSAISGSGDYTHYADSVKGRFTISRDNSKNTVYLQMNSLRAEDSAVYYCAKDEDGGSLLGHRGQGTLVTVSSASTKGPSVFPLAPSSKSTSGGTAALGCLVKDYFPEPVTVSWNSGALTSGVHTFPAVLQSSGLYSLSSVVTVPSSSLGTQTYICNVNHKPSNTKVDKRVEPKSCGTQSFGLLDPKLCYLLDGILFIYGVILTALFLRVKFSRSADAPAYQQGQNQLYNELNLGRREEYDVLDKRRGRDPEMGGKPQRRKNPQEGLYNELQKDKMAEAYSEIGMKGERRRGKGHDGLYQGLSTATKDTYDALHMQALPPRRAKRSGSGVKQTLNFDLLKLAGDVESNPGPSRGHMTEYKPTVRLATRDDVPRAVRTLAAAFADYPATRHTVDPDRHIERVTELQELFLTRVGLDIGKVWVADDGAAVAVWTTPESVEAGAVFAEIGPRMAELSGSRLAAQQQMEGLLAPHRPKEPAWFLATVGVSPDHQGKGLGSAVVLPGVEAAERAGVPAFLETSAPRNLPFYERLGFTVTADVEVPEGPRTWCMTRKPGA

SEQ ID NO: 17467 - protein, 825 aa, Artificial Sequence
  Synthetic Polypeptide
MALPVTALLLPLALLLHAARPQLQLQESGPGLVKPSETLSLTCTVSGDSISSGDYYWGWIRQPPGKGLEWIGHIYYSGVTYYNPSLKSRVTISVDTSRNQFSLKLSSVTAADTAVYYCTREDSSNWRSRGQGTLVTVSSLEDLKNVFPPEVAVFEPSEAEISHTQKATLVCLATGFYPDHVELSWWVNGKEVHSGVSTDPQPLKEQPALNDSRYCLSSRLRVSATFWQNPRNHFRCQVQFYGLSENDEWTQDRAKPVTQIVSAEAWGRADCGSQSFGLLDPKLCYLLDGILFIYGVILTALFLRVKFSRSADAPAYQQGQNQLYNELNLGRREEYDVLDKRRGRDPEMGGKPQRRKNPQEGLYNELQKDKMAEAYSEIGMKGERRRGKGHDGLYQGLSTATKDTYDALHMQALPPRRAKRSGSGATNFSLLKQAGDVEENPGPTSMDWIWRILFLVGAATGAHSFEVQLLESGGGLIQPGGSLRLSCAASGFTFSSHAMTWVRQAPGKGLEWVSAISGSGDYTHYADSVKGRFTISRDNSKNTVYLQMNSLRAEDSAVYYCAKDEDGGSLLGHRGQGTLVTVSSTRIQNPDPAVYQLRDSKSSDKSVCLFTDFDSQTNVSQSKDSDVYITDKTVLDMRSMDFKSNSAVAWSNKSDFACANAFNNSIIPEDTFFPSPESSCGTQSFGLLDPKLCYLLDGILFIYGVILTALFLRVKFSRSADAPAYQQGQNQLYNELNLGRREEYDVLDKRRGRDPEMGGKPQRRKNPQEGLYNELQKDKMAEAYSEIGMKGERRRGKGHDGLYQGLSTATKDTYDALHMQALPPR

SEQ ID NO: 17468 - protein, 825 aa, Artificial Sequence
  Synthetic Polypeptide
MALPVTALLLPLALLLHAARPQLQLQESGPGLVKPSETLSLTCTVSGDSISSGDYYWGWIRQPPGKGLEWIGHIYYSGVTYYNPSLKSRVTISVDTSRNQFSLKLSSVTAADTAVYYCTREDSSNWRSRGQGTLVTVSSLEDLKNVFPPEVAVFEPSKAEIAHTQKATLVCLATGFYPDHVELSWWVNGKEVHSGVCTDPQPLKEQPALNDSRYCLSSRLRVSATFWQNPRNHFRCQVQFYGLSENDEWTQDRAKPVTQIVSAEAWGRADCGSQSFGLLDPKLCYLLDGILFIYGVILTALFLRVKFSRSADAPAYQQGQNQLYNELNLGRREEYDVLDKRRGRDPEMGGKPQRRKNPQEGLYNELQKDKMAEAYSEIGMKGERRRGKGHDGLYQGLSTATKDTYDALHMQALPPRRAKRSGSGATNFSLLKQAGDVEENPGPTSMDWIWRILFLVGAATGAHSFEVQLLESGGGLIQPGGSLRLSCAASGFTFSSHAMTWVRQAPGKGLEWVSAISGSGDYTHYADSVKGRFTISRDNSKNTVYLQMNSLRAEDSAVYYCAKDEDGGSLLGHRGQGTLVTVSSTRIQNPDPAVYQLRDSKSSDKSVCLFTDFDSQTNVSQSKDSDVYITDKCVLDMRSMDFKSNSAVAWSNKSDFACANAFNNSIIPEDTFFPSSDVPCGTQSFGLLDPKLCYLLDGILFIYGVILTALFLRVKFSRSADAPAYQQGQNQLYNELNLGRREEYDVLDKRRGRDPEMGGKPQRRKNPQEGLYNELQKDKMAEAYSEIGMKGERRRGKGHDGLYQGLSTATKDTYDALHMQALPPR

SEQ ID NO: 17469 - protein, 896 aa, Artificial Sequence
  Synthetic Polypeptide
MALPVTALLLPLALLLHAARPQLQLQESGPGLVKPSETLSLTCTVSGDSISSGDYYWGWIRQPPGKGLEWIGHIYYSGVTYYNPSLKSRVTISVDTSRNQFSLKLSSVTAADTAVYYCTREDSSNWRSRGQGTLVTVSSLEGKPIPNPLLGLDSTGSGEDLKNVFPPEVAVFEPSEAEISHTQKATLVCLATGFYPDHVELSWWVNGKEVHSGVSTDPQPLKEQPALNDSRYCLSSRLRVSATFWQNPRNHFRCQVQFYGLSENDEWTQDRAKPVTQIVSAEAWGRADCGSQSFGLLDPKLCYLLDGILFIYGVILTALFLRVKFSRSADAPAYQQGQNQLYNELNLGRREEYDVLDKRRGRDPEMGGKPQRRKNPQEGLYNELQKDKMAEAYSEIGMKGERRRGKGHDGLYQGLSTATKDTYDALHMQALPPRRAKRSGSGATNFSLLKQAGDVEENPGPTSMDWIWRILFLVGAATGAHSFEVQLLESGGGLIQPGGSLRLSCAASGFTFSSHAMTWVRQAPGKGLEWVSAISGSGDYTHYADSVKGRFTISRDNSKNTVYLQMNSLRAEDSAVYYCAKDEDGGSLLGHRGQGTLVTVSSTREQKLISEEDGSGIQNPDPAVYQLRDSKSSDKSVCLFTDFDSQTNVSQSKDSDVYITDKTVLDMRSMDFKSNSAVAWSNKSDFACANAFNNSIIPEDTFFPSPESSCGTQSFGLLDPKLCYLLDGILFIYGVILTALFLRSKRSRLLHSDYMNMTPRRPGPTRKHYQPYAPPRDFAAYRSRVKFSRSADAPAYQQGQNQLYNELNLGRREEYDVLDKRRGRDPEMGGKPQRRKNPQEGLYNELQKDKMAEAYSEIGMKGERRRGKGHDGLYQGLSTATKDTYDALHMQALPPR

SEQ ID NO: 17470 - protein, 937 aa, Artificial Sequence
  Synthetic Polypeptide
MALPVTALLLPLALLLHAARPQLQLQESGPGLVKPSETLSLTCTVSGDSISSGDYYWGWIRQPPGKGLEWIGHIYYSGVTYYNPSLKSRVTISVDTSRNQFSLKLSSVTAADTAVYYCTREDSSNWRSRGQGTLVTVSSLEGKPIPNPLLGLDSTGSGEDLKNVFPPEVAVFEPSEAEISHTQKATLVCLATGFYPDHVELSWWVNGKEVHSGVSTDPQPLKEQPALNDSRYCLSSRLRVSATFWQNPRNHFRCQVQFYGLSENDEWTQDRAKPVTQIVSAEAWGRADCGSQSFGLLDPKLCYLLDGILFIYGVILTALFLRSKRSRLLHSDYMNMTPRRPGPTRKHYQPYAPPRDFAAYRSRVKFSRSADAPAYQQGQNQLYNELNLGRREEYDVLDKRRGRDPEMGGKPQRRKNPQEGLYNELQKDKMAEAYSEIGMKGERRRGKGHDGLYQGLSTATKDTYDALHMQALPPRRAKRSGSGATNFSLLKQAGDVEENPGPTSMDWIWRILFLVGAATGAHSFEVQLLESGGGLIQPGGSLRLSCAASGFTFSSHAMTWVRQAPGKGLEWVSAISGSGDYTHYADSVKGRFTISRDNSKNTVYLQMNSLRAEDSAVYYCAKDEDGGSLLGHRGQGTLVTVSSTREQKLISEEDGSGIQNPDPAVYQLRDSKSSDKSVCLFTDFDSQTNVSQSKDSDVYITDKTVLDMRSMDFKSNSAVAWSNKSDFACANAFNNSIIPEDTFFPSPESSCGTQSFGLLDPKLCYLLDGILFIYGVILTALFLRSKRSRLLHSDYMNMTPRRPGPTRKHYQPYAPPRDFAAYRSRVKFSRSADAPAYQQGQNQLYNELNLGRREEYDVLDKRRGRDPEMGGKPQRRKNPQEGLYNELQKDKMAEAYSEIGMKGERRRGKGHDGLYQGLSTATKDTYDALHMQALPPR

SEQ ID NO: 17471 - protein, 898 aa, Artificial Sequence
  Synthetic Polypeptide
MALPVTALLLPLALLLHAARPQLQLQESGPGLVKPSETLSLTCTVSGDSISSGDYYWGWIRQPPGKGLEWIGHIYYSGVTYYNPSLKSRVTISVDTSRNQFSLKLSSVTAADTAVYYCTREDSSNWRSRGQGTLVTVSSLEGKPIPNPLLGLDSTGSGEDLKNVFPPEVAVFEPSEAEISHTQKATLVCLATGFYPDHVELSWWVNGKEVHSGVSTDPQPLKEQPALNDSRYCLSSRLRVSATFWQNPRNHFRCQVQFYGLSENDEWTQDRAKPVTQIVSAEAWGRADCGSQSFGLLDPKLCYLLDGILFIYGVILTALFLRVKFSRSADAPAYQQGQNQLYNELNLGRREEYDVLDKRRGRDPEMGGKPQRRKNPQEGLYNELQKDKMAEAYSEIGMKGERRRGKGHDGLYQGLSTATKDTYDALHMQALPPRRAKRSGSGATNFSLLKQAGDVEENPGPTSMDWIWRILFLVGAATGAHSFEVQLLESGGGLIQPGGSLRLSCAASGFTFSSHAMTWVRQAPGKGLEWVSAISGSGDYTHYADSVKGRFTISRDNSKNTVYLQMNSLRAEDSAVYYCAKDEDGGSLLGHRGQGTLVTVSSTREQKLISEEDLGSGIQNPDPAVYQLRDSKSSDKSVCLFTDFDSQTNVSQSKDSDVYITDKTVLDMRSMDFKSNSAVAWSNKSDFACANAFNNSIIPEDTFFPSPESSCGTQSFGLLDPKLCYLLDGILFIYGVILTALFLKRGRKKLLYIFKQPFMRPVQTTQEEDGCSCRFPEEEEGGCELRVKFSRSADAPAYQQGQNQLYNELNLGRREEYDVLDKRRGRDPEMGGKPQRRKNPQEGLYNELQKDKMAEAYSEIGMKGERRRGKGHDGLYQGLSTATKDTYDALHMQALPPR

SEQ ID NO: 17472 - protein, 940 aa, Artificial Sequence
  Synthetic Polypeptide
MALPVTALLLPLALLLHAARPQLQLQESGPGLVKPSETLSLTCTVSGDSISSGDYYWGWIRQPPGKGLEWIGHIYYSGVTYYNPSLKSRVTISVDTSRNQFSLKLSSVTAADTAVYYCTREDSSNWRSRGQGTLVTVSSLEGKPIPNPLLGLDSTGSGEDLKNVFPPEVAVFEPSEAEISHTQKATLVCLATGFYPDHVELSWWVNGKEVHSGVSTDPQPLKEQPALNDSRYCLSSRLRVSATFWQNPRNHFRCQVQFYGLSENDEWTQDRAKPVTQIVSAEAWGRADCGSQSFGLLDPKLCYLLDGILFIYGVILTALFLKRGRKKLLYIFKQPFMRPVQTTQEEDGCSCRFPEEEEGGCELRVKFSRSADAPAYQQGQNQLYNELNLGRREEYDVLDKRRGRDPEMGGKPQRRKNPQEGLYNELQKDKMAEAYSEIGMKGERRRGKGHDGLYQGLSTATKDTYDALHMQALPPRRAKRSGSGATNFSLLKQAGDVEENPGPTSMDWIWRILFLVGAATGAHSFEVQLLESGGGLIQPGGSLRLSCAASGFTFSSHAMTWVRQAPGKGLEWVSAISGSGDYTHYADSVKGRFTISRDNSKNTVYLQMNSLRAEDSAVYYCAKDEDGGSLLGHRGQGTLVTVSSTREQKLISEEDLGSGIQNPDPAVYQLRDSKSSDKSVCLFTDFDSQTNVSQSKDSDVYITDKTVLDMRSMDFKSNSAVAWSNKSDFACANAFNNSIIPEDTFFPSPESSCGTQSFGLLDPKLCYLLDGILFIYGVILTALFLKRGRKKLLYIFKQPFMRPVQTTQEEDGCSCRFPEEEEGGCELRVKFSRSADAPAYQQGQNQLYNELNLGRREEYDVLDKRRGRDPEMGGKPQRRKNPQEGLYNELQKDKMAEAYSEIGMKGERRRGKGHDGLYQGLSTATKDTYDALHMQALPPR

SEQ ID NO: 17473 - protein, 830 aa, Artificial Sequence
  Synthetic Polypeptide
MALPVTALLLPLALLLHAARPQLQLQESGPGLVKPSETLSLTCTVSGDSISSGDYYWGWIRQPPGKGLEWIGHIYYSGVTYYNPSLKSRVTISVDTSRNQFSLKLSSVTAADTAVYYCTREDSSNWRSRGQGTLVTVSSLEQSFGLLDPKLCYLLDGILFIYGVILTALFLRVKFSRSADAPAYQQGQNQLYNELNLGRREEYDVLDKRRGRDPEMGGKPQRRKNPQEGLYNELQKDKMAEAYSEIGMKGERRRGKGHDGLYQGLSTATKDTYDALHMQALPPRRAKRSGSGATNFSLLKQAGDVEENPGPTSMDWIWRILFLVGAATGAHSFEVQLLESGGGLIQPGGSLRLSCAASGFTFSSHAMTWVRQAPGKGLEWVSAISGSGDYTHYADSVKGRFTISRDNSKNTVYLQMNSLRAEDSAVYYCAKDEDGGSLLGHRGQGTLVTVSSTRQSFGLLDPKLCYLLDGILFIYGVILTALFLRVKFSRSADAPAYQQGQNQLYNELNLGRREEYDVLDKRRGRDPEMGGKPQRRKNPQEGLYNELQKDKMAEAYSEIGMKGERRRGKGHDGLYQGLSTATKDTYDALHMQALPPRRAKRSGSGVKQTLNFDLLKLAGDVESNPGPSRGHMTEYKPTVRLATRDDVPRAVRTLAAAFADYPATRHTVDPDRHIERVTELQELFLTRVGLDIGKVWVADDGAAVAVWTTPESVEAGAVFAEIGPRMAELSGSRLAAQQQMEGLLAPHRPKEPAWFLATVGVSPDHQGKGLGSAVVLPGVEAAERAGVPAFLETSAPRNLPFYERLGFTVTADVEVPEGPRTWCMTRKPGA

SEQ ID NO: 17474 - protein, 655 aa, Artificial Sequence
  Synthetic Polypeptide
MALPVTALLLPLALLLHAARPQLQLQESGPGLVKPSETLSLTCTVSGDSISSGDYYWGWIRQPPGKGLEWIGHIYYSGVTYYNPSLKSRVTISVDTSRNQFSLKLSSVTAADTAVYYCTREDSSNWRSRGQGTLVTVSSLEGQPKANPTVTLFPPSSEELQANKATLVCLISDFYPGAVTVAWKADGSPVKAGVETTKPSKQSNNKYAASSYLSLTPEQWKSHRSYSCQVTHEGSTVEKTVAPTECSPIKTDVITMDPKDNCSKDANDTLLLQLTNTSAYYMYLLLLLKSVVYFAIITCCLLRRTAFCCNGEKSRAKRSGSGATNFSLLKQAGDVEENPGPTSMDWIWRILFLVGAATGAHSFEVQLLESGGGLIQPGGSLRLSCAASGFTFSSHAMTWVRQAPGKGLEWVSAISGSGDYTHYADSVKGRFTISRDNSKNTVYLQMNSLRAEDSAVYYCAKDEDGGSLLGHRGQGTLVTVSSTRASTKGPSVFPLAPSSKSTSGGTAALGCLVKDYFPEPVTVSWNSGALTSGVHTFPAVLQSSGLYSLSSVVTVPSSSLGTQTYICNVNHKPSNTKVDKRVEPKSCEVKTDSTDHVKPKETENTKQPSKSCHKPKAIVHTEKVNMMSLTVLGLRMLFAKTVAVNFLLTAKLFFL

SEQ ID NO: 17475 - protein, 633 aa, Artificial Sequence
  Synthetic Polypeptide
MALPVTALLLPLALLLHAARPQLQLQESGPGLVKPSETLSLTCTVSGDSISSGDYYWGWIRQPPGKGLEWIGHIYYSGVTYYNPSLKSRVTISVDTSRNQFSLKLSSVTAADTAVYYCTREDSSNWRSRGQGTLVTVSSLEGQPKANPTVTLFPPSSEELQANKATLVCLISDFYPGAVTVAWKADGSPVKAGVETTKPSKQSNNKYAASSYLSLTPEQWKSHRSYSCQVTHEGSTVEKTVAPTECSGRADCGITSASYHQGVLSATILYEILLGKATLYAVLVSALVLMAMVKRKDSRGRAKRSGSGATNFSLLKQAGDVEENPGPTSMDWIWRILFLVGAATGAHSFEVQLLESGGGLIQPGGSLRLSCAASGFTFSSHAMTWVRQAPGKGLEWVSAISGSGDYTHYADSVKGRFTISRDNSKNTVYLQMNSLRAEDSAVYYCAKDEDGGSLLGHRGQGTLVTVSSTRASTKGPSVFPLAPSSKSTSGGTAALGCLVKDYFPEPVTVSWNSGALTSGVHTFPAVLQSSGLYSLSSVVTVPSSSLGTQTYICNVNHKPSNTKVDKRVEPKSCIPEDTFFPSSDVPCDVKLVEKSFETDTNLNFQNLSVIGFRILLLKVAGFNLLMTLRLWSS

SEQ ID NO: 17476 - protein, 633 aa, Artificial Sequence
  Synthetic Polypeptide
MALPVTALLLPLALLLHAARPQLQLQESGPGLVKPSETLSLTCTVSGDSISSGDYYWGWIRQPPGKGLEWIGHIYYSGVTYYNPSLKSRVTISVDTSRNQFSLKLSSVTAADTAVYYCTREDSSNWRSRGQGTLVTVSSLEGQPKANPTVTLFPPSSEELQANKATLVCLISDFYPGAVTVAWKADGSPVKAGVETTKPSKQSNNKYAASSYLSLTPEQWKSHRSYSCQVTHEGSTVEKTVAPTECSGRADCGFTSESYQQGVLSATILYEILLGKATLYAVLVSALVLMAMVKRKDSRGRAKRSGSGATNFSLLKQAGDVEENPGPTSMDWIWRILFLVGAATGAHSFEVQLLESGGGLIQPGGSLRLSCAASGFTFSSHAMTWVRQAPGKGLEWVSAISGSGDYTHYADSVKGRFTISRDNSKNTVYLQMNSLRAEDSAVYYCAKDEDGGSLLGHRGQGTLVTVSSTRASTKGPSVFPLAPSSKSTSGGTAALGCLVKDYFPEPVTVSWNSGALTSGVHTFPAVLQSSGLYSLSSVVTVPSSSLGTQTYICNVNHKPSNTKVDKRVEPKSCIPEDTFFPSPESSCDVKLVEKSFETDTNLNFQNLSVIGFRILLLKVAGFNLLMTLRLWSS

SEQ ID NO: 17477 - protein, 454 aa, Artificial Sequence
  Synthetic Polypeptide
MALPVTALLLPLALLLHAARPQLQLQESGPGLVKPSETLSLTCTVSGDSISSGDYYWGWIRQPPGKGLEWIGHIYYSGVTYYNPSLKSRVTISVDTSRNQFSLKLSSVTAADTAVYYCTREDSSNWRSRGQGTLVTVSSLESGGGGSFEVQLLESGGGLIQPGGSLRLSCAASGFTFSSHAMTWVRQAPGKGLEWVSAISGSGDYTHYADSVKGRFTISRDNSKNTVYLQMNSLRAEDSAVYYCAKDEDGGSLLGHRGQGTLVTVSSTRDGNEEMGGITQTPYKVSISGTTVILTCPQYPGSEILWQHNDKNIGGDEDDKNIGSDEDHLSLKEFSELEQSGYYVCYPRGSKPEDANFYLYLRARVCENCMEMDVMSVATIVIVDICITGGLLLLVYYWSKNRKAKAKPVTRGAGAGGRQRGQNKERPPPVPNPDYEPIRKGQRDLYSGLNQRRI

SEQ ID NO: 17478 - protein, 419 aa, Artificial Sequence
  Synthetic Polypeptide
MALPVTALLLPLALLLHAARPQLQLQESGPGLVKPSETLSLTCTVSGDSISSGDYYWGWIRQPPGKGLEWIGHIYYSGVTYYNPSLKSRVTISVDTSRNQFSLKLSSVTAADTAVYYCTREDSSNWRSRGQGTLVTVSSLESGGGGSFEVQLLESGGGLIQPGGSLRLSCAASGFTFSSHAMTWVRQAPGKGLEWVSAISGSGDYTHYADSVKGRFTISRDNSKNTVYLQMNSLRAEDSAVYYCAKDEDGGSLLGHRGQGTLVTVSSTRFKIPIEELEDRVFVNCNTSITWVEGTVGTLLSDITRLDLGKRILDPRGIYRCNGTDIYKDKESTVQVHYRMCQSCVELDPATVAGIIVTDVIATLLLALGVFCFAGHETGRLSGAADTQALLRNDQVYQPLRDRDDAQYSHLGGNWARNK

SEQ ID NO: 17479 - protein, 429 aa, Artificial Sequence
  Synthetic Polypeptide
MALPVTALLLPLALLLHAARPQLQLQESGPGLVKPSETLSLTCTVSGDSISSGDYYWGWIRQPPGKGLEWIGHIYYSGVTYYNPSLKSRVTISVDTSRNQFSLKLSSVTAADTAVYYCTREDSSNWRSRGQGTLVTVSSLESGGGGSFEVQLLESGGGLIQPGGSLRLSCAASGFTFSSHAMTWVRQAPGKGLEWVSAISGSGDYTHYADSVKGRFTISRDNSKNTVYLQMNSLRAEDSAVYYCAKDEDGGSLLGHRGQGTLVTVSSTRQSIKGNHLVKVYDYQEDGSVLLTCDAEAKNITWFKDGKMIGFLTEDKKKWNLGSNAKDPRGMYQCKGSQNKSKPLQVYYRMCQNCIELNAATISGFLFAEIVSIFVLAVGVYFIAGQDGVRQSRASDKQTLLPNDQLYQPLKDREDDQYSHLQGNQLRRN

SEQ ID NO: 17480 - protein, 412 aa, Artificial Sequence
  Synthetic Polypeptide
MALPVTALLLPLALLLHAARPQLQLQESGPGLVKPSETLSLTCTVSGDSISSGDYYWGWIRQPPGKGLEWIGHIYYSGVTYYNPSLKSRVTISVDTSRNQFSLKLSSVTAADTAVYYCTREDSSNWRSRGQGTLVTVSSLESGGGGSFEVQLLESGGGLIQPGGSLRLSCAASGFTFSSHAMTWVRQAPGKGLEWVSAISGSGDYTHYADSVKGRFTISRDNSKNTVYLQMNSLRAEDSAVYYCAKDEDGGSLLGHRGQGTLVTVSSTRQSFGLLDPKLCYLLDGILFIYGVILTALFLRVKFSRSADAPAYQQGQNQLYNELNLGRREEYDVLDKRRGRDPEMGGKPQRRKNPQEGLYNELQKDKMAEAYSEIGMKGERRRGKGHDGLYQGLSTATKDTYDALHMQALPPR

SEQ ID NO: 17481 - protein, 455 aa, Artificial Sequence
  Synthetic Polypeptide
MALPVTALLLPLALLLHAARPEVQLLESGGGLIQPGGSLRLSCAASGFTFSSHAMTWVRQAPGKGLEWVSAISGSGDYTHYADSVKGRFTISRDNSKNTVYLQMNSLRAEDSAVYYCAKDEDGGSLLGHRGQGTLVTVSSLESGGGGSFEQLQLQESGPGLVKPSETLSLTCTVSGDSISSGDYYWGWIRQPPGKGLEWIGHIYYSGVTYYNPSLKSRVTISVDTSRNQFSLKLSSVTAADTAVYYCTREDSSNWRSRGQGTLVTVSSTRDGNEEMGGITQTPYKVSISGTTVILTCPQYPGSEILWQHNDKNIGGDEDDKNIGSDEDHLSLKEFSELEQSGYYVCYPRGSKPEDANFYLYLRARVCENCMEMDVMSVATIVIVDICITGGLLLLVYYWSKNRKAKAKPVTRGAGAGGRQRGQNKERPPPVPNPDYEPIRKGQRDLYSGLNQRRI

SEQ ID NO: 17482 - protein, 420 aa, Artificial Sequence
  Synthetic Polypeptide
MALPVTALLLPLALLLHAARPEVQLLESGGGLIQPGGSLRLSCAASGFTFSSHAMTWVRQAPGKGLEWVSAISGSGDYTHYADSVKGRFTISRDNSKNTVYLQMNSLRAEDSAVYYCAKDEDGGSLLGHRGQGTLVTVSSLESGGGGSFEQLQLQESGPGLVKPSETLSLTCTVSGDSISSGDYYWGWIRQPPGKGLEWIGHIYYSGVTYYNPSLKSRVTISVDTSRNQFSLKLSSVTAADTAVYYCTREDSSNWRSRGQGTLVTVSSTRFKIPIEELEDRVFVNCNTSITWVEGTVGTLLSDITRLDLGKRILDPRGIYRCNGTDIYKDKESTVQVHYRMCQSCVELDPATVAGIIVTDVIATLLLALGVFCFAGHETGRLSGAADTQALLRNDQVYQPLRDRDDAQYSHLGGNWARNK

SEQ ID NO: 17483 - protein, 430 aa, Artificial Sequence
  Synthetic Polypeptide
MALPVTALLLPLALLLHAARPEVQLLESGGGLIQPGGSLRLSCAASGFTFSSHAMTWVRQAPGKGLEWVSAISGSGDYTHYADSVKGRFTISRDNSKNTVYLQMNSLRAEDSAVYYCAKDEDGGSLLGHRGQGTLVTVSSLESGGGGSFEQLQLQESGPGLVKPSETLSLTCTVSGDSISSGDYYWGWIRQPPGKGLEWIGHIYYSGVTYYNPSLKSRVTISVDTSRNQFSLKLSSVTAADTAVYYCTREDSSNWRSRGQGTLVTVSSTRQSIKGNHLVKVYDYQEDGSVLLTCDAEAKNITWFKDGKMIGFLTEDKKKWNLGSNAKDPRGMYQCKGSQNKSKPLQVYYRMCQNCIELNAATISGFLFAEIVSIFVLAVGVYFIAGQDGVRQSRASDKQTLLPNDQLYQPLKDREDDQYSHLQGNQLRRN

SEQ ID NO: 17484 - protein, 413 aa, Artificial Sequence
  Synthetic Polypeptide
MALPVTALLLPLALLLHAARPEVQLLESGGGLIQPGGSLRLSCAASGFTFSSHAMTWVRQAPGKGLEWVSAISGSGDYTHYADSVKGRFTISRDNSKNTVYLQMNSLRAEDSAVYYCAKDEDGGSLLGHRGQGTLVTVSSLESGGGGSFEQLQLQESGPGLVKPSETLSLTCTVSGDSISSGDYYWGWIRQPPGKGLEWIGHIYYSGVTYYNPSLKSRVTISVDTSRNQFSLKLSSVTAADTAVYYCTREDSSNWRSRGQGTLVTVSSTRQSFGLLDPKLCYLLDGILFIYGVILTALFLRVKFSRSADAPAYQQGQNQLYNELNLGRREEYDVLDKRRGRDPEMGGKPQRRKNPQEGLYNELQKDKMAEAYSEIGMKGERRRGKGHDGLYQGLSTATKDTYDALHMQALPPR

SEQ ID NO: 17485 - protein, 645 aa, Artificial Sequence
  Synthetic Polypeptide
MALPVTALLLPLALLLHAARPQLQLQESGPGLVKPSETLSLTCTVSGDSISSGDYYWGWIRQPPGKGLEWIGHIYYSGVTYYNPSLKSRVTISVDTSRNQFSLKLSSVTAADTAVYYCTREDSSNWRSRGQGTLVTVSSLESGGGGSFEVQLLESGGGLIQPGGSLRLSCAASGFTFSSHAMTWVRQAPGKGLEWVSAISGSGDYTHYADSVKGRFTISRDNSKNTVYLQMNSLRAEDSAVYYCAKDEDGGSLLGHRGQGTLVTVSSTRGSGIQNPDPAVYQLRDSKSSDKSVCLFTDFDSQTNVSQSKDSDVYITDKTVLDMRSMDFKSNSAVAWSNKSDFACANAFNNSIIPEDTFFPSPESSCDVKLVEKSFETDTNLNFQNLSVIGFRILLLKVAGFNLLMTLRLWSSRAKRSGSGVKQTLNFDLLKLAGDVESNPGPSRGHMTEYKPTVRLATRDDVPRAVRTLAAAFADYPATRHTVDPDRHIERVTELQELFLTRVGLDIGKVWVADDGAAVAVWTTPESVEAGAVFAEIGPRMAELSGSRLAAQQQMEGLLAPHRPKEPAWFLATVGVSPDHQGKGLGSAVVLPGVEAAERAGVPAFLETSAPRNLPFYERLGFTVTADVEVPEGPRTWCMTRKPGA

SEQ ID NO: 17486 - protein, 677 aa, Artificial Sequence
  Synthetic Polypeptide
MALPVTALLLPLALLLHAARPQLQLQESGPGLVKPSETLSLTCTVSGDSISSGDYYWGWIRQPPGKGLEWIGHIYYSGVTYYNPSLKSRVTISVDTSRNQFSLKLSSVTAADTAVYYCTREDSSNWRSRGQGTLVTVSSLESGGGGSFEVQLLESGGGLIQPGGSLRLSCAASGFTFSSHAMTWVRQAPGKGLEWVSAISGSGDYTHYADSVKGRFTISRDNSKNTVYLQMNSLRAEDSAVYYCAKDEDGGSLLGHRGQGTLVTVSSLEDLKNVFPPEVAVFEPSEAEISHTQKATLVCLATGFYPDHVELSWWVNGKEVHSGVSTDPQPLKEQPALNDSRYCLSSRLRVSATFWQNPRNHFRCQVQFYGLSENDEWTQDRAKPVTQIVSAEAWGRADCGFTSESYQQGVLSATILYEILLGKATLYAVLVSALVLMAMVKRKDSRGRAKRSGSGATNFSLLKQAGDVEENPGPTRGHMTEYKPTVRLATRDDVPRAVRTLAAAFADYPATRHTVDPDRHIERVTELQELFLTRVGLDIGKVWVADDGAAVAVWTTPESVEAGAVFAEIGPRMAELSGSRLAAQQQMEGLLAPHRPKEPAWFLATVGVSPDHQGKGLGSAVVLPGVEAAERAGVPAFLETSAPRNLPFYERLGFTVTADVEVPEGPRTWCMTRKPGA

SEQ ID NO: 17487 - protein, 727 aa, Artificial Sequence
  Synthetic Polypeptide
MALPVTALLLPLALLLHAARPQLQLQESGPGLVKPSETLSLTCTVSGDSISSGDYYWGWIRQPPGKGLEWIGHIYYSGVTYYNPSLKSRVTISVDTSRNQFSLKLSSVTAADTAVYYCTREDSSNWRSRGQGTLVTVSSLESGGGGSFEVQLLESGGGLIQPGGSLRLSCAASGFTFSSHAMTWVRQAPGKGLEWVSAISGSGDYTHYADSVKGRFTISRDNSKNTVYLQMNSLRAEDSAVYYCAKDEDGGSLLGHRGQGTLVTVSSTREQKLISEEDLGSGTPFPSLAPPIMLLVDGKQQMVVVCLVLDVAPPGLDSPIWFSAGNGSALDAFTYGPSPATDGTWTNLAHLSLPSEELASWEPLVCHTGPGAEGHSRSTQPMHLSGEASTARTCPQEPLRGTPGGALWLGVLRLLLFKLLLFDLLLTCSCLCDPAGPLPSPATTTRLRALGSHRLHPATETGGREATSSPRPQPRDRRWGDTPPGRKPGSPVRAKRSGSGVKQTLNFDLLKLAGDVESNPGPSRSRGHMTEYKPTVRLATRDDVPRAVRTLAAAFADYPATRHTVDPDRHIERVTELQELFLTRVGLDIGKVWVADDGAAVAVWTTPESVEAGAVFAEIGPRMAELSGSRLAAQQQMEGLLAPHRPKEPAWFLATVGVSPDHQGKGLGSAVVLPGVEAAERAGVPAFLETSAPRNLPFYERLGFTVTADVEVPEGPRTWCMTRKPGA

SEQ ID NO: 17488 - protein, 549 aa, Artificial Sequence; identical to SEQ ID NO: 17196
  Synthetic Polypeptide

SEQ ID NO: 17489 - protein, 319 aa, Artificial Sequence; identical to SEQ ID NO: 17197
  Synthetic Polypeptide

SEQ ID NO: 17490 - protein, 447 aa, Artificial Sequence
  Synthetic Polypeptide
MDWIWRILFLVGAATGAHSFEVQLLESGGGLIQPGGSLRLSCAASGFTFSSHAMTWVRQAPGKGLEWVSAISGSGDYTHYADSVKGRFTISRDNSKNTVYLQMNSLRAEDSAVYYCAKDEDGGSLLGHRGQGTLVTVSSTRIQNPDPAVYQLRDSKSSDKSVCLFTDFDSQTNVSQSKDSDVYITDKTVLDMRSMDFKSNSAVAWSNKSDFACANAFNNSIIPEDTFFPSPESSCDVKLVEKSFETDTNLNFQNLSVIGFRILLLKVAGFNLLMTLRLWSSRAKRSGSGVKQTLNFDLLKLAGDVESNPGPSRGHMAKPLSQEESTLIERATATINSIPISEDYSVASAALSSDGRIFTGVNVYHFTGGPCAELVVLGTAAAAAAGNLTCIVAIGNENRGILSPCGRCRQVLLDLHPGIKAIVKDSDGQPTAVGIRELLPSGYVWEG

SEQ ID NO: 17491 - protein, 281 aa, Artificial Sequence
  Synthetic Polypeptide
MDWIWRILFLVGAATGAHSFEVQLLESGGGLIQPGGSLRLSCAASGFTFSSHAMTWVRQAPGKGLEWVSAISGSGDYTHYADSVKGRFTISRDNSKNTVYLQMNSLRAEDSAVYYCAKDEDGGSLLGHRGQGTLVTVSSTRIQNPDPAVYQLRDSKSSDKSVCLFTDFDSQTNVSQSKDSDVYITDKTVLDMRSMDFKSNSAVAWSNKSDFACANAFNNSIIPEDTFFPSPESSCDVKLVEKSFETDTNLNFQNLSVIGFRILLLKVAGFNLLMTLRLWSS

SEQ ID NO: 17492 - protein, 567 aa, Artificial Sequence; identical to SEQ ID NO: 17200
  Synthetic Polypeptide

SEQ ID NO: 17493 - protein, 337 aa, Artificial Sequence; identical to SEQ ID NO: 17201
  Synthetic Polypeptide

SEQ ID NO: 17494 - protein, 459 aa, Artificial Sequence
  Synthetic Polypeptide
MDWIWRILFLVGAATGAHSFEVQLLESGGGLIQPGGSLRLSCAASGFTFSSHAMTWVRQAPGKGLEWVSAISGSGDYTHYADSVKGRFTISRDNSKNTVYLQMNSLRAEDSAVYYCAKDEDGGSLLGHRGQGTLVTVSSTREQKLISEEDGSGIQNPDPAVYQLRDSKSSDKSVCLFTDFDSQTNVSQSKDSDVYITDKCVLDMRSMDFKSNSAVAWSNKSDFACANAFNNSIIPEDTFFPSPESSCDVKLVEKSFETDTNLNFQNLSVIGFRILLLKVAGFNLLMTLRLWSSRAKRSGSGVKQTLNFDLLKLAGDVESNPGPSRGHMAKPLSQEESTLIERATATINSIPISEDYSVASAALSSDGRIFTGVNVYHFTGGPCAELVVLGTAAAAAAGNLTCIVAIGNENRGILSPCGRCRQVLLDLHPGIKAIVKDSDGQPTAVGIRELLPSGYVWEG

SEQ ID NO: 17495 - protein, 293 aa, Artificial Sequence
  Synthetic Polypeptide
MDWIWRILFLVGAATGAHSFEVQLLESGGGLIQPGGSLRLSCAASGFTFSSHAMTWVRQAPGKGLEWVSAISGSGDYTHYADSVKGRFTISRDNSKNTVYLQMNSLRAEDSAVYYCAKDEDGGSLLGHRGQGTLVTVSSTREQKLISEEDGSGIQNPDPAVYQLRDSKSSDKSVCLFTDFDSQTNVSQSKDSDVYITDKCVLDMRSMDFKSNSAVAWSNKSDFACANAFNNSIIPEDTFFPSPESSCDVKLVEKSFETDTNLNFQNLSVIGFRILLLKVAGFNLLMTLRLWSS

SEQ ID NO: 17496 - protein, 645 aa, Artificial Sequence
  Synthetic Polypeptide
MALPVTALLLPLALLLHAARPQLQLQESGPGLVKPSETLSLTCTVSGDSISSGDYYWGWIRQPPGKGLEWIGHIYYSGVTYYNPSLKSRVTISVDTSRNQFSLKLSSVTAADTAVYYCTREDSSNWRSRGQGTLVTVSSLESGGGGSFEVQLLESGGGLIQPGGSLRLSCAASGFTFSSHAMTWVRQAPGKGLEWVSAISGSGDYTHYADSVKGRFTISRDNSKNTVYLQMNSLRAEDSAVYYCAKDEDGGSLLGHRGQGTLVTVSSTRGSGIQNPDPAVYQLRDSKSSDKSVCLFTDFDSQTNVSQSKDSDVYITDKTVLDMRSMDFKSNSAVAWSNKSDFACANAFNNSIIPEDTFFPSSDVPCDVKLVEKSFETDTNLNFQNLSVIGFRILLLKVAGFNLLMTLRLWSSRAKRSGSGVKQTLNFDLLKLAGDVESNPGPSRGHMTEYKPTVRLATRDDVPRAVRTLAAAFADYPATRHTVDPDRHIERVTELQELFLTRVGLDIGKVWVADDGAAVAVWTTPESVEAGAVFAEIGPRMAELSGSRLAAQQQMEGLLAPHRPKEPAWFLATVGVSPDHQGKGLGSAVVLPGVEAAERAGVPAFLETSAPRNLPFYERLGFTVTADVEVPEGPRTWCMTRKPGA

SEQ ID NO: 17497 - protein, 677 aa, Artificial Sequence
  Synthetic Polypeptide
MALPVTALLLPLALLLHAARPQLQLQESGPGLVKPSETLSLTCTVSGDSISSGDYYWGWIRQPPGKGLEWIGHIYYSGVTYYNPSLKSRVTISVDTSRNQFSLKLSSVTAADTAVYYCTREDSSNWRSRGQGTLVTVSSLESGGGGSFEVQLLESGGGLIQPGGSLRLSCAASGFTFSSHAMTWVRQAPGKGLEWVSAISGSGDYTHYADSVKGRFTISRDNSKNTVYLQMNSLRAEDSAVYYCAKDEDGGSLLGHRGQGTLVTVSSLEDLKNVFPPEVAVFEPSKAEIAHTQKATLVCLATGFYPDHVELSWWVNGKEVHSGVSTDPQPLKEQPALNDSRYCLSSRLRVSATFWQNPRNHFRCQVQFYGLSENDEWTQDRAKPVTQIVSAEAWGRADCGITSASYHQGVLSATILYEILLGKATLYAVLVSALVLMAMVKRKDSRGRAKRSGSGATNFSLLKQAGDVEENPGPTRGHMTEYKPTVRLATRDDVPRAVRTLAAAFADYPATRHTVDPDRHIERVTELQELFLTRVGLDIGKVWVADDGAAVAVWTTPESVEAGAVFAEIGPRMAELSGSRLAAQQQMEGLLAPHRPKEPAWFLATVGVSPDHQGKGLGSAVVLPGVEAAERAGVPAFLETSAPRNLPFYERLGFTVTADVEVPEGPRTWCMTRKPGA

SEQ ID NO: 17498 - protein, 700 aa, Artificial Sequence
  Synthetic Polypeptide
MALPVTALLLPLALLLHAARPQLQLQESGPGLVKPSETLSLTCTVSGDSISSGDYYWGWIRQPPGKGLEWIGHIYYSGVTYYNPSLKSRVTISVDTSRNQFSLKLSSVTAADTAVYYCTREDSSNWRSRGQGTLVTVSSLESGGGGSFEVQLLESGGGLIQPGGSLRLSCAASGFTFSSHAMTWVRQAPGKGLEWVSAISGSGDYTHYADSVKGRFTISRDNSKNTVYLQMNSLRAEDSAVYYCAKDEDGGSLLGHRGQGTLVTVSSTRGSGGGGSGGGGSGDGNEEMGGITQTPYKVSISGTTVILTCPQYPGSEILWQHNDKNIGGDEDDKNIGSDEDHLSLKEFSELEQSGYYVCYPRGSKPEDANFYLYLRARVCENCMEMDVMSVATIVIVDICITGGLLLLVYYWSKNRKAKAKPVTRGAGAGGRQRGQNKERPPPVPNPDYEPIRKGQRDLYSGLNQRRIRAKRSGSGVKQTLNFDLLKLAGDVESNPGPSRGHMTEYKPTVRLATRDDVPRAVRTLAAAFADYPATRHTVDPDRHIERVTELQELFLTRVGLDIGKVWVADDGAAVAVWTTPESVEAGAVFAEIGPRMAELSGSRLAAQQQMEGLLAPHRPKEPAWFLATVGVSPDHQGKGLGSAVVLPGVEAAERAGVPAFLETSAPRNLPFYERLGFTVTADVEVPEGPRTWCMTRKPGA

SEQ ID NO: 17499 - protein, 665 aa, Artificial Sequence
  Synthetic Polypeptide
MALPVTALLLPLALLLHAARPQLQLQESGPGLVKPSETLSLTCTVSGDSISSGDYYWGWIRQPPGKGLEWIGHIYYSGVTYYNPSLKSRVTISVDTSRNQFSLKLSSVTAADTAVYYCTREDSSNWRSRGQGTLVTVSSLESGGGGSFEVQLLESGGGLIQPGGSLRLSCAASGFTFSSHAMTWVRQAPGKGLEWVSAISGSGDYTHYADSVKGRFTISRDNSKNTVYLQMNSLRAEDSAVYYCAKDEDGGSLLGHRGQGTLVTVSSTRGSGGGGSGGGGSGFKIPIEELEDRVFVNCNTSITWVEGTVGTLLSDITRLDLGKRILDPRGIYRCNGTDIYKDKESTVQVHYRMCQSCVELDPATVAGIIVTDVIATLLLALGVFCFAGHETGRLSGAADTQALLRNDQVYQPLRDRDDAQYSHLGGNWARNKRAKRSGSGVKQTLNFDLLKLAGDVESNPGPSRGHMTEYKPTVRLATRDDVPRAVRTLAAAFADYPATRHTVDPDRHIERVTELQELFLTRVGLDIGKVWVADDGAAVAVWTTPESVEAGAVFAEIGPRMAELSGSRLAAQQQMEGLLAPHRPKEPAWFLATVGVSPDHQGKGLGSAVVLPGVEAAERAGVPAFLETSAPRNLPFYERLGFTVTADVEVPEGPRTWCMTRKPGA

SEQ ID NO: 17500 - protein, 675 aa, Artificial Sequence
  Synthetic Polypeptide
MALPVTALLLPLALLLHAARPQLQLQESGPGLVKPSETLSLTCTVSGDSISSGDYYWGWIRQPPGKGLEWIGHIYYSGVTYYNPSLKSRVTISVDTSRNQFSLKLSSVTAADTAVYYCTREDSSNWRSRGQGTLVTVSSLESGGGGSFEVQLLESGGGLIQPGGSLRLSCAASGFTFSSHAMTWVRQAPGKGLEWVSAISGSGDYTHYADSVKGRFTISRDNSKNTVYLQMNSLRAEDSAVYYCAKDEDGGSLLGHRGQGTLVTVSSTRGSGGGGSGGGGSGQSIKGNHLVKVYDYQEDGSVLLTCDAEAKNITWFKDGKMIGFLTEDKKKWNLGSNAKDPRGMYQCKGSQNKSKPLQVYYRMCQNCIELNAATISGFLFAEIVSIFVLAVGVYFIAGQDGVRQSRASDKQTLLPNDQLYQPLKDREDDQYSHLQGNQLRRNRAKRSGSGVKQTLNFDLLKLAGDVESNPGPSRGHMTEYKPTVRLATRDDVPRAVRTLAAAFADYPATRHTVDPDRHIERVTELQELFLTRVGLDIGKVWVADDGAAVAVWTTPESVEAGAVFAEIGPRMAELSGSRLAAQQQMEGLLAPHRPKEPAWFLATVGVSPDHQGKGLGSAVVLPGVEAAERAGVPAFLETSAPRNLPFYERLGFTVTADVEVPEGPRTWCMTRKPGA

SEQ ID NO: 17501 - protein, 658 aa, Artificial Sequence
  Synthetic Polypeptide
MALPVTALLLPLALLLHAARPQLQLQESGPGLVKPSETLSLTCTVSGDSISSGDYYWGWIRQPPGKGLEWIGHIYYSGVTYYNPSLKSRVTISVDTSRNQFSLKLSSVTAADTAVYYCTREDSSNWRSRGQGTLVTVSSLESGGGGSFEVQLLESGGGLIQPGGSLRLSCAASGFTFSSHAMTWVRQAPGKGLEWVSAISGSGDYTHYADSVKGRFTISRDNSKNTVYLQMNSLRAEDSAVYYCAKDEDGGSLLGHRGQGTLVTVSSTRGSGGGGSGGGGSGQSFGLLDPKLCYLLDGILFIYGVILTALFLRVKFSRSADAPAYQQGQNQLYNELNLGRREEYDVLDKRRGRDPEMGGKPQRRKNPQEGLYNELQKDKMAEAYSEIGMKGERRRGKGHDGLYQGLSTATKDTYDALHMQALPPRRAKRSGSGVKQTLNFDLLKLAGDVESNPGPSRGHMTEYKPTVRLATRDDVPRAVRTLAAAFADYPATRHTVDPDRHIERVTELQELFLTRVGLDIGKVWVADDGAAVAVWTTPESVEAGAVFAEIGPRMAELSGSRLAAQQQMEGLLAPHRPKEPAWFLATVGVSPDHQGKGLGSAVVLPGVEAAERAGVPAFLETSAPRNLPFYERLGFTVTADVEVPEGPRTWCMTRKPGA

SEQ ID NO: 17502 - protein, 866 aa, Artificial Sequence
  Synthetic Polypeptide
MALPVTALLLPLALLLHAARPQLQLQESGPGLVKPSETLSLTCTVSGDSISSGDYYWGWIRQPPGKGLEWIGHIYYSGVTYYNPSLKSRVTISVDTSRNQFSLKLSSVTAADTAVYYCTREDSSNWRSRGQGTLVTVSSLEGQPKANPTVTLFPPSSEELQANKATLVCLISDFYPGAVTVAWKADGSPVKAGVETTKPSKQSNNKYAASSYLSLTPEQWKSHRSYSCQVTHEGSTVEKTVAPTECSGRADCGFTSESYQQGVLSATILYEILLGKATLYAVLVSALVLMAMVKRKDSRGRAKRSGSGATNFSLLKQAGDVEENPGPTSMDWIWRILFLVGAATGAHSFEVQLLESGGGLIQPGGSLRLSCAASGFTFSSHAMTWVRQAPGKGLEWVSAISGSGDYTHYADSVKGRFTISRDNSKNTVYLQMNSLRAEDSAVYYCAKDEDGGSLLGHRGQGTLVTVSSTRASTKGPSVFPLAPSSKSTSGGTAALGCLVKDYFPEPVTVSWNSGALTSGVHTFPAVLQSSGLYSLSSVVTVPSSSLGTQTYICNVNHKPSNTKVDKRVEPKSCIPEDTFFPSPESSCDVKLVEKSFETDTNLNFQNLSVIGFRILLLKVAGFNLLMTLRLWSSRAKRSGSGVKQTLNFDLLKLAGDVESNPGPSRGHMTEYKPTVRLATRDDVPRAVRTLAAAFADYPATRHTVDPDRHIERVTELQELFLTRVGLDIGKVWVADDGAAVAVWTTPESVEAGAVFAEIGPRMAELSGSRLAAQQQMEGLLAPHRPKEPAWFLATVGVSPDHQGKGLGSAVVLPGVEAAERAGVPAFLETSAPRNLPFYERLGFTVTADVEVPEGPRTWCMTRKPGA

SEQ ID NO: 17503 - protein, 633 aa, Artificial Sequence; identical to SEQ ID NO: 17476
  Synthetic Polypeptide

SEQ ID NO: 17504 - protein, 661 aa, Artificial Sequence
  Synthetic Polypeptide
MALPVTALLLPLALLLHAARPQLQLQESGPGLVKPSETLSLTCTVSGDSISSGDYYWGWIRQPPGKGLEWIGHIYYSGVTYYNPSLKSRVTISVDTSRNQFSLKLSSVTAADTAVYYCTREDSSNWRSRGQGTLVTVSSLEGSGRADCGFTSESYQQGVLSATILYEILLGKATLYAVLVSALVLMAMVKRKDSRGRAKRSGSGATNFSLLKQAGDVEENPGPTSMDWIWRILFLVGAATGAHSFEVQLLESGGGLIQPGGSLRLSCAASGFTFSSHAMTWVRQAPGKGLEWVSAISGSGDYTHYADSVKGRFTISRDNSKNTVYLQMNSLRAEDSAVYYCAKDEDGGSLLGHRGQGTLVTVSSTRGSIPEDTFFPSPESSCDVKLVEKSFETDTNLNFQNLSVIGFRILLLKVAGFNLLMTLRLWSSRAKRSGSGVKQTLNFDLLKLAGDVESNPGPSRGHMTEYKPTVRLATRDDVPRAVRTLAAAFADYPATRHTVDPDRHIERVTELQELFLTRVGLDIGKVWVADDGAAVAVWTTPESVEAGAVFAEIGPRMAELSGSRLAAQQQMEGLLAPHRPKEPAWFLATVGVSPDHQGKGLGSAVVLPGVEAAERAGVPAFLETSAPRNLPFYERLGFTVTADVEVPEGPRTWCMTRKPGA

SEQ ID NO: 17505 - protein, 428 aa, Artificial Sequence
  Synthetic Polypeptide
MALPVTALLLPLALLLHAARPQLQLQESGPGLVKPSETLSLTCTVSGDSISSGDYYWGWIRQPPGKGLEWIGHIYYSGVTYYNPSLKSRVTISVDTSRNQFSLKLSSVTAADTAVYYCTREDSSNWRSRGQGTLVTVSSLEGSGRADCGFTSESYQQGVLSATILYEILLGKATLYAVLVSALVLMAMVKRKDSRGRAKRSGSGATNFSLLKQAGDVEENPGPTSMDWIWRILFLVGAATGAHSFEVQLLESGGGLIQPGGSLRLSCAASGFTFSSHAMTWVRQAPGKGLEWVSAISGSGDYTHYADSVKGRFTISRDNSKNTVYLQMNSLRAEDSAVYYCAKDEDGGSLLGHRGQGTLVTVSSTRGSIPEDTFFPSPESSCDVKLVEKSFETDTNLNFQNLSVIGFRILLLKVAGFNLLMTLRLWSS

SEQ ID NO: 17506 - protein, 670 aa, Artificial Sequence
  Synthetic Polypeptide
MALPVTALLLPLALLLHAARPQLQLQESGPGLVKPSETLSLTCTVSGDSISSGDYYWGWIRQPPGKGLEWIGHIYYSGVTYYNPSLKSRVTISVDTSRNQFSLKLSSVTAADTAVYYCTREDSSNWRSRGQGTLVTVSSLEDKTHTCPPCPAGRADCGFTSESYQQGVLSATILYEILLGKATLYAVLVSALVLMAMVKRKDSRGRAKRSGSGATNFSLLKQAGDVEENPGPTSMDWIWRILFLVGAATGAHSFEVQLLESGGGLIQPGGSLRLSCAASGFTFSSHAMTWVRQAPGKGLEWVSAISGSGDYTHYADSVKGRFTISRDNSKNTVYLQMNSLRAEDSAVYYCAKDEDGGSLLGHRGQGTLVTVSSTRGSIPEDTFFPSPESSCDVKLVEKSFETDTNLNFQNLSVIGFRILLLKVAGFNLLMTLRLWSSRAKRSGSGVKQTLNFDLLKLAGDVESNPGPSRGHMTEYKPTVRLATRDDVPRAVRTLAAAFADYPATRHTVDPDRHIERVTELQELFLTRVGLDIGKVWVADDGAAVAVWTTPESVEAGAVFAEIGPRMAELSGSRLAAQQQMEGLLAPHRPKEPAWFLATVGVSPDHQGKGLGSAVVLPGVEAAERAGVPAFLETSAPRNLPFYERLGFTVTADVEVPEGPRTWCMTRKPGA

SEQ ID NO: 17507 - protein, 670 aa, Artificial Sequence
  Synthetic Polypeptide
MALPVTALLLPLALLLHAARPQLQLQESGPGLVKPSETLSLTCTVSGDSISSGDYYWGWIRQPPGKGLEWIGHIYYSGVTYYNPSLKSRVTISVDTSRNQFSLKLSSVTAADTAVYYCTREDSSNWRSRGQGTLVTVSSLEGSGRADCGFTSESYQQGVLSATILYEILLGKATLYAVLVSALVLMAMVKRKDSRGRAKRSGSGATNFSLLKQAGDVEENPGPTSMDWIWRILFLVGAATGAHSFEVQLLESGGGLIQPGGSLRLSCAASGFTFSSHAMTWVRQAPGKGLEWVSAISGSGDYTHYADSVKGRFTISRDNSKNTVYLQMNSLRAEDSAVYYCAKDEDGGSLLGHRGQGTLVTVSSTRDKTHTCPPCPAIPEDTFFPSPESSCDVKLVEKSFETDTNLNFQNLSVIGFRILLLKVAGFNLLMTLRLWSSRAKRSGSGVKQTLNFDLLKLAGDVESNPGPSRGHMTEYKPTVRLATRDDVPRAVRTLAAAFADYPATRHTVDPDRHIERVTELQELFLTRVGLDIGKVWVADDGAAVAVWTTPESVEAGAVFAEIGPRMAELSGSRLAAQQQMEGLLAPHRPKEPAWFLATVGVSPDHQGKGLGSAVVLPGVEAAERAGVPAFLETSAPRNLPFYERLGFTVTADVEVPEGPRTWCMTRKPGA

SEQ ID NO: 17508 - protein, 679 aa, Artificial Sequence
  Synthetic Polypeptide
MALPVTALLLPLALLLHAARPQLQLQESGPGLVKPSETLSLTCTVSGDSISSGDYYWGWIRQPPGKGLEWIGHIYYSGVTYYNPSLKSRVTISVDTSRNQFSLKLSSVTAADTAVYYCTREDSSNWRSRGQGTLVTVSSLEDKTHTCPPCPAGRADCGFTSESYQQGVLSATILYEILLGKATLYAVLVSALVLMAMVKRKDSRGRAKRSGSGATNFSLLKQAGDVEENPGPTSMDWIWRILFLVGAATGAHSFEVQLLESGGGLIQPGGSLRLSCAASGFTFSSHAMTWVRQAPGKGLEWVSAISGSGDYTHYADSVKGRFTISRDNSKNTVYLQMNSLRAEDSAVYYCAKDEDGGSLLGHRGQGTLVTVSSTRDKTHTCPPCPAIPEDTFFPSPESSCDVKLVEKSFETDTNLNFQNLSVIGFRILLLKVAGFNLLMTLRLWSSRAKRSGSGVKQTLNFDLLKLAGDVESNPGPSRGHMTEYKPTVRLATRDDVPRAVRTLAAAFADYPATRHTVDPDRHIERVTELQELFLTRVGLDIGKVWVADDGAAVAVWTTPESVEAGAVFAEIGPRMAELSGSRLAAQQQMEGLLAPHRPKEPAWFLATVGVSPDHQGKGLGSAVVLPGVEAAERAGVPAFLETSAPRNLPFYERLGFTVTADVEVPEGPRTWCMTRKPGA

SEQ ID NO: 17509 - protein, 446 aa, Artificial Sequence
  Synthetic Polypeptide
MALPVTALLLPLALLLHAARPQLQLQESGPGLVKPSETLSLTCTVSGDSISSGDYYWGWIRQPPGKGLEWIGHIYYSGVTYYNPSLKSRVTISVDTSRNQFSLKLSSVTAADTAVYYCTREDSSNWRSRGQGTLVTVSSLEDKTHTCPPCPAGRADCGFTSESYQQGVLSATILYEILLGKATLYAVLVSALVLMAMVKRKDSRGRAKRSGSGATNFSLLKQAGDVEENPGPTSMDWIWRILFLVGAATGAHSFEVQLLESGGGLIQPGGSLRLSCAASGFTFSSHAMTWVRQAPGKGLEWVSAISGSGDYTHYADSVKGRFTISRDNSKNTVYLQMNSLRAEDSAVYYCAKDEDGGSLLGHRGQGTLVTVSSTRDKTHTCPPCPAIPEDTFFPSPESSCDVKLVEKSFETDTNLNFQNLSVIGFRILLLKVAGFNLLMTLRLWSS

SEQ ID NO: 17510 - protein, 437 aa, Artificial Sequence
  Synthetic Polypeptide
MALPVTALLLPLALLLHAARPQLQLQESGPGLVKPSETLSLTCTVSGDSISSGDYYWGWIRQPPGKGLEWIGHIYYSGVTYYNPSLKSRVTISVDTSRNQFSLKLSSVTAADTAVYYCTREDSSNWRSRGQGTLVTVSSLEGSGRADCGFTSESYQQGVLSATILYEILLGKATLYAVLVSALVLMAMVKRKDSRGRAKRSGSGATNFSLLKQAGDVEENPGPTSMDWIWRILFLVGAATGAHSFEVQLLESGGGLIQPGGSLRLSCAASGFTFSSHAMTWVRQAPGKGLEWVSAISGSGDYTHYADSVKGRFTISRDNSKNTVYLQMNSLRAEDSAVYYCAKDEDGGSLLGHRGQGTLVTVSSTRDKTHTCPPCPAIPEDTFFPSPESSCDVKLVEKSFETDTNLNFQNLSVIGFRILLLKVAGFNLLMTLRLWSS

SEQ ID NO: 17511 - protein, 888 aa, Artificial Sequence
  Synthetic Polypeptide
MALPVTALLLPLALLLHAARPQLQLQESGPGLVKPSETLSLTCTVSGDSISSGDYYWGWIRQPPGKGLEWIGHIYYSGVTYYNPSLKSRVTISVDTSRNQFSLKLSSVTAADTAVYYCTREDSSNWRSRGQGTLVTVSSLEGQPKANPTVTLFPPSSEELQANKATLVCLISDFYPGAVTVAWKADGSPVKAGVETTKPSKQSNNKYAASSYLSLTPEQWKSHRSYSCQVTHEGSTVEKTVAPTECSPIKTDVITMDPKDNCSKDANDTLLLQLTNTSAYYMYLLLLLKSVVYFAIITCCLLRRTAFCCNGEKSRAKRSGSGATNFSLLKQAGDVEENPGPTSMDWIWRILFLVGAATGAHSFEVQLLESGGGLIQPGGSLRLSCAASGFTFSSHAMTWVRQAPGKGLEWVSAISGSGDYTHYADSVKGRFTISRDNSKNTVYLQMNSLRAEDSAVYYCAKDEDGGSLLGHRGQGTLVTVSSTRASTKGPSVFPLAPSSKSTSGGTAALGCLVKDYFPEPVTVSWNSGALTSGVHTFPAVLQSSGLYSLSSVVTVPSSSLGTQTYICNVNHKPSNTKVDKRVEPKSCEVKTDSTDHVKPKETENTKQPSKSCHKPKAIVHTEKVNMMSLTVLGLRMLFAKTVAVNFLLTAKLFFLRAKRSGSGVKQTLNFDLLKLAGDVESNPGPSRGHMTEYKPTVRLATRDDVPRAVRTLAAAFADYPATRHTVDPDRHIERVTELQELFLTRVGLDIGKVWVADDGAAVAVWTTPESVEAGAVFAEIGPRMAELSGSRLAAQQQMEGLLAPHRPKEPAWFLATVGVSPDHQGKGLGSAVVLPGVEAAERAGVPAFLETSAPRNLPFYERLGFTVTADVEVPEGPRTWCMTRKPGA

SEQ ID NO: 17512 - protein, 655 aa, Artificial Sequence; identical to SEQ ID NO: 17474
  Synthetic Polypeptide

SEQ ID NO: 17513 - protein, 683 aa, Artificial Sequence
  Synthetic Polypeptide
MALPVTALLLPLALLLHAARPQLQLQESGPGLVKPSETLSLTCTVSGDSISSGDYYWGWIRQPPGKGLEWIGHIYYSGVTYYNPSLKSRVTISVDTSRNQFSLKLSSVTAADTAVYYCTREDSSNWRSRGQGTLVTVSSLEGSPIKTDVITMDPKDNCSKDANDTLLLQLTNTSAYYMYLLLLLKSVVYFAIITCCLLRRTAFCCNGEKSRAKRSGSGATNFSLLKQAGDVEENPGPTSMDWIWRILFLVGAATGAHSFEVQLLESGGGLIQPGGSLRLSCAASGFTFSSHAMTWVRQAPGKGLEWVSAISGSGDYTHYADSVKGRFTISRDNSKNTVYLQMNSLRAEDSAVYYCAKDEDGGSLLGHRGQGTLVTVSSTRGSEVKTDSTDHVKPKETENTKQPSKSCHKPKAIVHTEKVNMMSLTVLGLRMLFAKTVAVNFLLTAKLFFLRAKRSGSGVKQTLNFDLLKLAGDVESNPGPSRGHMTEYKPTVRLATRDDVPRAVRTLAAAFADYPATRHTVDPDRHIERVTELQELFLTRVGLDIGKVWVADDGAAVAVWTTPESVEAGAVFAEIGPRMAELSGSRLAAQQQMEGLLAPHRPKEPAWFLATVGVSPDHQGKGLGSAVVLPGVEAAERAGVPAFLETSAPRNLPFYERLGFTVTADVEVPEGPRTWCMTRKPGA

SEQ ID NO: 17514 - protein, 450 aa, Artificial Sequence
  Synthetic Polypeptide
MALPVTALLLPLALLLHAARPQLQLQESGPGLVKPSETLSLTCTVSGDSISSGDYYWGWIRQPPGKGLEWIGHIYYSGVTYYNPSLKSRVTISVDTSRNQFSLKLSSVTAADTAVYYCTREDSSNWRSRGQGTLVTVSSLEGSPIKTDVITMDPKDNCSKDANDTLLLQLTNTSAYYMYLLLLLKSVVYFAIITCCLLRRTAFCCNGEKSRAKRSGSGATNFSLLKQAGDVEENPGPTSMDWIWRILFLVGAATGAHSFEVQLLESGGGLIQPGGSLRLSCAASGFTFSSHAMTWVRQAPGKGLEWVSAISGSGDYTHYADSVKGRFTISRDNSKNTVYLQMNSLRAEDSAVYYCAKDEDGGSLLGHRGQGTLVTVSSTRGSEVKTDSTDHVKPKETENTKQPSKSCHKPKAIVHTEKVNMMSLTVLGLRMLFAKTVAVNFLLTAKLFFL

SEQ ID NO: 17515 - protein, 692 aa, Artificial Sequence
  Synthetic Polypeptide
MALPVTALLLPLALLLHAARPQLQLQESGPGLVKPSETLSLTCTVSGDSISSGDYYWGWIRQPPGKGLEWIGHIYYSGVTYYNPSLKSRVTISVDTSRNQFSLKLSSVTAADTAVYYCTREDSSNWRSRGQGTLVTVSSLEDKTHTCPPCPAPIKTDVITMDPKDNCSKDANDTLLLQLTNTSAYYMYLLLLLKSVVYFAIITCCLLRRTAFCCNGEKSRAKRSGSGATNFSLLKQAGDVEENPGPTSMDWIWRILFLVGAATGAHSFEVQLLESGGGLIQPGGSLRLSCAASGFTFSSHAMTWVRQAPGKGLEWVSAISGSGDYTHYADSVKGRFTISRDNSKNTVYLQMNSLRAEDSAVYYCAKDEDGGSLLGHRGQGTLVTVSSTRGSEVKTDSTDHVKPKETENTKQPSKSCHKPKAIVHTEKVNMMSLTVLGLRMLFAKTVAVNFLLTAKLFFLRAKRSGSGVKQTLNFDLLKLAGDVESNPGPSRGHMTEYKPTVRLATRDDVPRAVRTLAAAFADYPATRHTVDPDRHIERVTELQELFLTRVGLDIGKVWVADDGAAVAVWTTPESVEAGAVFAEIGPRMAELSGSRLAAQQQMEGLLAPHRPKEPAWFLATVGVSPDHQGKGLGSAVVLPGVEAAERAGVPAFLETSAPRNLPFYERLGFTVTADVEVPEGPRTWCMTRKPGA

SEQ ID NO: 17516 - protein, 692 aa, Artificial Sequence
  Synthetic Polypeptide
MALPVTALLLPLALLLHAARPQLQLQESGPGLVKPSETLSLTCTVSGDSISSGDYYWGWIRQPPGKGLEWIGHIYYSGVTYYNPSLKSRVTISVDTSRNQFSLKLSSVTAADTAVYYCTREDSSNWRSRGQGTLVTVSSLEGSPIKTDVITMDPKDNCSKDANDTLLLQLTNTSAYYMYLLLLLKSVVYFAIITCCLLRRTAFCCNGEKSRAKRSGSGATNFSLLKQAGDVEENPGPTSMDWIWRILFLVGAATGAHSFEVQLLESGGGLIQPGGSLRLSCAASGFTFSSHAMTWVRQAPGKGLEWVSAISGSGDYTHYADSVKGRFTISRDNSKNTVYLQMNSLRAEDSAVYYCAKDEDGGSLLGHRGQGTLVTVSSTRDKTHTCPPCPAEVKTDSTDHVKPKETENTKQPSKSCHKPKAIVHTEKVNMMSLTVLGLRMLFAKTVAVNFLLTAKLFFLRAKRSGSGVKQTLNFDLLKLAGDVESNPGPSRGHMTEYKPTVRLATRDDVPRAVRTLAAAFADYPATRHTVDPDRHIERVTELQELFLTRVGLDIGKVWVADDGAAVAVWTTPESVEAGAVFAEIGPRMAELSGSRLAAQQQMEGLLAPHRPKEPAWFLATVGVSPDHQGKGLGSAVVLPGVEAAERAGVPAFLETSAPRNLPFYERLGFTVTADVEVPEGPRTWCMTRKPGA

SEQ ID NO: 17517 - protein, 701 aa, Artificial Sequence
  Synthetic Polypeptide
MALPVTALLLPLALLLHAARPQLQLQESGPGLVKPSETLSLTCTVSGDSISSGDYYWGWIRQPPGKGLEWIGHIYYSGVTYYNPSLKSRVTISVDTSRNQFSLKLSSVTAADTAVYYCTREDSSNWRSRGQGTLVTVSSLEDKTHTCPPCPAPIKTDVITMDPKDNCSKDANDTLLLQLTNTSAYYMYLLLLLKSVVYFAIITCCLLRRTAFCCNGEKSRAKRSGSGATNFSLLKQAGDVEENPGPTSMDWIWRILFLVGAATGAHSFEVQLLESGGGLIQPGGSLRLSCAASGFTFSSHAMTWVRQAPGKGLEWVSAISGSGDYTHYADSVKGRFTISRDNSKNTVYLQMNSLRAEDSAVYYCAKDEDGGSLLGHRGQGTLVTVSSTRDKTHTCPPCPAEVKTDSTDHVKPKETENTKQPSKSCHKPKAIVHTEKVNMMSLTVLGLRMLFAKTVAVNFLLTAKLFFLRAKRSGSGVKQTLNFDLLKLAGDVESNPGPSRGHMTEYKPTVRLATRDDVPRAVRTLAAAFADYPATRHTVDPDRHIERVTELQELFLTRVGLDIGKVWVADDGAAVAVWTTPESVEAGAVFAEIGPRMAELSGSRLAAQQQMEGLLAPHRPKEPAWFLATVGVSPDHQGKGLGSAVVLPGVEAAERAGVPAFLETSAPRNLPFYERLGFTVTADVEVPEGPRTWCMTRKPGA

SEQ ID NO: 17518 - protein, 468 aa, Artificial Sequence
  Synthetic Polypeptide
MALPVTALLLPLALLLHAARPQLQLQESGPGLVKPSETLSLTCTVSGDSISSGDYYWGWIRQPPGKGLEWIGHIYYSGVTYYNPSLKSRVTISVDTSRNQFSLKLSSVTAADTAVYYCTREDSSNWRSRGQGTLVTVSSLEDKTHTCPPCPAPIKTDVITMDPKDNCSKDANDTLLLQLTNTSAYYMYLLLLLKSVVYFAIITCCLLRRTAFCCNGEKSRAKRSGSGATNFSLLKQAGDVEENPGPTSMDWIWRILFLVGAATGAHSFEVQLLESGGGLIQPGGSLRLSCAASGFTFSSHAMTWVRQAPGKGLEWVSAISGSGDYTHYADSVKGRFTISRDNSKNTVYLQMNSLRAEDSAVYYCAKDEDGGSLLGHRGQGTLVTVSSTRDKTHTCPPCPAEVKTDSTDHVKPKETENTKQPSKSCHKPKAIVHTEKVNMMSLTVLGLRMLFAKTVAVNFLLTAKLFFL

SEQ ID NO: 17519 - protein, 728 aa, Artificial Sequence
  Synthetic Polypeptide
MALPVTALLLPLALLLHAARPQLQLQESGPGLVKPSETLSLTCTVSGDSISSGDYYWGWIRQPPGKGLEWIGHIYYSGVTYYNPSLKSRVTISVDTSRNQFSLKLSSVTAADTAVYYCTREDSSNWRSRGQGTLVTVSSLESGGGGSFEVQLVESGGGLVQPGGSLRLSCAASGFNIKDTCIGWVRRAPGKEEELVADICPYKGSTRYADSVKGRFTISADTSKNTAYLQMNSLRAEDTAVYYCAIVSARDGYYNYWGQGTTVTVSSTREQKLISEEDLAKPTTTPAPRPPTPAPTIASQPLSLRPEACRPAAGGAVHTRGLDFACDIYIWAPLAGTCGVLLLSLVITLYCKRGRKKLLYIFKQPFMRPVQTTQEEDGCSCRFPEEEEGGCELRVKFSRSADAPAYQQGQNQLYNELNLGRREEYDVLDKRRGRDPEMGGKPRRKNPQEGLYNELQKDKMAEAYSEIGMKGERRRGKGHDGLYQGLSTATKDTYDALHMQALPPRSSGSGEGRGSLLTCGDVEENPGPHMTEYKPTVRLATRDDVPRAVRTLAAAFADYPATRHTVDPDRHIERVTELQELFLTRVGLDIGKVWVADDGAAVAVWTTPESVEAGAVFAEIGPRMAELSGSRLAAQQQMEGLLAPHRPKEPAWFLATVGVSPDHQGKGLGSAVVLPGVEAAERAGVPAFLETSAPRNLPFYERLGFTVTADVEVPEGPRTWCMTRKPGA

SEQ ID NO: 17520 - protein, 722 aa, Artificial Sequence
  Synthetic Polypeptide
MALPVTALLLPLALLLHAARPQLQLQESGPGLVKPSETLSLTCTVSGDSISSGDYYWGWIRQPPGKGLEWIGHIYYSGVTYYNPSLKSRVTISVDTSRNQFSLKLSSVTAADTAVYYCTREDSSNWRSRGQGTLVTVSSLESGGGGSFEVQLVESGGGLVQPGGSLRLSCAASGFNIKDTCIGWVRRAPGKEEELVADICPYKGSTRYADSVKGRFTISADTSKNTAYLQMNSLRAEDTAVYYCAIVSARDGYYNYWGQGTTVTVSSTREQKLISEEDLKIEVMYPPPYLDNEKSNGTIIHVKGKHLCPSPLFPGPSKPFWVLVVVGGVLACYSLLVTVAFIIFWVRSKRSRLLHSDYMNMTPRRPGPTRKHYQPYAPPRDFAAYRSRVKFSRSADAPAYQQGQNQLYNELNLGRREEYDVLDKRRGRDPEMGGKPRRKNPQEGLYNELQKDKMAEAYSEIGMKGERRRGKGHDGLYQGLSTATKDTYDALHMQALPPRSSGSGEGRGSLLTCGDVEENPGPHMTEYKPTVRLATRDDVPRAVRTLAAAFADYPATRHTVDPDRHIERVTELQELFLTRVGLDIGKVWVADDGAAVAVWTTPESVEAGAVFAEIGPRMAELSGSRLAAQQQMEGLLAPHRPKEPAWFLATVGVSPDHQGKGLGSAVVLPGVEAAERAGVPAFLETSAPRNLPFYERLGFTVTADVEVPEGPRTWCMTRKPGA

SEQ ID NO: 17521 - protein, 499 aa, Artificial Sequence
  Synthetic Polypeptide
MALPVTALLLPLALLLHAARPQLQLQESGPGLVKPSETLSLTCTVSGDSISSGDYYWGWIRQPPGKGLEWIGHIYYSGVTYYNPSLKSRVTISVDTSRNQFSLKLSSVTAADTAVYYCTREDSSNWRSRGQGTLVTVSSLESGGGGSFEVQLVESGGGLVQPGGSLRLSCAASGFNIKDTCIGWVRRAPGKEEELVADICPYKGSTRYADSVKGRFTISADTSKNTAYLQMNSLRAEDTAVYYCAIVSARDGYYNYWGQGTTVTVSSTREQKLISEEDLKIEVMYPPPYLDNEKSNGTIIHVKGKHLCPSPLFPGPSKPFWVLVVVGGVLACYSLLVTVAFIIFWVRSKRSRLLHSDYMNMTPRRPGPTRKHYQPYAPPRDFAAYRSRVKFSRSADAPAYQQGQNQLYNELNLGRREEYDVLDKRRGRDPEMGGKPRRKNPQEGLYNELQKDKMAEAYSEIGMKGERRRGKGHDGLYQGLSTATKDTYDALHMQALPPR

SEQ ID NO: 17522 - protein, 505 aa, Artificial Sequence
  Synthetic Polypeptide
MALPVTALLLPLALLLHAARPQLQLQESGPGLVKPSETLSLTCTVSGDSISSGDYYWGWIRQPPGKGLEWIGHIYYSGVTYYNPSLKSRVTISVDTSRNQFSLKLSSVTAADTAVYYCTREDSSNWRSRGQGTLVTVSSLESGGGGSFEVQLVESGGGLVQPGGSLRLSCAASGFNIKDTCIGWVRRAPGKEEELVADICPYKGSTRYADSVKGRFTISADTSKNTAYLQMNSLRAEDTAVYYCAIVSARDGYYNYWGQGTTVTVSSTREQKLISEEDLAKPTTTPAPRPPTPAPTIASQPLSLRPEACRPAAGGAVHTRGLDFACDIYIWAPLAGTCGVLLLSLVITLYCKRGRKKLLYIFKQPFMRPVQTTQEEDGCSCRFPEEEEGGCELRVKFSRSADAPAYQQGQNQLYNELNLGRREEYDVLDKRRGRDPEMGGKPRRKNPQEGLYNELQKDKMAEAYSEIGMKGERRRGKGHDGLYQGLSTATKDTYDALHMQALPPR

SEQ ID NO: 17523 - protein, 506 aa, Artificial Sequence
  Synthetic Polypeptide
MALPVTALLLPLALLLHAARPEVQLVESGGGLVQPGGSLRLSCAASGFNIKDTCIGWVRRAPGKEEELVADICPYKGSTRYADSVKGRFTISADTSKNTAYLQMNSLRAEDTAVYYCAIVSARDGYYNYWGQGTTVTVSSLESGGGGSFEQLQLQESGPGLVKPSETLSLTCTVSGDSISSGDYYWGWIRQPPGKGLEWIGHIYYSGVTYYNPSLKSRVTISVDTSRNQFSLKLSSVTAADTAVYYCTREDSSNWRSRGQGTLVTVSSTREQKLISEEDLAKPTTTPAPRPPTPAPTIASQPLSLRPEACRPAAGGAVHTRGLDFACDIYIWAPLAGTCGVLLLSLVITLYCKRGRKKLLYIFKQPFMRPVQTTQEEDGCSCRFPEEEEGGCELRVKFSRSADAPAYQQGQNQLYNELNLGRREEYDVLDKRRGRDPEMGGKPRRKNPQEGLYNELQKDKMAEAYSEIGMKGERRRGKGHDGLYQGLSTATKDTYDALHMQALPPR

SEQ ID NO: 17524 - protein, 918 aa, Artificial Sequence
  Synthetic Polypeptide
MALPVTALLLPLALLLHAARPQLQLQESGPGLVKPSETLSLTCTVSGDSISSGDYYWGWIRQPPGKGLEWIGHIYYSGVTYYNPSLKSRVTISVDTSRNQFSLKLSSVTAADTAVYYCTREDSSNWRSRGQGTLVTVSSLESGGGGSFEVQLVESGGGLVQPGGSLRLSCAASGFNIKDTCIGWVRRAPGKEEELVADICPYKGSTRYADSVKGRFTISADTSKNTAYLQMNSLRAEDTAVYYCAIVSARDGYYNYWGQGTTVTVSSTREQKLISEEDLAKPTTTPAPRPPTPAPTIASQPLSLRPEACRPAAGGAVHTRGLDFACDIYIWAPLAGTCGVLLLSLVITLYCGRARVKFSRSADAPAYQQGQNQLYNELNLGRREEYDVLDKRRGRDPEMGGKPRRKNPQEGLYNELQKDKMAEAYSEIGMKGERRRGKGHDGLYQGLSTATKDTYDALHMQALPPRSRGSGATNFSLLKQAGDVEENPGPGIHMATYEVLCEVARKLGTDDREVVLFLLNVFIPQPTLAQLIGALRALKEEGRLTFPLLAECLFRAGRRDLLRDLLHLDPRFLERHLAGTMSYFSPYQLTVLHVDGELCARDIRSLIFLSKDTIGSRSTPQTFLHWVYCMENLDLLGPTDVDALMSMLRSLSRVDLQRQVQTLMGLHLSGPSHSQHYRHTPLETDFYDYKDDDDKTSGSGEGRGSLLTCGDVEENPGPHMTEYKPTVRLATRDDVPRAVRTLAAAFADYPATRHTVDPDRHIERVTELQELFLTRVGLDIGKVWVADDGAAVAVWTTPESVEAGAVFAEIGPRMAELSGSRLAAQQQMEGLLAPHRPKEPAWFLATVGVSPDHQGKGLGSAVVLPGVEAAERAGVPAFLETSAPRNLPFYERLGFTVTADVEVPEGPRTWCMTRKPGA

SEQ ID NO: 17525 - protein, 863 aa, Artificial Sequence
  Synthetic Polypeptide
MALPVTALLLPLALLLHAARPQLQLQESGPGLVKPSETLSLTCTVSGDSISSGDYYWGWIRQPPGKGLEWIGHIYYSGVTYYNPSLKSRVTISVDTSRNQFSLKLSSVTAADTAVYYCTREDSSNWRSRGQGTLVTVSSLEIQNPDPAVYQLRDSKSSDKSVCLFTDFDSQTNVSQSKDSDVYITDKCVLDMRSMDFKSNSAVAWSNKSDFACANAFNNSIIPEDTFFPSSDVPCDVKLVEKSFETDTNLNFQNLSVIGFRILLLKVAGFNLLMTLRLWSSRAKRSGSGVKQTLNFDLLKLAGDVESNPGPTSMDWIWRILFLVGAATGAHSFEVQLVESGGGLVQPGGSLRLSCAASGFNIKDTCIGWVRRAPGKEEELVADICPYKGSTRYADSVKGRFTISADTSKNTAYLQMNSLRAEDTAVYYCAIVSARDGYYNYWGQGTTVTVSSTREDLKNVFPPEVAVFEPSKAEIAHTQKATLVCLATGFYPDHVELSWWVNGKEVHSGVCTDPQPLKEQPALNDSRYCLSSRLRVSATFWQNPRNHFRCQVQFYGLSENDEWTQDRAKPVTQIVSAEAWGRADCGITSASYHQGVLSATILYEILLGKATLYAVLVSALVLMAMVKRKDSRGRAKRSGSGATNFSLLKQAGDVEENPGPSRGHMTEYKPTVRLATRDDVPRAVRTLAAAFADYPATRHTVDPDRHIERVTELQELFLTRVGLDIGKVWVADDGAAVAVWTTPESVEAGAVFAEIGPRMAELSGSRLAAQQQMEGLLAPHRPKEPAWFLATVGVSPDHQGKGLGSAVVLPGVEAAERAGVPAFLETSAPRNLPFYERLGFTVTADVEVPEGPRTWCMTRKPGA

SEQ ID NO: 17526 - protein, 862 aa, Artificial Sequence
  Synthetic Polypeptide
MALPVTALLLPLALLLHAARPQLQLQESGPGLVKPSETLSLTCTVSGDSISSGDYYWGWIRQPPGKGLEWIGHIYYSGVTYYNPSLKSRVTISVDTSRNQFSLKLSSVTAADTAVYYCTREDSSNWRSRGQGTLVTVSSLEDLKNVFPPEVAVFEPSKAEIAHTQKATLVCLATGFYPDHVELSWWVNGKEVHSGVCTDPQPLKEQPALNDSRYCLSSRLRVSATFWQNPRNHFRCQVQFYGLSENDEWTQDRAKPVTQIVSAEAWGRADCGITSASYHQGVLSATILYEILLGKATLYAVLVSALVLMAMVKRKDSRGRAKRSGSGATNFSLLKQAGDVEENPGPTSMDWIWRILFLVGAATGAHSFEVQLVESGGGLVQPGGSLRLSCAASGFNIKDTCIGWVRRAPGKEEELVADICPYKGSTRYADSVKGRFTISADTSKNTAYLQMNSLRAEDTAVYYCAIVSARDGYYNYWGQGTTVTVSSTRIQNPDPAVYQLRDSKSSDKSVCLFTDFDSQTNVSQSKDSDVYITDKCVLDMRSMDFKSNSAVAWSNKSDFACANAFNNSIIPEDTFFPSSDVPCDVKLVEKSFETDTNLNFQNLSVIGFRILLLKVAGFNLLMTLRLWSSRAKRSGSGVKQTLNFDLLKLAGDVESNPGPSRGHMTEYKPTVRLATRDDVPRAVRTLAAAFADYPATRHTVDPDRHIERVTELQELFLTRVGLDIGKVWVADDGAAVAVWTTPESVEAGAVFAEIGPRMAELSGSRLAAQQQMEGLLAPHRPKEPAWFLATVGVSPDHQGKGLGSAVVLPGVEAAERAGVPAFLETSAPRNLPFYERLGFTVTADVEVPEGPRTWCMTRKPGA

SEQ ID NO: 17527 - protein, 629 aa, Artificial Sequence
  Synthetic Polypeptide
MALPVTALLLPLALLLHAARPQLQLQESGPGLVKPSETLSLTCTVSGDSISSGDYYWGWIRQPPGKGLEWIGHIYYSGVTYYNPSLKSRVTISVDTSRNQFSLKLSSVTAADTAVYYCTREDSSNWRSRGQGTLVTVSSLEDLKNVFPPEVAVFEPSEAEISHTQKATLVCLATGFYPDHVELSWWVNGKEVHSGVCTDPQPLKEQPALNDSRYCLSSRLRVSATFWQNPRNHFRCQVQFYGLSENDEWTQDRAKPVTQIVSAEAWGRADCGFTSESYQQGVLSATILYEILLGKATLYAVLVSALVLMAMVKRKDSRGRAKRSGSGATNFSLLKQAGDVEENPGPTSMDWIWRILFLVGAATGAHSFEVQLVESGGGLVQPGGSLRLSCAASGFNIKDTCIGWVRRAPGKEEELVADICPYKGSTRYADSVKGRFTISADTSKNTAYLQMNSLRAEDTAVYYCAIVSARDGYYNYWGQGTTVTVSSTRIQNPDPAVYQLRDSKSSDKSVCLFTDFDSQTNVSQSKDSDVYITDKCVLDMRSMDFKSNSAVAWSNKSDFACANAFNNSIIPEDTFFPSPESSCDVKLVEKSFETDTNLNFQNLSVIGFRILLLKVAGFNLLMTLRLWSS

SEQ ID NO: 17528 - protein, 854 aa, Artificial Sequence
  Synthetic Polypeptide
MALPVTALLLPLALLLHAARPQLQLQESGPGLVKPSETLSLTCTVSGDSISSGDYYWGWIRQPPGKGLEWIGHIYYSGVTYYNPSLKSRVTISVDTSRNQFSLKLSSVTAADTAVYYCTREDSSNWRSRGQGTLVTVSSLEDLKNVFPPEVAVFEPSEAEISHTQKATLVCLATGFYPDHVELSWWVNGKEVHSGVCTDPQPLKEQPALNDSRYCLSSRLRVSATFWQNPRNHFRCQVQFYGLSENDEWTQDRAKPVTQIVSAEAWGRADCGFTSESYQQGVLSATILYEILLGKATLYAVLVSALVLMAMVKRKDSRGRAKRSGSGATNFSLLKQAGDVEENPGPTSMDWIWRILFLVGAATGAHSFEVQLVESGGGLVQPGGSLRLSCAASGFNIKDTCIGWVRRAPGKEEELVADICPYKGSTRYADSVKGRFTISADTSKNTAYLQMNSLRAEDTAVYYCAIVSARDGYYNYWGQGTTVTVSSTRIQNPDPAVYQLRDSKSSDKSVCLFTDFDSQTNVSQSKDSDVYITDKCVLDMRSMDFKSNSAVAWSNKSDFACANAFNNSIIPEDTFFPSPESSCDVKLVEKSFETDTNLNFQNLSVIGFRILLLKVAGFNLLMTLRLWSSRAKRSGSGVKQTLNFDLLKLAGDVESNPGPSRGGIHTMATYEVLCEVARKLGTDDREVVLFLLNVFIPQPTLAQLIGALRALKEEGRLTFPLLAECLFRAGRRDLLRDLLHLDPRFLERHLAGTMSYFSPYQLTVLHVDGELCARDIRSLIFLSKDTIGSRSTPQTFLHWVYCMENLDLLGPTDVDALMSMLRSLSRVDLQRQVQTLMGLHLSGPSHSQHYRHTP

SEQ ID NO: 17529 - protein, 633 aa, Artificial Sequence
  Synthetic Polypeptide
MALPVTALLLPLALLLHAARPQLQLQESGPGLVKPSETLSLTCTVSGDSISSGDYYWGWIRQPPGKGLEWIGHIYYSGVTYYNPSLKSRVTISVDTSRNQFSLKLSSVTAADTAVYYCTREDSSNWRSRGQGTLVTVSSLEIQNPDPAVYQLRDSKSSDKSVCLFTDFDSQTNVSQSKDSDVYITDKCVLDMRSMDFKSNSAVAWSNKSDFACANAFNNSIIPEDTFFPSPESSCDVKLVEKSFETDTNLNFQNLSVIGFRILLLKVAGFNLLMTLRLWSSRAKRSGSGVKQTLNFDLLKLAGDVESNPGPTSMDWIWRILFLVGAATGAHSFEVQLVESGGGLVQPGGSLRLSCAASGFNIKDTCIGWVRRAPGKEEELVADICPYKGSTRYADSVKGRFTISADTSKNTAYLQMNSLRAEDTAVYYCAIVSARDGYYNYWGQGTTVTVSSTREDLKNVFPPEVAVFEPSEAEISHTQKATLVCLATGFYPDHVELSWWVNGKEVHSGVCTDPQPLKEQPALNDSRYCLSSRLRVSATFWQNPRNHFRCQVQFYGLSENDEWTQDRAKPVTQIVSAEAWGRADCGFTSESYQQGVLSATILYEILLGKATLYAVLVSALVLMAMVKRKDSRG

SEQ ID NO: 17530 - protein, 855 aa, Artificial Sequence
  Synthetic Polypeptide
MALPVTALLLPLALLLHAARPQLQLQESGPGLVKPSETLSLTCTVSGDSISSGDYYWGWIRQPPGKGLEWIGHIYYSGVTYYNPSLKSRVTISVDTSRNQFSLKLSSVTAADTAVYYCTREDSSNWRSRGQGTLVTVSSLEIQNPDPAVYQLRDSKSSDKSVCLFTDFDSQTNVSQSKDSDVYITDKCVLDMRSMDFKSNSAVAWSNKSDFACANAFNNSIIPEDTFFPSPESSCDVKLVEKSFETDTNLNFQNLSVIGFRILLLKVAGFNLLMTLRLWSSRAKRSGSGVKQTLNFDLLKLAGDVESNPGPTSMDWIWRILFLVGAATGAHSFEVQLVESGGGLVQPGGSLRLSCAASGFNIKDTCIGWVRRAPGKEEELVADICPYKGSTRYADSVKGRFTISADTSKNTAYLQMNSLRAEDTAVYYCAIVSARDGYYNYWGQGTTVTVSSTREDLKNVFPPEVAVFEPSEAEISHTQKATLVCLATGFYPDHVELSWWVNGKEVHSGVCTDPQPLKEQPALNDSRYCLSSRLRVSATFWQNPRNHFRCQVQFYGLSENDEWTQDRAKPVTQIVSAEAWGRADCGFTSESYQQGVLSATILYEILLGKATLYAVLVSALVLMAMVKRKDSRGRAKRSGSGATNFSLLKQAGDVEENPGPSRGGIHTMATYEVLCEVARKLGTDDREVVLFLLNVFIPQPTLAQLIGALRALKEEGRLTFPLLAECLFRAGRRDLLRDLLHLDPRFLERHLAGTMSYFSPYQLTVLHVDGELCARDIRSLIFLSKDTIGSRSTPQTFLHWVYCMENLDLLGPTDVDALMSMLRSLSRVDLQRQVQTLMGLHLSGPSHSQHYRHTP

SEQ ID NO: 17531 - protein, 902 aa, Artificial Sequence
  Synthetic Polypeptide
MALPVTALLLPLALLLHAARPLEGKPIPNPLLGLDSTGSGEDLKNVFPPEVAVFEPSKAEIAHTQKATLVCLATGFYPDHVELSWWVNGKEVHSGVCTDPQPLKEQPALNDSRYCLSSRLRVSATFWQNPRNHFRCQVQFYGLSENDEWTQDRAKPVTQIVSAEAWGRADCGITSASYHQGVLSATILYEILLGKATLYAVLVSALVLMAMVKRKDSRGRAKRSGSGATNFSLLKQAGDVEENPGPTSMALPVTALLLPLALLLHAARPQLQLQESGPGLVKPSETLSLTCTVSGDSISSGDYYWGWIRQPPGKGLEWIGHIYYSGVTYYNPSLKSRVTISVDTSRNQFSLKLSSVTAADTAVYYCTREDSSNWRSRGQGTLVTVSSLESGGGGSFEVQLVESGGGLVQPGGSLRLSCAASGFNIKDTCIGWVRRAPGKEEELVADICPYKGSTRYADSVKGRFTISADTSKNTAYLQMNSLRAEDTAVYYCAIVSARDGYYNYWGQGTTVTVSSTREQKLISEEDGSGIQNPDPAVYQLRDSKSSDKSVCLFTDFDSQTNVSQSKDSDVYITDKCVLDMRSMDFKSNSAVAWSNKSDFACANAFNNSIIPEDTFFPSSDVPCDVKLVEKSFETDTNLNFQNLSVIGFRILLLKVAGFNLLMTLRLWSSRAKRSGSGVKQTLNFDLLKLAGDVESNPGPSRGHMTEYKPTVRLATRDDVPRAVRTLAAAFADYPATRHTVDPDRHIERVTELQELFLTRVGLDIGKVWVADDGAAVAVWTTPESVEAGAVFAEIGPRMAELSGSRLAAQQQMEGLLAPHRPKEPAWFLATVGVSPDHQGKGLGSAVVLPGVEAAERAGVPAFLETSAPRNLPFYERLGFTVTADVEVPEGPRTWCMTRKPGA

SEQ ID NO: 17532 - protein, 903 aa, Artificial Sequence
  Synthetic Polypeptide
MALPVTALLLPLALLLHAARPLEQKLISEEDLGSGDRPDPAVYQLRDSKSSDKSVCLFTDFDSQTNVSQSKDSDVYITDKCVLDMRSMDFKSNSAVAWSNKSDFACANAFNNSIIPEDTFFPSPESSCDVKLVEKSFETDTNLNFQNLSVIGFRILLLKVAGFNLLMTLRLWSSSSRAKRSGSGVKQTLNFDLLKLAGDVESNPGPTSMALPVTALLLPLALLLHAARPQLQLQESGPGLVKPSETLSLTCTVSGDSISSGDYYWGWIRQPPGKGLEWIGHIYYSGVTYYNPSLKSRVTISVDTSRNQFSLKLSSVTAADTAVYYCTREDSSNWRSRGQGTLVTVSSLESGGGGSFEVQLVESGGGLVQPGGSLRLSCAASGFNIKDTCIGWVRRAPGKEEELVADICPYKGSTRYADSVKGRFTISADTSKNTAYLQMNSLRAEDTAVYYCAIVSARDGYYNYWGQGTTVTVSSTRGKPIPNPLLGLDSTGSGEDLKNVFPPEVAVFEPSEAEISHTQKATLVCLATGFYPDHVELSWWVNGKEVHSGVCTDPQPLKEQPALNDSRYCLSSRLRVSATFWQNPRNHFRCQVQFYGLSENDEWTQDRAKPVTQIVSAEAWGRADCGFTSESYQQGVLSATILYEILLGKATLYAVLVSALVLMAMVKRKDSRGRAKRSGSGATNFSLLKQAGDVEENPGPSRGHMTEYKPTVRLATRDDVPRAVRTLAAAFADYPATRHTVDPDRHIERVTELQELFLTRVGLDIGKVWVADDGAAVAVWTTPESVEAGAVFAEIGPRMAELSGSRLAAQQQMEGLLAPHRPKEPAWFLATVGVSPDHQGKGLGSAVVLPGVEAAERAGVPAFLETSAPRNLPFYERLGFTVTADVEVPEGPRTWCMTRKPGA

SEQ ID NO: 17533 - protein, 862 aa, Artificial Sequence
  Synthetic Polypeptide
MALPVTALLLPLALLLHAARPQLQLQESGPGLVKPSETLSLTCTVSGDSISSGDYYWGWIRQPPGKGLEWIGHIYYSGVTYYNPSLKSRVTISVDTSRNQFSLKLSSVTAADTAVYYCTREDSSNWRSRGQGTLVTVSSLEDLKNVFPPEVAVFEPSEAEISHTQKATLVCLATGFYPDHVELSWWVNGKEVHSGVSTDPQPLKEQPALNDSRYCLSSRLRVSATFWQNPRNHFRCQVQFYGLSENDEWTQDRAKPVTQIVSAEAWGRADCGFTSESYQQGVLSATILYEILLGKATLYAVLVSALVLMAMVKRKDSRGRAKRSGSGATNFSLLKQAGDVEENPGPTSMDWIWRILFLVGAATGAHSFEVQLVESGGGLVQPGGSLRLSCAASGFNIKDTCIGWVRRAPGKEEELVADICPYKGSTRYADSVKGRFTISADTSKNTAYLQMNSLRAEDTAVYYCAIVSARDGYYNYWGQGTTVTVSSTRIQNPDPAVYQLRDSKSSDKSVCLFTDFDSQTNVSQSKDSDVYITDKTVLDMRSMDFKSNSAVAWSNKSDFACANAFNNSIIPEDTFFPSPESSCDVKLVEKSFETDTNLNFQNLSVIGFRILLLKVAGFNLLMTLRLWSSRAKRSGSGVKQTLNFDLLKLAGDVESNPGPSRGHMTEYKPTVRLATRDDVPRAVRTLAAAFADYPATRHTVDPDRHIERVTELQELFLTRVGLDIGKVWVADDGAAVAVWTTPESVEAGAVFAEIGPRMAELSGSRLAAQQQMEGLLAPHRPKEPAWFLATVGVSPDHQGKGLGSAVVLPGVEAAERAGVPAFLETSAPRNLPFYERLGFTVTADVEVPEGPRTWCMTRKPGA

SEQ ID NO: 17534 - protein, 944 aa, Artificial Sequence
  Synthetic Polypeptide
MALPVTALLLPLALLLHAARPQLQLQESGPGLVKPSETLSLTCTVSGDSISSGDYYWGWIRQPPGKGLEWIGHIYYSGVTYYNPSLKSRVTISVDTSRNQFSLKLSSVTAADTAVYYCTREDSSNWRSRGQGTLVTVSSLEDLKNVFPPEVAVFEPSEAEISHTQKATLVCLATGFYPDHVELSWWVNGKEVHSGVSTDPQPLKEQPALNDSRYCLSSRLRVSATFWQNPRNHFRCQVQFYGLSENDEWTQDRAKPVTQIVSAEAWGRADCGFTSESYQQGVLSATILYEILLGKATLYAVLVSALVLMAMVKRKDSRGRAKRSGSGATNFSLLKQAGDVEENPGPTSMDWIWRILFLVGAATGAHSFEVQLVESGGGLVQPGGSLRLSCAASGFNIKDTCIGWVRRAPGKEEELVADICPYKGSTRYADSVKGRFTISADTSKNTAYLQMNSLRAEDTAVYYCAIVSARDGYYNYWGQGTTVTVSSTREQKLISEEDGSGTPFPSLAPPIMLLVDGKQQMVVVCLVLDVAPPGLDSPIWFSAGNGSALDAFTYGPSPATDGTWTNLAHLSLPSEELASWEPLVCHTGPGAEGHSRSTQPMHLSGEASTARTCPQEPLRGTPGGALWLGVLRLLLFKLLLFDLLLTCSCLCDPAGPLPSPATTTRLRALGSHRLHPATETGGREATSSPRPQPRDRRWGDTPPGRKPGSPVRAKRSGSGVKQTLNFDLLKLAGDVESNPGPSRGHMTEYKPTVRLATRDDVPRAVRTLAAAFADYPATRHTVDPDRHIERVTELQELFLTRVGLDIGKVWVADDGAAVAVWTTPESVEAGAVFAEIGPRMAELSGSRLAAQQQMEGLLAPHRPKEPAWFLATVGVSPDHQGKGLGSAVVLPGVEAAERAGVPAFLETSAPRNLPFYERLGFTVTADVEVPEGPRTWCMTRKPGA

SEQ ID NO: 17535 - protein, 957 aa, Artificial Sequence
  Synthetic Polypeptide
MALPVTALLLPLALLLHAARPLEDLKNVFPPEVAVFEPSEAEISHTQKATLVCLATGFYPDHVELSWWVNGKEVHSGVSTDPQPLKEQPALNDSRYCLSSRLRVSATFWQNPRNHFRCQVQFYGLSENDEWTQDRAKPVTQIVSAEAWGRADCGFTSESYQQGVLSATILYEILLGKATLYAVLVSALVLMAMVKRKDSRGRAKRSGSGATNFSLLKQAGDVEENPGPTSMALPVTALLLPLALLLHAARPQLQLQESGPGLVKPSETLSLTCTVSGDSISSGDYYWGWIRQPPGKGLEWIGHIYYSGVTYYNPSLKSRVTISVDTSRNQFSLKLSSVTAADTAVYYCTREDSSNWRSRGQGTLVTVSSLESGGGGSFEVQLVESGGGLVQPGGSLRLSCAASGFNIKDTCIGWVRRAPGKEEELVADICPYKGSTRYADSVKGRFTISADTSKNTAYLQMNSLRAEDTAVYYCAIVSARDGYYNYWGQGTTVTVSSTREQKLISEEDLGSGTPFPSLAPPIMLLVDGKQQMVVVCLVLDVAPPGLDSPIWFSAGNGSALDAFTYGPSPATDGTWTNLAHLSLPSEELASWEPLVCHTGPGAEGHSRSTQPMHLSGEASTARTCPQEPLRGTPGGALWLGVLRLLLFKLLLFDLLLTCSCLCDPAGPLPSPATTTRLRALGSHRLHPATETGGREATSSPRPQPRDRRWGDTPPGRKPGSPVRAKRSGSGVKQTLNFDLLKLAGDVESNPGPSRSRGHMTEYKPTVRLATRDDVPRAVRTLAAAFADYPATRHTVDPDRHIERVTELQELFLTRVGLDIGKVWVADDGAAVAVWTTPESVEAGAVFAEIGPRMAELSGSRLAAQQQMEGLLAPHRPKEPAWFLATVGVSPDHQGKGLGSAVVLPGVEAAERAGVPAFLETSAPRNLPFYERLGFTVTADVEVPEGPRTWCMTRKPGA

SEQ ID NO: 17536 - protein, 899 aa, Artificial Sequence
  Synthetic Polypeptide
MALPVTALLLPLALLLHAARPQLQLQESGPGLVKPSETLSLTCTVSGDSISSGDYYWGWIRQPPGKGLEWIGHIYYSGVTYYNPSLKSRVTISVDTSRNQFSLKLSSVTAADTAVYYCTREDSSNWRSRGQGTLVTVSSLEGKPIPNPLLGLDSTGSGDKQLDADVSPKPTIFLPSIAETKLQKAGTYLCLLEKFFPDVIKIHWQEKKSNTILGSQEGNTMKTNDTYMKFSWLTVPEKSLDKEHRCIVRHENNKNGVDQEIIFPPIKTDVITMDPKDNCSKDANDTLLLQLTNTSAYYMYLLLLLKSVVYFAIITCCLLRRTAFCCNGEKSRAKRSGSGATNFSLLKQAGDVEENPGPTSMDWIWRILFLVGAATGAHSFEVQLVESGGGLVQPGGSLRLSCAASGFNIKDTCIGWVRRAPGKEEELVADICPYKGSTRYADSVKGRFTISADTSKNTAYLQMNSLRAEDTAVYYCAIVSARDGYYNYWGQGTTVTVSSTREQKLISEEDGSGSQPHTKPSVFVMKNGTNVACLVKEFYPKDIRINLVSSKKITEFDPAIVISPSGKYNAVKLGKYEDSNSVTCSVQHDNKTVHSTDFEVKTDSTDHVKPKETENTKQPSKSCHKPKAIVHTEKVNMMSLTVLGLRMLFAKTVAVNFLLTAKLFFLRAKRSGSGVKQTLNFDLLKLAGDVESNPGPSRGHMTEYKPTVRLATRDDVPRAVRTLAAAFADYPATRHTVDPDRHIERVTELQELFLTRVGLDIGKVWVADDGAAVAVWTTPESVEAGAVFAEIGPRMAELSGSRLAAQQQMEGLLAPHRPKEPAWFLATVGVSPDHQGKGLGSAVVLPGVEAAERAGVPAFLETSAPRNLPFYERLGFTVTADVEVPEGPRTWCMTRKPGA

SEQ ID NO: 17537 - protein, 637 aa, Artificial Sequence
  Synthetic Polypeptide
MALPVTALLLPLALLLHAARPQLQLQESGPGLVKPSETLSLTCTVSGDSISSGDYYWGWIRQPPGKGLEWIGHIYYSGVTYYNPSLKSRVTISVDTSRNQFSLKLSSVTAADTAVYYCTREDSSNWRSRGQGTLVTVSSLESQPHTKPSVFVMKNGTNVACLVKEFYPKDIRINLVSSKKITEFDPAIVISPSGKYNAVKLGKYEDSNSVTCSVQHDNKTVHSTDFEVKTDSTDHVKPKETENTKQPSKSCHKPKAIVHTEKVNMMSLTVLGLRMLFAKTVAVNFLLTAKLFFLRAKRSGSGATNFSLLKQAGDVEENPGPTSMDWIWRILFLVGAATGAHSFEVQLVESGGGLVQPGGSLRLSCAASGFNIKDTCIGWVRRAPGKEEELVADICPYKGSTRYADSVKGRFTISADTSKNTAYLQMNSLRAEDTAVYYCAIVSARDGYYNYWGQGTTVTVSSTRDKQLDADVSPKPTIFLPSIAETKLQKAGTYLCLLEKFFPDVIKIHWQEKKSNTILGSQEGNTMKTNDTYMKFSWLTVPEKSLDKEHRCIVRHENNKNGVDQEIIFPPIKTDVITMDPKDNCSKDANDTLLLQLTNTSAYYMYLLLLLKSVVYFAIITCCLLRRTAFCCNGEKS

SEQ ID NO: 17538 - protein, 909 aa, Artificial Sequence
  Synthetic Polypeptide
MALPVTALLLPLALLLHAARPLEGKPIPNPLLGLDSTGSGDKQLDADVSPKPTIFLPSIAETKLQKAGTYLCLLEKFFPDVIKIHWQEKKSNTILGSQEGNTMKTNDTYMKFSWLTVPEKSLDKEHRCIVRHENNKNGVDQEIIFPPIKTDVITMDPKDNCSKDANDTLLLQLTNTSAYYMYLLLLLKSVVYFAIITCCLLRRTAFCCNGEKSRAKRSGSGATNFSLLKQAGDVEENPGPTSMALPVTALLLPLALLLHAARPQLQLQESGPGLVKPSETLSLTCTVSGDSISSGDYYWGWIRQPPGKGLEWIGHIYYSGVTYYNPSLKSRVTISVDTSRNQFSLKLSSVTAADTAVYYCTREDSSNWRSRGQGTLVTVSSLESGGGGSFEVQLVESGGGLVQPGGSLRLSCAASGFNIKDTCIGWVRRAPGKEEELVADICPYKGSTRYADSVKGRFTISADTSKNTAYLQMNSLRAEDTAVYYCAIVSARDGYYNYWGQGTTVTVSSTREQKLISEEDGSGSQPHTKPSVFVMKNGTNVACLVKEFYPKDIRINLVSSKKITEFDPAIVISPSGKYNAVKLGKYEDSNSVTCSVQHDNKTVHSTDFEVKTDSTDHVKPKETENTKQPSKSCHKPKAIVHTEKVNMMSLTVLGLRMLFAKTVAVNFLLTAKLFFLRAKRSGSGVKQTLNFDLLKLAGDVESNPGPSRGHMTEYKPTVRLATRDDVPRAVRTLAAAFADYPATRHTVDPDRHIERVTELQELFLTRVGLDIGKVWVADDGAAVAVWTTPESVEAGAVFAEIGPRMAELSGSRLAAQQQMEGLLAPHRPKEPAWFLATVGVSPDHQGKGLGSAVVLPGVEAAERAGVPAFLETSAPRNLPFYERLGFTVTADVEVPEGPRTWCMTRKPGA

SEQ ID NO: 17539 - protein, 1039 aa, Artificial Sequence
  Synthetic Polypeptide
MALPVTALLLPLALLLHAARPQLQLQESGPGLVKPSETLSLTCTVSGDSISSGDYYWGWIRQPPGKGLEWIGHIYYSGVTYYNPSLKSRVTISVDTSRNQFSLKLSSVTAADTAVYYCTREDSSNWRSRGQGTLVTVSSGQPKANPTVTLFPPSSEELQANKATLVCLISDFYPGAVTVAWKADGSPVKAGVETTKPSKQSNNKYAASSYLSLTPEQWKSHRSYSCQVTHEGSTVEKTVAPTECSGSQSFGLLDPKLCYLLDGILFIYGVILTALFLRVKFSRSADAPAYQQGQNQLYNELNLGRREEYDVLDKRRGRDPEMGGKPQRRKNPQEGLYNELQKDKMAEAYSEIGMKGERRRGKGHDGLYQGLSTATKDTYDALHMQALPPRRAKRSGSGATNFSLLKQAGDVEENPGPTSMDWIWRILFLVGAATGAHSFEVQLVESGGGLVQPGGSLRLSCAASGFNIKDTCIGWVRRAPGKEEELVADICPYKGSTRYADSVKGRFTISADTSKNTAYLQMNSLRAEDTAVYYCAIVSARDGYYNYWGQGTTVTVSSASTKGPSVFPLAPSSKSTSGGTAALGCLVKDYFPEPVTVSWNSGALTSGVHTFPAVLQSSGLYSLSSVVTVPSSSLGTQTYICNVNHKPSNTKVDKRVEPKSCGTQSFGLLDPKLCYLLDGILFIYGVILTALFLRVKFSRSADAPAYQQGQNQLYNELNLGRREEYDVLDKRRGRDPEMGGKPQRRKNPQEGLYNELQKDKMAEAYSEIGMKGERRRGKGHDGLYQGLSTATKDTYDALHMQALPPRRAKRSGSGVKQTLNFDLLKLAGDVESNPGPSRGHMTEYKPTVRLATRDDVPRAVRTLAAAFADYPATRHTVDPDRHIERVTELQELFLTRVGLDIGKVWVADDGAAVAVWTTPESVEAGAVFAEIGPRMAELSGSRLAAQQQMEGLLAPHRPKEPAWFLATVGVSPDHQGKGLGSAVVLPGVEAAERAGVPAFLETSAPRNLPFYERLGFTVTADVEVPEGPRTWCMTRKPGA

SEQ ID NO: 17540 - protein, 825 aa, Artificial Sequence
  Synthetic Polypeptide
MALPVTALLLPLALLLHAARPQLQLQESGPGLVKPSETLSLTCTVSGDSISSGDYYWGWIRQPPGKGLEWIGHIYYSGVTYYNPSLKSRVTISVDTSRNQFSLKLSSVTAADTAVYYCTREDSSNWRSRGQGTLVTVSSLEDLKNVFPPEVAVFEPSEAEISHTQKATLVCLATGFYPDHVELSWWVNGKEVHSGVSTDPQPLKEQPALNDSRYCLSSRLRVSATFWQNPRNHFRCQVQFYGLSENDEWTQDRAKPVTQIVSAEAWGRADCGSQSFGLLDPKLCYLLDGILFIYGVILTALFLRVKFSRSADAPAYQQGQNQLYNELNLGRREEYDVLDKRRGRDPEMGGKPQRRKNPQEGLYNELQKDKMAEAYSEIGMKGERRRGKGHDGLYQGLSTATKDTYDALHMQALPPRRAKRSGSGATNFSLLKQAGDVEENPGPTSMDWIWRILFLVGAATGAHSFEVQLVESGGGLVQPGGSLRLSCAASGFNIKDTCIGWVRRAPGKEEELVADICPYKGSTRYADSVKGRFTISADTSKNTAYLQMNSLRAEDTAVYYCAIVSARDGYYNYWGQGTTVTVSSTRIQNPDPAVYQLRDSKSSDKSVCLFTDFDSQTNVSQSKDSDVYITDKTVLDMRSMDFKSNSAVAWSNKSDFACANAFNNSIIPEDTFFPSPESSCGTQSFGLLDPKLCYLLDGILFIYGVILTALFLRVKFSRSADAPAYQQGQNQLYNELNLGRREEYDVLDKRRGRDPEMGGKPQRRKNPQEGLYNELQKDKMAEAYSEIGMKGERRRGKGHDGLYQGLSTATKDTYDALHMQALPPR

SEQ ID NO: 17541 - protein, 825 aa, Artificial Sequence
  Synthetic Polypeptide
MALPVTALLLPLALLLHAARPQLQLQESGPGLVKPSETLSLTCTVSGDSISSGDYYWGWIRQPPGKGLEWIGHIYYSGVTYYNPSLKSRVTISVDTSRNQFSLKLSSVTAADTAVYYCTREDSSNWRSRGQGTLVTVSSLEDLKNVFPPEVAVFEPSKAEIAHTQKATLVCLATGFYPDHVELSWWVNGKEVHSGVCTDPQPLKEQPALNDSRYCLSSRLRVSATFWQNPRNHFRCQVQFYGLSENDEWTQDRAKPVTQIVSAEAWGRADCGSQSFGLLDPKLCYLLDGILFIYGVILTALFLRVKFSRSADAPAYQQGQNQLYNELNLGRREEYDVLDKRRGRDPEMGGKPQRRKNPQEGLYNELQKDKMAEAYSEIGMKGERRRGKGHDGLYQGLSTATKDTYDALHMQALPPRRAKRSGSGATNFSLLKQAGDVEENPGPTSMDWIWRILFLVGAATGAHSFEVQLVESGGGLVQPGGSLRLSCAASGFNIKDTCIGWVRRAPGKEEELVADICPYKGSTRYADSVKGRFTISADTSKNTAYLQMNSLRAEDTAVYYCAIVSARDGYYNYWGQGTTVTVSSTRIQNPDPAVYQLRDSKSSDKSVCLFTDFDSQTNVSQSKDSDVYITDKCVLDMRSMDFKSNSAVAWSNKSDFACANAFNNSIIPEDTFFPSSDVPCGTQSFGLLDPKLCYLLDGILFIYGVILTALFLRVKFSRSADAPAYQQGQNQLYNELNLGRREEYDVLDKRRGRDPEMGGKPQRRKNPQEGLYNELQKDKMAEAYSEIGMKGERRRGKGHDGLYQGLSTATKDTYDALHMQALPPR

SEQ ID NO: 17542 - protein, 896 aa, Artificial Sequence
  Synthetic Polypeptide
MALPVTALLLPLALLLHAARPQLQLQESGPGLVKPSETLSLTCTVSGDSISSGDYYWGWIRQPPGKGLEWIGHIYYSGVTYYNPSLKSRVTISVDTSRNQFSLKLSSVTAADTAVYYCTREDSSNWRSRGQGTLVTVSSLEGKPIPNPLLGLDSTGSGEDLKNVFPPEVAVFEPSEAEISHTQKATLVCLATGFYPDHVELSWWVNGKEVHSGVSTDPQPLKEQPALNDSRYCLSSRLRVSATFWQNPRNHFRCQVQFYGLSENDEWTQDRAKPVTQIVSAEAWGRADCGSQSFGLLDPKLCYLLDGILFIYGVILTALFLRVKFSRSADAPAYQQGQNQLYNELNLGRREEYDVLDKRRGRDPEMGGKPQRRKNPQEGLYNELQKDKMAEAYSEIGMKGERRRGKGHDGLYQGLSTATKDTYDALHMQALPPRRAKRSGSGATNFSLLKQAGDVEENPGPTSMDWIWRILFLVGAATGAHSFEVQLVESGGGLVQPGGSLRLSCAASGFNIKDTCIGWVRRAPGKEEELVADICPYKGSTRYADSVKGRFTISADTSKNTAYLQMNSLRAEDTAVYYCAIVSARDGYYNYWGQGTTVTVSSTREQKLISEEDGSGIQNPDPAVYQLRDSKSSDKSVCLFTDFDSQTNVSQSKDSDVYITDKTVLDMRSMDFKSNSAVAWSNKSDFACANAFNNSIIPEDTFFPSPESSCGTQSFGLLDPKLCYLLDGILFIYGVILTALFLRSKRSRLLHSDYMNMTPRRPGPTRKHYQPYAPPRDFAAYRSRVKFSRSADAPAYQQGQNQLYNELNLGRREEYDVLDKRRGRDPEMGGKPQRRKNPQEGLYNELQKDKMAEAYSEIGMKGERRRGKGHDGLYQGLSTATKDTYDALHMQALPPR

SEQ ID NO: 17543 - protein, 937 aa, Artificial Sequence
  Synthetic Polypeptide
MALPVTALLLPLALLLHAARPQLQLQESGPGLVKPSETLSLTCTVSGDSISSGDYYWGWIRQPPGKGLEWIGHIYYSGVTYYNPSLKSRVTISVDTSRNQFSLKLSSVTAADTAVYYCTREDSSNWRSRGQGTLVTVSSLEGKPIPNPLLGLDSTGSGEDLKNVFPPEVAVFEPSEAEISHTQKATLVCLATGFYPDHVELSWWVNGKEVHSGVSTDPQPLKEQPALNDSRYCLSSRLRVSATFWQNPRNHFRCQVQFYGLSENDEWTQDRAKPVTQIVSAEAWGRADCGSQSFGLLDPKLCYLLDGILFIYGVILTALFLRSKRSRLLHSDYMNMTPRRPGPTRKHYQPYAPPRDFAAYRSRVKFSRSADAPAYQQGQNQLYNELNLGRREEYDVLDKRRGRDPEMGGKPQRRKNPQEGLYNELQKDKMAEAYSEIGMKGERRRGKGHDGLYQGLSTATKDTYDALHMQALPPRRAKRSGSGATNFSLLKQAGDVEENPGPTSMDWIWRILFLVGAATGAHSFEVQLVESGGGLVQPGGSLRLSCAASGFNIKDTCIGWVRRAPGKEEELVADICPYKGSTRYADSVKGRFTISADTSKNTAYLQMNSLRAEDTAVYYCAIVSARDGYYNYWGQGTTVTVSSTREQKLISEEDGSGIQNPDPAVYQLRDSKSSDKSVCLFTDFDSQTNVSQSKDSDVYITDKTVLDMRSMDFKSNSAVAWSNKSDFACANAFNNSIIPEDTFFPSPESSCGTQSFGLLDPKLCYLLDGILFIYGVILTALFLRSKRSRLLHSDYMNMTPRRPGPTRKHYQPYAPPRDFAAYRSRVKFSRSADAPAYQQGQNQLYNELNLGRREEYDVLDKRRGRDPEMGGKPQRRKNPQEGLYNELQKDKMAEAYSEIGMKGERRRGKGHDGLYQGLSTATKDTYDALHMQALPPR

SEQ ID NO: 17544 - protein, 898 aa, Artificial Sequence
  Synthetic Polypeptide
MALPVTALLLPLALLLHAARPQLQLQESGPGLVKPSETLSLTCTVSGDSISSGDYYWGWIRQPPGKGLEWIGHIYYSGVTYYNPSLKSRVTISVDTSRNQFSLKLSSVTAADTAVYYCTREDSSNWRSRGQGTLVTVSSLEGKPIPNPLLGLDSTGSGEDLKNVFPPEVAVFEPSEAEISHTQKATLVCLATGFYPDHVELSWWVNGKEVHSGVSTDPQPLKEQPALNDSRYCLSSRLRVSATFWQNPRNHFRCQVQFYGLSENDEWTQDRAKPVTQIVSAEAWGRADCGSQSFGLLDPKLCYLLDGILFIYGVILTALFLRVKFSRSADAPAYQQGQNQLYNELNLGRREEYDVLDKRRGRDPEMGGKPQRRKNPQEGLYNELQKDKMAEAYSEIGMKGERRRGKGHDGLYQGLSTATKDTYDALHMQALPPRRAKRSGSGATNFSLLKQAGDVEENPGPTSMDWIWRILFLVGAATGAHSFEVQLVESGGGLVQPGGSLRLSCAASGFNIKDTCIGWVRRAPGKEEELVADICPYKGSTRYADSVKGRFTISADTSKNTAYLQMNSLRAEDTAVYYCAIVSARDGYYNYWGQGTTVTVSSTREQKLISEEDLGSGIQNPDPAVYQLRDSKSSDKSVCLFTDFDSQTNVSQSKDSDVYITDKTVLDMRSMDFKSNSAVAWSNKSDFACANAFNNSIIPEDTFFPSPESSCGTQSFGLLDPKLCYLLDGILFIYGVILTALFLKRGRKKLLYIFKQPFMRPVQTTQEEDGCSCRFPEEEEGGCELRVKFSRSADAPAYQQGQNQLYNELNLGRREEYDVLDKRRGRDPEMGGKPQRRKNPQEGLYNELQKDKMAEAYSEIGMKGERRRGKGHDGLYQGLSTATKDTYDALHMQALPPR

SEQ ID NO: 17545 - protein, 940 aa, Artificial Sequence
  Synthetic Polypeptide
MALPVTALLLPLALLLHAARPQLQLQESGPGLVKPSETLSLTCTVSGDSISSGDYYWGWIRQPPGKGLEWIGHIYYSGVTYYNPSLKSRVTISVDTSRNQFSLKLSSVTAADTAVYYCTREDSSNWRSRGQGTLVTVSSLEGKPIPNPLLGLDSTGSGEDLKNVFPPEVAVFEPSEAEISHTQKATLVCLATGFYPDHVELSWWVNGKEVHSGVSTDPQPLKEQPALNDSRYCLSSRLRVSATFWQNPRNHFRCQVQFYGLSENDEWTQDRAKPVTQIVSAEAWGRADCGSQSFGLLDPKLCYLLDGILFIYGVILTALFLKRGRKKLLYIFKQPFMRPVQTTQEEDGCSCRFPEEEEGGCELRVKFSRSADAPAYQQGQNQLYNELNLGRREEYDVLDKRRGRDPEMGGKPQRRKNPQEGLYNELQKDKMAEAYSEIGMKGERRRGKGHDGLYQGLSTATKDTYDALHMQALPPRRAKRSGSGATNFSLLKQAGDVEENPGPTSMDWIWRILFLVGAATGAHSFEVQLVESGGGLVQPGGSLRLSCAASGFNIKDTCIGWVRRAPGKEEELVADICPYKGSTRYADSVKGRFTISADTSKNTAYLQMNSLRAEDTAVYYCAIVSARDGYYNYWGQGTTVTVSSTREQKLISEEDLGSGIQNPDPAVYQLRDSKSSDKSVCLFTDFDSQTNVSQSKDSDVYITDKTVLDMRSMDFKSNSAVAWSNKSDFACANAFNNSIIPEDTFFPSPESSCGTQSFGLLDPKLCYLLDGILFIYGVILTALFLKRGRKKLLYIFKQPFMRPVQTTQEEDGCSCRFPEEEEGGCELRVKFSRSADAPAYQQGQNQLYNELNLGRREEYDVLDKRRGRDPEMGGKPQRRKNPQEGLYNELQKDKMAEAYSEIGMKGERRRGKGHDGLYQGLSTATKDTYDALHMQALPPR

SEQ ID NO: 17546 - protein, 830 aa, Artificial Sequence
  Synthetic Polypeptide
MALPVTALLLPLALLLHAARPQLQLQESGPGLVKPSETLSLTCTVSGDSISSGDYYWGWIRQPPGKGLEWIGHIYYSGVTYYNPSLKSRVTISVDTSRNQFSLKLSSVTAADTAVYYCTREDSSNWRSRGQGTLVTVSSLEQSFGLLDPKLCYLLDGILFIYGVILTALFLRVKFSRSADAPAYQQGQNQLYNELNLGRREEYDVLDKRRGRDPEMGGKPQRRKNPQEGLYNELQKDKMAEAYSEIGMKGERRRGKGHDGLYQGLSTATKDTYDALHMQALPPRRAKRSGSGATNFSLLKQAGDVEENPGPTSMDWIWRILFLVGAATGAHSFEVQLVESGGGLVQPGGSLRLSCAASGFNIKDTCIGWVRRAPGKEEELVADICPYKGSTRYADSVKGRFTISADTSKNTAYLQMNSLRAEDTAVYYCAIVSARDGYYNYWGQGTTVTVSSTRQSFGLLDPKLCYLLDGILFIYGVILTALFLRVKFSRSADAPAYQQGQNQLYNELNLGRREEYDVLDKRRGRDPEMGGKPQRRKNPQEGLYNELQKDKMAEAYSEIGMKGERRRGKGHDGLYQGLSTATKDTYDALHMQALPPRRAKRSGSGVKQTLNFDLLKLAGDVESNPGPSRGHMTEYKPTVRLATRDDVPRAVRTLAAAFADYPATRHTVDPDRHIERVTELQELFLTRVGLDIGKVWVADDGAAVAVWTTPESVEAGAVFAEIGPRMAELSGSRLAAQQQMEGLLAPHRPKEPAWFLATVGVSPDHQGKGLGSAVVLPGVEAAERAGVPAFLETSAPRNLPFYERLGFTVTADVEVPEGPRTWCMTRKPGA

SEQ ID NO: 17547 - protein, 655 aa, Artificial Sequence
  Synthetic Polypeptide
MALPVTALLLPLALLLHAARPQLQLQESGPGLVKPSETLSLTCTVSGDSISSGDYYWGWIRQPPGKGLEWIGHIYYSGVTYYNPSLKSRVTISVDTSRNQFSLKLSSVTAADTAVYYCTREDSSNWRSRGQGTLVTVSSLEGQPKANPTVTLFPPSSEELQANKATLVCLISDFYPGAVTVAWKADGSPVKAGVETTKPSKQSNNKYAASSYLSLTPEQWKSHRSYSCQVTHEGSTVEKTVAPTECSPIKTDVITMDPKDNCSKDANDTLLLQLTNTSAYYMYLLLLLKSVVYFAIITCCLLRRTAFCCNGEKSRAKRSGSGATNFSLLKQAGDVEENPGPTSMDWIWRILFLVGAATGAHSFEVQLVESGGGLVQPGGSLRLSCAASGFNIKDTCIGWVRRAPGKEEELVADICPYKGSTRYADSVKGRFTISADTSKNTAYLQMNSLRAEDTAVYYCAIVSARDGYYNYWGQGTTVTVSSTRASTKGPSVFPLAPSSKSTSGGTAALGCLVKDYFPEPVTVSWNSGALTSGVHTFPAVLQSSGLYSLSSVVTVPSSSLGTQTYICNVNHKPSNTKVDKRVEPKSCEVKTDSTDHVKPKETENTKQPSKSCHKPKAIVHTEKVNMMSLTVLGLRMLFAKTVAVNFLLTAKLFFL

SEQ ID NO: 17548 - protein, 633 aa, Artificial Sequence
  Synthetic Polypeptide
MALPVTALLLPLALLLHAARPQLQLQESGPGLVKPSETLSLTCTVSGDSISSGDYYWGWIRQPPGKGLEWIGHIYYSGVTYYNPSLKSRVTISVDTSRNQFSLKLSSVTAADTAVYYCTREDSSNWRSRGQGTLVTVSSLEGQPKANPTVTLFPPSSEELQANKATLVCLISDFYPGAVTVAWKADGSPVKAGVETTKPSKQSNNKYAASSYLSLTPEQWKSHRSYSCQVTHEGSTVEKTVAPTECSGRADCGITSASYHQGVLSATILYEILLGKATLYAVLVSALVLMAMVKRKDSRGRAKRSGSGATNFSLLKQAGDVEENPGPTSMDWIWRILFLVGAATGAHSFEVQLVESGGGLVQPGGSLRLSCAASGFNIKDTCIGWVRRAPGKEEELVADICPYKGSTRYADSVKGRFTISADTSKNTAYLQMNSLRAEDTAVYYCAIVSARDGYYNYWGQGTTVTVSSTRASTKGPSVFPLAPSSKSTSGGTAALGCLVKDYFPEPVTVSWNSGALTSGVHTFPAVLQSSGLYSLSSVVTVPSSSLGTQTYICNVNHKPSNTKVDKRVEPKSCIPEDTFFPSSDVPCDVKLVEKSFETDTNLNFQNLSVIGFRILLLKVAGFNLLMTLRLWSS

SEQ ID NO: 17549 - protein, 633 aa, Artificial Sequence
  Synthetic Polypeptide
MALPVTALLLPLALLLHAARPQLQLQESGPGLVKPSETLSLTCTVSGDSISSGDYYWGWIRQPPGKGLEWIGHIYYSGVTYYNPSLKSRVTISVDTSRNQFSLKLSSVTAADTAVYYCTREDSSNWRSRGQGTLVTVSSLEGQPKANPTVTLFPPSSEELQANKATLVCLISDFYPGAVTVAWKADGSPVKAGVETTKPSKQSNNKYAASSYLSLTPEQWKSHRSYSCQVTHEGSTVEKTVAPTECSGRADCGFTSESYQQGVLSATILYEILLGKATLYAVLVSALVLMAMVKRKDSRGRAKRSGSGATNFSLLKQAGDVEENPGPTSMDWIWRILFLVGAATGAHSFEVQLVESGGGLVQPGGSLRLSCAASGFNIKDTCIGWVRRAPGKEEELVADICPYKGSTRYADSVKGRFTISADTSKNTAYLQMNSLRAEDTAVYYCAIVSARDGYYNYWGQGTTVTVSSTRASTKGPSVFPLAPSSKSTSGGTAALGCLVKDYFPEPVTVSWNSGALTSGVHTFPAVLQSSGLYSLSSVVTVPSSSLGTQTYICNVNHKPSNTKVDKRVEPKSCIPEDTFFPSPESSCDVKLVEKSFETDTNLNFQNLSVIGFRILLLKVAGFNLLMTLRLWSS

SEQ ID NO: 17550 - protein, 454 aa, Artificial Sequence
  Synthetic Polypeptide
MALPVTALLLPLALLLHAARPQLQLQESGPGLVKPSETLSLTCTVSGDSISSGDYYWGWIRQPPGKGLEWIGHIYYSGVTYYNPSLKSRVTISVDTSRNQFSLKLSSVTAADTAVYYCTREDSSNWRSRGQGTLVTVSSLESGGGGSFEVQLVESGGGLVQPGGSLRLSCAASGFNIKDTCIGWVRRAPGKEEELVADICPYKGSTRYADSVKGRFTISADTSKNTAYLQMNSLRAEDTAVYYCAIVSARDGYYNYWGQGTTVTVSSTRDGNEEMGGITQTPYKVSISGTTVILTCPQYPGSEILWQHNDKNIGGDEDDKNIGSDEDHLSLKEFSELEQSGYYVCYPRGSKPEDANFYLYLRARVCENCMEMDVMSVATIVIVDICITGGLLLLVYYWSKNRKAKAKPVTRGAGAGGRQRGQNKERPPPVPNPDYEPIRKGQRDLYSGLNQRRI

SEQ ID NO: 17551 - protein, 419 aa, Artificial Sequence
  Synthetic Polypeptide
MALPVTALLLPLALLLHAARPQLQLQESGPGLVKPSETLSLTCTVSGDSISSGDYYWGWIRQPPGKGLEWIGHIYYSGVTYYNPSLKSRVTISVDTSRNQFSLKLSSVTAADTAVYYCTREDSSNWRSRGQGTLVTVSSLESGGGGSFEVQLVESGGGLVQPGGSLRLSCAASGFNIKDTCIGWVRRAPGKEEELVADICPYKGSTRYADSVKGRFTISADTSKNTAYLQMNSLRAEDTAVYYCAIVSARDGYYNYWGQGTTVTVSSTRFKIPIEELEDRVFVNCNTSITWVEGTVGTLLSDITRLDLGKRILDPRGIYRCNGTDIYKDKESTVQVHYRMCQSCVELDPATVAGIIVTDVIATLLLALGVFCFAGHETGRLSGAADTQALLRNDQVYQPLRDRDDAQYSHLGGNWARNK

SEQ ID NO: 17552 - protein, 429 aa, Artificial Sequence
  Synthetic Polypeptide
MALPVTALLLPLALLLHAARPQLQLQESGPGLVKPSETLSLTCTVSGDSISSGDYYWGWIRQPPGKGLEWIGHIYYSGVTYYNPSLKSRVTISVDTSRNQFSLKLSSVTAADTAVYYCTREDSSNWRSRGQGTLVTVSSLESGGGGSFEVQLVESGGGLVQPGGSLRLSCAASGFNIKDTCIGWVRRAPGKEEELVADICPYKGSTRYADSVKGRFTISADTSKNTAYLQMNSLRAEDTAVYYCAIVSARDGYYNYWGQGTTVTVSSTRQSIKGNHLVKVYDYQEDGSVLLTCDAEAKNITWFKDGKMIGFLTEDKKKWNLGSNAKDPRGMYQCKGSQNKSKPLQVYYRMCQNCIELNAATISGFLFAEIVSIFVLAVGVYFIAGQDGVRQSRASDKQTLLPNDQLYQPLKDREDDQYSHLQGNQLRRN

SEQ ID NO: 17553 - protein, 412 aa, Artificial Sequence
  Synthetic Polypeptide
MALPVTALLLPLALLLHAARPQLQLQESGPGLVKPSETLSLTCTVSGDSISSGDYYWGWIRQPPGKGLEWIGHIYYSGVTYYNPSLKSRVTISVDTSRNQFSLKLSSVTAADTAVYYCTREDSSNWRSRGQGTLVTVSSLESGGGGSFEVQLVESGGGLVQPGGSLRLSCAASGFNIKDTCIGWVRRAPGKEEELVADICPYKGSTRYADSVKGRFTISADTSKNTAYLQMNSLRAEDTAVYYCAIVSARDGYYNYWGQGTTVTVSSTRQSFGLLDPKLCYLLDGILFIYGVILTALFLRVKFSRSADAPAYQQGQNQLYNELNLGRREEYDVLDKRRGRDPEMGGKPQRRKNPQEGLYNELQKDKMAEAYSEIGMKGERRRGKGHDGLYQGLSTATKDTYDALHMQALPPR

SEQ ID NO: 17554 - protein, 455 aa, Artificial Sequence
  Synthetic Polypeptide
MALPVTALLLPLALLLHAARPEVQLVESGGGLVQPGGSLRLSCAASGFNIKDTCIGWVRRAPGKEEELVADICPYKGSTRYADSVKGRFTISADTSKNTAYLQMNSLRAEDTAVYYCAIVSARDGYYNYWGQGTTVTVSSLESGGGGSFEQLQLQESGPGLVKPSETLSLTCTVSGDSISSGDYYWGWIRQPPGKGLEWIGHIYYSGVTYYNPSLKSRVTISVDTSRNQFSLKLSSVTAADTAVYYCTREDSSNWRSRGQGTLVTVSSTRDGNEEMGGITQTPYKVSISGTTVILTCPQYPGSEILWQHNDKNIGGDEDDKNIGSDEDHLSLKEFSELEQSGYYVCYPRGSKPEDANFYLYLRARVCENCMEMDVMSVATIVIVDICITGGLLLLVYYWSKNRKAKAKPVTRGAGAGGRQRGQNKERPPPVPNPDYEPIRKGQRDLYSGLNQRRI

SEQ ID NO: 17555 - protein, 420 aa, Artificial Sequence
  Synthetic Polypeptide
MALPVTALLLPLALLLHAARPEVQLVESGGGLVQPGGSLRLSCAASGFNIKDTCIGWVRRAPGKEEELVADICPYKGSTRYADSVKGRFTISADTSKNTAYLQMNSLRAEDTAVYYCAIVSARDGYYNYWGQGTTVTVSSLESGGGGSFEQLQLQESGPGLVKPSETLSLTCTVSGDSISSGDYYWGWIRQPPGKGLEWIGHIYYSGVTYYNPSLKSRVTISVDTSRNQFSLKLSSVTAADTAVYYCTREDSSNWRSRGQGTLVTVSSTRFKIPIEELEDRVFVNCNTSITWVEGTVGTLLSDITRLDLGKRILDPRGIYRCNGTDIYKDKESTVQVHYRMCQSCVELDPATVAGIIVTDVIATLLLALGVFCFAGHETGRLSGAADTQALLRNDQVYQPLRDRDDAQYSHLGGNWARNK

SEQ ID NO: 17556 - protein, 430 aa, Artificial Sequence
  Synthetic Polypeptide
MALPVTALLLPLALLLHAARPEVQLVESGGGLVQPGGSLRLSCAASGFNIKDTCIGWVRRAPGKEEELVADICPYKGSTRYADSVKGRFTISADTSKNTAYLQMNSLRAEDTAVYYCAIVSARDGYYNYWGQGTTVTVSSLESGGGGSFEQLQLQESGPGLVKPSETLSLTCTVSGDSISSGDYYWGWIRQPPGKGLEWIGHIYYSGVTYYNPSLKSRVTISVDTSRNQFSLKLSSVTAADTAVYYCTREDSSNWRSRGQGTLVTVSSTRQSIKGNHLVKVYDYQEDGSVLLTCDAEAKNITWFKDGKMIGFLTEDKKKWNLGSNAKDPRGMYQCKGSQNKSKPLQVYYRMCQNCIELNAATISGFLFAEIVSIFVLAVGVYFIAGQDGVRQSRASDKQTLLPNDQLYQPLKDREDDQYSHLQGNQLRRN

SEQ ID NO: 17557 - protein, 413 aa, Artificial Sequence
  Synthetic Polypeptide
MALPVTALLLPLALLLHAARPEVQLVESGGGLVQPGGSLRLSCAASGFNIKDTCIGWVRRAPGKEEELVADICPYKGSTRYADSVKGRFTISADTSKNTAYLQMNSLRAEDTAVYYCAIVSARDGYYNYWGQGTTVTVSSLESGGGGSFEQLQLQESGPGLVKPSETLSLTCTVSGDSISSGDYYWGWIRQPPGKGLEWIGHIYYSGVTYYNPSLKSRVTISVDTSRNQFSLKLSSVTAADTAVYYCTREDSSNWRSRGQGTLVTVSSTRQSFGLLDPKLCYLLDGILFIYGVILTALFLRVKFSRSADAPAYQQGQNQLYNELNLGRREEYDVLDKRRGRDPEMGGKPQRRKNPQEGLYNELQKDKMAEAYSEIGMKGERRRGKGHDGLYQGLSTATKDTYDALHMQALPPR

SEQ ID NO: 17558 - protein, 645 aa, Artificial Sequence
  Synthetic Polypeptide
MALPVTALLLPLALLLHAARPQLQLQESGPGLVKPSETLSLTCTVSGDSISSGDYYWGWIRQPPGKGLEWIGHIYYSGVTYYNPSLKSRVTISVDTSRNQFSLKLSSVTAADTAVYYCTREDSSNWRSRGQGTLVTVSSLESGGGGSFEVQLVESGGGLVQPGGSLRLSCAASGFNIKDTCIGWVRRAPGKEEELVADICPYKGSTRYADSVKGRFTISADTSKNTAYLQMNSLRAEDTAVYYCAIVSARDGYYNYWGQGTTVTVSSTRGSGIQNPDPAVYQLRDSKSSDKSVCLFTDFDSQTNVSQSKDSDVYITDKTVLDMRSMDFKSNSAVAWSNKSDFACANAFNNSIIPEDTFFPSPESSCDVKLVEKSFETDTNLNFQNLSVIGFRILLLKVAGFNLLMTLRLWSSRAKRSGSGVKQTLNFDLLKLAGDVESNPGPSRGHMTEYKPTVRLATRDDVPRAVRTLAAAFADYPATRHTVDPDRHIERVTELQELFLTRVGLDIGKVWVADDGAAVAVWTTPESVEAGAVFAEIGPRMAELSGSRLAAQQQMEGLLAPHRPKEPAWFLATVGVSPDHQGKGLGSAVVLPGVEAAERAGVPAFLETSAPRNLPFYERLGFTVTADVEVPEGPRTWCMTRKPGA

SEQ ID NO: 17559 - protein, 677 aa, Artificial Sequence
  Synthetic Polypeptide
MALPVTALLLPLALLLHAARPQLQLQESGPGLVKPSETLSLTCTVSGDSISSGDYYWGWIRQPPGKGLEWIGHIYYSGVTYYNPSLKSRVTISVDTSRNQFSLKLSSVTAADTAVYYCTREDSSNWRSRGQGTLVTVSSLESGGGGSFEVQLVESGGGLVQPGGSLRLSCAASGFNIKDTCIGWVRRAPGKEEELVADICPYKGSTRYADSVKGRFTISADTSKNTAYLQMNSLRAEDTAVYYCAIVSARDGYYNYWGQGTTVTVSSLEDLKNVFPPEVAVFEPSEAEISHTQKATLVCLATGFYPDHVELSWWVNGKEVHSGVSTDPQPLKEQPALNDSRYCLSSRLRVSATFWQNPRNHFRCQVQFYGLSENDEWTQDRAKPVTQIVSAEAWGRADCGFTSESYQQGVLSATILYEILLGKATLYAVLVSALVLMAMVKRKDSRGRAKRSGSGATNFSLLKQAGDVEENPGPTRGHMTEYKPTVRLATRDDVPRAVRTLAAAFADYPATRHTVDPDRHIERVTELQELFLTRVGLDIGKVWVADDGAAVAVWTTPESVEAGAVFAEIGPRMAELSGSRLAAQQQMEGLLAPHRPKEPAWFLATVGVSPDHQGKGLGSAVVLPGVEAAERAGVPAFLETSAPRNLPFYERLGFTVTADVEVPEGPRTWCMTRKPGA

SEQ ID NO: 17560 - protein, 727 aa, Artificial Sequence
  Synthetic Polypeptide
MALPVTALLLPLALLLHAARPQLQLQESGPGLVKPSETLSLTCTVSGDSISSGDYYWGWIRQPPGKGLEWIGHIYYSGVTYYNPSLKSRVTISVDTSRNQFSLKLSSVTAADTAVYYCTREDSSNWRSRGQGTLVTVSSLESGGGGSFEVQLVESGGGLVQPGGSLRLSCAASGFNIKDTCIGWVRRAPGKEEELVADICPYKGSTRYADSVKGRFTISADTSKNTAYLQMNSLRAEDTAVYYCAIVSARDGYYNYWGQGTTVTVSSTREQKLISEEDLGSGTPFPSLAPPIMLLVDGKQQMVVVCLVLDVAPPGLDSPIWFSAGNGSALDAFTYGPSPATDGTWTNLAHLSLPSEELASWEPLVCHTGPGAEGHSRSTQPMHLSGEASTARTCPQEPLRGTPGGALWLGVLRLLLFKLLLFDLLLTCSCLCDPAGPLPSPATTTRLRALGSHRLHPATETGGREATSSPRPQPRDRRWGDTPPGRKPGSPVRAKRSGSGVKQTLNFDLLKLAGDVESNPGPSRSRGHMTEYKPTVRLATRDDVPRAVRTLAAAFADYPATRHTVDPDRHIERVTELQELFLTRVGLDIGKVWVADDGAAVAVWTTPESVEAGAVFAEIGPRMAELSGSRLAAQQQMEGLLAPHRPKEPAWFLATVGVSPDHQGKGLGSAVVLPGVEAAERAGVPAFLETSAPRNLPFYERLGFTVTADVEVPEGPRTWCMTRKPGA

SEQ ID NO: 17561 - protein, 549 aa, Artificial Sequence; identical to SEQ ID NO: 17196
  Synthetic Polypeptide

SEQ ID NO: 17562 - protein, 319 aa, Artificial Sequence; identical to SEQ ID NO: 17197
  Synthetic Polypeptide

SEQ ID NO: 17563 - protein, 447 aa, Artificial Sequence
  Synthetic Polypeptide
MDWIWRILFLVGAATGAHSFEVQLVESGGGLVQPGGSLRLSCAASGFNIKDTCIGWVRRAPGKEEELVADICPYKGSTRYADSVKGRFTISADTSKNTAYLQMNSLRAEDTAVYYCAIVSARDGYYNYWGQGTTVTVSSTRIQNPDPAVYQLRDSKSSDKSVCLFTDFDSQTNVSQSKDSDVYITDKTVLDMRSMDFKSNSAVAWSNKSDFACANAFNNSIIPEDTFFPSPESSCDVKLVEKSFETDTNLNFQNLSVIGFRILLLKVAGFNLLMTLRLWSSRAKRSGSGVKQTLNFDLLKLAGDVESNPGPSRGHMAKPLSQEESTLIERATATINSIPISEDYSVASAALSSDGRIFTGVNVYHFTGGPCAELVVLGTAAAAAAGNLTCIVAIGNENRGILSPCGRCRQVLLDLHPGIKAIVKDSDGQPTAVGIRELLPSGYVWEG

SEQ ID NO: 17564 - protein, 281 aa, Artificial Sequence
  Synthetic Polypeptide
MDWIWRILFLVGAATGAHSFEVQLVESGGGLVQPGGSLRLSCAASGFNIKDTCIGWVRRAPGKEEELVADICPYKGSTRYADSVKGRFTISADTSKNTAYLQMNSLRAEDTAVYYCAIVSARDGYYNYWGQGTTVTVSSTRIQNPDPAVYQLRDSKSSDKSVCLFTDFDSQTNVSQSKDSDVYITDKTVLDMRSMDFKSNSAVAWSNKSDFACANAFNNSIIPEDTFFPSPESSCDVKLVEKSFETDTNLNFQNLSVIGFRILLLKVAGFNLLMTLRLWSS

SEQ ID NO: 17565 - protein, 567 aa, Artificial Sequence; identical to SEQ ID NO: 17200
  Synthetic Polypeptide

SEQ ID NO: 17566 - protein, 337 aa, Artificial Sequence; identical to SEQ ID NO: 17201
  Synthetic Polypeptide

SEQ ID NO: 17567 - protein, 459 aa, Artificial Sequence
  Synthetic Polypeptide
MDWIWRILFLVGAATGAHSFEVQLVESGGGLVQPGGSLRLSCAASGFNIKDTCIGWVRRAPGKEEELVADICPYKGSTRYADSVKGRFTISADTSKNTAYLQMNSLRAEDTAVYYCAIVSARDGYYNYWGQGTTVTVSSTREQKLISEEDGSGIQNPDPAVYQLRDSKSSDKSVCLFTDFDSQTNVSQSKDSDVYITDKCVLDMRSMDFKSNSAVAWSNKSDFACANAFNNSIIPEDTFFPSPESSCDVKLVEKSFETDTNLNFQNLSVIGFRILLLKVAGFNLLMTLRLWSSRAKRSGSGVKQTLNFDLLKLAGDVESNPGPSRGHMAKPLSQEESTLIERATATINSIPISEDYSVASAALSSDGRIFTGVNVYHFTGGPCAELVVLGTAAAAAAGNLTCIVAIGNENRGILSPCGRCRQVLLDLHPGIKAIVKDSDGQPTAVGIRELLPSGYVWEG

SEQ ID NO: 17568 - protein, 293 aa, Artificial Sequence
  Synthetic Polypeptide
MDWIWRILFLVGAATGAHSFEVQLVESGGGLVQPGGSLRLSCAASGFNIKDTCIGWVRRAPGKEEELVADICPYKGSTRYADSVKGRFTISADTSKNTAYLQMNSLRAEDTAVYYCAIVSARDGYYNYWGQGTTVTVSSTREQKLISEEDGSGIQNPDPAVYQLRDSKSSDKSVCLFTDFDSQTNVSQSKDSDVYITDKCVLDMRSMDFKSNSAVAWSNKSDFACANAFNNSIIPEDTFFPSPESSCDVKLVEKSFETDTNLNFQNLSVIGFRILLLKVAGFNLLMTLRLWSS

SEQ ID NO: 17569 - protein, 645 aa, Artificial Sequence
  Synthetic Polypeptide
MALPVTALLLPLALLLHAARPQLQLQESGPGLVKPSETLSLTCTVSGDSISSGDYYWGWIRQPPGKGLEWIGHIYYSGVTYYNPSLKSRVTISVDTSRNQFSLKLSSVTAADTAVYYCTREDSSNWRSRGQGTLVTVSSLESGGGGSFEVQLVESGGGLVQPGGSLRLSCAASGFNIKDTCIGWVRRAPGKEEELVADICPYKGSTRYADSVKGRFTISADTSKNTAYLQMNSLRAEDTAVYYCAIVSARDGYYNYWGQGTTVTVSSTRGSGIQNPDPAVYQLRDSKSSDKSVCLFTDFDSQTNVSQSKDSDVYITDKTVLDMRSMDFKSNSAVAWSNKSDFACANAFNNSIIPEDTFFPSSDVPCDVKLVEKSFETDTNLNFQNLSVIGFRILLLKVAGFNLLMTLRLWSSRAKRSGSGVKQTLNFDLLKLAGDVESNPGPSRGHMTEYKPTVRLATRDDVPRAVRTLAAAFADYPATRHTVDPDRHIERVTELQELFLTRVGLDIGKVWVADDGAAVAVWTTPESVEAGAVFAEIGPRMAELSGSRLAAQQQMEGLLAPHRPKEPAWFLATVGVSPDHQGKGLGSAVVLPGVEAAERAGVPAFLETSAPRNLPFYERLGFTVTADVEVPEGPRTWCMTRKPGA

SEQ ID NO: 17570 - protein, 677 aa, Artificial Sequence
  Synthetic Polypeptide
MALPVTALLLPLALLLHAARPQLQLQESGPGLVKPSETLSLTCTVSGDSISSGDYYWGWIRQPPGKGLEWIGHIYYSGVTYYNPSLKSRVTISVDTSRNQFSLKLSSVTAADTAVYYCTREDSSNWRSRGQGTLVTVSSLESGGGGSFEVQLVESGGGLVQPGGSLRLSCAASGFNIKDTCIGWVRRAPGKEEELVADICPYKGSTRYADSVKGRFTISADTSKNTAYLQMNSLRAEDTAVYYCAIVSARDGYYNYWGQGTTVTVSSLEDLKNVFPPEVAVFEPSKAEIAHTQKATLVCLATGFYPDHVELSWWVNGKEVHSGVSTDPQPLKEQPALNDSRYCLSSRLRVSATFWQNPRNHFRCQVQFYGLSENDEWTQDRAKPVTQIVSAEAWGRADCGITSASYHQGVLSATILYEILLGKATLYAVLVSALVLMAMVKRKDSRGRAKRSGSGATNFSLLKQAGDVEENPGPTRGHMTEYKPTVRLATRDDVPRAVRTLAAAFADYPATRHTVDPDRHIERVTELQELFLTRVGLDIGKVWVADDGAAVAVWTTPESVEAGAVFAEIGPRMAELSGSRLAAQQQMEGLLAPHRPKEPAWFLATVGVSPDHQGKGLGSAVVLPGVEAAERAGVPAFLETSAPRNLPFYERLGFTVTADVEVPEGPRTWCMTRKPGA

SEQ ID NO: 17571 - protein, 700 aa, Artificial Sequence
  Synthetic Polypeptide
MALPVTALLLPLALLLHAARPQLQLQESGPGLVKPSETLSLTCTVSGDSISSGDYYWGWIRQPPGKGLEWIGHIYYSGVTYYNPSLKSRVTISVDTSRNQFSLKLSSVTAADTAVYYCTREDSSNWRSRGQGTLVTVSSLESGGGGSFEVQLVESGGGLVQPGGSLRLSCAASGFNIKDTCIGWVRRAPGKEEELVADICPYKGSTRYADSVKGRFTISADTSKNTAYLQMNSLRAEDTAVYYCAIVSARDGYYNYWGQGTTVTVSSTRGSGGGGSGGGGSGDGNEEMGGITQTPYKVSISGTTVILTCPQYPGSEILWQHNDKNIGGDEDDKNIGSDEDHLSLKEFSELEQSGYYVCYPRGSKPEDANFYLYLRARVCENCMEMDVMSVATIVIVDICITGGLLLLVYYWSKNRKAKAKPVTRGAGAGGRQRGQNKERPPPVPNPDYEPIRKGQRDLYSGLNQRRIRAKRSGSGVKQTLNFDLLKLAGDVESNPGPSRGHMTEYKPTVRLATRDDVPRAVRTLAAAFADYPATRHTVDPDRHIERVTELQELFLTRVGLDIGKVWVADDGAAVAVWTTPESVEAGAVFAEIGPRMAELSGSRLAAQQQMEGLLAPHRPKEPAWFLATVGVSPDHQGKGLGSAVVLPGVEAAERAGVPAFLETSAPRNLPFYERLGFTVTADVEVPEGPRTWCMTRKPGA

SEQ ID NO: 17572 - protein, 665 aa, Artificial Sequence
  Synthetic Polypeptide
MALPVTALLLPLALLLHAARPQLQLQESGPGLVKPSETLSLTCTVSGDSISSGDYYWGWIRQPPGKGLEWIGHIYYSGVTYYNPSLKSRVTISVDTSRNQFSLKLSSVTAADTAVYYCTREDSSNWRSRGQGTLVTVSSLESGGGGSFEVQLVESGGGLVQPGGSLRLSCAASGFNIKDTCIGWVRRAPGKEEELVADICPYKGSTRYADSVKGRFTISADTSKNTAYLQMNSLRAEDTAVYYCAIVSARDGYYNYWGQGTTVTVSSTRGSGGGGSGGGGSGFKIPIEELEDRVFVNCNTSITWVEGTVGTLLSDITRLDLGKRILDPRGIYRCNGTDIYKDKESTVQVHYRMCQSCVELDPATVAGIIVTDVIATLLLALGVFCFAGHETGRLSGAADTQALLRNDQVYQPLRDRDDAQYSHLGGNWARNKRAKRSGSGVKQTLNFDLLKLAGDVESNPGPSRGHMTEYKPTVRLATRDDVPRAVRTLAAAFADYPATRHTVDPDRHIERVTELQELFLTRVGLDIGKVWVADDGAAVAVWTTPESVEAGAVFAEIGPRMAELSGSRLAAQQQMEGLLAPHRPKEPAWFLATVGVSPDHQGKGLGSAVVLPGVEAAERAGVPAFLETSAPRNLPFYERLGFTVTADVEVPEGPRTWCMTRKPGA

SEQ ID NO: 17573 - protein, 675 aa, Artificial Sequence
  Synthetic Polypeptide
MALPVTALLLPLALLLHAARPQLQLQESGPGLVKPSETLSLTCTVSGDSISSGDYYWGWIRQPPGKGLEWIGHIYYSGVTYYNPSLKSRVTISVDTSRNQFSLKLSSVTAADTAVYYCTREDSSNWRSRGQGTLVTVSSLESGGGGSFEVQLVESGGGLVQPGGSLRLSCAASGFNIKDTCIGWVRRAPGKEEELVADICPYKGSTRYADSVKGRFTISADTSKNTAYLQMNSLRAEDTAVYYCAIVSARDGYYNYWGQGTTVTVSSTRGSGGGGSGGGGSGQSIKGNHLVKVYDYQEDGSVLLTCDAEAKNITWFKDGKMIGFLTEDKKKWNLGSNAKDPRGMYQCKGSQNKSKPLQVYYRMCQNCIELNAATISGFLFAEIVSIFVLAVGVYFIAGQDGVRQSRASDKQTLLPNDQLYQPLKDREDDQYSHLQGNQLRRNRAKRSGSGVKQTLNFDLLKLAGDVESNPGPSRGHMTEYKPTVRLATRDDVPRAVRTLAAAFADYPATRHTVDPDRHIERVTELQELFLTRVGLDIGKVWVADDGAAVAVWTTPESVEAGAVFAEIGPRMAELSGSRLAAQQQMEGLLAPHRPKEPAWFLATVGVSPDHQGKGLGSAVVLPGVEAAERAGVPAFLETSAPRNLPFYERLGFTVTADVEVPEGPRTWCMTRKPGA

SEQ ID NO: 17574 - protein, 658 aa, Artificial Sequence
  Synthetic Polypeptide
MALPVTALLLPLALLLHAARPQLQLQESGPGLVKPSETLSLTCTVSGDSISSGDYYWGWIRQPPGKGLEWIGHIYYSGVTYYNPSLKSRVTISVDTSRNQFSLKLSSVTAADTAVYYCTREDSSNWRSRGQGTLVTVSSLESGGGGSFEVQLVESGGGLVQPGGSLRLSCAASGFNIKDTCIGWVRRAPGKEEELVADICPYKGSTRYADSVKGRFTISADTSKNTAYLQMNSLRAEDTAVYYCAIVSARDGYYNYWGQGTTVTVSSTRGSGGGGSGGGGSGQSFGLLDPKLCYLLDGILFIYGVILTALFLRVKFSRSADAPAYQQGQNQLYNELNLGRREEYDVLDKRRGRDPEMGGKPQRRKNPQEGLYNELQKDKMAEAYSEIGMKGERRRGKGHDGLYQGLSTATKDTYDALHMQALPPRRAKRSGSGVKQTLNFDLLKLAGDVESNPGPSRGHMTEYKPTVRLATRDDVPRAVRTLAAAFADYPATRHTVDPDRHIERVTELQELFLTRVGLDIGKVWVADDGAAVAVWTTPESVEAGAVFAEIGPRMAELSGSRLAAQQQMEGLLAPHRPKEPAWFLATVGVSPDHQGKGLGSAVVLPGVEAAERAGVPAFLETSAPRNLPFYERLGFTVTADVEVPEGPRTWCMTRKPGA

SEQ ID NO: 17575 - protein, 866 aa, Artificial Sequence
  Synthetic Polypeptide
MALPVTALLLPLALLLHAARPQLQLQESGPGLVKPSETLSLTCTVSGDSISSGDYYWGWIRQPPGKGLEWIGHIYYSGVTYYNPSLKSRVTISVDTSRNQFSLKLSSVTAADTAVYYCTREDSSNWRSRGQGTLVTVSSLEGQPKANPTVTLFPPSSEELQANKATLVCLISDFYPGAVTVAWKADGSPVKAGVETTKPSKQSNNKYAASSYLSLTPEQWKSHRSYSCQVTHEGSTVEKTVAPTECSGRADCGFTSESYQQGVLSATILYEILLGKATLYAVLVSALVLMAMVKRKDSRGRAKRSGSGATNFSLLKQAGDVEENPGPTSMDWIWRILFLVGAATGAHSFEVQLVESGGGLVQPGGSLRLSCAASGFNIKDTCIGWVRRAPGKEEELVADICPYKGSTRYADSVKGRFTISADTSKNTAYLQMNSLRAEDTAVYYCAIVSARDGYYNYWGQGTTVTVSSTRASTKGPSVFPLAPSSKSTSGGTAALGCLVKDYFPEPVTVSWNSGALTSGVHTFPAVLQSSGLYSLSSVVTVPSSSLGTQTYICNVNHKPSNTKVDKRVEPKSCIPEDTFFPSPESSCDVKLVEKSFETDTNLNFQNLSVIGFRILLLKVAGFNLLMTLRLWSSRAKRSGSGVKQTLNFDLLKLAGDVESNPGPSRGHMTEYKPTVRLATRDDVPRAVRTLAAAFADYPATRHTVDPDRHIERVTELQELFLTRVGLDIGKVWVADDGAAVAVWTTPESVEAGAVFAEIGPRMAELSGSRLAAQQQMEGLLAPHRPKEPAWFLATVGVSPDHQGKGLGSAVVLPGVEAAERAGVPAFLETSAPRNLPFYERLGFTVTADVEVPEGPRTWCMTRKPGA

SEQ ID NO: 17576 - protein, 633 aa, Artificial Sequence; identical to SEQ ID NO: 17549
  Synthetic Polypeptide

SEQ ID NO: 17577 - protein, 661 aa, Artificial Sequence
  Synthetic Polypeptide
MALPVTALLLPLALLLHAARPQLQLQESGPGLVKPSETLSLTCTVSGDSISSGDYYWGWIRQPPGKGLEWIGHIYYSGVTYYNPSLKSRVTISVDTSRNQFSLKLSSVTAADTAVYYCTREDSSNWRSRGQGTLVTVSSLEGSGRADCGFTSESYQQGVLSATILYEILLGKATLYAVLVSALVLMAMVKRKDSRGRAKRSGSGATNFSLLKQAGDVEENPGPTSMDWIWRILFLVGAATGAHSFEVQLVESGGGLVQPGGSLRLSCAASGFNIKDTCIGWVRRAPGKEEELVADICPYKGSTRYADSVKGRFTISADTSKNTAYLQMNSLRAEDTAVYYCAIVSARDGYYNYWGQGTTVTVSSTRGSIPEDTFFPSPESSCDVKLVEKSFETDTNLNFQNLSVIGFRILLLKVAGFNLLMTLRLWSSRAKRSGSGVKQTLNFDLLKLAGDVESNPGPSRGHMTEYKPTVRLATRDDVPRAVRTLAAAFADYPATRHTVDPDRHIERVTELQELFLTRVGLDIGKVWVADDGAAVAVWTTPESVEAGAVFAEIGPRMAELSGSRLAAQQQMEGLLAPHRPKEPAWFLATVGVSPDHQGKGLGSAVVLPGVEAAERAGVPAFLETSAPRNLPFYERLGFTVTADVEVPEGPRTWCMTRKPGA

SEQ ID NO: 17578 - protein, 428 aa, Artificial Sequence
  Synthetic Polypeptide
MALPVTALLLPLALLLHAARPQLQLQESGPGLVKPSETLSLTCTVSGDSISSGDYYWGWIRQPPGKGLEWIGHIYYSGVTYYNPSLKSRVTISVDTSRNQFSLKLSSVTAADTAVYYCTREDSSNWRSRGQGTLVTVSSLEGSGRADCGFTSESYQQGVLSATILYEILLGKATLYAVLVSALVLMAMVKRKDSRGRAKRSGSGATNFSLLKQAGDVEENPGPTSMDWIWRILFLVGAATGAHSFEVQLVESGGGLVQPGGSLRLSCAASGFNIKDTCIGWVRRAPGKEEELVADICPYKGSTRYADSVKGRFTISADTSKNTAYLQMNSLRAEDTAVYYCAIVSARDGYYNYWGQGTTVTVSSTRGSIPEDTFFPSPESSCDVKLVEKSFETDTNLNFQNLSVIGFRILLLKVAGFNLLMTLRLWSS

SEQ ID NO: 17579 - protein, 670 aa, Artificial Sequence
  Synthetic Polypeptide
MALPVTALLLPLALLLHAARPQLQLQESGPGLVKPSETLSLTCTVSGDSISSGDYYWGWIRQPPGKGLEWIGHIYYSGVTYYNPSLKSRVTISVDTSRNQFSLKLSSVTAADTAVYYCTREDSSNWRSRGQGTLVTVSSLEDKTHTCPPCPAGRADCGFTSESYQQGVLSATILYEILLGKATLYAVLVSALVLMAMVKRKDSRGRAKRSGSGATNFSLLKQAGDVEENPGPTSMDWIWRILFLVGAATGAHSFEVQLVESGGGLVQPGGSLRLSCAASGFNIKDTCIGWVRRAPGKEEELVADICPYKGSTRYADSVKGRFTISADTSKNTAYLQMNSLRAEDTAVYYCAIVSARDGYYNYWGQGTTVTVSSTRGSIPEDTFFPSPESSCDVKLVEKSFETDTNLNFQNLSVIGFRILLLKVAGFNLLMTLRLWSSRAKRSGSGVKQTLNFDLLKLAGDVESNPGPSRGHMTEYKPTVRLATRDDVPRAVRTLAAAFADYPATRHTVDPDRHIERVTELQELFLTRVGLDIGKVWVADDGAAVAVWTTPESVEAGAVFAEIGPRMAELSGSRLAAQQQMEGLLAPHRPKEPAWFLATVGVSPDHQGKGLGSAVVLPGVEAAERAGVPAFLETSAPRNLPFYERLGFTVTADVEVPEGPRTWCMTRKPGA

SEQ ID NO: 17580 - protein, 670 aa, Artificial Sequence
  Synthetic Polypeptide
MALPVTALLLPLALLLHAARPQLQLQESGPGLVKPSETLSLTCTVSGDSISSGDYYWGWIRQPPGKGLEWIGHIYYSGVTYYNPSLKSRVTISVDTSRNQFSLKLSSVTAADTAVYYCTREDSSNWRSRGQGTLVTVSSLEGSGRADCGFTSESYQQGVLSATILYEILLGKATLYAVLVSALVLMAMVKRKDSRGRAKRSGSGATNFSLLKQAGDVEENPGPTSMDWIWRILFLVGAATGAHSFEVQLVESGGGLVQPGGSLRLSCAASGFNIKDTCIGWVRRAPGKEEELVADICPYKGSTRYADSVKGRFTISADTSKNTAYLQMNSLRAEDTAVYYCAIVSARDGYYNYWGQGTTVTVSSTRDKTHTCPPCPAIPEDTFFPSPESSCDVKLVEKSFETDTNLNFQNLSVIGFRILLLKVAGFNLLMTLRLWSSRAKRSGSGVKQTLNFDLLKLAGDVESNPGPSRGHMTEYKPTVRLATRDDVPRAVRTLAAAFADYPATRHTVDPDRHIERVTELQELFLTRVGLDIGKVWVADDGAAVAVWTTPESVEAGAVFAEIGPRMAELSGSRLAAQQQMEGLLAPHRPKEPAWFLATVGVSPDHQGKGLGSAVVLPGVEAAERAGVPAFLETSAPRNLPFYERLGFTVTADVEVPEGPRTWCMTRKPGA

SEQ ID NO: 17581 - protein, 679 aa, Artificial Sequence
  Synthetic Polypeptide
MALPVTALLLPLALLLHAARPQLQLQESGPGLVKPSETLSLTCTVSGDSISSGDYYWGWIRQPPGKGLEWIGHIYYSGVTYYNPSLKSRVTISVDTSRNQFSLKLSSVTAADTAVYYCTREDSSNWRSRGQGTLVTVSSLEDKTHTCPPCPAGRADCGFTSESYQQGVLSATILYEILLGKATLYAVLVSALVLMAMVKRKDSRGRAKRSGSGATNFSLLKQAGDVEENPGPTSMDWIWRILFLVGAATGAHSFEVQLVESGGGLVQPGGSLRLSCAASGFNIKDTCIGWVRRAPGKEEELVADICPYKGSTRYADSVKGRFTISADTSKNTAYLQMNSLRAEDTAVYYCAIVSARDGYYNYWGQGTTVTVSSTRDKTHTCPPCPAIPEDTFFPSPESSCDVKLVEKSFETDTNLNFQNLSVIGFRILLLKVAGFNLLMTLRLWSSRAKRSGSGVKQTLNFDLLKLAGDVESNPGPSRGHMTEYKPTVRLATRDDVPRAVRTLAAAFADYPATRHTVDPDRHIERVTELQELFLTRVGLDIGKVWVADDGAAVAVWTTPESVEAGAVFAEIGPRMAELSGSRLAAQQQMEGLLAPHRPKEPAWFLATVGVSPDHQGKGLGSAVVLPGVEAAERAGVPAFLETSAPRNLPFYERLGFTVTADVEVPEGPRTWCMTRKPGA

SEQ ID NO: 17582 - protein, 446 aa, Artificial Sequence
  Synthetic Polypeptide
MALPVTALLLPLALLLHAARPQLQLQESGPGLVKPSETLSLTCTVSGDSISSGDYYWGWIRQPPGKGLEWIGHIYYSGVTYYNPSLKSRVTISVDTSRNQFSLKLSSVTAADTAVYYCTREDSSNWRSRGQGTLVTVSSLEDKTHTCPPCPAGRADCGFTSESYQQGVLSATILYEILLGKATLYAVLVSALVLMAMVKRKDSRGRAKRSGSGATNFSLLKQAGDVEENPGPTSMDWIWRILFLVGAATGAHSFEVQLVESGGGLVQPGGSLRLSCAASGFNIKDTCIGWVRRAPGKEEELVADICPYKGSTRYADSVKGRFTISADTSKNTAYLQMNSLRAEDTAVYYCAIVSARDGYYNYWGQGTTVTVSSTRDKTHTCPPCPAIPEDTFFPSPESSCDVKLVEKSFETDTNLNFQNLSVIGFRILLLKVAGFNLLMTLRLWSS

SEQ ID NO: 17583 - protein, 437 aa, Artificial Sequence
  Synthetic Polypeptide
MALPVTALLLPLALLLHAARPQLQLQESGPGLVKPSETLSLTCTVSGDSISSGDYYWGWIRQPPGKGLEWIGHIYYSGVTYYNPSLKSRVTISVDTSRNQFSLKLSSVTAADTAVYYCTREDSSNWRSRGQGTLVTVSSLEGSGRADCGFTSESYQQGVLSATILYEILLGKATLYAVLVSALVLMAMVKRKDSRGRAKRSGSGATNFSLLKQAGDVEENPGPTSMDWIWRILFLVGAATGAHSFEVQLVESGGGLVQPGGSLRLSCAASGFNIKDTCIGWVRRAPGKEEELVADICPYKGSTRYADSVKGRFTISADTSKNTAYLQMNSLRAEDTAVYYCAIVSARDGYYNYWGQGTTVTVSSTRDKTHTCPPCPAIPEDTFFPSPESSCDVKLVEKSFETDTNLNFQNLSVIGFRILLLKVAGFNLLMTLRLWSS

SEQ ID NO: 17584 - protein, 888 aa, Artificial Sequence
  Synthetic Polypeptide
MALPVTALLLPLALLLHAARPQLQLQESGPGLVKPSETLSLTCTVSGDSISSGDYYWGWIRQPPGKGLEWIGHIYYSGVTYYNPSLKSRVTISVDTSRNQFSLKLSSVTAADTAVYYCTREDSSNWRSRGQGTLVTVSSLEGQPKANPTVTLFPPSSEELQANKATLVCLISDFYPGAVTVAWKADGSPVKAGVETTKPSKQSNNKYAASSYLSLTPEQWKSHRSYSCQVTHEGSTVEKTVAPTECSPIKTDVITMDPKDNCSKDANDTLLLQLTNTSAYYMYLLLLLKSVVYFAIITCCLLRRTAFCCNGEKSRAKRSGSGATNFSLLKQAGDVEENPGPTSMDWIWRILFLVGAATGAHSFEVQLVESGGGLVQPGGSLRLSCAASGFNIKDTCIGWVRRAPGKEEELVADICPYKGSTRYADSVKGRFTISADTSKNTAYLQMNSLRAEDTAVYYCAIVSARDGYYNYWGQGTTVTVSSTRASTKGPSVFPLAPSSKSTSGGTAALGCLVKDYFPEPVTVSWNSGALTSGVHTFPAVLQSSGLYSLSSVVTVPSSSLGTQTYICNVNHKPSNTKVDKRVEPKSCEVKTDSTDHVKPKETENTKQPSKSCHKPKAIVHTEKVNMMSLTVLGLRMLFAKTVAVNFLLTAKLFFLRAKRSGSGVKQTLNFDLLKLAGDVESNPGPSRGHMTEYKPTVRLATRDDVPRAVRTLAAAFADYPATRHTVDPDRHIERVTELQELFLTRVGLDIGKVWVADDGAAVAVWTTPESVEAGAVFAEIGPRMAELSGSRLAAQQQMEGLLAPHRPKEPAWFLATVGVSPDHQGKGLGSAVVLPGVEAAERAGVPAFLETSAPRNLPFYERLGFTVTADVEVPEGPRTWCMTRKPGA

SEQ ID NO: 17585 - protein, 655 aa, Artificial Sequence; identical to SEQ ID NO: 17547
  Synthetic Polypeptide

SEQ ID NO: 17586 - protein, 683 aa, Artificial Sequence
  Synthetic Polypeptide
MALPVTALLLPLALLLHAARPQLQLQESGPGLVKPSETLSLTCTVSGDSISSGDYYWGWIRQPPGKGLEWIGHIYYSGVTYYNPSLKSRVTISVDTSRNQFSLKLSSVTAADTAVYYCTREDSSNWRSRGQGTLVTVSSLEGSPIKTDVITMDPKDNCSKDANDTLLLQLTNTSAYYMYLLLLLKSVVYFAIITCCLLRRTAFCCNGEKSRAKRSGSGATNFSLLKQAGDVEENPGPTSMDWIWRILFLVGAATGAHSFEVQLVESGGGLVQPGGSLRLSCAASGFNIKDTCIGWVRRAPGKEEELVADICPYKGSTRYADSVKGRFTISADTSKNTAYLQMNSLRAEDTAVYYCAIVSARDGYYNYWGQGTTVTVSSTRGSEVKTDSTDHVKPKETENTKQPSKSCHKPKAIVHTEKVNMMSLTVLGLRMLFAKTVAVNFLLTAKLFFLRAKRSGSGVKQTLNFDLLKLAGDVESNPGPSRGHMTEYKPTVRLATRDDVPRAVRTLAAAFADYPATRHTVDPDRHIERVTELQELFLTRVGLDIGKVWVADDGAAVAVWTTPESVEAGAVFAEIGPRMAELSGSRLAAQQQMEGLLAPHRPKEPAWFLATVGVSPDHQGKGLGSAVVLPGVEAAERAGVPAFLETSAPRNLPFYERLGFTVTADVEVPEGPRTWCMTRKPGA

SEQ ID NO: 17587 - protein, 450 aa, Artificial Sequence
  Synthetic Polypeptide
MALPVTALLLPLALLLHAARPQLQLQESGPGLVKPSETLSLTCTVSGDSISSGDYYWGWIRQPPGKGLEWIGHIYYSGVTYYNPSLKSRVTISVDTSRNQFSLKLSSVTAADTAVYYCTREDSSNWRSRGQGTLVTVSSLEGSPIKTDVITMDPKDNCSKDANDTLLLQLTNTSAYYMYLLLLLKSVVYFAIITCCLLRRTAFCCNGEKSRAKRSGSGATNFSLLKQAGDVEENPGPTSMDWIWRILFLVGAATGAHSFEVQLVESGGGLVQPGGSLRLSCAASGFNIKDTCIGWVRRAPGKEEELVADICPYKGSTRYADSVKGRFTISADTSKNTAYLQMNSLRAEDTAVYYCAIVSARDGYYNYWGQGTTVTVSSTRGSEVKTDSTDHVKPKETENTKQPSKSCHKPKAIVHTEKVNMMSLTVLGLRMLFAKTVAVNFLLTAKLFFL

SEQ ID NO: 17588 - protein, 692 aa, Artificial Sequence
  Synthetic Polypeptide
MALPVTALLLPLALLLHAARPQLQLQESGPGLVKPSETLSLTCTVSGDSISSGDYYWGWIRQPPGKGLEWIGHIYYSGVTYYNPSLKSRVTISVDTSRNQFSLKLSSVTAADTAVYYCTREDSSNWRSRGQGTLVTVSSLEDKTHTCPPCPAPIKTDVITMDPKDNCSKDANDTLLLQLTNTSAYYMYLLLLLKSVVYFAIITCCLLRRTAFCCNGEKSRAKRSGSGATNFSLLKQAGDVEENPGPTSMDWIWRILFLVGAATGAHSFEVQLVESGGGLVQPGGSLRLSCAASGFNIKDTCIGWVRRAPGKEEELVADICPYKGSTRYADSVKGRFTISADTSKNTAYLQMNSLRAEDTAVYYCAIVSARDGYYNYWGQGTTVTVSSTRGSEVKTDSTDHVKPKETENTKQPSKSCHKPKAIVHTEKVNMMSLTVLGLRMLFAKTVAVNFLLTAKLFFLRAKRSGSGVKQTLNFDLLKLAGDVESNPGPSRGHMTEYKPTVRLATRDDVPRAVRTLAAAFADYPATRHTVDPDRHIERVTELQELFLTRVGLDIGKVWVADDGAAVAVWTTPESVEAGAVFAEIGPRMAELSGSRLAAQQQMEGLLAPHRPKEPAWFLATVGVSPDHQGKGLGSAVVLPGVEAAERAGVPAFLETSAPRNLPFYERLGFTVTADVEVPEGPRTWCMTRKPGA

SEQ ID NO: 17589 - protein, 692 aa, Artificial Sequence
  Synthetic Polypeptide
MALPVTALLLPLALLLHAARPQLQLQESGPGLVKPSETLSLTCTVSGDSISSGDYYWGWIRQPPGKGLEWIGHIYYSGVTYYNPSLKSRVTISVDTSRNQFSLKLSSVTAADTAVYYCTREDSSNWRSRGQGTLVTVSSLEGSPIKTDVITMDPKDNCSKDANDTLLLQLTNTSAYYMYLLLLLKSVVYFAIITCCLLRRTAFCCNGEKSRAKRSGSGATNFSLLKQAGDVEENPGPTSMDWIWRILFLVGAATGAHSFEVQLVESGGGLVQPGGSLRLSCAASGFNIKDTCIGWVRRAPGKEEELVADICPYKGSTRYADSVKGRFTISADTSKNTAYLQMNSLRAEDTAVYYCAIVSARDGYYNYWGQGTTVTVSSTRDKTHTCPPCPAEVKTDSTDHVKPKETENTKQPSKSCHKPKAIVHTEKVNMMSLTVLGLRMLFAKTVAVNFLLTAKLFFLRAKRSGSGVKQTLNFDLLKLAGDVESNPGPSRGHMTEYKPTVRLATRDDVPRAVRTLAAAFADYPATRHTVDPDRHIERVTELQELFLTRVGLDIGKVWVADDGAAVAVWTTPESVEAGAVFAEIGPRMAELSGSRLAAQQQMEGLLAPHRPKEPAWFLATVGVSPDHQGKGLGSAVVLPGVEAAERAGVPAFLETSAPRNLPFYERLGFTVTADVEVPEGPRTWCMTRKPGA

SEQ ID NO: 17590 - protein, 701 aa, Artificial Sequence
  Synthetic Polypeptide
MALPVTALLLPLALLLHAARPQLQLQESGPGLVKPSETLSLTCTVSGDSISSGDYYWGWIRQPPGKGLEWIGHIYYSGVTYYNPSLKSRVTISVDTSRNQFSLKLSSVTAADTAVYYCTREDSSNWRSRGQGTLVTVSSLEDKTHTCPPCPAPIKTDVITMDPKDNCSKDANDTLLLQLTNTSAYYMYLLLLLKSVVYFAIITCCLLRRTAFCCNGEKSRAKRSGSGATNFSLLKQAGDVEENPGPTSMDWIWRILFLVGAATGAHSFEVQLVESGGGLVQPGGSLRLSCAASGFNIKDTCIGWVRRAPGKEEELVADICPYKGSTRYADSVKGRFTISADTSKNTAYLQMNSLRAEDTAVYYCAIVSARDGYYNYWGQGTTVTVSSTRDKTHTCPPCPAEVKTDSTDHVKPKETENTKQPSKSCHKPKAIVHTEKVNMMSLTVLGLRMLFAKTVAVNFLLTAKLFFLRAKRSGSGVKQTLNFDLLKLAGDVESNPGPSRGHMTEYKPTVRLATRDDVPRAVRTLAAAFADYPATRHTVDPDRHIERVTELQELFLTRVGLDIGKVWVADDGAAVAVWTTPESVEAGAVFAEIGPRMAELSGSRLAAQQQMEGLLAPHRPKEPAWFLATVGVSPDHQGKGLGSAVVLPGVEAAERAGVPAFLETSAPRNLPFYERLGFTVTADVEVPEGPRTWCMTRKPGA

SEQ ID NO: 17591 - protein, 468 aa, Artificial Sequence
  Synthetic Polypeptide
MALPVTALLLPLALLLHAARPQLQLQESGPGLVKPSETLSLTCTVSGDSISSGDYYWGWIRQPPGKGLEWIGHIYYSGVTYYNPSLKSRVTISVDTSRNQFSLKLSSVTAADTAVYYCTREDSSNWRSRGQGTLVTVSSLEDKTHTCPPCPAPIKTDVITMDPKDNCSKDANDTLLLQLTNTSAYYMYLLLLLKSVVYFAIITCCLLRRTAFCCNGEKSRAKRSGSGATNFSLLKQAGDVEENPGPTSMDWIWRILFLVGAATGAHSFEVQLVESGGGLVQPGGSLRLSCAASGFNIKDTCIGWVRRAPGKEEELVADICPYKGSTRYADSVKGRFTISADTSKNTAYLQMNSLRAEDTAVYYCAIVSARDGYYNYWGQGTTVTVSSTRDKTHTCPPCPAEVKTDSTDHVKPKETENTKQPSKSCHKPKAIVHTEKVNMMSLTVLGLRMLFAKTVAVNFLLTAKLFFL

SEQ ID NO: 17592 - protein, 729 aa, Artificial Sequence
  Synthetic Polypeptide
MALPVTALLLPLALLLHAARPEVQLVESGGGLVQPGGSLRLSCAASGFNIKDTCIGWVRRAPGKEEELVAKICKYSGHTRYADSVKGRFTISADTSKNTAYLQMNSLRAEDTAVYYCAAVSVRDGHYNYWGQGTTVTVSSLESGGGGSFEVQLLESGGGLIQPGGSLRLSCAASGFTFSSHAMTWVRQAPGKGLEWVSAISGSGDYTHYADSVKGRFTISRDNSKNTVYLQMNSLRAEDSAVYYCAKDEDGGSLLGHRGQGTLVTVSSTREQKLISEEDLAKPTTTPAPRPPTPAPTIASQPLSLRPEACRPAAGGAVHTRGLDFACDIYIWAPLAGTCGVLLLSLVITLYCKRGRKKLLYIFKQPFMRPVQTTQEEDGCSCRFPEEEEGGCELRVKFSRSADAPAYQQGQNQLYNELNLGRREEYDVLDKRRGRDPEMGGKPRRKNPQEGLYNELQKDKMAEAYSEIGMKGERRRGKGHDGLYQGLSTATKDTYDALHMQALPPRSSGSGEGRGSLLTCGDVEENPGPHMTEYKPTVRLATRDDVPRAVRTLAAAFADYPATRHTVDPDRHIERVTELQELFLTRVGLDIGKVWVADDGAAVAVWTTPESVEAGAVFAEIGPRMAELSGSRLAAQQQMEGLLAPHRPKEPAWFLATVGVSPDHQGKGLGSAVVLPGVEAAERAGVPAFLETSAPRNLPFYERLGFTVTADVEVPEGPRTWCMTRKPGA

SEQ ID NO: 17593 - protein, 723 aa, Artificial Sequence
  Synthetic Polypeptide
MALPVTALLLPLALLLHAARPEVQLVESGGGLVQPGGSLRLSCAASGFNIKDTCIGWVRRAPGKEEELVAKICKYSGHTRYADSVKGRFTISADTSKNTAYLQMNSLRAEDTAVYYCAAVSVRDGHYNYWGQGTTVTVSSLESGGGGSFEVQLLESGGGLIQPGGSLRLSCAASGFTFSSHAMTWVRQAPGKGLEWVSAISGSGDYTHYADSVKGRFTISRDNSKNTVYLQMNSLRAEDSAVYYCAKDEDGGSLLGHRGQGTLVTVSSTREQKLISEEDLKIEVMYPPPYLDNEKSNGTIIHVKGKHLCPSPLFPGPSKPFWVLVVVGGVLACYSLLVTVAFIIFWVRSKRSRLLHSDYMNMTPRRPGPTRKHYQPYAPPRDFAAYRSRVKFSRSADAPAYQQGQNQLYNELNLGRREEYDVLDKRRGRDPEMGGKPRRKNPQEGLYNELQKDKMAEAYSEIGMKGERRRGKGHDGLYQGLSTATKDTYDALHMQALPPRSSGSGEGRGSLLTCGDVEENPGPHMTEYKPTVRLATRDDVPRAVRTLAAAFADYPATRHTVDPDRHIERVTELQELFLTRVGLDIGKVWVADDGAAVAVWTTPESVEAGAVFAEIGPRMAELSGSRLAAQQQMEGLLAPHRPKEPAWFLATVGVSPDHQGKGLGSAVVLPGVEAAERAGVPAFLETSAPRNLPFYERLGFTVTADVEVPEGPRTWCMTRKPGA

SEQ ID NO: 17594 - protein, 500 aa, Artificial Sequence
  Synthetic Polypeptide
MALPVTALLLPLALLLHAARPEVQLVESGGGLVQPGGSLRLSCAASGFNIKDTCIGWVRRAPGKEEELVAKICKYSGHTRYADSVKGRFTISADTSKNTAYLQMNSLRAEDTAVYYCAAVSVRDGHYNYWGQGTTVTVSSLESGGGGSFEVQLLESGGGLIQPGGSLRLSCAASGFTFSSHAMTWVRQAPGKGLEWVSAISGSGDYTHYADSVKGRFTISRDNSKNTVYLQMNSLRAEDSAVYYCAKDEDGGSLLGHRGQGTLVTVSSTREQKLISEEDLKIEVMYPPPYLDNEKSNGTIIHVKGKHLCPSPLFPGPSKPFWVLVVVGGVLACYSLLVTVAFIIFWVRSKRSRLLHSDYMNMTPRRPGPTRKHYQPYAPPRDFAAYRSRVKFSRSADAPAYQQGQNQLYNELNLGRREEYDVLDKRRGRDPEMGGKPRRKNPQEGLYNELQKDKMAEAYSEIGMKGERRRGKGHDGLYQGLSTATKDTYDALHMQALPPR

SEQ ID NO: 17595 - protein, 506 aa, Artificial Sequence
  Synthetic Polypeptide
MALPVTALLLPLALLLHAARPEVQLVESGGGLVQPGGSLRLSCAASGFNIKDTCIGWVRRAPGKEEELVAKICKYSGHTRYADSVKGRFTISADTSKNTAYLQMNSLRAEDTAVYYCAAVSVRDGHYNYWGQGTTVTVSSLESGGGGSFEVQLLESGGGLIQPGGSLRLSCAASGFTFSSHAMTWVRQAPGKGLEWVSAISGSGDYTHYADSVKGRFTISRDNSKNTVYLQMNSLRAEDSAVYYCAKDEDGGSLLGHRGQGTLVTVSSTREQKLISEEDLAKPTTTPAPRPPTPAPTIASQPLSLRPEACRPAAGGAVHTRGLDFACDIYIWAPLAGTCGVLLLSLVITLYCKRGRKKLLYIFKQPFMRPVQTTQEEDGCSCRFPEEEEGGCELRVKFSRSADAPAYQQGQNQLYNELNLGRREEYDVLDKRRGRDPEMGGKPRRKNPQEGLYNELQKDKMAEAYSEIGMKGERRRGKGHDGLYQGLSTATKDTYDALHMQALPPR

SEQ ID NO: 17596 - protein, 507 aa, Artificial Sequence
  Synthetic Polypeptide
MALPVTALLLPLALLLHAARPEVQLLESGGGLIQPGGSLRLSCAASGFTFSSHAMTWVRQAPGKGLEWVSAISGSGDYTHYADSVKGRFTISRDNSKNTVYLQMNSLRAEDSAVYYCAKDEDGGSLLGHRGQGTLVTVSSLESGGGGSFEEVQLVESGGGLVQPGGSLRLSCAASGFNIKDTCIGWVRRAPGKEEELVAKICKYSGHTRYADSVKGRFTISADTSKNTAYLQMNSLRAEDTAVYYCAAVSVRDGHYNYWGQGTTVTVSSTREQKLISEEDLAKPTTTPAPRPPTPAPTIASQPLSLRPEACRPAAGGAVHTRGLDFACDIYIWAPLAGTCGVLLLSLVITLYCKRGRKKLLYIFKQPFMRPVQTTQEEDGCSCRFPEEEEGGCELRVKFSRSADAPAYQQGQNQLYNELNLGRREEYDVLDKRRGRDPEMGGKPRRKNPQEGLYNELQKDKMAEAYSEIGMKGERRRGKGHDGLYQGLSTATKDTYDALHMQALPPR

SEQ ID NO: 17597 - protein, 919 aa, Artificial Sequence
  Synthetic Polypeptide
MALPVTALLLPLALLLHAARPEVQLVESGGGLVQPGGSLRLSCAASGFNIKDTCIGWVRRAPGKEEELVAKICKYSGHTRYADSVKGRFTISADTSKNTAYLQMNSLRAEDTAVYYCAAVSVRDGHYNYWGQGTTVTVSSLESGGGGSFEVQLLESGGGLIQPGGSLRLSCAASGFTFSSHAMTWVRQAPGKGLEWVSAISGSGDYTHYADSVKGRFTISRDNSKNTVYLQMNSLRAEDSAVYYCAKDEDGGSLLGHRGQGTLVTVSSTREQKLISEEDLAKPTTTPAPRPPTPAPTIASQPLSLRPEACRPAAGGAVHTRGLDFACDIYIWAPLAGTCGVLLLSLVITLYCGRARVKFSRSADAPAYQQGQNQLYNELNLGRREEYDVLDKRRGRDPEMGGKPRRKNPQEGLYNELQKDKMAEAYSEIGMKGERRRGKGHDGLYQGLSTATKDTYDALHMQALPPRSRGSGATNFSLLKQAGDVEENPGPGIHMATYEVLCEVARKLGTDDREVVLFLLNVFIPQPTLAQLIGALRALKEEGRLTFPLLAECLFRAGRRDLLRDLLHLDPRFLERHLAGTMSYFSPYQLTVLHVDGELCARDIRSLIFLSKDTIGSRSTPQTFLHWVYCMENLDLLGPTDVDALMSMLRSLSRVDLQRQVQTLMGLHLSGPSHSQHYRHTPLETDFYDYKDDDDKTSGSGEGRGSLLTCGDVEENPGPHMTEYKPTVRLATRDDVPRAVRTLAAAFADYPATRHTVDPDRHIERVTELQELFLTRVGLDIGKVWVADDGAAVAVWTTPESVEAGAVFAEIGPRMAELSGSRLAAQQQMEGLLAPHRPKEPAWFLATVGVSPDHQGKGLGSAVVLPGVEAAERAGVPAFLETSAPRNLPFYERLGFTVTADVEVPEGPRTWCMTRKPGA

SEQ ID NO: 17598 - protein, 864 aa, Artificial Sequence
  Synthetic Polypeptide
MALPVTALLLPLALLLHAARPEVQLVESGGGLVQPGGSLRLSCAASGFNIKDTCIGWVRRAPGKEEELVAKICKYSGHTRYADSVKGRFTISADTSKNTAYLQMNSLRAEDTAVYYCAAVSVRDGHYNYWGQGTTVTVSSLEIQNPDPAVYQLRDSKSSDKSVCLFTDFDSQTNVSQSKDSDVYITDKCVLDMRSMDFKSNSAVAWSNKSDFACANAFNNSIIPEDTFFPSSDVPCDVKLVEKSFETDTNLNFQNLSVIGFRILLLKVAGFNLLMTLRLWSSRAKRSGSGVKQTLNFDLLKLAGDVESNPGPTSMDWIWRILFLVGAATGAHSFEVQLLESGGGLIQPGGSLRLSCAASGFTFSSHAMTWVRQAPGKGLEWVSAISGSGDYTHYADSVKGRFTISRDNSKNTVYLQMNSLRAEDSAVYYCAKDEDGGSLLGHRGQGTLVTVSSTREDLKNVFPPEVAVFEPSKAEIAHTQKATLVCLATGFYPDHVELSWWVNGKEVHSGVCTDPQPLKEQPALNDSRYCLSSRLRVSATFWQNPRNHFRCQVQFYGLSENDEWTQDRAKPVTQIVSAEAWGRADCGITSASYHQGVLSATILYEILLGKATLYAVLVSALVLMAMVKRKDSRGRAKRSGSGATNFSLLKQAGDVEENPGPSRGHMTEYKPTVRLATRDDVPRAVRTLAAAFADYPATRHTVDPDRHIERVTELQELFLTRVGLDIGKVWVADDGAAVAVWTTPESVEAGAVFAEIGPRMAELSGSRLAAQQQMEGLLAPHRPKEPAWFLATVGVSPDHQGKGLGSAVVLPGVEAAERAGVPAFLETSAPRNLPFYERLGFTVTADVEVPEGPRTWCMTRKPGA

SEQ ID NO: 17599 - protein, 863 aa, Artificial Sequence
  Synthetic Polypeptide
MALPVTALLLPLALLLHAARPEVQLVESGGGLVQPGGSLRLSCAASGFNIKDTCIGWVRRAPGKEEELVAKICKYSGHTRYADSVKGRFTISADTSKNTAYLQMNSLRAEDTAVYYCAAVSVRDGHYNYWGQGTTVTVSSLEDLKNVFPPEVAVFEPSKAEIAHTQKATLVCLATGFYPDHVELSWWVNGKEVHSGVCTDPQPLKEQPALNDSRYCLSSRLRVSATFWQNPRNHFRCQVQFYGLSENDEWTQDRAKPVTQIVSAEAWGRADCGITSASYHQGVLSATILYEILLGKATLYAVLVSALVLMAMVKRKDSRGRAKRSGSGATNFSLLKQAGDVEENPGPTSMDWIWRILFLVGAATGAHSFEVQLLESGGGLIQPGGSLRLSCAASGFTFSSHAMTWVRQAPGKGLEWVSAISGSGDYTHYADSVKGRFTISRDNSKNTVYLQMNSLRAEDSAVYYCAKDEDGGSLLGHRGQGTLVTVSSTRIQNPDPAVYQLRDSKSSDKSVCLFTDFDSQTNVSQSKDSDVYITDKCVLDMRSMDFKSNSAVAWSNKSDFACANAFNNSIIPEDTFFPSSDVPCDVKLVEKSFETDTNLNFQNLSVIGFRILLLKVAGFNLLMTLRLWSSRAKRSGSGVKQTLNFDLLKLAGDVESNPGPSRGHMTEYKPTVRLATRDDVPRAVRTLAAAFADYPATRHTVDPDRHIERVTELQELFLTRVGLDIGKVWVADDGAAVAVWTTPESVEAGAVFAEIGPRMAELSGSRLAAQQQMEGLLAPHRPKEPAWFLATVGVSPDHQGKGLGSAVVLPGVEAAERAGVPAFLETSAPRNLPFYERLGFTVTADVEVPEGPRTWCMTRKPGA

SEQ ID NO: 17600 - protein, 630 aa, Artificial Sequence
  Synthetic Polypeptide
MALPVTALLLPLALLLHAARPEVQLVESGGGLVQPGGSLRLSCAASGFNIKDTCIGWVRRAPGKEEELVAKICKYSGHTRYADSVKGRFTISADTSKNTAYLQMNSLRAEDTAVYYCAAVSVRDGHYNYWGQGTTVTVSSLEDLKNVFPPEVAVFEPSEAEISHTQKATLVCLATGFYPDHVELSWWVNGKEVHSGVCTDPQPLKEQPALNDSRYCLSSRLRVSATFWQNPRNHFRCQVQFYGLSENDEWTQDRAKPVTQIVSAEAWGRADCGFTSESYQQGVLSATILYEILLGKATLYAVLVSALVLMAMVKRKDSRGRAKRSGSGATNFSLLKQAGDVEENPGPTSMDWIWRILFLVGAATGAHSFEVQLLESGGGLIQPGGSLRLSCAASGFTFSSHAMTWVRQAPGKGLEWVSAISGSGDYTHYADSVKGRFTISRDNSKNTVYLQMNSLRAEDSAVYYCAKDEDGGSLLGHRGQGTLVTVSSTRIQNPDPAVYQLRDSKSSDKSVCLFTDFDSQTNVSQSKDSDVYITDKCVLDMRSMDFKSNSAVAWSNKSDFACANAFNNSIIPEDTFFPSPESSCDVKLVEKSFETDTNLNFQNLSVIGFRILLLKVAGFNLLMTLRLWSS

SEQ ID NO: 17601 - protein, 855 aa, Artificial Sequence
  Synthetic Polypeptide
MALPVTALLLPLALLLHAARPEVQLVESGGGLVQPGGSLRLSCAASGFNIKDTCIGWVRRAPGKEEELVAKICKYSGHTRYADSVKGRFTISADTSKNTAYLQMNSLRAEDTAVYYCAAVSVRDGHYNYWGQGTTVTVSSLEDLKNVFPPEVAVFEPSEAEISHTQKATLVCLATGFYPDHVELSWWVNGKEVHSGVCTDPQPLKEQPALNDSRYCLSSRLRVSATFWQNPRNHFRCQVQFYGLSENDEWTQDRAKPVTQIVSAEAWGRADCGFTSESYQQGVLSATILYEILLGKATLYAVLVSALVLMAMVKRKDSRGRAKRSGSGATNFSLLKQAGDVEENPGPTSMDWIWRILFLVGAATGAHSFEVQLLESGGGLIQPGGSLRLSCAASGFTFSSHAMTWVRQAPGKGLEWVSAISGSGDYTHYADSVKGRFTISRDNSKNTVYLQMNSLRAEDSAVYYCAKDEDGGSLLGHRGQGTLVTVSSTRIQNPDPAVYQLRDSKSSDKSVCLFTDFDSQTNVSQSKDSDVYITDKCVLDMRSMDFKSNSAVAWSNKSDFACANAFNNSIIPEDTFFPSPESSCDVKLVEKSFETDTNLNFQNLSVIGFRILLLKVAGFNLLMTLRLWSSRAKRSGSGVKQTLNFDLLKLAGDVESNPGPSRGGIHTMATYEVLCEVARKLGTDDREVVLFLLNVFIPQPTLAQLIGALRALKEEGRLTFPLLAECLFRAGRRDLLRDLLHLDPRFLERHLAGTMSYFSPYQLTVLHVDGELCARDIRSLIFLSKDTIGSRSTPQTFLHWVYCMENLDLLGPTDVDALMSMLRSLSRVDLQRQVQTLMGLHLSGPSHSQHYRHTP

SEQ ID NO: 17602 - protein, 634 aa, Artificial Sequence
  Synthetic Polypeptide
MALPVTALLLPLALLLHAARPEVQLVESGGGLVQPGGSLRLSCAASGFNIKDTCIGWVRRAPGKEEELVAKICKYSGHTRYADSVKGRFTISADTSKNTAYLQMNSLRAEDTAVYYCAAVSVRDGHYNYWGQGTTVTVSSLEIQNPDPAVYQLRDSKSSDKSVCLFTDFDSQTNVSQSKDSDVYITDKCVLDMRSMDFKSNSAVAWSNKSDFACANAFNNSIIPEDTFFPSPESSCDVKLVEKSFETDTNLNFQNLSVIGFRILLLKVAGFNLLMTLRLWSSRAKRSGSGVKQTLNFDLLKLAGDVESNPGPTSMDWIWRILFLVGAATGAHSFEVQLLESGGGLIQPGGSLRLSCAASGFTFSSHAMTWVRQAPGKGLEWVSAISGSGDYTHYADSVKGRFTISRDNSKNTVYLQMNSLRAEDSAVYYCAKDEDGGSLLGHRGQGTLVTVSSTREDLKNVFPPEVAVFEPSEAEISHTQKATLVCLATGFYPDHVELSWWVNGKEVHSGVCTDPQPLKEQPALNDSRYCLSSRLRVSATFWQNPRNHFRCQVQFYGLSENDEWTQDRAKPVTQIVSAEAWGRADCGFTSESYQQGVLSATILYEILLGKATLYAVLVSALVLMAMVKRKDSRG

SEQ ID NO: 17603 - protein, 856 aa, Artificial Sequence
  Synthetic Polypeptide
MALPVTALLLPLALLLHAARPEVQLVESGGGLVQPGGSLRLSCAASGFNIKDTCIGWVRRAPGKEEELVAKICKYSGHTRYADSVKGRFTISADTSKNTAYLQMNSLRAEDTAVYYCAAVSVRDGHYNYWGQGTTVTVSSLEIQNPDPAVYQLRDSKSSDKSVCLFTDFDSQTNVSQSKDSDVYITDKCVLDMRSMDFKSNSAVAWSNKSDFACANAFNNSIIPEDTFFPSPESSCDVKLVEKSFETDTNLNFQNLSVIGFRILLLKVAGFNLLMTLRLWSSRAKRSGSGVKQTLNFDLLKLAGDVESNPGPTSMDWIWRILFLVGAATGAHSFEVQLLESGGGLIQPGGSLRLSCAASGFTFSSHAMTWVRQAPGKGLEWVSAISGSGDYTHYADSVKGRFTISRDNSKNTVYLQMNSLRAEDSAVYYCAKDEDGGSLLGHRGQGTLVTVSSTREDLKNVFPPEVAVFEPSEAEISHTQKATLVCLATGFYPDHVELSWWVNGKEVHSGVCTDPQPLKEQPALNDSRYCLSSRLRVSATFWQNPRNHFRCQVQFYGLSENDEWTQDRAKPVTQIVSAEAWGRADCGFTSESYQQGVLSATILYEILLGKATLYAVLVSALVLMAMVKRKDSRGRAKRSGSGATNFSLLKQAGDVEENPGPSRGGIHTMATYEVLCEVARKLGTDDREVVLFLLNVFIPQPTLAQLIGALRALKEEGRLTFPLLAECLFRAGRRDLLRDLLHLDPRFLERHLAGTMSYFSPYQLTVLHVDGELCARDIRSLIFLSKDTIGSRSTPQTFLHWVYCMENLDLLGPTDVDALMSMLRSLSRVDLQRQVQTLMGLHLSGPSHSQHYRHTP

SEQ ID NO: 17604 - protein, 903 aa, Artificial Sequence
  Synthetic Polypeptide
MALPVTALLLPLALLLHAARPLEGKPIPNPLLGLDSTGSGEDLKNVFPPEVAVFEPSKAEIAHTQKATLVCLATGFYPDHVELSWWVNGKEVHSGVCTDPQPLKEQPALNDSRYCLSSRLRVSATFWQNPRNHFRCQVQFYGLSENDEWTQDRAKPVTQIVSAEAWGRADCGITSASYHQGVLSATILYEILLGKATLYAVLVSALVLMAMVKRKDSRGRAKRSGSGATNFSLLKQAGDVEENPGPTSMALPVTALLLPLALLLHAARPEVQLVESGGGLVQPGGSLRLSCAASGFNIKDTCIGWVRRAPGKEEELVAKICKYSGHTRYADSVKGRFTISADTSKNTAYLQMNSLRAEDTAVYYCAAVSVRDGHYNYWGQGTTVTVSSLESGGGGSFEVQLLESGGGLIQPGGSLRLSCAASGFTFSSHAMTWVRQAPGKGLEWVSAISGSGDYTHYADSVKGRFTISRDNSKNTVYLQMNSLRAEDSAVYYCAKDEDGGSLLGHRGQGTLVTVSSTREQKLISEEDGSGIQNPDPAVYQLRDSKSSDKSVCLFTDFDSQTNVSQSKDSDVYITDKCVLDMRSMDFKSNSAVAWSNKSDFACANAFNNSIIPEDTFFPSSDVPCDVKLVEKSFETDTNLNFQNLSVIGFRILLLKVAGFNLLMTLRLWSSRAKRSGSGVKQTLNFDLLKLAGDVESNPGPSRGHMTEYKPTVRLATRDDVPRAVRTLAAAFADYPATRHTVDPDRHIERVTELQELFLTRVGLDIGKVWVADDGAAVAVWTTPESVEAGAVFAEIGPRMAELSGSRLAAQQQMEGLLAPHRPKEPAWFLATVGVSPDHQGKGLGSAVVLPGVEAAERAGVPAFLETSAPRNLPFYERLGFTVTADVEVPEGPRTWCMTRKPGA

SEQ ID NO: 17605 - protein, 904 aa, Artificial Sequence
  Synthetic Polypeptide
MALPVTALLLPLALLLHAARPLEQKLISEEDLGSGDRPDPAVYQLRDSKSSDKSVCLFTDFDSQTNVSQSKDSDVYITDKCVLDMRSMDFKSNSAVAWSNKSDFACANAFNNSIIPEDTFFPSPESSCDVKLVEKSFETDTNLNFQNLSVIGFRILLLKVAGFNLLMTLRLWSSSSRAKRSGSGVKQTLNFDLLKLAGDVESNPGPTSMALPVTALLLPLALLLHAARPEVQLVESGGGLVQPGGSLRLSCAASGFNIKDTCIGWVRRAPGKEEELVAKICKYSGHTRYADSVKGRFTISADTSKNTAYLQMNSLRAEDTAVYYCAAVSVRDGHYNYWGQGTTVTVSSLESGGGGSFEVQLLESGGGLIQPGGSLRLSCAASGFTFSSHAMTWVRQAPGKGLEWVSAISGSGDYTHYADSVKGRFTISRDNSKNTVYLQMNSLRAEDSAVYYCAKDEDGGSLLGHRGQGTLVTVSSTRGKPIPNPLLGLDSTGSGEDLKNVFPPEVAVFEPSEAEISHTQKATLVCLATGFYPDHVELSWWVNGKEVHSGVCTDPQPLKEQPALNDSRYCLSSRLRVSATFWQNPRNHFRCQVQFYGLSENDEWTQDRAKPVTQIVSAEAWGRADCGFTSESYQQGVLSATILYEILLGKATLYAVLVSALVLMAMVKRKDSRGRAKRSGSGATNFSLLKQAGDVEENPGPSRGHMTEYKPTVRLATRDDVPRAVRTLAAAFADYPATRHTVDPDRHIERVTELQELFLTRVGLDIGKVWVADDGAAVAVWTTPESVEAGAVFAEIGPRMAELSGSRLAAQQQMEGLLAPHRPKEPAWFLATVGVSPDHQGKGLGSAVVLPGVEAAERAGVPAFLETSAPRNLPFYERLGFTVTADVEVPEGPRTWCMTRKPGA

SEQ ID NO: 17606 - protein, 863 aa, Artificial Sequence
  Synthetic Polypeptide
MALPVTALLLPLALLLHAARPEVQLVESGGGLVQPGGSLRLSCAASGFNIKDTCIGWVRRAPGKEEELVAKICKYSGHTRYADSVKGRFTISADTSKNTAYLQMNSLRAEDTAVYYCAAVSVRDGHYNYWGQGTTVTVSSLEDLKNVFPPEVAVFEPSEAEISHTQKATLVCLATGFYPDHVELSWWVNGKEVHSGVSTDPQPLKEQPALNDSRYCLSSRLRVSATFWQNPRNHFRCQVQFYGLSENDEWTQDRAKPVTQIVSAEAWGRADCGFTSESYQQGVLSATILYEILLGKATLYAVLVSALVLMAMVKRKDSRGRAKRSGSGATNFSLLKQAGDVEENPGPTSMDWIWRILFLVGAATGAHSFEVQLLESGGGLIQPGGSLRLSCAASGFTFSSHAMTWVRQAPGKGLEWVSAISGSGDYTHYADSVKGRFTISRDNSKNTVYLQMNSLRAEDSAVYYCAKDEDGGSLLGHRGQGTLVTVSSTRIQNPDPAVYQLRDSKSSDKSVCLFTDFDSQTNVSQSKDSDVYITDKTVLDMRSMDFKSNSAVAWSNKSDFACANAFNNSIIPEDTFFPSPESSCDVKLVEKSFETDTNLNFQNLSVIGFRILLLKVAGFNLLMTLRLWSSRAKRSGSGVKQTLNFDLLKLAGDVESNPGPSRGHMTEYKPTVRLATRDDVPRAVRTLAAAFADYPATRHTVDPDRHIERVTELQELFLTRVGLDIGKVWVADDGAAVAVWTTPESVEAGAVFAEIGPRMAELSGSRLAAQQQMEGLLAPHRPKEPAWFLATVGVSPDHQGKGLGSAVVLPGVEAAERAGVPAFLETSAPRNLPFYERLGFTVTADVEVPEGPRTWCMTRKPGA

SEQ ID NO: 17607 - protein, 945 aa, Artificial Sequence
  Synthetic Polypeptide
MALPVTALLLPLALLLHAARPEVQLVESGGGLVQPGGSLRLSCAASGFNIKDTCIGWVRRAPGKEEELVAKICKYSGHTRYADSVKGRFTISADTSKNTAYLQMNSLRAEDTAVYYCAAVSVRDGHYNYWGQGTTVTVSSLEDLKNVFPPEVAVFEPSEAEISHTQKATLVCLATGFYPDHVELSWWVNGKEVHSGVSTDPQPLKEQPALNDSRYCLSSRLRVSATFWQNPRNHFRCQVQFYGLSENDEWTQDRAKPVTQIVSAEAWGRADCGFTSESYQQGVLSATILYEILLGKATLYAVLVSALVLMAMVKRKDSRGRAKRSGSGATNFSLLKQAGDVEENPGPTSMDWIWRILFLVGAATGAHSFEVQLLESGGGLIQPGGSLRLSCAASGFTFSSHAMTWVRQAPGKGLEWVSAISGSGDYTHYADSVKGRFTISRDNSKNTVYLQMNSLRAEDSAVYYCAKDEDGGSLLGHRGQGTLVTVSSTREQKLISEEDGSGTPFPSLAPPIMLLVDGKQQMVVVCLVLDVAPPGLDSPIWFSAGNGSALDAFTYGPSPATDGTWTNLAHLSLPSEELASWEPLVCHTGPGAEGHSRSTQPMHLSGEASTARTCPQEPLRGTPGGALWLGVLRLLLFKLLLFDLLLTCSCLCDPAGPLPSPATTTRLRALGSHRLHPATETGGREATSSPRPQPRDRRWGDTPPGRKPGSPVRAKRSGSGVKQTLNFDLLKLAGDVESNPGPSRGHMTEYKPTVRLATRDDVPRAVRTLAAAFADYPATRHTVDPDRHIERVTELQELFLTRVGLDIGKVWVADDGAAVAVWTTPESVEAGAVFAEIGPRMAELSGSRLAAQQQMEGLLAPHRPKEPAWFLATVGVSPDHQGKGLGSAVVLPGVEAAERAGVPAFLETSAPRNLPFYERLGFTVTADVEVPEGPRTWCMTRKPGA

SEQ ID NO: 17608 - protein, 958 aa, Artificial Sequence
  Synthetic Polypeptide
MALPVTALLLPLALLLHAARPLEDLKNVFPPEVAVFEPSEAEISHTQKATLVCLATGFYPDHVELSWWVNGKEVHSGVSTDPQPLKEQPALNDSRYCLSSRLRVSATFWQNPRNHFRCQVQFYGLSENDEWTQDRAKPVTQIVSAEAWGRADCGFTSESYQQGVLSATILYEILLGKATLYAVLVSALVLMAMVKRKDSRGRAKRSGSGATNFSLLKQAGDVEENPGPTSMALPVTALLLPLALLLHAARPEVQLVESGGGLVQPGGSLRLSCAASGFNIKDTCIGWVRRAPGKEEELVAKICKYSGHTRYADSVKGRFTISADTSKNTAYLQMNSLRAEDTAVYYCAAVSVRDGHYNYWGQGTTVTVSSLESGGGGSFEVQLLESGGGLIQPGGSLRLSCAASGFTFSSHAMTWVRQAPGKGLEWVSAISGSGDYTHYADSVKGRFTISRDNSKNTVYLQMNSLRAEDSAVYYCAKDEDGGSLLGHRGQGTLVTVSSTREQKLISEEDLGSGTPFPSLAPPIMLLVDGKQQMVVVCLVLDVAPPGLDSPIWFSAGNGSALDAFTYGPSPATDGTWTNLAHLSLPSEELASWEPLVCHTGPGAEGHSRSTQPMHLSGEASTARTCPQEPLRGTPGGALWLGVLRLLLFKLLLFDLLLTCSCLCDPAGPLPSPATTTRLRALGSHRLHPATETGGREATSSPRPQPRDRRWGDTPPGRKPGSPVRAKRSGSGVKQTLNFDLLKLAGDVESNPGPSRSRGHMTEYKPTVRLATRDDVPRAVRTLAAAFADYPATRHTVDPDRHIERVTELQELFLTRVGLDIGKVWVADDGAAVAVWTTPESVEAGAVFAEIGPRMAELSGSRLAAQQQMEGLLAPHRPKEPAWFLATVGVSPDHQGKGLGSAVVLPGVEAAERAGVPAFLETSAPRNLPFYERLGFTVTADVEVPEGPRTWCMTRKPGA

SEQ ID NO: 17609 - protein, 900 aa, Artificial Sequence
  Synthetic Polypeptide
MALPVTALLLPLALLLHAARPEVQLVESGGGLVQPGGSLRLSCAASGFNIKDTCIGWVRRAPGKEEELVAKICKYSGHTRYADSVKGRFTISADTSKNTAYLQMNSLRAEDTAVYYCAAVSVRDGHYNYWGQGTTVTVSSLEGKPIPNPLLGLDSTGSGDKQLDADVSPKPTIFLPSIAETKLQKAGTYLCLLEKFFPDVIKIHWQEKKSNTILGSQEGNTMKTNDTYMKFSWLTVPEKSLDKEHRCIVRHENNKNGVDQEIIFPPIKTDVITMDPKDNCSKDANDTLLLQLTNTSAYYMYLLLLLKSVVYFAIITCCLLRRTAFCCNGEKSRAKRSGSGATNFSLLKQAGDVEENPGPTSMDWIWRILFLVGAATGAHSFEVQLLESGGGLIQPGGSLRLSCAASGFTFSSHAMTWVRQAPGKGLEWVSAISGSGDYTHYADSVKGRFTISRDNSKNTVYLQMNSLRAEDSAVYYCAKDEDGGSLLGHRGQGTLVTVSSTREQKLISEEDGSGSQPHTKPSVFVMKNGTNVACLVKEFYPKDIRINLVSSKKITEFDPAIVISPSGKYNAVKLGKYEDSNSVTCSVQHDNKTVHSTDFEVKTDSTDHVKPKETENTKQPSKSCHKPKAIVHTEKVNMMSLTVLGLRMLFAKTVAVNFLLTAKLFFLRAKRSGSGVKQTLNFDLLKLAGDVESNPGPSRGHMTEYKPTVRLATRDDVPRAVRTLAAAFADYPATRHTVDPDRHIERVTELQELFLTRVGLDIGKVWVADDGAAVAVWTTPESVEAGAVFAEIGPRMAELSGSRLAAQQQMEGLLAPHRPKEPAWFLATVGVSPDHQGKGLGSAVVLPGVEAAERAGVPAFLETSAPRNLPFYERLGFTVTADVEVPEGPRTWCMTRKPGA

SEQ ID NO: 17610 - protein, 638 aa, Artificial Sequence
  Synthetic Polypeptide
MALPVTALLLPLALLLHAARPEVQLVESGGGLVQPGGSLRLSCAASGFNIKDTCIGWVRRAPGKEEELVAKICKYSGHTRYADSVKGRFTISADTSKNTAYLQMNSLRAEDTAVYYCAAVSVRDGHYNYWGQGTTVTVSSLESQPHTKPSVFVMKNGTNVACLVKEFYPKDIRINLVSSKKITEFDPAIVISPSGKYNAVKLGKYEDSNSVTCSVQHDNKTVHSTDFEVKTDSTDHVKPKETENTKQPSKSCHKPKAIVHTEKVNMMSLTVLGLRMLFAKTVAVNFLLTAKLFFLRAKRSGSGATNFSLLKQAGDVEENPGPTSMDWIWRILFLVGAATGAHSFEVQLLESGGGLIQPGGSLRLSCAASGFTFSSHAMTWVRQAPGKGLEWVSAISGSGDYTHYADSVKGRFTISRDNSKNTVYLQMNSLRAEDSAVYYCAKDEDGGSLLGHRGQGTLVTVSSTRDKQLDADVSPKPTIFLPSIAETKLQKAGTYLCLLEKFFPDVIKIHWQEKKSNTILGSQEGNTMKTNDTYMKFSWLTVPEKSLDKEHRCIVRHENNKNGVDQEIIFPPIKTDVITMDPKDNCSKDANDTLLLQLTNTSAYYMYLLLLLKSVVYFAIITCCLLRRTAFCCNGEKS

SEQ ID NO: 17611 - protein, 910 aa, Artificial Sequence
  Synthetic Polypeptide
MALPVTALLLPLALLLHAARPLEGKPIPNPLLGLDSTGSGDKQLDADVSPKPTIFLPSIAETKLQKAGTYLCLLEKFFPDVIKIHWQEKKSNTILGSQEGNTMKTNDTYMKFSWLTVPEKSLDKEHRCIVRHENNKNGVDQEIIFPPIKTDVITMDPKDNCSKDANDTLLLQLTNTSAYYMYLLLLLKSVVYFAIITCCLLRRTAFCCNGEKSRAKRSGSGATNFSLLKQAGDVEENPGPTSMALPVTALLLPLALLLHAARPEVQLVESGGGLVQPGGSLRLSCAASGFNIKDTCIGWVRRAPGKEEELVAKICKYSGHTRYADSVKGRFTISADTSKNTAYLQMNSLRAEDTAVYYCAAVSVRDGHYNYWGQGTTVTVSSLESGGGGSFEVQLLESGGGLIQPGGSLRLSCAASGFTFSSHAMTWVRQAPGKGLEWVSAISGSGDYTHYADSVKGRFTISRDNSKNTVYLQMNSLRAEDSAVYYCAKDEDGGSLLGHRGQGTLVTVSSTREQKLISEEDGSGSQPHTKPSVFVMKNGTNVACLVKEFYPKDIRINLVSSKKITEFDPAIVISPSGKYNAVKLGKYEDSNSVTCSVQHDNKTVHSTDFEVKTDSTDHVKPKETENTKQPSKSCHKPKAIVHTEKVNMMSLTVLGLRMLFAKTVAVNFLLTAKLFFLRAKRSGSGVKQTLNFDLLKLAGDVESNPGPSRGHMTEYKPTVRLATRDDVPRAVRTLAAAFADYPATRHTVDPDRHIERVTELQELFLTRVGLDIGKVWVADDGAAVAVWTTPESVEAGAVFAEIGPRMAELSGSRLAAQQQMEGLLAPHRPKEPAWFLATVGVSPDHQGKGLGSAVVLPGVEAAERAGVPAFLETSAPRNLPFYERLGFTVTADVEVPEGPRTWCMTRKPGA

SEQ ID NO: 17612 - protein, 1040 aa, Artificial Sequence
  Synthetic Polypeptide
MALPVTALLLPLALLLHAARPEVQLVESGGGLVQPGGSLRLSCAASGFNIKDTCIGWVRRAPGKEEELVAKICKYSGHTRYADSVKGRFTISADTSKNTAYLQMNSLRAEDTAVYYCAAVSVRDGHYNYWGQGTTVTVSSGQPKANPTVTLFPPSSEELQANKATLVCLISDFYPGAVTVAWKADGSPVKAGVETTKPSKQSNNKYAASSYLSLTPEQWKSHRSYSCQVTHEGSTVEKTVAPTECSGSQSFGLLDPKLCYLLDGILFIYGVILTALFLRVKFSRSADAPAYQQGQNQLYNELNLGRREEYDVLDKRRGRDPEMGGKPQRRKNPQEGLYNELQKDKMAEAYSEIGMKGERRRGKGHDGLYQGLSTATKDTYDALHMQALPPRRAKRSGSGATNFSLLKQAGDVEENPGPTSMDWIWRILFLVGAATGAHSFEVQLLESGGGLIQPGGSLRLSCAASGFTFSSHAMTWVRQAPGKGLEWVSAISGSGDYTHYADSVKGRFTISRDNSKNTVYLQMNSLRAEDSAVYYCAKDEDGGSLLGHRGQGTLVTVSSASTKGPSVFPLAPSSKSTSGGTAALGCLVKDYFPEPVTVSWNSGALTSGVHTFPAVLQSSGLYSLSSVVTVPSSSLGTQTYICNVNHKPSNTKVDKRVEPKSCGTQSFGLLDPKLCYLLDGILFIYGVILTALFLRVKFSRSADAPAYQQGQNQLYNELNLGRREEYDVLDKRRGRDPEMGGKPQRRKNPQEGLYNELQKDKMAEAYSEIGMKGERRRGKGHDGLYQGLSTATKDTYDALHMQALPPRRAKRSGSGVKQTLNFDLLKLAGDVESNPGPSRGHMTEYKPTVRLATRDDVPRAVRTLAAAFADYPATRHTVDPDRHIERVTELQELFLTRVGLDIGKVWVADDGAAVAVWTTPESVEAGAVFAEIGPRMAELSGSRLAAQQQMEGLLAPHRPKEPAWFLATVGVSPDHQGKGLGSAVVLPGVEAAERAGVPAFLETSAPRNLPFYERLGFTVTADVEVPEGPRTWCMTRKPGA

SEQ ID NO: 17613 - protein, 826 aa, Artificial Sequence
  Synthetic Polypeptide
MALPVTALLLPLALLLHAARPEVQLVESGGGLVQPGGSLRLSCAASGFNIKDTCIGWVRRAPGKEEELVAKICKYSGHTRYADSVKGRFTISADTSKNTAYLQMNSLRAEDTAVYYCAAVSVRDGHYNYWGQGTTVTVSSLEDLKNVFPPEVAVFEPSEAEISHTQKATLVCLATGFYPDHVELSWWVNGKEVHSGVSTDPQPLKEQPALNDSRYCLSSRLRVSATFWQNPRNHFRCQVQFYGLSENDEWTQDRAKPVTQIVSAEAWGRADCGSQSFGLLDPKLCYLLDGILFIYGVILTALFLRVKFSRSADAPAYQQGQNQLYNELNLGRREEYDVLDKRRGRDPEMGGKPQRRKNPQEGLYNELQKDKMAEAYSEIGMKGERRRGKGHDGLYQGLSTATKDTYDALHMQALPPRRAKRSGSGATNFSLLKQAGDVEENPGPTSMDWIWRILFLVGAATGAHSFEVQLLESGGGLIQPGGSLRLSCAASGFTFSSHAMTWVRQAPGKGLEWVSAISGSGDYTHYADSVKGRFTISRDNSKNTVYLQMNSLRAEDSAVYYCAKDEDGGSLLGHRGQGTLVTVSSTRIQNPDPAVYQLRDSKSSDKSVCLFTDFDSQTNVSQSKDSDVYITDKTVLDMRSMDFKSNSAVAWSNKSDFACANAFNNSIIPEDTFFPSPESSCGTQSFGLLDPKLCYLLDGILFIYGVILTALFLRVKFSRSADAPAYQQGQNQLYNELNLGRREEYDVLDKRRGRDPEMGGKPQRRKNPQEGLYNELQKDKMAEAYSEIGMKGERRRGKGHDGLYQGLSTATKDTYDALHMQALPPR

SEQ ID NO: 17614 - protein, 826 aa, Artificial Sequence
  Synthetic Polypeptide
MALPVTALLLPLALLLHAARPEVQLVESGGGLVQPGGSLRLSCAASGFNIKDTCIGWVRRAPGKEEELVAKICKYSGHTRYADSVKGRFTISADTSKNTAYLQMNSLRAEDTAVYYCAAVSVRDGHYNYWGQGTTVTVSSLEDLKNVFPPEVAVFEPSKAEIAHTQKATLVCLATGFYPDHVELSWWVNGKEVHSGVCTDPQPLKEQPALNDSRYCLSSRLRVSATFWQNPRNHFRCQVQFYGLSENDEWTQDRAKPVTQIVSAEAWGRADCGSQSFGLLDPKLCYLLDGILFIYGVILTALFLRVKFSRSADAPAYQQGQNQLYNELNLGRREEYDVLDKRRGRDPEMGGKPQRRKNPQEGLYNELQKDKMAEAYSEIGMKGERRRGKGHDGLYQGLSTATKDTYDALHMQALPPRRAKRSGSGATNFSLLKQAGDVEENPGPTSMDWIWRILFLVGAATGAHSFEVQLLESGGGLIQPGGSLRLSCAASGFTFSSHAMTWVRQAPGKGLEWVSAISGSGDYTHYADSVKGRFTISRDNSKNTVYLQMNSLRAEDSAVYYCAKDEDGGSLLGHRGQGTLVTVSSTRIQNPDPAVYQLRDSKSSDKSVCLFTDFDSQTNVSQSKDSDVYITDKCVLDMRSMDFKSNSAVAWSNKSDFACANAFNNSIIPEDTFFPSSDVPCGTQSFGLLDPKLCYLLDGILFIYGVILTALFLRVKFSRSADAPAYQQGQNQLYNELNLGRREEYDVLDKRRGRDPEMGGKPQRRKNPQEGLYNELQKDKMAEAYSEIGMKGERRRGKGHDGLYQGLSTATKDTYDALHMQALPPR

SEQ ID NO: 17615 - protein, 897 aa, Artificial Sequence
  Synthetic Polypeptide
MALPVTALLLPLALLLHAARPEVQLVESGGGLVQPGGSLRLSCAASGFNIKDTCIGWVRRAPGKEEELVAKICKYSGHTRYADSVKGRFTISADTSKNTAYLQMNSLRAEDTAVYYCAAVSVRDGHYNYWGQGTTVTVSSLEGKPIPNPLLGLDSTGSGEDLKNVFPPEVAVFEPSEAEISHTQKATLVCLATGFYPDHVELSWWVNGKEVHSGVSTDPQPLKEQPALNDSRYCLSSRLRVSATFWQNPRNHFRCQVQFYGLSENDEWTQDRAKPVTQIVSAEAWGRADCGSQSFGLLDPKLCYLLDGILFIYGVILTALFLRVKFSRSADAPAYQQGQNQLYNELNLGRREEYDVLDKRRGRDPEMGGKPQRRKNPQEGLYNELQKDKMAEAYSEIGMKGERRRGKGHDGLYQGLSTATKDTYDALHMQALPPRRAKRSGSGATNFSLLKQAGDVEENPGPTSMDWIWRILFLVGAATGAHSFEVQLLESGGGLIQPGGSLRLSCAASGFTFSSHAMTWVRQAPGKGLEWVSAISGSGDYTHYADSVKGRFTISRDNSKNTVYLQMNSLRAEDSAVYYCAKDEDGGSLLGHRGQGTLVTVSSTREQKLISEEDGSGIQNPDPAVYQLRDSKSSDKSVCLFTDFDSQTNVSQSKDSDVYITDKTVLDMRSMDFKSNSAVAWSNKSDFACANAFNNSIIPEDTFFPSPESSCGTQSFGLLDPKLCYLLDGILFIYGVILTALFLRSKRSRLLHSDYMNMTPRRPGPTRKHYQPYAPPRDFAAYRSRVKFSRSADAPAYQQGQNQLYNELNLGRREEYDVLDKRRGRDPEMGGKPQRRKNPQEGLYNELQKDKMAEAYSEIGMKGERRRGKGHDGLYQGLSTATKDTYDALHMQALPPR

SEQ ID NO: 17616 - protein, 938 aa, Artificial Sequence
  Synthetic Polypeptide
MALPVTALLLPLALLLHAARPEVQLVESGGGLVQPGGSLRLSCAASGFNIKDTCIGWVRRAPGKEEELVAKICKYSGHTRYADSVKGRFTISADTSKNTAYLQMNSLRAEDTAVYYCAAVSVRDGHYNYWGQGTTVTVSSLEGKPIPNPLLGLDSTGSGEDLKNVFPPEVAVFEPSEAEISHTQKATLVCLATGFYPDHVELSWWVNGKEVHSGVSTDPQPLKEQPALNDSRYCLSSRLRVSATFWQNPRNHFRCQVQFYGLSENDEWTQDRAKPVTQIVSAEAWGRADCGSQSFGLLDPKLCYLLDGILFIYGVILTALFLRSKRSRLLHSDYMNMTPRRPGPTRKHYQPYAPPRDFAAYRSRVKFSRSADAPAYQQGQNQLYNELNLGRREEYDVLDKRRGRDPEMGGKPQRRKNPQEGLYNELQKDKMAEAYSEIGMKGERRRGKGHDGLYQGLSTATKDTYDALHMQALPPRRAKRSGSGATNFSLLKQAGDVEENPGPTSMDWIWRILFLVGAATGAHSFEVQLLESGGGLIQPGGSLRLSCAASGFTFSSHAMTWVRQAPGKGLEWVSAISGSGDYTHYADSVKGRFTISRDNSKNTVYLQMNSLRAEDSAVYYCAKDEDGGSLLGHRGQGTLVTVSSTREQKLISEEDGSGIQNPDPAVYQLRDSKSSDKSVCLFTDFDSQTNVSQSKDSDVYITDKTVLDMRSMDFKSNSAVAWSNKSDFACANAFNNSIIPEDTFFPSPESSCGTQSFGLLDPKLCYLLDGILFIYGVILTALFLRSKRSRLLHSDYMNMTPRRPGPTRKHYQPYAPPRDFAAYRSRVKFSRSADAPAYQQGQNQLYNELNLGRREEYDVLDKRRGRDPEMGGKPQRRKNPQEGLYNELQKDKMAEAYSEIGMKGERRRGKGHDGLYQGLSTATKDTYDALHMQALPPR

SEQ ID NO: 17617 - protein, 899 aa, Artificial Sequence
  Synthetic Polypeptide
MALPVTALLLPLALLLHAARPEVQLVESGGGLVQPGGSLRLSCAASGFNIKDTCIGWVRRAPGKEEELVAKICKYSGHTRYADSVKGRFTISADTSKNTAYLQMNSLRAEDTAVYYCAAVSVRDGHYNYWGQGTTVTVSSLEGKPIPNPLLGLDSTGSGEDLKNVFPPEVAVFEPSEAEISHTQKATLVCLATGFYPDHVELSWWVNGKEVHSGVSTDPQPLKEQPALNDSRYCLSSRLRVSATFWQNPRNHFRCQVQFYGLSENDEWTQDRAKPVTQIVSAEAWGRADCGSQSFGLLDPKLCYLLDGILFIYGVILTALFLRVKFSRSADAPAYQQGQNQLYNELNLGRREEYDVLDKRRGRDPEMGGKPQRRKNPQEGLYNELQKDKMAEAYSEIGMKGERRRGKGHDGLYQGLSTATKDTYDALHMQALPPRRAKRSGSGATNFSLLKQAGDVEENPGPTSMDWIWRILFLVGAATGAHSFEVQLLESGGGLIQPGGSLRLSCAASGFTFSSHAMTWVRQAPGKGLEWVSAISGSGDYTHYADSVKGRFTISRDNSKNTVYLQMNSLRAEDSAVYYCAKDEDGGSLLGHRGQGTLVTVSSTREQKLISEEDLGSGIQNPDPAVYQLRDSKSSDKSVCLFTDFDSQTNVSQSKDSDVYITDKTVLDMRSMDFKSNSAVAWSNKSDFACANAFNNSIIPEDTFFPSPESSCGTQSFGLLDPKLCYLLDGILFIYGVILTALFLKRGRKKLLYIFKQPFMRPVQTTQEEDGCSCRFPEEEEGGCELRVKFSRSADAPAYQQGQNQLYNELNLGRREEYDVLDKRRGRDPEMGGKPQRRKNPQEGLYNELQKDKMAEAYSEIGMKGERRRGKGHDGLYQGLSTATKDTYDALHMQALPPR

SEQ ID NO: 17618 - protein, 941 aa, Artificial Sequence
  Synthetic Polypeptide
MALPVTALLLPLALLLHAARPEVQLVESGGGLVQPGGSLRLSCAASGFNIKDTCIGWVRRAPGKEEELVAKICKYSGHTRYADSVKGRFTISADTSKNTAYLQMNSLRAEDTAVYYCAAVSVRDGHYNYWGQGTTVTVSSLEGKPIPNPLLGLDSTGSGEDLKNVFPPEVAVFEPSEAEISHTQKATLVCLATGFYPDHVELSWWVNGKEVHSGVSTDPQPLKEQPALNDSRYCLSSRLRVSATFWQNPRNHFRCQVQFYGLSENDEWTQDRAKPVTQIVSAEAWGRADCGSQSFGLLDPKLCYLLDGILFIYGVILTALFLKRGRKKLLYIFKQPFMRPVQTTQEEDGCSCRFPEEEEGGCELRVKFSRSADAPAYQQGQNQLYNELNLGRREEYDVLDKRRGRDPEMGGKPQRRKNPQEGLYNELQKDKMAEAYSEIGMKGERRRGKGHDGLYQGLSTATKDTYDALHMQALPPRRAKRSGSGATNFSLLKQAGDVEENPGPTSMDWIWRILFLVGAATGAHSFEVQLLESGGGLIQPGGSLRLSCAASGFTFSSHAMTWVRQAPGKGLEWVSAISGSGDYTHYADSVKGRFTISRDNSKNTVYLQMNSLRAEDSAVYYCAKDEDGGSLLGHRGQGTLVTVSSTREQKLISEEDLGSGIQNPDPAVYQLRDSKSSDKSVCLFTDFDSQTNVSQSKDSDVYITDKTVLDMRSMDFKSNSAVAWSNKSDFACANAFNNSIIPEDTFFPSPESSCGTQSFGLLDPKLCYLLDGILFIYGVILTALFLKRGRKKLLYIFKQPFMRPVQTTQEEDGCSCRFPEEEEGGCELRVKFSRSADAPAYQQGQNQLYNELNLGRREEYDVLDKRRGRDPEMGGKPQRRKNPQEGLYNELQKDKMAEAYSEIGMKGERRRGKGHDGLYQGLSTATKDTYDALHMQALPPR

SEQ ID NO: 17619 - protein, 831 aa, Artificial Sequence
  Synthetic Polypeptide
MALPVTALLLPLALLLHAARPEVQLVESGGGLVQPGGSLRLSCAASGFNIKDTCIGWVRRAPGKEEELVAKICKYSGHTRYADSVKGRFTISADTSKNTAYLQMNSLRAEDTAVYYCAAVSVRDGHYNYWGQGTTVTVSSLEQSFGLLDPKLCYLLDGILFIYGVILTALFLRVKFSRSADAPAYQQGQNQLYNELNLGRREEYDVLDKRRGRDPEMGGKPQRRKNPQEGLYNELQKDKMAEAYSEIGMKGERRRGKGHDGLYQGLSTATKDTYDALHMQALPPRRAKRSGSGATNFSLLKQAGDVEENPGPTSMDWIWRILFLVGAATGAHSFEVQLLESGGGLIQPGGSLRLSCAASGFTFSSHAMTWVRQAPGKGLEWVSAISGSGDYTHYADSVKGRFTISRDNSKNTVYLQMNSLRAEDSAVYYCAKDEDGGSLLGHRGQGTLVTVSSTRQSFGLLDPKLCYLLDGILFIYGVILTALFLRVKFSRSADAPAYQQGQNQLYNELNLGRREEYDVLDKRRGRDPEMGGKPQRRKNPQEGLYNELQKDKMAEAYSEIGMKGERRRGKGHDGLYQGLSTATKDTYDALHMQALPPRRAKRSGSGVKQTLNFDLLKLAGDVESNPGPSRGHMTEYKPTVRLATRDDVPRAVRTLAAAFADYPATRHTVDPDRHIERVTELQELFLTRVGLDIGKVWVADDGAAVAVWTTPESVEAGAVFAEIGPRMAELSGSRLAAQQQMEGLLAPHRPKEPAWFLATVGVSPDHQGKGLGSAVVLPGVEAAERAGVPAFLETSAPRNLPFYERLGFTVTADVEVPEGPRTWCMTRKPGA

SEQ ID NO: 17620 - protein, 656 aa, Artificial Sequence
  Synthetic Polypeptide
MALPVTALLLPLALLLHAARPEVQLVESGGGLVQPGGSLRLSCAASGFNIKDTCIGWVRRAPGKEEELVAKICKYSGHTRYADSVKGRFTISADTSKNTAYLQMNSLRAEDTAVYYCAAVSVRDGHYNYWGQGTTVTVSSLEGQPKANPTVTLFPPSSEELQANKATLVCLISDFYPGAVTVAWKADGSPVKAGVETTKPSKQSNNKYAASSYLSLTPEQWKSHRSYSCQVTHEGSTVEKTVAPTECSPIKTDVITMDPKDNCSKDANDTLLLQLTNTSAYYMYLLLLLKSVVYFAIITCCLLRRTAFCCNGEKSRAKRSGSGATNFSLLKQAGDVEENPGPTSMDWIWRILFLVGAATGAHSFEVQLLESGGGLIQPGGSLRLSCAASGFTFSSHAMTWVRQAPGKGLEWVSAISGSGDYTHYADSVKGRFTISRDNSKNTVYLQMNSLRAEDSAVYYCAKDEDGGSLLGHRGQGTLVTVSSTRASTKGPSVFPLAPSSKSTSGGTAALGCLVKDYFPEPVTVSWNSGALTSGVHTFPAVLQSSGLYSLSSVVTVPSSSLGTQTYICNVNHKPSNTKVDKRVEPKSCEVKTDSTDHVKPKETENTKQPSKSCHKPKAIVHTEKVNMMSLTVLGLRMLFAKTVAVNFLLTAKLFFL

SEQ ID NO: 17621 - protein, 634 aa, Artificial Sequence
  Synthetic Polypeptide
MALPVTALLLPLALLLHAARPEVQLVESGGGLVQPGGSLRLSCAASGFNIKDTCIGWVRRAPGKEEELVAKICKYSGHTRYADSVKGRFTISADTSKNTAYLQMNSLRAEDTAVYYCAAVSVRDGHYNYWGQGTTVTVSSLEGQPKANPTVTLFPPSSEELQANKATLVCLISDFYPGAVTVAWKADGSPVKAGVETTKPSKQSNNKYAASSYLSLTPEQWKSHRSYSCQVTHEGSTVEKTVAPTECSGRADCGITSASYHQGVLSATILYEILLGKATLYAVLVSALVLMAMVKRKDSRGRAKRSGSGATNFSLLKQAGDVEENPGPTSMDWIWRILFLVGAATGAHSFEVQLLESGGGLIQPGGSLRLSCAASGFTFSSHAMTWVRQAPGKGLEWVSAISGSGDYTHYADSVKGRFTISRDNSKNTVYLQMNSLRAEDSAVYYCAKDEDGGSLLGHRGQGTLVTVSSTRASTKGPSVFPLAPSSKSTSGGTAALGCLVKDYFPEPVTVSWNSGALTSGVHTFPAVLQSSGLYSLSSVVTVPSSSLGTQTYICNVNHKPSNTKVDKRVEPKSCIPEDTFFPSSDVPCDVKLVEKSFETDTNLNFQNLSVIGFRILLLKVAGFNLLMTLRLWSS

SEQ ID NO: 17622 - protein, 634 aa, Artificial Sequence
  Synthetic Polypeptide
MALPVTALLLPLALLLHAARPEVQLVESGGGLVQPGGSLRLSCAASGFNIKDTCIGWVRRAPGKEEELVAKICKYSGHTRYADSVKGRFTISADTSKNTAYLQMNSLRAEDTAVYYCAAVSVRDGHYNYWGQGTTVTVSSLEGQPKANPTVTLFPPSSEELQANKATLVCLISDFYPGAVTVAWKADGSPVKAGVETTKPSKQSNNKYAASSYLSLTPEQWKSHRSYSCQVTHEGSTVEKTVAPTECSGRADCGFTSESYQQGVLSATILYEILLGKATLYAVLVSALVLMAMVKRKDSRGRAKRSGSGATNFSLLKQAGDVEENPGPTSMDWIWRILFLVGAATGAHSFEVQLLESGGGLIQPGGSLRLSCAASGFTFSSHAMTWVRQAPGKGLEWVSAISGSGDYTHYADSVKGRFTISRDNSKNTVYLQMNSLRAEDSAVYYCAKDEDGGSLLGHRGQGTLVTVSSTRASTKGPSVFPLAPSSKSTSGGTAALGCLVKDYFPEPVTVSWNSGALTSGVHTFPAVLQSSGLYSLSSVVTVPSSSLGTQTYICNVNHKPSNTKVDKRVEPKSCIPEDTFFPSPESSCDVKLVEKSFETDTNLNFQNLSVIGFRILLLKVAGFNLLMTLRLWSS

SEQ ID NO: 17623 - protein, 455 aa, Artificial Sequence
  Synthetic Polypeptide
MALPVTALLLPLALLLHAARPEVQLVESGGGLVQPGGSLRLSCAASGFNIKDTCIGWVRRAPGKEEELVAKICKYSGHTRYADSVKGRFTISADTSKNTAYLQMNSLRAEDTAVYYCAAVSVRDGHYNYWGQGTTVTVSSLESGGGGSFEVQLLESGGGLIQPGGSLRLSCAASGFTFSSHAMTWVRQAPGKGLEWVSAISGSGDYTHYADSVKGRFTISRDNSKNTVYLQMNSLRAEDSAVYYCAKDEDGGSLLGHRGQGTLVTVSSTRDGNEEMGGITQTPYKVSISGTTVILTCPQYPGSEILWQHNDKNIGGDEDDKNIGSDEDHLSLKEFSELEQSGYYVCYPRGSKPEDANFYLYLRARVCENCMEMDVMSVATIVIVDICITGGLLLLVYYWSKNRKAKAKPVTRGAGAGGRQRGQNKERPPPVPNPDYEPIRKGQRDLYSGLNQRRI

SEQ ID NO: 17624 - protein, 420 aa, Artificial Sequence
  Synthetic Polypeptide
MALPVTALLLPLALLLHAARPEVQLVESGGGLVQPGGSLRLSCAASGFNIKDTCIGWVRRAPGKEEELVAKICKYSGHTRYADSVKGRFTISADTSKNTAYLQMNSLRAEDTAVYYCAAVSVRDGHYNYWGQGTTVTVSSLESGGGGSFEVQLLESGGGLIQPGGSLRLSCAASGFTFSSHAMTWVRQAPGKGLEWVSAISGSGDYTHYADSVKGRFTISRDNSKNTVYLQMNSLRAEDSAVYYCAKDEDGGSLLGHRGQGTLVTVSSTRFKIPIEELEDRVFVNCNTSITWVEGTVGTLLSDITRLDLGKRILDPRGIYRCNGTDIYKDKESTVQVHYRMCQSCVELDPATVAGIIVTDVIATLLLALGVFCFAGHETGRLSGAADTQALLRNDQVYQPLRDRDDAQYSHLGGNWARNK

SEQ ID NO: 17625 - protein, 430 aa, Artificial Sequence
  Synthetic Polypeptide
MALPVTALLLPLALLLHAARPEVQLVESGGGLVQPGGSLRLSCAASGFNIKDTCIGWVRRAPGKEEELVAKICKYSGHTRYADSVKGRFTISADTSKNTAYLQMNSLRAEDTAVYYCAAVSVRDGHYNYWGQGTTVTVSSLESGGGGSFEVQLLESGGGLIQPGGSLRLSCAASGFTFSSHAMTWVRQAPGKGLEWVSAISGSGDYTHYADSVKGRFTISRDNSKNTVYLQMNSLRAEDSAVYYCAKDEDGGSLLGHRGQGTLVTVSSTRQSIKGNHLVKVYDYQEDGSVLLTCDAEAKNITWFKDGKMIGFLTEDKKKWNLGSNAKDPRGMYQCKGSQNKSKPLQVYYRMCQNCIELNAATISGFLFAEIVSIFVLAVGVYFIAGQDGVRQSRASDKQTLLPNDQLYQPLKDREDDQYSHLQGNQLRRN

SEQ ID NO: 17626 - protein, 413 aa, Artificial Sequence
  Synthetic Polypeptide
MALPVTALLLPLALLLHAARPEVQLVESGGGLVQPGGSLRLSCAASGFNIKDTCIGWVRRAPGKEEELVAKICKYSGHTRYADSVKGRFTISADTSKNTAYLQMNSLRAEDTAVYYCAAVSVRDGHYNYWGQGTTVTVSSLESGGGGSFEVQLLESGGGLIQPGGSLRLSCAASGFTFSSHAMTWVRQAPGKGLEWVSAISGSGDYTHYADSVKGRFTISRDNSKNTVYLQMNSLRAEDSAVYYCAKDEDGGSLLGHRGQGTLVTVSSTRQSFGLLDPKLCYLLDGILFIYGVILTALFLRVKFSRSADAPAYQQGQNQLYNELNLGRREEYDVLDKRRGRDPEMGGKPQRRKNPQEGLYNELQKDKMAEAYSEIGMKGERRRGKGHDGLYQGLSTATKDTYDALHMQALPPR

SEQ ID NO: 17627 - protein, 456 aa, Artificial Sequence
  Synthetic Polypeptide
MALPVTALLLPLALLLHAARPEVQLLESGGGLIQPGGSLRLSCAASGFTFSSHAMTWVRQAPGKGLEWVSAISGSGDYTHYADSVKGRFTISRDNSKNTVYLQMNSLRAEDSAVYYCAKDEDGGSLLGHRGQGTLVTVSSLESGGGGSFEEVQLVESGGGLVQPGGSLRLSCAASGFNIKDTCIGWVRRAPGKEEELVAKICKYSGHTRYADSVKGRFTISADTSKNTAYLQMNSLRAEDTAVYYCAAVSVRDGHYNYWGQGTTVTVSSTRDGNEEMGGITQTPYKVSISGTTVILTCPQYPGSEILWQHNDKNIGGDEDDKNIGSDEDHLSLKEFSELEQSGYYVCYPRGSKPEDANFYLYLRARVCENCMEMDVMSVATIVIVDICITGGLLLLVYYWSKNRKAKAKPVTRGAGAGGRQRGQNKERPPPVPNPDYEPIRKGQRDLYSGLNQRRI

SEQ ID NO: 17628 - protein, 421 aa, Artificial Sequence
  Synthetic Polypeptide
MALPVTALLLPLALLLHAARPEVQLLESGGGLIQPGGSLRLSCAASGFTFSSHAMTWVRQAPGKGLEWVSAISGSGDYTHYADSVKGRFTISRDNSKNTVYLQMNSLRAEDSAVYYCAKDEDGGSLLGHRGQGTLVTVSSLESGGGGSFEEVQLVESGGGLVQPGGSLRLSCAASGFNIKDTCIGWVRRAPGKEEELVAKICKYSGHTRYADSVKGRFTISADTSKNTAYLQMNSLRAEDTAVYYCAAVSVRDGHYNYWGQGTTVTVSSTRFKIPIEELEDRVFVNCNTSITWVEGTVGTLLSDITRLDLGKRILDPRGIYRCNGTDIYKDKESTVQVHYRMCQSCVELDPATVAGIIVTDVIATLLLALGVFCFAGHETGRLSGAADTQALLRNDQVYQPLRDRDDAQYSHLGGNWARNK

SEQ ID NO: 17629 - protein, 431 aa, Artificial Sequence
  Synthetic Polypeptide
MALPVTALLLPLALLLHAARPEVQLLESGGGLIQPGGSLRLSCAASGFTFSSHAMTWVRQAPGKGLEWVSAISGSGDYTHYADSVKGRFTISRDNSKNTVYLQMNSLRAEDSAVYYCAKDEDGGSLLGHRGQGTLVTVSSLESGGGGSFEEVQLVESGGGLVQPGGSLRLSCAASGFNIKDTCIGWVRRAPGKEEELVAKICKYSGHTRYADSVKGRFTISADTSKNTAYLQMNSLRAEDTAVYYCAAVSVRDGHYNYWGQGTTVTVSSTRQSIKGNHLVKVYDYQEDGSVLLTCDAEAKNITWFKDGKMIGFLTEDKKKWNLGSNAKDPRGMYQCKGSQNKSKPLQVYYRMCQNCIELNAATISGFLFAEIVSIFVLAVGVYFIAGQDGVRQSRASDKQTLLPNDQLYQPLKDREDDQYSHLQGNQLRRN

SEQ ID NO: 17630 - protein, 414 aa, Artificial Sequence
  Synthetic Polypeptide
MALPVTALLLPLALLLHAARPEVQLLESGGGLIQPGGSLRLSCAASGFTFSSHAMTWVRQAPGKGLEWVSAISGSGDYTHYADSVKGRFTISRDNSKNTVYLQMNSLRAEDSAVYYCAKDEDGGSLLGHRGQGTLVTVSSLESGGGGSFEEVQLVESGGGLVQPGGSLRLSCAASGFNIKDTCIGWVRRAPGKEEELVAKICKYSGHTRYADSVKGRFTISADTSKNTAYLQMNSLRAEDTAVYYCAAVSVRDGHYNYWGQGTTVTVSSTRQSFGLLDPKLCYLLDGILFIYGVILTALFLRVKFSRSADAPAYQQGQNQLYNELNLGRREEYDVLDKRRGRDPEMGGKPQRRKNPQEGLYNELQKDKMAEAYSEIGMKGERRRGKGHDGLYQGLSTATKDTYDALHMQALPPR

SEQ ID NO: 17631 - protein, 646 aa, Artificial Sequence
  Synthetic Polypeptide
MALPVTALLLPLALLLHAARPEVQLVESGGGLVQPGGSLRLSCAASGFNIKDTCIGWVRRAPGKEEELVAKICKYSGHTRYADSVKGRFTISADTSKNTAYLQMNSLRAEDTAVYYCAAVSVRDGHYNYWGQGTTVTVSSLESGGGGSFEVQLLESGGGLIQPGGSLRLSCAASGFTFSSHAMTWVRQAPGKGLEWVSAISGSGDYTHYADSVKGRFTISRDNSKNTVYLQMNSLRAEDSAVYYCAKDEDGGSLLGHRGQGTLVTVSSTRGSGIQNPDPAVYQLRDSKSSDKSVCLFTDFDSQTNVSQSKDSDVYITDKTVLDMRSMDFKSNSAVAWSNKSDFACANAFNNSIIPEDTFFPSPESSCDVKLVEKSFETDTNLNFQNLSVIGFRILLLKVAGFNLLMTLRLWSSRAKRSGSGVKQTLNFDLLKLAGDVESNPGPSRGHMTEYKPTVRLATRDDVPRAVRTLAAAFADYPATRHTVDPDRHIERVTELQELFLTRVGLDIGKVWVADDGAAVAVWTTPESVEAGAVFAEIGPRMAELSGSRLAAQQQMEGLLAPHRPKEPAWFLATVGVSPDHQGKGLGSAVVLPGVEAAERAGVPAFLETSAPRNLPFYERLGFTVTADVEVPEGPRTWCMTRKPGA

SEQ ID NO: 17632 - protein, 678 aa, Artificial Sequence
  Synthetic Polypeptide
MALPVTALLLPLALLLHAARPEVQLVESGGGLVQPGGSLRLSCAASGFNIKDTCIGWVRRAPGKEEELVAKICKYSGHTRYADSVKGRFTISADTSKNTAYLQMNSLRAEDTAVYYCAAVSVRDGHYNYWGQGTTVTVSSLESGGGGSFEVQLLESGGGLIQPGGSLRLSCAASGFTFSSHAMTWVRQAPGKGLEWVSAISGSGDYTHYADSVKGRFTISRDNSKNTVYLQMNSLRAEDSAVYYCAKDEDGGSLLGHRGQGTLVTVSSLEDLKNVFPPEVAVFEPSEAEISHTQKATLVCLATGFYPDHVELSWWVNGKEVHSGVSTDPQPLKEQPALNDSRYCLSSRLRVSATFWQNPRNHFRCQVQFYGLSENDEWTQDRAKPVTQIVSAEAWGRADCGFTSESYQQGVLSATILYEILLGKATLYAVLVSALVLMAMVKRKDSRGRAKRSGSGATNFSLLKQAGDVEENPGPTRGHMTEYKPTVRLATRDDVPRAVRTLAAAFADYPATRHTVDPDRHIERVTELQELFLTRVGLDIGKVWVADDGAAVAVWTTPESVEAGAVFAEIGPRMAELSGSRLAAQQQMEGLLAPHRPKEPAWFLATVGVSPDHQGKGLGSAVVLPGVEAAERAGVPAFLETSAPRNLPFYERLGFTVTADVEVPEGPRTWCMTRKPGA

SEQ ID NO: 17633 - protein, 728 aa, Artificial Sequence
  Synthetic Polypeptide
MALPVTALLLPLALLLHAARPEVQLVESGGGLVQPGGSLRLSCAASGFNIKDTCIGWVRRAPGKEEELVAKICKYSGHTRYADSVKGRFTISADTSKNTAYLQMNSLRAEDTAVYYCAAVSVRDGHYNYWGQGTTVTVSSLESGGGGSFEVQLLESGGGLIQPGGSLRLSCAASGFTFSSHAMTWVRQAPGKGLEWVSAISGSGDYTHYADSVKGRFTISRDNSKNTVYLQMNSLRAEDSAVYYCAKDEDGGSLLGHRGQGTLVTVSSTREQKLISEEDLGSGTPFPSLAPPIMLLVDGKQQMVVVCLVLDVAPPGLDSPIWFSAGNGSALDAFTYGPSPATDGTWTNLAHLSLPSEELASWEPLVCHTGPGAEGHSRSTQPMHLSGEASTARTCPQEPLRGTPGGALWLGVLRLLLFKLLLFDLLLTCSCLCDPAGPLPSPATTTRLRALGSHRLHPATETGGREATSSPRPQPRDRRWGDTPPGRKPGSPVRAKRSGSGVKQTLNFDLLKLAGDVESNPGPSRSRGHMTEYKPTVRLATRDDVPRAVRTLAAAFADYPATRHTVDPDRHIERVTELQELFLTRVGLDIGKVWVADDGAAVAVWTTPESVEAGAVFAEIGPRMAELSGSRLAAQQQMEGLLAPHRPKEPAWFLATVGVSPDHQGKGLGSAVVLPGVEAAERAGVPAFLETSAPRNLPFYERLGFTVTADVEVPEGPRTWCMTRKPGA

SEQ ID NO: 17634 - protein, 550 aa, Artificial Sequence
  Synthetic Polypeptide
MALPVTALLLPLALLLHAARPEVQLVESGGGLVQPGGSLRLSCAASGFNIKDTCIGWVRRAPGKEEELVAKICKYSGHTRYADSVKGRFTISADTSKNTAYLQMNSLRAEDTAVYYCAAVSVRDGHYNYWGQGTTVTVSSLEDLKNVFPPEVAVFEPSEAEISHTQKATLVCLATGFYPDHVELSWWVNGKEVHSGVSTDPQPLKEQPALNDSRYCLSSRLRVSATFWQNPRNHFRCQVQFYGLSENDEWTQDRAKPVTQIVSAEAWGRADCGFTSESYQQGVLSATILYEILLGKATLYAVLVSALVLMAMVKRKDSRGRAKRSGSGATNFSLLKQAGDVEENPGPTRGHMTEYKPTVRLATRDDVPRAVRTLAAAFADYPATRHTVDPDRHIERVTELQELFLTRVGLDIGKVWVADDGAAVAVWTTPESVEAGAVFAEIGPRMAELSGSRLAAQQQMEGLLAPHRPKEPAWFLATVGVSPDHQGKGLGSAVVLPGVEAAERAGVPAFLETSAPRNLPFYERLGFTVTADVEVPEGPRTWCMTRKPGA

SEQ ID NO: 17635 - protein, 320 aa, Artificial Sequence
  Synthetic Polypeptide
MALPVTALLLPLALLLHAARPEVQLVESGGGLVQPGGSLRLSCAASGFNIKDTCIGWVRRAPGKEEELVAKICKYSGHTRYADSVKGRFTISADTSKNTAYLQMNSLRAEDTAVYYCAAVSVRDGHYNYWGQGTTVTVSSLEDLKNVFPPEVAVFEPSEAEISHTQKATLVCLATGFYPDHVELSWWVNGKEVHSGVSTDPQPLKEQPALNDSRYCLSSRLRVSATFWQNPRNHFRCQVQFYGLSENDEWTQDRAKPVTQIVSAEAWGRADCGFTSESYQQGVLSATILYEILLGKATLYAVLVSALVLMAMVKRKDSRG

SEQ ID NO: 17636 - protein, 447 aa, Artificial Sequence; identical to SEQ ID NO: 17490
  Synthetic Polypeptide

SEQ ID NO: 17637 - protein, 281 aa, Artificial Sequence; identical to SEQ ID NO: 17491
  Synthetic Polypeptide

SEQ ID NO: 17638 - protein, 568 aa, Artificial Sequence
  Synthetic Polypeptide
MALPVTALLLPLALLLHAARPEVQLVESGGGLVQPGGSLRLSCAASGFNIKDTCIGWVRRAPGKEEELVAKICKYSGHTRYADSVKGRFTISADTSKNTAYLQMNSLRAEDTAVYYCAAVSVRDGHYNYWGQGTTVTVSSLEGKPIPNPLLGLDSTGSGEDLKNVFPPEVAVFEPSEAEISHTQKATLVCLATGFYPDHVELSWWVNGKEVHSGVCTDPQPLKEQPALNDSRYCLSSRLRVSATFWQNPRNHFRCQVQFYGLSENDEWTQDRAKPVTQIVSAEAWGRADCGFTSESYQQGVLSATILYEILLGKATLYAVLVSALVLMAMVKRKDSRGRAKRSGSGATNFSLLKQAGDVEENPGPTRGHMTEYKPTVRLATRDDVPRAVRTLAAAFADYPATRHTVDPDRHIERVTELQELFLTRVGLDIGKVWVADDGAAVAVWTTPESVEAGAVFAEIGPRMAELSGSRLAAQQQMEGLLAPHRPKEPAWFLATVGVSPDHQGKGLGSAVVLPGVEAAERAGVPAFLETSAPRNLPFYERLGFTVTADVEVPEGPRTWCMTRKPGA

SEQ ID NO: 17639 - protein, 338 aa, Artificial Sequence
  Synthetic Polypeptide
MALPVTALLLPLALLLHAARPEVQLVESGGGLVQPGGSLRLSCAASGFNIKDTCIGWVRRAPGKEEELVAKICKYSGHTRYADSVKGRFTISADTSKNTAYLQMNSLRAEDTAVYYCAAVSVRDGHYNYWGQGTTVTVSSLEGKPIPNPLLGLDSTGSGEDLKNVFPPEVAVFEPSEAEISHTQKATLVCLATGFYPDHVELSWWVNGKEVHSGVCTDPQPLKEQPALNDSRYCLSSRLRVSATFWQNPRNHFRCQVQFYGLSENDEWTQDRAKPVTQIVSAEAWGRADCGFTSESYQQGVLSATILYEILLGKATLYAVLVSALVLMAMVKRKDSRG

SEQ ID NO: 17640 - protein, 459 aa, Artificial Sequence; identical to SEQ ID NO: 17494
  Synthetic Polypeptide

SEQ ID NO: 17641 - protein, 293 aa, Artificial Sequence; identical to SEQ ID NO: 17495
  Synthetic Polypeptide

SEQ ID NO: 17642 - protein, 646 aa, Artificial Sequence
  Synthetic Polypeptide
MALPVTALLLPLALLLHAARPEVQLVESGGGLVQPGGSLRLSCAASGFNIKDTCIGWVRRAPGKEEELVAKICKYSGHTRYADSVKGRFTISADTSKNTAYLQMNSLRAEDTAVYYCAAVSVRDGHYNYWGQGTTVTVSSLESGGGGSFEVQLLESGGGLIQPGGSLRLSCAASGFTFSSHAMTWVRQAPGKGLEWVSAISGSGDYTHYADSVKGRFTISRDNSKNTVYLQMNSLRAEDSAVYYCAKDEDGGSLLGHRGQGTLVTVSSTRGSGIQNPDPAVYQLRDSKSSDKSVCLFTDFDSQTNVSQSKDSDVYITDKTVLDMRSMDFKSNSAVAWSNKSDFACANAFNNSIIPEDTFFPSSDVPCDVKLVEKSFETDTNLNFQNLSVIGFRILLLKVAGFNLLMTLRLWSSRAKRSGSGVKQTLNFDLLKLAGDVESNPGPSRGHMTEYKPTVRLATRDDVPRAVRTLAAAFADYPATRHTVDPDRHIERVTELQELFLTRVGLDIGKVWVADDGAAVAVWTTPESVEAGAVFAEIGPRMAELSGSRLAAQQQMEGLLAPHRPKEPAWFLATVGVSPDHQGKGLGSAVVLPGVEAAERAGVPAFLETSAPRNLPFYERLGFTVTADVEVPEGPRTWCMTRKPGA

SEQ ID NO: 17643 - protein, 678 aa, Artificial Sequence
  Synthetic Polypeptide
MALPVTALLLPLALLLHAARPEVQLVESGGGLVQPGGSLRLSCAASGFNIKDTCIGWVRRAPGKEEELVAKICKYSGHTRYADSVKGRFTISADTSKNTAYLQMNSLRAEDTAVYYCAAVSVRDGHYNYWGQGTTVTVSSLESGGGGSFEVQLLESGGGLIQPGGSLRLSCAASGFTFSSHAMTWVRQAPGKGLEWVSAISGSGDYTHYADSVKGRFTISRDNSKNTVYLQMNSLRAEDSAVYYCAKDEDGGSLLGHRGQGTLVTVSSLEDLKNVFPPEVAVFEPSKAEIAHTQKATLVCLATGFYPDHVELSWWVNGKEVHSGVSTDPQPLKEQPALNDSRYCLSSRLRVSATFWQNPRNHFRCQVQFYGLSENDEWTQDRAKPVTQIVSAEAWGRADCGITSASYHQGVLSATILYEILLGKATLYAVLVSALVLMAMVKRKDSRGRAKRSGSGATNFSLLKQAGDVEENPGPTRGHMTEYKPTVRLATRDDVPRAVRTLAAAFADYPATRHTVDPDRHIERVTELQELFLTRVGLDIGKVWVADDGAAVAVWTTPESVEAGAVFAEIGPRMAELSGSRLAAQQQMEGLLAPHRPKEPAWFLATVGVSPDHQGKGLGSAVVLPGVEAAERAGVPAFLETSAPRNLPFYERLGFTVTADVEVPEGPRTWCMTRKPGA

SEQ ID NO: 17644 - protein, 701 aa, Artificial Sequence
  Synthetic Polypeptide
MALPVTALLLPLALLLHAARPEVQLVESGGGLVQPGGSLRLSCAASGFNIKDTCIGWVRRAPGKEEELVAKICKYSGHTRYADSVKGRFTISADTSKNTAYLQMNSLRAEDTAVYYCAAVSVRDGHYNYWGQGTTVTVSSLESGGGGSFEVQLLESGGGLIQPGGSLRLSCAASGFTFSSHAMTWVRQAPGKGLEWVSAISGSGDYTHYADSVKGRFTISRDNSKNTVYLQMNSLRAEDSAVYYCAKDEDGGSLLGHRGQGTLVTVSSTRGSGGGGSGGGGSGDGNEEMGGITQTPYKVSISGTTVILTCPQYPGSEILWQHNDKNIGGDEDDKNIGSDEDHLSLKEFSELEQSGYYVCYPRGSKPEDANFYLYLRARVCENCMEMDVMSVATIVIVDICITGGLLLLVYYWSKNRKAKAKPVTRGAGAGGRQRGQNKERPPPVPNPDYEPIRKGQRDLYSGLNQRRIRAKRSGSGVKQTLNFDLLKLAGDVESNPGPSRGHMTEYKPTVRLATRDDVPRAVRTLAAAFADYPATRHTVDPDRHIERVTELQELFLTRVGLDIGKVWVADDGAAVAVWTTPESVEAGAVFAEIGPRMAELSGSRLAAQQQMEGLLAPHRPKEPAWFLATVGVSPDHQGKGLGSAVVLPGVEAAERAGVPAFLETSAPRNLPFYERLGFTVTADVEVPEGPRTWCMTRKPGA

SEQ ID NO: 17645 - protein, 666 aa, Artificial Sequence
  Synthetic Polypeptide
MALPVTALLLPLALLLHAARPEVQLVESGGGLVQPGGSLRLSCAASGFNIKDTCIGWVRRAPGKEEELVAKICKYSGHTRYADSVKGRFTISADTSKNTAYLQMNSLRAEDTAVYYCAAVSVRDGHYNYWGQGTTVTVSSLESGGGGSFEVQLLESGGGLIQPGGSLRLSCAASGFTFSSHAMTWVRQAPGKGLEWVSAISGSGDYTHYADSVKGRFTISRDNSKNTVYLQMNSLRAEDSAVYYCAKDEDGGSLLGHRGQGTLVTVSSTRGSGGGGSGGGGSGFKIPIEELEDRVFVNCNTSITWVEGTVGTLLSDITRLDLGKRILDPRGIYRCNGTDIYKDKESTVQVHYRMCQSCVELDPATVAGIIVTDVIATLLLALGVFCFAGHETGRLSGAADTQALLRNDQVYQPLRDRDDAQYSHLGGNWARNKRAKRSGSGVKQTLNFDLLKLAGDVESNPGPSRGHMTEYKPTVRLATRDDVPRAVRTLAAAFADYPATRHTVDPDRHIERVTELQELFLTRVGLDIGKVWVADDGAAVAVWTTPESVEAGAVFAEIGPRMAELSGSRLAAQQQMEGLLAPHRPKEPAWFLATVGVSPDHQGKGLGSAVVLPGVEAAERAGVPAFLETSAPRNLPFYERLGFTVTADVEVPEGPRTWCMTRKPGA

SEQ ID NO: 17646 - protein, 676 aa, Artificial Sequence
  Synthetic Polypeptide
MALPVTALLLPLALLLHAARPEVQLVESGGGLVQPGGSLRLSCAASGFNIKDTCIGWVRRAPGKEEELVAKICKYSGHTRYADSVKGRFTISADTSKNTAYLQMNSLRAEDTAVYYCAAVSVRDGHYNYWGQGTTVTVSSLESGGGGSFEVQLLESGGGLIQPGGSLRLSCAASGFTFSSHAMTWVRQAPGKGLEWVSAISGSGDYTHYADSVKGRFTISRDNSKNTVYLQMNSLRAEDSAVYYCAKDEDGGSLLGHRGQGTLVTVSSTRGSGGGGSGGGGSGQSIKGNHLVKVYDYQEDGSVLLTCDAEAKNITWFKDGKMIGFLTEDKKKWNLGSNAKDPRGMYQCKGSQNKSKPLQVYYRMCQNCIELNAATISGFLFAEIVSIFVLAVGVYFIAGQDGVRQSRASDKQTLLPNDQLYQPLKDREDDQYSHLQGNQLRRNRAKRSGSGVKQTLNFDLLKLAGDVESNPGPSRGHMTEYKPTVRLATRDDVPRAVRTLAAAFADYPATRHTVDPDRHIERVTELQELFLTRVGLDIGKVWVADDGAAVAVWTTPESVEAGAVFAEIGPRMAELSGSRLAAQQQMEGLLAPHRPKEPAWFLATVGVSPDHQGKGLGSAVVLPGVEAAERAGVPAFLETSAPRNLPFYERLGFTVTADVEVPEGPRTWCMTRKPGA

SEQ ID NO: 17647 - protein, 659 aa, Artificial Sequence
  Synthetic Polypeptide
MALPVTALLLPLALLLHAARPEVQLVESGGGLVQPGGSLRLSCAASGFNIKDTCIGWVRRAPGKEEELVAKICKYSGHTRYADSVKGRFTISADTSKNTAYLQMNSLRAEDTAVYYCAAVSVRDGHYNYWGQGTTVTVSSLESGGGGSFEVQLLESGGGLIQPGGSLRLSCAASGFTFSSHAMTWVRQAPGKGLEWVSAISGSGDYTHYADSVKGRFTISRDNSKNTVYLQMNSLRAEDSAVYYCAKDEDGGSLLGHRGQGTLVTVSSTRGSGGGGSGGGGSGQSFGLLDPKLCYLLDGILFIYGVILTALFLRVKFSRSADAPAYQQGQNQLYNELNLGRREEYDVLDKRRGRDPEMGGKPQRRKNPQEGLYNELQKDKMAEAYSEIGMKGERRRGKGHDGLYQGLSTATKDTYDALHMQALPPRRAKRSGSGVKQTLNFDLLKLAGDVESNPGPSRGHMTEYKPTVRLATRDDVPRAVRTLAAAFADYPATRHTVDPDRHIERVTELQELFLTRVGLDIGKVWVADDGAAVAVWTTPESVEAGAVFAEIGPRMAELSGSRLAAQQQMEGLLAPHRPKEPAWFLATVGVSPDHQGKGLGSAVVLPGVEAAERAGVPAFLETSAPRNLPFYERLGFTVTADVEVPEGPRTWCMTRKPGA

SEQ ID NO: 17648 - protein, 867 aa, Artificial Sequence
  Synthetic Polypeptide
MALPVTALLLPLALLLHAARPEVQLVESGGGLVQPGGSLRLSCAASGFNIKDTCIGWVRRAPGKEEELVAKICKYSGHTRYADSVKGRFTISADTSKNTAYLQMNSLRAEDTAVYYCAAVSVRDGHYNYWGQGTTVTVSSLEGQPKANPTVTLFPPSSEELQANKATLVCLISDFYPGAVTVAWKADGSPVKAGVETTKPSKQSNNKYAASSYLSLTPEQWKSHRSYSCQVTHEGSTVEKTVAPTECSGRADCGFTSESYQQGVLSATILYEILLGKATLYAVLVSALVLMAMVKRKDSRGRAKRSGSGATNFSLLKQAGDVEENPGPTSMDWIWRILFLVGAATGAHSFEVQLLESGGGLIQPGGSLRLSCAASGFTFSSHAMTWVRQAPGKGLEWVSAISGSGDYTHYADSVKGRFTISRDNSKNTVYLQMNSLRAEDSAVYYCAKDEDGGSLLGHRGQGTLVTVSSTRASTKGPSVFPLAPSSKSTSGGTAALGCLVKDYFPEPVTVSWNSGALTSGVHTFPAVLQSSGLYSLSSVVTVPSSSLGTQTYICNVNHKPSNTKVDKRVEPKSCIPEDTFFPSPESSCDVKLVEKSFETDTNLNFQNLSVIGFRILLLKVAGFNLLMTLRLWSSRAKRSGSGVKQTLNFDLLKLAGDVESNPGPSRGHMTEYKPTVRLATRDDVPRAVRTLAAAFADYPATRHTVDPDRHIERVTELQELFLTRVGLDIGKVWVADDGAAVAVWTTPESVEAGAVFAEIGPRMAELSGSRLAAQQQMEGLLAPHRPKEPAWFLATVGVSPDHQGKGLGSAVVLPGVEAAERAGVPAFLETSAPRNLPFYERLGFTVTADVEVPEGPRTWCMTRKPGA

SEQ ID NO: 17649 - protein, 634 aa, Artificial Sequence; identical to SEQ ID NO: 17622
  Synthetic Polypeptide

SEQ ID NO: 17650 - protein, 662 aa, Artificial Sequence
  Synthetic Polypeptide
MALPVTALLLPLALLLHAARPEVQLVESGGGLVQPGGSLRLSCAASGFNIKDTCIGWVRRAPGKEEELVAKICKYSGHTRYADSVKGRFTISADTSKNTAYLQMNSLRAEDTAVYYCAAVSVRDGHYNYWGQGTTVTVSSLEGSGRADCGFTSESYQQGVLSATILYEILLGKATLYAVLVSALVLMAMVKRKDSRGRAKRSGSGATNFSLLKQAGDVEENPGPTSMDWIWRILFLVGAATGAHSFEVQLLESGGGLIQPGGSLRLSCAASGFTFSSHAMTWVRQAPGKGLEWVSAISGSGDYTHYADSVKGRFTISRDNSKNTVYLQMNSLRAEDSAVYYCAKDEDGGSLLGHRGQGTLVTVSSTRGSIPEDTFFPSPESSCDVKLVEKSFETDTNLNFQNLSVIGFRILLLKVAGFNLLMTLRLWSSRAKRSGSGVKQTLNFDLLKLAGDVESNPGPSRGHMTEYKPTVRLATRDDVPRAVRTLAAAFADYPATRHTVDPDRHIERVTELQELFLTRVGLDIGKVWVADDGAAVAVWTTPESVEAGAVFAEIGPRMAELSGSRLAAQQQMEGLLAPHRPKEPAWFLATVGVSPDHQGKGLGSAVVLPGVEAAERAGVPAFLETSAPRNLPFYERLGFTVTADVEVPEGPRTWCMTRKPGA

SEQ ID NO: 17651 - protein, 429 aa, Artificial Sequence
  Synthetic Polypeptide
MALPVTALLLPLALLLHAARPEVQLVESGGGLVQPGGSLRLSCAASGFNIKDTCIGWVRRAPGKEEELVAKICKYSGHTRYADSVKGRFTISADTSKNTAYLQMNSLRAEDTAVYYCAAVSVRDGHYNYWGQGTTVTVSSLEGSGRADCGFTSESYQQGVLSATILYEILLGKATLYAVLVSALVLMAMVKRKDSRGRAKRSGSGATNFSLLKQAGDVEENPGPTSMDWIWRILFLVGAATGAHSFEVQLLESGGGLIQPGGSLRLSCAASGFTFSSHAMTWVRQAPGKGLEWVSAISGSGDYTHYADSVKGRFTISRDNSKNTVYLQMNSLRAEDSAVYYCAKDEDGGSLLGHRGQGTLVTVSSTRGSIPEDTFFPSPESSCDVKLVEKSFETDTNLNFQNLSVIGFRILLLKVAGFNLLMTLRLWSS

SEQ ID NO: 17652 - protein, 671 aa, Artificial Sequence
  Synthetic Polypeptide
MALPVTALLLPLALLLHAARPEVQLVESGGGLVQPGGSLRLSCAASGFNIKDTCIGWVRRAPGKEEELVAKICKYSGHTRYADSVKGRFTISADTSKNTAYLQMNSLRAEDTAVYYCAAVSVRDGHYNYWGQGTTVTVSSLEDKTHTCPPCPAGRADCGFTSESYQQGVLSATILYEILLGKATLYAVLVSALVLMAMVKRKDSRGRAKRSGSGATNFSLLKQAGDVEENPGPTSMDWIWRILFLVGAATGAHSFEVQLLESGGGLIQPGGSLRLSCAASGFTFSSHAMTWVRQAPGKGLEWVSAISGSGDYTHYADSVKGRFTISRDNSKNTVYLQMNSLRAEDSAVYYCAKDEDGGSLLGHRGQGTLVTVSSTRGSIPEDTFFPSPESSCDVKLVEKSFETDTNLNFQNLSVIGFRILLLKVAGFNLLMTLRLWSSRAKRSGSGVKQTLNFDLLKLAGDVESNPGPSRGHMTEYKPTVRLATRDDVPRAVRTLAAAFADYPATRHTVDPDRHIERVTELQELFLTRVGLDIGKVWVADDGAAVAVWTTPESVEAGAVFAEIGPRMAELSGSRLAAQQQMEGLLAPHRPKEPAWFLATVGVSPDHQGKGLGSAVVLPGVEAAERAGVPAFLETSAPRNLPFYERLGFTVTADVEVPEGPRTWCMTRKPGA

SEQ ID NO: 17653 - protein, 671 aa, Artificial Sequence
  Synthetic Polypeptide
MALPVTALLLPLALLLHAARPEVQLVESGGGLVQPGGSLRLSCAASGFNIKDTCIGWVRRAPGKEEELVAKICKYSGHTRYADSVKGRFTISADTSKNTAYLQMNSLRAEDTAVYYCAAVSVRDGHYNYWGQGTTVTVSSLEGSGRADCGFTSESYQQGVLSATILYEILLGKATLYAVLVSALVLMAMVKRKDSRGRAKRSGSGATNFSLLKQAGDVEENPGPTSMDWIWRILFLVGAATGAHSFEVQLLESGGGLIQPGGSLRLSCAASGFTFSSHAMTWVRQAPGKGLEWVSAISGSGDYTHYADSVKGRFTISRDNSKNTVYLQMNSLRAEDSAVYYCAKDEDGGSLLGHRGQGTLVTVSSTRDKTHTCPPCPAIPEDTFFPSPESSCDVKLVEKSFETDTNLNFQNLSVIGFRILLLKVAGFNLLMTLRLWSSRAKRSGSGVKQTLNFDLLKLAGDVESNPGPSRGHMTEYKPTVRLATRDDVPRAVRTLAAAFADYPATRHTVDPDRHIERVTELQELFLTRVGLDIGKVWVADDGAAVAVWTTPESVEAGAVFAEIGPRMAELSGSRLAAQQQMEGLLAPHRPKEPAWFLATVGVSPDHQGKGLGSAVVLPGVEAAERAGVPAFLETSAPRNLPFYERLGFTVTADVEVPEGPRTWCMTRKPGA

SEQ ID NO: 17654 - protein, 680 aa, Artificial Sequence
  Synthetic Polypeptide
MALPVTALLLPLALLLHAARPEVQLVESGGGLVQPGGSLRLSCAASGFNIKDTCIGWVRRAPGKEEELVAKICKYSGHTRYADSVKGRFTISADTSKNTAYLQMNSLRAEDTAVYYCAAVSVRDGHYNYWGQGTTVTVSSLEDKTHTCPPCPAGRADCGFTSESYQQGVLSATILYEILLGKATLYAVLVSALVLMAMVKRKDSRGRAKRSGSGATNFSLLKQAGDVEENPGPTSMDWIWRILFLVGAATGAHSFEVQLLESGGGLIQPGGSLRLSCAASGFTFSSHAMTWVRQAPGKGLEWVSAISGSGDYTHYADSVKGRFTISRDNSKNTVYLQMNSLRAEDSAVYYCAKDEDGGSLLGHRGQGTLVTVSSTRDKTHTCPPCPAIPEDTFFPSPESSCDVKLVEKSFETDTNLNFQNLSVIGFRILLLKVAGFNLLMTLRLWSSRAKRSGSGVKQTLNFDLLKLAGDVESNPGPSRGHMTEYKPTVRLATRDDVPRAVRTLAAAFADYPATRHTVDPDRHIERVTELQELFLTRVGLDIGKVWVADDGAAVAVWTTPESVEAGAVFAEIGPRMAELSGSRLAAQQQMEGLLAPHRPKEPAWFLATVGVSPDHQGKGLGSAVVLPGVEAAERAGVPAFLETSAPRNLPFYERLGFTVTADVEVPEGPRTWCMTRKPGA

SEQ ID NO: 17655 - protein, 447 aa, Artificial Sequence
  Synthetic Polypeptide
MALPVTALLLPLALLLHAARPEVQLVESGGGLVQPGGSLRLSCAASGFNIKDTCIGWVRRAPGKEEELVAKICKYSGHTRYADSVKGRFTISADTSKNTAYLQMNSLRAEDTAVYYCAAVSVRDGHYNYWGQGTTVTVSSLEDKTHTCPPCPAGRADCGFTSESYQQGVLSATILYEILLGKATLYAVLVSALVLMAMVKRKDSRGRAKRSGSGATNFSLLKQAGDVEENPGPTSMDWIWRILFLVGAATGAHSFEVQLLESGGGLIQPGGSLRLSCAASGFTFSSHAMTWVRQAPGKGLEWVSAISGSGDYTHYADSVKGRFTISRDNSKNTVYLQMNSLRAEDSAVYYCAKDEDGGSLLGHRGQGTLVTVSSTRDKTHTCPPCPAIPEDTFFPSPESSCDVKLVEKSFETDTNLNFQNLSVIGFRILLLKVAGFNLLMTLRLWSS

SEQ ID NO: 17656 - protein, 438 aa, Artificial Sequence
  Synthetic Polypeptide
MALPVTALLLPLALLLHAARPEVQLVESGGGLVQPGGSLRLSCAASGFNIKDTCIGWVRRAPGKEEELVAKICKYSGHTRYADSVKGRFTISADTSKNTAYLQMNSLRAEDTAVYYCAAVSVRDGHYNYWGQGTTVTVSSLEGSGRADCGFTSESYQQGVLSATILYEILLGKATLYAVLVSALVLMAMVKRKDSRGRAKRSGSGATNFSLLKQAGDVEENPGPTSMDWIWRILFLVGAATGAHSFEVQLLESGGGLIQPGGSLRLSCAASGFTFSSHAMTWVRQAPGKGLEWVSAISGSGDYTHYADSVKGRFTISRDNSKNTVYLQMNSLRAEDSAVYYCAKDEDGGSLLGHRGQGTLVTVSSTRDKTHTCPPCPAIPEDTFFPSPESSCDVKLVEKSFETDTNLNFQNLSVIGFRILLLKVAGFNLLMTLRLWSS

SEQ ID NO: 17657 - protein, 889 aa, Artificial Sequence
  Synthetic Polypeptide
MALPVTALLLPLALLLHAARPEVQLVESGGGLVQPGGSLRLSCAASGFNIKDTCIGWVRRAPGKEEELVAKICKYSGHTRYADSVKGRFTISADTSKNTAYLQMNSLRAEDTAVYYCAAVSVRDGHYNYWGQGTTVTVSSLEGQPKANPTVTLFPPSSEELQANKATLVCLISDFYPGAVTVAWKADGSPVKAGVETTKPSKQSNNKYAASSYLSLTPEQWKSHRSYSCQVTHEGSTVEKTVAPTECSPIKTDVITMDPKDNCSKDANDTLLLQLTNTSAYYMYLLLLLKSVVYFAIITCCLLRRTAFCCNGEKSRAKRSGSGATNFSLLKQAGDVEENPGPTSMDWIWRILFLVGAATGAHSFEVQLLESGGGLIQPGGSLRLSCAASGFTFSSHAMTWVRQAPGKGLEWVSAISGSGDYTHYADSVKGRFTISRDNSKNTVYLQMNSLRAEDSAVYYCAKDEDGGSLLGHRGQGTLVTVSSTRASTKGPSVFPLAPSSKSTSGGTAALGCLVKDYFPEPVTVSWNSGALTSGVHTFPAVLQSSGLYSLSSVVTVPSSSLGTQTYICNVNHKPSNTKVDKRVEPKSCEVKTDSTDHVKPKETENTKQPSKSCHKPKAIVHTEKVNMMSLTVLGLRMLFAKTVAVNFLLTAKLFFLRAKRSGSGVKQTLNFDLLKLAGDVESNPGPSRGHMTEYKPTVRLATRDDVPRAVRTLAAAFADYPATRHTVDPDRHIERVTELQELFLTRVGLDIGKVWVADDGAAVAVWTTPESVEAGAVFAEIGPRMAELSGSRLAAQQQMEGLLAPHRPKEPAWFLATVGVSPDHQGKGLGSAVVLPGVEAAERAGVPAFLETSAPRNLPFYERLGFTVTADVEVPEGPRTWCMTRKPGA

SEQ ID NO: 17658 - protein, 656 aa, Artificial Sequence; identical to SEQ ID NO: 17620
  Synthetic Polypeptide

SEQ ID NO: 17659 - protein, 684 aa, Artificial Sequence
  Synthetic Polypeptide
MALPVTALLLPLALLLHAARPEVQLVESGGGLVQPGGSLRLSCAASGFNIKDTCIGWVRRAPGKEEELVAKICKYSGHTRYADSVKGRFTISADTSKNTAYLQMNSLRAEDTAVYYCAAVSVRDGHYNYWGQGTTVTVSSLEGSPIKTDVITMDPKDNCSKDANDTLLLQLTNTSAYYMYLLLLLKSVVYFAIITCCLLRRTAFCCNGEKSRAKRSGSGATNFSLLKQAGDVEENPGPTSMDWIWRILFLVGAATGAHSFEVQLLESGGGLIQPGGSLRLSCAASGFTFSSHAMTWVRQAPGKGLEWVSAISGSGDYTHYADSVKGRFTISRDNSKNTVYLQMNSLRAEDSAVYYCAKDEDGGSLLGHRGQGTLVTVSSTRGSEVKTDSTDHVKPKETENTKQPSKSCHKPKAIVHTEKVNMMSLTVLGLRMLFAKTVAVNFLLTAKLFFLRAKRSGSGVKQTLNFDLLKLAGDVESNPGPSRGHMTEYKPTVRLATRDDVPRAVRTLAAAFADYPATRHTVDPDRHIERVTELQELFLTRVGLDIGKVWVADDGAAVAVWTTPESVEAGAVFAEIGPRMAELSGSRLAAQQQMEGLLAPHRPKEPAWFLATVGVSPDHQGKGLGSAVVLPGVEAAERAGVPAFLETSAPRNLPFYERLGFTVTADVEVPEGPRTWCMTRKPGA

SEQ ID NO: 17660 - protein, 451 aa, Artificial Sequence
  Synthetic Polypeptide
MALPVTALLLPLALLLHAARPEVQLVESGGGLVQPGGSLRLSCAASGFNIKDTCIGWVRRAPGKEEELVAKICKYSGHTRYADSVKGRFTISADTSKNTAYLQMNSLRAEDTAVYYCAAVSVRDGHYNYWGQGTTVTVSSLEGSPIKTDVITMDPKDNCSKDANDTLLLQLTNTSAYYMYLLLLLKSVVYFAIITCCLLRRTAFCCNGEKSRAKRSGSGATNFSLLKQAGDVEENPGPTSMDWIWRILFLVGAATGAHSFEVQLLESGGGLIQPGGSLRLSCAASGFTFSSHAMTWVRQAPGKGLEWVSAISGSGDYTHYADSVKGRFTISRDNSKNTVYLQMNSLRAEDSAVYYCAKDEDGGSLLGHRGQGTLVTVSSTRGSEVKTDSTDHVKPKETENTKQPSKSCHKPKAIVHTEKVNMMSLTVLGLRMLFAKTVAVNFLLTAKLFFL

SEQ ID NO: 17661 - protein, 693 aa, Artificial Sequence
  Synthetic Polypeptide
MALPVTALLLPLALLLHAARPEVQLVESGGGLVQPGGSLRLSCAASGFNIKDTCIGWVRRAPGKEEELVAKICKYSGHTRYADSVKGRFTISADTSKNTAYLQMNSLRAEDTAVYYCAAVSVRDGHYNYWGQGTTVTVSSLEDKTHTCPPCPAPIKTDVITMDPKDNCSKDANDTLLLQLTNTSAYYMYLLLLLKSVVYFAIITCCLLRRTAFCCNGEKSRAKRSGSGATNFSLLKQAGDVEENPGPTSMDWIWRILFLVGAATGAHSFEVQLLESGGGLIQPGGSLRLSCAASGFTFSSHAMTWVRQAPGKGLEWVSAISGSGDYTHYADSVKGRFTISRDNSKNTVYLQMNSLRAEDSAVYYCAKDEDGGSLLGHRGQGTLVTVSSTRGSEVKTDSTDHVKPKETENTKQPSKSCHKPKAIVHTEKVNMMSLTVLGLRMLFAKTVAVNFLLTAKLFFLRAKRSGSGVKQTLNFDLLKLAGDVESNPGPSRGHMTEYKPTVRLATRDDVPRAVRTLAAAFADYPATRHTVDPDRHIERVTELQELFLTRVGLDIGKVWVADDGAAVAVWTTPESVEAGAVFAEIGPRMAELSGSRLAAQQQMEGLLAPHRPKEPAWFLATVGVSPDHQGKGLGSAVVLPGVEAAERAGVPAFLETSAPRNLPFYERLGFTVTADVEVPEGPRTWCMTRKPGA

SEQ ID NO: 17662 - protein, 693 aa, Artificial Sequence
  Synthetic Polypeptide
MALPVTALLLPLALLLHAARPEVQLVESGGGLVQPGGSLRLSCAASGFNIKDTCIGWVRRAPGKEEELVAKICKYSGHTRYADSVKGRFTISADTSKNTAYLQMNSLRAEDTAVYYCAAVSVRDGHYNYWGQGTTVTVSSLEGSPIKTDVITMDPKDNCSKDANDTLLLQLTNTSAYYMYLLLLLKSVVYFAIITCCLLRRTAFCCNGEKSRAKRSGSGATNFSLLKQAGDVEENPGPTSMDWIWRILFLVGAATGAHSFEVQLLESGGGLIQPGGSLRLSCAASGFTFSSHAMTWVRQAPGKGLEWVSAISGSGDYTHYADSVKGRFTISRDNSKNTVYLQMNSLRAEDSAVYYCAKDEDGGSLLGHRGQGTLVTVSSTRDKTHTCPPCPAEVKTDSTDHVKPKETENTKQPSKSCHKPKAIVHTEKVNMMSLTVLGLRMLFAKTVAVNFLLTAKLFFLRAKRSGSGVKQTLNFDLLKLAGDVESNPGPSRGHMTEYKPTVRLATRDDVPRAVRTLAAAFADYPATRHTVDPDRHIERVTELQELFLTRVGLDIGKVWVADDGAAVAVWTTPESVEAGAVFAEIGPRMAELSGSRLAAQQQMEGLLAPHRPKEPAWFLATVGVSPDHQGKGLGSAVVLPGVEAAERAGVPAFLETSAPRNLPFYERLGFTVTADVEVPEGPRTWCMTRKPGA

SEQ ID NO: 17663 - protein, 702 aa, Artificial Sequence
  Synthetic Polypeptide
MALPVTALLLPLALLLHAARPEVQLVESGGGLVQPGGSLRLSCAASGFNIKDTCIGWVRRAPGKEEELVAKICKYSGHTRYADSVKGRFTISADTSKNTAYLQMNSLRAEDTAVYYCAAVSVRDGHYNYWGQGTTVTVSSLEDKTHTCPPCPAPIKTDVITMDPKDNCSKDANDTLLLQLTNTSAYYMYLLLLLKSVVYFAIITCCLLRRTAFCCNGEKSRAKRSGSGATNFSLLKQAGDVEENPGPTSMDWIWRILFLVGAATGAHSFEVQLLESGGGLIQPGGSLRLSCAASGFTFSSHAMTWVRQAPGKGLEWVSAISGSGDYTHYADSVKGRFTISRDNSKNTVYLQMNSLRAEDSAVYYCAKDEDGGSLLGHRGQGTLVTVSSTRDKTHTCPPCPAEVKTDSTDHVKPKETENTKQPSKSCHKPKAIVHTEKVNMMSLTVLGLRMLFAKTVAVNFLLTAKLFFLRAKRSGSGVKQTLNFDLLKLAGDVESNPGPSRGHMTEYKPTVRLATRDDVPRAVRTLAAAFADYPATRHTVDPDRHIERVTELQELFLTRVGLDIGKVWVADDGAAVAVWTTPESVEAGAVFAEIGPRMAELSGSRLAAQQQMEGLLAPHRPKEPAWFLATVGVSPDHQGKGLGSAVVLPGVEAAERAGVPAFLETSAPRNLPFYERLGFTVTADVEVPEGPRTWCMTRKPGA

SEQ ID NO: 17664 - protein, 469 aa, Artificial Sequence
  Synthetic Polypeptide
MALPVTALLLPLALLLHAARPEVQLVESGGGLVQPGGSLRLSCAASGFNIKDTCIGWVRRAPGKEEELVAKICKYSGHTRYADSVKGRFTISADTSKNTAYLQMNSLRAEDTAVYYCAAVSVRDGHYNYWGQGTTVTVSSLEDKTHTCPPCPAPIKTDVITMDPKDNCSKDANDTLLLQLTNTSAYYMYLLLLLKSVVYFAIITCCLLRRTAFCCNGEKSRAKRSGSGATNFSLLKQAGDVEENPGPTSMDWIWRILFLVGAATGAHSFEVQLLESGGGLIQPGGSLRLSCAASGFTFSSHAMTWVRQAPGKGLEWVSAISGSGDYTHYADSVKGRFTISRDNSKNTVYLQMNSLRAEDSAVYYCAKDEDGGSLLGHRGQGTLVTVSSTRDKTHTCPPCPAEVKTDSTDHVKPKETENTKQPSKSCHKPKAIVHTEKVNMMSLTVLGLRMLFAKTVAVNFLLTAKLFFL

SEQ ID NO: 17665 - protein, 726 aa, Artificial Sequence
  Synthetic Polypeptide
MALPVTALLLPLALLLHAARPEVQLLESGGGLIQPGGSLRLSCAASGFTFSSHAMTWVRQAPGKGLEWVSAISGSGDYTHYADSVKGRFTISRDNSKNTVYLQMNSLRAEDSAVYYCAKDEDGGSLLGHRGQGTLVTVSSLESGGGGSFEVQLVESGGGLVQPGGSLRLSCAASGFSFSDFWMSWVRQAPGKGLEWVATISQAGSEKDYVDSVKGRFTISRDNAKKSLYLQMNSLRAEDTAVYYCASGVYSFDYRGQGTLVTVSSTREQKLISEEDLAKPTTTPAPRPPTPAPTIASQPLSLRPEACRPAAGGAVHTRGLDFACDIYIWAPLAGTCGVLLLSLVITLYCKRGRKKLLYIFKQPFMRPVQTTQEEDGCSCRFPEEEEGGCELRVKFSRSADAPAYQQGQNQLYNELNLGRREEYDVLDKRRGRDPEMGGKPRRKNPQEGLYNELQKDKMAEAYSEIGMKGERRRGKGHDGLYQGLSTATKDTYDALHMQALPPRSSGSGEGRGSLLTCGDVEENPGPHMTEYKPTVRLATRDDVPRAVRTLAAAFADYPATRHTVDPDRHIERVTELQELFLTRVGLDIGKVWVADDGAAVAVWTTPESVEAGAVFAEIGPRMAELSGSRLAAQQQMEGLLAPHRPKEPAWFLATVGVSPDHQGKGLGSAVVLPGVEAAERAGVPAFLETSAPRNLPFYERLGFTVTADVEVPEGPRTWCMTRKPGA

SEQ ID NO: 17666 - protein, 720 aa, Artificial Sequence
  Synthetic Polypeptide
MALPVTALLLPLALLLHAARPEVQLLESGGGLIQPGGSLRLSCAASGFTFSSHAMTWVRQAPGKGLEWVSAISGSGDYTHYADSVKGRFTISRDNSKNTVYLQMNSLRAEDSAVYYCAKDEDGGSLLGHRGQGTLVTVSSLESGGGGSFEVQLVESGGGLVQPGGSLRLSCAASGFSFSDFWMSWVRQAPGKGLEWVATISQAGSEKDYVDSVKGRFTISRDNAKKSLYLQMNSLRAEDTAVYYCASGVYSFDYRGQGTLVTVSSTREQKLISEEDLKIEVMYPPPYLDNEKSNGTIIHVKGKHLCPSPLFPGPSKPFWVLVVVGGVLACYSLLVTVAFIIFWVRSKRSRLLHSDYMNMTPRRPGPTRKHYQPYAPPRDFAAYRSRVKFSRSADAPAYQQGQNQLYNELNLGRREEYDVLDKRRGRDPEMGGKPRRKNPQEGLYNELQKDKMAEAYSEIGMKGERRRGKGHDGLYQGLSTATKDTYDALHMQALPPRSSGSGEGRGSLLTCGDVEENPGPHMTEYKPTVRLATRDDVPRAVRTLAAAFADYPATRHTVDPDRHIERVTELQELFLTRVGLDIGKVWVADDGAAVAVWTTPESVEAGAVFAEIGPRMAELSGSRLAAQQQMEGLLAPHRPKEPAWFLATVGVSPDHQGKGLGSAVVLPGVEAAERAGVPAFLETSAPRNLPFYERLGFTVTADVEVPEGPRTWCMTRKPGA

SEQ ID NO: 17667 - protein, 497 aa, Artificial Sequence
  Synthetic Polypeptide
MALPVTALLLPLALLLHAARPEVQLLESGGGLIQPGGSLRLSCAASGFTFSSHAMTWVRQAPGKGLEWVSAISGSGDYTHYADSVKGRFTISRDNSKNTVYLQMNSLRAEDSAVYYCAKDEDGGSLLGHRGQGTLVTVSSLESGGGGSFEVQLVESGGGLVQPGGSLRLSCAASGFSFSDFWMSWVRQAPGKGLEWVATISQAGSEKDYVDSVKGRFTISRDNAKKSLYLQMNSLRAEDTAVYYCASGVYSFDYRGQGTLVTVSSTREQKLISEEDLKIEVMYPPPYLDNEKSNGTIIHVKGKHLCPSPLFPGPSKPFWVLVVVGGVLACYSLLVTVAFIIFWVRSKRSRLLHSDYMNMTPRRPGPTRKHYQPYAPPRDFAAYRSRVKFSRSADAPAYQQGQNQLYNELNLGRREEYDVLDKRRGRDPEMGGKPRRKNPQEGLYNELQKDKMAEAYSEIGMKGERRRGKGHDGLYQGLSTATKDTYDALHMQALPPR

SEQ ID NO: 17668 - protein, 503 aa, Artificial Sequence
  Synthetic Polypeptide
MALPVTALLLPLALLLHAARPEVQLLESGGGLIQPGGSLRLSCAASGFTFSSHAMTWVRQAPGKGLEWVSAISGSGDYTHYADSVKGRFTISRDNSKNTVYLQMNSLRAEDSAVYYCAKDEDGGSLLGHRGQGTLVTVSSLESGGGGSFEVQLVESGGGLVQPGGSLRLSCAASGFSFSDFWMSWVRQAPGKGLEWVATISQAGSEKDYVDSVKGRFTISRDNAKKSLYLQMNSLRAEDTAVYYCASGVYSFDYRGQGTLVTVSSTREQKLISEEDLAKPTTTPAPRPPTPAPTIASQPLSLRPEACRPAAGGAVHTRGLDFACDIYIWAPLAGTCGVLLLSLVITLYCKRGRKKLLYIFKQPFMRPVQTTQEEDGCSCRFPEEEEGGCELRVKFSRSADAPAYQQGQNQLYNELNLGRREEYDVLDKRRGRDPEMGGKPRRKNPQEGLYNELQKDKMAEAYSEIGMKGERRRGKGHDGLYQGLSTATKDTYDALHMQALPPR

SEQ ID NO: 17669 - protein, 504 aa, Artificial Sequence
  Synthetic Polypeptide
MALPVTALLLPLALLLHAARPEVQLVESGGGLVQPGGSLRLSCAASGFSFSDFWMSWVRQAPGKGLEWVATISQAGSEKDYVDSVKGRFTISRDNAKKSLYLQMNSLRAEDTAVYYCASGVYSFDYRGQGTLVTVSSLESGGGGSFEEVQLLESGGGLIQPGGSLRLSCAASGFTFSSHAMTWVRQAPGKGLEWVSAISGSGDYTHYADSVKGRFTISRDNSKNTVYLQMNSLRAEDSAVYYCAKDEDGGSLLGHRGQGTLVTVSSTREQKLISEEDLAKPTTTPAPRPPTPAPTIASQPLSLRPEACRPAAGGAVHTRGLDFACDIYIWAPLAGTCGVLLLSLVITLYCKRGRKKLLYIFKQPFMRPVQTTQEEDGCSCRFPEEEEGGCELRVKFSRSADAPAYQQGQNQLYNELNLGRREEYDVLDKRRGRDPEMGGKPRRKNPQEGLYNELQKDKMAEAYSEIGMKGERRRGKGHDGLYQGLSTATKDTYDALHMQALPPR

SEQ ID NO: 17670 - protein, 916 aa, Artificial Sequence
  Synthetic Polypeptide
MALPVTALLLPLALLLHAARPEVQLLESGGGLIQPGGSLRLSCAASGFTFSSHAMTWVRQAPGKGLEWVSAISGSGDYTHYADSVKGRFTISRDNSKNTVYLQMNSLRAEDSAVYYCAKDEDGGSLLGHRGQGTLVTVSSLESGGGGSFEVQLVESGGGLVQPGGSLRLSCAASGFSFSDFWMSWVRQAPGKGLEWVATISQAGSEKDYVDSVKGRFTISRDNAKKSLYLQMNSLRAEDTAVYYCASGVYSFDYRGQGTLVTVSSTREQKLISEEDLAKPTTTPAPRPPTPAPTIASQPLSLRPEACRPAAGGAVHTRGLDFACDIYIWAPLAGTCGVLLLSLVITLYCGRARVKFSRSADAPAYQQGQNQLYNELNLGRREEYDVLDKRRGRDPEMGGKPRRKNPQEGLYNELQKDKMAEAYSEIGMKGERRRGKGHDGLYQGLSTATKDTYDALHMQALPPRSRGSGATNFSLLKQAGDVEENPGPGIHMATYEVLCEVARKLGTDDREVVLFLLNVFIPQPTLAQLIGALRALKEEGRLTFPLLAECLFRAGRRDLLRDLLHLDPRFLERHLAGTMSYFSPYQLTVLHVDGELCARDIRSLIFLSKDTIGSRSTPQTFLHWVYCMENLDLLGPTDVDALMSMLRSLSRVDLQRQVQTLMGLHLSGPSHSQHYRHTPLETDFYDYKDDDDKTSGSGEGRGSLLTCGDVEENPGPHMTEYKPTVRLATRDDVPRAVRTLAAAFADYPATRHTVDPDRHIERVTELQELFLTRVGLDIGKVWVADDGAAVAVWTTPESVEAGAVFAEIGPRMAELSGSRLAAQQQMEGLLAPHRPKEPAWFLATVGVSPDHQGKGLGSAVVLPGVEAAERAGVPAFLETSAPRNLPFYERLGFTVTADVEVPEGPRTWCMTRKPGA

SEQ ID NO: 17671 - protein, 861 aa, Artificial Sequence
  Synthetic Polypeptide
MALPVTALLLPLALLLHAARPEVQLLESGGGLIQPGGSLRLSCAASGFTFSSHAMTWVRQAPGKGLEWVSAISGSGDYTHYADSVKGRFTISRDNSKNTVYLQMNSLRAEDSAVYYCAKDEDGGSLLGHRGQGTLVTVSSLEIQNPDPAVYQLRDSKSSDKSVCLFTDFDSQTNVSQSKDSDVYITDKCVLDMRSMDFKSNSAVAWSNKSDFACANAFNNSIIPEDTFFPSSDVPCDVKLVEKSFETDTNLNFQNLSVIGFRILLLKVAGFNLLMTLRLWSSRAKRSGSGVKQTLNFDLLKLAGDVESNPGPTSMDWIWRILFLVGAATGAHSFEVQLVESGGGLVQPGGSLRLSCAASGFSFSDFWMSWVRQAPGKGLEWVATISQAGSEKDYVDSVKGRFTISRDNAKKSLYLQMNSLRAEDTAVYYCASGVYSFDYRGQGTLVTVSSTREDLKNVFPPEVAVFEPSKAEIAHTQKATLVCLATGFYPDHVELSWWVNGKEVHSGVCTDPQPLKEQPALNDSRYCLSSRLRVSATFWQNPRNHFRCQVQFYGLSENDEWTQDRAKPVTQIVSAEAWGRADCGITSASYHQGVLSATILYEILLGKATLYAVLVSALVLMAMVKRKDSRGRAKRSGSGATNFSLLKQAGDVEENPGPSRGHMTEYKPTVRLATRDDVPRAVRTLAAAFADYPATRHTVDPDRHIERVTELQELFLTRVGLDIGKVWVADDGAAVAVWTTPESVEAGAVFAEIGPRMAELSGSRLAAQQQMEGLLAPHRPKEPAWFLATVGVSPDHQGKGLGSAVVLPGVEAAERAGVPAFLETSAPRNLPFYERLGFTVTADVEVPEGPRTWCMTRKPGA

SEQ ID NO: 17672 - protein, 860 aa, Artificial Sequence
  Synthetic Polypeptide
MALPVTALLLPLALLLHAARPEVQLLESGGGLIQPGGSLRLSCAASGFTFSSHAMTWVRQAPGKGLEWVSAISGSGDYTHYADSVKGRFTISRDNSKNTVYLQMNSLRAEDSAVYYCAKDEDGGSLLGHRGQGTLVTVSSLEDLKNVFPPEVAVFEPSKAEIAHTQKATLVCLATGFYPDHVELSWWVNGKEVHSGVCTDPQPLKEQPALNDSRYCLSSRLRVSATFWQNPRNHFRCQVQFYGLSENDEWTQDRAKPVTQIVSAEAWGRADCGITSASYHQGVLSATILYEILLGKATLYAVLVSALVLMAMVKRKDSRGRAKRSGSGATNFSLLKQAGDVEENPGPTSMDWIWRILFLVGAATGAHSFEVQLVESGGGLVQPGGSLRLSCAASGFSFSDFWMSWVRQAPGKGLEWVATISQAGSEKDYVDSVKGRFTISRDNAKKSLYLQMNSLRAEDTAVYYCASGVYSFDYRGQGTLVTVSSTRIQNPDPAVYQLRDSKSSDKSVCLFTDFDSQTNVSQSKDSDVYITDKCVLDMRSMDFKSNSAVAWSNKSDFACANAFNNSIIPEDTFFPSSDVPCDVKLVEKSFETDTNLNFQNLSVIGFRILLLKVAGFNLLMTLRLWSSRAKRSGSGVKQTLNFDLLKLAGDVESNPGPSRGHMTEYKPTVRLATRDDVPRAVRTLAAAFADYPATRHTVDPDRHIERVTELQELFLTRVGLDIGKVWVADDGAAVAVWTTPESVEAGAVFAEIGPRMAELSGSRLAAQQQMEGLLAPHRPKEPAWFLATVGVSPDHQGKGLGSAVVLPGVEAAERAGVPAFLETSAPRNLPFYERLGFTVTADVEVPEGPRTWCMTRKPGA

SEQ ID NO: 17673 - protein, 627 aa, Artificial Sequence
  Synthetic Polypeptide
MALPVTALLLPLALLLHAARPEVQLLESGGGLIQPGGSLRLSCAASGFTFSSHAMTWVRQAPGKGLEWVSAISGSGDYTHYADSVKGRFTISRDNSKNTVYLQMNSLRAEDSAVYYCAKDEDGGSLLGHRGQGTLVTVSSLEDLKNVFPPEVAVFEPSEAEISHTQKATLVCLATGFYPDHVELSWWVNGKEVHSGVCTDPQPLKEQPALNDSRYCLSSRLRVSATFWQNPRNHFRCQVQFYGLSENDEWTQDRAKPVTQIVSAEAWGRADCGFTSESYQQGVLSATILYEILLGKATLYAVLVSALVLMAMVKRKDSRGRAKRSGSGATNFSLLKQAGDVEENPGPTSMDWIWRILFLVGAATGAHSFEVQLVESGGGLVQPGGSLRLSCAASGFSFSDFWMSWVRQAPGKGLEWVATISQAGSEKDYVDSVKGRFTISRDNAKKSLYLQMNSLRAEDTAVYYCASGVYSFDYRGQGTLVTVSSTRIQNPDPAVYQLRDSKSSDKSVCLFTDFDSQTNVSQSKDSDVYITDKCVLDMRSMDFKSNSAVAWSNKSDFACANAFNNSIIPEDTFFPSPESSCDVKLVEKSFETDTNLNFQNLSVIGFRILLLKVAGFNLLMTLRLWSS

SEQ ID NO: 17674 - protein, 852 aa, Artificial Sequence
  Synthetic Polypeptide
MALPVTALLLPLALLLHAARPEVQLLESGGGLIQPGGSLRLSCAASGFTFSSHAMTWVRQAPGKGLEWVSAISGSGDYTHYADSVKGRFTISRDNSKNTVYLQMNSLRAEDSAVYYCAKDEDGGSLLGHRGQGTLVTVSSLEDLKNVFPPEVAVFEPSEAEISHTQKATLVCLATGFYPDHVELSWWVNGKEVHSGVCTDPQPLKEQPALNDSRYCLSSRLRVSATFWQNPRNHFRCQVQFYGLSENDEWTQDRAKPVTQIVSAEAWGRADCGFTSESYQQGVLSATILYEILLGKATLYAVLVSALVLMAMVKRKDSRGRAKRSGSGATNFSLLKQAGDVEENPGPTSMDWIWRILFLVGAATGAHSFEVQLVESGGGLVQPGGSLRLSCAASGFSFSDFWMSWVRQAPGKGLEWVATISQAGSEKDYVDSVKGRFTISRDNAKKSLYLQMNSLRAEDTAVYYCASGVYSFDYRGQGTLVTVSSTRIQNPDPAVYQLRDSKSSDKSVCLFTDFDSQTNVSQSKDSDVYITDKCVLDMRSMDFKSNSAVAWSNKSDFACANAFNNSIIPEDTFFPSPESSCDVKLVEKSFETDTNLNFQNLSVIGFRILLLKVAGFNLLMTLRLWSSRAKRSGSGVKQTLNFDLLKLAGDVESNPGPSRGGIHTMATYEVLCEVARKLGTDDREVVLFLLNVFIPQPTLAQLIGALRALKEEGRLTFPLLAECLFRAGRRDLLRDLLHLDPRFLERHLAGTMSYFSPYQLTVLHVDGELCARDIRSLIFLSKDTIGSRSTPQTFLHWVYCMENLDLLGPTDVDALMSMLRSLSRVDLQRQVQTLMGLHLSGPSHSQHYRHTP

SEQ ID NO: 17675 - protein, 631 aa, Artificial Sequence
  Synthetic Polypeptide
MALPVTALLLPLALLLHAARPEVQLLESGGGLIQPGGSLRLSCAASGFTFSSHAMTWVRQAPGKGLEWVSAISGSGDYTHYADSVKGRFTISRDNSKNTVYLQMNSLRAEDSAVYYCAKDEDGGSLLGHRGQGTLVTVSSLEIQNPDPAVYQLRDSKSSDKSVCLFTDFDSQTNVSQSKDSDVYITDKCVLDMRSMDFKSNSAVAWSNKSDFACANAFNNSIIPEDTFFPSPESSCDVKLVEKSFETDTNLNFQNLSVIGFRILLLKVAGFNLLMTLRLWSSRAKRSGSGVKQTLNFDLLKLAGDVESNPGPTSMDWIWRILFLVGAATGAHSFEVQLVESGGGLVQPGGSLRLSCAASGFSFSDFWMSWVRQAPGKGLEWVATISQAGSEKDYVDSVKGRFTISRDNAKKSLYLQMNSLRAEDTAVYYCASGVYSFDYRGQGTLVTVSSTREDLKNVFPPEVAVFEPSEAEISHTQKATLVCLATGFYPDHVELSWWVNGKEVHSGVCTDPQPLKEQPALNDSRYCLSSRLRVSATFWQNPRNHFRCQVQFYGLSENDEWTQDRAKPVTQIVSAEAWGRADCGFTSESYQQGVLSATILYEILLGKATLYAVLVSALVLMAMVKRKDSRG

SEQ ID NO: 17676 - protein, 853 aa, Artificial Sequence
  Synthetic Polypeptide
MALPVTALLLPLALLLHAARPEVQLLESGGGLIQPGGSLRLSCAASGFTFSSHAMTWVRQAPGKGLEWVSAISGSGDYTHYADSVKGRFTISRDNSKNTVYLQMNSLRAEDSAVYYCAKDEDGGSLLGHRGQGTLVTVSSLEIQNPDPAVYQLRDSKSSDKSVCLFTDFDSQTNVSQSKDSDVYITDKCVLDMRSMDFKSNSAVAWSNKSDFACANAFNNSIIPEDTFFPSPESSCDVKLVEKSFETDTNLNFQNLSVIGFRILLLKVAGFNLLMTLRLWSSRAKRSGSGVKQTLNFDLLKLAGDVESNPGPTSMDWIWRILFLVGAATGAHSFEVQLVESGGGLVQPGGSLRLSCAASGFSFSDFWMSWVRQAPGKGLEWVATISQAGSEKDYVDSVKGRFTISRDNAKKSLYLQMNSLRAEDTAVYYCASGVYSFDYRGQGTLVTVSSTREDLKNVFPPEVAVFEPSEAEISHTQKATLVCLATGFYPDHVELSWWVNGKEVHSGVCTDPQPLKEQPALNDSRYCLSSRLRVSATFWQNPRNHFRCQVQFYGLSENDEWTQDRAKPVTQIVSAEAWGRADCGFTSESYQQGVLSATILYEILLGKATLYAVLVSALVLMAMVKRKDSRGRAKRSGSGATNFSLLKQAGDVEENPGPSRGGIHTMATYEVLCEVARKLGTDDREVVLFLLNVFIPQPTLAQLIGALRALKEEGRLTFPLLAECLFRAGRRDLLRDLLHLDPRFLERHLAGTMSYFSPYQLTVLHVDGELCARDIRSLIFLSKDTIGSRSTPQTFLHWVYCMENLDLLGPTDVDALMSMLRSLSRVDLQRQVQTLMGLHLSGPSHSQHYRHTP

SEQ ID NO: 17677 - protein, 900 aa, Artificial Sequence
  Synthetic Polypeptide
MALPVTALLLPLALLLHAARPLEGKPIPNPLLGLDSTGSGEDLKNVFPPEVAVFEPSKAEIAHTQKATLVCLATGFYPDHVELSWWVNGKEVHSGVCTDPQPLKEQPALNDSRYCLSSRLRVSATFWQNPRNHFRCQVQFYGLSENDEWTQDRAKPVTQIVSAEAWGRADCGITSASYHQGVLSATILYEILLGKATLYAVLVSALVLMAMVKRKDSRGRAKRSGSGATNFSLLKQAGDVEENPGPTSMALPVTALLLPLALLLHAARPEVQLLESGGGLIQPGGSLRLSCAASGFTFSSHAMTWVRQAPGKGLEWVSAISGSGDYTHYADSVKGRFTISRDNSKNTVYLQMNSLRAEDSAVYYCAKDEDGGSLLGHRGQGTLVTVSSLESGGGGSFEVQLVESGGGLVQPGGSLRLSCAASGFSFSDFWMSWVRQAPGKGLEWVATISQAGSEKDYVDSVKGRFTISRDNAKKSLYLQMNSLRAEDTAVYYCASGVYSFDYRGQGTLVTVSSTREQKLISEEDGSGIQNPDPAVYQLRDSKSSDKSVCLFTDFDSQTNVSQSKDSDVYITDKCVLDMRSMDFKSNSAVAWSNKSDFACANAFNNSIIPEDTFFPSSDVPCDVKLVEKSFETDTNLNFQNLSVIGFRILLLKVAGFNLLMTLRLWSSRAKRSGSGVKQTLNFDLLKLAGDVESNPGPSRGHMTEYKPTVRLATRDDVPRAVRTLAAAFADYPATRHTVDPDRHIERVTELQELFLTRVGLDIGKVWVADDGAAVAVWTTPESVEAGAVFAEIGPRMAELSGSRLAAQQQMEGLLAPHRPKEPAWFLATVGVSPDHQGKGLGSAVVLPGVEAAERAGVPAFLETSAPRNLPFYERLGFTVTADVEVPEGPRTWCMTRKPGA

SEQ ID NO: 17678 - protein, 901 aa, Artificial Sequence
  Synthetic Polypeptide
MALPVTALLLPLALLLHAARPLEQKLISEEDLGSGDRPDPAVYQLRDSKSSDKSVCLFTDFDSQTNVSQSKDSDVYITDKCVLDMRSMDFKSNSAVAWSNKSDFACANAFNNSIIPEDTFFPSPESSCDVKLVEKSFETDTNLNFQNLSVIGFRILLLKVAGFNLLMTLRLWSSSSRAKRSGSGVKQTLNFDLLKLAGDVESNPGPTSMALPVTALLLPLALLLHAARPEVQLLESGGGLIQPGGSLRLSCAASGFTFSSHAMTWVRQAPGKGLEWVSAISGSGDYTHYADSVKGRFTISRDNSKNTVYLQMNSLRAEDSAVYYCAKDEDGGSLLGHRGQGTLVTVSSLESGGGGSFEVQLVESGGGLVQPGGSLRLSCAASGFSFSDFWMSWVRQAPGKGLEWVATISQAGSEKDYVDSVKGRFTISRDNAKKSLYLQMNSLRAEDTAVYYCASGVYSFDYRGQGTLVTVSSTRGKPIPNPLLGLDSTGSGEDLKNVFPPEVAVFEPSEAEISHTQKATLVCLATGFYPDHVELSWWVNGKEVHSGVCTDPQPLKEQPALNDSRYCLSSRLRVSATFWQNPRNHFRCQVQFYGLSENDEWTQDRAKPVTQIVSAEAWGRADCGFTSESYQQGVLSATILYEILLGKATLYAVLVSALVLMAMVKRKDSRGRAKRSGSGATNFSLLKQAGDVEENPGPSRGHMTEYKPTVRLATRDDVPRAVRTLAAAFADYPATRHTVDPDRHIERVTELQELFLTRVGLDIGKVWVADDGAAVAVWTTPESVEAGAVFAEIGPRMAELSGSRLAAQQQMEGLLAPHRPKEPAWFLATVGVSPDHQGKGLGSAVVLPGVEAAERAGVPAFLETSAPRNLPFYERLGFTVTADVEVPEGPRTWCMTRKPGA

SEQ ID NO: 17679 - protein, 860 aa, Artificial Sequence
  Synthetic Polypeptide
MALPVTALLLPLALLLHAARPEVQLLESGGGLIQPGGSLRLSCAASGFTFSSHAMTWVRQAPGKGLEWVSAISGSGDYTHYADSVKGRFTISRDNSKNTVYLQMNSLRAEDSAVYYCAKDEDGGSLLGHRGQGTLVTVSSLEDLKNVFPPEVAVFEPSEAEISHTQKATLVCLATGFYPDHVELSWWVNGKEVHSGVSTDPQPLKEQPALNDSRYCLSSRLRVSATFWQNPRNHFRCQVQFYGLSENDEWTQDRAKPVTQIVSAEAWGRADCGFTSESYQQGVLSATILYEILLGKATLYAVLVSALVLMAMVKRKDSRGRAKRSGSGATNFSLLKQAGDVEENPGPTSMDWIWRILFLVGAATGAHSFEVQLVESGGGLVQPGGSLRLSCAASGFSFSDFWMSWVRQAPGKGLEWVATISQAGSEKDYVDSVKGRFTISRDNAKKSLYLQMNSLRAEDTAVYYCASGVYSFDYRGQGTLVTVSSTRIQNPDPAVYQLRDSKSSDKSVCLFTDFDSQTNVSQSKDSDVYITDKTVLDMRSMDFKSNSAVAWSNKSDFACANAFNNSIIPEDTFFPSPESSCDVKLVEKSFETDTNLNFQNLSVIGFRILLLKVAGFNLLMTLRLWSSRAKRSGSGVKQTLNFDLLKLAGDVESNPGPSRGHMTEYKPTVRLATRDDVPRAVRTLAAAFADYPATRHTVDPDRHIERVTELQELFLTRVGLDIGKVWVADDGAAVAVWTTPESVEAGAVFAEIGPRMAELSGSRLAAQQQMEGLLAPHRPKEPAWFLATVGVSPDHQGKGLGSAVVLPGVEAAERAGVPAFLETSAPRNLPFYERLGFTVTADVEVPEGPRTWCMTRKPGA

SEQ ID NO: 17680 - protein, 942 aa, Artificial Sequence
  Synthetic Polypeptide
MALPVTALLLPLALLLHAARPEVQLLESGGGLIQPGGSLRLSCAASGFTFSSHAMTWVRQAPGKGLEWVSAISGSGDYTHYADSVKGRFTISRDNSKNTVYLQMNSLRAEDSAVYYCAKDEDGGSLLGHRGQGTLVTVSSLEDLKNVFPPEVAVFEPSEAEISHTQKATLVCLATGFYPDHVELSWWVNGKEVHSGVSTDPQPLKEQPALNDSRYCLSSRLRVSATFWQNPRNHFRCQVQFYGLSENDEWTQDRAKPVTQIVSAEAWGRADCGFTSESYQQGVLSATILYEILLGKATLYAVLVSALVLMAMVKRKDSRGRAKRSGSGATNFSLLKQAGDVEENPGPTSMDWIWRILFLVGAATGAHSFEVQLVESGGGLVQPGGSLRLSCAASGFSFSDFWMSWVRQAPGKGLEWVATISQAGSEKDYVDSVKGRFTISRDNAKKSLYLQMNSLRAEDTAVYYCASGVYSFDYRGQGTLVTVSSTREQKLISEEDGSGTPFPSLAPPIMLLVDGKQQMVVVCLVLDVAPPGLDSPIWFSAGNGSALDAFTYGPSPATDGTWTNLAHLSLPSEELASWEPLVCHTGPGAEGHSRSTQPMHLSGEASTARTCPQEPLRGTPGGALWLGVLRLLLFKLLLFDLLLTCSCLCDPAGPLPSPATTTRLRALGSHRLHPATETGGREATSSPRPQPRDRRWGDTPPGRKPGSPVRAKRSGSGVKQTLNFDLLKLAGDVESNPGPSRGHMTEYKPTVRLATRDDVPRAVRTLAAAFADYPATRHTVDPDRHIERVTELQELFLTRVGLDIGKVWVADDGAAVAVWTTPESVEAGAVFAEIGPRMAELSGSRLAAQQQMEGLLAPHRPKEPAWFLATVGVSPDHQGKGLGSAVVLPGVEAAERAGVPAFLETSAPRNLPFYERLGFTVTADVEVPEGPRTWCMTRKPGA

SEQ ID NO: 17681 - protein, 955 aa, Artificial Sequence
  Synthetic Polypeptide
MALPVTALLLPLALLLHAARPLEDLKNVFPPEVAVFEPSEAEISHTQKATLVCLATGFYPDHVELSWWVNGKEVHSGVSTDPQPLKEQPALNDSRYCLSSRLRVSATFWQNPRNHFRCQVQFYGLSENDEWTQDRAKPVTQIVSAEAWGRADCGFTSESYQQGVLSATILYEILLGKATLYAVLVSALVLMAMVKRKDSRGRAKRSGSGATNFSLLKQAGDVEENPGPTSMALPVTALLLPLALLLHAARPEVQLLESGGGLIQPGGSLRLSCAASGFTFSSHAMTWVRQAPGKGLEWVSAISGSGDYTHYADSVKGRFTISRDNSKNTVYLQMNSLRAEDSAVYYCAKDEDGGSLLGHRGQGTLVTVSSLESGGGGSFEVQLVESGGGLVQPGGSLRLSCAASGFSFSDFWMSWVRQAPGKGLEWVATISQAGSEKDYVDSVKGRFTISRDNAKKSLYLQMNSLRAEDTAVYYCASGVYSFDYRGQGTLVTVSSTREQKLISEEDLGSGTPFPSLAPPIMLLVDGKQQMVVVCLVLDVAPPGLDSPIWFSAGNGSALDAFTYGPSPATDGTWTNLAHLSLPSEELASWEPLVCHTGPGAEGHSRSTQPMHLSGEASTARTCPQEPLRGTPGGALWLGVLRLLLFKLLLFDLLLTCSCLCDPAGPLPSPATTTRLRALGSHRLHPATETGGREATSSPRPQPRDRRWGDTPPGRKPGSPVRAKRSGSGVKQTLNFDLLKLAGDVESNPGPSRSRGHMTEYKPTVRLATRDDVPRAVRTLAAAFADYPATRHTVDPDRHIERVTELQELFLTRVGLDIGKVWVADDGAAVAVWTTPESVEAGAVFAEIGPRMAELSGSRLAAQQQMEGLLAPHRPKEPAWFLATVGVSPDHQGKGLGSAVVLPGVEAAERAGVPAFLETSAPRNLPFYERLGFTVTADVEVPEGPRTWCMTRKPGA

SEQ ID NO: 17682 - protein, 897 aa, Artificial Sequence
  Synthetic Polypeptide
MALPVTALLLPLALLLHAARPEVQLLESGGGLIQPGGSLRLSCAASGFTFSSHAMTWVRQAPGKGLEWVSAISGSGDYTHYADSVKGRFTISRDNSKNTVYLQMNSLRAEDSAVYYCAKDEDGGSLLGHRGQGTLVTVSSLEGKPIPNPLLGLDSTGSGDKQLDADVSPKPTIFLPSIAETKLQKAGTYLCLLEKFFPDVIKIHWQEKKSNTILGSQEGNTMKTNDTYMKFSWLTVPEKSLDKEHRCIVRHENNKNGVDQEIIFPPIKTDVITMDPKDNCSKDANDTLLLQLTNTSAYYMYLLLLLKSVVYFAIITCCLLRRTAFCCNGEKSRAKRSGSGATNFSLLKQAGDVEENPGPTSMDWIWRILFLVGAATGAHSFEVQLVESGGGLVQPGGSLRLSCAASGFSFSDFWMSWVRQAPGKGLEWVATISQAGSEKDYVDSVKGRFTISRDNAKKSLYLQMNSLRAEDTAVYYCASGVYSFDYRGQGTLVTVSSTREQKLISEEDGSGSQPHTKPSVFVMKNGTNVACLVKEFYPKDIRINLVSSKKITEFDPAIVISPSGKYNAVKLGKYEDSNSVTCSVQHDNKTVHSTDFEVKTDSTDHVKPKETENTKQPSKSCHKPKAIVHTEKVNMMSLTVLGLRMLFAKTVAVNFLLTAKLFFLRAKRSGSGVKQTLNFDLLKLAGDVESNPGPSRGHMTEYKPTVRLATRDDVPRAVRTLAAAFADYPATRHTVDPDRHIERVTELQELFLTRVGLDIGKVWVADDGAAVAVWTTPESVEAGAVFAEIGPRMAELSGSRLAAQQQMEGLLAPHRPKEPAWFLATVGVSPDHQGKGLGSAVVLPGVEAAERAGVPAFLETSAPRNLPFYERLGFTVTADVEVPEGPRTWCMTRKPGA

SEQ ID NO: 17683 - protein, 635 aa, Artificial Sequence
  Synthetic Polypeptide
MALPVTALLLPLALLLHAARPEVQLLESGGGLIQPGGSLRLSCAASGFTFSSHAMTWVRQAPGKGLEWVSAISGSGDYTHYADSVKGRFTISRDNSKNTVYLQMNSLRAEDSAVYYCAKDEDGGSLLGHRGQGTLVTVSSLESQPHTKPSVFVMKNGTNVACLVKEFYPKDIRINLVSSKKITEFDPAIVISPSGKYNAVKLGKYEDSNSVTCSVQHDNKTVHSTDFEVKTDSTDHVKPKETENTKQPSKSCHKPKAIVHTEKVNMMSLTVLGLRMLFAKTVAVNFLLTAKLFFLRAKRSGSGATNFSLLKQAGDVEENPGPTSMDWIWRILFLVGAATGAHSFEVQLVESGGGLVQPGGSLRLSCAASGFSFSDFWMSWVRQAPGKGLEWVATISQAGSEKDYVDSVKGRFTISRDNAKKSLYLQMNSLRAEDTAVYYCASGVYSFDYRGQGTLVTVSSTRDKQLDADVSPKPTIFLPSIAETKLQKAGTYLCLLEKFFPDVIKIHWQEKKSNTILGSQEGNTMKTNDTYMKFSWLTVPEKSLDKEHRCIVRHENNKNGVDQEIIFPPIKTDVITMDPKDNCSKDANDTLLLQLTNTSAYYMYLLLLLKSVVYFAIITCCLLRRTAFCCNGEKS

SEQ ID NO: 17684 - protein, 907 aa, Artificial Sequence
  Synthetic Polypeptide
MALPVTALLLPLALLLHAARPLEGKPIPNPLLGLDSTGSGDKQLDADVSPKPTIFLPSIAETKLQKAGTYLCLLEKFFPDVIKIHWQEKKSNTILGSQEGNTMKTNDTYMKFSWLTVPEKSLDKEHRCIVRHENNKNGVDQEIIFPPIKTDVITMDPKDNCSKDANDTLLLQLTNTSAYYMYLLLLLKSVVYFAIITCCLLRRTAFCCNGEKSRAKRSGSGATNFSLLKQAGDVEENPGPTSMALPVTALLLPLALLLHAARPEVQLLESGGGLIQPGGSLRLSCAASGFTFSSHAMTWVRQAPGKGLEWVSAISGSGDYTHYADSVKGRFTISRDNSKNTVYLQMNSLRAEDSAVYYCAKDEDGGSLLGHRGQGTLVTVSSLESGGGGSFEVQLVESGGGLVQPGGSLRLSCAASGFSFSDFWMSWVRQAPGKGLEWVATISQAGSEKDYVDSVKGRFTISRDNAKKSLYLQMNSLRAEDTAVYYCASGVYSFDYRGQGTLVTVSSTREQKLISEEDGSGSQPHTKPSVFVMKNGTNVACLVKEFYPKDIRINLVSSKKITEFDPAIVISPSGKYNAVKLGKYEDSNSVTCSVQHDNKTVHSTDFEVKTDSTDHVKPKETENTKQPSKSCHKPKAIVHTEKVNMMSLTVLGLRMLFAKTVAVNFLLTAKLFFLRAKRSGSGVKQTLNFDLLKLAGDVESNPGPSRGHMTEYKPTVRLATRDDVPRAVRTLAAAFADYPATRHTVDPDRHIERVTELQELFLTRVGLDIGKVWVADDGAAVAVWTTPESVEAGAVFAEIGPRMAELSGSRLAAQQQMEGLLAPHRPKEPAWFLATVGVSPDHQGKGLGSAVVLPGVEAAERAGVPAFLETSAPRNLPFYERLGFTVTADVEVPEGPRTWCMTRKPGA

SEQ ID NO: 17685 - protein, 1037 aa, Artificial Sequence
  Synthetic Polypeptide
MALPVTALLLPLALLLHAARPEVQLLESGGGLIQPGGSLRLSCAASGFTFSSHAMTWVRQAPGKGLEWVSAISGSGDYTHYADSVKGRFTISRDNSKNTVYLQMNSLRAEDSAVYYCAKDEDGGSLLGHRGQGTLVTVSSGQPKANPTVTLFPPSSEELQANKATLVCLISDFYPGAVTVAWKADGSPVKAGVETTKPSKQSNNKYAASSYLSLTPEQWKSHRSYSCQVTHEGSTVEKTVAPTECSGSQSFGLLDPKLCYLLDGILFIYGVILTALFLRVKFSRSADAPAYQQGQNQLYNELNLGRREEYDVLDKRRGRDPEMGGKPQRRKNPQEGLYNELQKDKMAEAYSEIGMKGERRRGKGHDGLYQGLSTATKDTYDALHMQALPPRRAKRSGSGATNFSLLKQAGDVEENPGPTSMDWIWRILFLVGAATGAHSFEVQLVESGGGLVQPGGSLRLSCAASGFSFSDFWMSWVRQAPGKGLEWVATISQAGSEKDYVDSVKGRFTISRDNAKKSLYLQMNSLRAEDTAVYYCASGVYSFDYRGQGTLVTVSSASTKGPSVFPLAPSSKSTSGGTAALGCLVKDYFPEPVTVSWNSGALTSGVHTFPAVLQSSGLYSLSSVVTVPSSSLGTQTYICNVNHKPSNTKVDKRVEPKSCGTQSFGLLDPKLCYLLDGILFIYGVILTALFLRVKFSRSADAPAYQQGQNQLYNELNLGRREEYDVLDKRRGRDPEMGGKPQRRKNPQEGLYNELQKDKMAEAYSEIGMKGERRRGKGHDGLYQGLSTATKDTYDALHMQALPPRRAKRSGSGVKQTLNFDLLKLAGDVESNPGPSRGHMTEYKPTVRLATRDDVPRAVRTLAAAFADYPATRHTVDPDRHIERVTELQELFLTRVGLDIGKVWVADDGAAVAVWTTPESVEAGAVFAEIGPRMAELSGSRLAAQQQMEGLLAPHRPKEPAWFLATVGVSPDHQGKGLGSAVVLPGVEAAERAGVPAFLETSAPRNLPFYERLGFTVTADVEVPEGPRTWCMTRKPGA

SEQ ID NO: 17686 - protein, 823 aa, Artificial Sequence
  Synthetic Polypeptide
MALPVTALLLPLALLLHAARPEVQLLESGGGLIQPGGSLRLSCAASGFTFSSHAMTWVRQAPGKGLEWVSAISGSGDYTHYADSVKGRFTISRDNSKNTVYLQMNSLRAEDSAVYYCAKDEDGGSLLGHRGQGTLVTVSSLEDLKNVFPPEVAVFEPSEAEISHTQKATLVCLATGFYPDHVELSWWVNGKEVHSGVSTDPQPLKEQPALNDSRYCLSSRLRVSATFWQNPRNHFRCQVQFYGLSENDEWTQDRAKPVTQIVSAEAWGRADCGSQSFGLLDPKLCYLLDGILFIYGVILTALFLRVKFSRSADAPAYQQGQNQLYNELNLGRREEYDVLDKRRGRDPEMGGKPQRRKNPQEGLYNELQKDKMAEAYSEIGMKGERRRGKGHDGLYQGLSTATKDTYDALHMQALPPRRAKRSGSGATNFSLLKQAGDVEENPGPTSMDWIWRILFLVGAATGAHSFEVQLVESGGGLVQPGGSLRLSCAASGFSFSDFWMSWVRQAPGKGLEWVATISQAGSEKDYVDSVKGRFTISRDNAKKSLYLQMNSLRAEDTAVYYCASGVYSFDYRGQGTLVTVSSTRIQNPDPAVYQLRDSKSSDKSVCLFTDFDSQTNVSQSKDSDVYITDKTVLDMRSMDFKSNSAVAWSNKSDFACANAFNNSIIPEDTFFPSPESSCGTQSFGLLDPKLCYLLDGILFIYGVILTALFLRVKFSRSADAPAYQQGQNQLYNELNLGRREEYDVLDKRRGRDPEMGGKPQRRKNPQEGLYNELQKDKMAEAYSEIGMKGERRRGKGHDGLYQGLSTATKDTYDALHMQALPPR

SEQ ID NO: 17687 - protein, 823 aa, Artificial Sequence
  Synthetic Polypeptide
MALPVTALLLPLALLLHAARPEVQLLESGGGLIQPGGSLRLSCAASGFTFSSHAMTWVRQAPGKGLEWVSAISGSGDYTHYADSVKGRFTISRDNSKNTVYLQMNSLRAEDSAVYYCAKDEDGGSLLGHRGQGTLVTVSSLEDLKNVFPPEVAVFEPSKAEIAHTQKATLVCLATGFYPDHVELSWWVNGKEVHSGVCTDPQPLKEQPALNDSRYCLSSRLRVSATFWQNPRNHFRCQVQFYGLSENDEWTQDRAKPVTQIVSAEAWGRADCGSQSFGLLDPKLCYLLDGILFIYGVILTALFLRVKFSRSADAPAYQQGQNQLYNELNLGRREEYDVLDKRRGRDPEMGGKPQRRKNPQEGLYNELQKDKMAEAYSEIGMKGERRRGKGHDGLYQGLSTATKDTYDALHMQALPPRRAKRSGSGATNFSLLKQAGDVEENPGPTSMDWIWRILFLVGAATGAHSFEVQLVESGGGLVQPGGSLRLSCAASGFSFSDFWMSWVRQAPGKGLEWVATISQAGSEKDYVDSVKGRFTISRDNAKKSLYLQMNSLRAEDTAVYYCASGVYSFDYRGQGTLVTVSSTRIQNPDPAVYQLRDSKSSDKSVCLFTDFDSQTNVSQSKDSDVYITDKCVLDMRSMDFKSNSAVAWSNKSDFACANAFNNSIIPEDTFFPSSDVPCGTQSFGLLDPKLCYLLDGILFIYGVILTALFLRVKFSRSADAPAYQQGQNQLYNELNLGRREEYDVLDKRRGRDPEMGGKPQRRKNPQEGLYNELQKDKMAEAYSEIGMKGERRRGKGHDGLYQGLSTATKDTYDALHMQALPPR

SEQ ID NO: 17688 - protein, 894 aa, Artificial Sequence
  Synthetic Polypeptide
MALPVTALLLPLALLLHAARPEVQLLESGGGLIQPGGSLRLSCAASGFTFSSHAMTWVRQAPGKGLEWVSAISGSGDYTHYADSVKGRFTISRDNSKNTVYLQMNSLRAEDSAVYYCAKDEDGGSLLGHRGQGTLVTVSSLEGKPIPNPLLGLDSTGSGEDLKNVFPPEVAVFEPSEAEISHTQKATLVCLATGFYPDHVELSWWVNGKEVHSGVSTDPQPLKEQPALNDSRYCLSSRLRVSATFWQNPRNHFRCQVQFYGLSENDEWTQDRAKPVTQIVSAEAWGRADCGSQSFGLLDPKLCYLLDGILFIYGVILTALFLRVKFSRSADAPAYQQGQNQLYNELNLGRREEYDVLDKRRGRDPEMGGKPQRRKNPQEGLYNELQKDKMAEAYSEIGMKGERRRGKGHDGLYQGLSTATKDTYDALHMQALPPRRAKRSGSGATNFSLLKQAGDVEENPGPTSMDWIWRILFLVGAATGAHSFEVQLVESGGGLVQPGGSLRLSCAASGFSFSDFWMSWVRQAPGKGLEWVATISQAGSEKDYVDSVKGRFTISRDNAKKSLYLQMNSLRAEDTAVYYCASGVYSFDYRGQGTLVTVSSTREQKLISEEDGSGIQNPDPAVYQLRDSKSSDKSVCLFTDFDSQTNVSQSKDSDVYITDKTVLDMRSMDFKSNSAVAWSNKSDFACANAFNNSIIPEDTFFPSPESSCGTQSFGLLDPKLCYLLDGILFIYGVILTALFLRSKRSRLLHSDYMNMTPRRPGPTRKHYQPYAPPRDFAAYRSRVKFSRSADAPAYQQGQNQLYNELNLGRREEYDVLDKRRGRDPEMGGKPQRRKNPQEGLYNELQKDKMAEAYSEIGMKGERRRGKGHDGLYQGLSTATKDTYDALHMQALPPR

SEQ ID NO: 17689 - protein, 935 aa, Artificial Sequence
  Synthetic Polypeptide
MALPVTALLLPLALLLHAARPEVQLLESGGGLIQPGGSLRLSCAASGFTFSSHAMTWVRQAPGKGLEWVSAISGSGDYTHYADSVKGRFTISRDNSKNTVYLQMNSLRAEDSAVYYCAKDEDGGSLLGHRGQGTLVTVSSLEGKPIPNPLLGLDSTGSGEDLKNVFPPEVAVFEPSEAEISHTQKATLVCLATGFYPDHVELSWWVNGKEVHSGVSTDPQPLKEQPALNDSRYCLSSRLRVSATFWQNPRNHFRCQVQFYGLSENDEWTQDRAKPVTQIVSAEAWGRADCGSQSFGLLDPKLCYLLDGILFIYGVILTALFLRSKRSRLLHSDYMNMTPRRPGPTRKHYQPYAPPRDFAAYRSRVKFSRSADAPAYQQGQNQLYNELNLGRREEYDVLDKRRGRDPEMGGKPQRRKNPQEGLYNELQKDKMAEAYSEIGMKGERRRGKGHDGLYQGLSTATKDTYDALHMQALPPRRAKRSGSGATNFSLLKQAGDVEENPGPTSMDWIWRILFLVGAATGAHSFEVQLVESGGGLVQPGGSLRLSCAASGFSFSDFWMSWVRQAPGKGLEWVATISQAGSEKDYVDSVKGRFTISRDNAKKSLYLQMNSLRAEDTAVYYCASGVYSFDYRGQGTLVTVSSTREQKLISEEDGSGIQNPDPAVYQLRDSKSSDKSVCLFTDFDSQTNVSQSKDSDVYITDKTVLDMRSMDFKSNSAVAWSNKSDFACANAFNNSIIPEDTFFPSPESSCGTQSFGLLDPKLCYLLDGILFIYGVILTALFLRSKRSRLLHSDYMNMTPRRPGPTRKHYQPYAPPRDFAAYRSRVKFSRSADAPAYQQGQNQLYNELNLGRREEYDVLDKRRGRDPEMGGKPQRRKNPQEGLYNELQKDKMAEAYSEIGMKGERRRGKGHDGLYQGLSTATKDTYDALHMQALPPR

SEQ ID NO: 17690 - protein, 896 aa, Artificial Sequence
  Synthetic Polypeptide
MALPVTALLLPLALLLHAARPEVQLLESGGGLIQPGGSLRLSCAASGFTFSSHAMTWVRQAPGKGLEWVSAISGSGDYTHYADSVKGRFTISRDNSKNTVYLQMNSLRAEDSAVYYCAKDEDGGSLLGHRGQGTLVTVSSLEGKPIPNPLLGLDSTGSGEDLKNVFPPEVAVFEPSEAEISHTQKATLVCLATGFYPDHVELSWWVNGKEVHSGVSTDPQPLKEQPALNDSRYCLSSRLRVSATFWQNPRNHFRCQVQFYGLSENDEWTQDRAKPVTQIVSAEAWGRADCGSQSFGLLDPKLCYLLDGILFIYGVILTALFLRVKFSRSADAPAYQQGQNQLYNELNLGRREEYDVLDKRRGRDPEMGGKPQRRKNPQEGLYNELQKDKMAEAYSEIGMKGERRRGKGHDGLYQGLSTATKDTYDALHMQALPPRRAKRSGSGATNFSLLKQAGDVEENPGPTSMDWIWRILFLVGAATGAHSFEVQLVESGGGLVQPGGSLRLSCAASGFSFSDFWMSWVRQAPGKGLEWVATISQAGSEKDYVDSVKGRFTISRDNAKKSLYLQMNSLRAEDTAVYYCASGVYSFDYRGQGTLVTVSSTREQKLISEEDLGSGIQNPDPAVYQLRDSKSSDKSVCLFTDFDSQTNVSQSKDSDVYITDKTVLDMRSMDFKSNSAVAWSNKSDFACANAFNNSIIPEDTFFPSPESSCGTQSFGLLDPKLCYLLDGILFIYGVILTALFLKRGRKKLLYIFKQPFMRPVQTTQEEDGCSCRFPEEEEGGCELRVKFSRSADAPAYQQGQNQLYNELNLGRREEYDVLDKRRGRDPEMGGKPQRRKNPQEGLYNELQKDKMAEAYSEIGMKGERRRGKGHDGLYQGLSTATKDTYDALHMQALPPR

SEQ ID NO: 17691 - protein, 938 aa, Artificial Sequence
  Synthetic Polypeptide
MALPVTALLLPLALLLHAARPEVQLLESGGGLIQPGGSLRLSCAASGFTFSSHAMTWVRQAPGKGLEWVSAISGSGDYTHYADSVKGRFTISRDNSKNTVYLQMNSLRAEDSAVYYCAKDEDGGSLLGHRGQGTLVTVSSLEGKPIPNPLLGLDSTGSGEDLKNVFPPEVAVFEPSEAEISHTQKATLVCLATGFYPDHVELSWWVNGKEVHSGVSTDPQPLKEQPALNDSRYCLSSRLRVSATFWQNPRNHFRCQVQFYGLSENDEWTQDRAKPVTQIVSAEAWGRADCGSQSFGLLDPKLCYLLDGILFIYGVILTALFLKRGRKKLLYIFKQPFMRPVQTTQEEDGCSCRFPEEEEGGCELRVKFSRSADAPAYQQGQNQLYNELNLGRREEYDVLDKRRGRDPEMGGKPQRRKNPQEGLYNELQKDKMAEAYSEIGMKGERRRGKGHDGLYQGLSTATKDTYDALHMQALPPRRAKRSGSGATNFSLLKQAGDVEENPGPTSMDWIWRILFLVGAATGAHSFEVQLVESGGGLVQPGGSLRLSCAASGFSFSDFWMSWVRQAPGKGLEWVATISQAGSEKDYVDSVKGRFTISRDNAKKSLYLQMNSLRAEDTAVYYCASGVYSFDYRGQGTLVTVSSTREQKLISEEDLGSGIQNPDPAVYQLRDSKSSDKSVCLFTDFDSQTNVSQSKDSDVYITDKTVLDMRSMDFKSNSAVAWSNKSDFACANAFNNSIIPEDTFFPSPESSCGTQSFGLLDPKLCYLLDGILFIYGVILTALFLKRGRKKLLYIFKQPFMRPVQTTQEEDGCSCRFPEEEEGGCELRVKFSRSADAPAYQQGQNQLYNELNLGRREEYDVLDKRRGRDPEMGGKPQRRKNPQEGLYNELQKDKMAEAYSEIGMKGERRRGKGHDGLYQGLSTATKDTYDALHMQALPPR

SEQ ID NO: 17692 - protein, 828 aa, Artificial Sequence
  Synthetic Polypeptide
MALPVTALLLPLALLLHAARPEVQLLESGGGLIQPGGSLRLSCAASGFTFSSHAMTWVRQAPGKGLEWVSAISGSGDYTHYADSVKGRFTISRDNSKNTVYLQMNSLRAEDSAVYYCAKDEDGGSLLGHRGQGTLVTVSSLEQSFGLLDPKLCYLLDGILFIYGVILTALFLRVKFSRSADAPAYQQGQNQLYNELNLGRREEYDVLDKRRGRDPEMGGKPQRRKNPQEGLYNELQKDKMAEAYSEIGMKGERRRGKGHDGLYQGLSTATKDTYDALHMQALPPRRAKRSGSGATNFSLLKQAGDVEENPGPTSMDWIWRILFLVGAATGAHSFEVQLVESGGGLVQPGGSLRLSCAASGFSFSDFWMSWVRQAPGKGLEWVATISQAGSEKDYVDSVKGRFTISRDNAKKSLYLQMNSLRAEDTAVYYCASGVYSFDYRGQGTLVTVSSTRQSFGLLDPKLCYLLDGILFIYGVILTALFLRVKFSRSADAPAYQQGQNQLYNELNLGRREEYDVLDKRRGRDPEMGGKPQRRKNPQEGLYNELQKDKMAEAYSEIGMKGERRRGKGHDGLYQGLSTATKDTYDALHMQALPPRRAKRSGSGVKQTLNFDLLKLAGDVESNPGPSRGHMTEYKPTVRLATRDDVPRAVRTLAAAFADYPATRHTVDPDRHIERVTELQELFLTRVGLDIGKVWVADDGAAVAVWTTPESVEAGAVFAEIGPRMAELSGSRLAAQQQMEGLLAPHRPKEPAWFLATVGVSPDHQGKGLGSAVVLPGVEAAERAGVPAFLETSAPRNLPFYERLGFTVTADVEVPEGPRTWCMTRKPGA

SEQ ID NO: 17693 - protein, 653 aa, Artificial Sequence
  Synthetic Polypeptide
MALPVTALLLPLALLLHAARPEVQLLESGGGLIQPGGSLRLSCAASGFTFSSHAMTWVRQAPGKGLEWVSAISGSGDYTHYADSVKGRFTISRDNSKNTVYLQMNSLRAEDSAVYYCAKDEDGGSLLGHRGQGTLVTVSSLEGQPKANPTVTLFPPSSEELQANKATLVCLISDFYPGAVTVAWKADGSPVKAGVETTKPSKQSNNKYAASSYLSLTPEQWKSHRSYSCQVTHEGSTVEKTVAPTECSPIKTDVITMDPKDNCSKDANDTLLLQLTNTSAYYMYLLLLLKSVVYFAIITCCLLRRTAFCCNGEKSRAKRSGSGATNFSLLKQAGDVEENPGPTSMDWIWRILFLVGAATGAHSFEVQLVESGGGLVQPGGSLRLSCAASGFSFSDFWMSWVRQAPGKGLEWVATISQAGSEKDYVDSVKGRFTISRDNAKKSLYLQMNSLRAEDTAVYYCASGVYSFDYRGQGTLVTVSSTRASTKGPSVFPLAPSSKSTSGGTAALGCLVKDYFPEPVTVSWNSGALTSGVHTFPAVLQSSGLYSLSSVVTVPSSSLGTQTYICNVNHKPSNTKVDKRVEPKSCEVKTDSTDHVKPKETENTKQPSKSCHKPKAIVHTEKVNMMSLTVLGLRMLFAKTVAVNFLLTAKLFFL

SEQ ID NO: 17694 - protein, 631 aa, Artificial Sequence
  Synthetic Polypeptide
MALPVTALLLPLALLLHAARPEVQLLESGGGLIQPGGSLRLSCAASGFTFSSHAMTWVRQAPGKGLEWVSAISGSGDYTHYADSVKGRFTISRDNSKNTVYLQMNSLRAEDSAVYYCAKDEDGGSLLGHRGQGTLVTVSSLEGQPKANPTVTLFPPSSEELQANKATLVCLISDFYPGAVTVAWKADGSPVKAGVETTKPSKQSNNKYAASSYLSLTPEQWKSHRSYSCQVTHEGSTVEKTVAPTECSGRADCGITSASYHQGVLSATILYEILLGKATLYAVLVSALVLMAMVKRKDSRGRAKRSGSGATNFSLLKQAGDVEENPGPTSMDWIWRILFLVGAATGAHSFEVQLVESGGGLVQPGGSLRLSCAASGFSFSDFWMSWVRQAPGKGLEWVATISQAGSEKDYVDSVKGRFTISRDNAKKSLYLQMNSLRAEDTAVYYCASGVYSFDYRGQGTLVTVSSTRASTKGPSVFPLAPSSKSTSGGTAALGCLVKDYFPEPVTVSWNSGALTSGVHTFPAVLQSSGLYSLSSVVTVPSSSLGTQTYICNVNHKPSNTKVDKRVEPKSCIPEDTFFPSSDVPCDVKLVEKSFETDTNLNFQNLSVIGFRILLLKVAGFNLLMTLRLWSS

SEQ ID NO: 17695 - protein, 631 aa, Artificial Sequence
  Synthetic Polypeptide
MALPVTALLLPLALLLHAARPEVQLLESGGGLIQPGGSLRLSCAASGFTFSSHAMTWVRQAPGKGLEWVSAISGSGDYTHYADSVKGRFTISRDNSKNTVYLQMNSLRAEDSAVYYCAKDEDGGSLLGHRGQGTLVTVSSLEGQPKANPTVTLFPPSSEELQANKATLVCLISDFYPGAVTVAWKADGSPVKAGVETTKPSKQSNNKYAASSYLSLTPEQWKSHRSYSCQVTHEGSTVEKTVAPTECSGRADCGFTSESYQQGVLSATILYEILLGKATLYAVLVSALVLMAMVKRKDSRGRAKRSGSGATNFSLLKQAGDVEENPGPTSMDWIWRILFLVGAATGAHSFEVQLVESGGGLVQPGGSLRLSCAASGFSFSDFWMSWVRQAPGKGLEWVATISQAGSEKDYVDSVKGRFTISRDNAKKSLYLQMNSLRAEDTAVYYCASGVYSFDYRGQGTLVTVSSTRASTKGPSVFPLAPSSKSTSGGTAALGCLVKDYFPEPVTVSWNSGALTSGVHTFPAVLQSSGLYSLSSVVTVPSSSLGTQTYICNVNHKPSNTKVDKRVEPKSCIPEDTFFPSPESSCDVKLVEKSFETDTNLNFQNLSVIGFRILLLKVAGFNLLMTLRLWSS

SEQ ID NO: 17696 - protein, 452 aa, Artificial Sequence
  Synthetic Polypeptide
MALPVTALLLPLALLLHAARPEVQLLESGGGLIQPGGSLRLSCAASGFTFSSHAMTWVRQAPGKGLEWVSAISGSGDYTHYADSVKGRFTISRDNSKNTVYLQMNSLRAEDSAVYYCAKDEDGGSLLGHRGQGTLVTVSSLESGGGGSFEVQLVESGGGLVQPGGSLRLSCAASGFSFSDFWMSWVRQAPGKGLEWVATISQAGSEKDYVDSVKGRFTISRDNAKKSLYLQMNSLRAEDTAVYYCASGVYSFDYRGQGTLVTVSSTRDGNEEMGGITQTPYKVSISGTTVILTCPQYPGSEILWQHNDKNIGGDEDDKNIGSDEDHLSLKEFSELEQSGYYVCYPRGSKPEDANFYLYLRARVCENCMEMDVMSVATIVIVDICITGGLLLLVYYWSKNRKAKAKPVTRGAGAGGRQRGQNKERPPPVPNPDYEPIRKGQRDLYSGLNQRRI

SEQ ID NO: 17697 - protein, 417 aa, Artificial Sequence
  Synthetic Polypeptide
MALPVTALLLPLALLLHAARPEVQLLESGGGLIQPGGSLRLSCAASGFTFSSHAMTWVRQAPGKGLEWVSAISGSGDYTHYADSVKGRFTISRDNSKNTVYLQMNSLRAEDSAVYYCAKDEDGGSLLGHRGQGTLVTVSSLESGGGGSFEVQLVESGGGLVQPGGSLRLSCAASGFSFSDFWMSWVRQAPGKGLEWVATISQAGSEKDYVDSVKGRFTISRDNAKKSLYLQMNSLRAEDTAVYYCASGVYSFDYRGQGTLVTVSSTRFKIPIEELEDRVFVNCNTSITWVEGTVGTLLSDITRLDLGKRILDPRGIYRCNGTDIYKDKESTVQVHYRMCQSCVELDPATVAGIIVTDVIATLLLALGVFCFAGHETGRLSGAADTQALLRNDQVYQPLRDRDDAQYSHLGGNWARNK

SEQ ID NO: 17698 - protein, 427 aa, Artificial Sequence
  Synthetic Polypeptide
MALPVTALLLPLALLLHAARPEVQLLESGGGLIQPGGSLRLSCAASGFTFSSHAMTWVRQAPGKGLEWVSAISGSGDYTHYADSVKGRFTISRDNSKNTVYLQMNSLRAEDSAVYYCAKDEDGGSLLGHRGQGTLVTVSSLESGGGGSFEVQLVESGGGLVQPGGSLRLSCAASGFSFSDFWMSWVRQAPGKGLEWVATISQAGSEKDYVDSVKGRFTISRDNAKKSLYLQMNSLRAEDTAVYYCASGVYSFDYRGQGTLVTVSSTRQSIKGNHLVKVYDYQEDGSVLLTCDAEAKNITWFKDGKMIGFLTEDKKKWNLGSNAKDPRGMYQCKGSQNKSKPLQVYYRMCQNCIELNAATISGFLFAEIVSIFVLAVGVYFIAGQDGVRQSRASDKQTLLPNDQLYQPLKDREDDQYSHLQGNQLRRN

SEQ ID NO: 17699 - protein, 410 aa, Artificial Sequence
  Synthetic Polypeptide
MALPVTALLLPLALLLHAARPEVQLLESGGGLIQPGGSLRLSCAASGFTFSSHAMTWVRQAPGKGLEWVSAISGSGDYTHYADSVKGRFTISRDNSKNTVYLQMNSLRAEDSAVYYCAKDEDGGSLLGHRGQGTLVTVSSLESGGGGSFEVQLVESGGGLVQPGGSLRLSCAASGFSFSDFWMSWVRQAPGKGLEWVATISQAGSEKDYVDSVKGRFTISRDNAKKSLYLQMNSLRAEDTAVYYCASGVYSFDYRGQGTLVTVSSTRQSFGLLDPKLCYLLDGILFIYGVILTALFLRVKFSRSADAPAYQQGQNQLYNELNLGRREEYDVLDKRRGRDPEMGGKPQRRKNPQEGLYNELQKDKMAEAYSEIGMKGERRRGKGHDGLYQGLSTATKDTYDALHMQALPPR

SEQ ID NO: 17700 - protein, 453 aa, Artificial Sequence
  Synthetic Polypeptide
MALPVTALLLPLALLLHAARPEVQLVESGGGLVQPGGSLRLSCAASGFSFSDFWMSWVRQAPGKGLEWVATISQAGSEKDYVDSVKGRFTISRDNAKKSLYLQMNSLRAEDTAVYYCASGVYSFDYRGQGTLVTVSSLESGGGGSFEEVQLLESGGGLIQPGGSLRLSCAASGFTFSSHAMTWVRQAPGKGLEWVSAISGSGDYTHYADSVKGRFTISRDNSKNTVYLQMNSLRAEDSAVYYCAKDEDGGSLLGHRGQGTLVTVSSTRDGNEEMGGITQTPYKVSISGTTVILTCPQYPGSEILWQHNDKNIGGDEDDKNIGSDEDHLSLKEFSELEQSGYYVCYPRGSKPEDANFYLYLRARVCENCMEMDVMSVATIVIVDICITGGLLLLVYYWSKNRKAKAKPVTRGAGAGGRQRGQNKERPPPVPNPDYEPIRKGQRDLYSGLNQRRI

SEQ ID NO: 17701 - protein, 418 aa, Artificial Sequence
  Synthetic Polypeptide
MALPVTALLLPLALLLHAARPEVQLVESGGGLVQPGGSLRLSCAASGFSFSDFWMSWVRQAPGKGLEWVATISQAGSEKDYVDSVKGRFTISRDNAKKSLYLQMNSLRAEDTAVYYCASGVYSFDYRGQGTLVTVSSLESGGGGSFEEVQLLESGGGLIQPGGSLRLSCAASGFTFSSHAMTWVRQAPGKGLEWVSAISGSGDYTHYADSVKGRFTISRDNSKNTVYLQMNSLRAEDSAVYYCAKDEDGGSLLGHRGQGTLVTVSSTRFKIPIEELEDRVFVNCNTSITWVEGTVGTLLSDITRLDLGKRILDPRGIYRCNGTDIYKDKESTVQVHYRMCQSCVELDPATVAGIIVTDVIATLLLALGVFCFAGHETGRLSGAADTQALLRNDQVYQPLRDRDDAQYSHLGGNWARNK

SEQ ID NO: 17702 - protein, 428 aa, Artificial Sequence
  Synthetic Polypeptide
MALPVTALLLPLALLLHAARPEVQLVESGGGLVQPGGSLRLSCAASGFSFSDFWMSWVRQAPGKGLEWVATISQAGSEKDYVDSVKGRFTISRDNAKKSLYLQMNSLRAEDTAVYYCASGVYSFDYRGQGTLVTVSSLESGGGGSFEEVQLLESGGGLIQPGGSLRLSCAASGFTFSSHAMTWVRQAPGKGLEWVSAISGSGDYTHYADSVKGRFTISRDNSKNTVYLQMNSLRAEDSAVYYCAKDEDGGSLLGHRGQGTLVTVSSTRQSIKGNHLVKVYDYQEDGSVLLTCDAEAKNITWFKDGKMIGFLTEDKKKWNLGSNAKDPRGMYQCKGSQNKSKPLQVYYRMCQNCIELNAATISGFLFAEIVSIFVLAVGVYFIAGQDGVRQSRASDKQTLLPNDQLYQPLKDREDDQYSHLQGNQLRRN

SEQ ID NO: 17703 - protein, 411 aa, Artificial Sequence
  Synthetic Polypeptide
MALPVTALLLPLALLLHAARPEVQLVESGGGLVQPGGSLRLSCAASGFSFSDFWMSWVRQAPGKGLEWVATISQAGSEKDYVDSVKGRFTISRDNAKKSLYLQMNSLRAEDTAVYYCASGVYSFDYRGQGTLVTVSSLESGGGGSFEEVQLLESGGGLIQPGGSLRLSCAASGFTFSSHAMTWVRQAPGKGLEWVSAISGSGDYTHYADSVKGRFTISRDNSKNTVYLQMNSLRAEDSAVYYCAKDEDGGSLLGHRGQGTLVTVSSTRQSFGLLDPKLCYLLDGILFIYGVILTALFLRVKFSRSADAPAYQQGQNQLYNELNLGRREEYDVLDKRRGRDPEMGGKPQRRKNPQEGLYNELQKDKMAEAYSEIGMKGERRRGKGHDGLYQGLSTATKDTYDALHMQALPPR

SEQ ID NO: 17704 - protein, 643 aa, Artificial Sequence
  Synthetic Polypeptide
MALPVTALLLPLALLLHAARPEVQLLESGGGLIQPGGSLRLSCAASGFTFSSHAMTWVRQAPGKGLEWVSAISGSGDYTHYADSVKGRFTISRDNSKNTVYLQMNSLRAEDSAVYYCAKDEDGGSLLGHRGQGTLVTVSSLESGGGGSFEVQLVESGGGLVQPGGSLRLSCAASGFSFSDFWMSWVRQAPGKGLEWVATISQAGSEKDYVDSVKGRFTISRDNAKKSLYLQMNSLRAEDTAVYYCASGVYSFDYRGQGTLVTVSSTRGSGIQNPDPAVYQLRDSKSSDKSVCLFTDFDSQTNVSQSKDSDVYITDKTVLDMRSMDFKSNSAVAWSNKSDFACANAFNNSIIPEDTFFPSPESSCDVKLVEKSFETDTNLNFQNLSVIGFRILLLKVAGFNLLMTLRLWSSRAKRSGSGVKQTLNFDLLKLAGDVESNPGPSRGHMTEYKPTVRLATRDDVPRAVRTLAAAFADYPATRHTVDPDRHIERVTELQELFLTRVGLDIGKVWVADDGAAVAVWTTPESVEAGAVFAEIGPRMAELSGSRLAAQQQMEGLLAPHRPKEPAWFLATVGVSPDHQGKGLGSAVVLPGVEAAERAGVPAFLETSAPRNLPFYERLGFTVTADVEVPEGPRTWCMTRKPGA

SEQ ID NO: 17705 - protein, 675 aa, Artificial Sequence
  Synthetic Polypeptide
MALPVTALLLPLALLLHAARPEVQLLESGGGLIQPGGSLRLSCAASGFTFSSHAMTWVRQAPGKGLEWVSAISGSGDYTHYADSVKGRFTISRDNSKNTVYLQMNSLRAEDSAVYYCAKDEDGGSLLGHRGQGTLVTVSSLESGGGGSFEVQLVESGGGLVQPGGSLRLSCAASGFSFSDFWMSWVRQAPGKGLEWVATISQAGSEKDYVDSVKGRFTISRDNAKKSLYLQMNSLRAEDTAVYYCASGVYSFDYRGQGTLVTVSSLEDLKNVFPPEVAVFEPSEAEISHTQKATLVCLATGFYPDHVELSWWVNGKEVHSGVSTDPQPLKEQPALNDSRYCLSSRLRVSATFWQNPRNHFRCQVQFYGLSENDEWTQDRAKPVTQIVSAEAWGRADCGFTSESYQQGVLSATILYEILLGKATLYAVLVSALVLMAMVKRKDSRGRAKRSGSGATNFSLLKQAGDVEENPGPTRGHMTEYKPTVRLATRDDVPRAVRTLAAAFADYPATRHTVDPDRHIERVTELQELFLTRVGLDIGKVWVADDGAAVAVWTTPESVEAGAVFAEIGPRMAELSGSRLAAQQQMEGLLAPHRPKEPAWFLATVGVSPDHQGKGLGSAVVLPGVEAAERAGVPAFLETSAPRNLPFYERLGFTVTADVEVPEGPRTWCMTRKPGA

SEQ ID NO: 17706 - protein, 725 aa, Artificial Sequence
  Synthetic Polypeptide
MALPVTALLLPLALLLHAARPEVQLLESGGGLIQPGGSLRLSCAASGFTFSSHAMTWVRQAPGKGLEWVSAISGSGDYTHYADSVKGRFTISRDNSKNTVYLQMNSLRAEDSAVYYCAKDEDGGSLLGHRGQGTLVTVSSLESGGGGSFEVQLVESGGGLVQPGGSLRLSCAASGFSFSDFWMSWVRQAPGKGLEWVATISQAGSEKDYVDSVKGRFTISRDNAKKSLYLQMNSLRAEDTAVYYCASGVYSFDYRGQGTLVTVSSTREQKLISEEDLGSGTPFPSLAPPIMLLVDGKQQMVVVCLVLDVAPPGLDSPIWFSAGNGSALDAFTYGPSPATDGTWTNLAHLSLPSEELASWEPLVCHTGPGAEGHSRSTQPMHLSGEASTARTCPQEPLRGTPGGALWLGVLRLLLFKLLLFDLLLTCSCLCDPAGPLPSPATTTRLRALGSHRLHPATETGGREATSSPRPQPRDRRWGDTPPGRKPGSPVRAKRSGSGVKQTLNFDLLKLAGDVESNPGPSRSRGHMTEYKPTVRLATRDDVPRAVRTLAAAFADYPATRHTVDPDRHIERVTELQELFLTRVGLDIGKVWVADDGAAVAVWTTPESVEAGAVFAEIGPRMAELSGSRLAAQQQMEGLLAPHRPKEPAWFLATVGVSPDHQGKGLGSAVVLPGVEAAERAGVPAFLETSAPRNLPFYERLGFTVTADVEVPEGPRTWCMTRKPGA

SEQ ID NO: 17707 - protein, 550 aa, Artificial Sequence
  Synthetic Polypeptide
MALPVTALLLPLALLLHAARPEVQLLESGGGLIQPGGSLRLSCAASGFTFSSHAMTWVRQAPGKGLEWVSAISGSGDYTHYADSVKGRFTISRDNSKNTVYLQMNSLRAEDSAVYYCAKDEDGGSLLGHRGQGTLVTVSSLEDLKNVFPPEVAVFEPSEAEISHTQKATLVCLATGFYPDHVELSWWVNGKEVHSGVSTDPQPLKEQPALNDSRYCLSSRLRVSATFWQNPRNHFRCQVQFYGLSENDEWTQDRAKPVTQIVSAEAWGRADCGFTSESYQQGVLSATILYEILLGKATLYAVLVSALVLMAMVKRKDSRGRAKRSGSGATNFSLLKQAGDVEENPGPTRGHMTEYKPTVRLATRDDVPRAVRTLAAAFADYPATRHTVDPDRHIERVTELQELFLTRVGLDIGKVWVADDGAAVAVWTTPESVEAGAVFAEIGPRMAELSGSRLAAQQQMEGLLAPHRPKEPAWFLATVGVSPDHQGKGLGSAVVLPGVEAAERAGVPAFLETSAPRNLPFYERLGFTVTADVEVPEGPRTWCMTRKPGA

SEQ ID NO: 17708 - protein, 320 aa, Artificial Sequence
  Synthetic Polypeptide
MALPVTALLLPLALLLHAARPEVQLLESGGGLIQPGGSLRLSCAASGFTFSSHAMTWVRQAPGKGLEWVSAISGSGDYTHYADSVKGRFTISRDNSKNTVYLQMNSLRAEDSAVYYCAKDEDGGSLLGHRGQGTLVTVSSLEDLKNVFPPEVAVFEPSEAEISHTQKATLVCLATGFYPDHVELSWWVNGKEVHSGVSTDPQPLKEQPALNDSRYCLSSRLRVSATFWQNPRNHFRCQVQFYGLSENDEWTQDRAKPVTQIVSAEAWGRADCGFTSESYQQGVLSATILYEILLGKATLYAVLVSALVLMAMVKRKDSRG

SEQ ID NO: 17709 - protein, 444 aa, Artificial Sequence; identical to SEQ ID NO: 17344
  Synthetic Polypeptide

SEQ ID NO: 17710 - protein, 278 aa, Artificial Sequence; identical to SEQ ID NO: 17345
  Synthetic Polypeptide

SEQ ID NO: 17711 - protein, 568 aa, Artificial Sequence
  Synthetic Polypeptide
MALPVTALLLPLALLLHAARPEVQLLESGGGLIQPGGSLRLSCAASGFTFSSHAMTWVRQAPGKGLEWVSAISGSGDYTHYADSVKGRFTISRDNSKNTVYLQMNSLRAEDSAVYYCAKDEDGGSLLGHRGQGTLVTVSSLEGKPIPNPLLGLDSTGSGEDLKNVFPPEVAVFEPSEAEISHTQKATLVCLATGFYPDHVELSWWVNGKEVHSGVCTDPQPLKEQPALNDSRYCLSSRLRVSATFWQNPRNHFRCQVQFYGLSENDEWTQDRAKPVTQIVSAEAWGRADCGFTSESYQQGVLSATILYEILLGKATLYAVLVSALVLMAMVKRKDSRGRAKRSGSGATNFSLLKQAGDVEENPGPTRGHMTEYKPTVRLATRDDVPRAVRTLAAAFADYPATRHTVDPDRHIERVTELQELFLTRVGLDIGKVWVADDGAAVAVWTTPESVEAGAVFAEIGPRMAELSGSRLAAQQQMEGLLAPHRPKEPAWFLATVGVSPDHQGKGLGSAVVLPGVEAAERAGVPAFLETSAPRNLPFYERLGFTVTADVEVPEGPRTWCMTRKPGA

SEQ ID NO: 17712 - protein, 338 aa, Artificial Sequence
  Synthetic Polypeptide
MALPVTALLLPLALLLHAARPEVQLLESGGGLIQPGGSLRLSCAASGFTFSSHAMTWVRQAPGKGLEWVSAISGSGDYTHYADSVKGRFTISRDNSKNTVYLQMNSLRAEDSAVYYCAKDEDGGSLLGHRGQGTLVTVSSLEGKPIPNPLLGLDSTGSGEDLKNVFPPEVAVFEPSEAEISHTQKATLVCLATGFYPDHVELSWWVNGKEVHSGVCTDPQPLKEQPALNDSRYCLSSRLRVSATFWQNPRNHFRCQVQFYGLSENDEWTQDRAKPVTQIVSAEAWGRADCGFTSESYQQGVLSATILYEILLGKATLYAVLVSALVLMAMVKRKDSRG

SEQ ID NO: 17713 - protein, 456 aa, Artificial Sequence; identical to SEQ ID NO: 17348
  Synthetic Polypeptide

SEQ ID NO: 17714 - protein, 290 aa, Artificial Sequence; identical to SEQ ID NO: 17349
  Synthetic Polypeptide

SEQ ID NO: 17715 - protein, 643 aa, Artificial Sequence
  Synthetic Polypeptide
MALPVTALLLPLALLLHAARPEVQLLESGGGLIQPGGSLRLSCAASGFTFSSHAMTWVRQAPGKGLEWVSAISGSGDYTHYADSVKGRFTISRDNSKNTVYLQMNSLRAEDSAVYYCAKDEDGGSLLGHRGQGTLVTVSSLESGGGGSFEVQLVESGGGLVQPGGSLRLSCAASGFSFSDFWMSWVRQAPGKGLEWVATISQAGSEKDYVDSVKGRFTISRDNAKKSLYLQMNSLRAEDTAVYYCASGVYSFDYRGQGTLVTVSSTRGSGIQNPDPAVYQLRDSKSSDKSVCLFTDFDSQTNVSQSKDSDVYITDKTVLDMRSMDFKSNSAVAWSNKSDFACANAFNNSIIPEDTFFPSSDVPCDVKLVEKSFETDTNLNFQNLSVIGFRILLLKVAGFNLLMTLRLWSSRAKRSGSGVKQTLNFDLLKLAGDVESNPGPSRGHMTEYKPTVRLATRDDVPRAVRTLAAAFADYPATRHTVDPDRHIERVTELQELFLTRVGLDIGKVWVADDGAAVAVWTTPESVEAGAVFAEIGPRMAELSGSRLAAQQQMEGLLAPHRPKEPAWFLATVGVSPDHQGKGLGSAVVLPGVEAAERAGVPAFLETSAPRNLPFYERLGFTVTADVEVPEGPRTWCMTRKPGA

SEQ ID NO: 17716 - protein, 675 aa, Artificial Sequence
  Synthetic Polypeptide
MALPVTALLLPLALLLHAARPEVQLLESGGGLIQPGGSLRLSCAASGFTFSSHAMTWVRQAPGKGLEWVSAISGSGDYTHYADSVKGRFTISRDNSKNTVYLQMNSLRAEDSAVYYCAKDEDGGSLLGHRGQGTLVTVSSLESGGGGSFEVQLVESGGGLVQPGGSLRLSCAASGFSFSDFWMSWVRQAPGKGLEWVATISQAGSEKDYVDSVKGRFTISRDNAKKSLYLQMNSLRAEDTAVYYCASGVYSFDYRGQGTLVTVSSLEDLKNVFPPEVAVFEPSKAEIAHTQKATLVCLATGFYPDHVELSWWVNGKEVHSGVSTDPQPLKEQPALNDSRYCLSSRLRVSATFWQNPRNHFRCQVQFYGLSENDEWTQDRAKPVTQIVSAEAWGRADCGITSASYHQGVLSATILYEILLGKATLYAVLVSALVLMAMVKRKDSRGRAKRSGSGATNFSLLKQAGDVEENPGPTRGHMTEYKPTVRLATRDDVPRAVRTLAAAFADYPATRHTVDPDRHIERVTELQELFLTRVGLDIGKVWVADDGAAVAVWTTPESVEAGAVFAEIGPRMAELSGSRLAAQQQMEGLLAPHRPKEPAWFLATVGVSPDHQGKGLGSAVVLPGVEAAERAGVPAFLETSAPRNLPFYERLGFTVTADVEVPEGPRTWCMTRKPGA

SEQ ID NO: 17717 - protein, 698 aa, Artificial Sequence
  Synthetic Polypeptide
MALPVTALLLPLALLLHAARPEVQLLESGGGLIQPGGSLRLSCAASGFTFSSHAMTWVRQAPGKGLEWVSAISGSGDYTHYADSVKGRFTISRDNSKNTVYLQMNSLRAEDSAVYYCAKDEDGGSLLGHRGQGTLVTVSSLESGGGGSFEVQLVESGGGLVQPGGSLRLSCAASGFSFSDFWMSWVRQAPGKGLEWVATISQAGSEKDYVDSVKGRFTISRDNAKKSLYLQMNSLRAEDTAVYYCASGVYSFDYRGQGTLVTVSSTRGSGGGGSGGGGSGDGNEEMGGITQTPYKVSISGTTVILTCPQYPGSEILWQHNDKNIGGDEDDKNIGSDEDHLSLKEFSELEQSGYYVCYPRGSKPEDANFYLYLRARVCENCMEMDVMSVATIVIVDICITGGLLLLVYYWSKNRKAKAKPVTRGAGAGGRQRGQNKERPPPVPNPDYEPIRKGQRDLYSGLNQRRIRAKRSGSGVKQTLNFDLLKLAGDVESNPGPSRGHMTEYKPTVRLATRDDVPRAVRTLAAAFADYPATRHTVDPDRHIERVTELQELFLTRVGLDIGKVWVADDGAAVAVWTTPESVEAGAVFAEIGPRMAELSGSRLAAQQQMEGLLAPHRPKEPAWFLATVGVSPDHQGKGLGSAVVLPGVEAAERAGVPAFLETSAPRNLPFYERLGFTVTADVEVPEGPRTWCMTRKPGA

SEQ ID NO: 17718 - protein, 663 aa, Artificial Sequence
  Synthetic Polypeptide
MALPVTALLLPLALLLHAARPEVQLLESGGGLIQPGGSLRLSCAASGFTFSSHAMTWVRQAPGKGLEWVSAISGSGDYTHYADSVKGRFTISRDNSKNTVYLQMNSLRAEDSAVYYCAKDEDGGSLLGHRGQGTLVTVSSLESGGGGSFEVQLVESGGGLVQPGGSLRLSCAASGFSFSDFWMSWVRQAPGKGLEWVATISQAGSEKDYVDSVKGRFTISRDNAKKSLYLQMNSLRAEDTAVYYCASGVYSFDYRGQGTLVTVSSTRGSGGGGSGGGGSGFKIPIEELEDRVFVNCNTSITWVEGTVGTLLSDITRLDLGKRILDPRGIYRCNGTDIYKDKESTVQVHYRMCQSCVELDPATVAGIIVTDVIATLLLALGVFCFAGHETGRLSGAADTQALLRNDQVYQPLRDRDDAQYSHLGGNWARNKRAKRSGSGVKQTLNFDLLKLAGDVESNPGPSRGHMTEYKPTVRLATRDDVPRAVRTLAAAFADYPATRHTVDPDRHIERVTELQELFLTRVGLDIGKVWVADDGAAVAVWTTPESVEAGAVFAEIGPRMAELSGSRLAAQQQMEGLLAPHRPKEPAWFLATVGVSPDHQGKGLGSAVVLPGVEAAERAGVPAFLETSAPRNLPFYERLGFTVTADVEVPEGPRTWCMTRKPGA

SEQ ID NO: 17719 - protein, 673 aa, Artificial Sequence
  Synthetic Polypeptide
MALPVTALLLPLALLLHAARPEVQLLESGGGLIQPGGSLRLSCAASGFTFSSHAMTWVRQAPGKGLEWVSAISGSGDYTHYADSVKGRFTISRDNSKNTVYLQMNSLRAEDSAVYYCAKDEDGGSLLGHRGQGTLVTVSSLESGGGGSFEVQLVESGGGLVQPGGSLRLSCAASGFSFSDFWMSWVRQAPGKGLEWVATISQAGSEKDYVDSVKGRFTISRDNAKKSLYLQMNSLRAEDTAVYYCASGVYSFDYRGQGTLVTVSSTRGSGGGGSGGGGSGQSIKGNHLVKVYDYQEDGSVLLTCDAEAKNITWFKDGKMIGFLTEDKKKWNLGSNAKDPRGMYQCKGSQNKSKPLQVYYRMCQNCIELNAATISGFLFAEIVSIFVLAVGVYFIAGQDGVRQSRASDKQTLLPNDQLYQPLKDREDDQYSHLQGNQLRRNRAKRSGSGVKQTLNFDLLKLAGDVESNPGPSRGHMTEYKPTVRLATRDDVPRAVRTLAAAFADYPATRHTVDPDRHIERVTELQELFLTRVGLDIGKVWVADDGAAVAVWTTPESVEAGAVFAEIGPRMAELSGSRLAAQQQMEGLLAPHRPKEPAWFLATVGVSPDHQGKGLGSAVVLPGVEAAERAGVPAFLETSAPRNLPFYERLGFTVTADVEVPEGPRTWCMTRKPGA

SEQ ID NO: 17720 - protein, 656 aa, Artificial Sequence
  Synthetic Polypeptide
MALPVTALLLPLALLLHAARPEVQLLESGGGLIQPGGSLRLSCAASGFTFSSHAMTWVRQAPGKGLEWVSAISGSGDYTHYADSVKGRFTISRDNSKNTVYLQMNSLRAEDSAVYYCAKDEDGGSLLGHRGQGTLVTVSSLESGGGGSFEVQLVESGGGLVQPGGSLRLSCAASGFSFSDFWMSWVRQAPGKGLEWVATISQAGSEKDYVDSVKGRFTISRDNAKKSLYLQMNSLRAEDTAVYYCASGVYSFDYRGQGTLVTVSSTRGSGGGGSGGGGSGQSFGLLDPKLCYLLDGILFIYGVILTALFLRVKFSRSADAPAYQQGQNQLYNELNLGRREEYDVLDKRRGRDPEMGGKPQRRKNPQEGLYNELQKDKMAEAYSEIGMKGERRRGKGHDGLYQGLSTATKDTYDALHMQALPPRRAKRSGSGVKQTLNFDLLKLAGDVESNPGPSRGHMTEYKPTVRLATRDDVPRAVRTLAAAFADYPATRHTVDPDRHIERVTELQELFLTRVGLDIGKVWVADDGAAVAVWTTPESVEAGAVFAEIGPRMAELSGSRLAAQQQMEGLLAPHRPKEPAWFLATVGVSPDHQGKGLGSAVVLPGVEAAERAGVPAFLETSAPRNLPFYERLGFTVTADVEVPEGPRTWCMTRKPGA

SEQ ID NO: 17721 - protein, 864 aa, Artificial Sequence
  Synthetic Polypeptide
MALPVTALLLPLALLLHAARPEVQLLESGGGLIQPGGSLRLSCAASGFTFSSHAMTWVRQAPGKGLEWVSAISGSGDYTHYADSVKGRFTISRDNSKNTVYLQMNSLRAEDSAVYYCAKDEDGGSLLGHRGQGTLVTVSSLEGQPKANPTVTLFPPSSEELQANKATLVCLISDFYPGAVTVAWKADGSPVKAGVETTKPSKQSNNKYAASSYLSLTPEQWKSHRSYSCQVTHEGSTVEKTVAPTECSGRADCGFTSESYQQGVLSATILYEILLGKATLYAVLVSALVLMAMVKRKDSRGRAKRSGSGATNFSLLKQAGDVEENPGPTSMDWIWRILFLVGAATGAHSFEVQLVESGGGLVQPGGSLRLSCAASGFSFSDFWMSWVRQAPGKGLEWVATISQAGSEKDYVDSVKGRFTISRDNAKKSLYLQMNSLRAEDTAVYYCASGVYSFDYRGQGTLVTVSSTRASTKGPSVFPLAPSSKSTSGGTAALGCLVKDYFPEPVTVSWNSGALTSGVHTFPAVLQSSGLYSLSSVVTVPSSSLGTQTYICNVNHKPSNTKVDKRVEPKSCIPEDTFFPSPESSCDVKLVEKSFETDTNLNFQNLSVIGFRILLLKVAGFNLLMTLRLWSSRAKRSGSGVKQTLNFDLLKLAGDVESNPGPSRGHMTEYKPTVRLATRDDVPRAVRTLAAAFADYPATRHTVDPDRHIERVTELQELFLTRVGLDIGKVWVADDGAAVAVWTTPESVEAGAVFAEIGPRMAELSGSRLAAQQQMEGLLAPHRPKEPAWFLATVGVSPDHQGKGLGSAVVLPGVEAAERAGVPAFLETSAPRNLPFYERLGFTVTADVEVPEGPRTWCMTRKPGA

SEQ ID NO: 17722 - protein, 631 aa, Artificial Sequence; identical to SEQ ID NO: 17695
  Synthetic Polypeptide

SEQ ID NO: 17723 - protein, 659 aa, Artificial Sequence
  Synthetic Polypeptide
MALPVTALLLPLALLLHAARPEVQLLESGGGLIQPGGSLRLSCAASGFTFSSHAMTWVRQAPGKGLEWVSAISGSGDYTHYADSVKGRFTISRDNSKNTVYLQMNSLRAEDSAVYYCAKDEDGGSLLGHRGQGTLVTVSSLEGSGRADCGFTSESYQQGVLSATILYEILLGKATLYAVLVSALVLMAMVKRKDSRGRAKRSGSGATNFSLLKQAGDVEENPGPTSMDWIWRILFLVGAATGAHSFEVQLVESGGGLVQPGGSLRLSCAASGFSFSDFWMSWVRQAPGKGLEWVATISQAGSEKDYVDSVKGRFTISRDNAKKSLYLQMNSLRAEDTAVYYCASGVYSFDYRGQGTLVTVSSTRGSIPEDTFFPSPESSCDVKLVEKSFETDTNLNFQNLSVIGFRILLLKVAGFNLLMTLRLWSSRAKRSGSGVKQTLNFDLLKLAGDVESNPGPSRGHMTEYKPTVRLATRDDVPRAVRTLAAAFADYPATRHTVDPDRHIERVTELQELFLTRVGLDIGKVWVADDGAAVAVWTTPESVEAGAVFAEIGPRMAELSGSRLAAQQQMEGLLAPHRPKEPAWFLATVGVSPDHQGKGLGSAVVLPGVEAAERAGVPAFLETSAPRNLPFYERLGFTVTADVEVPEGPRTWCMTRKPGA

SEQ ID NO: 17724 - protein, 426 aa, Artificial Sequence
  Synthetic Polypeptide
MALPVTALLLPLALLLHAARPEVQLLESGGGLIQPGGSLRLSCAASGFTFSSHAMTWVRQAPGKGLEWVSAISGSGDYTHYADSVKGRFTISRDNSKNTVYLQMNSLRAEDSAVYYCAKDEDGGSLLGHRGQGTLVTVSSLEGSGRADCGFTSESYQQGVLSATILYEILLGKATLYAVLVSALVLMAMVKRKDSRGRAKRSGSGATNFSLLKQAGDVEENPGPTSMDWIWRILFLVGAATGAHSFEVQLVESGGGLVQPGGSLRLSCAASGFSFSDFWMSWVRQAPGKGLEWVATISQAGSEKDYVDSVKGRFTISRDNAKKSLYLQMNSLRAEDTAVYYCASGVYSFDYRGQGTLVTVSSTRGSIPEDTFFPSPESSCDVKLVEKSFETDTNLNFQNLSVIGFRILLLKVAGFNLLMTLRLWSS

SEQ ID NO: 17725 - protein, 668 aa, Artificial Sequence
  Synthetic Polypeptide
MALPVTALLLPLALLLHAARPEVQLLESGGGLIQPGGSLRLSCAASGFTFSSHAMTWVRQAPGKGLEWVSAISGSGDYTHYADSVKGRFTISRDNSKNTVYLQMNSLRAEDSAVYYCAKDEDGGSLLGHRGQGTLVTVSSLEDKTHTCPPCPAGRADCGFTSESYQQGVLSATILYEILLGKATLYAVLVSALVLMAMVKRKDSRGRAKRSGSGATNFSLLKQAGDVEENPGPTSMDWIWRILFLVGAATGAHSFEVQLVESGGGLVQPGGSLRLSCAASGFSFSDFWMSWVRQAPGKGLEWVATISQAGSEKDYVDSVKGRFTISRDNAKKSLYLQMNSLRAEDTAVYYCASGVYSFDYRGQGTLVTVSSTRGSIPEDTFFPSPESSCDVKLVEKSFETDTNLNFQNLSVIGFRILLLKVAGFNLLMTLRLWSSRAKRSGSGVKQTLNFDLLKLAGDVESNPGPSRGHMTEYKPTVRLATRDDVPRAVRTLAAAFADYPATRHTVDPDRHIERVTELQELFLTRVGLDIGKVWVADDGAAVAVWTTPESVEAGAVFAEIGPRMAELSGSRLAAQQQMEGLLAPHRPKEPAWFLATVGVSPDHQGKGLGSAVVLPGVEAAERAGVPAFLETSAPRNLPFYERLGFTVTADVEVPEGPRTWCMTRKPGA

SEQ ID NO: 17726 - protein, 668 aa, Artificial Sequence
  Synthetic Polypeptide
MALPVTALLLPLALLLHAARPEVQLLESGGGLIQPGGSLRLSCAASGFTFSSHAMTWVRQAPGKGLEWVSAISGSGDYTHYADSVKGRFTISRDNSKNTVYLQMNSLRAEDSAVYYCAKDEDGGSLLGHRGQGTLVTVSSLEGSGRADCGFTSESYQQGVLSATILYEILLGKATLYAVLVSALVLMAMVKRKDSRGRAKRSGSGATNFSLLKQAGDVEENPGPTSMDWIWRILFLVGAATGAHSFEVQLVESGGGLVQPGGSLRLSCAASGFSFSDFWMSWVRQAPGKGLEWVATISQAGSEKDYVDSVKGRFTISRDNAKKSLYLQMNSLRAEDTAVYYCASGVYSFDYRGQGTLVTVSSTRDKTHTCPPCPAIPEDTFFPSPESSCDVKLVEKSFETDTNLNFQNLSVIGFRILLLKVAGFNLLMTLRLWSSRAKRSGSGVKQTLNFDLLKLAGDVESNPGPSRGHMTEYKPTVRLATRDDVPRAVRTLAAAFADYPATRHTVDPDRHIERVTELQELFLTRVGLDIGKVWVADDGAAVAVWTTPESVEAGAVFAEIGPRMAELSGSRLAAQQQMEGLLAPHRPKEPAWFLATVGVSPDHQGKGLGSAVVLPGVEAAERAGVPAFLETSAPRNLPFYERLGFTVTADVEVPEGPRTWCMTRKPGA

SEQ ID NO: 17727 - protein, 677 aa, Artificial Sequence
  Synthetic Polypeptide
MALPVTALLLPLALLLHAARPEVQLLESGGGLIQPGGSLRLSCAASGFTFSSHAMTWVRQAPGKGLEWVSAISGSGDYTHYADSVKGRFTISRDNSKNTVYLQMNSLRAEDSAVYYCAKDEDGGSLLGHRGQGTLVTVSSLEDKTHTCPPCPAGRADCGFTSESYQQGVLSATILYEILLGKATLYAVLVSALVLMAMVKRKDSRGRAKRSGSGATNFSLLKQAGDVEENPGPTSMDWIWRILFLVGAATGAHSFEVQLVESGGGLVQPGGSLRLSCAASGFSFSDFWMSWVRQAPGKGLEWVATISQAGSEKDYVDSVKGRFTISRDNAKKSLYLQMNSLRAEDTAVYYCASGVYSFDYRGQGTLVTVSSTRDKTHTCPPCPAIPEDTFFPSPESSCDVKLVEKSFETDTNLNFQNLSVIGFRILLLKVAGFNLLMTLRLWSSRAKRSGSGVKQTLNFDLLKLAGDVESNPGPSRGHMTEYKPTVRLATRDDVPRAVRTLAAAFADYPATRHTVDPDRHIERVTELQELFLTRVGLDIGKVWVADDGAAVAVWTTPESVEAGAVFAEIGPRMAELSGSRLAAQQQMEGLLAPHRPKEPAWFLATVGVSPDHQGKGLGSAVVLPGVEAAERAGVPAFLETSAPRNLPFYERLGFTVTADVEVPEGPRTWCMTRKPGA

SEQ ID NO: 17728 - protein, 444 aa, Artificial Sequence
  Synthetic Polypeptide
MALPVTALLLPLALLLHAARPEVQLLESGGGLIQPGGSLRLSCAASGFTFSSHAMTWVRQAPGKGLEWVSAISGSGDYTHYADSVKGRFTISRDNSKNTVYLQMNSLRAEDSAVYYCAKDEDGGSLLGHRGQGTLVTVSSLEDKTHTCPPCPAGRADCGFTSESYQQGVLSATILYEILLGKATLYAVLVSALVLMAMVKRKDSRGRAKRSGSGATNFSLLKQAGDVEENPGPTSMDWIWRILFLVGAATGAHSFEVQLVESGGGLVQPGGSLRLSCAASGFSFSDFWMSWVRQAPGKGLEWVATISQAGSEKDYVDSVKGRFTISRDNAKKSLYLQMNSLRAEDTAVYYCASGVYSFDYRGQGTLVTVSSTRDKTHTCPPCPAIPEDTFFPSPESSCDVKLVEKSFETDTNLNFQNLSVIGFRILLLKVAGFNLLMTLRLWSS

SEQ ID NO: 17729 - protein, 435 aa, Artificial Sequence
  Synthetic Polypeptide
MALPVTALLLPLALLLHAARPEVQLLESGGGLIQPGGSLRLSCAASGFTFSSHAMTWVRQAPGKGLEWVSAISGSGDYTHYADSVKGRFTISRDNSKNTVYLQMNSLRAEDSAVYYCAKDEDGGSLLGHRGQGTLVTVSSLEGSGRADCGFTSESYQQGVLSATILYEILLGKATLYAVLVSALVLMAMVKRKDSRGRAKRSGSGATNFSLLKQAGDVEENPGPTSMDWIWRILFLVGAATGAHSFEVQLVESGGGLVQPGGSLRLSCAASGFSFSDFWMSWVRQAPGKGLEWVATISQAGSEKDYVDSVKGRFTISRDNAKKSLYLQMNSLRAEDTAVYYCASGVYSFDYRGQGTLVTVSSTRDKTHTCPPCPAIPEDTFFPSPESSCDVKLVEKSFETDTNLNFQNLSVIGFRILLLKVAGFNLLMTLRLWSS

SEQ ID NO: 17730 - protein, 886 aa, Artificial Sequence
  Synthetic Polypeptide
MALPVTALLLPLALLLHAARPEVQLLESGGGLIQPGGSLRLSCAASGFTFSSHAMTWVRQAPGKGLEWVSAISGSGDYTHYADSVKGRFTISRDNSKNTVYLQMNSLRAEDSAVYYCAKDEDGGSLLGHRGQGTLVTVSSLEGQPKANPTVTLFPPSSEELQANKATLVCLISDFYPGAVTVAWKADGSPVKAGVETTKPSKQSNNKYAASSYLSLTPEQWKSHRSYSCQVTHEGSTVEKTVAPTECSPIKTDVITMDPKDNCSKDANDTLLLQLTNTSAYYMYLLLLLKSVVYFAIITCCLLRRTAFCCNGEKSRAKRSGSGATNFSLLKQAGDVEENPGPTSMDWIWRILFLVGAATGAHSFEVQLVESGGGLVQPGGSLRLSCAASGFSFSDFWMSWVRQAPGKGLEWVATISQAGSEKDYVDSVKGRFTISRDNAKKSLYLQMNSLRAEDTAVYYCASGVYSFDYRGQGTLVTVSSTRASTKGPSVFPLAPSSKSTSGGTAALGCLVKDYFPEPVTVSWNSGALTSGVHTFPAVLQSSGLYSLSSVVTVPSSSLGTQTYICNVNHKPSNTKVDKRVEPKSCEVKTDSTDHVKPKETENTKQPSKSCHKPKAIVHTEKVNMMSLTVLGLRMLFAKTVAVNFLLTAKLFFLRAKRSGSGVKQTLNFDLLKLAGDVESNPGPSRGHMTEYKPTVRLATRDDVPRAVRTLAAAFADYPATRHTVDPDRHIERVTELQELFLTRVGLDIGKVWVADDGAAVAVWTTPESVEAGAVFAEIGPRMAELSGSRLAAQQQMEGLLAPHRPKEPAWFLATVGVSPDHQGKGLGSAVVLPGVEAAERAGVPAFLETSAPRNLPFYERLGFTVTADVEVPEGPRTWCMTRKPGA

SEQ ID NO: 17731 - protein, 653 aa, Artificial Sequence; identical to SEQ ID NO: 17693
  Synthetic Polypeptide

SEQ ID NO: 17732 - protein, 681 aa, Artificial Sequence
  Synthetic Polypeptide
MALPVTALLLPLALLLHAARPEVQLLESGGGLIQPGGSLRLSCAASGFTFSSHAMTWVRQAPGKGLEWVSAISGSGDYTHYADSVKGRFTISRDNSKNTVYLQMNSLRAEDSAVYYCAKDEDGGSLLGHRGQGTLVTVSSLEGSPIKTDVITMDPKDNCSKDANDTLLLQLTNTSAYYMYLLLLLKSVVYFAIITCCLLRRTAFCCNGEKSRAKRSGSGATNFSLLKQAGDVEENPGPTSMDWIWRILFLVGAATGAHSFEVQLVESGGGLVQPGGSLRLSCAASGFSFSDFWMSWVRQAPGKGLEWVATISQAGSEKDYVDSVKGRFTISRDNAKKSLYLQMNSLRAEDTAVYYCASGVYSFDYRGQGTLVTVSSTRGSEVKTDSTDHVKPKETENTKQPSKSCHKPKAIVHTEKVNMMSLTVLGLRMLFAKTVAVNFLLTAKLFFLRAKRSGSGVKQTLNFDLLKLAGDVESNPGPSRGHMTEYKPTVRLATRDDVPRAVRTLAAAFADYPATRHTVDPDRHIERVTELQELFLTRVGLDIGKVWVADDGAAVAVWTTPESVEAGAVFAEIGPRMAELSGSRLAAQQQMEGLLAPHRPKEPAWFLATVGVSPDHQGKGLGSAVVLPGVEAAERAGVPAFLETSAPRNLPFYERLGFTVTADVEVPEGPRTWCMTRKPGA

SEQ ID NO: 17733 - protein, 448 aa, Artificial Sequence
  Synthetic Polypeptide
MALPVTALLLPLALLLHAARPEVQLLESGGGLIQPGGSLRLSCAASGFTFSSHAMTWVRQAPGKGLEWVSAISGSGDYTHYADSVKGRFTISRDNSKNTVYLQMNSLRAEDSAVYYCAKDEDGGSLLGHRGQGTLVTVSSLEGSPIKTDVITMDPKDNCSKDANDTLLLQLTNTSAYYMYLLLLLKSVVYFAIITCCLLRRTAFCCNGEKSRAKRSGSGATNFSLLKQAGDVEENPGPTSMDWIWRILFLVGAATGAHSFEVQLVESGGGLVQPGGSLRLSCAASGFSFSDFWMSWVRQAPGKGLEWVATISQAGSEKDYVDSVKGRFTISRDNAKKSLYLQMNSLRAEDTAVYYCASGVYSFDYRGQGTLVTVSSTRGSEVKTDSTDHVKPKETENTKQPSKSCHKPKAIVHTEKVNMMSLTVLGLRMLFAKTVAVNFLLTAKLFFL

SEQ ID NO: 17734 - protein, 690 aa, Artificial Sequence
  Synthetic Polypeptide
MALPVTALLLPLALLLHAARPEVQLLESGGGLIQPGGSLRLSCAASGFTFSSHAMTWVRQAPGKGLEWVSAISGSGDYTHYADSVKGRFTISRDNSKNTVYLQMNSLRAEDSAVYYCAKDEDGGSLLGHRGQGTLVTVSSLEDKTHTCPPCPAPIKTDVITMDPKDNCSKDANDTLLLQLTNTSAYYMYLLLLLKSVVYFAIITCCLLRRTAFCCNGEKSRAKRSGSGATNFSLLKQAGDVEENPGPTSMDWIWRILFLVGAATGAHSFEVQLVESGGGLVQPGGSLRLSCAASGFSFSDFWMSWVRQAPGKGLEWVATISQAGSEKDYVDSVKGRFTISRDNAKKSLYLQMNSLRAEDTAVYYCASGVYSFDYRGQGTLVTVSSTRGSEVKTDSTDHVKPKETENTKQPSKSCHKPKAIVHTEKVNMMSLTVLGLRMLFAKTVAVNFLLTAKLFFLRAKRSGSGVKQTLNFDLLKLAGDVESNPGPSRGHMTEYKPTVRLATRDDVPRAVRTLAAAFADYPATRHTVDPDRHIERVTELQELFLTRVGLDIGKVWVADDGAAVAVWTTPESVEAGAVFAEIGPRMAELSGSRLAAQQQMEGLLAPHRPKEPAWFLATVGVSPDHQGKGLGSAVVLPGVEAAERAGVPAFLETSAPRNLPFYERLGFTVTADVEVPEGPRTWCMTRKPGA

SEQ ID NO: 17735 - protein, 690 aa, Artificial Sequence
  Synthetic Polypeptide
MALPVTALLLPLALLLHAARPEVQLLESGGGLIQPGGSLRLSCAASGFTFSSHAMTWVRQAPGKGLEWVSAISGSGDYTHYADSVKGRFTISRDNSKNTVYLQMNSLRAEDSAVYYCAKDEDGGSLLGHRGQGTLVTVSSLEGSPIKTDVITMDPKDNCSKDANDTLLLQLTNTSAYYMYLLLLLKSVVYFAIITCCLLRRTAFCCNGEKSRAKRSGSGATNFSLLKQAGDVEENPGPTSMDWIWRILFLVGAATGAHSFEVQLVESGGGLVQPGGSLRLSCAASGFSFSDFWMSWVRQAPGKGLEWVATISQAGSEKDYVDSVKGRFTISRDNAKKSLYLQMNSLRAEDTAVYYCASGVYSFDYRGQGTLVTVSSTRDKTHTCPPCPAEVKTDSTDHVKPKETENTKQPSKSCHKPKAIVHTEKVNMMSLTVLGLRMLFAKTVAVNFLLTAKLFFLRAKRSGSGVKQTLNFDLLKLAGDVESNPGPSRGHMTEYKPTVRLATRDDVPRAVRTLAAAFADYPATRHTVDPDRHIERVTELQELFLTRVGLDIGKVWVADDGAAVAVWTTPESVEAGAVFAEIGPRMAELSGSRLAAQQQMEGLLAPHRPKEPAWFLATVGVSPDHQGKGLGSAVVLPGVEAAERAGVPAFLETSAPRNLPFYERLGFTVTADVEVPEGPRTWCMTRKPGA

SEQ ID NO: 17736 - protein, 699 aa, Artificial Sequence
  Synthetic Polypeptide
MALPVTALLLPLALLLHAARPEVQLLESGGGLIQPGGSLRLSCAASGFTFSSHAMTWVRQAPGKGLEWVSAISGSGDYTHYADSVKGRFTISRDNSKNTVYLQMNSLRAEDSAVYYCAKDEDGGSLLGHRGQGTLVTVSSLEDKTHTCPPCPAPIKTDVITMDPKDNCSKDANDTLLLQLTNTSAYYMYLLLLLKSVVYFAIITCCLLRRTAFCCNGEKSRAKRSGSGATNFSLLKQAGDVEENPGPTSMDWIWRILFLVGAATGAHSFEVQLVESGGGLVQPGGSLRLSCAASGFSFSDFWMSWVRQAPGKGLEWVATISQAGSEKDYVDSVKGRFTISRDNAKKSLYLQMNSLRAEDTAVYYCASGVYSFDYRGQGTLVTVSSTRDKTHTCPPCPAEVKTDSTDHVKPKETENTKQPSKSCHKPKAIVHTEKVNMMSLTVLGLRMLFAKTVAVNFLLTAKLFFLRAKRSGSGVKQTLNFDLLKLAGDVESNPGPSRGHMTEYKPTVRLATRDDVPRAVRTLAAAFADYPATRHTVDPDRHIERVTELQELFLTRVGLDIGKVWVADDGAAVAVWTTPESVEAGAVFAEIGPRMAELSGSRLAAQQQMEGLLAPHRPKEPAWFLATVGVSPDHQGKGLGSAVVLPGVEAAERAGVPAFLETSAPRNLPFYERLGFTVTADVEVPEGPRTWCMTRKPGA

SEQ ID NO: 17737 - protein, 466 aa, Artificial Sequence
  Synthetic Polypeptide
MALPVTALLLPLALLLHAARPEVQLLESGGGLIQPGGSLRLSCAASGFTFSSHAMTWVRQAPGKGLEWVSAISGSGDYTHYADSVKGRFTISRDNSKNTVYLQMNSLRAEDSAVYYCAKDEDGGSLLGHRGQGTLVTVSSLEDKTHTCPPCPAPIKTDVITMDPKDNCSKDANDTLLLQLTNTSAYYMYLLLLLKSVVYFAIITCCLLRRTAFCCNGEKSRAKRSGSGATNFSLLKQAGDVEENPGPTSMDWIWRILFLVGAATGAHSFEVQLVESGGGLVQPGGSLRLSCAASGFSFSDFWMSWVRQAPGKGLEWVATISQAGSEKDYVDSVKGRFTISRDNAKKSLYLQMNSLRAEDTAVYYCASGVYSFDYRGQGTLVTVSSTRDKTHTCPPCPAEVKTDSTDHVKPKETENTKQPSKSCHKPKAIVHTEKVNMMSLTVLGLRMLFAKTVAVNFLLTAKLFFL

SEQ ID NO: 17738 - protein, 732 aa, Artificial Sequence
  Synthetic Polypeptide
MALPVTALLLPLALLLHAARPQVQLVESGGGLVQPGGSLRLSCAASGFTFTNHAMSWVRQAPGKGLELVSSISGNGRTTYYADSVKGRFTISRDISKNTLDLQMNSLRAEDTAVYYCAKDGGETLVDSRGQGTLVTVSSLESGGGGSFEEVQLLESGGGLVQPGGSLRLSCAASGFIFSSYAMSWVRQAPGKGQEWVSGVSGTGVNTYYADSVKGRFTISRDNSKNTLYLQMNSLRAEDTAVYYCASGKGWDSGSWYEDYRGQGTLVTVSSTREQKLISEEDLAKPTTTPAPRPPTPAPTIASQPLSLRPEACRPAAGGAVHTRGLDFACDIYIWAPLAGTCGVLLLSLVITLYCKRGRKKLLYIFKQPFMRPVQTTQEEDGCSCRFPEEEEGGCELRVKFSRSADAPAYQQGQNQLYNELNLGRREEYDVLDKRRGRDPEMGGKPRRKNPQEGLYNELQKDKMAEAYSEIGMKGERRRGKGHDGLYQGLSTATKDTYDALHMQALPPRSSGSGEGRGSLLTCGDVEENPGPHMTEYKPTVRLATRDDVPRAVRTLAAAFADYPATRHTVDPDRHIERVTELQELFLTRVGLDIGKVWVADDGAAVAVWTTPESVEAGAVFAEIGPRMAELSGSRLAAQQQMEGLLAPHRPKEPAWFLATVGVSPDHQGKGLGSAVVLPGVEAAERAGVPAFLETSAPRNLPFYERLGFTVTADVEVPEGPRTWCMTRKPGA

SEQ ID NO: 17739 - protein, 726 aa, Artificial Sequence
  Synthetic Polypeptide
MALPVTALLLPLALLLHAARPQVQLVESGGGLVQPGGSLRLSCAASGFTFTNHAMSWVRQAPGKGLELVSSISGNGRTTYYADSVKGRFTISRDISKNTLDLQMNSLRAEDTAVYYCAKDGGETLVDSRGQGTLVTVSSLESGGGGSFEEVQLLESGGGLVQPGGSLRLSCAASGFIFSSYAMSWVRQAPGKGQEWVSGVSGTGVNTYYADSVKGRFTISRDNSKNTLYLQMNSLRAEDTAVYYCASGKGWDSGSWYEDYRGQGTLVTVSSTREQKLISEEDLKIEVMYPPPYLDNEKSNGTIIHVKGKHLCPSPLFPGPSKPFWVLVVVGGVLACYSLLVTVAFIIFWVRSKRSRLLHSDYMNMTPRRPGPTRKHYQPYAPPRDFAAYRSRVKFSRSADAPAYQQGQNQLYNELNLGRREEYDVLDKRRGRDPEMGGKPRRKNPQEGLYNELQKDKMAEAYSEIGMKGERRRGKGHDGLYQGLSTATKDTYDALHMQALPPRSSGSGEGRGSLLTCGDVEENPGPHMTEYKPTVRLATRDDVPRAVRTLAAAFADYPATRHTVDPDRHIERVTELQELFLTRVGLDIGKVWVADDGAAVAVWTTPESVEAGAVFAEIGPRMAELSGSRLAAQQQMEGLLAPHRPKEPAWFLATVGVSPDHQGKGLGSAVVLPGVEAAERAGVPAFLETSAPRNLPFYERLGFTVTADVEVPEGPRTWCMTRKPGA

SEQ ID NO: 17740 - protein, 503 aa, Artificial Sequence
  Synthetic Polypeptide
MALPVTALLLPLALLLHAARPQVQLVESGGGLVQPGGSLRLSCAASGFTFTNHAMSWVRQAPGKGLELVSSISGNGRTTYYADSVKGRFTISRDISKNTLDLQMNSLRAEDTAVYYCAKDGGETLVDSRGQGTLVTVSSLESGGGGSFEEVQLLESGGGLVQPGGSLRLSCAASGFIFSSYAMSWVRQAPGKGQEWVSGVSGTGVNTYYADSVKGRFTISRDNSKNTLYLQMNSLRAEDTAVYYCASGKGWDSGSWYEDYRGQGTLVTVSSTREQKLISEEDLKIEVMYPPPYLDNEKSNGTIIHVKGKHLCPSPLFPGPSKPFWVLVVVGGVLACYSLLVTVAFIIFWVRSKRSRLLHSDYMNMTPRRPGPTRKHYQPYAPPRDFAAYRSRVKFSRSADAPAYQQGQNQLYNELNLGRREEYDVLDKRRGRDPEMGGKPRRKNPQEGLYNELQKDKMAEAYSEIGMKGERRRGKGHDGLYQGLSTATKDTYDALHMQALPPR

SEQ ID NO: 17741 - protein, 509 aa, Artificial Sequence
  Synthetic Polypeptide
MALPVTALLLPLALLLHAARPQVQLVESGGGLVQPGGSLRLSCAASGFTFTNHAMSWVRQAPGKGLELVSSISGNGRTTYYADSVKGRFTISRDISKNTLDLQMNSLRAEDTAVYYCAKDGGETLVDSRGQGTLVTVSSLESGGGGSFEEVQLLESGGGLVQPGGSLRLSCAASGFIFSSYAMSWVRQAPGKGQEWVSGVSGTGVNTYYADSVKGRFTISRDNSKNTLYLQMNSLRAEDTAVYYCASGKGWDSGSWYEDYRGQGTLVTVSSTREQKLISEEDLAKPTTTPAPRPPTPAPTIASQPLSLRPEACRPAAGGAVHTRGLDFACDIYIWAPLAGTCGVLLLSLVITLYCKRGRKKLLYIFKQPFMRPVQTTQEEDGCSCRFPEEEEGGCELRVKFSRSADAPAYQQGQNQLYNELNLGRREEYDVLDKRRGRDPEMGGKPRRKNPQEGLYNELQKDKMAEAYSEIGMKGERRRGKGHDGLYQGLSTATKDTYDALHMQALPPR

SEQ ID NO: 17742 - protein, 510 aa, Artificial Sequence
  Synthetic Polypeptide
MALPVTALLLPLALLLHAARPEEVQLLESGGGLVQPGGSLRLSCAASGFIFSSYAMSWVRQAPGKGQEWVSGVSGTGVNTYYADSVKGRFTISRDNSKNTLYLQMNSLRAEDTAVYYCASGKGWDSGSWYEDYRGQGTLVTVSSLESGGGGSFEQVQLVESGGGLVQPGGSLRLSCAASGFTFTNHAMSWVRQAPGKGLELVSSISGNGRTTYYADSVKGRFTISRDISKNTLDLQMNSLRAEDTAVYYCAKDGGETLVDSRGQGTLVTVSSTREQKLISEEDLAKPTTTPAPRPPTPAPTIASQPLSLRPEACRPAAGGAVHTRGLDFACDIYIWAPLAGTCGVLLLSLVITLYCKRGRKKLLYIFKQPFMRPVQTTQEEDGCSCRFPEEEEGGCELRVKFSRSADAPAYQQGQNQLYNELNLGRREEYDVLDKRRGRDPEMGGKPRRKNPQEGLYNELQKDKMAEAYSEIGMKGERRRGKGHDGLYQGLSTATKDTYDALHMQALPPR

SEQ ID NO: 17743 - protein, 922 aa, Artificial Sequence
  Synthetic Polypeptide
MALPVTALLLPLALLLHAARPQVQLVESGGGLVQPGGSLRLSCAASGFTFTNHAMSWVRQAPGKGLELVSSISGNGRTTYYADSVKGRFTISRDISKNTLDLQMNSLRAEDTAVYYCAKDGGETLVDSRGQGTLVTVSSLESGGGGSFEEVQLLESGGGLVQPGGSLRLSCAASGFIFSSYAMSWVRQAPGKGQEWVSGVSGTGVNTYYADSVKGRFTISRDNSKNTLYLQMNSLRAEDTAVYYCASGKGWDSGSWYEDYRGQGTLVTVSSTREQKLISEEDLAKPTTTPAPRPPTPAPTIASQPLSLRPEACRPAAGGAVHTRGLDFACDIYIWAPLAGTCGVLLLSLVITLYCGRARVKFSRSADAPAYQQGQNQLYNELNLGRREEYDVLDKRRGRDPEMGGKPRRKNPQEGLYNELQKDKMAEAYSEIGMKGERRRGKGHDGLYQGLSTATKDTYDALHMQALPPRSRGSGATNFSLLKQAGDVEENPGPGIHMATYEVLCEVARKLGTDDREVVLFLLNVFIPQPTLAQLIGALRALKEEGRLTFPLLAECLFRAGRRDLLRDLLHLDPRFLERHLAGTMSYFSPYQLTVLHVDGELCARDIRSLIFLSKDTIGSRSTPQTFLHWVYCMENLDLLGPTDVDALMSMLRSLSRVDLQRQVQTLMGLHLSGPSHSQHYRHTPLETDFYDYKDDDDKTSGSGEGRGSLLTCGDVEENPGPHMTEYKPTVRLATRDDVPRAVRTLAAAFADYPATRHTVDPDRHIERVTELQELFLTRVGLDIGKVWVADDGAAVAVWTTPESVEAGAVFAEIGPRMAELSGSRLAAQQQMEGLLAPHRPKEPAWFLATVGVSPDHQGKGLGSAVVLPGVEAAERAGVPAFLETSAPRNLPFYERLGFTVTADVEVPEGPRTWCMTRKPGA

SEQ ID NO: 17744 - protein, 867 aa, Artificial Sequence
  Synthetic Polypeptide
MALPVTALLLPLALLLHAARPQVQLVESGGGLVQPGGSLRLSCAASGFTFTNHAMSWVRQAPGKGLELVSSISGNGRTTYYADSVKGRFTISRDISKNTLDLQMNSLRAEDTAVYYCAKDGGETLVDSRGQGTLVTVSSLEIQNPDPAVYQLRDSKSSDKSVCLFTDFDSQTNVSQSKDSDVYITDKCVLDMRSMDFKSNSAVAWSNKSDFACANAFNNSIIPEDTFFPSSDVPCDVKLVEKSFETDTNLNFQNLSVIGFRILLLKVAGFNLLMTLRLWSSRAKRSGSGVKQTLNFDLLKLAGDVESNPGPTSMDWIWRILFLVGAATGAHSFEEVQLLESGGGLVQPGGSLRLSCAASGFIFSSYAMSWVRQAPGKGQEWVSGVSGTGVNTYYADSVKGRFTISRDNSKNTLYLQMNSLRAEDTAVYYCASGKGWDSGSWYEDYRGQGTLVTVSSTREDLKNVFPPEVAVFEPSKAEIAHTQKATLVCLATGFYPDHVELSWWVNGKEVHSGVCTDPQPLKEQPALNDSRYCLSSRLRVSATFWQNPRNHFRCQVQFYGLSENDEWTQDRAKPVTQIVSAEAWGRADCGITSASYHQGVLSATILYEILLGKATLYAVLVSALVLMAMVKRKDSRGRAKRSGSGATNFSLLKQAGDVEENPGPSRGHMTEYKPTVRLATRDDVPRAVRTLAAAFADYPATRHTVDPDRHIERVTELQELFLTRVGLDIGKVWVADDGAAVAVWTTPESVEAGAVFAEIGPRMAELSGSRLAAQQQMEGLLAPHRPKEPAWFLATVGVSPDHQGKGLGSAVVLPGVEAAERAGVPAFLETSAPRNLPFYERLGFTVTADVEVPEGPRTWCMTRKPGA

SEQ ID NO: 17745 - protein, 866 aa, Artificial Sequence
  Synthetic Polypeptide
MALPVTALLLPLALLLHAARPQVQLVESGGGLVQPGGSLRLSCAASGFTFTNHAMSWVRQAPGKGLELVSSISGNGRTTYYADSVKGRFTISRDISKNTLDLQMNSLRAEDTAVYYCAKDGGETLVDSRGQGTLVTVSSLEDLKNVFPPEVAVFEPSKAEIAHTQKATLVCLATGFYPDHVELSWWVNGKEVHSGVCTDPQPLKEQPALNDSRYCLSSRLRVSATFWQNPRNHFRCQVQFYGLSENDEWTQDRAKPVTQIVSAEAWGRADCGITSASYHQGVLSATILYEILLGKATLYAVLVSALVLMAMVKRKDSRGRAKRSGSGATNFSLLKQAGDVEENPGPTSMDWIWRILFLVGAATGAHSFEEVQLLESGGGLVQPGGSLRLSCAASGFIFSSYAMSWVRQAPGKGQEWVSGVSGTGVNTYYADSVKGRFTISRDNSKNTLYLQMNSLRAEDTAVYYCASGKGWDSGSWYEDYRGQGTLVTVSSTRIQNPDPAVYQLRDSKSSDKSVCLFTDFDSQTNVSQSKDSDVYITDKCVLDMRSMDFKSNSAVAWSNKSDFACANAFNNSIIPEDTFFPSSDVPCDVKLVEKSFETDTNLNFQNLSVIGFRILLLKVAGFNLLMTLRLWSSRAKRSGSGVKQTLNFDLLKLAGDVESNPGPSRGHMTEYKPTVRLATRDDVPRAVRTLAAAFADYPATRHTVDPDRHIERVTELQELFLTRVGLDIGKVWVADDGAAVAVWTTPESVEAGAVFAEIGPRMAELSGSRLAAQQQMEGLLAPHRPKEPAWFLATVGVSPDHQGKGLGSAVVLPGVEAAERAGVPAFLETSAPRNLPFYERLGFTVTADVEVPEGPRTWCMTRKPGA

SEQ ID NO: 17746 - protein, 633 aa, Artificial Sequence
  Synthetic Polypeptide
MALPVTALLLPLALLLHAARPQVQLVESGGGLVQPGGSLRLSCAASGFTFTNHAMSWVRQAPGKGLELVSSISGNGRTTYYADSVKGRFTISRDISKNTLDLQMNSLRAEDTAVYYCAKDGGETLVDSRGQGTLVTVSSLEDLKNVFPPEVAVFEPSEAEISHTQKATLVCLATGFYPDHVELSWWVNGKEVHSGVCTDPQPLKEQPALNDSRYCLSSRLRVSATFWQNPRNHFRCQVQFYGLSENDEWTQDRAKPVTQIVSAEAWGRADCGFTSESYQQGVLSATILYEILLGKATLYAVLVSALVLMAMVKRKDSRGRAKRSGSGATNFSLLKQAGDVEENPGPTSMDWIWRILFLVGAATGAHSFEEVQLLESGGGLVQPGGSLRLSCAASGFIFSSYAMSWVRQAPGKGQEWVSGVSGTGVNTYYADSVKGRFTISRDNSKNTLYLQMNSLRAEDTAVYYCASGKGWDSGSWYEDYRGQGTLVTVSSTRIQNPDPAVYQLRDSKSSDKSVCLFTDFDSQTNVSQSKDSDVYITDKCVLDMRSMDFKSNSAVAWSNKSDFACANAFNNSIIPEDTFFPSPESSCDVKLVEKSFETDTNLNFQNLSVIGFRILLLKVAGFNLLMTLRLWSS

SEQ ID NO: 17747 - protein, 858 aa, Artificial Sequence
  Synthetic Polypeptide
MALPVTALLLPLALLLHAARPQVQLVESGGGLVQPGGSLRLSCAASGFTFTNHAMSWVRQAPGKGLELVSSISGNGRTTYYADSVKGRFTISRDISKNTLDLQMNSLRAEDTAVYYCAKDGGETLVDSRGQGTLVTVSSLEDLKNVFPPEVAVFEPSEAEISHTQKATLVCLATGFYPDHVELSWWVNGKEVHSGVCTDPQPLKEQPALNDSRYCLSSRLRVSATFWQNPRNHFRCQVQFYGLSENDEWTQDRAKPVTQIVSAEAWGRADCGFTSESYQQGVLSATILYEILLGKATLYAVLVSALVLMAMVKRKDSRGRAKRSGSGATNFSLLKQAGDVEENPGPTSMDWIWRILFLVGAATGAHSFEEVQLLESGGGLVQPGGSLRLSCAASGFIFSSYAMSWVRQAPGKGQEWVSGVSGTGVNTYYADSVKGRFTISRDNSKNTLYLQMNSLRAEDTAVYYCASGKGWDSGSWYEDYRGQGTLVTVSSTRIQNPDPAVYQLRDSKSSDKSVCLFTDFDSQTNVSQSKDSDVYITDKCVLDMRSMDFKSNSAVAWSNKSDFACANAFNNSIIPEDTFFPSPESSCDVKLVEKSFETDTNLNFQNLSVIGFRILLLKVAGFNLLMTLRLWSSRAKRSGSGVKQTLNFDLLKLAGDVESNPGPSRGGIHTMATYEVLCEVARKLGTDDREVVLFLLNVFIPQPTLAQLIGALRALKEEGRLTFPLLAECLFRAGRRDLLRDLLHLDPRFLERHLAGTMSYFSPYQLTVLHVDGELCARDIRSLIFLSKDTIGSRSTPQTFLHWVYCMENLDLLGPTDVDALMSMLRSLSRVDLQRQVQTLMGLHLSGPSHSQHYRHTP

SEQ ID NO: 17748 - protein, 637 aa, Artificial Sequence
  Synthetic Polypeptide
MALPVTALLLPLALLLHAARPQVQLVESGGGLVQPGGSLRLSCAASGFTFTNHAMSWVRQAPGKGLELVSSISGNGRTTYYADSVKGRFTISRDISKNTLDLQMNSLRAEDTAVYYCAKDGGETLVDSRGQGTLVTVSSLEIQNPDPAVYQLRDSKSSDKSVCLFTDFDSQTNVSQSKDSDVYITDKCVLDMRSMDFKSNSAVAWSNKSDFACANAFNNSIIPEDTFFPSPESSCDVKLVEKSFETDTNLNFQNLSVIGFRILLLKVAGFNLLMTLRLWSSRAKRSGSGVKQTLNFDLLKLAGDVESNPGPTSMDWIWRILFLVGAATGAHSFEEVQLLESGGGLVQPGGSLRLSCAASGFIFSSYAMSWVRQAPGKGQEWVSGVSGTGVNTYYADSVKGRFTISRDNSKNTLYLQMNSLRAEDTAVYYCASGKGWDSGSWYEDYRGQGTLVTVSSTREDLKNVFPPEVAVFEPSEAEISHTQKATLVCLATGFYPDHVELSWWVNGKEVHSGVCTDPQPLKEQPALNDSRYCLSSRLRVSATFWQNPRNHFRCQVQFYGLSENDEWTQDRAKPVTQIVSAEAWGRADCGFTSESYQQGVLSATILYEILLGKATLYAVLVSALVLMAMVKRKDSRG

SEQ ID NO: 17749 - protein, 859 aa, Artificial Sequence
  Synthetic Polypeptide
MALPVTALLLPLALLLHAARPQVQLVESGGGLVQPGGSLRLSCAASGFTFTNHAMSWVRQAPGKGLELVSSISGNGRTTYYADSVKGRFTISRDISKNTLDLQMNSLRAEDTAVYYCAKDGGETLVDSRGQGTLVTVSSLEIQNPDPAVYQLRDSKSSDKSVCLFTDFDSQTNVSQSKDSDVYITDKCVLDMRSMDFKSNSAVAWSNKSDFACANAFNNSIIPEDTFFPSPESSCDVKLVEKSFETDTNLNFQNLSVIGFRILLLKVAGFNLLMTLRLWSSRAKRSGSGVKQTLNFDLLKLAGDVESNPGPTSMDWIWRILFLVGAATGAHSFEEVQLLESGGGLVQPGGSLRLSCAASGFIFSSYAMSWVRQAPGKGQEWVSGVSGTGVNTYYADSVKGRFTISRDNSKNTLYLQMNSLRAEDTAVYYCASGKGWDSGSWYEDYRGQGTLVTVSSTREDLKNVFPPEVAVFEPSEAEISHTQKATLVCLATGFYPDHVELSWWVNGKEVHSGVCTDPQPLKEQPALNDSRYCLSSRLRVSATFWQNPRNHFRCQVQFYGLSENDEWTQDRAKPVTQIVSAEAWGRADCGFTSESYQQGVLSATILYEILLGKATLYAVLVSALVLMAMVKRKDSRGRAKRSGSGATNFSLLKQAGDVEENPGPSRGGIHTMATYEVLCEVARKLGTDDREVVLFLLNVFIPQPTLAQLIGALRALKEEGRLTFPLLAECLFRAGRRDLLRDLLHLDPRFLERHLAGTMSYFSPYQLTVLHVDGELCARDIRSLIFLSKDTIGSRSTPQTFLHWVYCMENLDLLGPTDVDALMSMLRSLSRVDLQRQVQTLMGLHLSGPSHSQHYRHTP

SEQ ID NO: 17750 - protein, 906 aa, Artificial Sequence
  Synthetic Polypeptide
MALPVTALLLPLALLLHAARPLEGKPIPNPLLGLDSTGSGEDLKNVFPPEVAVFEPSKAEIAHTQKATLVCLATGFYPDHVELSWWVNGKEVHSGVCTDPQPLKEQPALNDSRYCLSSRLRVSATFWQNPRNHFRCQVQFYGLSENDEWTQDRAKPVTQIVSAEAWGRADCGITSASYHQGVLSATILYEILLGKATLYAVLVSALVLMAMVKRKDSRGRAKRSGSGATNFSLLKQAGDVEENPGPTSMALPVTALLLPLALLLHAARPQVQLVESGGGLVQPGGSLRLSCAASGFTFTNHAMSWVRQAPGKGLELVSSISGNGRTTYYADSVKGRFTISRDISKNTLDLQMNSLRAEDTAVYYCAKDGGETLVDSRGQGTLVTVSSLESGGGGSFEEVQLLESGGGLVQPGGSLRLSCAASGFIFSSYAMSWVRQAPGKGQEWVSGVSGTGVNTYYADSVKGRFTISRDNSKNTLYLQMNSLRAEDTAVYYCASGKGWDSGSWYEDYRGQGTLVTVSSTREQKLISEEDGSGIQNPDPAVYQLRDSKSSDKSVCLFTDFDSQTNVSQSKDSDVYITDKCVLDMRSMDFKSNSAVAWSNKSDFACANAFNNSIIPEDTFFPSSDVPCDVKLVEKSFETDTNLNFQNLSVIGFRILLLKVAGFNLLMTLRLWSSRAKRSGSGVKQTLNFDLLKLAGDVESNPGPSRGHMTEYKPTVRLATRDDVPRAVRTLAAAFADYPATRHTVDPDRHIERVTELQELFLTRVGLDIGKVWVADDGAAVAVWTTPESVEAGAVFAEIGPRMAELSGSRLAAQQQMEGLLAPHRPKEPAWFLATVGVSPDHQGKGLGSAVVLPGVEAAERAGVPAFLETSAPRNLPFYERLGFTVTADVEVPEGPRTWCMTRKPGA

SEQ ID NO: 17751 - protein, 907 aa, Artificial Sequence
  Synthetic Polypeptide
MALPVTALLLPLALLLHAARPLEQKLISEEDLGSGDRPDPAVYQLRDSKSSDKSVCLFTDFDSQTNVSQSKDSDVYITDKCVLDMRSMDFKSNSAVAWSNKSDFACANAFNNSIIPEDTFFPSPESSCDVKLVEKSFETDTNLNFQNLSVIGFRILLLKVAGFNLLMTLRLWSSSSRAKRSGSGVKQTLNFDLLKLAGDVESNPGPTSMALPVTALLLPLALLLHAARPQVQLVESGGGLVQPGGSLRLSCAASGFTFTNHAMSWVRQAPGKGLELVSSISGNGRTTYYADSVKGRFTISRDISKNTLDLQMNSLRAEDTAVYYCAKDGGETLVDSRGQGTLVTVSSLESGGGGSFEEVQLLESGGGLVQPGGSLRLSCAASGFIFSSYAMSWVRQAPGKGQEWVSGVSGTGVNTYYADSVKGRFTISRDNSKNTLYLQMNSLRAEDTAVYYCASGKGWDSGSWYEDYRGQGTLVTVSSTRGKPIPNPLLGLDSTGSGEDLKNVFPPEVAVFEPSEAEISHTQKATLVCLATGFYPDHVELSWWVNGKEVHSGVCTDPQPLKEQPALNDSRYCLSSRLRVSATFWQNPRNHFRCQVQFYGLSENDEWTQDRAKPVTQIVSAEAWGRADCGFTSESYQQGVLSATILYEILLGKATLYAVLVSALVLMAMVKRKDSRGRAKRSGSGATNFSLLKQAGDVEENPGPSRGHMTEYKPTVRLATRDDVPRAVRTLAAAFADYPATRHTVDPDRHIERVTELQELFLTRVGLDIGKVWVADDGAAVAVWTTPESVEAGAVFAEIGPRMAELSGSRLAAQQQMEGLLAPHRPKEPAWFLATVGVSPDHQGKGLGSAVVLPGVEAAERAGVPAFLETSAPRNLPFYERLGFTVTADVEVPEGPRTWCMTRKPGA

SEQ ID NO: 17752 - protein, 866 aa, Artificial Sequence
  Synthetic Polypeptide
MALPVTALLLPLALLLHAARPQVQLVESGGGLVQPGGSLRLSCAASGFTFTNHAMSWVRQAPGKGLELVSSISGNGRTTYYADSVKGRFTISRDISKNTLDLQMNSLRAEDTAVYYCAKDGGETLVDSRGQGTLVTVSSLEDLKNVFPPEVAVFEPSEAEISHTQKATLVCLATGFYPDHVELSWWVNGKEVHSGVSTDPQPLKEQPALNDSRYCLSSRLRVSATFWQNPRNHFRCQVQFYGLSENDEWTQDRAKPVTQIVSAEAWGRADCGFTSESYQQGVLSATILYEILLGKATLYAVLVSALVLMAMVKRKDSRGRAKRSGSGATNFSLLKQAGDVEENPGPTSMDWIWRILFLVGAATGAHSFEEVQLLESGGGLVQPGGSLRLSCAASGFIFSSYAMSWVRQAPGKGQEWVSGVSGTGVNTYYADSVKGRFTISRDNSKNTLYLQMNSLRAEDTAVYYCASGKGWDSGSWYEDYRGQGTLVTVSSTRIQNPDPAVYQLRDSKSSDKSVCLFTDFDSQTNVSQSKDSDVYITDKTVLDMRSMDFKSNSAVAWSNKSDFACANAFNNSIIPEDTFFPSPESSCDVKLVEKSFETDTNLNFQNLSVIGFRILLLKVAGFNLLMTLRLWSSRAKRSGSGVKQTLNFDLLKLAGDVESNPGPSRGHMTEYKPTVRLATRDDVPRAVRTLAAAFADYPATRHTVDPDRHIERVTELQELFLTRVGLDIGKVWVADDGAAVAVWTTPESVEAGAVFAEIGPRMAELSGSRLAAQQQMEGLLAPHRPKEPAWFLATVGVSPDHQGKGLGSAVVLPGVEAAERAGVPAFLETSAPRNLPFYERLGFTVTADVEVPEGPRTWCMTRKPGA

SEQ ID NO: 17753 - protein, 948 aa, Artificial Sequence
  Synthetic Polypeptide
MALPVTALLLPLALLLHAARPQVQLVESGGGLVQPGGSLRLSCAASGFTFTNHAMSWVRQAPGKGLELVSSISGNGRTTYYADSVKGRFTISRDISKNTLDLQMNSLRAEDTAVYYCAKDGGETLVDSRGQGTLVTVSSLEDLKNVFPPEVAVFEPSEAEISHTQKATLVCLATGFYPDHVELSWWVNGKEVHSGVSTDPQPLKEQPALNDSRYCLSSRLRVSATFWQNPRNHFRCQVQFYGLSENDEWTQDRAKPVTQIVSAEAWGRADCGFTSESYQQGVLSATILYEILLGKATLYAVLVSALVLMAMVKRKDSRGRAKRSGSGATNFSLLKQAGDVEENPGPTSMDWIWRILFLVGAATGAHSFEEVQLLESGGGLVQPGGSLRLSCAASGFIFSSYAMSWVRQAPGKGQEWVSGVSGTGVNTYYADSVKGRFTISRDNSKNTLYLQMNSLRAEDTAVYYCASGKGWDSGSWYEDYRGQGTLVTVSSTREQKLISEEDGSGTPFPSLAPPIMLLVDGKQQMVVVCLVLDVAPPGLDSPIWFSAGNGSALDAFTYGPSPATDGTWTNLAHLSLPSEELASWEPLVCHTGPGAEGHSRSTQPMHLSGEASTARTCPQEPLRGTPGGALWLGVLRLLLFKLLLFDLLLTCSCLCDPAGPLPSPATTTRLRALGSHRLHPATETGGREATSSPRPQPRDRRWGDTPPGRKPGSPVRAKRSGSGVKQTLNFDLLKLAGDVESNPGPSRGHMTEYKPTVRLATRDDVPRAVRTLAAAFADYPATRHTVDPDRHIERVTELQELFLTRVGLDIGKVWVADDGAAVAVWTTPESVEAGAVFAEIGPRMAELSGSRLAAQQQMEGLLAPHRPKEPAWFLATVGVSPDHQGKGLGSAVVLPGVEAAERAGVPAFLETSAPRNLPFYERLGFTVTADVEVPEGPRTWCMTRKPGA

SEQ ID NO: 17754 - protein, 961 aa, Artificial Sequence
  Synthetic Polypeptide
MALPVTALLLPLALLLHAARPLEDLKNVFPPEVAVFEPSEAEISHTQKATLVCLATGFYPDHVELSWWVNGKEVHSGVSTDPQPLKEQPALNDSRYCLSSRLRVSATFWQNPRNHFRCQVQFYGLSENDEWTQDRAKPVTQIVSAEAWGRADCGFTSESYQQGVLSATILYEILLGKATLYAVLVSALVLMAMVKRKDSRGRAKRSGSGATNFSLLKQAGDVEENPGPTSMALPVTALLLPLALLLHAARPQVQLVESGGGLVQPGGSLRLSCAASGFTFTNHAMSWVRQAPGKGLELVSSISGNGRTTYYADSVKGRFTISRDISKNTLDLQMNSLRAEDTAVYYCAKDGGETLVDSRGQGTLVTVSSLESGGGGSFEEVQLLESGGGLVQPGGSLRLSCAASGFIFSSYAMSWVRQAPGKGQEWVSGVSGTGVNTYYADSVKGRFTISRDNSKNTLYLQMNSLRAEDTAVYYCASGKGWDSGSWYEDYRGQGTLVTVSSTREQKLISEEDLGSGTPFPSLAPPIMLLVDGKQQMVVVCLVLDVAPPGLDSPIWFSAGNGSALDAFTYGPSPATDGTWTNLAHLSLPSEELASWEPLVCHTGPGAEGHSRSTQPMHLSGEASTARTCPQEPLRGTPGGALWLGVLRLLLFKLLLFDLLLTCSCLCDPAGPLPSPATTTRLRALGSHRLHPATETGGREATSSPRPQPRDRRWGDTPPGRKPGSPVRAKRSGSGVKQTLNFDLLKLAGDVESNPGPSRSRGHMTEYKPTVRLATRDDVPRAVRTLAAAFADYPATRHTVDPDRHIERVTELQELFLTRVGLDIGKVWVADDGAAVAVWTTPESVEAGAVFAEIGPRMAELSGSRLAAQQQMEGLLAPHRPKEPAWFLATVGVSPDHQGKGLGSAVVLPGVEAAERAGVPAFLETSAPRNLPFYERLGFTVTADVEVPEGPRTWCMTRKPGA

SEQ ID NO: 17755 - protein, 903 aa, Artificial Sequence
  Synthetic Polypeptide
MALPVTALLLPLALLLHAARPQVQLVESGGGLVQPGGSLRLSCAASGFTFTNHAMSWVRQAPGKGLELVSSISGNGRTTYYADSVKGRFTISRDISKNTLDLQMNSLRAEDTAVYYCAKDGGETLVDSRGQGTLVTVSSLEGKPIPNPLLGLDSTGSGDKQLDADVSPKPTIFLPSIAETKLQKAGTYLCLLEKFFPDVIKIHWQEKKSNTILGSQEGNTMKTNDTYMKFSWLTVPEKSLDKEHRCIVRHENNKNGVDQEIIFPPIKTDVITMDPKDNCSKDANDTLLLQLTNTSAYYMYLLLLLKSVVYFAIITCCLLRRTAFCCNGEKSRAKRSGSGATNFSLLKQAGDVEENPGPTSMDWIWRILFLVGAATGAHSFEEVQLLESGGGLVQPGGSLRLSCAASGFIFSSYAMSWVRQAPGKGQEWVSGVSGTGVNTYYADSVKGRFTISRDNSKNTLYLQMNSLRAEDTAVYYCASGKGWDSGSWYEDYRGQGTLVTVSSTREQKLISEEDGSGSQPHTKPSVFVMKNGTNVACLVKEFYPKDIRINLVSSKKITEFDPAIVISPSGKYNAVKLGKYEDSNSVTCSVQHDNKTVHSTDFEVKTDSTDHVKPKETENTKQPSKSCHKPKAIVHTEKVNMMSLTVLGLRMLFAKTVAVNFLLTAKLFFLRAKRSGSGVKQTLNFDLLKLAGDVESNPGPSRGHMTEYKPTVRLATRDDVPRAVRTLAAAFADYPATRHTVDPDRHIERVTELQELFLTRVGLDIGKVWVADDGAAVAVWTTPESVEAGAVFAEIGPRMAELSGSRLAAQQQMEGLLAPHRPKEPAWFLATVGVSPDHQGKGLGSAVVLPGVEAAERAGVPAFLETSAPRNLPFYERLGFTVTADVEVPEGPRTWCMTRKPGA

SEQ ID NO: 17756 - protein, 641 aa, Artificial Sequence
  Synthetic Polypeptide
MALPVTALLLPLALLLHAARPQVQLVESGGGLVQPGGSLRLSCAASGFTFTNHAMSWVRQAPGKGLELVSSISGNGRTTYYADSVKGRFTISRDISKNTLDLQMNSLRAEDTAVYYCAKDGGETLVDSRGQGTLVTVSSLESQPHTKPSVFVMKNGTNVACLVKEFYPKDIRINLVSSKKITEFDPAIVISPSGKYNAVKLGKYEDSNSVTCSVQHDNKTVHSTDFEVKTDSTDHVKPKETENTKQPSKSCHKPKAIVHTEKVNMMSLTVLGLRMLFAKTVAVNFLLTAKLFFLRAKRSGSGATNFSLLKQAGDVEENPGPTSMDWIWRILFLVGAATGAHSFEEVQLLESGGGLVQPGGSLRLSCAASGFIFSSYAMSWVRQAPGKGQEWVSGVSGTGVNTYYADSVKGRFTISRDNSKNTLYLQMNSLRAEDTAVYYCASGKGWDSGSWYEDYRGQGTLVTVSSTRDKQLDADVSPKPTIFLPSIAETKLQKAGTYLCLLEKFFPDVIKIHWQEKKSNTILGSQEGNTMKTNDTYMKFSWLTVPEKSLDKEHRCIVRHENNKNGVDQEIIFPPIKTDVITMDPKDNCSKDANDTLLLQLTNTSAYYMYLLLLLKSVVYFAIITCCLLRRTAFCCNGEKS

SEQ ID NO: 17757 - protein, 913 aa, Artificial Sequence
  Synthetic Polypeptide
MALPVTALLLPLALLLHAARPLEGKPIPNPLLGLDSTGSGDKQLDADVSPKPTIFLPSIAETKLQKAGTYLCLLEKFFPDVIKIHWQEKKSNTILGSQEGNTMKTNDTYMKFSWLTVPEKSLDKEHRCIVRHENNKNGVDQEIIFPPIKTDVITMDPKDNCSKDANDTLLLQLTNTSAYYMYLLLLLKSVVYFAIITCCLLRRTAFCCNGEKSRAKRSGSGATNFSLLKQAGDVEENPGPTSMALPVTALLLPLALLLHAARPQVQLVESGGGLVQPGGSLRLSCAASGFTFTNHAMSWVRQAPGKGLELVSSISGNGRTTYYADSVKGRFTISRDISKNTLDLQMNSLRAEDTAVYYCAKDGGETLVDSRGQGTLVTVSSLESGGGGSFEEVQLLESGGGLVQPGGSLRLSCAASGFIFSSYAMSWVRQAPGKGQEWVSGVSGTGVNTYYADSVKGRFTISRDNSKNTLYLQMNSLRAEDTAVYYCASGKGWDSGSWYEDYRGQGTLVTVSSTREQKLISEEDGSGSQPHTKPSVFVMKNGTNVACLVKEFYPKDIRINLVSSKKITEFDPAIVISPSGKYNAVKLGKYEDSNSVTCSVQHDNKTVHSTDFEVKTDSTDHVKPKETENTKQPSKSCHKPKAIVHTEKVNMMSLTVLGLRMLFAKTVAVNFLLTAKLFFLRAKRSGSGVKQTLNFDLLKLAGDVESNPGPSRGHMTEYKPTVRLATRDDVPRAVRTLAAAFADYPATRHTVDPDRHIERVTELQELFLTRVGLDIGKVWVADDGAAVAVWTTPESVEAGAVFAEIGPRMAELSGSRLAAQQQMEGLLAPHRPKEPAWFLATVGVSPDHQGKGLGSAVVLPGVEAAERAGVPAFLETSAPRNLPFYERLGFTVTADVEVPEGPRTWCMTRKPGA

SEQ ID NO: 17758 - protein, 1043 aa, Artificial Sequence
  Synthetic Polypeptide
MALPVTALLLPLALLLHAARPQVQLVESGGGLVQPGGSLRLSCAASGFTFTNHAMSWVRQAPGKGLELVSSISGNGRTTYYADSVKGRFTISRDISKNTLDLQMNSLRAEDTAVYYCAKDGGETLVDSRGQGTLVTVSSGQPKANPTVTLFPPSSEELQANKATLVCLISDFYPGAVTVAWKADGSPVKAGVETTKPSKQSNNKYAASSYLSLTPEQWKSHRSYSCQVTHEGSTVEKTVAPTECSGSQSFGLLDPKLCYLLDGILFIYGVILTALFLRVKFSRSADAPAYQQGQNQLYNELNLGRREEYDVLDKRRGRDPEMGGKPQRRKNPQEGLYNELQKDKMAEAYSEIGMKGERRRGKGHDGLYQGLSTATKDTYDALHMQALPPRRAKRSGSGATNFSLLKQAGDVEENPGPTSMDWIWRILFLVGAATGAHSFEEVQLLESGGGLVQPGGSLRLSCAASGFIFSSYAMSWVRQAPGKGQEWVSGVSGTGVNTYYADSVKGRFTISRDNSKNTLYLQMNSLRAEDTAVYYCASGKGWDSGSWYEDYRGQGTLVTVSSASTKGPSVFPLAPSSKSTSGGTAALGCLVKDYFPEPVTVSWNSGALTSGVHTFPAVLQSSGLYSLSSVVTVPSSSLGTQTYICNVNHKPSNTKVDKRVEPKSCGTQSFGLLDPKLCYLLDGILFIYGVILTALFLRVKFSRSADAPAYQQGQNQLYNELNLGRREEYDVLDKRRGRDPEMGGKPQRRKNPQEGLYNELQKDKMAEAYSEIGMKGERRRGKGHDGLYQGLSTATKDTYDALHMQALPPRRAKRSGSGVKQTLNFDLLKLAGDVESNPGPSRGHMTEYKPTVRLATRDDVPRAVRTLAAAFADYPATRHTVDPDRHIERVTELQELFLTRVGLDIGKVWVADDGAAVAVWTTPESVEAGAVFAEIGPRMAELSGSRLAAQQQMEGLLAPHRPKEPAWFLATVGVSPDHQGKGLGSAVVLPGVEAAERAGVPAFLETSAPRNLPFYERLGFTVTADVEVPEGPRTWCMTRKPGA

SEQ ID NO: 17759 - protein, 829 aa, Artificial Sequence
  Synthetic Polypeptide
MALPVTALLLPLALLLHAARPQVQLVESGGGLVQPGGSLRLSCAASGFTFTNHAMSWVRQAPGKGLELVSSISGNGRTTYYADSVKGRFTISRDISKNTLDLQMNSLRAEDTAVYYCAKDGGETLVDSRGQGTLVTVSSLEDLKNVFPPEVAVFEPSEAEISHTQKATLVCLATGFYPDHVELSWWVNGKEVHSGVSTDPQPLKEQPALNDSRYCLSSRLRVSATFWQNPRNHFRCQVQFYGLSENDEWTQDRAKPVTQIVSAEAWGRADCGSQSFGLLDPKLCYLLDGILFIYGVILTALFLRVKFSRSADAPAYQQGQNQLYNELNLGRREEYDVLDKRRGRDPEMGGKPQRRKNPQEGLYNELQKDKMAEAYSEIGMKGERRRGKGHDGLYQGLSTATKDTYDALHMQALPPRRAKRSGSGATNFSLLKQAGDVEENPGPTSMDWIWRILFLVGAATGAHSFEEVQLLESGGGLVQPGGSLRLSCAASGFIFSSYAMSWVRQAPGKGQEWVSGVSGTGVNTYYADSVKGRFTISRDNSKNTLYLQMNSLRAEDTAVYYCASGKGWDSGSWYEDYRGQGTLVTVSSTRIQNPDPAVYQLRDSKSSDKSVCLFTDFDSQTNVSQSKDSDVYITDKTVLDMRSMDFKSNSAVAWSNKSDFACANAFNNSIIPEDTFFPSPESSCGTQSFGLLDPKLCYLLDGILFIYGVILTALFLRVKFSRSADAPAYQQGQNQLYNELNLGRREEYDVLDKRRGRDPEMGGKPQRRKNPQEGLYNELQKDKMAEAYSEIGMKGERRRGKGHDGLYQGLSTATKDTYDALHMQALPPR

SEQ ID NO: 17760 - protein, 829 aa, Artificial Sequence
  Synthetic Polypeptide
MALPVTALLLPLALLLHAARPQVQLVESGGGLVQPGGSLRLSCAASGFTFTNHAMSWVRQAPGKGLELVSSISGNGRTTYYADSVKGRFTISRDISKNTLDLQMNSLRAEDTAVYYCAKDGGETLVDSRGQGTLVTVSSLEDLKNVFPPEVAVFEPSKAEIAHTQKATLVCLATGFYPDHVELSWWVNGKEVHSGVCTDPQPLKEQPALNDSRYCLSSRLRVSATFWQNPRNHFRCQVQFYGLSENDEWTQDRAKPVTQIVSAEAWGRADCGSQSFGLLDPKLCYLLDGILFIYGVILTALFLRVKFSRSADAPAYQQGQNQLYNELNLGRREEYDVLDKRRGRDPEMGGKPQRRKNPQEGLYNELQKDKMAEAYSEIGMKGERRRGKGHDGLYQGLSTATKDTYDALHMQALPPRRAKRSGSGATNFSLLKQAGDVEENPGPTSMDWIWRILFLVGAATGAHSFEEVQLLESGGGLVQPGGSLRLSCAASGFIFSSYAMSWVRQAPGKGQEWVSGVSGTGVNTYYADSVKGRFTISRDNSKNTLYLQMNSLRAEDTAVYYCASGKGWDSGSWYEDYRGQGTLVTVSSTRIQNPDPAVYQLRDSKSSDKSVCLFTDFDSQTNVSQSKDSDVYITDKCVLDMRSMDFKSNSAVAWSNKSDFACANAFNNSIIPEDTFFPSSDVPCGTQSFGLLDPKLCYLLDGILFIYGVILTALFLRVKFSRSADAPAYQQGQNQLYNELNLGRREEYDVLDKRRGRDPEMGGKPQRRKNPQEGLYNELQKDKMAEAYSEIGMKGERRRGKGHDGLYQGLSTATKDTYDALHMQALPPR

SEQ ID NO: 17761 - protein, 900 aa, Artificial Sequence
  Synthetic Polypeptide
MALPVTALLLPLALLLHAARPQVQLVESGGGLVQPGGSLRLSCAASGFTFTNHAMSWVRQAPGKGLELVSSISGNGRTTYYADSVKGRFTISRDISKNTLDLQMNSLRAEDTAVYYCAKDGGETLVDSRGQGTLVTVSSLEGKPIPNPLLGLDSTGSGEDLKNVFPPEVAVFEPSEAEISHTQKATLVCLATGFYPDHVELSWWVNGKEVHSGVSTDPQPLKEQPALNDSRYCLSSRLRVSATFWQNPRNHFRCQVQFYGLSENDEWTQDRAKPVTQIVSAEAWGRADCGSQSFGLLDPKLCYLLDGILFIYGVILTALFLRVKFSRSADAPAYQQGQNQLYNELNLGRREEYDVLDKRRGRDPEMGGKPQRRKNPQEGLYNELQKDKMAEAYSEIGMKGERRRGKGHDGLYQGLSTATKDTYDALHMQALPPRRAKRSGSGATNFSLLKQAGDVEENPGPTSMDWIWRILFLVGAATGAHSFEEVQLLESGGGLVQPGGSLRLSCAASGFIFSSYAMSWVRQAPGKGQEWVSGVSGTGVNTYYADSVKGRFTISRDNSKNTLYLQMNSLRAEDTAVYYCASGKGWDSGSWYEDYRGQGTLVTVSSTREQKLISEEDGSGIQNPDPAVYQLRDSKSSDKSVCLFTDFDSQTNVSQSKDSDVYITDKTVLDMRSMDFKSNSAVAWSNKSDFACANAFNNSIIPEDTFFPSPESSCGTQSFGLLDPKLCYLLDGILFIYGVILTALFLRSKRSRLLHSDYMNMTPRRPGPTRKHYQPYAPPRDFAAYRSRVKFSRSADAPAYQQGQNQLYNELNLGRREEYDVLDKRRGRDPEMGGKPQRRKNPQEGLYNELQKDKMAEAYSEIGMKGERRRGKGHDGLYQGLSTATKDTYDALHMQALPPR

SEQ ID NO: 17762 - protein, 941 aa, Artificial Sequence
  Synthetic Polypeptide
MALPVTALLLPLALLLHAARPQVQLVESGGGLVQPGGSLRLSCAASGFTFTNHAMSWVRQAPGKGLELVSSISGNGRTTYYADSVKGRFTISRDISKNTLDLQMNSLRAEDTAVYYCAKDGGETLVDSRGQGTLVTVSSLEGKPIPNPLLGLDSTGSGEDLKNVFPPEVAVFEPSEAEISHTQKATLVCLATGFYPDHVELSWWVNGKEVHSGVSTDPQPLKEQPALNDSRYCLSSRLRVSATFWQNPRNHFRCQVQFYGLSENDEWTQDRAKPVTQIVSAEAWGRADCGSQSFGLLDPKLCYLLDGILFIYGVILTALFLRSKRSRLLHSDYMNMTPRRPGPTRKHYQPYAPPRDFAAYRSRVKFSRSADAPAYQQGQNQLYNELNLGRREEYDVLDKRRGRDPEMGGKPQRRKNPQEGLYNELQKDKMAEAYSEIGMKGERRRGKGHDGLYQGLSTATKDTYDALHMQALPPRRAKRSGSGATNFSLLKQAGDVEENPGPTSMDWIWRILFLVGAATGAHSFEEVQLLESGGGLVQPGGSLRLSCAASGFIFSSYAMSWVRQAPGKGQEWVSGVSGTGVNTYYADSVKGRFTISRDNSKNTLYLQMNSLRAEDTAVYYCASGKGWDSGSWYEDYRGQGTLVTVSSTREQKLISEEDGSGIQNPDPAVYQLRDSKSSDKSVCLFTDFDSQTNVSQSKDSDVYITDKTVLDMRSMDFKSNSAVAWSNKSDFACANAFNNSIIPEDTFFPSPESSCGTQSFGLLDPKLCYLLDGILFIYGVILTALFLRSKRSRLLHSDYMNMTPRRPGPTRKHYQPYAPPRDFAAYRSRVKFSRSADAPAYQQGQNQLYNELNLGRREEYDVLDKRRGRDPEMGGKPQRRKNPQEGLYNELQKDKMAEAYSEIGMKGERRRGKGHDGLYQGLSTATKDTYDALHMQALPPR

SEQ ID NO: 17763 - protein, 902 aa, Artificial Sequence
  Synthetic Polypeptide
MALPVTALLLPLALLLHAARPQVQLVESGGGLVQPGGSLRLSCAASGFTFTNHAMSWVRQAPGKGLELVSSISGNGRTTYYADSVKGRFTISRDISKNTLDLQMNSLRAEDTAVYYCAKDGGETLVDSRGQGTLVTVSSLEGKPIPNPLLGLDSTGSGEDLKNVFPPEVAVFEPSEAEISHTQKATLVCLATGFYPDHVELSWWVNGKEVHSGVSTDPQPLKEQPALNDSRYCLSSRLRVSATFWQNPRNHFRCQVQFYGLSENDEWTQDRAKPVTQIVSAEAWGRADCGSQSFGLLDPKLCYLLDGILFIYGVILTALFLRVKFSRSADAPAYQQGQNQLYNELNLGRREEYDVLDKRRGRDPEMGGKPQRRKNPQEGLYNELQKDKMAEAYSEIGMKGERRRGKGHDGLYQGLSTATKDTYDALHMQALPPRRAKRSGSGATNFSLLKQAGDVEENPGPTSMDWIWRILFLVGAATGAHSFEEVQLLESGGGLVQPGGSLRLSCAASGFIFSSYAMSWVRQAPGKGQEWVSGVSGTGVNTYYADSVKGRFTISRDNSKNTLYLQMNSLRAEDTAVYYCASGKGWDSGSWYEDYRGQGTLVTVSSTREQKLISEEDLGSGIQNPDPAVYQLRDSKSSDKSVCLFTDFDSQTNVSQSKDSDVYITDKTVLDMRSMDFKSNSAVAWSNKSDFACANAFNNSIIPEDTFFPSPESSCGTQSFGLLDPKLCYLLDGILFIYGVILTALFLKRGRKKLLYIFKQPFMRPVQTTQEEDGCSCRFPEEEEGGCELRVKFSRSADAPAYQQGQNQLYNELNLGRREEYDVLDKRRGRDPEMGGKPQRRKNPQEGLYNELQKDKMAEAYSEIGMKGERRRGKGHDGLYQGLSTATKDTYDALHMQALPPR

SEQ ID NO: 17764 - protein, 944 aa, Artificial Sequence
  Synthetic Polypeptide
MALPVTALLLPLALLLHAARPQVQLVESGGGLVQPGGSLRLSCAASGFTFTNHAMSWVRQAPGKGLELVSSISGNGRTTYYADSVKGRFTISRDISKNTLDLQMNSLRAEDTAVYYCAKDGGETLVDSRGQGTLVTVSSLEGKPIPNPLLGLDSTGSGEDLKNVFPPEVAVFEPSEAEISHTQKATLVCLATGFYPDHVELSWWVNGKEVHSGVSTDPQPLKEQPALNDSRYCLSSRLRVSATFWQNPRNHFRCQVQFYGLSENDEWTQDRAKPVTQIVSAEAWGRADCGSQSFGLLDPKLCYLLDGILFIYGVILTALFLKRGRKKLLYIFKQPFMRPVQTTQEEDGCSCRFPEEEEGGCELRVKFSRSADAPAYQQGQNQLYNELNLGRREEYDVLDKRRGRDPEMGGKPQRRKNPQEGLYNELQKDKMAEAYSEIGMKGERRRGKGHDGLYQGLSTATKDTYDALHMQALPPRRAKRSGSGATNFSLLKQAGDVEENPGPTSMDWIWRILFLVGAATGAHSFEEVQLLESGGGLVQPGGSLRLSCAASGFIFSSYAMSWVRQAPGKGQEWVSGVSGTGVNTYYADSVKGRFTISRDNSKNTLYLQMNSLRAEDTAVYYCASGKGWDSGSWYEDYRGQGTLVTVSSTREQKLISEEDLGSGIQNPDPAVYQLRDSKSSDKSVCLFTDFDSQTNVSQSKDSDVYITDKTVLDMRSMDFKSNSAVAWSNKSDFACANAFNNSIIPEDTFFPSPESSCGTQSFGLLDPKLCYLLDGILFIYGVILTALFLKRGRKKLLYIFKQPFMRPVQTTQEEDGCSCRFPEEEEGGCELRVKFSRSADAPAYQQGQNQLYNELNLGRREEYDVLDKRRGRDPEMGGKPQRRKNPQEGLYNELQKDKMAEAYSEIGMKGERRRGKGHDGLYQGLSTATKDTYDALHMQALPPR

SEQ ID NO: 17765 - protein, 834 aa, Artificial Sequence
  Synthetic Polypeptide
MALPVTALLLPLALLLHAARPQVQLVESGGGLVQPGGSLRLSCAASGFTFTNHAMSWVRQAPGKGLELVSSISGNGRTTYYADSVKGRFTISRDISKNTLDLQMNSLRAEDTAVYYCAKDGGETLVDSRGQGTLVTVSSLEQSFGLLDPKLCYLLDGILFIYGVILTALFLRVKFSRSADAPAYQQGQNQLYNELNLGRREEYDVLDKRRGRDPEMGGKPQRRKNPQEGLYNELQKDKMAEAYSEIGMKGERRRGKGHDGLYQGLSTATKDTYDALHMQALPPRRAKRSGSGATNFSLLKQAGDVEENPGPTSMDWIWRILFLVGAATGAHSFEEVQLLESGGGLVQPGGSLRLSCAASGFIFSSYAMSWVRQAPGKGQEWVSGVSGTGVNTYYADSVKGRFTISRDNSKNTLYLQMNSLRAEDTAVYYCASGKGWDSGSWYEDYRGQGTLVTVSSTRQSFGLLDPKLCYLLDGILFIYGVILTALFLRVKFSRSADAPAYQQGQNQLYNELNLGRREEYDVLDKRRGRDPEMGGKPQRRKNPQEGLYNELQKDKMAEAYSEIGMKGERRRGKGHDGLYQGLSTATKDTYDALHMQALPPRRAKRSGSGVKQTLNFDLLKLAGDVESNPGPSRGHMTEYKPTVRLATRDDVPRAVRTLAAAFADYPATRHTVDPDRHIERVTELQELFLTRVGLDIGKVWVADDGAAVAVWTTPESVEAGAVFAEIGPRMAELSGSRLAAQQQMEGLLAPHRPKEPAWFLATVGVSPDHQGKGLGSAVVLPGVEAAERAGVPAFLETSAPRNLPFYERLGFTVTADVEVPEGPRTWCMTRKPGA

SEQ ID NO: 17766 - protein, 659 aa, Artificial Sequence
  Synthetic Polypeptide
MALPVTALLLPLALLLHAARPQVQLVESGGGLVQPGGSLRLSCAASGFTFTNHAMSWVRQAPGKGLELVSSISGNGRTTYYADSVKGRFTISRDISKNTLDLQMNSLRAEDTAVYYCAKDGGETLVDSRGQGTLVTVSSLEGQPKANPTVTLFPPSSEELQANKATLVCLISDFYPGAVTVAWKADGSPVKAGVETTKPSKQSNNKYAASSYLSLTPEQWKSHRSYSCQVTHEGSTVEKTVAPTECSPIKTDVITMDPKDNCSKDANDTLLLQLTNTSAYYMYLLLLLKSVVYFAIITCCLLRRTAFCCNGEKSRAKRSGSGATNFSLLKQAGDVEENPGPTSMDWIWRILFLVGAATGAHSFEEVQLLESGGGLVQPGGSLRLSCAASGFIFSSYAMSWVRQAPGKGQEWVSGVSGTGVNTYYADSVKGRFTISRDNSKNTLYLQMNSLRAEDTAVYYCASGKGWDSGSWYEDYRGQGTLVTVSSTRASTKGPSVFPLAPSSKSTSGGTAALGCLVKDYFPEPVTVSWNSGALTSGVHTFPAVLQSSGLYSLSSVVTVPSSSLGTQTYICNVNHKPSNTKVDKRVEPKSCEVKTDSTDHVKPKETENTKQPSKSCHKPKAIVHTEKVNMMSLTVLGLRMLFAKTVAVNFLLTAKLFFL

SEQ ID NO: 17767 - protein, 637 aa, Artificial Sequence
  Synthetic Polypeptide
MALPVTALLLPLALLLHAARPQVQLVESGGGLVQPGGSLRLSCAASGFTFTNHAMSWVRQAPGKGLELVSSISGNGRTTYYADSVKGRFTISRDISKNTLDLQMNSLRAEDTAVYYCAKDGGETLVDSRGQGTLVTVSSLEGQPKANPTVTLFPPSSEELQANKATLVCLISDFYPGAVTVAWKADGSPVKAGVETTKPSKQSNNKYAASSYLSLTPEQWKSHRSYSCQVTHEGSTVEKTVAPTECSGRADCGITSASYHQGVLSATILYEILLGKATLYAVLVSALVLMAMVKRKDSRGRAKRSGSGATNFSLLKQAGDVEENPGPTSMDWIWRILFLVGAATGAHSFEEVQLLESGGGLVQPGGSLRLSCAASGFIFSSYAMSWVRQAPGKGQEWVSGVSGTGVNTYYADSVKGRFTISRDNSKNTLYLQMNSLRAEDTAVYYCASGKGWDSGSWYEDYRGQGTLVTVSSTRASTKGPSVFPLAPSSKSTSGGTAALGCLVKDYFPEPVTVSWNSGALTSGVHTFPAVLQSSGLYSLSSVVTVPSSSLGTQTYICNVNHKPSNTKVDKRVEPKSCIPEDTFFPSSDVPCDVKLVEKSFETDTNLNFQNLSVIGFRILLLKVAGFNLLMTLRLWSS

SEQ ID NO: 17768 - protein, 637 aa, Artificial Sequence
  Synthetic Polypeptide
MALPVTALLLPLALLLHAARPQVQLVESGGGLVQPGGSLRLSCAASGFTFTNHAMSWVRQAPGKGLELVSSISGNGRTTYYADSVKGRFTISRDISKNTLDLQMNSLRAEDTAVYYCAKDGGETLVDSRGQGTLVTVSSLEGQPKANPTVTLFPPSSEELQANKATLVCLISDFYPGAVTVAWKADGSPVKAGVETTKPSKQSNNKYAASSYLSLTPEQWKSHRSYSCQVTHEGSTVEKTVAPTECSGRADCGFTSESYQQGVLSATILYEILLGKATLYAVLVSALVLMAMVKRKDSRGRAKRSGSGATNFSLLKQAGDVEENPGPTSMDWIWRILFLVGAATGAHSFEEVQLLESGGGLVQPGGSLRLSCAASGFIFSSYAMSWVRQAPGKGQEWVSGVSGTGVNTYYADSVKGRFTISRDNSKNTLYLQMNSLRAEDTAVYYCASGKGWDSGSWYEDYRGQGTLVTVSSTRASTKGPSVFPLAPSSKSTSGGTAALGCLVKDYFPEPVTVSWNSGALTSGVHTFPAVLQSSGLYSLSSVVTVPSSSLGTQTYICNVNHKPSNTKVDKRVEPKSCIPEDTFFPSPESSCDVKLVEKSFETDTNLNFQNLSVIGFRILLLKVAGFNLLMTLRLWSS

SEQ ID NO: 17769 - protein, 458 aa, Artificial Sequence
  Synthetic Polypeptide
MALPVTALLLPLALLLHAARPQVQLVESGGGLVQPGGSLRLSCAASGFTFTNHAMSWVRQAPGKGLELVSSISGNGRTTYYADSVKGRFTISRDISKNTLDLQMNSLRAEDTAVYYCAKDGGETLVDSRGQGTLVTVSSLESGGGGSFEEVQLLESGGGLVQPGGSLRLSCAASGFIFSSYAMSWVRQAPGKGQEWVSGVSGTGVNTYYADSVKGRFTISRDNSKNTLYLQMNSLRAEDTAVYYCASGKGWDSGSWYEDYRGQGTLVTVSSTRDGNEEMGGITQTPYKVSISGTTVILTCPQYPGSEILWQHNDKNIGGDEDDKNIGSDEDHLSLKEFSELEQSGYYVCYPRGSKPEDANFYLYLRARVCENCMEMDVMSVATIVIVDICITGGLLLLVYYWSKNRKAKAKPVTRGAGAGGRQRGQNKERPPPVPNPDYEPIRKGQRDLYSGLNQRRI

SEQ ID NO: 17770 - protein, 423 aa, Artificial Sequence
  Synthetic Polypeptide
MALPVTALLLPLALLLHAARPQVQLVESGGGLVQPGGSLRLSCAASGFTFTNHAMSWVRQAPGKGLELVSSISGNGRTTYYADSVKGRFTISRDISKNTLDLQMNSLRAEDTAVYYCAKDGGETLVDSRGQGTLVTVSSLESGGGGSFEEVQLLESGGGLVQPGGSLRLSCAASGFIFSSYAMSWVRQAPGKGQEWVSGVSGTGVNTYYADSVKGRFTISRDNSKNTLYLQMNSLRAEDTAVYYCASGKGWDSGSWYEDYRGQGTLVTVSSTRFKIPIEELEDRVFVNCNTSITWVEGTVGTLLSDITRLDLGKRILDPRGIYRCNGTDIYKDKESTVQVHYRMCQSCVELDPATVAGIIVTDVIATLLLALGVFCFAGHETGRLSGAADTQALLRNDQVYQPLRDRDDAQYSHLGGNWARNK

SEQ ID NO: 17771 - protein, 433 aa, Artificial Sequence
  Synthetic Polypeptide
MALPVTALLLPLALLLHAARPQVQLVESGGGLVQPGGSLRLSCAASGFTFTNHAMSWVRQAPGKGLELVSSISGNGRTTYYADSVKGRFTISRDISKNTLDLQMNSLRAEDTAVYYCAKDGGETLVDSRGQGTLVTVSSLESGGGGSFEEVQLLESGGGLVQPGGSLRLSCAASGFIFSSYAMSWVRQAPGKGQEWVSGVSGTGVNTYYADSVKGRFTISRDNSKNTLYLQMNSLRAEDTAVYYCASGKGWDSGSWYEDYRGQGTLVTVSSTRQSIKGNHLVKVYDYQEDGSVLLTCDAEAKNITWFKDGKMIGFLTEDKKKWNLGSNAKDPRGMYQCKGSQNKSKPLQVYYRMCQNCIELNAATISGFLFAEIVSIFVLAVGVYFIAGQDGVRQSRASDKQTLLPNDQLYQPLKDREDDQYSHLQGNQLRRN

SEQ ID NO: 17772 - protein, 416 aa, Artificial Sequence
  Synthetic Polypeptide
MALPVTALLLPLALLLHAARPQVQLVESGGGLVQPGGSLRLSCAASGFTFTNHAMSWVRQAPGKGLELVSSISGNGRTTYYADSVKGRFTISRDISKNTLDLQMNSLRAEDTAVYYCAKDGGETLVDSRGQGTLVTVSSLESGGGGSFEEVQLLESGGGLVQPGGSLRLSCAASGFIFSSYAMSWVRQAPGKGQEWVSGVSGTGVNTYYADSVKGRFTISRDNSKNTLYLQMNSLRAEDTAVYYCASGKGWDSGSWYEDYRGQGTLVTVSSTRQSFGLLDPKLCYLLDGILFIYGVILTALFLRVKFSRSADAPAYQQGQNQLYNELNLGRREEYDVLDKRRGRDPEMGGKPQRRKNPQEGLYNELQKDKMAEAYSEIGMKGERRRGKGHDGLYQGLSTATKDTYDALHMQALPPR

SEQ ID NO: 17773 - protein, 459 aa, Artificial Sequence
  Synthetic Polypeptide
MALPVTALLLPLALLLHAARPEEVQLLESGGGLVQPGGSLRLSCAASGFIFSSYAMSWVRQAPGKGQEWVSGVSGTGVNTYYADSVKGRFTISRDNSKNTLYLQMNSLRAEDTAVYYCASGKGWDSGSWYEDYRGQGTLVTVSSLESGGGGSFEQVQLVESGGGLVQPGGSLRLSCAASGFTFTNHAMSWVRQAPGKGLELVSSISGNGRTTYYADSVKGRFTISRDISKNTLDLQMNSLRAEDTAVYYCAKDGGETLVDSRGQGTLVTVSSTRDGNEEMGGITQTPYKVSISGTTVILTCPQYPGSEILWQHNDKNIGGDEDDKNIGSDEDHLSLKEFSELEQSGYYVCYPRGSKPEDANFYLYLRARVCENCMEMDVMSVATIVIVDICITGGLLLLVYYWSKNRKAKAKPVTRGAGAGGRQRGQNKERPPPVPNPDYEPIRKGQRDLYSGLNQRRI

SEQ ID NO: 17774 - protein, 424 aa, Artificial Sequence
  Synthetic Polypeptide
MALPVTALLLPLALLLHAARPEEVQLLESGGGLVQPGGSLRLSCAASGFIFSSYAMSWVRQAPGKGQEWVSGVSGTGVNTYYADSVKGRFTISRDNSKNTLYLQMNSLRAEDTAVYYCASGKGWDSGSWYEDYRGQGTLVTVSSLESGGGGSFEQVQLVESGGGLVQPGGSLRLSCAASGFTFTNHAMSWVRQAPGKGLELVSSISGNGRTTYYADSVKGRFTISRDISKNTLDLQMNSLRAEDTAVYYCAKDGGETLVDSRGQGTLVTVSSTRFKIPIEELEDRVFVNCNTSITWVEGTVGTLLSDITRLDLGKRILDPRGIYRCNGTDIYKDKESTVQVHYRMCQSCVELDPATVAGIIVTDVIATLLLALGVFCFAGHETGRLSGAADTQALLRNDQVYQPLRDRDDAQYSHLGGNWARNK

SEQ ID NO: 17775 - protein, 434 aa, Artificial Sequence
  Synthetic Polypeptide
MALPVTALLLPLALLLHAARPEEVQLLESGGGLVQPGGSLRLSCAASGFIFSSYAMSWVRQAPGKGQEWVSGVSGTGVNTYYADSVKGRFTISRDNSKNTLYLQMNSLRAEDTAVYYCASGKGWDSGSWYEDYRGQGTLVTVSSLESGGGGSFEQVQLVESGGGLVQPGGSLRLSCAASGFTFTNHAMSWVRQAPGKGLELVSSISGNGRTTYYADSVKGRFTISRDISKNTLDLQMNSLRAEDTAVYYCAKDGGETLVDSRGQGTLVTVSSTRQSIKGNHLVKVYDYQEDGSVLLTCDAEAKNITWFKDGKMIGFLTEDKKKWNLGSNAKDPRGMYQCKGSQNKSKPLQVYYRMCQNCIELNAATISGFLFAEIVSIFVLAVGVYFIAGQDGVRQSRASDKQTLLPNDQLYQPLKDREDDQYSHLQGNQLRRN

SEQ ID NO: 17776 - protein, 417 aa, Artificial Sequence
  Synthetic Polypeptide
MALPVTALLLPLALLLHAARPEEVQLLESGGGLVQPGGSLRLSCAASGFIFSSYAMSWVRQAPGKGQEWVSGVSGTGVNTYYADSVKGRFTISRDNSKNTLYLQMNSLRAEDTAVYYCASGKGWDSGSWYEDYRGQGTLVTVSSLESGGGGSFEQVQLVESGGGLVQPGGSLRLSCAASGFTFTNHAMSWVRQAPGKGLELVSSISGNGRTTYYADSVKGRFTISRDISKNTLDLQMNSLRAEDTAVYYCAKDGGETLVDSRGQGTLVTVSSTRQSFGLLDPKLCYLLDGILFIYGVILTALFLRVKFSRSADAPAYQQGQNQLYNELNLGRREEYDVLDKRRGRDPEMGGKPQRRKNPQEGLYNELQKDKMAEAYSEIGMKGERRRGKGHDGLYQGLSTATKDTYDALHMQALPPR

SEQ ID NO: 17777 - protein, 649 aa, Artificial Sequence
  Synthetic Polypeptide
MALPVTALLLPLALLLHAARPQVQLVESGGGLVQPGGSLRLSCAASGFTFTNHAMSWVRQAPGKGLELVSSISGNGRTTYYADSVKGRFTISRDISKNTLDLQMNSLRAEDTAVYYCAKDGGETLVDSRGQGTLVTVSSLESGGGGSFEEVQLLESGGGLVQPGGSLRLSCAASGFIFSSYAMSWVRQAPGKGQEWVSGVSGTGVNTYYADSVKGRFTISRDNSKNTLYLQMNSLRAEDTAVYYCASGKGWDSGSWYEDYRGQGTLVTVSSTRGSGIQNPDPAVYQLRDSKSSDKSVCLFTDFDSQTNVSQSKDSDVYITDKTVLDMRSMDFKSNSAVAWSNKSDFACANAFNNSIIPEDTFFPSPESSCDVKLVEKSFETDTNLNFQNLSVIGFRILLLKVAGFNLLMTLRLWSSRAKRSGSGVKQTLNFDLLKLAGDVESNPGPSRGHMTEYKPTVRLATRDDVPRAVRTLAAAFADYPATRHTVDPDRHIERVTELQELFLTRVGLDIGKVWVADDGAAVAVWTTPESVEAGAVFAEIGPRMAELSGSRLAAQQQMEGLLAPHRPKEPAWFLATVGVSPDHQGKGLGSAVVLPGVEAAERAGVPAFLETSAPRNLPFYERLGFTVTADVEVPEGPRTWCMTRKPGA

SEQ ID NO: 17778 - protein, 681 aa, Artificial Sequence
  Synthetic Polypeptide
MALPVTALLLPLALLLHAARPQVQLVESGGGLVQPGGSLRLSCAASGFTFTNHAMSWVRQAPGKGLELVSSISGNGRTTYYADSVKGRFTISRDISKNTLDLQMNSLRAEDTAVYYCAKDGGETLVDSRGQGTLVTVSSLESGGGGSFEEVQLLESGGGLVQPGGSLRLSCAASGFIFSSYAMSWVRQAPGKGQEWVSGVSGTGVNTYYADSVKGRFTISRDNSKNTLYLQMNSLRAEDTAVYYCASGKGWDSGSWYEDYRGQGTLVTVSSLEDLKNVFPPEVAVFEPSEAEISHTQKATLVCLATGFYPDHVELSWWVNGKEVHSGVSTDPQPLKEQPALNDSRYCLSSRLRVSATFWQNPRNHFRCQVQFYGLSENDEWTQDRAKPVTQIVSAEAWGRADCGFTSESYQQGVLSATILYEILLGKATLYAVLVSALVLMAMVKRKDSRGRAKRSGSGATNFSLLKQAGDVEENPGPTRGHMTEYKPTVRLATRDDVPRAVRTLAAAFADYPATRHTVDPDRHIERVTELQELFLTRVGLDIGKVWVADDGAAVAVWTTPESVEAGAVFAEIGPRMAELSGSRLAAQQQMEGLLAPHRPKEPAWFLATVGVSPDHQGKGLGSAVVLPGVEAAERAGVPAFLETSAPRNLPFYERLGFTVTADVEVPEGPRTWCMTRKPGA

SEQ ID NO: 17779 - protein, 731 aa, Artificial Sequence
  Synthetic Polypeptide
MALPVTALLLPLALLLHAARPQVQLVESGGGLVQPGGSLRLSCAASGFTFTNHAMSWVRQAPGKGLELVSSISGNGRTTYYADSVKGRFTISRDISKNTLDLQMNSLRAEDTAVYYCAKDGGETLVDSRGQGTLVTVSSLESGGGGSFEEVQLLESGGGLVQPGGSLRLSCAASGFIFSSYAMSWVRQAPGKGQEWVSGVSGTGVNTYYADSVKGRFTISRDNSKNTLYLQMNSLRAEDTAVYYCASGKGWDSGSWYEDYRGQGTLVTVSSTREQKLISEEDLGSGTPFPSLAPPIMLLVDGKQQMVVVCLVLDVAPPGLDSPIWFSAGNGSALDAFTYGPSPATDGTWTNLAHLSLPSEELASWEPLVCHTGPGAEGHSRSTQPMHLSGEASTARTCPQEPLRGTPGGALWLGVLRLLLFKLLLFDLLLTCSCLCDPAGPLPSPATTTRLRALGSHRLHPATETGGREATSSPRPQPRDRRWGDTPPGRKPGSPVRAKRSGSGVKQTLNFDLLKLAGDVESNPGPSRSRGHMTEYKPTVRLATRDDVPRAVRTLAAAFADYPATRHTVDPDRHIERVTELQELFLTRVGLDIGKVWVADDGAAVAVWTTPESVEAGAVFAEIGPRMAELSGSRLAAQQQMEGLLAPHRPKEPAWFLATVGVSPDHQGKGLGSAVVLPGVEAAERAGVPAFLETSAPRNLPFYERLGFTVTADVEVPEGPRTWCMTRKPGA

SEQ ID NO: 17780 - protein, 549 aa, Artificial Sequence
  Synthetic Polypeptide
MALPVTALLLPLALLLHAARPQVQLVESGGGLVQPGGSLRLSCAASGFTFTNHAMSWVRQAPGKGLELVSSISGNGRTTYYADSVKGRFTISRDISKNTLDLQMNSLRAEDTAVYYCAKDGGETLVDSRGQGTLVTVSSLEDLKNVFPPEVAVFEPSEAEISHTQKATLVCLATGFYPDHVELSWWVNGKEVHSGVSTDPQPLKEQPALNDSRYCLSSRLRVSATFWQNPRNHFRCQVQFYGLSENDEWTQDRAKPVTQIVSAEAWGRADCGFTSESYQQGVLSATILYEILLGKATLYAVLVSALVLMAMVKRKDSRGRAKRSGSGATNFSLLKQAGDVEENPGPTRGHMTEYKPTVRLATRDDVPRAVRTLAAAFADYPATRHTVDPDRHIERVTELQELFLTRVGLDIGKVWVADDGAAVAVWTTPESVEAGAVFAEIGPRMAELSGSRLAAQQQMEGLLAPHRPKEPAWFLATVGVSPDHQGKGLGSAVVLPGVEAAERAGVPAFLETSAPRNLPFYERLGFTVTADVEVPEGPRTWCMTRKPGA

SEQ ID NO: 17781 - protein, 319 aa, Artificial Sequence
  Synthetic Polypeptide
MALPVTALLLPLALLLHAARPQVQLVESGGGLVQPGGSLRLSCAASGFTFTNHAMSWVRQAPGKGLELVSSISGNGRTTYYADSVKGRFTISRDISKNTLDLQMNSLRAEDTAVYYCAKDGGETLVDSRGQGTLVTVSSLEDLKNVFPPEVAVFEPSEAEISHTQKATLVCLATGFYPDHVELSWWVNGKEVHSGVSTDPQPLKEQPALNDSRYCLSSRLRVSATFWQNPRNHFRCQVQFYGLSENDEWTQDRAKPVTQIVSAEAWGRADCGFTSESYQQGVLSATILYEILLGKATLYAVLVSALVLMAMVKRKDSRG

SEQ ID NO: 17782 - protein, 451 aa, Artificial Sequence
  Synthetic Polypeptide
MDWIWRILFLVGAATGAHSFEEVQLLESGGGLVQPGGSLRLSCAASGFIFSSYAMSWVRQAPGKGQEWVSGVSGTGVNTYYADSVKGRFTISRDNSKNTLYLQMNSLRAEDTAVYYCASGKGWDSGSWYEDYRGQGTLVTVSSTRIQNPDPAVYQLRDSKSSDKSVCLFTDFDSQTNVSQSKDSDVYITDKTVLDMRSMDFKSNSAVAWSNKSDFACANAFNNSIIPEDTFFPSPESSCDVKLVEKSFETDTNLNFQNLSVIGFRILLLKVAGFNLLMTLRLWSSRAKRSGSGVKQTLNFDLLKLAGDVESNPGPSRGHMAKPLSQEESTLIERATATINSIPISEDYSVASAALSSDGRIFTGVNVYHFTGGPCAELVVLGTAAAAAAGNLTCIVAIGNENRGILSPCGRCRQVLLDLHPGIKAIVKDSDGQPTAVGIRELLPSGYVWEG

SEQ ID NO: 17783 - protein, 285 aa, Artificial Sequence
  Synthetic Polypeptide
MDWIWRILFLVGAATGAHSFEEVQLLESGGGLVQPGGSLRLSCAASGFIFSSYAMSWVRQAPGKGQEWVSGVSGTGVNTYYADSVKGRFTISRDNSKNTLYLQMNSLRAEDTAVYYCASGKGWDSGSWYEDYRGQGTLVTVSSTRIQNPDPAVYQLRDSKSSDKSVCLFTDFDSQTNVSQSKDSDVYITDKTVLDMRSMDFKSNSAVAWSNKSDFACANAFNNSIIPEDTFFPSPESSCDVKLVEKSFETDTNLNFQNLSVIGFRILLLKVAGFNLLMTLRLWSS

SEQ ID NO: 17784 - protein, 567 aa, Artificial Sequence
  Synthetic Polypeptide
MALPVTALLLPLALLLHAARPQVQLVESGGGLVQPGGSLRLSCAASGFTFTNHAMSWVRQAPGKGLELVSSISGNGRTTYYADSVKGRFTISRDISKNTLDLQMNSLRAEDTAVYYCAKDGGETLVDSRGQGTLVTVSSLEGKPIPNPLLGLDSTGSGEDLKNVFPPEVAVFEPSEAEISHTQKATLVCLATGFYPDHVELSWWVNGKEVHSGVCTDPQPLKEQPALNDSRYCLSSRLRVSATFWQNPRNHFRCQVQFYGLSENDEWTQDRAKPVTQIVSAEAWGRADCGFTSESYQQGVLSATILYEILLGKATLYAVLVSALVLMAMVKRKDSRGRAKRSGSGATNFSLLKQAGDVEENPGPTRGHMTEYKPTVRLATRDDVPRAVRTLAAAFADYPATRHTVDPDRHIERVTELQELFLTRVGLDIGKVWVADDGAAVAVWTTPESVEAGAVFAEIGPRMAELSGSRLAAQQQMEGLLAPHRPKEPAWFLATVGVSPDHQGKGLGSAVVLPGVEAAERAGVPAFLETSAPRNLPFYERLGFTVTADVEVPEGPRTWCMTRKPGA

SEQ ID NO: 17785 - protein, 337 aa, Artificial Sequence
  Synthetic Polypeptide
MALPVTALLLPLALLLHAARPQVQLVESGGGLVQPGGSLRLSCAASGFTFTNHAMSWVRQAPGKGLELVSSISGNGRTTYYADSVKGRFTISRDISKNTLDLQMNSLRAEDTAVYYCAKDGGETLVDSRGQGTLVTVSSLEGKPIPNPLLGLDSTGSGEDLKNVFPPEVAVFEPSEAEISHTQKATLVCLATGFYPDHVELSWWVNGKEVHSGVCTDPQPLKEQPALNDSRYCLSSRLRVSATFWQNPRNHFRCQVQFYGLSENDEWTQDRAKPVTQIVSAEAWGRADCGFTSESYQQGVLSATILYEILLGKATLYAVLVSALVLMAMVKRKDSRG

SEQ ID NO: 17786 - protein, 463 aa, Artificial Sequence
  Synthetic Polypeptide
MDWIWRILFLVGAATGAHSFEEVQLLESGGGLVQPGGSLRLSCAASGFIFSSYAMSWVRQAPGKGQEWVSGVSGTGVNTYYADSVKGRFTISRDNSKNTLYLQMNSLRAEDTAVYYCASGKGWDSGSWYEDYRGQGTLVTVSSTREQKLISEEDGSGIQNPDPAVYQLRDSKSSDKSVCLFTDFDSQTNVSQSKDSDVYITDKCVLDMRSMDFKSNSAVAWSNKSDFACANAFNNSIIPEDTFFPSPESSCDVKLVEKSFETDTNLNFQNLSVIGFRILLLKVAGFNLLMTLRLWSSRAKRSGSGVKQTLNFDLLKLAGDVESNPGPSRGHMAKPLSQEESTLIERATATINSIPISEDYSVASAALSSDGRIFTGVNVYHFTGGPCAELVVLGTAAAAAAGNLTCIVAIGNENRGILSPCGRCRQVLLDLHPGIKAIVKDSDGQPTAVGIRELLPSGYVWEG

SEQ ID NO: 17787 - protein, 297 aa, Artificial Sequence
  Synthetic Polypeptide
MDWIWRILFLVGAATGAHSFEEVQLLESGGGLVQPGGSLRLSCAASGFIFSSYAMSWVRQAPGKGQEWVSGVSGTGVNTYYADSVKGRFTISRDNSKNTLYLQMNSLRAEDTAVYYCASGKGWDSGSWYEDYRGQGTLVTVSSTREQKLISEEDGSGIQNPDPAVYQLRDSKSSDKSVCLFTDFDSQTNVSQSKDSDVYITDKCVLDMRSMDFKSNSAVAWSNKSDFACANAFNNSIIPEDTFFPSPESSCDVKLVEKSFETDTNLNFQNLSVIGFRILLLKVAGFNLLMTLRLWSS

SEQ ID NO: 17788 - protein, 649 aa, Artificial Sequence
  Synthetic Polypeptide
MALPVTALLLPLALLLHAARPQVQLVESGGGLVQPGGSLRLSCAASGFTFTNHAMSWVRQAPGKGLELVSSISGNGRTTYYADSVKGRFTISRDISKNTLDLQMNSLRAEDTAVYYCAKDGGETLVDSRGQGTLVTVSSLESGGGGSFEEVQLLESGGGLVQPGGSLRLSCAASGFIFSSYAMSWVRQAPGKGQEWVSGVSGTGVNTYYADSVKGRFTISRDNSKNTLYLQMNSLRAEDTAVYYCASGKGWDSGSWYEDYRGQGTLVTVSSTRGSGIQNPDPAVYQLRDSKSSDKSVCLFTDFDSQTNVSQSKDSDVYITDKTVLDMRSMDFKSNSAVAWSNKSDFACANAFNNSIIPEDTFFPSSDVPCDVKLVEKSFETDTNLNFQNLSVIGFRILLLKVAGFNLLMTLRLWSSRAKRSGSGVKQTLNFDLLKLAGDVESNPGPSRGHMTEYKPTVRLATRDDVPRAVRTLAAAFADYPATRHTVDPDRHIERVTELQELFLTRVGLDIGKVWVADDGAAVAVWTTPESVEAGAVFAEIGPRMAELSGSRLAAQQQMEGLLAPHRPKEPAWFLATVGVSPDHQGKGLGSAVVLPGVEAAERAGVPAFLETSAPRNLPFYERLGFTVTADVEVPEGPRTWCMTRKPGA

SEQ ID NO: 17789 - protein, 681 aa, Artificial Sequence
  Synthetic Polypeptide
MALPVTALLLPLALLLHAARPQVQLVESGGGLVQPGGSLRLSCAASGFTFTNHAMSWVRQAPGKGLELVSSISGNGRTTYYADSVKGRFTISRDISKNTLDLQMNSLRAEDTAVYYCAKDGGETLVDSRGQGTLVTVSSLESGGGGSFEEVQLLESGGGLVQPGGSLRLSCAASGFIFSSYAMSWVRQAPGKGQEWVSGVSGTGVNTYYADSVKGRFTISRDNSKNTLYLQMNSLRAEDTAVYYCASGKGWDSGSWYEDYRGQGTLVTVSSLEDLKNVFPPEVAVFEPSKAEIAHTQKATLVCLATGFYPDHVELSWWVNGKEVHSGVSTDPQPLKEQPALNDSRYCLSSRLRVSATFWQNPRNHFRCQVQFYGLSENDEWTQDRAKPVTQIVSAEAWGRADCGITSASYHQGVLSATILYEILLGKATLYAVLVSALVLMAMVKRKDSRGRAKRSGSGATNFSLLKQAGDVEENPGPTRGHMTEYKPTVRLATRDDVPRAVRTLAAAFADYPATRHTVDPDRHIERVTELQELFLTRVGLDIGKVWVADDGAAVAVWTTPESVEAGAVFAEIGPRMAELSGSRLAAQQQMEGLLAPHRPKEPAWFLATVGVSPDHQGKGLGSAVVLPGVEAAERAGVPAFLETSAPRNLPFYERLGFTVTADVEVPEGPRTWCMTRKPGA

SEQ ID NO: 17790 - protein, 704 aa, Artificial Sequence
  Synthetic Polypeptide
MALPVTALLLPLALLLHAARPQVQLVESGGGLVQPGGSLRLSCAASGFTFTNHAMSWVRQAPGKGLELVSSISGNGRTTYYADSVKGRFTISRDISKNTLDLQMNSLRAEDTAVYYCAKDGGETLVDSRGQGTLVTVSSLESGGGGSFEEVQLLESGGGLVQPGGSLRLSCAASGFIFSSYAMSWVRQAPGKGQEWVSGVSGTGVNTYYADSVKGRFTISRDNSKNTLYLQMNSLRAEDTAVYYCASGKGWDSGSWYEDYRGQGTLVTVSSTRGSGGGGSGGGGSGDGNEEMGGITQTPYKVSISGTTVILTCPQYPGSEILWQHNDKNIGGDEDDKNIGSDEDHLSLKEFSELEQSGYYVCYPRGSKPEDANFYLYLRARVCENCMEMDVMSVATIVIVDICITGGLLLLVYYWSKNRKAKAKPVTRGAGAGGRQRGQNKERPPPVPNPDYEPIRKGQRDLYSGLNQRRIRAKRSGSGVKQTLNFDLLKLAGDVESNPGPSRGHMTEYKPTVRLATRDDVPRAVRTLAAAFADYPATRHTVDPDRHIERVTELQELFLTRVGLDIGKVWVADDGAAVAVWTTPESVEAGAVFAEIGPRMAELSGSRLAAQQQMEGLLAPHRPKEPAWFLATVGVSPDHQGKGLGSAVVLPGVEAAERAGVPAFLETSAPRNLPFYERLGFTVTADVEVPEGPRTWCMTRKPGA

SEQ ID NO: 17791 - protein, 669 aa, Artificial Sequence
  Synthetic Polypeptide
MALPVTALLLPLALLLHAARPQVQLVESGGGLVQPGGSLRLSCAASGFTFTNHAMSWVRQAPGKGLELVSSISGNGRTTYYADSVKGRFTISRDISKNTLDLQMNSLRAEDTAVYYCAKDGGETLVDSRGQGTLVTVSSLESGGGGSFEEVQLLESGGGLVQPGGSLRLSCAASGFIFSSYAMSWVRQAPGKGQEWVSGVSGTGVNTYYADSVKGRFTISRDNSKNTLYLQMNSLRAEDTAVYYCASGKGWDSGSWYEDYRGQGTLVTVSSTRGSGGGGSGGGGSGFKIPIEELEDRVFVNCNTSITWVEGTVGTLLSDITRLDLGKRILDPRGIYRCNGTDIYKDKESTVQVHYRMCQSCVELDPATVAGIIVTDVIATLLLALGVFCFAGHETGRLSGAADTQALLRNDQVYQPLRDRDDAQYSHLGGNWARNKRAKRSGSGVKQTLNFDLLKLAGDVESNPGPSRGHMTEYKPTVRLATRDDVPRAVRTLAAAFADYPATRHTVDPDRHIERVTELQELFLTRVGLDIGKVWVADDGAAVAVWTTPESVEAGAVFAEIGPRMAELSGSRLAAQQQMEGLLAPHRPKEPAWFLATVGVSPDHQGKGLGSAVVLPGVEAAERAGVPAFLETSAPRNLPFYERLGFTVTADVEVPEGPRTWCMTRKPGA

SEQ ID NO: 17792 - protein, 679 aa, Artificial Sequence
  Synthetic Polypeptide
MALPVTALLLPLALLLHAARPQVQLVESGGGLVQPGGSLRLSCAASGFTFTNHAMSWVRQAPGKGLELVSSISGNGRTTYYADSVKGRFTISRDISKNTLDLQMNSLRAEDTAVYYCAKDGGETLVDSRGQGTLVTVSSLESGGGGSFEEVQLLESGGGLVQPGGSLRLSCAASGFIFSSYAMSWVRQAPGKGQEWVSGVSGTGVNTYYADSVKGRFTISRDNSKNTLYLQMNSLRAEDTAVYYCASGKGWDSGSWYEDYRGQGTLVTVSSTRGSGGGGSGGGGSGQSIKGNHLVKVYDYQEDGSVLLTCDAEAKNITWFKDGKMIGFLTEDKKKWNLGSNAKDPRGMYQCKGSQNKSKPLQVYYRMCQNCIELNAATISGFLFAEIVSIFVLAVGVYFIAGQDGVRQSRASDKQTLLPNDQLYQPLKDREDDQYSHLQGNQLRRNRAKRSGSGVKQTLNFDLLKLAGDVESNPGPSRGHMTEYKPTVRLATRDDVPRAVRTLAAAFADYPATRHTVDPDRHIERVTELQELFLTRVGLDIGKVWVADDGAAVAVWTTPESVEAGAVFAEIGPRMAELSGSRLAAQQQMEGLLAPHRPKEPAWFLATVGVSPDHQGKGLGSAVVLPGVEAAERAGVPAFLETSAPRNLPFYERLGFTVTADVEVPEGPRTWCMTRKPGA

SEQ ID NO: 17793 - protein, 662 aa, Artificial Sequence
  Synthetic Polypeptide
MALPVTALLLPLALLLHAARPQVQLVESGGGLVQPGGSLRLSCAASGFTFTNHAMSWVRQAPGKGLELVSSISGNGRTTYYADSVKGRFTISRDISKNTLDLQMNSLRAEDTAVYYCAKDGGETLVDSRGQGTLVTVSSLESGGGGSFEEVQLLESGGGLVQPGGSLRLSCAASGFIFSSYAMSWVRQAPGKGQEWVSGVSGTGVNTYYADSVKGRFTISRDNSKNTLYLQMNSLRAEDTAVYYCASGKGWDSGSWYEDYRGQGTLVTVSSTRGSGGGGSGGGGSGQSFGLLDPKLCYLLDGILFIYGVILTALFLRVKFSRSADAPAYQQGQNQLYNELNLGRREEYDVLDKRRGRDPEMGGKPQRRKNPQEGLYNELQKDKMAEAYSEIGMKGERRRGKGHDGLYQGLSTATKDTYDALHMQALPPRRAKRSGSGVKQTLNFDLLKLAGDVESNPGPSRGHMTEYKPTVRLATRDDVPRAVRTLAAAFADYPATRHTVDPDRHIERVTELQELFLTRVGLDIGKVWVADDGAAVAVWTTPESVEAGAVFAEIGPRMAELSGSRLAAQQQMEGLLAPHRPKEPAWFLATVGVSPDHQGKGLGSAVVLPGVEAAERAGVPAFLETSAPRNLPFYERLGFTVTADVEVPEGPRTWCMTRKPGA

SEQ ID NO: 17794 - protein, 870 aa, Artificial Sequence
  Synthetic Polypeptide
MALPVTALLLPLALLLHAARPQVQLVESGGGLVQPGGSLRLSCAASGFTFTNHAMSWVRQAPGKGLELVSSISGNGRTTYYADSVKGRFTISRDISKNTLDLQMNSLRAEDTAVYYCAKDGGETLVDSRGQGTLVTVSSLEGQPKANPTVTLFPPSSEELQANKATLVCLISDFYPGAVTVAWKADGSPVKAGVETTKPSKQSNNKYAASSYLSLTPEQWKSHRSYSCQVTHEGSTVEKTVAPTECSGRADCGFTSESYQQGVLSATILYEILLGKATLYAVLVSALVLMAMVKRKDSRGRAKRSGSGATNFSLLKQAGDVEENPGPTSMDWIWRILFLVGAATGAHSFEEVQLLESGGGLVQPGGSLRLSCAASGFIFSSYAMSWVRQAPGKGQEWVSGVSGTGVNTYYADSVKGRFTISRDNSKNTLYLQMNSLRAEDTAVYYCASGKGWDSGSWYEDYRGQGTLVTVSSTRASTKGPSVFPLAPSSKSTSGGTAALGCLVKDYFPEPVTVSWNSGALTSGVHTFPAVLQSSGLYSLSSVVTVPSSSLGTQTYICNVNHKPSNTKVDKRVEPKSCIPEDTFFPSPESSCDVKLVEKSFETDTNLNFQNLSVIGFRILLLKVAGFNLLMTLRLWSSRAKRSGSGVKQTLNFDLLKLAGDVESNPGPSRGHMTEYKPTVRLATRDDVPRAVRTLAAAFADYPATRHTVDPDRHIERVTELQELFLTRVGLDIGKVWVADDGAAVAVWTTPESVEAGAVFAEIGPRMAELSGSRLAAQQQMEGLLAPHRPKEPAWFLATVGVSPDHQGKGLGSAVVLPGVEAAERAGVPAFLETSAPRNLPFYERLGFTVTADVEVPEGPRTWCMTRKPGA

SEQ ID NO: 17795 - protein, 637 aa, Artificial Sequence; identical to SEQ ID NO: 17768
  Synthetic Polypeptide

SEQ ID NO: 17796 - protein, 665 aa, Artificial Sequence
  Synthetic Polypeptide
MALPVTALLLPLALLLHAARPQVQLVESGGGLVQPGGSLRLSCAASGFTFTNHAMSWVRQAPGKGLELVSSISGNGRTTYYADSVKGRFTISRDISKNTLDLQMNSLRAEDTAVYYCAKDGGETLVDSRGQGTLVTVSSLEGSGRADCGFTSESYQQGVLSATILYEILLGKATLYAVLVSALVLMAMVKRKDSRGRAKRSGSGATNFSLLKQAGDVEENPGPTSMDWIWRILFLVGAATGAHSFEEVQLLESGGGLVQPGGSLRLSCAASGFIFSSYAMSWVRQAPGKGQEWVSGVSGTGVNTYYADSVKGRFTISRDNSKNTLYLQMNSLRAEDTAVYYCASGKGWDSGSWYEDYRGQGTLVTVSSTRGSIPEDTFFPSPESSCDVKLVEKSFETDTNLNFQNLSVIGFRILLLKVAGFNLLMTLRLWSSRAKRSGSGVKQTLNFDLLKLAGDVESNPGPSRGHMTEYKPTVRLATRDDVPRAVRTLAAAFADYPATRHTVDPDRHIERVTELQELFLTRVGLDIGKVWVADDGAAVAVWTTPESVEAGAVFAEIGPRMAELSGSRLAAQQQMEGLLAPHRPKEPAWFLATVGVSPDHQGKGLGSAVVLPGVEAAERAGVPAFLETSAPRNLPFYERLGFTVTADVEVPEGPRTWCMTRKPGA

SEQ ID NO: 17797 - protein, 432 aa, Artificial Sequence
  Synthetic Polypeptide
MALPVTALLLPLALLLHAARPQVQLVESGGGLVQPGGSLRLSCAASGFTFTNHAMSWVRQAPGKGLELVSSISGNGRTTYYADSVKGRFTISRDISKNTLDLQMNSLRAEDTAVYYCAKDGGETLVDSRGQGTLVTVSSLEGSGRADCGFTSESYQQGVLSATILYEILLGKATLYAVLVSALVLMAMVKRKDSRGRAKRSGSGATNFSLLKQAGDVEENPGPTSMDWIWRILFLVGAATGAHSFEEVQLLESGGGLVQPGGSLRLSCAASGFIFSSYAMSWVRQAPGKGQEWVSGVSGTGVNTYYADSVKGRFTISRDNSKNTLYLQMNSLRAEDTAVYYCASGKGWDSGSWYEDYRGQGTLVTVSSTRGSIPEDTFFPSPESSCDVKLVEKSFETDTNLNFQNLSVIGFRILLLKVAGFNLLMTLRLWSS

SEQ ID NO: 17798 - protein, 674 aa, Artificial Sequence
  Synthetic Polypeptide
MALPVTALLLPLALLLHAARPQVQLVESGGGLVQPGGSLRLSCAASGFTFTNHAMSWVRQAPGKGLELVSSISGNGRTTYYADSVKGRFTISRDISKNTLDLQMNSLRAEDTAVYYCAKDGGETLVDSRGQGTLVTVSSLEDKTHTCPPCPAGRADCGFTSESYQQGVLSATILYEILLGKATLYAVLVSALVLMAMVKRKDSRGRAKRSGSGATNFSLLKQAGDVEENPGPTSMDWIWRILFLVGAATGAHSFEEVQLLESGGGLVQPGGSLRLSCAASGFIFSSYAMSWVRQAPGKGQEWVSGVSGTGVNTYYADSVKGRFTISRDNSKNTLYLQMNSLRAEDTAVYYCASGKGWDSGSWYEDYRGQGTLVTVSSTRGSIPEDTFFPSPESSCDVKLVEKSFETDTNLNFQNLSVIGFRILLLKVAGFNLLMTLRLWSSRAKRSGSGVKQTLNFDLLKLAGDVESNPGPSRGHMTEYKPTVRLATRDDVPRAVRTLAAAFADYPATRHTVDPDRHIERVTELQELFLTRVGLDIGKVWVADDGAAVAVWTTPESVEAGAVFAEIGPRMAELSGSRLAAQQQMEGLLAPHRPKEPAWFLATVGVSPDHQGKGLGSAVVLPGVEAAERAGVPAFLETSAPRNLPFYERLGFTVTADVEVPEGPRTWCMTRKPGA

SEQ ID NO: 17799 - protein, 674 aa, Artificial Sequence
  Synthetic Polypeptide
MALPVTALLLPLALLLHAARPQVQLVESGGGLVQPGGSLRLSCAASGFTFTNHAMSWVRQAPGKGLELVSSISGNGRTTYYADSVKGRFTISRDISKNTLDLQMNSLRAEDTAVYYCAKDGGETLVDSRGQGTLVTVSSLEGSGRADCGFTSESYQQGVLSATILYEILLGKATLYAVLVSALVLMAMVKRKDSRGRAKRSGSGATNFSLLKQAGDVEENPGPTSMDWIWRILFLVGAATGAHSFEEVQLLESGGGLVQPGGSLRLSCAASGFIFSSYAMSWVRQAPGKGQEWVSGVSGTGVNTYYADSVKGRFTISRDNSKNTLYLQMNSLRAEDTAVYYCASGKGWDSGSWYEDYRGQGTLVTVSSTRDKTHTCPPCPAIPEDTFFPSPESSCDVKLVEKSFETDTNLNFQNLSVIGFRILLLKVAGFNLLMTLRLWSSRAKRSGSGVKQTLNFDLLKLAGDVESNPGPSRGHMTEYKPTVRLATRDDVPRAVRTLAAAFADYPATRHTVDPDRHIERVTELQELFLTRVGLDIGKVWVADDGAAVAVWTTPESVEAGAVFAEIGPRMAELSGSRLAAQQQMEGLLAPHRPKEPAWFLATVGVSPDHQGKGLGSAVVLPGVEAAERAGVPAFLETSAPRNLPFYERLGFTVTADVEVPEGPRTWCMTRKPGA

SEQ ID NO: 17800 - protein, 683 aa, Artificial Sequence
  Synthetic Polypeptide
MALPVTALLLPLALLLHAARPQVQLVESGGGLVQPGGSLRLSCAASGFTFTNHAMSWVRQAPGKGLELVSSISGNGRTTYYADSVKGRFTISRDISKNTLDLQMNSLRAEDTAVYYCAKDGGETLVDSRGQGTLVTVSSLEDKTHTCPPCPAGRADCGFTSESYQQGVLSATILYEILLGKATLYAVLVSALVLMAMVKRKDSRGRAKRSGSGATNFSLLKQAGDVEENPGPTSMDWIWRILFLVGAATGAHSFEEVQLLESGGGLVQPGGSLRLSCAASGFIFSSYAMSWVRQAPGKGQEWVSGVSGTGVNTYYADSVKGRFTISRDNSKNTLYLQMNSLRAEDTAVYYCASGKGWDSGSWYEDYRGQGTLVTVSSTRDKTHTCPPCPAIPEDTFFPSPESSCDVKLVEKSFETDTNLNFQNLSVIGFRILLLKVAGFNLLMTLRLWSSRAKRSGSGVKQTLNFDLLKLAGDVESNPGPSRGHMTEYKPTVRLATRDDVPRAVRTLAAAFADYPATRHTVDPDRHIERVTELQELFLTRVGLDIGKVWVADDGAAVAVWTTPESVEAGAVFAEIGPRMAELSGSRLAAQQQMEGLLAPHRPKEPAWFLATVGVSPDHQGKGLGSAVVLPGVEAAERAGVPAFLETSAPRNLPFYERLGFTVTADVEVPEGPRTWCMTRKPGA

SEQ ID NO: 17801 - protein, 450 aa, Artificial Sequence
  Synthetic Polypeptide
MALPVTALLLPLALLLHAARPQVQLVESGGGLVQPGGSLRLSCAASGFTFTNHAMSWVRQAPGKGLELVSSISGNGRTTYYADSVKGRFTISRDISKNTLDLQMNSLRAEDTAVYYCAKDGGETLVDSRGQGTLVTVSSLEDKTHTCPPCPAGRADCGFTSESYQQGVLSATILYEILLGKATLYAVLVSALVLMAMVKRKDSRGRAKRSGSGATNFSLLKQAGDVEENPGPTSMDWIWRILFLVGAATGAHSFEEVQLLESGGGLVQPGGSLRLSCAASGFIFSSYAMSWVRQAPGKGQEWVSGVSGTGVNTYYADSVKGRFTISRDNSKNTLYLQMNSLRAEDTAVYYCASGKGWDSGSWYEDYRGQGTLVTVSSTRDKTHTCPPCPAIPEDTFFPSPESSCDVKLVEKSFETDTNLNFQNLSVIGFRILLLKVAGFNLLMTLRLWSS

SEQ ID NO: 17802 - protein, 441 aa, Artificial Sequence
  Synthetic Polypeptide
MALPVTALLLPLALLLHAARPQVQLVESGGGLVQPGGSLRLSCAASGFTFTNHAMSWVRQAPGKGLELVSSISGNGRTTYYADSVKGRFTISRDISKNTLDLQMNSLRAEDTAVYYCAKDGGETLVDSRGQGTLVTVSSLEGSGRADCGFTSESYQQGVLSATILYEILLGKATLYAVLVSALVLMAMVKRKDSRGRAKRSGSGATNFSLLKQAGDVEENPGPTSMDWIWRILFLVGAATGAHSFEEVQLLESGGGLVQPGGSLRLSCAASGFIFSSYAMSWVRQAPGKGQEWVSGVSGTGVNTYYADSVKGRFTISRDNSKNTLYLQMNSLRAEDTAVYYCASGKGWDSGSWYEDYRGQGTLVTVSSTRDKTHTCPPCPAIPEDTFFPSPESSCDVKLVEKSFETDTNLNFQNLSVIGFRILLLKVAGFNLLMTLRLWSS

SEQ ID NO: 17803 - protein, 892 aa, Artificial Sequence
  Synthetic Polypeptide
MALPVTALLLPLALLLHAARPQVQLVESGGGLVQPGGSLRLSCAASGFTFTNHAMSWVRQAPGKGLELVSSISGNGRTTYYADSVKGRFTISRDISKNTLDLQMNSLRAEDTAVYYCAKDGGETLVDSRGQGTLVTVSSLEGQPKANPTVTLFPPSSEELQANKATLVCLISDFYPGAVTVAWKADGSPVKAGVETTKPSKQSNNKYAASSYLSLTPEQWKSHRSYSCQVTHEGSTVEKTVAPTECSPIKTDVITMDPKDNCSKDANDTLLLQLTNTSAYYMYLLLLLKSVVYFAIITCCLLRRTAFCCNGEKSRAKRSGSGATNFSLLKQAGDVEENPGPTSMDWIWRILFLVGAATGAHSFEEVQLLESGGGLVQPGGSLRLSCAASGFIFSSYAMSWVRQAPGKGQEWVSGVSGTGVNTYYADSVKGRFTISRDNSKNTLYLQMNSLRAEDTAVYYCASGKGWDSGSWYEDYRGQGTLVTVSSTRASTKGPSVFPLAPSSKSTSGGTAALGCLVKDYFPEPVTVSWNSGALTSGVHTFPAVLQSSGLYSLSSVVTVPSSSLGTQTYICNVNHKPSNTKVDKRVEPKSCEVKTDSTDHVKPKETENTKQPSKSCHKPKAIVHTEKVNMMSLTVLGLRMLFAKTVAVNFLLTAKLFFLRAKRSGSGVKQTLNFDLLKLAGDVESNPGPSRGHMTEYKPTVRLATRDDVPRAVRTLAAAFADYPATRHTVDPDRHIERVTELQELFLTRVGLDIGKVWVADDGAAVAVWTTPESVEAGAVFAEIGPRMAELSGSRLAAQQQMEGLLAPHRPKEPAWFLATVGVSPDHQGKGLGSAVVLPGVEAAERAGVPAFLETSAPRNLPFYERLGFTVTADVEVPEGPRTWCMTRKPGA

SEQ ID NO: 17804 - protein, 659 aa, Artificial Sequence; identical to SEQ ID NO: 17766
  Synthetic Polypeptide

SEQ ID NO: 17805 - protein, 687 aa, Artificial Sequence
  Synthetic Polypeptide
MALPVTALLLPLALLLHAARPQVQLVESGGGLVQPGGSLRLSCAASGFTFTNHAMSWVRQAPGKGLELVSSISGNGRTTYYADSVKGRFTISRDISKNTLDLQMNSLRAEDTAVYYCAKDGGETLVDSRGQGTLVTVSSLEGSPIKTDVITMDPKDNCSKDANDTLLLQLTNTSAYYMYLLLLLKSVVYFAIITCCLLRRTAFCCNGEKSRAKRSGSGATNFSLLKQAGDVEENPGPTSMDWIWRILFLVGAATGAHSFEEVQLLESGGGLVQPGGSLRLSCAASGFIFSSYAMSWVRQAPGKGQEWVSGVSGTGVNTYYADSVKGRFTISRDNSKNTLYLQMNSLRAEDTAVYYCASGKGWDSGSWYEDYRGQGTLVTVSSTRGSEVKTDSTDHVKPKETENTKQPSKSCHKPKAIVHTEKVNMMSLTVLGLRMLFAKTVAVNFLLTAKLFFLRAKRSGSGVKQTLNFDLLKLAGDVESNPGPSRGHMTEYKPTVRLATRDDVPRAVRTLAAAFADYPATRHTVDPDRHIERVTELQELFLTRVGLDIGKVWVADDGAAVAVWTTPESVEAGAVFAEIGPRMAELSGSRLAAQQQMEGLLAPHRPKEPAWFLATVGVSPDHQGKGLGSAVVLPGVEAAERAGVPAFLETSAPRNLPFYERLGFTVTADVEVPEGPRTWCMTRKPGA

SEQ ID NO: 17806 - protein, 454 aa, Artificial Sequence
  Synthetic Polypeptide
MALPVTALLLPLALLLHAARPQVQLVESGGGLVQPGGSLRLSCAASGFTFTNHAMSWVRQAPGKGLELVSSISGNGRTTYYADSVKGRFTISRDISKNTLDLQMNSLRAEDTAVYYCAKDGGETLVDSRGQGTLVTVSSLEGSPIKTDVITMDPKDNCSKDANDTLLLQLTNTSAYYMYLLLLLKSVVYFAIITCCLLRRTAFCCNGEKSRAKRSGSGATNFSLLKQAGDVEENPGPTSMDWIWRILFLVGAATGAHSFEEVQLLESGGGLVQPGGSLRLSCAASGFIFSSYAMSWVRQAPGKGQEWVSGVSGTGVNTYYADSVKGRFTISRDNSKNTLYLQMNSLRAEDTAVYYCASGKGWDSGSWYEDYRGQGTLVTVSSTRGSEVKTDSTDHVKPKETENTKQPSKSCHKPKAIVHTEKVNMMSLTVLGLRMLFAKTVAVNFLLTAKLFFL

SEQ ID NO: 17807 - protein, 696 aa, Artificial Sequence
  Synthetic Polypeptide
MALPVTALLLPLALLLHAARPQVQLVESGGGLVQPGGSLRLSCAASGFTFTNHAMSWVRQAPGKGLELVSSISGNGRTTYYADSVKGRFTISRDISKNTLDLQMNSLRAEDTAVYYCAKDGGETLVDSRGQGTLVTVSSLEDKTHTCPPCPAPIKTDVITMDPKDNCSKDANDTLLLQLTNTSAYYMYLLLLLKSVVYFAIITCCLLRRTAFCCNGEKSRAKRSGSGATNFSLLKQAGDVEENPGPTSMDWIWRILFLVGAATGAHSFEEVQLLESGGGLVQPGGSLRLSCAASGFIFSSYAMSWVRQAPGKGQEWVSGVSGTGVNTYYADSVKGRFTISRDNSKNTLYLQMNSLRAEDTAVYYCASGKGWDSGSWYEDYRGQGTLVTVSSTRGSEVKTDSTDHVKPKETENTKQPSKSCHKPKAIVHTEKVNMMSLTVLGLRMLFAKTVAVNFLLTAKLFFLRAKRSGSGVKQTLNFDLLKLAGDVESNPGPSRGHMTEYKPTVRLATRDDVPRAVRTLAAAFADYPATRHTVDPDRHIERVTELQELFLTRVGLDIGKVWVADDGAAVAVWTTPESVEAGAVFAEIGPRMAELSGSRLAAQQQMEGLLAPHRPKEPAWFLATVGVSPDHQGKGLGSAVVLPGVEAAERAGVPAFLETSAPRNLPFYERLGFTVTADVEVPEGPRTWCMTRKPGA

SEQ ID NO: 17808 - protein, 696 aa, Artificial Sequence
  Synthetic Polypeptide
MALPVTALLLPLALLLHAARPQVQLVESGGGLVQPGGSLRLSCAASGFTFTNHAMSWVRQAPGKGLELVSSISGNGRTTYYADSVKGRFTISRDISKNTLDLQMNSLRAEDTAVYYCAKDGGETLVDSRGQGTLVTVSSLEGSPIKTDVITMDPKDNCSKDANDTLLLQLTNTSAYYMYLLLLLKSVVYFAIITCCLLRRTAFCCNGEKSRAKRSGSGATNFSLLKQAGDVEENPGPTSMDWIWRILFLVGAATGAHSFEEVQLLESGGGLVQPGGSLRLSCAASGFIFSSYAMSWVRQAPGKGQEWVSGVSGTGVNTYYADSVKGRFTISRDNSKNTLYLQMNSLRAEDTAVYYCASGKGWDSGSWYEDYRGQGTLVTVSSTRDKTHTCPPCPAEVKTDSTDHVKPKETENTKQPSKSCHKPKAIVHTEKVNMMSLTVLGLRMLFAKTVAVNFLLTAKLFFLRAKRSGSGVKQTLNFDLLKLAGDVESNPGPSRGHMTEYKPTVRLATRDDVPRAVRTLAAAFADYPATRHTVDPDRHIERVTELQELFLTRVGLDIGKVWVADDGAAVAVWTTPESVEAGAVFAEIGPRMAELSGSRLAAQQQMEGLLAPHRPKEPAWFLATVGVSPDHQGKGLGSAVVLPGVEAAERAGVPAFLETSAPRNLPFYERLGFTVTADVEVPEGPRTWCMTRKPGA

SEQ ID NO: 17809 - protein, 705 aa, Artificial Sequence
  Synthetic Polypeptide
MALPVTALLLPLALLLHAARPQVQLVESGGGLVQPGGSLRLSCAASGFTFTNHAMSWVRQAPGKGLELVSSISGNGRTTYYADSVKGRFTISRDISKNTLDLQMNSLRAEDTAVYYCAKDGGETLVDSRGQGTLVTVSSLEDKTHTCPPCPAPIKTDVITMDPKDNCSKDANDTLLLQLTNTSAYYMYLLLLLKSVVYFAIITCCLLRRTAFCCNGEKSRAKRSGSGATNFSLLKQAGDVEENPGPTSMDWIWRILFLVGAATGAHSFEEVQLLESGGGLVQPGGSLRLSCAASGFIFSSYAMSWVRQAPGKGQEWVSGVSGTGVNTYYADSVKGRFTISRDNSKNTLYLQMNSLRAEDTAVYYCASGKGWDSGSWYEDYRGQGTLVTVSSTRDKTHTCPPCPAEVKTDSTDHVKPKETENTKQPSKSCHKPKAIVHTEKVNMMSLTVLGLRMLFAKTVAVNFLLTAKLFFLRAKRSGSGVKQTLNFDLLKLAGDVESNPGPSRGHMTEYKPTVRLATRDDVPRAVRTLAAAFADYPATRHTVDPDRHIERVTELQELFLTRVGLDIGKVWVADDGAAVAVWTTPESVEAGAVFAEIGPRMAELSGSRLAAQQQMEGLLAPHRPKEPAWFLATVGVSPDHQGKGLGSAVVLPGVEAAERAGVPAFLETSAPRNLPFYERLGFTVTADVEVPEGPRTWCMTRKPGA

SEQ ID NO: 17810 - protein, 472 aa, Artificial Sequence
  Synthetic Polypeptide
MALPVTALLLPLALLLHAARPQVQLVESGGGLVQPGGSLRLSCAASGFTFTNHAMSWVRQAPGKGLELVSSISGNGRTTYYADSVKGRFTISRDISKNTLDLQMNSLRAEDTAVYYCAKDGGETLVDSRGQGTLVTVSSLEDKTHTCPPCPAPIKTDVITMDPKDNCSKDANDTLLLQLTNTSAYYMYLLLLLKSVVYFAIITCCLLRRTAFCCNGEKSRAKRSGSGATNFSLLKQAGDVEENPGPTSMDWIWRILFLVGAATGAHSFEEVQLLESGGGLVQPGGSLRLSCAASGFIFSSYAMSWVRQAPGKGQEWVSGVSGTGVNTYYADSVKGRFTISRDNSKNTLYLQMNSLRAEDTAVYYCASGKGWDSGSWYEDYRGQGTLVTVSSTRDKTHTCPPCPAEVKTDSTDHVKPKETENTKQPSKSCHKPKAIVHTEKVNMMSLTVLGLRMLFAKTVAVNFLLTAKLFFL

SEQ ID NO: 17811 - protein, 728 aa, Artificial Sequence
  Synthetic Polypeptide
MALPVTALLLPLALLLHAARPEVQLVESGGGLVQAGGSLRLSCAASGRTFSMGWFRQAPGKEREFVAAITYSGGSPYYADSVKGRFTISRDNAKNTVYLQMNSLKPEDTAVYYCAANPTYGSDWNAENWGQGTQVTVSSLESGGGGSFEQLQLQESGPGLVKPSETLSLTCTVSGGSISSGDYYWGWIRQPPGKGLEWIGSISYSGSTYYNPSLKSRVTISVDTSRNQFSLKLSSVTAADTAVYYCTREDSSNWRSRGQGTLVTVSSTREQKLISEEDLAKPTTTPAPRPPTPAPTIASQPLSLRPEACRPAAGGAVHTRGLDFACDIYIWAPLAGTCGVLLLSLVITLYCKRGRKKLLYIFKQPFMRPVQTTQEEDGCSCRFPEEEEGGCELRVKFSRSADAPAYQQGQNQLYNELNLGRREEYDVLDKRRGRDPEMGGKPRRKNPQEGLYNELQKDKMAEAYSEIGMKGERRRGKGHDGLYQGLSTATKDTYDALHMQALPPRSSGSGEGRGSLLTCGDVEENPGPHMTEYKPTVRLATRDDVPRAVRTLAAAFADYPATRHTVDPDRHIERVTELQELFLTRVGLDIGKVWVADDGAAVAVWTTPESVEAGAVFAEIGPRMAELSGSRLAAQQQMEGLLAPHRPKEPAWFLATVGVSPDHQGKGLGSAVVLPGVEAAERAGVPAFLETSAPRNLPFYERLGFTVTADVEVPEGPRTWCMTRKPGA

SEQ ID NO: 17812 - protein, 722 aa, Artificial Sequence
  Synthetic Polypeptide
MALPVTALLLPLALLLHAARPEVQLVESGGGLVQAGGSLRLSCAASGRTFSMGWFRQAPGKEREFVAAITYSGGSPYYADSVKGRFTISRDNAKNTVYLQMNSLKPEDTAVYYCAANPTYGSDWNAENWGQGTQVTVSSLESGGGGSFEQLQLQESGPGLVKPSETLSLTCTVSGGSISSGDYYWGWIRQPPGKGLEWIGSISYSGSTYYNPSLKSRVTISVDTSRNQFSLKLSSVTAADTAVYYCTREDSSNWRSRGQGTLVTVSSTREQKLISEEDLKIEVMYPPPYLDNEKSNGTIIHVKGKHLCPSPLFPGPSKPFWVLVVVGGVLACYSLLVTVAFIIFWVRSKRSRLLHSDYMNMTPRRPGPTRKHYQPYAPPRDFAAYRSRVKFSRSADAPAYQQGQNQLYNELNLGRREEYDVLDKRRGRDPEMGGKPRRKNPQEGLYNELQKDKMAEAYSEIGMKGERRRGKGHDGLYQGLSTATKDTYDALHMQALPPRSSGSGEGRGSLLTCGDVEENPGPHMTEYKPTVRLATRDDVPRAVRTLAAAFADYPATRHTVDPDRHIERVTELQELFLTRVGLDIGKVWVADDGAAVAVWTTPESVEAGAVFAEIGPRMAELSGSRLAAQQQMEGLLAPHRPKEPAWFLATVGVSPDHQGKGLGSAVVLPGVEAAERAGVPAFLETSAPRNLPFYERLGFTVTADVEVPEGPRTWCMTRKPGA

SEQ ID NO: 17813 - protein, 499 aa, Artificial Sequence
  Synthetic Polypeptide
MALPVTALLLPLALLLHAARPEVQLVESGGGLVQAGGSLRLSCAASGRTFSMGWFRQAPGKEREFVAAITYSGGSPYYADSVKGRFTISRDNAKNTVYLQMNSLKPEDTAVYYCAANPTYGSDWNAENWGQGTQVTVSSLESGGGGSFEQLQLQESGPGLVKPSETLSLTCTVSGGSISSGDYYWGWIRQPPGKGLEWIGSISYSGSTYYNPSLKSRVTISVDTSRNQFSLKLSSVTAADTAVYYCTREDSSNWRSRGQGTLVTVSSTREQKLISEEDLKIEVMYPPPYLDNEKSNGTIIHVKGKHLCPSPLFPGPSKPFWVLVVVGGVLACYSLLVTVAFIIFWVRSKRSRLLHSDYMNMTPRRPGPTRKHYQPYAPPRDFAAYRSRVKFSRSADAPAYQQGQNQLYNELNLGRREEYDVLDKRRGRDPEMGGKPRRKNPQEGLYNELQKDKMAEAYSEIGMKGERRRGKGHDGLYQGLSTATKDTYDALHMQALPPR

SEQ ID NO: 17814 - protein, 505 aa, Artificial Sequence
  Synthetic Polypeptide
MALPVTALLLPLALLLHAARPEVQLVESGGGLVQAGGSLRLSCAASGRTFSMGWFRQAPGKEREFVAAITYSGGSPYYADSVKGRFTISRDNAKNTVYLQMNSLKPEDTAVYYCAANPTYGSDWNAENWGQGTQVTVSSLESGGGGSFEQLQLQESGPGLVKPSETLSLTCTVSGGSISSGDYYWGWIRQPPGKGLEWIGSISYSGSTYYNPSLKSRVTISVDTSRNQFSLKLSSVTAADTAVYYCTREDSSNWRSRGQGTLVTVSSTREQKLISEEDLAKPTTTPAPRPPTPAPTIASQPLSLRPEACRPAAGGAVHTRGLDFACDIYIWAPLAGTCGVLLLSLVITLYCKRGRKKLLYIFKQPFMRPVQTTQEEDGCSCRFPEEEEGGCELRVKFSRSADAPAYQQGQNQLYNELNLGRREEYDVLDKRRGRDPEMGGKPRRKNPQEGLYNELQKDKMAEAYSEIGMKGERRRGKGHDGLYQGLSTATKDTYDALHMQALPPR

SEQ ID NO: 17815 - protein, 506 aa, Artificial Sequence
  Synthetic Polypeptide
MALPVTALLLPLALLLHAARPEQLQLQESGPGLVKPSETLSLTCTVSGGSISSGDYYWGWIRQPPGKGLEWIGSISYSGSTYYNPSLKSRVTISVDTSRNQFSLKLSSVTAADTAVYYCTREDSSNWRSRGQGTLVTVSSLESGGGGSFEEVQLVESGGGLVQAGGSLRLSCAASGRTFSMGWFRQAPGKEREFVAAITYSGGSPYYADSVKGRFTISRDNAKNTVYLQMNSLKPEDTAVYYCAANPTYGSDWNAENWGQGTQVTVSSTREQKLISEEDLAKPTTTPAPRPPTPAPTIASQPLSLRPEACRPAAGGAVHTRGLDFACDIYIWAPLAGTCGVLLLSLVITLYCKRGRKKLLYIFKQPFMRPVQTTQEEDGCSCRFPEEEEGGCELRVKFSRSADAPAYQQGQNQLYNELNLGRREEYDVLDKRRGRDPEMGGKPRRKNPQEGLYNELQKDKMAEAYSEIGMKGERRRGKGHDGLYQGLSTATKDTYDALHMQALPPR

SEQ ID NO: 17816 - protein, 918 aa, Artificial Sequence
  Synthetic Polypeptide
MALPVTALLLPLALLLHAARPEVQLVESGGGLVQAGGSLRLSCAASGRTFSMGWFRQAPGKEREFVAAITYSGGSPYYADSVKGRFTISRDNAKNTVYLQMNSLKPEDTAVYYCAANPTYGSDWNAENWGQGTQVTVSSLESGGGGSFEQLQLQESGPGLVKPSETLSLTCTVSGGSISSGDYYWGWIRQPPGKGLEWIGSISYSGSTYYNPSLKSRVTISVDTSRNQFSLKLSSVTAADTAVYYCTREDSSNWRSRGQGTLVTVSSTREQKLISEEDLAKPTTTPAPRPPTPAPTIASQPLSLRPEACRPAAGGAVHTRGLDFACDIYIWAPLAGTCGVLLLSLVITLYCGRARVKFSRSADAPAYQQGQNQLYNELNLGRREEYDVLDKRRGRDPEMGGKPRRKNPQEGLYNELQKDKMAEAYSEIGMKGERRRGKGHDGLYQGLSTATKDTYDALHMQALPPRSRGSGATNFSLLKQAGDVEENPGPGIHMATYEVLCEVARKLGTDDREVVLFLLNVFIPQPTLAQLIGALRALKEEGRLTFPLLAECLFRAGRRDLLRDLLHLDPRFLERHLAGTMSYFSPYQLTVLHVDGELCARDIRSLIFLSKDTIGSRSTPQTFLHWVYCMENLDLLGPTDVDALMSMLRSLSRVDLQRQVQTLMGLHLSGPSHSQHYRHTPLETDFYDYKDDDDKTSGSGEGRGSLLTCGDVEENPGPHMTEYKPTVRLATRDDVPRAVRTLAAAFADYPATRHTVDPDRHIERVTELQELFLTRVGLDIGKVWVADDGAAVAVWTTPESVEAGAVFAEIGPRMAELSGSRLAAQQQMEGLLAPHRPKEPAWFLATVGVSPDHQGKGLGSAVVLPGVEAAERAGVPAFLETSAPRNLPFYERLGFTVTADVEVPEGPRTWCMTRKPGA

SEQ ID NO: 17817 - protein, 863 aa, Artificial Sequence
  Synthetic Polypeptide
MALPVTALLLPLALLLHAARPEVQLVESGGGLVQAGGSLRLSCAASGRTFSMGWFRQAPGKEREFVAAITYSGGSPYYADSVKGRFTISRDNAKNTVYLQMNSLKPEDTAVYYCAANPTYGSDWNAENWGQGTQVTVSSLEIQNPDPAVYQLRDSKSSDKSVCLFTDFDSQTNVSQSKDSDVYITDKCVLDMRSMDFKSNSAVAWSNKSDFACANAFNNSIIPEDTFFPSSDVPCDVKLVEKSFETDTNLNFQNLSVIGFRILLLKVAGFNLLMTLRLWSSRAKRSGSGVKQTLNFDLLKLAGDVESNPGPTSMDWIWRILFLVGAATGAHSFEQLQLQESGPGLVKPSETLSLTCTVSGGSISSGDYYWGWIRQPPGKGLEWIGSISYSGSTYYNPSLKSRVTISVDTSRNQFSLKLSSVTAADTAVYYCTREDSSNWRSRGQGTLVTVSSTREDLKNVFPPEVAVFEPSKAEIAHTQKATLVCLATGFYPDHVELSWWVNGKEVHSGVCTDPQPLKEQPALNDSRYCLSSRLRVSATFWQNPRNHFRCQVQFYGLSENDEWTQDRAKPVTQIVSAEAWGRADCGITSASYHQGVLSATILYEILLGKATLYAVLVSALVLMAMVKRKDSRGRAKRSGSGATNFSLLKQAGDVEENPGPSRGHMTEYKPTVRLATRDDVPRAVRTLAAAFADYPATRHTVDPDRHIERVTELQELFLTRVGLDIGKVWVADDGAAVAVWTTPESVEAGAVFAEIGPRMAELSGSRLAAQQQMEGLLAPHRPKEPAWFLATVGVSPDHQGKGLGSAVVLPGVEAAERAGVPAFLETSAPRNLPFYERLGFTVTADVEVPEGPRTWCMTRKPGA

SEQ ID NO: 17818 - protein, 862 aa, Artificial Sequence
  Synthetic Polypeptide
MALPVTALLLPLALLLHAARPEVQLVESGGGLVQAGGSLRLSCAASGRTFSMGWFRQAPGKEREFVAAITYSGGSPYYADSVKGRFTISRDNAKNTVYLQMNSLKPEDTAVYYCAANPTYGSDWNAENWGQGTQVTVSSLEDLKNVFPPEVAVFEPSKAEIAHTQKATLVCLATGFYPDHVELSWWVNGKEVHSGVCTDPQPLKEQPALNDSRYCLSSRLRVSATFWQNPRNHFRCQVQFYGLSENDEWTQDRAKPVTQIVSAEAWGRADCGITSASYHQGVLSATILYEILLGKATLYAVLVSALVLMAMVKRKDSRGRAKRSGSGATNFSLLKQAGDVEENPGPTSMDWIWRILFLVGAATGAHSFEQLQLQESGPGLVKPSETLSLTCTVSGGSISSGDYYWGWIRQPPGKGLEWIGSISYSGSTYYNPSLKSRVTISVDTSRNQFSLKLSSVTAADTAVYYCTREDSSNWRSRGQGTLVTVSSTRIQNPDPAVYQLRDSKSSDKSVCLFTDFDSQTNVSQSKDSDVYITDKCVLDMRSMDFKSNSAVAWSNKSDFACANAFNNSIIPEDTFFPSSDVPCDVKLVEKSFETDTNLNFQNLSVIGFRILLLKVAGFNLLMTLRLWSSRAKRSGSGVKQTLNFDLLKLAGDVESNPGPSRGHMTEYKPTVRLATRDDVPRAVRTLAAAFADYPATRHTVDPDRHIERVTELQELFLTRVGLDIGKVWVADDGAAVAVWTTPESVEAGAVFAEIGPRMAELSGSRLAAQQQMEGLLAPHRPKEPAWFLATVGVSPDHQGKGLGSAVVLPGVEAAERAGVPAFLETSAPRNLPFYERLGFTVTADVEVPEGPRTWCMTRKPGA

SEQ ID NO: 17819 - protein, 629 aa, Artificial Sequence
  Synthetic Polypeptide
MALPVTALLLPLALLLHAARPEVQLVESGGGLVQAGGSLRLSCAASGRTFSMGWFRQAPGKEREFVAAITYSGGSPYYADSVKGRFTISRDNAKNTVYLQMNSLKPEDTAVYYCAANPTYGSDWNAENWGQGTQVTVSSLEDLKNVFPPEVAVFEPSEAEISHTQKATLVCLATGFYPDHVELSWWVNGKEVHSGVCTDPQPLKEQPALNDSRYCLSSRLRVSATFWQNPRNHFRCQVQFYGLSENDEWTQDRAKPVTQIVSAEAWGRADCGFTSESYQQGVLSATILYEILLGKATLYAVLVSALVLMAMVKRKDSRGRAKRSGSGATNFSLLKQAGDVEENPGPTSMDWIWRILFLVGAATGAHSFEQLQLQESGPGLVKPSETLSLTCTVSGGSISSGDYYWGWIRQPPGKGLEWIGSISYSGSTYYNPSLKSRVTISVDTSRNQFSLKLSSVTAADTAVYYCTREDSSNWRSRGQGTLVTVSSTRIQNPDPAVYQLRDSKSSDKSVCLFTDFDSQTNVSQSKDSDVYITDKCVLDMRSMDFKSNSAVAWSNKSDFACANAFNNSIIPEDTFFPSPESSCDVKLVEKSFETDTNLNFQNLSVIGFRILLLKVAGFNLLMTLRLWSS

SEQ ID NO: 17820 - protein, 854 aa, Artificial Sequence
  Synthetic Polypeptide
MALPVTALLLPLALLLHAARPEVQLVESGGGLVQAGGSLRLSCAASGRTFSMGWFRQAPGKEREFVAAITYSGGSPYYADSVKGRFTISRDNAKNTVYLQMNSLKPEDTAVYYCAANPTYGSDWNAENWGQGTQVTVSSLEDLKNVFPPEVAVFEPSEAEISHTQKATLVCLATGFYPDHVELSWWVNGKEVHSGVCTDPQPLKEQPALNDSRYCLSSRLRVSATFWQNPRNHFRCQVQFYGLSENDEWTQDRAKPVTQIVSAEAWGRADCGFTSESYQQGVLSATILYEILLGKATLYAVLVSALVLMAMVKRKDSRGRAKRSGSGATNFSLLKQAGDVEENPGPTSMDWIWRILFLVGAATGAHSFEQLQLQESGPGLVKPSETLSLTCTVSGGSISSGDYYWGWIRQPPGKGLEWIGSISYSGSTYYNPSLKSRVTISVDTSRNQFSLKLSSVTAADTAVYYCTREDSSNWRSRGQGTLVTVSSTRIQNPDPAVYQLRDSKSSDKSVCLFTDFDSQTNVSQSKDSDVYITDKCVLDMRSMDFKSNSAVAWSNKSDFACANAFNNSIIPEDTFFPSPESSCDVKLVEKSFETDTNLNFQNLSVIGFRILLLKVAGFNLLMTLRLWSSRAKRSGSGVKQTLNFDLLKLAGDVESNPGPSRGGIHTMATYEVLCEVARKLGTDDREVVLFLLNVFIPQPTLAQLIGALRALKEEGRLTFPLLAECLFRAGRRDLLRDLLHLDPRFLERHLAGTMSYFSPYQLTVLHVDGELCARDIRSLIFLSKDTIGSRSTPQTFLHWVYCMENLDLLGPTDVDALMSMLRSLSRVDLQRQVQTLMGLHLSGPSHSQHYRHTP

SEQ ID NO: 17821 - protein, 633 aa, Artificial Sequence
  Synthetic Polypeptide
MALPVTALLLPLALLLHAARPEVQLVESGGGLVQAGGSLRLSCAASGRTFSMGWFRQAPGKEREFVAAITYSGGSPYYADSVKGRFTISRDNAKNTVYLQMNSLKPEDTAVYYCAANPTYGSDWNAENWGQGTQVTVSSLEIQNPDPAVYQLRDSKSSDKSVCLFTDFDSQTNVSQSKDSDVYITDKCVLDMRSMDFKSNSAVAWSNKSDFACANAFNNSIIPEDTFFPSPESSCDVKLVEKSFETDTNLNFQNLSVIGFRILLLKVAGFNLLMTLRLWSSRAKRSGSGVKQTLNFDLLKLAGDVESNPGPTSMDWIWRILFLVGAATGAHSFEQLQLQESGPGLVKPSETLSLTCTVSGGSISSGDYYWGWIRQPPGKGLEWIGSISYSGSTYYNPSLKSRVTISVDTSRNQFSLKLSSVTAADTAVYYCTREDSSNWRSRGQGTLVTVSSTREDLKNVFPPEVAVFEPSEAEISHTQKATLVCLATGFYPDHVELSWWVNGKEVHSGVCTDPQPLKEQPALNDSRYCLSSRLRVSATFWQNPRNHFRCQVQFYGLSENDEWTQDRAKPVTQIVSAEAWGRADCGFTSESYQQGVLSATILYEILLGKATLYAVLVSALVLMAMVKRKDSRG

SEQ ID NO: 17822 - protein, 855 aa, Artificial Sequence
  Synthetic Polypeptide
MALPVTALLLPLALLLHAARPEVQLVESGGGLVQAGGSLRLSCAASGRTFSMGWFRQAPGKEREFVAAITYSGGSPYYADSVKGRFTISRDNAKNTVYLQMNSLKPEDTAVYYCAANPTYGSDWNAENWGQGTQVTVSSLEIQNPDPAVYQLRDSKSSDKSVCLFTDFDSQTNVSQSKDSDVYITDKCVLDMRSMDFKSNSAVAWSNKSDFACANAFNNSIIPEDTFFPSPESSCDVKLVEKSFETDTNLNFQNLSVIGFRILLLKVAGFNLLMTLRLWSSRAKRSGSGVKQTLNFDLLKLAGDVESNPGPTSMDWIWRILFLVGAATGAHSFEQLQLQESGPGLVKPSETLSLTCTVSGGSISSGDYYWGWIRQPPGKGLEWIGSISYSGSTYYNPSLKSRVTISVDTSRNQFSLKLSSVTAADTAVYYCTREDSSNWRSRGQGTLVTVSSTREDLKNVFPPEVAVFEPSEAEISHTQKATLVCLATGFYPDHVELSWWVNGKEVHSGVCTDPQPLKEQPALNDSRYCLSSRLRVSATFWQNPRNHFRCQVQFYGLSENDEWTQDRAKPVTQIVSAEAWGRADCGFTSESYQQGVLSATILYEILLGKATLYAVLVSALVLMAMVKRKDSRGRAKRSGSGATNFSLLKQAGDVEENPGPSRGGIHTMATYEVLCEVARKLGTDDREVVLFLLNVFIPQPTLAQLIGALRALKEEGRLTFPLLAECLFRAGRRDLLRDLLHLDPRFLERHLAGTMSYFSPYQLTVLHVDGELCARDIRSLIFLSKDTIGSRSTPQTFLHWVYCMENLDLLGPTDVDALMSMLRSLSRVDLQRQVQTLMGLHLSGPSHSQHYRHTP

SEQ ID NO: 17823 - protein, 902 aa, Artificial Sequence
  Synthetic Polypeptide
MALPVTALLLPLALLLHAARPLEGKPIPNPLLGLDSTGSGEDLKNVFPPEVAVFEPSKAEIAHTQKATLVCLATGFYPDHVELSWWVNGKEVHSGVCTDPQPLKEQPALNDSRYCLSSRLRVSATFWQNPRNHFRCQVQFYGLSENDEWTQDRAKPVTQIVSAEAWGRADCGITSASYHQGVLSATILYEILLGKATLYAVLVSALVLMAMVKRKDSRGRAKRSGSGATNFSLLKQAGDVEENPGPTSMALPVTALLLPLALLLHAARPEVQLVESGGGLVQAGGSLRLSCAASGRTFSMGWFRQAPGKEREFVAAITYSGGSPYYADSVKGRFTISRDNAKNTVYLQMNSLKPEDTAVYYCAANPTYGSDWNAENWGQGTQVTVSSLESGGGGSFEQLQLQESGPGLVKPSETLSLTCTVSGGSISSGDYYWGWIRQPPGKGLEWIGSISYSGSTYYNPSLKSRVTISVDTSRNQFSLKLSSVTAADTAVYYCTREDSSNWRSRGQGTLVTVSSTREQKLISEEDGSGIQNPDPAVYQLRDSKSSDKSVCLFTDFDSQTNVSQSKDSDVYITDKCVLDMRSMDFKSNSAVAWSNKSDFACANAFNNSIIPEDTFFPSSDVPCDVKLVEKSFETDTNLNFQNLSVIGFRILLLKVAGFNLLMTLRLWSSRAKRSGSGVKQTLNFDLLKLAGDVESNPGPSRGHMTEYKPTVRLATRDDVPRAVRTLAAAFADYPATRHTVDPDRHIERVTELQELFLTRVGLDIGKVWVADDGAAVAVWTTPESVEAGAVFAEIGPRMAELSGSRLAAQQQMEGLLAPHRPKEPAWFLATVGVSPDHQGKGLGSAVVLPGVEAAERAGVPAFLETSAPRNLPFYERLGFTVTADVEVPEGPRTWCMTRKPGA

SEQ ID NO: 17824 - protein, 903 aa, Artificial Sequence
  Synthetic Polypeptide
MALPVTALLLPLALLLHAARPLEQKLISEEDLGSGDRPDPAVYQLRDSKSSDKSVCLFTDFDSQTNVSQSKDSDVYITDKCVLDMRSMDFKSNSAVAWSNKSDFACANAFNNSIIPEDTFFPSPESSCDVKLVEKSFETDTNLNFQNLSVIGFRILLLKVAGFNLLMTLRLWSSSSRAKRSGSGVKQTLNFDLLKLAGDVESNPGPTSMALPVTALLLPLALLLHAARPEVQLVESGGGLVQAGGSLRLSCAASGRTFSMGWFRQAPGKEREFVAAITYSGGSPYYADSVKGRFTISRDNAKNTVYLQMNSLKPEDTAVYYCAANPTYGSDWNAENWGQGTQVTVSSLESGGGGSFEQLQLQESGPGLVKPSETLSLTCTVSGGSISSGDYYWGWIRQPPGKGLEWIGSISYSGSTYYNPSLKSRVTISVDTSRNQFSLKLSSVTAADTAVYYCTREDSSNWRSRGQGTLVTVSSTRGKPIPNPLLGLDSTGSGEDLKNVFPPEVAVFEPSEAEISHTQKATLVCLATGFYPDHVELSWWVNGKEVHSGVCTDPQPLKEQPALNDSRYCLSSRLRVSATFWQNPRNHFRCQVQFYGLSENDEWTQDRAKPVTQIVSAEAWGRADCGFTSESYQQGVLSATILYEILLGKATLYAVLVSALVLMAMVKRKDSRGRAKRSGSGATNFSLLKQAGDVEENPGPSRGHMTEYKPTVRLATRDDVPRAVRTLAAAFADYPATRHTVDPDRHIERVTELQELFLTRVGLDIGKVWVADDGAAVAVWTTPESVEAGAVFAEIGPRMAELSGSRLAAQQQMEGLLAPHRPKEPAWFLATVGVSPDHQGKGLGSAVVLPGVEAAERAGVPAFLETSAPRNLPFYERLGFTVTADVEVPEGPRTWCMTRKPGA

SEQ ID NO: 17825 - protein, 862 aa, Artificial Sequence
  Synthetic Polypeptide
MALPVTALLLPLALLLHAARPEVQLVESGGGLVQAGGSLRLSCAASGRTFSMGWFRQAPGKEREFVAAITYSGGSPYYADSVKGRFTISRDNAKNTVYLQMNSLKPEDTAVYYCAANPTYGSDWNAENWGQGTQVTVSSLEDLKNVFPPEVAVFEPSEAEISHTQKATLVCLATGFYPDHVELSWWVNGKEVHSGVSTDPQPLKEQPALNDSRYCLSSRLRVSATFWQNPRNHFRCQVQFYGLSENDEWTQDRAKPVTQIVSAEAWGRADCGFTSESYQQGVLSATILYEILLGKATLYAVLVSALVLMAMVKRKDSRGRAKRSGSGATNFSLLKQAGDVEENPGPTSMDWIWRILFLVGAATGAHSFEQLQLQESGPGLVKPSETLSLTCTVSGGSISSGDYYWGWIRQPPGKGLEWIGSISYSGSTYYNPSLKSRVTISVDTSRNQFSLKLSSVTAADTAVYYCTREDSSNWRSRGQGTLVTVSSTRIQNPDPAVYQLRDSKSSDKSVCLFTDFDSQTNVSQSKDSDVYITDKTVLDMRSMDFKSNSAVAWSNKSDFACANAFNNSIIPEDTFFPSPESSCDVKLVEKSFETDTNLNFQNLSVIGFRILLLKVAGFNLLMTLRLWSSRAKRSGSGVKQTLNFDLLKLAGDVESNPGPSRGHMTEYKPTVRLATRDDVPRAVRTLAAAFADYPATRHTVDPDRHIERVTELQELFLTRVGLDIGKVWVADDGAAVAVWTTPESVEAGAVFAEIGPRMAELSGSRLAAQQQMEGLLAPHRPKEPAWFLATVGVSPDHQGKGLGSAVVLPGVEAAERAGVPAFLETSAPRNLPFYERLGFTVTADVEVPEGPRTWCMTRKPGA

SEQ ID NO: 17826 - protein, 944 aa, Artificial Sequence
  Synthetic Polypeptide
MALPVTALLLPLALLLHAARPEVQLVESGGGLVQAGGSLRLSCAASGRTFSMGWFRQAPGKEREFVAAITYSGGSPYYADSVKGRFTISRDNAKNTVYLQMNSLKPEDTAVYYCAANPTYGSDWNAENWGQGTQVTVSSLEDLKNVFPPEVAVFEPSEAEISHTQKATLVCLATGFYPDHVELSWWVNGKEVHSGVSTDPQPLKEQPALNDSRYCLSSRLRVSATFWQNPRNHFRCQVQFYGLSENDEWTQDRAKPVTQIVSAEAWGRADCGFTSESYQQGVLSATILYEILLGKATLYAVLVSALVLMAMVKRKDSRGRAKRSGSGATNFSLLKQAGDVEENPGPTSMDWIWRILFLVGAATGAHSFEQLQLQESGPGLVKPSETLSLTCTVSGGSISSGDYYWGWIRQPPGKGLEWIGSISYSGSTYYNPSLKSRVTISVDTSRNQFSLKLSSVTAADTAVYYCTREDSSNWRSRGQGTLVTVSSTREQKLISEEDGSGTPFPSLAPPIMLLVDGKQQMVVVCLVLDVAPPGLDSPIWFSAGNGSALDAFTYGPSPATDGTWTNLAHLSLPSEELASWEPLVCHTGPGAEGHSRSTQPMHLSGEASTARTCPQEPLRGTPGGALWLGVLRLLLFKLLLFDLLLTCSCLCDPAGPLPSPATTTRLRALGSHRLHPATETGGREATSSPRPQPRDRRWGDTPPGRKPGSPVRAKRSGSGVKQTLNFDLLKLAGDVESNPGPSRGHMTEYKPTVRLATRDDVPRAVRTLAAAFADYPATRHTVDPDRHIERVTELQELFLTRVGLDIGKVWVADDGAAVAVWTTPESVEAGAVFAEIGPRMAELSGSRLAAQQQMEGLLAPHRPKEPAWFLATVGVSPDHQGKGLGSAVVLPGVEAAERAGVPAFLETSAPRNLPFYERLGFTVTADVEVPEGPRTWCMTRKPGA

SEQ ID NO: 17827 - protein, 957 aa, Artificial Sequence
  Synthetic Polypeptide
MALPVTALLLPLALLLHAARPLEDLKNVFPPEVAVFEPSEAEISHTQKATLVCLATGFYPDHVELSWWVNGKEVHSGVSTDPQPLKEQPALNDSRYCLSSRLRVSATFWQNPRNHFRCQVQFYGLSENDEWTQDRAKPVTQIVSAEAWGRADCGFTSESYQQGVLSATILYEILLGKATLYAVLVSALVLMAMVKRKDSRGRAKRSGSGATNFSLLKQAGDVEENPGPTSMALPVTALLLPLALLLHAARPEVQLVESGGGLVQAGGSLRLSCAASGRTFSMGWFRQAPGKEREFVAAITYSGGSPYYADSVKGRFTISRDNAKNTVYLQMNSLKPEDTAVYYCAANPTYGSDWNAENWGQGTQVTVSSLESGGGGSFEQLQLQESGPGLVKPSETLSLTCTVSGGSISSGDYYWGWIRQPPGKGLEWIGSISYSGSTYYNPSLKSRVTISVDTSRNQFSLKLSSVTAADTAVYYCTREDSSNWRSRGQGTLVTVSSTREQKLISEEDLGSGTPFPSLAPPIMLLVDGKQQMVVVCLVLDVAPPGLDSPIWFSAGNGSALDAFTYGPSPATDGTWTNLAHLSLPSEELASWEPLVCHTGPGAEGHSRSTQPMHLSGEASTARTCPQEPLRGTPGGALWLGVLRLLLFKLLLFDLLLTCSCLCDPAGPLPSPATTTRLRALGSHRLHPATETGGREATSSPRPQPRDRRWGDTPPGRKPGSPVRAKRSGSGVKQTLNFDLLKLAGDVESNPGPSRSRGHMTEYKPTVRLATRDDVPRAVRTLAAAFADYPATRHTVDPDRHIERVTELQELFLTRVGLDIGKVWVADDGAAVAVWTTPESVEAGAVFAEIGPRMAELSGSRLAAQQQMEGLLAPHRPKEPAWFLATVGVSPDHQGKGLGSAVVLPGVEAAERAGVPAFLETSAPRNLPFYERLGFTVTADVEVPEGPRTWCMTRKPGA

SEQ ID NO: 17828 - protein, 899 aa, Artificial Sequence
  Synthetic Polypeptide
MALPVTALLLPLALLLHAARPEVQLVESGGGLVQAGGSLRLSCAASGRTFSMGWFRQAPGKEREFVAAITYSGGSPYYADSVKGRFTISRDNAKNTVYLQMNSLKPEDTAVYYCAANPTYGSDWNAENWGQGTQVTVSSLEGKPIPNPLLGLDSTGSGDKQLDADVSPKPTIFLPSIAETKLQKAGTYLCLLEKFFPDVIKIHWQEKKSNTILGSQEGNTMKTNDTYMKFSWLTVPEKSLDKEHRCIVRHENNKNGVDQEIIFPPIKTDVITMDPKDNCSKDANDTLLLQLTNTSAYYMYLLLLLKSVVYFAIITCCLLRRTAFCCNGEKSRAKRSGSGATNFSLLKQAGDVEENPGPTSMDWIWRILFLVGAATGAHSFEQLQLQESGPGLVKPSETLSLTCTVSGGSISSGDYYWGWIRQPPGKGLEWIGSISYSGSTYYNPSLKSRVTISVDTSRNQFSLKLSSVTAADTAVYYCTREDSSNWRSRGQGTLVTVSSTREQKLISEEDGSGSQPHTKPSVFVMKNGTNVACLVKEFYPKDIRINLVSSKKITEFDPAIVISPSGKYNAVKLGKYEDSNSVTCSVQHDNKTVHSTDFEVKTDSTDHVKPKETENTKQPSKSCHKPKAIVHTEKVNMMSLTVLGLRMLFAKTVAVNFLLTAKLFFLRAKRSGSGVKQTLNFDLLKLAGDVESNPGPSRGHMTEYKPTVRLATRDDVPRAVRTLAAAFADYPATRHTVDPDRHIERVTELQELFLTRVGLDIGKVWVADDGAAVAVWTTPESVEAGAVFAEIGPRMAELSGSRLAAQQQMEGLLAPHRPKEPAWFLATVGVSPDHQGKGLGSAVVLPGVEAAERAGVPAFLETSAPRNLPFYERLGFTVTADVEVPEGPRTWCMTRKPGA

SEQ ID NO: 17829 - protein, 637 aa, Artificial Sequence
  Synthetic Polypeptide
MALPVTALLLPLALLLHAARPEVQLVESGGGLVQAGGSLRLSCAASGRTFSMGWFRQAPGKEREFVAAITYSGGSPYYADSVKGRFTISRDNAKNTVYLQMNSLKPEDTAVYYCAANPTYGSDWNAENWGQGTQVTVSSLESQPHTKPSVFVMKNGTNVACLVKEFYPKDIRINLVSSKKITEFDPAIVISPSGKYNAVKLGKYEDSNSVTCSVQHDNKTVHSTDFEVKTDSTDHVKPKETENTKQPSKSCHKPKAIVHTEKVNMMSLTVLGLRMLFAKTVAVNFLLTAKLFFLRAKRSGSGATNFSLLKQAGDVEENPGPTSMDWIWRILFLVGAATGAHSFEQLQLQESGPGLVKPSETLSLTCTVSGGSISSGDYYWGWIRQPPGKGLEWIGSISYSGSTYYNPSLKSRVTISVDTSRNQFSLKLSSVTAADTAVYYCTREDSSNWRSRGQGTLVTVSSTRDKQLDADVSPKPTIFLPSIAETKLQKAGTYLCLLEKFFPDVIKIHWQEKKSNTILGSQEGNTMKTNDTYMKFSWLTVPEKSLDKEHRCIVRHENNKNGVDQEIIFPPIKTDVITMDPKDNCSKDANDTLLLQLTNTSAYYMYLLLLLKSVVYFAIITCCLLRRTAFCCNGEKS

SEQ ID NO: 17830 - protein, 909 aa, Artificial Sequence
  Synthetic Polypeptide
MALPVTALLLPLALLLHAARPLEGKPIPNPLLGLDSTGSGDKQLDADVSPKPTIFLPSIAETKLQKAGTYLCLLEKFFPDVIKIHWQEKKSNTILGSQEGNTMKTNDTYMKFSWLTVPEKSLDKEHRCIVRHENNKNGVDQEIIFPPIKTDVITMDPKDNCSKDANDTLLLQLTNTSAYYMYLLLLLKSVVYFAIITCCLLRRTAFCCNGEKSRAKRSGSGATNFSLLKQAGDVEENPGPTSMALPVTALLLPLALLLHAARPEVQLVESGGGLVQAGGSLRLSCAASGRTFSMGWFRQAPGKEREFVAAITYSGGSPYYADSVKGRFTISRDNAKNTVYLQMNSLKPEDTAVYYCAANPTYGSDWNAENWGQGTQVTVSSLESGGGGSFEQLQLQESGPGLVKPSETLSLTCTVSGGSISSGDYYWGWIRQPPGKGLEWIGSISYSGSTYYNPSLKSRVTISVDTSRNQFSLKLSSVTAADTAVYYCTREDSSNWRSRGQGTLVTVSSTREQKLISEEDGSGSQPHTKPSVFVMKNGTNVACLVKEFYPKDIRINLVSSKKITEFDPAIVISPSGKYNAVKLGKYEDSNSVTCSVQHDNKTVHSTDFEVKTDSTDHVKPKETENTKQPSKSCHKPKAIVHTEKVNMMSLTVLGLRMLFAKTVAVNFLLTAKLFFLRAKRSGSGVKQTLNFDLLKLAGDVESNPGPSRGHMTEYKPTVRLATRDDVPRAVRTLAAAFADYPATRHTVDPDRHIERVTELQELFLTRVGLDIGKVWVADDGAAVAVWTTPESVEAGAVFAEIGPRMAELSGSRLAAQQQMEGLLAPHRPKEPAWFLATVGVSPDHQGKGLGSAVVLPGVEAAERAGVPAFLETSAPRNLPFYERLGFTVTADVEVPEGPRTWCMTRKPGA

SEQ ID NO: 17831 - protein, 1039 aa, Artificial Sequence
  Synthetic Polypeptide
MALPVTALLLPLALLLHAARPEVQLVESGGGLVQAGGSLRLSCAASGRTFSMGWFRQAPGKEREFVAAITYSGGSPYYADSVKGRFTISRDNAKNTVYLQMNSLKPEDTAVYYCAANPTYGSDWNAENWGQGTQVTVSSGQPKANPTVTLFPPSSEELQANKATLVCLISDFYPGAVTVAWKADGSPVKAGVETTKPSKQSNNKYAASSYLSLTPEQWKSHRSYSCQVTHEGSTVEKTVAPTECSGSQSFGLLDPKLCYLLDGILFIYGVILTALFLRVKFSRSADAPAYQQGQNQLYNELNLGRREEYDVLDKRRGRDPEMGGKPQRRKNPQEGLYNELQKDKMAEAYSEIGMKGERRRGKGHDGLYQGLSTATKDTYDALHMQALPPRRAKRSGSGATNFSLLKQAGDVEENPGPTSMDWIWRILFLVGAATGAHSFEQLQLQESGPGLVKPSETLSLTCTVSGGSISSGDYYWGWIRQPPGKGLEWIGSISYSGSTYYNPSLKSRVTISVDTSRNQFSLKLSSVTAADTAVYYCTREDSSNWRSRGQGTLVTVSSASTKGPSVFPLAPSSKSTSGGTAALGCLVKDYFPEPVTVSWNSGALTSGVHTFPAVLQSSGLYSLSSVVTVPSSSLGTQTYICNVNHKPSNTKVDKRVEPKSCGTQSFGLLDPKLCYLLDGILFIYGVILTALFLRVKFSRSADAPAYQQGQNQLYNELNLGRREEYDVLDKRRGRDPEMGGKPQRRKNPQEGLYNELQKDKMAEAYSEIGMKGERRRGKGHDGLYQGLSTATKDTYDALHMQALPPRRAKRSGSGVKQTLNFDLLKLAGDVESNPGPSRGHMTEYKPTVRLATRDDVPRAVRTLAAAFADYPATRHTVDPDRHIERVTELQELFLTRVGLDIGKVWVADDGAAVAVWTTPESVEAGAVFAEIGPRMAELSGSRLAAQQQMEGLLAPHRPKEPAWFLATVGVSPDHQGKGLGSAVVLPGVEAAERAGVPAFLETSAPRNLPFYERLGFTVTADVEVPEGPRTWCMTRKPGA

SEQ ID NO: 17832 - protein, 825 aa, Artificial Sequence
  Synthetic Polypeptide
MALPVTALLLPLALLLHAARPEVQLVESGGGLVQAGGSLRLSCAASGRTFSMGWFRQAPGKEREFVAAITYSGGSPYYADSVKGRFTISRDNAKNTVYLQMNSLKPEDTAVYYCAANPTYGSDWNAENWGQGTQVTVSSLEDLKNVFPPEVAVFEPSEAEISHTQKATLVCLATGFYPDHVELSWWVNGKEVHSGVSTDPQPLKEQPALNDSRYCLSSRLRVSATFWQNPRNHFRCQVQFYGLSENDEWTQDRAKPVTQIVSAEAWGRADCGSQSFGLLDPKLCYLLDGILFIYGVILTALFLRVKFSRSADAPAYQQGQNQLYNELNLGRREEYDVLDKRRGRDPEMGGKPQRRKNPQEGLYNELQKDKMAEAYSEIGMKGERRRGKGHDGLYQGLSTATKDTYDALHMQALPPRRAKRSGSGATNFSLLKQAGDVEENPGPTSMDWIWRILFLVGAATGAHSFEQLQLQESGPGLVKPSETLSLTCTVSGGSISSGDYYWGWIRQPPGKGLEWIGSISYSGSTYYNPSLKSRVTISVDTSRNQFSLKLSSVTAADTAVYYCTREDSSNWRSRGQGTLVTVSSTRIQNPDPAVYQLRDSKSSDKSVCLFTDFDSQTNVSQSKDSDVYITDKTVLDMRSMDFKSNSAVAWSNKSDFACANAFNNSIIPEDTFFPSPESSCGTQSFGLLDPKLCYLLDGILFIYGVILTALFLRVKFSRSADAPAYQQGQNQLYNELNLGRREEYDVLDKRRGRDPEMGGKPQRRKNPQEGLYNELQKDKMAEAYSEIGMKGERRRGKGHDGLYQGLSTATKDTYDALHMQALPPR

SEQ ID NO: 17833 - protein, 825 aa, Artificial Sequence
  Synthetic Polypeptide
MALPVTALLLPLALLLHAARPEVQLVESGGGLVQAGGSLRLSCAASGRTFSMGWFRQAPGKEREFVAAITYSGGSPYYADSVKGRFTISRDNAKNTVYLQMNSLKPEDTAVYYCAANPTYGSDWNAENWGQGTQVTVSSLEDLKNVFPPEVAVFEPSKAEIAHTQKATLVCLATGFYPDHVELSWWVNGKEVHSGVCTDPQPLKEQPALNDSRYCLSSRLRVSATFWQNPRNHFRCQVQFYGLSENDEWTQDRAKPVTQIVSAEAWGRADCGSQSFGLLDPKLCYLLDGILFIYGVILTALFLRVKFSRSADAPAYQQGQNQLYNELNLGRREEYDVLDKRRGRDPEMGGKPQRRKNPQEGLYNELQKDKMAEAYSEIGMKGERRRGKGHDGLYQGLSTATKDTYDALHMQALPPRRAKRSGSGATNFSLLKQAGDVEENPGPTSMDWIWRILFLVGAATGAHSFEQLQLQESGPGLVKPSETLSLTCTVSGGSISSGDYYWGWIRQPPGKGLEWIGSISYSGSTYYNPSLKSRVTISVDTSRNQFSLKLSSVTAADTAVYYCTREDSSNWRSRGQGTLVTVSSTRIQNPDPAVYQLRDSKSSDKSVCLFTDFDSQTNVSQSKDSDVYITDKCVLDMRSMDFKSNSAVAWSNKSDFACANAFNNSIIPEDTFFPSSDVPCGTQSFGLLDPKLCYLLDGILFIYGVILTALFLRVKFSRSADAPAYQQGQNQLYNELNLGRREEYDVLDKRRGRDPEMGGKPQRRKNPQEGLYNELQKDKMAEAYSEIGMKGERRRGKGHDGLYQGLSTATKDTYDALHMQALPPR

SEQ ID NO: 17834 - protein, 896 aa, Artificial Sequence
  Synthetic Polypeptide
MALPVTALLLPLALLLHAARPEVQLVESGGGLVQAGGSLRLSCAASGRTFSMGWFRQAPGKEREFVAAITYSGGSPYYADSVKGRFTISRDNAKNTVYLQMNSLKPEDTAVYYCAANPTYGSDWNAENWGQGTQVTVSSLEGKPIPNPLLGLDSTGSGEDLKNVFPPEVAVFEPSEAEISHTQKATLVCLATGFYPDHVELSWWVNGKEVHSGVSTDPQPLKEQPALNDSRYCLSSRLRVSATFWQNPRNHFRCQVQFYGLSENDEWTQDRAKPVTQIVSAEAWGRADCGSQSFGLLDPKLCYLLDGILFIYGVILTALFLRVKFSRSADAPAYQQGQNQLYNELNLGRREEYDVLDKRRGRDPEMGGKPQRRKNPQEGLYNELQKDKMAEAYSEIGMKGERRRGKGHDGLYQGLSTATKDTYDALHMQALPPRRAKRSGSGATNFSLLKQAGDVEENPGPTSMDWIWRILFLVGAATGAHSFEQLQLQESGPGLVKPSETLSLTCTVSGGSISSGDYYWGWIRQPPGKGLEWIGSISYSGSTYYNPSLKSRVTISVDTSRNQFSLKLSSVTAADTAVYYCTREDSSNWRSRGQGTLVTVSSTREQKLISEEDGSGIQNPDPAVYQLRDSKSSDKSVCLFTDFDSQTNVSQSKDSDVYITDKTVLDMRSMDFKSNSAVAWSNKSDFACANAFNNSIIPEDTFFPSPESSCGTQSFGLLDPKLCYLLDGILFIYGVILTALFLRSKRSRLLHSDYMNMTPRRPGPTRKHYQPYAPPRDFAAYRSRVKFSRSADAPAYQQGQNQLYNELNLGRREEYDVLDKRRGRDPEMGGKPQRRKNPQEGLYNELQKDKMAEAYSEIGMKGERRRGKGHDGLYQGLSTATKDTYDALHMQALPPR

SEQ ID NO: 17835 - protein, 937 aa, Artificial Sequence
  Synthetic Polypeptide
MALPVTALLLPLALLLHAARPEVQLVESGGGLVQAGGSLRLSCAASGRTFSMGWFRQAPGKEREFVAAITYSGGSPYYADSVKGRFTISRDNAKNTVYLQMNSLKPEDTAVYYCAANPTYGSDWNAENWGQGTQVTVSSLEGKPIPNPLLGLDSTGSGEDLKNVFPPEVAVFEPSEAEISHTQKATLVCLATGFYPDHVELSWWVNGKEVHSGVSTDPQPLKEQPALNDSRYCLSSRLRVSATFWQNPRNHFRCQVQFYGLSENDEWTQDRAKPVTQIVSAEAWGRADCGSQSFGLLDPKLCYLLDGILFIYGVILTALFLRSKRSRLLHSDYMNMTPRRPGPTRKHYQPYAPPRDFAAYRSRVKFSRSADAPAYQQGQNQLYNELNLGRREEYDVLDKRRGRDPEMGGKPQRRKNPQEGLYNELQKDKMAEAYSEIGMKGERRRGKGHDGLYQGLSTATKDTYDALHMQALPPRRAKRSGSGATNFSLLKQAGDVEENPGPTSMDWIWRILFLVGAATGAHSFEQLQLQESGPGLVKPSETLSLTCTVSGGSISSGDYYWGWIRQPPGKGLEWIGSISYSGSTYYNPSLKSRVTISVDTSRNQFSLKLSSVTAADTAVYYCTREDSSNWRSRGQGTLVTVSSTREQKLISEEDGSGIQNPDPAVYQLRDSKSSDKSVCLFTDFDSQTNVSQSKDSDVYITDKTVLDMRSMDFKSNSAVAWSNKSDFACANAFNNSIIPEDTFFPSPESSCGTQSFGLLDPKLCYLLDGILFIYGVILTALFLRSKRSRLLHSDYMNMTPRRPGPTRKHYQPYAPPRDFAAYRSRVKFSRSADAPAYQQGQNQLYNELNLGRREEYDVLDKRRGRDPEMGGKPQRRKNPQEGLYNELQKDKMAEAYSEIGMKGERRRGKGHDGLYQGLSTATKDTYDALHMQALPPR

SEQ ID NO: 17836 - protein, 898 aa, Artificial Sequence
  Synthetic Polypeptide
MALPVTALLLPLALLLHAARPEVQLVESGGGLVQAGGSLRLSCAASGRTFSMGWFRQAPGKEREFVAAITYSGGSPYYADSVKGRFTISRDNAKNTVYLQMNSLKPEDTAVYYCAANPTYGSDWNAENWGQGTQVTVSSLEGKPIPNPLLGLDSTGSGEDLKNVFPPEVAVFEPSEAEISHTQKATLVCLATGFYPDHVELSWWVNGKEVHSGVSTDPQPLKEQPALNDSRYCLSSRLRVSATFWQNPRNHFRCQVQFYGLSENDEWTQDRAKPVTQIVSAEAWGRADCGSQSFGLLDPKLCYLLDGILFIYGVILTALFLRVKFSRSADAPAYQQGQNQLYNELNLGRREEYDVLDKRRGRDPEMGGKPQRRKNPQEGLYNELQKDKMAEAYSEIGMKGERRRGKGHDGLYQGLSTATKDTYDALHMQALPPRRAKRSGSGATNFSLLKQAGDVEENPGPTSMDWIWRILFLVGAATGAHSFEQLQLQESGPGLVKPSETLSLTCTVSGGSISSGDYYWGWIRQPPGKGLEWIGSISYSGSTYYNPSLKSRVTISVDTSRNQFSLKLSSVTAADTAVYYCTREDSSNWRSRGQGTLVTVSSTREQKLISEEDLGSGIQNPDPAVYQLRDSKSSDKSVCLFTDFDSQTNVSQSKDSDVYITDKTVLDMRSMDFKSNSAVAWSNKSDFACANAFNNSIIPEDTFFPSPESSCGTQSFGLLDPKLCYLLDGILFIYGVILTALFLKRGRKKLLYIFKQPFMRPVQTTQEEDGCSCRFPEEEEGGCELRVKFSRSADAPAYQQGQNQLYNELNLGRREEYDVLDKRRGRDPEMGGKPQRRKNPQEGLYNELQKDKMAEAYSEIGMKGERRRGKGHDGLYQGLSTATKDTYDALHMQALPPR

SEQ ID NO: 17837 - protein, 940 aa, Artificial Sequence
  Synthetic Polypeptide
MALPVTALLLPLALLLHAARPEVQLVESGGGLVQAGGSLRLSCAASGRTFSMGWFRQAPGKEREFVAAITYSGGSPYYADSVKGRFTISRDNAKNTVYLQMNSLKPEDTAVYYCAANPTYGSDWNAENWGQGTQVTVSSLEGKPIPNPLLGLDSTGSGEDLKNVFPPEVAVFEPSEAEISHTQKATLVCLATGFYPDHVELSWWVNGKEVHSGVSTDPQPLKEQPALNDSRYCLSSRLRVSATFWQNPRNHFRCQVQFYGLSENDEWTQDRAKPVTQIVSAEAWGRADCGSQSFGLLDPKLCYLLDGILFIYGVILTALFLKRGRKKLLYIFKQPFMRPVQTTQEEDGCSCRFPEEEEGGCELRVKFSRSADAPAYQQGQNQLYNELNLGRREEYDVLDKRRGRDPEMGGKPQRRKNPQEGLYNELQKDKMAEAYSEIGMKGERRRGKGHDGLYQGLSTATKDTYDALHMQALPPRRAKRSGSGATNFSLLKQAGDVEENPGPTSMDWIWRILFLVGAATGAHSFEQLQLQESGPGLVKPSETLSLTCTVSGGSISSGDYYWGWIRQPPGKGLEWIGSISYSGSTYYNPSLKSRVTISVDTSRNQFSLKLSSVTAADTAVYYCTREDSSNWRSRGQGTLVTVSSTREQKLISEEDLGSGIQNPDPAVYQLRDSKSSDKSVCLFTDFDSQTNVSQSKDSDVYITDKTVLDMRSMDFKSNSAVAWSNKSDFACANAFNNSIIPEDTFFPSPESSCGTQSFGLLDPKLCYLLDGILFIYGVILTALFLKRGRKKLLYIFKQPFMRPVQTTQEEDGCSCRFPEEEEGGCELRVKFSRSADAPAYQQGQNQLYNELNLGRREEYDVLDKRRGRDPEMGGKPQRRKNPQEGLYNELQKDKMAEAYSEIGMKGERRRGKGHDGLYQGLSTATKDTYDALHMQALPPR

SEQ ID NO: 17838 - protein, 830 aa, Artificial Sequence
  Synthetic Polypeptide
MALPVTALLLPLALLLHAARPEVQLVESGGGLVQAGGSLRLSCAASGRTFSMGWFRQAPGKEREFVAAITYSGGSPYYADSVKGRFTISRDNAKNTVYLQMNSLKPEDTAVYYCAANPTYGSDWNAENWGQGTQVTVSSLEQSFGLLDPKLCYLLDGILFIYGVILTALFLRVKFSRSADAPAYQQGQNQLYNELNLGRREEYDVLDKRRGRDPEMGGKPQRRKNPQEGLYNELQKDKMAEAYSEIGMKGERRRGKGHDGLYQGLSTATKDTYDALHMQALPPRRAKRSGSGATNFSLLKQAGDVEENPGPTSMDWIWRILFLVGAATGAHSFEQLQLQESGPGLVKPSETLSLTCTVSGGSISSGDYYWGWIRQPPGKGLEWIGSISYSGSTYYNPSLKSRVTISVDTSRNQFSLKLSSVTAADTAVYYCTREDSSNWRSRGQGTLVTVSSTRQSFGLLDPKLCYLLDGILFIYGVILTALFLRVKFSRSADAPAYQQGQNQLYNELNLGRREEYDVLDKRRGRDPEMGGKPQRRKNPQEGLYNELQKDKMAEAYSEIGMKGERRRGKGHDGLYQGLSTATKDTYDALHMQALPPRRAKRSGSGVKQTLNFDLLKLAGDVESNPGPSRGHMTEYKPTVRLATRDDVPRAVRTLAAAFADYPATRHTVDPDRHIERVTELQELFLTRVGLDIGKVWVADDGAAVAVWTTPESVEAGAVFAEIGPRMAELSGSRLAAQQQMEGLLAPHRPKEPAWFLATVGVSPDHQGKGLGSAVVLPGVEAAERAGVPAFLETSAPRNLPFYERLGFTVTADVEVPEGPRTWCMTRKPGA

SEQ ID NO: 17839 - protein, 655 aa, Artificial Sequence
  Synthetic Polypeptide
MALPVTALLLPLALLLHAARPEVQLVESGGGLVQAGGSLRLSCAASGRTFSMGWFRQAPGKEREFVAAITYSGGSPYYADSVKGRFTISRDNAKNTVYLQMNSLKPEDTAVYYCAANPTYGSDWNAENWGQGTQVTVSSLEGQPKANPTVTLFPPSSEELQANKATLVCLISDFYPGAVTVAWKADGSPVKAGVETTKPSKQSNNKYAASSYLSLTPEQWKSHRSYSCQVTHEGSTVEKTVAPTECSPIKTDVITMDPKDNCSKDANDTLLLQLTNTSAYYMYLLLLLKSVVYFAIITCCLLRRTAFCCNGEKSRAKRSGSGATNFSLLKQAGDVEENPGPTSMDWIWRILFLVGAATGAHSFEQLQLQESGPGLVKPSETLSLTCTVSGGSISSGDYYWGWIRQPPGKGLEWIGSISYSGSTYYNPSLKSRVTISVDTSRNQFSLKLSSVTAADTAVYYCTREDSSNWRSRGQGTLVTVSSTRASTKGPSVFPLAPSSKSTSGGTAALGCLVKDYFPEPVTVSWNSGALTSGVHTFPAVLQSSGLYSLSSVVTVPSSSLGTQTYICNVNHKPSNTKVDKRVEPKSCEVKTDSTDHVKPKETENTKQPSKSCHKPKAIVHTEKVNMMSLTVLGLRMLFAKTVAVNFLLTAKLFFL

SEQ ID NO: 17840 - protein, 633 aa, Artificial Sequence
  Synthetic Polypeptide
MALPVTALLLPLALLLHAARPEVQLVESGGGLVQAGGSLRLSCAASGRTFSMGWFRQAPGKEREFVAAITYSGGSPYYADSVKGRFTISRDNAKNTVYLQMNSLKPEDTAVYYCAANPTYGSDWNAENWGQGTQVTVSSLEGQPKANPTVTLFPPSSEELQANKATLVCLISDFYPGAVTVAWKADGSPVKAGVETTKPSKQSNNKYAASSYLSLTPEQWKSHRSYSCQVTHEGSTVEKTVAPTECSGRADCGITSASYHQGVLSATILYEILLGKATLYAVLVSALVLMAMVKRKDSRGRAKRSGSGATNFSLLKQAGDVEENPGPTSMDWIWRILFLVGAATGAHSFEQLQLQESGPGLVKPSETLSLTCTVSGGSISSGDYYWGWIRQPPGKGLEWIGSISYSGSTYYNPSLKSRVTISVDTSRNQFSLKLSSVTAADTAVYYCTREDSSNWRSRGQGTLVTVSSTRASTKGPSVFPLAPSSKSTSGGTAALGCLVKDYFPEPVTVSWNSGALTSGVHTFPAVLQSSGLYSLSSVVTVPSSSLGTQTYICNVNHKPSNTKVDKRVEPKSCIPEDTFFPSSDVPCDVKLVEKSFETDTNLNFQNLSVIGFRILLLKVAGFNLLMTLRLWSS

SEQ ID NO: 17841 - protein, 633 aa, Artificial Sequence
  Synthetic Polypeptide
MALPVTALLLPLALLLHAARPEVQLVESGGGLVQAGGSLRLSCAASGRTFSMGWFRQAPGKEREFVAAITYSGGSPYYADSVKGRFTISRDNAKNTVYLQMNSLKPEDTAVYYCAANPTYGSDWNAENWGQGTQVTVSSLEGQPKANPTVTLFPPSSEELQANKATLVCLISDFYPGAVTVAWKADGSPVKAGVETTKPSKQSNNKYAASSYLSLTPEQWKSHRSYSCQVTHEGSTVEKTVAPTECSGRADCGFTSESYQQGVLSATILYEILLGKATLYAVLVSALVLMAMVKRKDSRGRAKRSGSGATNFSLLKQAGDVEENPGPTSMDWIWRILFLVGAATGAHSFEQLQLQESGPGLVKPSETLSLTCTVSGGSISSGDYYWGWIRQPPGKGLEWIGSISYSGSTYYNPSLKSRVTISVDTSRNQFSLKLSSVTAADTAVYYCTREDSSNWRSRGQGTLVTVSSTRASTKGPSVFPLAPSSKSTSGGTAALGCLVKDYFPEPVTVSWNSGALTSGVHTFPAVLQSSGLYSLSSVVTVPSSSLGTQTYICNVNHKPSNTKVDKRVEPKSCIPEDTFFPSPESSCDVKLVEKSFETDTNLNFQNLSVIGFRILLLKVAGFNLLMTLRLWSS

SEQ ID NO: 17842 - protein, 454 aa, Artificial Sequence
  Synthetic Polypeptide
MALPVTALLLPLALLLHAARPEVQLVESGGGLVQAGGSLRLSCAASGRTFSMGWFRQAPGKEREFVAAITYSGGSPYYADSVKGRFTISRDNAKNTVYLQMNSLKPEDTAVYYCAANPTYGSDWNAENWGQGTQVTVSSLESGGGGSFEQLQLQESGPGLVKPSETLSLTCTVSGGSISSGDYYWGWIRQPPGKGLEWIGSISYSGSTYYNPSLKSRVTISVDTSRNQFSLKLSSVTAADTAVYYCTREDSSNWRSRGQGTLVTVSSTRDGNEEMGGITQTPYKVSISGTTVILTCPQYPGSEILWQHNDKNIGGDEDDKNIGSDEDHLSLKEFSELEQSGYYVCYPRGSKPEDANFYLYLRARVCENCMEMDVMSVATIVIVDICITGGLLLLVYYWSKNRKAKAKPVTRGAGAGGRQRGQNKERPPPVPNPDYEPIRKGQRDLYSGLNQRRI

SEQ ID NO: 17843 - protein, 419 aa, Artificial Sequence
  Synthetic Polypeptide
MALPVTALLLPLALLLHAARPEVQLVESGGGLVQAGGSLRLSCAASGRTFSMGWFRQAPGKEREFVAAITYSGGSPYYADSVKGRFTISRDNAKNTVYLQMNSLKPEDTAVYYCAANPTYGSDWNAENWGQGTQVTVSSLESGGGGSFEQLQLQESGPGLVKPSETLSLTCTVSGGSISSGDYYWGWIRQPPGKGLEWIGSISYSGSTYYNPSLKSRVTISVDTSRNQFSLKLSSVTAADTAVYYCTREDSSNWRSRGQGTLVTVSSTRFKIPIEELEDRVFVNCNTSITWVEGTVGTLLSDITRLDLGKRILDPRGIYRCNGTDIYKDKESTVQVHYRMCQSCVELDPATVAGIIVTDVIATLLLALGVFCFAGHETGRLSGAADTQALLRNDQVYQPLRDRDDAQYSHLGGNWARNK

SEQ ID NO: 17844 - protein, 429 aa, Artificial Sequence
  Synthetic Polypeptide
MALPVTALLLPLALLLHAARPEVQLVESGGGLVQAGGSLRLSCAASGRTFSMGWFRQAPGKEREFVAAITYSGGSPYYADSVKGRFTISRDNAKNTVYLQMNSLKPEDTAVYYCAANPTYGSDWNAENWGQGTQVTVSSLESGGGGSFEQLQLQESGPGLVKPSETLSLTCTVSGGSISSGDYYWGWIRQPPGKGLEWIGSISYSGSTYYNPSLKSRVTISVDTSRNQFSLKLSSVTAADTAVYYCTREDSSNWRSRGQGTLVTVSSTRQSIKGNHLVKVYDYQEDGSVLLTCDAEAKNITWFKDGKMIGFLTEDKKKWNLGSNAKDPRGMYQCKGSQNKSKPLQVYYRMCQNCIELNAATISGFLFAEIVSIFVLAVGVYFIAGQDGVRQSRASDKQTLLPNDQLYQPLKDREDDQYSHLQGNQLRRN

SEQ ID NO: 17845 - protein, 412 aa, Artificial Sequence
  Synthetic Polypeptide
MALPVTALLLPLALLLHAARPEVQLVESGGGLVQAGGSLRLSCAASGRTFSMGWFRQAPGKEREFVAAITYSGGSPYYADSVKGRFTISRDNAKNTVYLQMNSLKPEDTAVYYCAANPTYGSDWNAENWGQGTQVTVSSLESGGGGSFEQLQLQESGPGLVKPSETLSLTCTVSGGSISSGDYYWGWIRQPPGKGLEWIGSISYSGSTYYNPSLKSRVTISVDTSRNQFSLKLSSVTAADTAVYYCTREDSSNWRSRGQGTLVTVSSTRQSFGLLDPKLCYLLDGILFIYGVILTALFLRVKFSRSADAPAYQQGQNQLYNELNLGRREEYDVLDKRRGRDPEMGGKPQRRKNPQEGLYNELQKDKMAEAYSEIGMKGERRRGKGHDGLYQGLSTATKDTYDALHMQALPPR

SEQ ID NO: 17846 - protein, 455 aa, Artificial Sequence
  Synthetic Polypeptide
MALPVTALLLPLALLLHAARPEQLQLQESGPGLVKPSETLSLTCTVSGGSISSGDYYWGWIRQPPGKGLEWIGSISYSGSTYYNPSLKSRVTISVDTSRNQFSLKLSSVTAADTAVYYCTREDSSNWRSRGQGTLVTVSSLESGGGGSFEEVQLVESGGGLVQAGGSLRLSCAASGRTFSMGWFRQAPGKEREFVAAITYSGGSPYYADSVKGRFTISRDNAKNTVYLQMNSLKPEDTAVYYCAANPTYGSDWNAENWGQGTQVTVSSTRDGNEEMGGITQTPYKVSISGTTVILTCPQYPGSEILWQHNDKNIGGDEDDKNIGSDEDHLSLKEFSELEQSGYYVCYPRGSKPEDANFYLYLRARVCENCMEMDVMSVATIVIVDICITGGLLLLVYYWSKNRKAKAKPVTRGAGAGGRQRGQNKERPPPVPNPDYEPIRKGQRDLYSGLNQRRI

SEQ ID NO: 17847 - protein, 420 aa, Artificial Sequence
  Synthetic Polypeptide
MALPVTALLLPLALLLHAARPEQLQLQESGPGLVKPSETLSLTCTVSGGSISSGDYYWGWIRQPPGKGLEWIGSISYSGSTYYNPSLKSRVTISVDTSRNQFSLKLSSVTAADTAVYYCTREDSSNWRSRGQGTLVTVSSLESGGGGSFEEVQLVESGGGLVQAGGSLRLSCAASGRTFSMGWFRQAPGKEREFVAAITYSGGSPYYADSVKGRFTISRDNAKNTVYLQMNSLKPEDTAVYYCAANPTYGSDWNAENWGQGTQVTVSSTRFKIPIEELEDRVFVNCNTSITWVEGTVGTLLSDITRLDLGKRILDPRGIYRCNGTDIYKDKESTVQVHYRMCQSCVELDPATVAGIIVTDVIATLLLALGVFCFAGHETGRLSGAADTQALLRNDQVYQPLRDRDDAQYSHLGGNWARNK

SEQ ID NO: 17848 - protein, 430 aa, Artificial Sequence
  Synthetic Polypeptide
MALPVTALLLPLALLLHAARPEQLQLQESGPGLVKPSETLSLTCTVSGGSISSGDYYWGWIRQPPGKGLEWIGSISYSGSTYYNPSLKSRVTISVDTSRNQFSLKLSSVTAADTAVYYCTREDSSNWRSRGQGTLVTVSSLESGGGGSFEEVQLVESGGGLVQAGGSLRLSCAASGRTFSMGWFRQAPGKEREFVAAITYSGGSPYYADSVKGRFTISRDNAKNTVYLQMNSLKPEDTAVYYCAANPTYGSDWNAENWGQGTQVTVSSTRQSIKGNHLVKVYDYQEDGSVLLTCDAEAKNITWFKDGKMIGFLTEDKKKWNLGSNAKDPRGMYQCKGSQNKSKPLQVYYRMCQNCIELNAATISGFLFAEIVSIFVLAVGVYFIAGQDGVRQSRASDKQTLLPNDQLYQPLKDREDDQYSHLQGNQLRRN

SEQ ID NO: 17849 - protein, 413 aa, Artificial Sequence
  Synthetic Polypeptide
MALPVTALLLPLALLLHAARPEQLQLQESGPGLVKPSETLSLTCTVSGGSISSGDYYWGWIRQPPGKGLEWIGSISYSGSTYYNPSLKSRVTISVDTSRNQFSLKLSSVTAADTAVYYCTREDSSNWRSRGQGTLVTVSSLESGGGGSFEEVQLVESGGGLVQAGGSLRLSCAASGRTFSMGWFRQAPGKEREFVAAITYSGGSPYYADSVKGRFTISRDNAKNTVYLQMNSLKPEDTAVYYCAANPTYGSDWNAENWGQGTQVTVSSTRQSFGLLDPKLCYLLDGILFIYGVILTALFLRVKFSRSADAPAYQQGQNQLYNELNLGRREEYDVLDKRRGRDPEMGGKPQRRKNPQEGLYNELQKDKMAEAYSEIGMKGERRRGKGHDGLYQGLSTATKDTYDALHMQALPPR

SEQ ID NO: 17850 - protein, 645 aa, Artificial Sequence
  Synthetic Polypeptide
MALPVTALLLPLALLLHAARPEVQLVESGGGLVQAGGSLRLSCAASGRTFSMGWFRQAPGKEREFVAAITYSGGSPYYADSVKGRFTISRDNAKNTVYLQMNSLKPEDTAVYYCAANPTYGSDWNAENWGQGTQVTVSSLESGGGGSFEQLQLQESGPGLVKPSETLSLTCTVSGGSISSGDYYWGWIRQPPGKGLEWIGSISYSGSTYYNPSLKSRVTISVDTSRNQFSLKLSSVTAADTAVYYCTREDSSNWRSRGQGTLVTVSSTRGSGIQNPDPAVYQLRDSKSSDKSVCLFTDFDSQTNVSQSKDSDVYITDKTVLDMRSMDFKSNSAVAWSNKSDFACANAFNNSIIPEDTFFPSPESSCDVKLVEKSFETDTNLNFQNLSVIGFRILLLKVAGFNLLMTLRLWSSRAKRSGSGVKQTLNFDLLKLAGDVESNPGPSRGHMTEYKPTVRLATRDDVPRAVRTLAAAFADYPATRHTVDPDRHIERVTELQELFLTRVGLDIGKVWVADDGAAVAVWTTPESVEAGAVFAEIGPRMAELSGSRLAAQQQMEGLLAPHRPKEPAWFLATVGVSPDHQGKGLGSAVVLPGVEAAERAGVPAFLETSAPRNLPFYERLGFTVTADVEVPEGPRTWCMTRKPGA

SEQ ID NO: 17851 - protein, 677 aa, Artificial Sequence
  Synthetic Polypeptide
MALPVTALLLPLALLLHAARPEVQLVESGGGLVQAGGSLRLSCAASGRTFSMGWFRQAPGKEREFVAAITYSGGSPYYADSVKGRFTISRDNAKNTVYLQMNSLKPEDTAVYYCAANPTYGSDWNAENWGQGTQVTVSSLESGGGGSFEQLQLQESGPGLVKPSETLSLTCTVSGGSISSGDYYWGWIRQPPGKGLEWIGSISYSGSTYYNPSLKSRVTISVDTSRNQFSLKLSSVTAADTAVYYCTREDSSNWRSRGQGTLVTVSSLEDLKNVFPPEVAVFEPSEAEISHTQKATLVCLATGFYPDHVELSWWVNGKEVHSGVSTDPQPLKEQPALNDSRYCLSSRLRVSATFWQNPRNHFRCQVQFYGLSENDEWTQDRAKPVTQIVSAEAWGRADCGFTSESYQQGVLSATILYEILLGKATLYAVLVSALVLMAMVKRKDSRGRAKRSGSGATNFSLLKQAGDVEENPGPTRGHMTEYKPTVRLATRDDVPRAVRTLAAAFADYPATRHTVDPDRHIERVTELQELFLTRVGLDIGKVWVADDGAAVAVWTTPESVEAGAVFAEIGPRMAELSGSRLAAQQQMEGLLAPHRPKEPAWFLATVGVSPDHQGKGLGSAVVLPGVEAAERAGVPAFLETSAPRNLPFYERLGFTVTADVEVPEGPRTWCMTRKPGA

SEQ ID NO: 17852 - protein, 727 aa, Artificial Sequence
  Synthetic Polypeptide
MALPVTALLLPLALLLHAARPEVQLVESGGGLVQAGGSLRLSCAASGRTFSMGWFRQAPGKEREFVAAITYSGGSPYYADSVKGRFTISRDNAKNTVYLQMNSLKPEDTAVYYCAANPTYGSDWNAENWGQGTQVTVSSLESGGGGSFEQLQLQESGPGLVKPSETLSLTCTVSGGSISSGDYYWGWIRQPPGKGLEWIGSISYSGSTYYNPSLKSRVTISVDTSRNQFSLKLSSVTAADTAVYYCTREDSSNWRSRGQGTLVTVSSTREQKLISEEDLGSGTPFPSLAPPIMLLVDGKQQMVVVCLVLDVAPPGLDSPIWFSAGNGSALDAFTYGPSPATDGTWTNLAHLSLPSEELASWEPLVCHTGPGAEGHSRSTQPMHLSGEASTARTCPQEPLRGTPGGALWLGVLRLLLFKLLLFDLLLTCSCLCDPAGPLPSPATTTRLRALGSHRLHPATETGGREATSSPRPQPRDRRWGDTPPGRKPGSPVRAKRSGSGVKQTLNFDLLKLAGDVESNPGPSRSRGHMTEYKPTVRLATRDDVPRAVRTLAAAFADYPATRHTVDPDRHIERVTELQELFLTRVGLDIGKVWVADDGAAVAVWTTPESVEAGAVFAEIGPRMAELSGSRLAAQQQMEGLLAPHRPKEPAWFLATVGVSPDHQGKGLGSAVVLPGVEAAERAGVPAFLETSAPRNLPFYERLGFTVTADVEVPEGPRTWCMTRKPGA

SEQ ID NO: 17853 - protein, 549 aa, Artificial Sequence
  Synthetic Polypeptide
MALPVTALLLPLALLLHAARPEVQLVESGGGLVQAGGSLRLSCAASGRTFSMGWFRQAPGKEREFVAAITYSGGSPYYADSVKGRFTISRDNAKNTVYLQMNSLKPEDTAVYYCAANPTYGSDWNAENWGQGTQVTVSSLEDLKNVFPPEVAVFEPSEAEISHTQKATLVCLATGFYPDHVELSWWVNGKEVHSGVSTDPQPLKEQPALNDSRYCLSSRLRVSATFWQNPRNHFRCQVQFYGLSENDEWTQDRAKPVTQIVSAEAWGRADCGFTSESYQQGVLSATILYEILLGKATLYAVLVSALVLMAMVKRKDSRGRAKRSGSGATNFSLLKQAGDVEENPGPTRGHMTEYKPTVRLATRDDVPRAVRTLAAAFADYPATRHTVDPDRHIERVTELQELFLTRVGLDIGKVWVADDGAAVAVWTTPESVEAGAVFAEIGPRMAELSGSRLAAQQQMEGLLAPHRPKEPAWFLATVGVSPDHQGKGLGSAVVLPGVEAAERAGVPAFLETSAPRNLPFYERLGFTVTADVEVPEGPRTWCMTRKPGA

SEQ ID NO: 17854 - protein, 319 aa, Artificial Sequence
  Synthetic Polypeptide
MALPVTALLLPLALLLHAARPEVQLVESGGGLVQAGGSLRLSCAASGRTFSMGWFRQAPGKEREFVAAITYSGGSPYYADSVKGRFTISRDNAKNTVYLQMNSLKPEDTAVYYCAANPTYGSDWNAENWGQGTQVTVSSLEDLKNVFPPEVAVFEPSEAEISHTQKATLVCLATGFYPDHVELSWWVNGKEVHSGVSTDPQPLKEQPALNDSRYCLSSRLRVSATFWQNPRNHFRCQVQFYGLSENDEWTQDRAKPVTQIVSAEAWGRADCGFTSESYQQGVLSATILYEILLGKATLYAVLVSALVLMAMVKRKDSRG

SEQ ID NO: 17855 - protein, 447 aa, Artificial Sequence
  Synthetic Polypeptide
MDWIWRILFLVGAATGAHSFEQLQLQESGPGLVKPSETLSLTCTVSGGSISSGDYYWGWIRQPPGKGLEWIGSISYSGSTYYNPSLKSRVTISVDTSRNQFSLKLSSVTAADTAVYYCTREDSSNWRSRGQGTLVTVSSTRIQNPDPAVYQLRDSKSSDKSVCLFTDFDSQTNVSQSKDSDVYITDKTVLDMRSMDFKSNSAVAWSNKSDFACANAFNNSIIPEDTFFPSPESSCDVKLVEKSFETDTNLNFQNLSVIGFRILLLKVAGFNLLMTLRLWSSRAKRSGSGVKQTLNFDLLKLAGDVESNPGPSRGHMAKPLSQEESTLIERATATINSIPISEDYSVASAALSSDGRIFTGVNVYHFTGGPCAELVVLGTAAAAAAGNLTCIVAIGNENRGILSPCGRCRQVLLDLHPGIKAIVKDSDGQPTAVGIRELLPSGYVWEG

SEQ ID NO: 17856 - protein, 281 aa, Artificial Sequence
  Synthetic Polypeptide
MDWIWRILFLVGAATGAHSFEQLQLQESGPGLVKPSETLSLTCTVSGGSISSGDYYWGWIRQPPGKGLEWIGSISYSGSTYYNPSLKSRVTISVDTSRNQFSLKLSSVTAADTAVYYCTREDSSNWRSRGQGTLVTVSSTRIQNPDPAVYQLRDSKSSDKSVCLFTDFDSQTNVSQSKDSDVYITDKTVLDMRSMDFKSNSAVAWSNKSDFACANAFNNSIIPEDTFFPSPESSCDVKLVEKSFETDTNLNFQNLSVIGFRILLLKVAGFNLLMTLRLWSS

SEQ ID NO: 17857 - protein, 567 aa, Artificial Sequence
  Synthetic Polypeptide
MALPVTALLLPLALLLHAARPEVQLVESGGGLVQAGGSLRLSCAASGRTFSMGWFRQAPGKEREFVAAITYSGGSPYYADSVKGRFTISRDNAKNTVYLQMNSLKPEDTAVYYCAANPTYGSDWNAENWGQGTQVTVSSLEGKPIPNPLLGLDSTGSGEDLKNVFPPEVAVFEPSEAEISHTQKATLVCLATGFYPDHVELSWWVNGKEVHSGVCTDPQPLKEQPALNDSRYCLSSRLRVSATFWQNPRNHFRCQVQFYGLSENDEWTQDRAKPVTQIVSAEAWGRADCGFTSESYQQGVLSATILYEILLGKATLYAVLVSALVLMAMVKRKDSRGRAKRSGSGATNFSLLKQAGDVEENPGPTRGHMTEYKPTVRLATRDDVPRAVRTLAAAFADYPATRHTVDPDRHIERVTELQELFLTRVGLDIGKVWVADDGAAVAVWTTPESVEAGAVFAEIGPRMAELSGSRLAAQQQMEGLLAPHRPKEPAWFLATVGVSPDHQGKGLGSAVVLPGVEAAERAGVPAFLETSAPRNLPFYERLGFTVTADVEVPEGPRTWCMTRKPGA

SEQ ID NO: 17858 - protein, 337 aa, Artificial Sequence
  Synthetic Polypeptide
MALPVTALLLPLALLLHAARPEVQLVESGGGLVQAGGSLRLSCAASGRTFSMGWFRQAPGKEREFVAAITYSGGSPYYADSVKGRFTISRDNAKNTVYLQMNSLKPEDTAVYYCAANPTYGSDWNAENWGQGTQVTVSSLEGKPIPNPLLGLDSTGSGEDLKNVFPPEVAVFEPSEAEISHTQKATLVCLATGFYPDHVELSWWVNGKEVHSGVCTDPQPLKEQPALNDSRYCLSSRLRVSATFWQNPRNHFRCQVQFYGLSENDEWTQDRAKPVTQIVSAEAWGRADCGFTSESYQQGVLSATILYEILLGKATLYAVLVSALVLMAMVKRKDSRG

SEQ ID NO: 17859 - protein, 459 aa, Artificial Sequence
  Synthetic Polypeptide
MDWIWRILFLVGAATGAHSFEQLQLQESGPGLVKPSETLSLTCTVSGGSISSGDYYWGWIRQPPGKGLEWIGSISYSGSTYYNPSLKSRVTISVDTSRNQFSLKLSSVTAADTAVYYCTREDSSNWRSRGQGTLVTVSSTREQKLISEEDGSGIQNPDPAVYQLRDSKSSDKSVCLFTDFDSQTNVSQSKDSDVYITDKCVLDMRSMDFKSNSAVAWSNKSDFACANAFNNSIIPEDTFFPSPESSCDVKLVEKSFETDTNLNFQNLSVIGFRILLLKVAGFNLLMTLRLWSSRAKRSGSGVKQTLNFDLLKLAGDVESNPGPSRGHMAKPLSQEESTLIERATATINSIPISEDYSVASAALSSDGRIFTGVNVYHFTGGPCAELVVLGTAAAAAAGNLTCIVAIGNENRGILSPCGRCRQVLLDLHPGIKAIVKDSDGQPTAVGIRELLPSGYVWEG

SEQ ID NO: 17860 - protein, 293 aa, Artificial Sequence
  Synthetic Polypeptide
MDWIWRILFLVGAATGAHSFEQLQLQESGPGLVKPSETLSLTCTVSGGSISSGDYYWGWIRQPPGKGLEWIGSISYSGSTYYNPSLKSRVTISVDTSRNQFSLKLSSVTAADTAVYYCTREDSSNWRSRGQGTLVTVSSTREQKLISEEDGSGIQNPDPAVYQLRDSKSSDKSVCLFTDFDSQTNVSQSKDSDVYITDKCVLDMRSMDFKSNSAVAWSNKSDFACANAFNNSIIPEDTFFPSPESSCDVKLVEKSFETDTNLNFQNLSVIGFRILLLKVAGFNLLMTLRLWSS

SEQ ID NO: 17861 - protein, 645 aa, Artificial Sequence
  Synthetic Polypeptide
MALPVTALLLPLALLLHAARPEVQLVESGGGLVQAGGSLRLSCAASGRTFSMGWFRQAPGKEREFVAAITYSGGSPYYADSVKGRFTISRDNAKNTVYLQMNSLKPEDTAVYYCAANPTYGSDWNAENWGQGTQVTVSSLESGGGGSFEQLQLQESGPGLVKPSETLSLTCTVSGGSISSGDYYWGWIRQPPGKGLEWIGSISYSGSTYYNPSLKSRVTISVDTSRNQFSLKLSSVTAADTAVYYCTREDSSNWRSRGQGTLVTVSSTRGSGIQNPDPAVYQLRDSKSSDKSVCLFTDFDSQTNVSQSKDSDVYITDKTVLDMRSMDFKSNSAVAWSNKSDFACANAFNNSIIPEDTFFPSSDVPCDVKLVEKSFETDTNLNFQNLSVIGFRILLLKVAGFNLLMTLRLWSSRAKRSGSGVKQTLNFDLLKLAGDVESNPGPSRGHMTEYKPTVRLATRDDVPRAVRTLAAAFADYPATRHTVDPDRHIERVTELQELFLTRVGLDIGKVWVADDGAAVAVWTTPESVEAGAVFAEIGPRMAELSGSRLAAQQQMEGLLAPHRPKEPAWFLATVGVSPDHQGKGLGSAVVLPGVEAAERAGVPAFLETSAPRNLPFYERLGFTVTADVEVPEGPRTWCMTRKPGA

SEQ ID NO: 17862 - protein, 677 aa, Artificial Sequence
  Synthetic Polypeptide
MALPVTALLLPLALLLHAARPEVQLVESGGGLVQAGGSLRLSCAASGRTFSMGWFRQAPGKEREFVAAITYSGGSPYYADSVKGRFTISRDNAKNTVYLQMNSLKPEDTAVYYCAANPTYGSDWNAENWGQGTQVTVSSLESGGGGSFEQLQLQESGPGLVKPSETLSLTCTVSGGSISSGDYYWGWIRQPPGKGLEWIGSISYSGSTYYNPSLKSRVTISVDTSRNQFSLKLSSVTAADTAVYYCTREDSSNWRSRGQGTLVTVSSLEDLKNVFPPEVAVFEPSKAEIAHTQKATLVCLATGFYPDHVELSWWVNGKEVHSGVSTDPQPLKEQPALNDSRYCLSSRLRVSATFWQNPRNHFRCQVQFYGLSENDEWTQDRAKPVTQIVSAEAWGRADCGITSASYHQGVLSATILYEILLGKATLYAVLVSALVLMAMVKRKDSRGRAKRSGSGATNFSLLKQAGDVEENPGPTRGHMTEYKPTVRLATRDDVPRAVRTLAAAFADYPATRHTVDPDRHIERVTELQELFLTRVGLDIGKVWVADDGAAVAVWTTPESVEAGAVFAEIGPRMAELSGSRLAAQQQMEGLLAPHRPKEPAWFLATVGVSPDHQGKGLGSAVVLPGVEAAERAGVPAFLETSAPRNLPFYERLGFTVTADVEVPEGPRTWCMTRKPGA

SEQ ID NO: 17863 - protein, 700 aa, Artificial Sequence
  Synthetic Polypeptide
MALPVTALLLPLALLLHAARPEVQLVESGGGLVQAGGSLRLSCAASGRTFSMGWFRQAPGKEREFVAAITYSGGSPYYADSVKGRFTISRDNAKNTVYLQMNSLKPEDTAVYYCAANPTYGSDWNAENWGQGTQVTVSSLESGGGGSFEQLQLQESGPGLVKPSETLSLTCTVSGGSISSGDYYWGWIRQPPGKGLEWIGSISYSGSTYYNPSLKSRVTISVDTSRNQFSLKLSSVTAADTAVYYCTREDSSNWRSRGQGTLVTVSSTRGSGGGGSGGGGSGDGNEEMGGITQTPYKVSISGTTVILTCPQYPGSEILWQHNDKNIGGDEDDKNIGSDEDHLSLKEFSELEQSGYYVCYPRGSKPEDANFYLYLRARVCENCMEMDVMSVATIVIVDICITGGLLLLVYYWSKNRKAKAKPVTRGAGAGGRQRGQNKERPPPVPNPDYEPIRKGQRDLYSGLNQRRIRAKRSGSGVKQTLNFDLLKLAGDVESNPGPSRGHMTEYKPTVRLATRDDVPRAVRTLAAAFADYPATRHTVDPDRHIERVTELQELFLTRVGLDIGKVWVADDGAAVAVWTTPESVEAGAVFAEIGPRMAELSGSRLAAQQQMEGLLAPHRPKEPAWFLATVGVSPDHQGKGLGSAVVLPGVEAAERAGVPAFLETSAPRNLPFYERLGFTVTADVEVPEGPRTWCMTRKPGA

SEQ ID NO: 17864 - protein, 665 aa, Artificial Sequence
  Synthetic Polypeptide
MALPVTALLLPLALLLHAARPEVQLVESGGGLVQAGGSLRLSCAASGRTFSMGWFRQAPGKEREFVAAITYSGGSPYYADSVKGRFTISRDNAKNTVYLQMNSLKPEDTAVYYCAANPTYGSDWNAENWGQGTQVTVSSLESGGGGSFEQLQLQESGPGLVKPSETLSLTCTVSGGSISSGDYYWGWIRQPPGKGLEWIGSISYSGSTYYNPSLKSRVTISVDTSRNQFSLKLSSVTAADTAVYYCTREDSSNWRSRGQGTLVTVSSTRGSGGGGSGGGGSGFKIPIEELEDRVFVNCNTSITWVEGTVGTLLSDITRLDLGKRILDPRGIYRCNGTDIYKDKESTVQVHYRMCQSCVELDPATVAGIIVTDVIATLLLALGVFCFAGHETGRLSGAADTQALLRNDQVYQPLRDRDDAQYSHLGGNWARNKRAKRSGSGVKQTLNFDLLKLAGDVESNPGPSRGHMTEYKPTVRLATRDDVPRAVRTLAAAFADYPATRHTVDPDRHIERVTELQELFLTRVGLDIGKVWVADDGAAVAVWTTPESVEAGAVFAEIGPRMAELSGSRLAAQQQMEGLLAPHRPKEPAWFLATVGVSPDHQGKGLGSAVVLPGVEAAERAGVPAFLETSAPRNLPFYERLGFTVTADVEVPEGPRTWCMTRKPGA

SEQ ID NO: 17865 - protein, 675 aa, Artificial Sequence
  Synthetic Polypeptide
MALPVTALLLPLALLLHAARPEVQLVESGGGLVQAGGSLRLSCAASGRTFSMGWFRQAPGKEREFVAAITYSGGSPYYADSVKGRFTISRDNAKNTVYLQMNSLKPEDTAVYYCAANPTYGSDWNAENWGQGTQVTVSSLESGGGGSFEQLQLQESGPGLVKPSETLSLTCTVSGGSISSGDYYWGWIRQPPGKGLEWIGSISYSGSTYYNPSLKSRVTISVDTSRNQFSLKLSSVTAADTAVYYCTREDSSNWRSRGQGTLVTVSSTRGSGGGGSGGGGSGQSIKGNHLVKVYDYQEDGSVLLTCDAEAKNITWFKDGKMIGFLTEDKKKWNLGSNAKDPRGMYQCKGSQNKSKPLQVYYRMCQNCIELNAATISGFLFAEIVSIFVLAVGVYFIAGQDGVRQSRASDKQTLLPNDQLYQPLKDREDDQYSHLQGNQLRRNRAKRSGSGVKQTLNFDLLKLAGDVESNPGPSRGHMTEYKPTVRLATRDDVPRAVRTLAAAFADYPATRHTVDPDRHIERVTELQELFLTRVGLDIGKVWVADDGAAVAVWTTPESVEAGAVFAEIGPRMAELSGSRLAAQQQMEGLLAPHRPKEPAWFLATVGVSPDHQGKGLGSAVVLPGVEAAERAGVPAFLETSAPRNLPFYERLGFTVTADVEVPEGPRTWCMTRKPGA

SEQ ID NO: 17866 - protein, 658 aa, Artificial Sequence
  Synthetic Polypeptide
MALPVTALLLPLALLLHAARPEVQLVESGGGLVQAGGSLRLSCAASGRTFSMGWFRQAPGKEREFVAAITYSGGSPYYADSVKGRFTISRDNAKNTVYLQMNSLKPEDTAVYYCAANPTYGSDWNAENWGQGTQVTVSSLESGGGGSFEQLQLQESGPGLVKPSETLSLTCTVSGGSISSGDYYWGWIRQPPGKGLEWIGSISYSGSTYYNPSLKSRVTISVDTSRNQFSLKLSSVTAADTAVYYCTREDSSNWRSRGQGTLVTVSSTRGSGGGGSGGGGSGQSFGLLDPKLCYLLDGILFIYGVILTALFLRVKFSRSADAPAYQQGQNQLYNELNLGRREEYDVLDKRRGRDPEMGGKPQRRKNPQEGLYNELQKDKMAEAYSEIGMKGERRRGKGHDGLYQGLSTATKDTYDALHMQALPPRRAKRSGSGVKQTLNFDLLKLAGDVESNPGPSRGHMTEYKPTVRLATRDDVPRAVRTLAAAFADYPATRHTVDPDRHIERVTELQELFLTRVGLDIGKVWVADDGAAVAVWTTPESVEAGAVFAEIGPRMAELSGSRLAAQQQMEGLLAPHRPKEPAWFLATVGVSPDHQGKGLGSAVVLPGVEAAERAGVPAFLETSAPRNLPFYERLGFTVTADVEVPEGPRTWCMTRKPGA

SEQ ID NO: 17867 - protein, 866 aa, Artificial Sequence
  Synthetic Polypeptide
MALPVTALLLPLALLLHAARPEVQLVESGGGLVQAGGSLRLSCAASGRTFSMGWFRQAPGKEREFVAAITYSGGSPYYADSVKGRFTISRDNAKNTVYLQMNSLKPEDTAVYYCAANPTYGSDWNAENWGQGTQVTVSSLEGQPKANPTVTLFPPSSEELQANKATLVCLISDFYPGAVTVAWKADGSPVKAGVETTKPSKQSNNKYAASSYLSLTPEQWKSHRSYSCQVTHEGSTVEKTVAPTECSGRADCGFTSESYQQGVLSATILYEILLGKATLYAVLVSALVLMAMVKRKDSRGRAKRSGSGATNFSLLKQAGDVEENPGPTSMDWIWRILFLVGAATGAHSFEQLQLQESGPGLVKPSETLSLTCTVSGGSISSGDYYWGWIRQPPGKGLEWIGSISYSGSTYYNPSLKSRVTISVDTSRNQFSLKLSSVTAADTAVYYCTREDSSNWRSRGQGTLVTVSSTRASTKGPSVFPLAPSSKSTSGGTAALGCLVKDYFPEPVTVSWNSGALTSGVHTFPAVLQSSGLYSLSSVVTVPSSSLGTQTYICNVNHKPSNTKVDKRVEPKSCIPEDTFFPSPESSCDVKLVEKSFETDTNLNFQNLSVIGFRILLLKVAGFNLLMTLRLWSSRAKRSGSGVKQTLNFDLLKLAGDVESNPGPSRGHMTEYKPTVRLATRDDVPRAVRTLAAAFADYPATRHTVDPDRHIERVTELQELFLTRVGLDIGKVWVADDGAAVAVWTTPESVEAGAVFAEIGPRMAELSGSRLAAQQQMEGLLAPHRPKEPAWFLATVGVSPDHQGKGLGSAVVLPGVEAAERAGVPAFLETSAPRNLPFYERLGFTVTADVEVPEGPRTWCMTRKPGA

SEQ ID NO: 17868 - protein, 633 aa, Artificial Sequence; identical to SEQ ID NO: 17841
  Synthetic Polypeptide

SEQ ID NO: 17869 - protein, 661 aa, Artificial Sequence
  Synthetic Polypeptide
MALPVTALLLPLALLLHAARPEVQLVESGGGLVQAGGSLRLSCAASGRTFSMGWFRQAPGKEREFVAAITYSGGSPYYADSVKGRFTISRDNAKNTVYLQMNSLKPEDTAVYYCAANPTYGSDWNAENWGQGTQVTVSSLEGSGRADCGFTSESYQQGVLSATILYEILLGKATLYAVLVSALVLMAMVKRKDSRGRAKRSGSGATNFSLLKQAGDVEENPGPTSMDWIWRILFLVGAATGAHSFEQLQLQESGPGLVKPSETLSLTCTVSGGSISSGDYYWGWIRQPPGKGLEWIGSISYSGSTYYNPSLKSRVTISVDTSRNQFSLKLSSVTAADTAVYYCTREDSSNWRSRGQGTLVTVSSTRGSIPEDTFFPSPESSCDVKLVEKSFETDTNLNFQNLSVIGFRILLLKVAGFNLLMTLRLWSSRAKRSGSGVKQTLNFDLLKLAGDVESNPGPSRGHMTEYKPTVRLATRDDVPRAVRTLAAAFADYPATRHTVDPDRHIERVTELQELFLTRVGLDIGKVWVADDGAAVAVWTTPESVEAGAVFAEIGPRMAELSGSRLAAQQQMEGLLAPHRPKEPAWFLATVGVSPDHQGKGLGSAVVLPGVEAAERAGVPAFLETSAPRNLPFYERLGFTVTADVEVPEGPRTWCMTRKPGA

SEQ ID NO: 17870 - protein, 428 aa, Artificial Sequence
  Synthetic Polypeptide
MALPVTALLLPLALLLHAARPEVQLVESGGGLVQAGGSLRLSCAASGRTFSMGWFRQAPGKEREFVAAITYSGGSPYYADSVKGRFTISRDNAKNTVYLQMNSLKPEDTAVYYCAANPTYGSDWNAENWGQGTQVTVSSLEGSGRADCGFTSESYQQGVLSATILYEILLGKATLYAVLVSALVLMAMVKRKDSRGRAKRSGSGATNFSLLKQAGDVEENPGPTSMDWIWRILFLVGAATGAHSFEQLQLQESGPGLVKPSETLSLTCTVSGGSISSGDYYWGWIRQPPGKGLEWIGSISYSGSTYYNPSLKSRVTISVDTSRNQFSLKLSSVTAADTAVYYCTREDSSNWRSRGQGTLVTVSSTRGSIPEDTFFPSPESSCDVKLVEKSFETDTNLNFQNLSVIGFRILLLKVAGFNLLMTLRLWSS

SEQ ID NO: 17871 - protein, 670 aa, Artificial Sequence
  Synthetic Polypeptide
MALPVTALLLPLALLLHAARPEVQLVESGGGLVQAGGSLRLSCAASGRTFSMGWFRQAPGKEREFVAAITYSGGSPYYADSVKGRFTISRDNAKNTVYLQMNSLKPEDTAVYYCAANPTYGSDWNAENWGQGTQVTVSSLEDKTHTCPPCPAGRADCGFTSESYQQGVLSATILYEILLGKATLYAVLVSALVLMAMVKRKDSRGRAKRSGSGATNFSLLKQAGDVEENPGPTSMDWIWRILFLVGAATGAHSFEQLQLQESGPGLVKPSETLSLTCTVSGGSISSGDYYWGWIRQPPGKGLEWIGSISYSGSTYYNPSLKSRVTISVDTSRNQFSLKLSSVTAADTAVYYCTREDSSNWRSRGQGTLVTVSSTRGSIPEDTFFPSPESSCDVKLVEKSFETDTNLNFQNLSVIGFRILLLKVAGFNLLMTLRLWSSRAKRSGSGVKQTLNFDLLKLAGDVESNPGPSRGHMTEYKPTVRLATRDDVPRAVRTLAAAFADYPATRHTVDPDRHIERVTELQELFLTRVGLDIGKVWVADDGAAVAVWTTPESVEAGAVFAEIGPRMAELSGSRLAAQQQMEGLLAPHRPKEPAWFLATVGVSPDHQGKGLGSAVVLPGVEAAERAGVPAFLETSAPRNLPFYERLGFTVTADVEVPEGPRTWCMTRKPGA

SEQ ID NO: 17872 - protein, 670 aa, Artificial Sequence
  Synthetic Polypeptide
MALPVTALLLPLALLLHAARPEVQLVESGGGLVQAGGSLRLSCAASGRTFSMGWFRQAPGKEREFVAAITYSGGSPYYADSVKGRFTISRDNAKNTVYLQMNSLKPEDTAVYYCAANPTYGSDWNAENWGQGTQVTVSSLEGSGRADCGFTSESYQQGVLSATILYEILLGKATLYAVLVSALVLMAMVKRKDSRGRAKRSGSGATNFSLLKQAGDVEENPGPTSMDWIWRILFLVGAATGAHSFEQLQLQESGPGLVKPSETLSLTCTVSGGSISSGDYYWGWIRQPPGKGLEWIGSISYSGSTYYNPSLKSRVTISVDTSRNQFSLKLSSVTAADTAVYYCTREDSSNWRSRGQGTLVTVSSTRDKTHTCPPCPAIPEDTFFPSPESSCDVKLVEKSFETDTNLNFQNLSVIGFRILLLKVAGFNLLMTLRLWSSRAKRSGSGVKQTLNFDLLKLAGDVESNPGPSRGHMTEYKPTVRLATRDDVPRAVRTLAAAFADYPATRHTVDPDRHIERVTELQELFLTRVGLDIGKVWVADDGAAVAVWTTPESVEAGAVFAEIGPRMAELSGSRLAAQQQMEGLLAPHRPKEPAWFLATVGVSPDHQGKGLGSAVVLPGVEAAERAGVPAFLETSAPRNLPFYERLGFTVTADVEVPEGPRTWCMTRKPGA

SEQ ID NO: 17873 - protein, 679 aa, Artificial Sequence
  Synthetic Polypeptide
MALPVTALLLPLALLLHAARPEVQLVESGGGLVQAGGSLRLSCAASGRTFSMGWFRQAPGKEREFVAAITYSGGSPYYADSVKGRFTISRDNAKNTVYLQMNSLKPEDTAVYYCAANPTYGSDWNAENWGQGTQVTVSSLEDKTHTCPPCPAGRADCGFTSESYQQGVLSATILYEILLGKATLYAVLVSALVLMAMVKRKDSRGRAKRSGSGATNFSLLKQAGDVEENPGPTSMDWIWRILFLVGAATGAHSFEQLQLQESGPGLVKPSETLSLTCTVSGGSISSGDYYWGWIRQPPGKGLEWIGSISYSGSTYYNPSLKSRVTISVDTSRNQFSLKLSSVTAADTAVYYCTREDSSNWRSRGQGTLVTVSSTRDKTHTCPPCPAIPEDTFFPSPESSCDVKLVEKSFETDTNLNFQNLSVIGFRILLLKVAGFNLLMTLRLWSSRAKRSGSGVKQTLNFDLLKLAGDVESNPGPSRGHMTEYKPTVRLATRDDVPRAVRTLAAAFADYPATRHTVDPDRHIERVTELQELFLTRVGLDIGKVWVADDGAAVAVWTTPESVEAGAVFAEIGPRMAELSGSRLAAQQQMEGLLAPHRPKEPAWFLATVGVSPDHQGKGLGSAVVLPGVEAAERAGVPAFLETSAPRNLPFYERLGFTVTADVEVPEGPRTWCMTRKPGA

SEQ ID NO: 17874 - protein, 446 aa, Artificial Sequence
  Synthetic Polypeptide
MALPVTALLLPLALLLHAARPEVQLVESGGGLVQAGGSLRLSCAASGRTFSMGWFRQAPGKEREFVAAITYSGGSPYYADSVKGRFTISRDNAKNTVYLQMNSLKPEDTAVYYCAANPTYGSDWNAENWGQGTQVTVSSLEDKTHTCPPCPAGRADCGFTSESYQQGVLSATILYEILLGKATLYAVLVSALVLMAMVKRKDSRGRAKRSGSGATNFSLLKQAGDVEENPGPTSMDWIWRILFLVGAATGAHSFEQLQLQESGPGLVKPSETLSLTCTVSGGSISSGDYYWGWIRQPPGKGLEWIGSISYSGSTYYNPSLKSRVTISVDTSRNQFSLKLSSVTAADTAVYYCTREDSSNWRSRGQGTLVTVSSTRDKTHTCPPCPAIPEDTFFPSPESSCDVKLVEKSFETDTNLNFQNLSVIGFRILLLKVAGFNLLMTLRLWSS

SEQ ID NO: 17875 - protein, 437 aa, Artificial Sequence
  Synthetic Polypeptide
MALPVTALLLPLALLLHAARPEVQLVESGGGLVQAGGSLRLSCAASGRTFSMGWFRQAPGKEREFVAAITYSGGSPYYADSVKGRFTISRDNAKNTVYLQMNSLKPEDTAVYYCAANPTYGSDWNAENWGQGTQVTVSSLEGSGRADCGFTSESYQQGVLSATILYEILLGKATLYAVLVSALVLMAMVKRKDSRGRAKRSGSGATNFSLLKQAGDVEENPGPTSMDWIWRILFLVGAATGAHSFEQLQLQESGPGLVKPSETLSLTCTVSGGSISSGDYYWGWIRQPPGKGLEWIGSISYSGSTYYNPSLKSRVTISVDTSRNQFSLKLSSVTAADTAVYYCTREDSSNWRSRGQGTLVTVSSTRDKTHTCPPCPAIPEDTFFPSPESSCDVKLVEKSFETDTNLNFQNLSVIGFRILLLKVAGFNLLMTLRLWSS

SEQ ID NO: 17876 - protein, 888 aa, Artificial Sequence
  Synthetic Polypeptide
MALPVTALLLPLALLLHAARPEVQLVESGGGLVQAGGSLRLSCAASGRTFSMGWFRQAPGKEREFVAAITYSGGSPYYADSVKGRFTISRDNAKNTVYLQMNSLKPEDTAVYYCAANPTYGSDWNAENWGQGTQVTVSSLEGQPKANPTVTLFPPSSEELQANKATLVCLISDFYPGAVTVAWKADGSPVKAGVETTKPSKQSNNKYAASSYLSLTPEQWKSHRSYSCQVTHEGSTVEKTVAPTECSPIKTDVITMDPKDNCSKDANDTLLLQLTNTSAYYMYLLLLLKSVVYFAIITCCLLRRTAFCCNGEKSRAKRSGSGATNFSLLKQAGDVEENPGPTSMDWIWRILFLVGAATGAHSFEQLQLQESGPGLVKPSETLSLTCTVSGGSISSGDYYWGWIRQPPGKGLEWIGSISYSGSTYYNPSLKSRVTISVDTSRNQFSLKLSSVTAADTAVYYCTREDSSNWRSRGQGTLVTVSSTRASTKGPSVFPLAPSSKSTSGGTAALGCLVKDYFPEPVTVSWNSGALTSGVHTFPAVLQSSGLYSLSSVVTVPSSSLGTQTYICNVNHKPSNTKVDKRVEPKSCEVKTDSTDHVKPKETENTKQPSKSCHKPKAIVHTEKVNMMSLTVLGLRMLFAKTVAVNFLLTAKLFFLRAKRSGSGVKQTLNFDLLKLAGDVESNPGPSRGHMTEYKPTVRLATRDDVPRAVRTLAAAFADYPATRHTVDPDRHIERVTELQELFLTRVGLDIGKVWVADDGAAVAVWTTPESVEAGAVFAEIGPRMAELSGSRLAAQQQMEGLLAPHRPKEPAWFLATVGVSPDHQGKGLGSAVVLPGVEAAERAGVPAFLETSAPRNLPFYERLGFTVTADVEVPEGPRTWCMTRKPGA

SEQ ID NO: 17877 - protein, 655 aa, Artificial Sequence; identical to SEQ ID NO: 17839
  Synthetic Polypeptide

SEQ ID NO: 17878 - protein, 683 aa, Artificial Sequence
  Synthetic Polypeptide
MALPVTALLLPLALLLHAARPEVQLVESGGGLVQAGGSLRLSCAASGRTFSMGWFRQAPGKEREFVAAITYSGGSPYYADSVKGRFTISRDNAKNTVYLQMNSLKPEDTAVYYCAANPTYGSDWNAENWGQGTQVTVSSLEGSPIKTDVITMDPKDNCSKDANDTLLLQLTNTSAYYMYLLLLLKSVVYFAIITCCLLRRTAFCCNGEKSRAKRSGSGATNFSLLKQAGDVEENPGPTSMDWIWRILFLVGAATGAHSFEQLQLQESGPGLVKPSETLSLTCTVSGGSISSGDYYWGWIRQPPGKGLEWIGSISYSGSTYYNPSLKSRVTISVDTSRNQFSLKLSSVTAADTAVYYCTREDSSNWRSRGQGTLVTVSSTRGSEVKTDSTDHVKPKETENTKQPSKSCHKPKAIVHTEKVNMMSLTVLGLRMLFAKTVAVNFLLTAKLFFLRAKRSGSGVKQTLNFDLLKLAGDVESNPGPSRGHMTEYKPTVRLATRDDVPRAVRTLAAAFADYPATRHTVDPDRHIERVTELQELFLTRVGLDIGKVWVADDGAAVAVWTTPESVEAGAVFAEIGPRMAELSGSRLAAQQQMEGLLAPHRPKEPAWFLATVGVSPDHQGKGLGSAVVLPGVEAAERAGVPAFLETSAPRNLPFYERLGFTVTADVEVPEGPRTWCMTRKPGA

SEQ ID NO: 17879 - protein, 450 aa, Artificial Sequence
  Synthetic Polypeptide
MALPVTALLLPLALLLHAARPEVQLVESGGGLVQAGGSLRLSCAASGRTFSMGWFRQAPGKEREFVAAITYSGGSPYYADSVKGRFTISRDNAKNTVYLQMNSLKPEDTAVYYCAANPTYGSDWNAENWGQGTQVTVSSLEGSPIKTDVITMDPKDNCSKDANDTLLLQLTNTSAYYMYLLLLLKSVVYFAIITCCLLRRTAFCCNGEKSRAKRSGSGATNFSLLKQAGDVEENPGPTSMDWIWRILFLVGAATGAHSFEQLQLQESGPGLVKPSETLSLTCTVSGGSISSGDYYWGWIRQPPGKGLEWIGSISYSGSTYYNPSLKSRVTISVDTSRNQFSLKLSSVTAADTAVYYCTREDSSNWRSRGQGTLVTVSSTRGSEVKTDSTDHVKPKETENTKQPSKSCHKPKAIVHTEKVNMMSLTVLGLRMLFAKTVAVNFLLTAKLFFL

SEQ ID NO: 17880 - protein, 692 aa, Artificial Sequence
  Synthetic Polypeptide
MALPVTALLLPLALLLHAARPEVQLVESGGGLVQAGGSLRLSCAASGRTFSMGWFRQAPGKEREFVAAITYSGGSPYYADSVKGRFTISRDNAKNTVYLQMNSLKPEDTAVYYCAANPTYGSDWNAENWGQGTQVTVSSLEDKTHTCPPCPAPIKTDVITMDPKDNCSKDANDTLLLQLTNTSAYYMYLLLLLKSVVYFAIITCCLLRRTAFCCNGEKSRAKRSGSGATNFSLLKQAGDVEENPGPTSMDWIWRILFLVGAATGAHSFEQLQLQESGPGLVKPSETLSLTCTVSGGSISSGDYYWGWIRQPPGKGLEWIGSISYSGSTYYNPSLKSRVTISVDTSRNQFSLKLSSVTAADTAVYYCTREDSSNWRSRGQGTLVTVSSTRGSEVKTDSTDHVKPKETENTKQPSKSCHKPKAIVHTEKVNMMSLTVLGLRMLFAKTVAVNFLLTAKLFFLRAKRSGSGVKQTLNFDLLKLAGDVESNPGPSRGHMTEYKPTVRLATRDDVPRAVRTLAAAFADYPATRHTVDPDRHIERVTELQELFLTRVGLDIGKVWVADDGAAVAVWTTPESVEAGAVFAEIGPRMAELSGSRLAAQQQMEGLLAPHRPKEPAWFLATVGVSPDHQGKGLGSAVVLPGVEAAERAGVPAFLETSAPRNLPFYERLGFTVTADVEVPEGPRTWCMTRKPGA

SEQ ID NO: 17881 - protein, 692 aa, Artificial Sequence
  Synthetic Polypeptide
MALPVTALLLPLALLLHAARPEVQLVESGGGLVQAGGSLRLSCAASGRTFSMGWFRQAPGKEREFVAAITYSGGSPYYADSVKGRFTISRDNAKNTVYLQMNSLKPEDTAVYYCAANPTYGSDWNAENWGQGTQVTVSSLEGSPIKTDVITMDPKDNCSKDANDTLLLQLTNTSAYYMYLLLLLKSVVYFAIITCCLLRRTAFCCNGEKSRAKRSGSGATNFSLLKQAGDVEENPGPTSMDWIWRILFLVGAATGAHSFEQLQLQESGPGLVKPSETLSLTCTVSGGSISSGDYYWGWIRQPPGKGLEWIGSISYSGSTYYNPSLKSRVTISVDTSRNQFSLKLSSVTAADTAVYYCTREDSSNWRSRGQGTLVTVSSTRDKTHTCPPCPAEVKTDSTDHVKPKETENTKQPSKSCHKPKAIVHTEKVNMMSLTVLGLRMLFAKTVAVNFLLTAKLFFLRAKRSGSGVKQTLNFDLLKLAGDVESNPGPSRGHMTEYKPTVRLATRDDVPRAVRTLAAAFADYPATRHTVDPDRHIERVTELQELFLTRVGLDIGKVWVADDGAAVAVWTTPESVEAGAVFAEIGPRMAELSGSRLAAQQQMEGLLAPHRPKEPAWFLATVGVSPDHQGKGLGSAVVLPGVEAAERAGVPAFLETSAPRNLPFYERLGFTVTADVEVPEGPRTWCMTRKPGA

SEQ ID NO: 17882 - protein, 701 aa, Artificial Sequence
  Synthetic Polypeptide
MALPVTALLLPLALLLHAARPEVQLVESGGGLVQAGGSLRLSCAASGRTFSMGWFRQAPGKEREFVAAITYSGGSPYYADSVKGRFTISRDNAKNTVYLQMNSLKPEDTAVYYCAANPTYGSDWNAENWGQGTQVTVSSLEDKTHTCPPCPAPIKTDVITMDPKDNCSKDANDTLLLQLTNTSAYYMYLLLLLKSVVYFAIITCCLLRRTAFCCNGEKSRAKRSGSGATNFSLLKQAGDVEENPGPTSMDWIWRILFLVGAATGAHSFEQLQLQESGPGLVKPSETLSLTCTVSGGSISSGDYYWGWIRQPPGKGLEWIGSISYSGSTYYNPSLKSRVTISVDTSRNQFSLKLSSVTAADTAVYYCTREDSSNWRSRGQGTLVTVSSTRDKTHTCPPCPAEVKTDSTDHVKPKETENTKQPSKSCHKPKAIVHTEKVNMMSLTVLGLRMLFAKTVAVNFLLTAKLFFLRAKRSGSGVKQTLNFDLLKLAGDVESNPGPSRGHMTEYKPTVRLATRDDVPRAVRTLAAAFADYPATRHTVDPDRHIERVTELQELFLTRVGLDIGKVWVADDGAAVAVWTTPESVEAGAVFAEIGPRMAELSGSRLAAQQQMEGLLAPHRPKEPAWFLATVGVSPDHQGKGLGSAVVLPGVEAAERAGVPAFLETSAPRNLPFYERLGFTVTADVEVPEGPRTWCMTRKPGA

SEQ ID NO: 17883 - protein, 468 aa, Artificial Sequence
  Synthetic Polypeptide
MALPVTALLLPLALLLHAARPEVQLVESGGGLVQAGGSLRLSCAASGRTFSMGWFRQAPGKEREFVAAITYSGGSPYYADSVKGRFTISRDNAKNTVYLQMNSLKPEDTAVYYCAANPTYGSDWNAENWGQGTQVTVSSLEDKTHTCPPCPAPIKTDVITMDPKDNCSKDANDTLLLQLTNTSAYYMYLLLLLKSVVYFAIITCCLLRRTAFCCNGEKSRAKRSGSGATNFSLLKQAGDVEENPGPTSMDWIWRILFLVGAATGAHSFEQLQLQESGPGLVKPSETLSLTCTVSGGSISSGDYYWGWIRQPPGKGLEWIGSISYSGSTYYNPSLKSRVTISVDTSRNQFSLKLSSVTAADTAVYYCTREDSSNWRSRGQGTLVTVSSTRDKTHTCPPCPAEVKTDSTDHVKPKETENTKQPSKSCHKPKAIVHTEKVNMMSLTVLGLRMLFAKTVAVNFLLTAKLFFL

SEQ ID NO: 17884 - protein, 726 aa, Artificial Sequence
  Synthetic Polypeptide
MALPVTALLLPLALLLHAARPQVQLVESGGGLVQPGGSLRLSCAASGFTFTNHAMSWVRQAPGKGLELVSSISGNGRTTYYADSVKGRFTISRDISKNTLDLQMNSLRAEDTAVYYCAKDGGETLVDSRGQGTLVTVSSLESGGGGSFEVQVLESGGGLVQPGGSLRLSCAASGFTFSNFAMSWVRQAPGKGLEWVSTISGSAGTTDYADSVKGRFTISRDNSKKTLYLQMNSLRVEDTAVYYCADGRGPFFDYRGQGTLVTVSSTREQKLISEEDLAKPTTTPAPRPPTPAPTIASQPLSLRPEACRPAAGGAVHTRGLDFACDIYIWAPLAGTCGVLLLSLVITLYCKRGRKKLLYIFKQPFMRPVQTTQEEDGCSCRFPEEEEGGCELRVKFSRSADAPAYQQGQNQLYNELNLGRREEYDVLDKRRGRDPEMGGKPRRKNPQEGLYNELQKDKMAEAYSEIGMKGERRRGKGHDGLYQGLSTATKDTYDALHMQALPPRSSGSGEGRGSLLTCGDVEENPGPHMTEYKPTVRLATRDDVPRAVRTLAAAFADYPATRHTVDPDRHIERVTELQELFLTRVGLDIGKVWVADDGAAVAVWTTPESVEAGAVFAEIGPRMAELSGSRLAAQQQMEGLLAPHRPKEPAWFLATVGVSPDHQGKGLGSAVVLPGVEAAERAGVPAFLETSAPRNLPFYERLGFTVTADVEVPEGPRTWCMTRKPGA

SEQ ID NO: 17885 - protein, 720 aa, Artificial Sequence
  Synthetic Polypeptide
MALPVTALLLPLALLLHAARPQVQLVESGGGLVQPGGSLRLSCAASGFTFTNHAMSWVRQAPGKGLELVSSISGNGRTTYYADSVKGRFTISRDISKNTLDLQMNSLRAEDTAVYYCAKDGGETLVDSRGQGTLVTVSSLESGGGGSFEVQVLESGGGLVQPGGSLRLSCAASGFTFSNFAMSWVRQAPGKGLEWVSTISGSAGTTDYADSVKGRFTISRDNSKKTLYLQMNSLRVEDTAVYYCADGRGPFFDYRGQGTLVTVSSTREQKLISEEDLKIEVMYPPPYLDNEKSNGTIIHVKGKHLCPSPLFPGPSKPFWVLVVVGGVLACYSLLVTVAFIIFWVRSKRSRLLHSDYMNMTPRRPGPTRKHYQPYAPPRDFAAYRSRVKFSRSADAPAYQQGQNQLYNELNLGRREEYDVLDKRRGRDPEMGGKPRRKNPQEGLYNELQKDKMAEAYSEIGMKGERRRGKGHDGLYQGLSTATKDTYDALHMQALPPRSSGSGEGRGSLLTCGDVEENPGPHMTEYKPTVRLATRDDVPRAVRTLAAAFADYPATRHTVDPDRHIERVTELQELFLTRVGLDIGKVWVADDGAAVAVWTTPESVEAGAVFAEIGPRMAELSGSRLAAQQQMEGLLAPHRPKEPAWFLATVGVSPDHQGKGLGSAVVLPGVEAAERAGVPAFLETSAPRNLPFYERLGFTVTADVEVPEGPRTWCMTRKPGA

SEQ ID NO: 17886 - protein, 497 aa, Artificial Sequence
  Synthetic Polypeptide
MALPVTALLLPLALLLHAARPQVQLVESGGGLVQPGGSLRLSCAASGFTFTNHAMSWVRQAPGKGLELVSSISGNGRTTYYADSVKGRFTISRDISKNTLDLQMNSLRAEDTAVYYCAKDGGETLVDSRGQGTLVTVSSLESGGGGSFEVQVLESGGGLVQPGGSLRLSCAASGFTFSNFAMSWVRQAPGKGLEWVSTISGSAGTTDYADSVKGRFTISRDNSKKTLYLQMNSLRVEDTAVYYCADGRGPFFDYRGQGTLVTVSSTREQKLISEEDLKIEVMYPPPYLDNEKSNGTIIHVKGKHLCPSPLFPGPSKPFWVLVVVGGVLACYSLLVTVAFIIFWVRSKRSRLLHSDYMNMTPRRPGPTRKHYQPYAPPRDFAAYRSRVKFSRSADAPAYQQGQNQLYNELNLGRREEYDVLDKRRGRDPEMGGKPRRKNPQEGLYNELQKDKMAEAYSEIGMKGERRRGKGHDGLYQGLSTATKDTYDALHMQALPPR

SEQ ID NO: 17887 - protein, 503 aa, Artificial Sequence
  Synthetic Polypeptide
MALPVTALLLPLALLLHAARPQVQLVESGGGLVQPGGSLRLSCAASGFTFTNHAMSWVRQAPGKGLELVSSISGNGRTTYYADSVKGRFTISRDISKNTLDLQMNSLRAEDTAVYYCAKDGGETLVDSRGQGTLVTVSSLESGGGGSFEVQVLESGGGLVQPGGSLRLSCAASGFTFSNFAMSWVRQAPGKGLEWVSTISGSAGTTDYADSVKGRFTISRDNSKKTLYLQMNSLRVEDTAVYYCADGRGPFFDYRGQGTLVTVSSTREQKLISEEDLAKPTTTPAPRPPTPAPTIASQPLSLRPEACRPAAGGAVHTRGLDFACDIYIWAPLAGTCGVLLLSLVITLYCKRGRKKLLYIFKQPFMRPVQTTQEEDGCSCRFPEEEEGGCELRVKFSRSADAPAYQQGQNQLYNELNLGRREEYDVLDKRRGRDPEMGGKPRRKNPQEGLYNELQKDKMAEAYSEIGMKGERRRGKGHDGLYQGLSTATKDTYDALHMQALPPR

SEQ ID NO: 17888 - protein, 504 aa, Artificial Sequence
  Synthetic Polypeptide
MALPVTALLLPLALLLHAARPEVQVLESGGGLVQPGGSLRLSCAASGFTFSNFAMSWVRQAPGKGLEWVSTISGSAGTTDYADSVKGRFTISRDNSKKTLYLQMNSLRVEDTAVYYCADGRGPFFDYRGQGTLVTVSSLESGGGGSFEQVQLVESGGGLVQPGGSLRLSCAASGFTFTNHAMSWVRQAPGKGLELVSSISGNGRTTYYADSVKGRFTISRDISKNTLDLQMNSLRAEDTAVYYCAKDGGETLVDSRGQGTLVTVSSTREQKLISEEDLAKPTTTPAPRPPTPAPTIASQPLSLRPEACRPAAGGAVHTRGLDFACDIYIWAPLAGTCGVLLLSLVITLYCKRGRKKLLYIFKQPFMRPVQTTQEEDGCSCRFPEEEEGGCELRVKFSRSADAPAYQQGQNQLYNELNLGRREEYDVLDKRRGRDPEMGGKPRRKNPQEGLYNELQKDKMAEAYSEIGMKGERRRGKGHDGLYQGLSTATKDTYDALHMQALPPR

SEQ ID NO: 17889 - protein, 916 aa, Artificial Sequence
  Synthetic Polypeptide
MALPVTALLLPLALLLHAARPQVQLVESGGGLVQPGGSLRLSCAASGFTFTNHAMSWVRQAPGKGLELVSSISGNGRTTYYADSVKGRFTISRDISKNTLDLQMNSLRAEDTAVYYCAKDGGETLVDSRGQGTLVTVSSLESGGGGSFEVQVLESGGGLVQPGGSLRLSCAASGFTFSNFAMSWVRQAPGKGLEWVSTISGSAGTTDYADSVKGRFTISRDNSKKTLYLQMNSLRVEDTAVYYCADGRGPFFDYRGQGTLVTVSSTREQKLISEEDLAKPTTTPAPRPPTPAPTIASQPLSLRPEACRPAAGGAVHTRGLDFACDIYIWAPLAGTCGVLLLSLVITLYCGRARVKFSRSADAPAYQQGQNQLYNELNLGRREEYDVLDKRRGRDPEMGGKPRRKNPQEGLYNELQKDKMAEAYSEIGMKGERRRGKGHDGLYQGLSTATKDTYDALHMQALPPRSRGSGATNFSLLKQAGDVEENPGPGIHMATYEVLCEVARKLGTDDREVVLFLLNVFIPQPTLAQLIGALRALKEEGRLTFPLLAECLFRAGRRDLLRDLLHLDPRFLERHLAGTMSYFSPYQLTVLHVDGELCARDIRSLIFLSKDTIGSRSTPQTFLHWVYCMENLDLLGPTDVDALMSMLRSLSRVDLQRQVQTLMGLHLSGPSHSQHYRHTPLETDFYDYKDDDDKTSGSGEGRGSLLTCGDVEENPGPHMTEYKPTVRLATRDDVPRAVRTLAAAFADYPATRHTVDPDRHIERVTELQELFLTRVGLDIGKVWVADDGAAVAVWTTPESVEAGAVFAEIGPRMAELSGSRLAAQQQMEGLLAPHRPKEPAWFLATVGVSPDHQGKGLGSAVVLPGVEAAERAGVPAFLETSAPRNLPFYERLGFTVTADVEVPEGPRTWCMTRKPGA

SEQ ID NO: 17890 - protein, 861 aa, Artificial Sequence
  Synthetic Polypeptide
MALPVTALLLPLALLLHAARPQVQLVESGGGLVQPGGSLRLSCAASGFTFTNHAMSWVRQAPGKGLELVSSISGNGRTTYYADSVKGRFTISRDISKNTLDLQMNSLRAEDTAVYYCAKDGGETLVDSRGQGTLVTVSSLEIQNPDPAVYQLRDSKSSDKSVCLFTDFDSQTNVSQSKDSDVYITDKCVLDMRSMDFKSNSAVAWSNKSDFACANAFNNSIIPEDTFFPSSDVPCDVKLVEKSFETDTNLNFQNLSVIGFRILLLKVAGFNLLMTLRLWSSRAKRSGSGVKQTLNFDLLKLAGDVESNPGPTSMDWIWRILFLVGAATGAHSFEVQVLESGGGLVQPGGSLRLSCAASGFTFSNFAMSWVRQAPGKGLEWVSTISGSAGTTDYADSVKGRFTISRDNSKKTLYLQMNSLRVEDTAVYYCADGRGPFFDYRGQGTLVTVSSTREDLKNVFPPEVAVFEPSKAEIAHTQKATLVCLATGFYPDHVELSWWVNGKEVHSGVCTDPQPLKEQPALNDSRYCLSSRLRVSATFWQNPRNHFRCQVQFYGLSENDEWTQDRAKPVTQIVSAEAWGRADCGITSASYHQGVLSATILYEILLGKATLYAVLVSALVLMAMVKRKDSRGRAKRSGSGATNFSLLKQAGDVEENPGPSRGHMTEYKPTVRLATRDDVPRAVRTLAAAFADYPATRHTVDPDRHIERVTELQELFLTRVGLDIGKVWVADDGAAVAVWTTPESVEAGAVFAEIGPRMAELSGSRLAAQQQMEGLLAPHRPKEPAWFLATVGVSPDHQGKGLGSAVVLPGVEAAERAGVPAFLETSAPRNLPFYERLGFTVTADVEVPEGPRTWCMTRKPGA

SEQ ID NO: 17891 - protein, 860 aa, Artificial Sequence
  Synthetic Polypeptide
MALPVTALLLPLALLLHAARPQVQLVESGGGLVQPGGSLRLSCAASGFTFTNHAMSWVRQAPGKGLELVSSISGNGRTTYYADSVKGRFTISRDISKNTLDLQMNSLRAEDTAVYYCAKDGGETLVDSRGQGTLVTVSSLEDLKNVFPPEVAVFEPSKAEIAHTQKATLVCLATGFYPDHVELSWWVNGKEVHSGVCTDPQPLKEQPALNDSRYCLSSRLRVSATFWQNPRNHFRCQVQFYGLSENDEWTQDRAKPVTQIVSAEAWGRADCGITSASYHQGVLSATILYEILLGKATLYAVLVSALVLMAMVKRKDSRGRAKRSGSGATNFSLLKQAGDVEENPGPTSMDWIWRILFLVGAATGAHSFEVQVLESGGGLVQPGGSLRLSCAASGFTFSNFAMSWVRQAPGKGLEWVSTISGSAGTTDYADSVKGRFTISRDNSKKTLYLQMNSLRVEDTAVYYCADGRGPFFDYRGQGTLVTVSSTRIQNPDPAVYQLRDSKSSDKSVCLFTDFDSQTNVSQSKDSDVYITDKCVLDMRSMDFKSNSAVAWSNKSDFACANAFNNSIIPEDTFFPSSDVPCDVKLVEKSFETDTNLNFQNLSVIGFRILLLKVAGFNLLMTLRLWSSRAKRSGSGVKQTLNFDLLKLAGDVESNPGPSRGHMTEYKPTVRLATRDDVPRAVRTLAAAFADYPATRHTVDPDRHIERVTELQELFLTRVGLDIGKVWVADDGAAVAVWTTPESVEAGAVFAEIGPRMAELSGSRLAAQQQMEGLLAPHRPKEPAWFLATVGVSPDHQGKGLGSAVVLPGVEAAERAGVPAFLETSAPRNLPFYERLGFTVTADVEVPEGPRTWCMTRKPGA

SEQ ID NO: 17892 - protein, 627 aa, Artificial Sequence
  Synthetic Polypeptide
MALPVTALLLPLALLLHAARPQVQLVESGGGLVQPGGSLRLSCAASGFTFTNHAMSWVRQAPGKGLELVSSISGNGRTTYYADSVKGRFTISRDISKNTLDLQMNSLRAEDTAVYYCAKDGGETLVDSRGQGTLVTVSSLEDLKNVFPPEVAVFEPSEAEISHTQKATLVCLATGFYPDHVELSWWVNGKEVHSGVCTDPQPLKEQPALNDSRYCLSSRLRVSATFWQNPRNHFRCQVQFYGLSENDEWTQDRAKPVTQIVSAEAWGRADCGFTSESYQQGVLSATILYEILLGKATLYAVLVSALVLMAMVKRKDSRGRAKRSGSGATNFSLLKQAGDVEENPGPTSMDWIWRILFLVGAATGAHSFEVQVLESGGGLVQPGGSLRLSCAASGFTFSNFAMSWVRQAPGKGLEWVSTISGSAGTTDYADSVKGRFTISRDNSKKTLYLQMNSLRVEDTAVYYCADGRGPFFDYRGQGTLVTVSSTRIQNPDPAVYQLRDSKSSDKSVCLFTDFDSQTNVSQSKDSDVYITDKCVLDMRSMDFKSNSAVAWSNKSDFACANAFNNSIIPEDTFFPSPESSCDVKLVEKSFETDTNLNFQNLSVIGFRILLLKVAGFNLLMTLRLWSS

SEQ ID NO: 17893 - protein, 852 aa, Artificial Sequence
  Synthetic Polypeptide
MALPVTALLLPLALLLHAARPQVQLVESGGGLVQPGGSLRLSCAASGFTFTNHAMSWVRQAPGKGLELVSSISGNGRTTYYADSVKGRFTISRDISKNTLDLQMNSLRAEDTAVYYCAKDGGETLVDSRGQGTLVTVSSLEDLKNVFPPEVAVFEPSEAEISHTQKATLVCLATGFYPDHVELSWWVNGKEVHSGVCTDPQPLKEQPALNDSRYCLSSRLRVSATFWQNPRNHFRCQVQFYGLSENDEWTQDRAKPVTQIVSAEAWGRADCGFTSESYQQGVLSATILYEILLGKATLYAVLVSALVLMAMVKRKDSRGRAKRSGSGATNFSLLKQAGDVEENPGPTSMDWIWRILFLVGAATGAHSFEVQVLESGGGLVQPGGSLRLSCAASGFTFSNFAMSWVRQAPGKGLEWVSTISGSAGTTDYADSVKGRFTISRDNSKKTLYLQMNSLRVEDTAVYYCADGRGPFFDYRGQGTLVTVSSTRIQNPDPAVYQLRDSKSSDKSVCLFTDFDSQTNVSQSKDSDVYITDKCVLDMRSMDFKSNSAVAWSNKSDFACANAFNNSIIPEDTFFPSPESSCDVKLVEKSFETDTNLNFQNLSVIGFRILLLKVAGFNLLMTLRLWSSRAKRSGSGVKQTLNFDLLKLAGDVESNPGPSRGGIHTMATYEVLCEVARKLGTDDREVVLFLLNVFIPQPTLAQLIGALRALKEEGRLTFPLLAECLFRAGRRDLLRDLLHLDPRFLERHLAGTMSYFSPYQLTVLHVDGELCARDIRSLIFLSKDTIGSRSTPQTFLHWVYCMENLDLLGPTDVDALMSMLRSLSRVDLQRQVQTLMGLHLSGPSHSQHYRHTP

SEQ ID NO: 17894 - protein, 631 aa, Artificial Sequence
  Synthetic Polypeptide
MALPVTALLLPLALLLHAARPQVQLVESGGGLVQPGGSLRLSCAASGFTFTNHAMSWVRQAPGKGLELVSSISGNGRTTYYADSVKGRFTISRDISKNTLDLQMNSLRAEDTAVYYCAKDGGETLVDSRGQGTLVTVSSLEIQNPDPAVYQLRDSKSSDKSVCLFTDFDSQTNVSQSKDSDVYITDKCVLDMRSMDFKSNSAVAWSNKSDFACANAFNNSIIPEDTFFPSPESSCDVKLVEKSFETDTNLNFQNLSVIGFRILLLKVAGFNLLMTLRLWSSRAKRSGSGVKQTLNFDLLKLAGDVESNPGPTSMDWIWRILFLVGAATGAHSFEVQVLESGGGLVQPGGSLRLSCAASGFTFSNFAMSWVRQAPGKGLEWVSTISGSAGTTDYADSVKGRFTISRDNSKKTLYLQMNSLRVEDTAVYYCADGRGPFFDYRGQGTLVTVSSTREDLKNVFPPEVAVFEPSEAEISHTQKATLVCLATGFYPDHVELSWWVNGKEVHSGVCTDPQPLKEQPALNDSRYCLSSRLRVSATFWQNPRNHFRCQVQFYGLSENDEWTQDRAKPVTQIVSAEAWGRADCGFTSESYQQGVLSATILYEILLGKATLYAVLVSALVLMAMVKRKDSRG

SEQ ID NO: 17895 - protein, 853 aa, Artificial Sequence
  Synthetic Polypeptide
MALPVTALLLPLALLLHAARPQVQLVESGGGLVQPGGSLRLSCAASGFTFTNHAMSWVRQAPGKGLELVSSISGNGRTTYYADSVKGRFTISRDISKNTLDLQMNSLRAEDTAVYYCAKDGGETLVDSRGQGTLVTVSSLEIQNPDPAVYQLRDSKSSDKSVCLFTDFDSQTNVSQSKDSDVYITDKCVLDMRSMDFKSNSAVAWSNKSDFACANAFNNSIIPEDTFFPSPESSCDVKLVEKSFETDTNLNFQNLSVIGFRILLLKVAGFNLLMTLRLWSSRAKRSGSGVKQTLNFDLLKLAGDVESNPGPTSMDWIWRILFLVGAATGAHSFEVQVLESGGGLVQPGGSLRLSCAASGFTFSNFAMSWVRQAPGKGLEWVSTISGSAGTTDYADSVKGRFTISRDNSKKTLYLQMNSLRVEDTAVYYCADGRGPFFDYRGQGTLVTVSSTREDLKNVFPPEVAVFEPSEAEISHTQKATLVCLATGFYPDHVELSWWVNGKEVHSGVCTDPQPLKEQPALNDSRYCLSSRLRVSATFWQNPRNHFRCQVQFYGLSENDEWTQDRAKPVTQIVSAEAWGRADCGFTSESYQQGVLSATILYEILLGKATLYAVLVSALVLMAMVKRKDSRGRAKRSGSGATNFSLLKQAGDVEENPGPSRGGIHTMATYEVLCEVARKLGTDDREVVLFLLNVFIPQPTLAQLIGALRALKEEGRLTFPLLAECLFRAGRRDLLRDLLHLDPRFLERHLAGTMSYFSPYQLTVLHVDGELCARDIRSLIFLSKDTIGSRSTPQTFLHWVYCMENLDLLGPTDVDALMSMLRSLSRVDLQRQVQTLMGLHLSGPSHSQHYRHTP

SEQ ID NO: 17896 - protein, 900 aa, Artificial Sequence
  Synthetic Polypeptide
MALPVTALLLPLALLLHAARPLEGKPIPNPLLGLDSTGSGEDLKNVFPPEVAVFEPSKAEIAHTQKATLVCLATGFYPDHVELSWWVNGKEVHSGVCTDPQPLKEQPALNDSRYCLSSRLRVSATFWQNPRNHFRCQVQFYGLSENDEWTQDRAKPVTQIVSAEAWGRADCGITSASYHQGVLSATILYEILLGKATLYAVLVSALVLMAMVKRKDSRGRAKRSGSGATNFSLLKQAGDVEENPGPTSMALPVTALLLPLALLLHAARPQVQLVESGGGLVQPGGSLRLSCAASGFTFTNHAMSWVRQAPGKGLELVSSISGNGRTTYYADSVKGRFTISRDISKNTLDLQMNSLRAEDTAVYYCAKDGGETLVDSRGQGTLVTVSSLESGGGGSFEVQVLESGGGLVQPGGSLRLSCAASGFTFSNFAMSWVRQAPGKGLEWVSTISGSAGTTDYADSVKGRFTISRDNSKKTLYLQMNSLRVEDTAVYYCADGRGPFFDYRGQGTLVTVSSTREQKLISEEDGSGIQNPDPAVYQLRDSKSSDKSVCLFTDFDSQTNVSQSKDSDVYITDKCVLDMRSMDFKSNSAVAWSNKSDFACANAFNNSIIPEDTFFPSSDVPCDVKLVEKSFETDTNLNFQNLSVIGFRILLLKVAGFNLLMTLRLWSSRAKRSGSGVKQTLNFDLLKLAGDVESNPGPSRGHMTEYKPTVRLATRDDVPRAVRTLAAAFADYPATRHTVDPDRHIERVTELQELFLTRVGLDIGKVWVADDGAAVAVWTTPESVEAGAVFAEIGPRMAELSGSRLAAQQQMEGLLAPHRPKEPAWFLATVGVSPDHQGKGLGSAVVLPGVEAAERAGVPAFLETSAPRNLPFYERLGFTVTADVEVPEGPRTWCMTRKPGA

SEQ ID NO: 17897 - protein, 901 aa, Artificial Sequence
  Synthetic Polypeptide
MALPVTALLLPLALLLHAARPLEQKLISEEDLGSGDRPDPAVYQLRDSKSSDKSVCLFTDFDSQTNVSQSKDSDVYITDKCVLDMRSMDFKSNSAVAWSNKSDFACANAFNNSIIPEDTFFPSPESSCDVKLVEKSFETDTNLNFQNLSVIGFRILLLKVAGFNLLMTLRLWSSSSRAKRSGSGVKQTLNFDLLKLAGDVESNPGPTSMALPVTALLLPLALLLHAARPQVQLVESGGGLVQPGGSLRLSCAASGFTFTNHAMSWVRQAPGKGLELVSSISGNGRTTYYADSVKGRFTISRDISKNTLDLQMNSLRAEDTAVYYCAKDGGETLVDSRGQGTLVTVSSLESGGGGSFEVQVLESGGGLVQPGGSLRLSCAASGFTFSNFAMSWVRQAPGKGLEWVSTISGSAGTTDYADSVKGRFTISRDNSKKTLYLQMNSLRVEDTAVYYCADGRGPFFDYRGQGTLVTVSSTRGKPIPNPLLGLDSTGSGEDLKNVFPPEVAVFEPSEAEISHTQKATLVCLATGFYPDHVELSWWVNGKEVHSGVCTDPQPLKEQPALNDSRYCLSSRLRVSATFWQNPRNHFRCQVQFYGLSENDEWTQDRAKPVTQIVSAEAWGRADCGFTSESYQQGVLSATILYEILLGKATLYAVLVSALVLMAMVKRKDSRGRAKRSGSGATNFSLLKQAGDVEENPGPSRGHMTEYKPTVRLATRDDVPRAVRTLAAAFADYPATRHTVDPDRHIERVTELQELFLTRVGLDIGKVWVADDGAAVAVWTTPESVEAGAVFAEIGPRMAELSGSRLAAQQQMEGLLAPHRPKEPAWFLATVGVSPDHQGKGLGSAVVLPGVEAAERAGVPAFLETSAPRNLPFYERLGFTVTADVEVPEGPRTWCMTRKPGA

SEQ ID NO: 17898 - protein, 860 aa, Artificial Sequence
  Synthetic Polypeptide
MALPVTALLLPLALLLHAARPQVQLVESGGGLVQPGGSLRLSCAASGFTFTNHAMSWVRQAPGKGLELVSSISGNGRTTYYADSVKGRFTISRDISKNTLDLQMNSLRAEDTAVYYCAKDGGETLVDSRGQGTLVTVSSLEDLKNVFPPEVAVFEPSEAEISHTQKATLVCLATGFYPDHVELSWWVNGKEVHSGVSTDPQPLKEQPALNDSRYCLSSRLRVSATFWQNPRNHFRCQVQFYGLSENDEWTQDRAKPVTQIVSAEAWGRADCGFTSESYQQGVLSATILYEILLGKATLYAVLVSALVLMAMVKRKDSRGRAKRSGSGATNFSLLKQAGDVEENPGPTSMDWIWRILFLVGAATGAHSFEVQVLESGGGLVQPGGSLRLSCAASGFTFSNFAMSWVRQAPGKGLEWVSTISGSAGTTDYADSVKGRFTISRDNSKKTLYLQMNSLRVEDTAVYYCADGRGPFFDYRGQGTLVTVSSTRIQNPDPAVYQLRDSKSSDKSVCLFTDFDSQTNVSQSKDSDVYITDKTVLDMRSMDFKSNSAVAWSNKSDFACANAFNNSIIPEDTFFPSPESSCDVKLVEKSFETDTNLNFQNLSVIGFRILLLKVAGFNLLMTLRLWSSRAKRSGSGVKQTLNFDLLKLAGDVESNPGPSRGHMTEYKPTVRLATRDDVPRAVRTLAAAFADYPATRHTVDPDRHIERVTELQELFLTRVGLDIGKVWVADDGAAVAVWTTPESVEAGAVFAEIGPRMAELSGSRLAAQQQMEGLLAPHRPKEPAWFLATVGVSPDHQGKGLGSAVVLPGVEAAERAGVPAFLETSAPRNLPFYERLGFTVTADVEVPEGPRTWCMTRKPGA

SEQ ID NO: 17899 - protein, 942 aa, Artificial Sequence
  Synthetic Polypeptide
MALPVTALLLPLALLLHAARPQVQLVESGGGLVQPGGSLRLSCAASGFTFTNHAMSWVRQAPGKGLELVSSISGNGRTTYYADSVKGRFTISRDISKNTLDLQMNSLRAEDTAVYYCAKDGGETLVDSRGQGTLVTVSSLEDLKNVFPPEVAVFEPSEAEISHTQKATLVCLATGFYPDHVELSWWVNGKEVHSGVSTDPQPLKEQPALNDSRYCLSSRLRVSATFWQNPRNHFRCQVQFYGLSENDEWTQDRAKPVTQIVSAEAWGRADCGFTSESYQQGVLSATILYEILLGKATLYAVLVSALVLMAMVKRKDSRGRAKRSGSGATNFSLLKQAGDVEENPGPTSMDWIWRILFLVGAATGAHSFEVQVLESGGGLVQPGGSLRLSCAASGFTFSNFAMSWVRQAPGKGLEWVSTISGSAGTTDYADSVKGRFTISRDNSKKTLYLQMNSLRVEDTAVYYCADGRGPFFDYRGQGTLVTVSSTREQKLISEEDGSGTPFPSLAPPIMLLVDGKQQMVVVCLVLDVAPPGLDSPIWFSAGNGSALDAFTYGPSPATDGTWTNLAHLSLPSEELASWEPLVCHTGPGAEGHSRSTQPMHLSGEASTARTCPQEPLRGTPGGALWLGVLRLLLFKLLLFDLLLTCSCLCDPAGPLPSPATTTRLRALGSHRLHPATETGGREATSSPRPQPRDRRWGDTPPGRKPGSPVRAKRSGSGVKQTLNFDLLKLAGDVESNPGPSRGHMTEYKPTVRLATRDDVPRAVRTLAAAFADYPATRHTVDPDRHIERVTELQELFLTRVGLDIGKVWVADDGAAVAVWTTPESVEAGAVFAEIGPRMAELSGSRLAAQQQMEGLLAPHRPKEPAWFLATVGVSPDHQGKGLGSAVVLPGVEAAERAGVPAFLETSAPRNLPFYERLGFTVTADVEVPEGPRTWCMTRKPGA

SEQ ID NO: 17900 - protein, 955 aa, Artificial Sequence
  Synthetic Polypeptide
MALPVTALLLPLALLLHAARPLEDLKNVFPPEVAVFEPSEAEISHTQKATLVCLATGFYPDHVELSWWVNGKEVHSGVSTDPQPLKEQPALNDSRYCLSSRLRVSATFWQNPRNHFRCQVQFYGLSENDEWTQDRAKPVTQIVSAEAWGRADCGFTSESYQQGVLSATILYEILLGKATLYAVLVSALVLMAMVKRKDSRGRAKRSGSGATNFSLLKQAGDVEENPGPTSMALPVTALLLPLALLLHAARPQVQLVESGGGLVQPGGSLRLSCAASGFTFTNHAMSWVRQAPGKGLELVSSISGNGRTTYYADSVKGRFTISRDISKNTLDLQMNSLRAEDTAVYYCAKDGGETLVDSRGQGTLVTVSSLESGGGGSFEVQVLESGGGLVQPGGSLRLSCAASGFTFSNFAMSWVRQAPGKGLEWVSTISGSAGTTDYADSVKGRFTISRDNSKKTLYLQMNSLRVEDTAVYYCADGRGPFFDYRGQGTLVTVSSTREQKLISEEDLGSGTPFPSLAPPIMLLVDGKQQMVVVCLVLDVAPPGLDSPIWFSAGNGSALDAFTYGPSPATDGTWTNLAHLSLPSEELASWEPLVCHTGPGAEGHSRSTQPMHLSGEASTARTCPQEPLRGTPGGALWLGVLRLLLFKLLLFDLLLTCSCLCDPAGPLPSPATTTRLRALGSHRLHPATETGGREATSSPRPQPRDRRWGDTPPGRKPGSPVRAKRSGSGVKQTLNFDLLKLAGDVESNPGPSRSRGHMTEYKPTVRLATRDDVPRAVRTLAAAFADYPATRHTVDPDRHIERVTELQELFLTRVGLDIGKVWVADDGAAVAVWTTPESVEAGAVFAEIGPRMAELSGSRLAAQQQMEGLLAPHRPKEPAWFLATVGVSPDHQGKGLGSAVVLPGVEAAERAGVPAFLETSAPRNLPFYERLGFTVTADVEVPEGPRTWCMTRKPGA

SEQ ID NO: 17901 - protein, 897 aa, Artificial Sequence
  Synthetic Polypeptide
MALPVTALLLPLALLLHAARPQVQLVESGGGLVQPGGSLRLSCAASGFTFTNHAMSWVRQAPGKGLELVSSISGNGRTTYYADSVKGRFTISRDISKNTLDLQMNSLRAEDTAVYYCAKDGGETLVDSRGQGTLVTVSSLEGKPIPNPLLGLDSTGSGDKQLDADVSPKPTIFLPSIAETKLQKAGTYLCLLEKFFPDVIKIHWQEKKSNTILGSQEGNTMKTNDTYMKFSWLTVPEKSLDKEHRCIVRHENNKNGVDQEIIFPPIKTDVITMDPKDNCSKDANDTLLLQLTNTSAYYMYLLLLLKSVVYFAIITCCLLRRTAFCCNGEKSRAKRSGSGATNFSLLKQAGDVEENPGPTSMDWIWRILFLVGAATGAHSFEVQVLESGGGLVQPGGSLRLSCAASGFTFSNFAMSWVRQAPGKGLEWVSTISGSAGTTDYADSVKGRFTISRDNSKKTLYLQMNSLRVEDTAVYYCADGRGPFFDYRGQGTLVTVSSTREQKLISEEDGSGSQPHTKPSVFVMKNGTNVACLVKEFYPKDIRINLVSSKKITEFDPAIVISPSGKYNAVKLGKYEDSNSVTCSVQHDNKTVHSTDFEVKTDSTDHVKPKETENTKQPSKSCHKPKAIVHTEKVNMMSLTVLGLRMLFAKTVAVNFLLTAKLFFLRAKRSGSGVKQTLNFDLLKLAGDVESNPGPSRGHMTEYKPTVRLATRDDVPRAVRTLAAAFADYPATRHTVDPDRHIERVTELQELFLTRVGLDIGKVWVADDGAAVAVWTTPESVEAGAVFAEIGPRMAELSGSRLAAQQQMEGLLAPHRPKEPAWFLATVGVSPDHQGKGLGSAVVLPGVEAAERAGVPAFLETSAPRNLPFYERLGFTVTADVEVPEGPRTWCMTRKPGA

SEQ ID NO: 17902 - protein, 635 aa, Artificial Sequence
  Synthetic Polypeptide
MALPVTALLLPLALLLHAARPQVQLVESGGGLVQPGGSLRLSCAASGFTFTNHAMSWVRQAPGKGLELVSSISGNGRTTYYADSVKGRFTISRDISKNTLDLQMNSLRAEDTAVYYCAKDGGETLVDSRGQGTLVTVSSLESQPHTKPSVFVMKNGTNVACLVKEFYPKDIRINLVSSKKITEFDPAIVISPSGKYNAVKLGKYEDSNSVTCSVQHDNKTVHSTDFEVKTDSTDHVKPKETENTKQPSKSCHKPKAIVHTEKVNMMSLTVLGLRMLFAKTVAVNFLLTAKLFFLRAKRSGSGATNFSLLKQAGDVEENPGPTSMDWIWRILFLVGAATGAHSFEVQVLESGGGLVQPGGSLRLSCAASGFTFSNFAMSWVRQAPGKGLEWVSTISGSAGTTDYADSVKGRFTISRDNSKKTLYLQMNSLRVEDTAVYYCADGRGPFFDYRGQGTLVTVSSTRDKQLDADVSPKPTIFLPSIAETKLQKAGTYLCLLEKFFPDVIKIHWQEKKSNTILGSQEGNTMKTNDTYMKFSWLTVPEKSLDKEHRCIVRHENNKNGVDQEIIFPPIKTDVITMDPKDNCSKDANDTLLLQLTNTSAYYMYLLLLLKSVVYFAIITCCLLRRTAFCCNGEKS

SEQ ID NO: 17903 - protein, 907 aa, Artificial Sequence
  Synthetic Polypeptide
MALPVTALLLPLALLLHAARPLEGKPIPNPLLGLDSTGSGDKQLDADVSPKPTIFLPSIAETKLQKAGTYLCLLEKFFPDVIKIHWQEKKSNTILGSQEGNTMKTNDTYMKFSWLTVPEKSLDKEHRCIVRHENNKNGVDQEIIFPPIKTDVITMDPKDNCSKDANDTLLLQLTNTSAYYMYLLLLLKSVVYFAIITCCLLRRTAFCCNGEKSRAKRSGSGATNFSLLKQAGDVEENPGPTSMALPVTALLLPLALLLHAARPQVQLVESGGGLVQPGGSLRLSCAASGFTFTNHAMSWVRQAPGKGLELVSSISGNGRTTYYADSVKGRFTISRDISKNTLDLQMNSLRAEDTAVYYCAKDGGETLVDSRGQGTLVTVSSLESGGGGSFEVQVLESGGGLVQPGGSLRLSCAASGFTFSNFAMSWVRQAPGKGLEWVSTISGSAGTTDYADSVKGRFTISRDNSKKTLYLQMNSLRVEDTAVYYCADGRGPFFDYRGQGTLVTVSSTREQKLISEEDGSGSQPHTKPSVFVMKNGTNVACLVKEFYPKDIRINLVSSKKITEFDPAIVISPSGKYNAVKLGKYEDSNSVTCSVQHDNKTVHSTDFEVKTDSTDHVKPKETENTKQPSKSCHKPKAIVHTEKVNMMSLTVLGLRMLFAKTVAVNFLLTAKLFFLRAKRSGSGVKQTLNFDLLKLAGDVESNPGPSRGHMTEYKPTVRLATRDDVPRAVRTLAAAFADYPATRHTVDPDRHIERVTELQELFLTRVGLDIGKVWVADDGAAVAVWTTPESVEAGAVFAEIGPRMAELSGSRLAAQQQMEGLLAPHRPKEPAWFLATVGVSPDHQGKGLGSAVVLPGVEAAERAGVPAFLETSAPRNLPFYERLGFTVTADVEVPEGPRTWCMTRKPGA

SEQ ID NO: 17904 - protein, 1037 aa, Artificial Sequence
  Synthetic Polypeptide
MALPVTALLLPLALLLHAARPQVQLVESGGGLVQPGGSLRLSCAASGFTFTNHAMSWVRQAPGKGLELVSSISGNGRTTYYADSVKGRFTISRDISKNTLDLQMNSLRAEDTAVYYCAKDGGETLVDSRGQGTLVTVSSGQPKANPTVTLFPPSSEELQANKATLVCLISDFYPGAVTVAWKADGSPVKAGVETTKPSKQSNNKYAASSYLSLTPEQWKSHRSYSCQVTHEGSTVEKTVAPTECSGSQSFGLLDPKLCYLLDGILFIYGVILTALFLRVKFSRSADAPAYQQGQNQLYNELNLGRREEYDVLDKRRGRDPEMGGKPQRRKNPQEGLYNELQKDKMAEAYSEIGMKGERRRGKGHDGLYQGLSTATKDTYDALHMQALPPRRAKRSGSGATNFSLLKQAGDVEENPGPTSMDWIWRILFLVGAATGAHSFEVQVLESGGGLVQPGGSLRLSCAASGFTFSNFAMSWVRQAPGKGLEWVSTISGSAGTTDYADSVKGRFTISRDNSKKTLYLQMNSLRVEDTAVYYCADGRGPFFDYRGQGTLVTVSSASTKGPSVFPLAPSSKSTSGGTAALGCLVKDYFPEPVTVSWNSGALTSGVHTFPAVLQSSGLYSLSSVVTVPSSSLGTQTYICNVNHKPSNTKVDKRVEPKSCGTQSFGLLDPKLCYLLDGILFIYGVILTALFLRVKFSRSADAPAYQQGQNQLYNELNLGRREEYDVLDKRRGRDPEMGGKPQRRKNPQEGLYNELQKDKMAEAYSEIGMKGERRRGKGHDGLYQGLSTATKDTYDALHMQALPPRRAKRSGSGVKQTLNFDLLKLAGDVESNPGPSRGHMTEYKPTVRLATRDDVPRAVRTLAAAFADYPATRHTVDPDRHIERVTELQELFLTRVGLDIGKVWVADDGAAVAVWTTPESVEAGAVFAEIGPRMAELSGSRLAAQQQMEGLLAPHRPKEPAWFLATVGVSPDHQGKGLGSAVVLPGVEAAERAGVPAFLETSAPRNLPFYERLGFTVTADVEVPEGPRTWCMTRKPGA

SEQ ID NO: 17905 - protein, 823 aa, Artificial Sequence
  Synthetic Polypeptide
MALPVTALLLPLALLLHAARPQVQLVESGGGLVQPGGSLRLSCAASGFTFTNHAMSWVRQAPGKGLELVSSISGNGRTTYYADSVKGRFTISRDISKNTLDLQMNSLRAEDTAVYYCAKDGGETLVDSRGQGTLVTVSSLEDLKNVFPPEVAVFEPSEAEISHTQKATLVCLATGFYPDHVELSWWVNGKEVHSGVSTDPQPLKEQPALNDSRYCLSSRLRVSATFWQNPRNHFRCQVQFYGLSENDEWTQDRAKPVTQIVSAEAWGRADCGSQSFGLLDPKLCYLLDGILFIYGVILTALFLRVKFSRSADAPAYQQGQNQLYNELNLGRREEYDVLDKRRGRDPEMGGKPQRRKNPQEGLYNELQKDKMAEAYSEIGMKGERRRGKGHDGLYQGLSTATKDTYDALHMQALPPRRAKRSGSGATNFSLLKQAGDVEENPGPTSMDWIWRILFLVGAATGAHSFEVQVLESGGGLVQPGGSLRLSCAASGFTFSNFAMSWVRQAPGKGLEWVSTISGSAGTTDYADSVKGRFTISRDNSKKTLYLQMNSLRVEDTAVYYCADGRGPFFDYRGQGTLVTVSSTRIQNPDPAVYQLRDSKSSDKSVCLFTDFDSQTNVSQSKDSDVYITDKTVLDMRSMDFKSNSAVAWSNKSDFACANAFNNSIIPEDTFFPSPESSCGTQSFGLLDPKLCYLLDGILFIYGVILTALFLRVKFSRSADAPAYQQGQNQLYNELNLGRREEYDVLDKRRGRDPEMGGKPQRRKNPQEGLYNELQKDKMAEAYSEIGMKGERRRGKGHDGLYQGLSTATKDTYDALHMQALPPR

SEQ ID NO: 17906 - protein, 823 aa, Artificial Sequence
  Synthetic Polypeptide
MALPVTALLLPLALLLHAARPQVQLVESGGGLVQPGGSLRLSCAASGFTFTNHAMSWVRQAPGKGLELVSSISGNGRTTYYADSVKGRFTISRDISKNTLDLQMNSLRAEDTAVYYCAKDGGETLVDSRGQGTLVTVSSLEDLKNVFPPEVAVFEPSKAEIAHTQKATLVCLATGFYPDHVELSWWVNGKEVHSGVCTDPQPLKEQPALNDSRYCLSSRLRVSATFWQNPRNHFRCQVQFYGLSENDEWTQDRAKPVTQIVSAEAWGRADCGSQSFGLLDPKLCYLLDGILFIYGVILTALFLRVKFSRSADAPAYQQGQNQLYNELNLGRREEYDVLDKRRGRDPEMGGKPQRRKNPQEGLYNELQKDKMAEAYSEIGMKGERRRGKGHDGLYQGLSTATKDTYDALHMQALPPRRAKRSGSGATNFSLLKQAGDVEENPGPTSMDWIWRILFLVGAATGAHSFEVQVLESGGGLVQPGGSLRLSCAASGFTFSNFAMSWVRQAPGKGLEWVSTISGSAGTTDYADSVKGRFTISRDNSKKTLYLQMNSLRVEDTAVYYCADGRGPFFDYRGQGTLVTVSSTRIQNPDPAVYQLRDSKSSDKSVCLFTDFDSQTNVSQSKDSDVYITDKCVLDMRSMDFKSNSAVAWSNKSDFACANAFNNSIIPEDTFFPSSDVPCGTQSFGLLDPKLCYLLDGILFIYGVILTALFLRVKFSRSADAPAYQQGQNQLYNELNLGRREEYDVLDKRRGRDPEMGGKPQRRKNPQEGLYNELQKDKMAEAYSEIGMKGERRRGKGHDGLYQGLSTATKDTYDALHMQALPPR

SEQ ID NO: 17907 - protein, 894 aa, Artificial Sequence
  Synthetic Polypeptide
MALPVTALLLPLALLLHAARPQVQLVESGGGLVQPGGSLRLSCAASGFTFTNHAMSWVRQAPGKGLELVSSISGNGRTTYYADSVKGRFTISRDISKNTLDLQMNSLRAEDTAVYYCAKDGGETLVDSRGQGTLVTVSSLEGKPIPNPLLGLDSTGSGEDLKNVFPPEVAVFEPSEAEISHTQKATLVCLATGFYPDHVELSWWVNGKEVHSGVSTDPQPLKEQPALNDSRYCLSSRLRVSATFWQNPRNHFRCQVQFYGLSENDEWTQDRAKPVTQIVSAEAWGRADCGSQSFGLLDPKLCYLLDGILFIYGVILTALFLRVKFSRSADAPAYQQGQNQLYNELNLGRREEYDVLDKRRGRDPEMGGKPQRRKNPQEGLYNELQKDKMAEAYSEIGMKGERRRGKGHDGLYQGLSTATKDTYDALHMQALPPRRAKRSGSGATNFSLLKQAGDVEENPGPTSMDWIWRILFLVGAATGAHSFEVQVLESGGGLVQPGGSLRLSCAASGFTFSNFAMSWVRQAPGKGLEWVSTISGSAGTTDYADSVKGRFTISRDNSKKTLYLQMNSLRVEDTAVYYCADGRGPFFDYRGQGTLVTVSSTREQKLISEEDGSGIQNPDPAVYQLRDSKSSDKSVCLFTDFDSQTNVSQSKDSDVYITDKTVLDMRSMDFKSNSAVAWSNKSDFACANAFNNSIIPEDTFFPSPESSCGTQSFGLLDPKLCYLLDGILFIYGVILTALFLRSKRSRLLHSDYMNMTPRRPGPTRKHYQPYAPPRDFAAYRSRVKFSRSADAPAYQQGQNQLYNELNLGRREEYDVLDKRRGRDPEMGGKPQRRKNPQEGLYNELQKDKMAEAYSEIGMKGERRRGKGHDGLYQGLSTATKDTYDALHMQALPPR

SEQ ID NO: 17908 - protein, 935 aa, Artificial Sequence
  Synthetic Polypeptide
MALPVTALLLPLALLLHAARPQVQLVESGGGLVQPGGSLRLSCAASGFTFTNHAMSWVRQAPGKGLELVSSISGNGRTTYYADSVKGRFTISRDISKNTLDLQMNSLRAEDTAVYYCAKDGGETLVDSRGQGTLVTVSSLEGKPIPNPLLGLDSTGSGEDLKNVFPPEVAVFEPSEAEISHTQKATLVCLATGFYPDHVELSWWVNGKEVHSGVSTDPQPLKEQPALNDSRYCLSSRLRVSATFWQNPRNHFRCQVQFYGLSENDEWTQDRAKPVTQIVSAEAWGRADCGSQSFGLLDPKLCYLLDGILFIYGVILTALFLRSKRSRLLHSDYMNMTPRRPGPTRKHYQPYAPPRDFAAYRSRVKFSRSADAPAYQQGQNQLYNELNLGRREEYDVLDKRRGRDPEMGGKPQRRKNPQEGLYNELQKDKMAEAYSEIGMKGERRRGKGHDGLYQGLSTATKDTYDALHMQALPPRRAKRSGSGATNFSLLKQAGDVEENPGPTSMDWIWRILFLVGAATGAHSFEVQVLESGGGLVQPGGSLRLSCAASGFTFSNFAMSWVRQAPGKGLEWVSTISGSAGTTDYADSVKGRFTISRDNSKKTLYLQMNSLRVEDTAVYYCADGRGPFFDYRGQGTLVTVSSTREQKLISEEDGSGIQNPDPAVYQLRDSKSSDKSVCLFTDFDSQTNVSQSKDSDVYITDKTVLDMRSMDFKSNSAVAWSNKSDFACANAFNNSIIPEDTFFPSPESSCGTQSFGLLDPKLCYLLDGILFIYGVILTALFLRSKRSRLLHSDYMNMTPRRPGPTRKHYQPYAPPRDFAAYRSRVKFSRSADAPAYQQGQNQLYNELNLGRREEYDVLDKRRGRDPEMGGKPQRRKNPQEGLYNELQKDKMAEAYSEIGMKGERRRGKGHDGLYQGLSTATKDTYDALHMQALPPR

SEQ ID NO: 17909 - protein, 896 aa, Artificial Sequence
  Synthetic Polypeptide
MALPVTALLLPLALLLHAARPQVQLVESGGGLVQPGGSLRLSCAASGFTFTNHAMSWVRQAPGKGLELVSSISGNGRTTYYADSVKGRFTISRDISKNTLDLQMNSLRAEDTAVYYCAKDGGETLVDSRGQGTLVTVSSLEGKPIPNPLLGLDSTGSGEDLKNVFPPEVAVFEPSEAEISHTQKATLVCLATGFYPDHVELSWWVNGKEVHSGVSTDPQPLKEQPALNDSRYCLSSRLRVSATFWQNPRNHFRCQVQFYGLSENDEWTQDRAKPVTQIVSAEAWGRADCGSQSFGLLDPKLCYLLDGILFIYGVILTALFLRVKFSRSADAPAYQQGQNQLYNELNLGRREEYDVLDKRRGRDPEMGGKPQRRKNPQEGLYNELQKDKMAEAYSEIGMKGERRRGKGHDGLYQGLSTATKDTYDALHMQALPPRRAKRSGSGATNFSLLKQAGDVEENPGPTSMDWIWRILFLVGAATGAHSFEVQVLESGGGLVQPGGSLRLSCAASGFTFSNFAMSWVRQAPGKGLEWVSTISGSAGTTDYADSVKGRFTISRDNSKKTLYLQMNSLRVEDTAVYYCADGRGPFFDYRGQGTLVTVSSTREQKLISEEDLGSGIQNPDPAVYQLRDSKSSDKSVCLFTDFDSQTNVSQSKDSDVYITDKTVLDMRSMDFKSNSAVAWSNKSDFACANAFNNSIIPEDTFFPSPESSCGTQSFGLLDPKLCYLLDGILFIYGVILTALFLKRGRKKLLYIFKQPFMRPVQTTQEEDGCSCRFPEEEEGGCELRVKFSRSADAPAYQQGQNQLYNELNLGRREEYDVLDKRRGRDPEMGGKPQRRKNPQEGLYNELQKDKMAEAYSEIGMKGERRRGKGHDGLYQGLSTATKDTYDALHMQALPPR

SEQ ID NO: 17910 - protein, 938 aa, Artificial Sequence
  Synthetic Polypeptide
MALPVTALLLPLALLLHAARPQVQLVESGGGLVQPGGSLRLSCAASGFTFTNHAMSWVRQAPGKGLELVSSISGNGRTTYYADSVKGRFTISRDISKNTLDLQMNSLRAEDTAVYYCAKDGGETLVDSRGQGTLVTVSSLEGKPIPNPLLGLDSTGSGEDLKNVFPPEVAVFEPSEAEISHTQKATLVCLATGFYPDHVELSWWVNGKEVHSGVSTDPQPLKEQPALNDSRYCLSSRLRVSATFWQNPRNHFRCQVQFYGLSENDEWTQDRAKPVTQIVSAEAWGRADCGSQSFGLLDPKLCYLLDGILFIYGVILTALFLKRGRKKLLYIFKQPFMRPVQTTQEEDGCSCRFPEEEEGGCELRVKFSRSADAPAYQQGQNQLYNELNLGRREEYDVLDKRRGRDPEMGGKPQRRKNPQEGLYNELQKDKMAEAYSEIGMKGERRRGKGHDGLYQGLSTATKDTYDALHMQALPPRRAKRSGSGATNFSLLKQAGDVEENPGPTSMDWIWRILFLVGAATGAHSFEVQVLESGGGLVQPGGSLRLSCAASGFTFSNFAMSWVRQAPGKGLEWVSTISGSAGTTDYADSVKGRFTISRDNSKKTLYLQMNSLRVEDTAVYYCADGRGPFFDYRGQGTLVTVSSTREQKLISEEDLGSGIQNPDPAVYQLRDSKSSDKSVCLFTDFDSQTNVSQSKDSDVYITDKTVLDMRSMDFKSNSAVAWSNKSDFACANAFNNSIIPEDTFFPSPESSCGTQSFGLLDPKLCYLLDGILFIYGVILTALFLKRGRKKLLYIFKQPFMRPVQTTQEEDGCSCRFPEEEEGGCELRVKFSRSADAPAYQQGQNQLYNELNLGRREEYDVLDKRRGRDPEMGGKPQRRKNPQEGLYNELQKDKMAEAYSEIGMKGERRRGKGHDGLYQGLSTATKDTYDALHMQALPPR

SEQ ID NO: 17911 - protein, 828 aa, Artificial Sequence
  Synthetic Polypeptide
MALPVTALLLPLALLLHAARPQVQLVESGGGLVQPGGSLRLSCAASGFTFTNHAMSWVRQAPGKGLELVSSISGNGRTTYYADSVKGRFTISRDISKNTLDLQMNSLRAEDTAVYYCAKDGGETLVDSRGQGTLVTVSSLEQSFGLLDPKLCYLLDGILFIYGVILTALFLRVKFSRSADAPAYQQGQNQLYNELNLGRREEYDVLDKRRGRDPEMGGKPQRRKNPQEGLYNELQKDKMAEAYSEIGMKGERRRGKGHDGLYQGLSTATKDTYDALHMQALPPRRAKRSGSGATNFSLLKQAGDVEENPGPTSMDWIWRILFLVGAATGAHSFEVQVLESGGGLVQPGGSLRLSCAASGFTFSNFAMSWVRQAPGKGLEWVSTISGSAGTTDYADSVKGRFTISRDNSKKTLYLQMNSLRVEDTAVYYCADGRGPFFDYRGQGTLVTVSSTRQSFGLLDPKLCYLLDGILFIYGVILTALFLRVKFSRSADAPAYQQGQNQLYNELNLGRREEYDVLDKRRGRDPEMGGKPQRRKNPQEGLYNELQKDKMAEAYSEIGMKGERRRGKGHDGLYQGLSTATKDTYDALHMQALPPRRAKRSGSGVKQTLNFDLLKLAGDVESNPGPSRGHMTEYKPTVRLATRDDVPRAVRTLAAAFADYPATRHTVDPDRHIERVTELQELFLTRVGLDIGKVWVADDGAAVAVWTTPESVEAGAVFAEIGPRMAELSGSRLAAQQQMEGLLAPHRPKEPAWFLATVGVSPDHQGKGLGSAVVLPGVEAAERAGVPAFLETSAPRNLPFYERLGFTVTADVEVPEGPRTWCMTRKPGA

SEQ ID NO: 17912 - protein, 653 aa, Artificial Sequence
  Synthetic Polypeptide
MALPVTALLLPLALLLHAARPQVQLVESGGGLVQPGGSLRLSCAASGFTFTNHAMSWVRQAPGKGLELVSSISGNGRTTYYADSVKGRFTISRDISKNTLDLQMNSLRAEDTAVYYCAKDGGETLVDSRGQGTLVTVSSLEGQPKANPTVTLFPPSSEELQANKATLVCLISDFYPGAVTVAWKADGSPVKAGVETTKPSKQSNNKYAASSYLSLTPEQWKSHRSYSCQVTHEGSTVEKTVAPTECSPIKTDVITMDPKDNCSKDANDTLLLQLTNTSAYYMYLLLLLKSVVYFAIITCCLLRRTAFCCNGEKSRAKRSGSGATNFSLLKQAGDVEENPGPTSMDWIWRILFLVGAATGAHSFEVQVLESGGGLVQPGGSLRLSCAASGFTFSNFAMSWVRQAPGKGLEWVSTISGSAGTTDYADSVKGRFTISRDNSKKTLYLQMNSLRVEDTAVYYCADGRGPFFDYRGQGTLVTVSSTRASTKGPSVFPLAPSSKSTSGGTAALGCLVKDYFPEPVTVSWNSGALTSGVHTFPAVLQSSGLYSLSSVVTVPSSSLGTQTYICNVNHKPSNTKVDKRVEPKSCEVKTDSTDHVKPKETENTKQPSKSCHKPKAIVHTEKVNMMSLTVLGLRMLFAKTVAVNFLLTAKLFFL

SEQ ID NO: 17913 - protein, 631 aa, Artificial Sequence
  Synthetic Polypeptide
MALPVTALLLPLALLLHAARPQVQLVESGGGLVQPGGSLRLSCAASGFTFTNHAMSWVRQAPGKGLELVSSISGNGRTTYYADSVKGRFTISRDISKNTLDLQMNSLRAEDTAVYYCAKDGGETLVDSRGQGTLVTVSSLEGQPKANPTVTLFPPSSEELQANKATLVCLISDFYPGAVTVAWKADGSPVKAGVETTKPSKQSNNKYAASSYLSLTPEQWKSHRSYSCQVTHEGSTVEKTVAPTECSGRADCGITSASYHQGVLSATILYEILLGKATLYAVLVSALVLMAMVKRKDSRGRAKRSGSGATNFSLLKQAGDVEENPGPTSMDWIWRILFLVGAATGAHSFEVQVLESGGGLVQPGGSLRLSCAASGFTFSNFAMSWVRQAPGKGLEWVSTISGSAGTTDYADSVKGRFTISRDNSKKTLYLQMNSLRVEDTAVYYCADGRGPFFDYRGQGTLVTVSSTRASTKGPSVFPLAPSSKSTSGGTAALGCLVKDYFPEPVTVSWNSGALTSGVHTFPAVLQSSGLYSLSSVVTVPSSSLGTQTYICNVNHKPSNTKVDKRVEPKSCIPEDTFFPSSDVPCDVKLVEKSFETDTNLNFQNLSVIGFRILLLKVAGFNLLMTLRLWSS

SEQ ID NO: 17914 - protein, 631 aa, Artificial Sequence
  Synthetic Polypeptide
MALPVTALLLPLALLLHAARPQVQLVESGGGLVQPGGSLRLSCAASGFTFTNHAMSWVRQAPGKGLELVSSISGNGRTTYYADSVKGRFTISRDISKNTLDLQMNSLRAEDTAVYYCAKDGGETLVDSRGQGTLVTVSSLEGQPKANPTVTLFPPSSEELQANKATLVCLISDFYPGAVTVAWKADGSPVKAGVETTKPSKQSNNKYAASSYLSLTPEQWKSHRSYSCQVTHEGSTVEKTVAPTECSGRADCGFTSESYQQGVLSATILYEILLGKATLYAVLVSALVLMAMVKRKDSRGRAKRSGSGATNFSLLKQAGDVEENPGPTSMDWIWRILFLVGAATGAHSFEVQVLESGGGLVQPGGSLRLSCAASGFTFSNFAMSWVRQAPGKGLEWVSTISGSAGTTDYADSVKGRFTISRDNSKKTLYLQMNSLRVEDTAVYYCADGRGPFFDYRGQGTLVTVSSTRASTKGPSVFPLAPSSKSTSGGTAALGCLVKDYFPEPVTVSWNSGALTSGVHTFPAVLQSSGLYSLSSVVTVPSSSLGTQTYICNVNHKPSNTKVDKRVEPKSCIPEDTFFPSPESSCDVKLVEKSFETDTNLNFQNLSVIGFRILLLKVAGFNLLMTLRLWSS

SEQ ID NO: 17915 - protein, 452 aa, Artificial Sequence
  Synthetic Polypeptide
MALPVTALLLPLALLLHAARPQVQLVESGGGLVQPGGSLRLSCAASGFTFTNHAMSWVRQAPGKGLELVSSISGNGRTTYYADSVKGRFTISRDISKNTLDLQMNSLRAEDTAVYYCAKDGGETLVDSRGQGTLVTVSSLESGGGGSFEVQVLESGGGLVQPGGSLRLSCAASGFTFSNFAMSWVRQAPGKGLEWVSTISGSAGTTDYADSVKGRFTISRDNSKKTLYLQMNSLRVEDTAVYYCADGRGPFFDYRGQGTLVTVSSTRDGNEEMGGITQTPYKVSISGTTVILTCPQYPGSEILWQHNDKNIGGDEDDKNIGSDEDHLSLKEFSELEQSGYYVCYPRGSKPEDANFYLYLRARVCENCMEMDVMSVATIVIVDICITGGLLLLVYYWSKNRKAKAKPVTRGAGAGGRQRGQNKERPPPVPNPDYEPIRKGQRDLYSGLNQRRI

SEQ ID NO: 17916 - protein, 417 aa, Artificial Sequence
  Synthetic Polypeptide
MALPVTALLLPLALLLHAARPQVQLVESGGGLVQPGGSLRLSCAASGFTFTNHAMSWVRQAPGKGLELVSSISGNGRTTYYADSVKGRFTISRDISKNTLDLQMNSLRAEDTAVYYCAKDGGETLVDSRGQGTLVTVSSLESGGGGSFEVQVLESGGGLVQPGGSLRLSCAASGFTFSNFAMSWVRQAPGKGLEWVSTISGSAGTTDYADSVKGRFTISRDNSKKTLYLQMNSLRVEDTAVYYCADGRGPFFDYRGQGTLVTVSSTRFKIPIEELEDRVFVNCNTSITWVEGTVGTLLSDITRLDLGKRILDPRGIYRCNGTDIYKDKESTVQVHYRMCQSCVELDPATVAGIIVTDVIATLLLALGVFCFAGHETGRLSGAADTQALLRNDQVYQPLRDRDDAQYSHLGGNWARNK

SEQ ID NO: 17917 - protein, 427 aa, Artificial Sequence
  Synthetic Polypeptide
MALPVTALLLPLALLLHAARPQVQLVESGGGLVQPGGSLRLSCAASGFTFTNHAMSWVRQAPGKGLELVSSISGNGRTTYYADSVKGRFTISRDISKNTLDLQMNSLRAEDTAVYYCAKDGGETLVDSRGQGTLVTVSSLESGGGGSFEVQVLESGGGLVQPGGSLRLSCAASGFTFSNFAMSWVRQAPGKGLEWVSTISGSAGTTDYADSVKGRFTISRDNSKKTLYLQMNSLRVEDTAVYYCADGRGPFFDYRGQGTLVTVSSTRQSIKGNHLVKVYDYQEDGSVLLTCDAEAKNITWFKDGKMIGFLTEDKKKWNLGSNAKDPRGMYQCKGSQNKSKPLQVYYRMCQNCIELNAATISGFLFAEIVSIFVLAVGVYFIAGQDGVRQSRASDKQTLLPNDQLYQPLKDREDDQYSHLQGNQLRRN

SEQ ID NO: 17918 - protein, 410 aa, Artificial Sequence
  Synthetic Polypeptide
MALPVTALLLPLALLLHAARPQVQLVESGGGLVQPGGSLRLSCAASGFTFTNHAMSWVRQAPGKGLELVSSISGNGRTTYYADSVKGRFTISRDISKNTLDLQMNSLRAEDTAVYYCAKDGGETLVDSRGQGTLVTVSSLESGGGGSFEVQVLESGGGLVQPGGSLRLSCAASGFTFSNFAMSWVRQAPGKGLEWVSTISGSAGTTDYADSVKGRFTISRDNSKKTLYLQMNSLRVEDTAVYYCADGRGPFFDYRGQGTLVTVSSTRQSFGLLDPKLCYLLDGILFIYGVILTALFLRVKFSRSADAPAYQQGQNQLYNELNLGRREEYDVLDKRRGRDPEMGGKPQRRKNPQEGLYNELQKDKMAEAYSEIGMKGERRRGKGHDGLYQGLSTATKDTYDALHMQALPPR

SEQ ID NO: 17919 - protein, 453 aa, Artificial Sequence
  Synthetic Polypeptide
MALPVTALLLPLALLLHAARPEVQVLESGGGLVQPGGSLRLSCAASGFTFSNFAMSWVRQAPGKGLEWVSTISGSAGTTDYADSVKGRFTISRDNSKKTLYLQMNSLRVEDTAVYYCADGRGPFFDYRGQGTLVTVSSLESGGGGSFEQVQLVESGGGLVQPGGSLRLSCAASGFTFTNHAMSWVRQAPGKGLELVSSISGNGRTTYYADSVKGRFTISRDISKNTLDLQMNSLRAEDTAVYYCAKDGGETLVDSRGQGTLVTVSSTRDGNEEMGGITQTPYKVSISGTTVILTCPQYPGSEILWQHNDKNIGGDEDDKNIGSDEDHLSLKEFSELEQSGYYVCYPRGSKPEDANFYLYLRARVCENCMEMDVMSVATIVIVDICITGGLLLLVYYWSKNRKAKAKPVTRGAGAGGRQRGQNKERPPPVPNPDYEPIRKGQRDLYSGLNQRRI

SEQ ID NO: 17920 - protein, 418 aa, Artificial Sequence
  Synthetic Polypeptide
MALPVTALLLPLALLLHAARPEVQVLESGGGLVQPGGSLRLSCAASGFTFSNFAMSWVRQAPGKGLEWVSTISGSAGTTDYADSVKGRFTISRDNSKKTLYLQMNSLRVEDTAVYYCADGRGPFFDYRGQGTLVTVSSLESGGGGSFEQVQLVESGGGLVQPGGSLRLSCAASGFTFTNHAMSWVRQAPGKGLELVSSISGNGRTTYYADSVKGRFTISRDISKNTLDLQMNSLRAEDTAVYYCAKDGGETLVDSRGQGTLVTVSSTRFKIPIEELEDRVFVNCNTSITWVEGTVGTLLSDITRLDLGKRILDPRGIYRCNGTDIYKDKESTVQVHYRMCQSCVELDPATVAGIIVTDVIATLLLALGVFCFAGHETGRLSGAADTQALLRNDQVYQPLRDRDDAQYSHLGGNWARNK

SEQ ID NO: 17921 - protein, 428 aa, Artificial Sequence
  Synthetic Polypeptide
MALPVTALLLPLALLLHAARPEVQVLESGGGLVQPGGSLRLSCAASGFTFSNFAMSWVRQAPGKGLEWVSTISGSAGTTDYADSVKGRFTISRDNSKKTLYLQMNSLRVEDTAVYYCADGRGPFFDYRGQGTLVTVSSLESGGGGSFEQVQLVESGGGLVQPGGSLRLSCAASGFTFTNHAMSWVRQAPGKGLELVSSISGNGRTTYYADSVKGRFTISRDISKNTLDLQMNSLRAEDTAVYYCAKDGGETLVDSRGQGTLVTVSSTRQSIKGNHLVKVYDYQEDGSVLLTCDAEAKNITWFKDGKMIGFLTEDKKKWNLGSNAKDPRGMYQCKGSQNKSKPLQVYYRMCQNCIELNAATISGFLFAEIVSIFVLAVGVYFIAGQDGVRQSRASDKQTLLPNDQLYQPLKDREDDQYSHLQGNQLRRN

SEQ ID NO: 17922 - protein, 411 aa, Artificial Sequence
  Synthetic Polypeptide
MALPVTALLLPLALLLHAARPEVQVLESGGGLVQPGGSLRLSCAASGFTFSNFAMSWVRQAPGKGLEWVSTISGSAGTTDYADSVKGRFTISRDNSKKTLYLQMNSLRVEDTAVYYCADGRGPFFDYRGQGTLVTVSSLESGGGGSFEQVQLVESGGGLVQPGGSLRLSCAASGFTFTNHAMSWVRQAPGKGLELVSSISGNGRTTYYADSVKGRFTISRDISKNTLDLQMNSLRAEDTAVYYCAKDGGETLVDSRGQGTLVTVSSTRQSFGLLDPKLCYLLDGILFIYGVILTALFLRVKFSRSADAPAYQQGQNQLYNELNLGRREEYDVLDKRRGRDPEMGGKPQRRKNPQEGLYNELQKDKMAEAYSEIGMKGERRRGKGHDGLYQGLSTATKDTYDALHMQALPPR

SEQ ID NO: 17923 - protein, 643 aa, Artificial Sequence
  Synthetic Polypeptide
MALPVTALLLPLALLLHAARPQVQLVESGGGLVQPGGSLRLSCAASGFTFTNHAMSWVRQAPGKGLELVSSISGNGRTTYYADSVKGRFTISRDISKNTLDLQMNSLRAEDTAVYYCAKDGGETLVDSRGQGTLVTVSSLESGGGGSFEVQVLESGGGLVQPGGSLRLSCAASGFTFSNFAMSWVRQAPGKGLEWVSTISGSAGTTDYADSVKGRFTISRDNSKKTLYLQMNSLRVEDTAVYYCADGRGPFFDYRGQGTLVTVSSTRGSGIQNPDPAVYQLRDSKSSDKSVCLFTDFDSQTNVSQSKDSDVYITDKTVLDMRSMDFKSNSAVAWSNKSDFACANAFNNSIIPEDTFFPSPESSCDVKLVEKSFETDTNLNFQNLSVIGFRILLLKVAGFNLLMTLRLWSSRAKRSGSGVKQTLNFDLLKLAGDVESNPGPSRGHMTEYKPTVRLATRDDVPRAVRTLAAAFADYPATRHTVDPDRHIERVTELQELFLTRVGLDIGKVWVADDGAAVAVWTTPESVEAGAVFAEIGPRMAELSGSRLAAQQQMEGLLAPHRPKEPAWFLATVGVSPDHQGKGLGSAVVLPGVEAAERAGVPAFLETSAPRNLPFYERLGFTVTADVEVPEGPRTWCMTRKPGA

SEQ ID NO: 17924 - protein, 675 aa, Artificial Sequence
  Synthetic Polypeptide
MALPVTALLLPLALLLHAARPQVQLVESGGGLVQPGGSLRLSCAASGFTFTNHAMSWVRQAPGKGLELVSSISGNGRTTYYADSVKGRFTISRDISKNTLDLQMNSLRAEDTAVYYCAKDGGETLVDSRGQGTLVTVSSLESGGGGSFEVQVLESGGGLVQPGGSLRLSCAASGFTFSNFAMSWVRQAPGKGLEWVSTISGSAGTTDYADSVKGRFTISRDNSKKTLYLQMNSLRVEDTAVYYCADGRGPFFDYRGQGTLVTVSSLEDLKNVFPPEVAVFEPSEAEISHTQKATLVCLATGFYPDHVELSWWVNGKEVHSGVSTDPQPLKEQPALNDSRYCLSSRLRVSATFWQNPRNHFRCQVQFYGLSENDEWTQDRAKPVTQIVSAEAWGRADCGFTSESYQQGVLSATILYEILLGKATLYAVLVSALVLMAMVKRKDSRGRAKRSGSGATNFSLLKQAGDVEENPGPTRGHMTEYKPTVRLATRDDVPRAVRTLAAAFADYPATRHTVDPDRHIERVTELQELFLTRVGLDIGKVWVADDGAAVAVWTTPESVEAGAVFAEIGPRMAELSGSRLAAQQQMEGLLAPHRPKEPAWFLATVGVSPDHQGKGLGSAVVLPGVEAAERAGVPAFLETSAPRNLPFYERLGFTVTADVEVPEGPRTWCMTRKPGA

SEQ ID NO: 17925 - protein, 725 aa, Artificial Sequence
  Synthetic Polypeptide
MALPVTALLLPLALLLHAARPQVQLVESGGGLVQPGGSLRLSCAASGFTFTNHAMSWVRQAPGKGLELVSSISGNGRTTYYADSVKGRFTISRDISKNTLDLQMNSLRAEDTAVYYCAKDGGETLVDSRGQGTLVTVSSLESGGGGSFEVQVLESGGGLVQPGGSLRLSCAASGFTFSNFAMSWVRQAPGKGLEWVSTISGSAGTTDYADSVKGRFTISRDNSKKTLYLQMNSLRVEDTAVYYCADGRGPFFDYRGQGTLVTVSSTREQKLISEEDLGSGTPFPSLAPPIMLLVDGKQQMVVVCLVLDVAPPGLDSPIWFSAGNGSALDAFTYGPSPATDGTWTNLAHLSLPSEELASWEPLVCHTGPGAEGHSRSTQPMHLSGEASTARTCPQEPLRGTPGGALWLGVLRLLLFKLLLFDLLLTCSCLCDPAGPLPSPATTTRLRALGSHRLHPATETGGREATSSPRPQPRDRRWGDTPPGRKPGSPVRAKRSGSGVKQTLNFDLLKLAGDVESNPGPSRSRGHMTEYKPTVRLATRDDVPRAVRTLAAAFADYPATRHTVDPDRHIERVTELQELFLTRVGLDIGKVWVADDGAAVAVWTTPESVEAGAVFAEIGPRMAELSGSRLAAQQQMEGLLAPHRPKEPAWFLATVGVSPDHQGKGLGSAVVLPGVEAAERAGVPAFLETSAPRNLPFYERLGFTVTADVEVPEGPRTWCMTRKPGA

SEQ ID NO: 17926 - protein, 549 aa, Artificial Sequence; identical to SEQ ID NO: 17780
  Synthetic Polypeptide

SEQ ID NO: 17927 - protein, 319 aa, Artificial Sequence; identical to SEQ ID NO: 17781
  Synthetic Polypeptide

SEQ ID NO: 17928 - protein, 445 aa, Artificial Sequence
  Synthetic Polypeptide
MDWIWRILFLVGAATGAHSFEVQVLESGGGLVQPGGSLRLSCAASGFTFSNFAMSWVRQAPGKGLEWVSTISGSAGTTDYADSVKGRFTISRDNSKKTLYLQMNSLRVEDTAVYYCADGRGPFFDYRGQGTLVTVSSTRIQNPDPAVYQLRDSKSSDKSVCLFTDFDSQTNVSQSKDSDVYITDKTVLDMRSMDFKSNSAVAWSNKSDFACANAFNNSIIPEDTFFPSPESSCDVKLVEKSFETDTNLNFQNLSVIGFRILLLKVAGFNLLMTLRLWSSRAKRSGSGVKQTLNFDLLKLAGDVESNPGPSRGHMAKPLSQEESTLIERATATINSIPISEDYSVASAALSSDGRIFTGVNVYHFTGGPCAELVVLGTAAAAAAGNLTCIVAIGNENRGILSPCGRCRQVLLDLHPGIKAIVKDSDGQPTAVGIRELLPSGYVWEG

SEQ ID NO: 17929 - protein, 279 aa, Artificial Sequence
  Synthetic Polypeptide
MDWIWRILFLVGAATGAHSFEVQVLESGGGLVQPGGSLRLSCAASGFTFSNFAMSWVRQAPGKGLEWVSTISGSAGTTDYADSVKGRFTISRDNSKKTLYLQMNSLRVEDTAVYYCADGRGPFFDYRGQGTLVTVSSTRIQNPDPAVYQLRDSKSSDKSVCLFTDFDSQTNVSQSKDSDVYITDKTVLDMRSMDFKSNSAVAWSNKSDFACANAFNNSIIPEDTFFPSPESSCDVKLVEKSFETDTNLNFQNLSVIGFRILLLKVAGFNLLMTLRLWSS

SEQ ID NO: 17930 - protein, 567 aa, Artificial Sequence; identical to SEQ ID NO: 17784
  Synthetic Polypeptide

SEQ ID NO: 17931 - protein, 337 aa, Artificial Sequence; identical to SEQ ID NO: 17785
  Synthetic Polypeptide

SEQ ID NO: 17932 - protein, 457 aa, Artificial Sequence
  Synthetic Polypeptide
MDWIWRILFLVGAATGAHSFEVQVLESGGGLVQPGGSLRLSCAASGFTFSNFAMSWVRQAPGKGLEWVSTISGSAGTTDYADSVKGRFTISRDNSKKTLYLQMNSLRVEDTAVYYCADGRGPFFDYRGQGTLVTVSSTREQKLISEEDGSGIQNPDPAVYQLRDSKSSDKSVCLFTDFDSQTNVSQSKDSDVYITDKCVLDMRSMDFKSNSAVAWSNKSDFACANAFNNSIIPEDTFFPSPESSCDVKLVEKSFETDTNLNFQNLSVIGFRILLLKVAGFNLLMTLRLWSSRAKRSGSGVKQTLNFDLLKLAGDVESNPGPSRGHMAKPLSQEESTLIERATATINSIPISEDYSVASAALSSDGRIFTGVNVYHFTGGPCAELVVLGTAAAAAAGNLTCIVAIGNENRGILSPCGRCRQVLLDLHPGIKAIVKDSDGQPTAVGIRELLPSGYVWEG

SEQ ID NO: 17933 - protein, 291 aa, Artificial Sequence
  Synthetic Polypeptide
MDWIWRILFLVGAATGAHSFEVQVLESGGGLVQPGGSLRLSCAASGFTFSNFAMSWVRQAPGKGLEWVSTISGSAGTTDYADSVKGRFTISRDNSKKTLYLQMNSLRVEDTAVYYCADGRGPFFDYRGQGTLVTVSSTREQKLISEEDGSGIQNPDPAVYQLRDSKSSDKSVCLFTDFDSQTNVSQSKDSDVYITDKCVLDMRSMDFKSNSAVAWSNKSDFACANAFNNSIIPEDTFFPSPESSCDVKLVEKSFETDTNLNFQNLSVIGFRILLLKVAGFNLLMTLRLWSS

SEQ ID NO: 17934 - protein, 643 aa, Artificial Sequence
  Synthetic Polypeptide
MALPVTALLLPLALLLHAARPQVQLVESGGGLVQPGGSLRLSCAASGFTFTNHAMSWVRQAPGKGLELVSSISGNGRTTYYADSVKGRFTISRDISKNTLDLQMNSLRAEDTAVYYCAKDGGETLVDSRGQGTLVTVSSLESGGGGSFEVQVLESGGGLVQPGGSLRLSCAASGFTFSNFAMSWVRQAPGKGLEWVSTISGSAGTTDYADSVKGRFTISRDNSKKTLYLQMNSLRVEDTAVYYCADGRGPFFDYRGQGTLVTVSSTRGSGIQNPDPAVYQLRDSKSSDKSVCLFTDFDSQTNVSQSKDSDVYITDKTVLDMRSMDFKSNSAVAWSNKSDFACANAFNNSIIPEDTFFPSSDVPCDVKLVEKSFETDTNLNFQNLSVIGFRILLLKVAGFNLLMTLRLWSSRAKRSGSGVKQTLNFDLLKLAGDVESNPGPSRGHMTEYKPTVRLATRDDVPRAVRTLAAAFADYPATRHTVDPDRHIERVTELQELFLTRVGLDIGKVWVADDGAAVAVWTTPESVEAGAVFAEIGPRMAELSGSRLAAQQQMEGLLAPHRPKEPAWFLATVGVSPDHQGKGLGSAVVLPGVEAAERAGVPAFLETSAPRNLPFYERLGFTVTADVEVPEGPRTWCMTRKPGA

SEQ ID NO: 17935 - protein, 675 aa, Artificial Sequence
  Synthetic Polypeptide
MALPVTALLLPLALLLHAARPQVQLVESGGGLVQPGGSLRLSCAASGFTFTNHAMSWVRQAPGKGLELVSSISGNGRTTYYADSVKGRFTISRDISKNTLDLQMNSLRAEDTAVYYCAKDGGETLVDSRGQGTLVTVSSLESGGGGSFEVQVLESGGGLVQPGGSLRLSCAASGFTFSNFAMSWVRQAPGKGLEWVSTISGSAGTTDYADSVKGRFTISRDNSKKTLYLQMNSLRVEDTAVYYCADGRGPFFDYRGQGTLVTVSSLEDLKNVFPPEVAVFEPSKAEIAHTQKATLVCLATGFYPDHVELSWWVNGKEVHSGVSTDPQPLKEQPALNDSRYCLSSRLRVSATFWQNPRNHFRCQVQFYGLSENDEWTQDRAKPVTQIVSAEAWGRADCGITSASYHQGVLSATILYEILLGKATLYAVLVSALVLMAMVKRKDSRGRAKRSGSGATNFSLLKQAGDVEENPGPTRGHMTEYKPTVRLATRDDVPRAVRTLAAAFADYPATRHTVDPDRHIERVTELQELFLTRVGLDIGKVWVADDGAAVAVWTTPESVEAGAVFAEIGPRMAELSGSRLAAQQQMEGLLAPHRPKEPAWFLATVGVSPDHQGKGLGSAVVLPGVEAAERAGVPAFLETSAPRNLPFYERLGFTVTADVEVPEGPRTWCMTRKPGA

SEQ ID NO: 17936 - protein, 698 aa, Artificial Sequence
  Synthetic Polypeptide
MALPVTALLLPLALLLHAARPQVQLVESGGGLVQPGGSLRLSCAASGFTFTNHAMSWVRQAPGKGLELVSSISGNGRTTYYADSVKGRFTISRDISKNTLDLQMNSLRAEDTAVYYCAKDGGETLVDSRGQGTLVTVSSLESGGGGSFEVQVLESGGGLVQPGGSLRLSCAASGFTFSNFAMSWVRQAPGKGLEWVSTISGSAGTTDYADSVKGRFTISRDNSKKTLYLQMNSLRVEDTAVYYCADGRGPFFDYRGQGTLVTVSSTRGSGGGGSGGGGSGDGNEEMGGITQTPYKVSISGTTVILTCPQYPGSEILWQHNDKNIGGDEDDKNIGSDEDHLSLKEFSELEQSGYYVCYPRGSKPEDANFYLYLRARVCENCMEMDVMSVATIVIVDICITGGLLLLVYYWSKNRKAKAKPVTRGAGAGGRQRGQNKERPPPVPNPDYEPIRKGQRDLYSGLNQRRIRAKRSGSGVKQTLNFDLLKLAGDVESNPGPSRGHMTEYKPTVRLATRDDVPRAVRTLAAAFADYPATRHTVDPDRHIERVTELQELFLTRVGLDIGKVWVADDGAAVAVWTTPESVEAGAVFAEIGPRMAELSGSRLAAQQQMEGLLAPHRPKEPAWFLATVGVSPDHQGKGLGSAVVLPGVEAAERAGVPAFLETSAPRNLPFYERLGFTVTADVEVPEGPRTWCMTRKPGA

SEQ ID NO: 17937 - protein, 663 aa, Artificial Sequence
  Synthetic Polypeptide
MALPVTALLLPLALLLHAARPQVQLVESGGGLVQPGGSLRLSCAASGFTFTNHAMSWVRQAPGKGLELVSSISGNGRTTYYADSVKGRFTISRDISKNTLDLQMNSLRAEDTAVYYCAKDGGETLVDSRGQGTLVTVSSLESGGGGSFEVQVLESGGGLVQPGGSLRLSCAASGFTFSNFAMSWVRQAPGKGLEWVSTISGSAGTTDYADSVKGRFTISRDNSKKTLYLQMNSLRVEDTAVYYCADGRGPFFDYRGQGTLVTVSSTRGSGGGGSGGGGSGFKIPIEELEDRVFVNCNTSITWVEGTVGTLLSDITRLDLGKRILDPRGIYRCNGTDIYKDKESTVQVHYRMCQSCVELDPATVAGIIVTDVIATLLLALGVFCFAGHETGRLSGAADTQALLRNDQVYQPLRDRDDAQYSHLGGNWARNKRAKRSGSGVKQTLNFDLLKLAGDVESNPGPSRGHMTEYKPTVRLATRDDVPRAVRTLAAAFADYPATRHTVDPDRHIERVTELQELFLTRVGLDIGKVWVADDGAAVAVWTTPESVEAGAVFAEIGPRMAELSGSRLAAQQQMEGLLAPHRPKEPAWFLATVGVSPDHQGKGLGSAVVLPGVEAAERAGVPAFLETSAPRNLPFYERLGFTVTADVEVPEGPRTWCMTRKPGA

SEQ ID NO: 17938 - protein, 673 aa, Artificial Sequence
  Synthetic Polypeptide
MALPVTALLLPLALLLHAARPQVQLVESGGGLVQPGGSLRLSCAASGFTFTNHAMSWVRQAPGKGLELVSSISGNGRTTYYADSVKGRFTISRDISKNTLDLQMNSLRAEDTAVYYCAKDGGETLVDSRGQGTLVTVSSLESGGGGSFEVQVLESGGGLVQPGGSLRLSCAASGFTFSNFAMSWVRQAPGKGLEWVSTISGSAGTTDYADSVKGRFTISRDNSKKTLYLQMNSLRVEDTAVYYCADGRGPFFDYRGQGTLVTVSSTRGSGGGGSGGGGSGQSIKGNHLVKVYDYQEDGSVLLTCDAEAKNITWFKDGKMIGFLTEDKKKWNLGSNAKDPRGMYQCKGSQNKSKPLQVYYRMCQNCIELNAATISGFLFAEIVSIFVLAVGVYFIAGQDGVRQSRASDKQTLLPNDQLYQPLKDREDDQYSHLQGNQLRRNRAKRSGSGVKQTLNFDLLKLAGDVESNPGPSRGHMTEYKPTVRLATRDDVPRAVRTLAAAFADYPATRHTVDPDRHIERVTELQELFLTRVGLDIGKVWVADDGAAVAVWTTPESVEAGAVFAEIGPRMAELSGSRLAAQQQMEGLLAPHRPKEPAWFLATVGVSPDHQGKGLGSAVVLPGVEAAERAGVPAFLETSAPRNLPFYERLGFTVTADVEVPEGPRTWCMTRKPGA

SEQ ID NO: 17939 - protein, 656 aa, Artificial Sequence
  Synthetic Polypeptide
MALPVTALLLPLALLLHAARPQVQLVESGGGLVQPGGSLRLSCAASGFTFTNHAMSWVRQAPGKGLELVSSISGNGRTTYYADSVKGRFTISRDISKNTLDLQMNSLRAEDTAVYYCAKDGGETLVDSRGQGTLVTVSSLESGGGGSFEVQVLESGGGLVQPGGSLRLSCAASGFTFSNFAMSWVRQAPGKGLEWVSTISGSAGTTDYADSVKGRFTISRDNSKKTLYLQMNSLRVEDTAVYYCADGRGPFFDYRGQGTLVTVSSTRGSGGGGSGGGGSGQSFGLLDPKLCYLLDGILFIYGVILTALFLRVKFSRSADAPAYQQGQNQLYNELNLGRREEYDVLDKRRGRDPEMGGKPQRRKNPQEGLYNELQKDKMAEAYSEIGMKGERRRGKGHDGLYQGLSTATKDTYDALHMQALPPRRAKRSGSGVKQTLNFDLLKLAGDVESNPGPSRGHMTEYKPTVRLATRDDVPRAVRTLAAAFADYPATRHTVDPDRHIERVTELQELFLTRVGLDIGKVWVADDGAAVAVWTTPESVEAGAVFAEIGPRMAELSGSRLAAQQQMEGLLAPHRPKEPAWFLATVGVSPDHQGKGLGSAVVLPGVEAAERAGVPAFLETSAPRNLPFYERLGFTVTADVEVPEGPRTWCMTRKPGA

SEQ ID NO: 17940 - protein, 864 aa, Artificial Sequence
  Synthetic Polypeptide
MALPVTALLLPLALLLHAARPQVQLVESGGGLVQPGGSLRLSCAASGFTFTNHAMSWVRQAPGKGLELVSSISGNGRTTYYADSVKGRFTISRDISKNTLDLQMNSLRAEDTAVYYCAKDGGETLVDSRGQGTLVTVSSLEGQPKANPTVTLFPPSSEELQANKATLVCLISDFYPGAVTVAWKADGSPVKAGVETTKPSKQSNNKYAASSYLSLTPEQWKSHRSYSCQVTHEGSTVEKTVAPTECSGRADCGFTSESYQQGVLSATILYEILLGKATLYAVLVSALVLMAMVKRKDSRGRAKRSGSGATNFSLLKQAGDVEENPGPTSMDWIWRILFLVGAATGAHSFEVQVLESGGGLVQPGGSLRLSCAASGFTFSNFAMSWVRQAPGKGLEWVSTISGSAGTTDYADSVKGRFTISRDNSKKTLYLQMNSLRVEDTAVYYCADGRGPFFDYRGQGTLVTVSSTRASTKGPSVFPLAPSSKSTSGGTAALGCLVKDYFPEPVTVSWNSGALTSGVHTFPAVLQSSGLYSLSSVVTVPSSSLGTQTYICNVNHKPSNTKVDKRVEPKSCIPEDTFFPSPESSCDVKLVEKSFETDTNLNFQNLSVIGFRILLLKVAGFNLLMTLRLWSSRAKRSGSGVKQTLNFDLLKLAGDVESNPGPSRGHMTEYKPTVRLATRDDVPRAVRTLAAAFADYPATRHTVDPDRHIERVTELQELFLTRVGLDIGKVWVADDGAAVAVWTTPESVEAGAVFAEIGPRMAELSGSRLAAQQQMEGLLAPHRPKEPAWFLATVGVSPDHQGKGLGSAVVLPGVEAAERAGVPAFLETSAPRNLPFYERLGFTVTADVEVPEGPRTWCMTRKPGA

SEQ ID NO: 17941 - protein, 631 aa, Artificial Sequence; identical to SEQ ID NO: 17914
  Synthetic Polypeptide

SEQ ID NO: 17942 - protein, 659 aa, Artificial Sequence
  Synthetic Polypeptide
MALPVTALLLPLALLLHAARPQVQLVESGGGLVQPGGSLRLSCAASGFTFTNHAMSWVRQAPGKGLELVSSISGNGRTTYYADSVKGRFTISRDISKNTLDLQMNSLRAEDTAVYYCAKDGGETLVDSRGQGTLVTVSSLEGSGRADCGFTSESYQQGVLSATILYEILLGKATLYAVLVSALVLMAMVKRKDSRGRAKRSGSGATNFSLLKQAGDVEENPGPTSMDWIWRILFLVGAATGAHSFEVQVLESGGGLVQPGGSLRLSCAASGFTFSNFAMSWVRQAPGKGLEWVSTISGSAGTTDYADSVKGRFTISRDNSKKTLYLQMNSLRVEDTAVYYCADGRGPFFDYRGQGTLVTVSSTRGSIPEDTFFPSPESSCDVKLVEKSFETDTNLNFQNLSVIGFRILLLKVAGFNLLMTLRLWSSRAKRSGSGVKQTLNFDLLKLAGDVESNPGPSRGHMTEYKPTVRLATRDDVPRAVRTLAAAFADYPATRHTVDPDRHIERVTELQELFLTRVGLDIGKVWVADDGAAVAVWTTPESVEAGAVFAEIGPRMAELSGSRLAAQQQMEGLLAPHRPKEPAWFLATVGVSPDHQGKGLGSAVVLPGVEAAERAGVPAFLETSAPRNLPFYERLGFTVTADVEVPEGPRTWCMTRKPGA

SEQ ID NO: 17943 - protein, 426 aa, Artificial Sequence
  Synthetic Polypeptide
MALPVTALLLPLALLLHAARPQVQLVESGGGLVQPGGSLRLSCAASGFTFTNHAMSWVRQAPGKGLELVSSISGNGRTTYYADSVKGRFTISRDISKNTLDLQMNSLRAEDTAVYYCAKDGGETLVDSRGQGTLVTVSSLEGSGRADCGFTSESYQQGVLSATILYEILLGKATLYAVLVSALVLMAMVKRKDSRGRAKRSGSGATNFSLLKQAGDVEENPGPTSMDWIWRILFLVGAATGAHSFEVQVLESGGGLVQPGGSLRLSCAASGFTFSNFAMSWVRQAPGKGLEWVSTISGSAGTTDYADSVKGRFTISRDNSKKTLYLQMNSLRVEDTAVYYCADGRGPFFDYRGQGTLVTVSSTRGSIPEDTFFPSPESSCDVKLVEKSFETDTNLNFQNLSVIGFRILLLKVAGFNLLMTLRLWSS

SEQ ID NO: 17944 - protein, 668 aa, Artificial Sequence
  Synthetic Polypeptide
MALPVTALLLPLALLLHAARPQVQLVESGGGLVQPGGSLRLSCAASGFTFTNHAMSWVRQAPGKGLELVSSISGNGRTTYYADSVKGRFTISRDISKNTLDLQMNSLRAEDTAVYYCAKDGGETLVDSRGQGTLVTVSSLEDKTHTCPPCPAGRADCGFTSESYQQGVLSATILYEILLGKATLYAVLVSALVLMAMVKRKDSRGRAKRSGSGATNFSLLKQAGDVEENPGPTSMDWIWRILFLVGAATGAHSFEVQVLESGGGLVQPGGSLRLSCAASGFTFSNFAMSWVRQAPGKGLEWVSTISGSAGTTDYADSVKGRFTISRDNSKKTLYLQMNSLRVEDTAVYYCADGRGPFFDYRGQGTLVTVSSTRGSIPEDTFFPSPESSCDVKLVEKSFETDTNLNFQNLSVIGFRILLLKVAGFNLLMTLRLWSSRAKRSGSGVKQTLNFDLLKLAGDVESNPGPSRGHMTEYKPTVRLATRDDVPRAVRTLAAAFADYPATRHTVDPDRHIERVTELQELFLTRVGLDIGKVWVADDGAAVAVWTTPESVEAGAVFAEIGPRMAELSGSRLAAQQQMEGLLAPHRPKEPAWFLATVGVSPDHQGKGLGSAVVLPGVEAAERAGVPAFLETSAPRNLPFYERLGFTVTADVEVPEGPRTWCMTRKPGA

SEQ ID NO: 17945 - protein, 668 aa, Artificial Sequence
  Synthetic Polypeptide
MALPVTALLLPLALLLHAARPQVQLVESGGGLVQPGGSLRLSCAASGFTFTNHAMSWVRQAPGKGLELVSSISGNGRTTYYADSVKGRFTISRDISKNTLDLQMNSLRAEDTAVYYCAKDGGETLVDSRGQGTLVTVSSLEGSGRADCGFTSESYQQGVLSATILYEILLGKATLYAVLVSALVLMAMVKRKDSRGRAKRSGSGATNFSLLKQAGDVEENPGPTSMDWIWRILFLVGAATGAHSFEVQVLESGGGLVQPGGSLRLSCAASGFTFSNFAMSWVRQAPGKGLEWVSTISGSAGTTDYADSVKGRFTISRDNSKKTLYLQMNSLRVEDTAVYYCADGRGPFFDYRGQGTLVTVSSTRDKTHTCPPCPAIPEDTFFPSPESSCDVKLVEKSFETDTNLNFQNLSVIGFRILLLKVAGFNLLMTLRLWSSRAKRSGSGVKQTLNFDLLKLAGDVESNPGPSRGHMTEYKPTVRLATRDDVPRAVRTLAAAFADYPATRHTVDPDRHIERVTELQELFLTRVGLDIGKVWVADDGAAVAVWTTPESVEAGAVFAEIGPRMAELSGSRLAAQQQMEGLLAPHRPKEPAWFLATVGVSPDHQGKGLGSAVVLPGVEAAERAGVPAFLETSAPRNLPFYERLGFTVTADVEVPEGPRTWCMTRKPGA

SEQ ID NO: 17946 - protein, 677 aa, Artificial Sequence
  Synthetic Polypeptide
MALPVTALLLPLALLLHAARPQVQLVESGGGLVQPGGSLRLSCAASGFTFTNHAMSWVRQAPGKGLELVSSISGNGRTTYYADSVKGRFTISRDISKNTLDLQMNSLRAEDTAVYYCAKDGGETLVDSRGQGTLVTVSSLEDKTHTCPPCPAGRADCGFTSESYQQGVLSATILYEILLGKATLYAVLVSALVLMAMVKRKDSRGRAKRSGSGATNFSLLKQAGDVEENPGPTSMDWIWRILFLVGAATGAHSFEVQVLESGGGLVQPGGSLRLSCAASGFTFSNFAMSWVRQAPGKGLEWVSTISGSAGTTDYADSVKGRFTISRDNSKKTLYLQMNSLRVEDTAVYYCADGRGPFFDYRGQGTLVTVSSTRDKTHTCPPCPAIPEDTFFPSPESSCDVKLVEKSFETDTNLNFQNLSVIGFRILLLKVAGFNLLMTLRLWSSRAKRSGSGVKQTLNFDLLKLAGDVESNPGPSRGHMTEYKPTVRLATRDDVPRAVRTLAAAFADYPATRHTVDPDRHIERVTELQELFLTRVGLDIGKVWVADDGAAVAVWTTPESVEAGAVFAEIGPRMAELSGSRLAAQQQMEGLLAPHRPKEPAWFLATVGVSPDHQGKGLGSAVVLPGVEAAERAGVPAFLETSAPRNLPFYERLGFTVTADVEVPEGPRTWCMTRKPGA

SEQ ID NO: 17947 - protein, 444 aa, Artificial Sequence
  Synthetic Polypeptide
MALPVTALLLPLALLLHAARPQVQLVESGGGLVQPGGSLRLSCAASGFTFTNHAMSWVRQAPGKGLELVSSISGNGRTTYYADSVKGRFTISRDISKNTLDLQMNSLRAEDTAVYYCAKDGGETLVDSRGQGTLVTVSSLEDKTHTCPPCPAGRADCGFTSESYQQGVLSATILYEILLGKATLYAVLVSALVLMAMVKRKDSRGRAKRSGSGATNFSLLKQAGDVEENPGPTSMDWIWRILFLVGAATGAHSFEVQVLESGGGLVQPGGSLRLSCAASGFTFSNFAMSWVRQAPGKGLEWVSTISGSAGTTDYADSVKGRFTISRDNSKKTLYLQMNSLRVEDTAVYYCADGRGPFFDYRGQGTLVTVSSTRDKTHTCPPCPAIPEDTFFPSPESSCDVKLVEKSFETDTNLNFQNLSVIGFRILLLKVAGFNLLMTLRLWSS

SEQ ID NO: 17948 - protein, 435 aa, Artificial Sequence
  Synthetic Polypeptide
MALPVTALLLPLALLLHAARPQVQLVESGGGLVQPGGSLRLSCAASGFTFTNHAMSWVRQAPGKGLELVSSISGNGRTTYYADSVKGRFTISRDISKNTLDLQMNSLRAEDTAVYYCAKDGGETLVDSRGQGTLVTVSSLEGSGRADCGFTSESYQQGVLSATILYEILLGKATLYAVLVSALVLMAMVKRKDSRGRAKRSGSGATNFSLLKQAGDVEENPGPTSMDWIWRILFLVGAATGAHSFEVQVLESGGGLVQPGGSLRLSCAASGFTFSNFAMSWVRQAPGKGLEWVSTISGSAGTTDYADSVKGRFTISRDNSKKTLYLQMNSLRVEDTAVYYCADGRGPFFDYRGQGTLVTVSSTRDKTHTCPPCPAIPEDTFFPSPESSCDVKLVEKSFETDTNLNFQNLSVIGFRILLLKVAGFNLLMTLRLWSS

SEQ ID NO: 17949 - protein, 886 aa, Artificial Sequence
  Synthetic Polypeptide
MALPVTALLLPLALLLHAARPQVQLVESGGGLVQPGGSLRLSCAASGFTFTNHAMSWVRQAPGKGLELVSSISGNGRTTYYADSVKGRFTISRDISKNTLDLQMNSLRAEDTAVYYCAKDGGETLVDSRGQGTLVTVSSLEGQPKANPTVTLFPPSSEELQANKATLVCLISDFYPGAVTVAWKADGSPVKAGVETTKPSKQSNNKYAASSYLSLTPEQWKSHRSYSCQVTHEGSTVEKTVAPTECSPIKTDVITMDPKDNCSKDANDTLLLQLTNTSAYYMYLLLLLKSVVYFAIITCCLLRRTAFCCNGEKSRAKRSGSGATNFSLLKQAGDVEENPGPTSMDWIWRILFLVGAATGAHSFEVQVLESGGGLVQPGGSLRLSCAASGFTFSNFAMSWVRQAPGKGLEWVSTISGSAGTTDYADSVKGRFTISRDNSKKTLYLQMNSLRVEDTAVYYCADGRGPFFDYRGQGTLVTVSSTRASTKGPSVFPLAPSSKSTSGGTAALGCLVKDYFPEPVTVSWNSGALTSGVHTFPAVLQSSGLYSLSSVVTVPSSSLGTQTYICNVNHKPSNTKVDKRVEPKSCEVKTDSTDHVKPKETENTKQPSKSCHKPKAIVHTEKVNMMSLTVLGLRMLFAKTVAVNFLLTAKLFFLRAKRSGSGVKQTLNFDLLKLAGDVESNPGPSRGHMTEYKPTVRLATRDDVPRAVRTLAAAFADYPATRHTVDPDRHIERVTELQELFLTRVGLDIGKVWVADDGAAVAVWTTPESVEAGAVFAEIGPRMAELSGSRLAAQQQMEGLLAPHRPKEPAWFLATVGVSPDHQGKGLGSAVVLPGVEAAERAGVPAFLETSAPRNLPFYERLGFTVTADVEVPEGPRTWCMTRKPGA

SEQ ID NO: 17950 - protein, 653 aa, Artificial Sequence; identical to SEQ ID NO: 17912
  Synthetic Polypeptide

SEQ ID NO: 17951 - protein, 681 aa, Artificial Sequence
  Synthetic Polypeptide
MALPVTALLLPLALLLHAARPQVQLVESGGGLVQPGGSLRLSCAASGFTFTNHAMSWVRQAPGKGLELVSSISGNGRTTYYADSVKGRFTISRDISKNTLDLQMNSLRAEDTAVYYCAKDGGETLVDSRGQGTLVTVSSLEGSPIKTDVITMDPKDNCSKDANDTLLLQLTNTSAYYMYLLLLLKSVVYFAIITCCLLRRTAFCCNGEKSRAKRSGSGATNFSLLKQAGDVEENPGPTSMDWIWRILFLVGAATGAHSFEVQVLESGGGLVQPGGSLRLSCAASGFTFSNFAMSWVRQAPGKGLEWVSTISGSAGTTDYADSVKGRFTISRDNSKKTLYLQMNSLRVEDTAVYYCADGRGPFFDYRGQGTLVTVSSTRGSEVKTDSTDHVKPKETENTKQPSKSCHKPKAIVHTEKVNMMSLTVLGLRMLFAKTVAVNFLLTAKLFFLRAKRSGSGVKQTLNFDLLKLAGDVESNPGPSRGHMTEYKPTVRLATRDDVPRAVRTLAAAFADYPATRHTVDPDRHIERVTELQELFLTRVGLDIGKVWVADDGAAVAVWTTPESVEAGAVFAEIGPRMAELSGSRLAAQQQMEGLLAPHRPKEPAWFLATVGVSPDHQGKGLGSAVVLPGVEAAERAGVPAFLETSAPRNLPFYERLGFTVTADVEVPEGPRTWCMTRKPGA

SEQ ID NO: 17952 - protein, 448 aa, Artificial Sequence
  Synthetic Polypeptide
MALPVTALLLPLALLLHAARPQVQLVESGGGLVQPGGSLRLSCAASGFTFTNHAMSWVRQAPGKGLELVSSISGNGRTTYYADSVKGRFTISRDISKNTLDLQMNSLRAEDTAVYYCAKDGGETLVDSRGQGTLVTVSSLEGSPIKTDVITMDPKDNCSKDANDTLLLQLTNTSAYYMYLLLLLKSVVYFAIITCCLLRRTAFCCNGEKSRAKRSGSGATNFSLLKQAGDVEENPGPTSMDWIWRILFLVGAATGAHSFEVQVLESGGGLVQPGGSLRLSCAASGFTFSNFAMSWVRQAPGKGLEWVSTISGSAGTTDYADSVKGRFTISRDNSKKTLYLQMNSLRVEDTAVYYCADGRGPFFDYRGQGTLVTVSSTRGSEVKTDSTDHVKPKETENTKQPSKSCHKPKAIVHTEKVNMMSLTVLGLRMLFAKTVAVNFLLTAKLFFL

SEQ ID NO: 17953 - protein, 690 aa, Artificial Sequence
  Synthetic Polypeptide
MALPVTALLLPLALLLHAARPQVQLVESGGGLVQPGGSLRLSCAASGFTFTNHAMSWVRQAPGKGLELVSSISGNGRTTYYADSVKGRFTISRDISKNTLDLQMNSLRAEDTAVYYCAKDGGETLVDSRGQGTLVTVSSLEDKTHTCPPCPAPIKTDVITMDPKDNCSKDANDTLLLQLTNTSAYYMYLLLLLKSVVYFAIITCCLLRRTAFCCNGEKSRAKRSGSGATNFSLLKQAGDVEENPGPTSMDWIWRILFLVGAATGAHSFEVQVLESGGGLVQPGGSLRLSCAASGFTFSNFAMSWVRQAPGKGLEWVSTISGSAGTTDYADSVKGRFTISRDNSKKTLYLQMNSLRVEDTAVYYCADGRGPFFDYRGQGTLVTVSSTRGSEVKTDSTDHVKPKETENTKQPSKSCHKPKAIVHTEKVNMMSLTVLGLRMLFAKTVAVNFLLTAKLFFLRAKRSGSGVKQTLNFDLLKLAGDVESNPGPSRGHMTEYKPTVRLATRDDVPRAVRTLAAAFADYPATRHTVDPDRHIERVTELQELFLTRVGLDIGKVWVADDGAAVAVWTTPESVEAGAVFAEIGPRMAELSGSRLAAQQQMEGLLAPHRPKEPAWFLATVGVSPDHQGKGLGSAVVLPGVEAAERAGVPAFLETSAPRNLPFYERLGFTVTADVEVPEGPRTWCMTRKPGA

SEQ ID NO: 17954 - protein, 690 aa, Artificial Sequence
  Synthetic Polypeptide
MALPVTALLLPLALLLHAARPQVQLVESGGGLVQPGGSLRLSCAASGFTFTNHAMSWVRQAPGKGLELVSSISGNGRTTYYADSVKGRFTISRDISKNTLDLQMNSLRAEDTAVYYCAKDGGETLVDSRGQGTLVTVSSLEGSPIKTDVITMDPKDNCSKDANDTLLLQLTNTSAYYMYLLLLLKSVVYFAIITCCLLRRTAFCCNGEKSRAKRSGSGATNFSLLKQAGDVEENPGPTSMDWIWRILFLVGAATGAHSFEVQVLESGGGLVQPGGSLRLSCAASGFTFSNFAMSWVRQAPGKGLEWVSTISGSAGTTDYADSVKGRFTISRDNSKKTLYLQMNSLRVEDTAVYYCADGRGPFFDYRGQGTLVTVSSTRDKTHTCPPCPAEVKTDSTDHVKPKETENTKQPSKSCHKPKAIVHTEKVNMMSLTVLGLRMLFAKTVAVNFLLTAKLFFLRAKRSGSGVKQTLNFDLLKLAGDVESNPGPSRGHMTEYKPTVRLATRDDVPRAVRTLAAAFADYPATRHTVDPDRHIERVTELQELFLTRVGLDIGKVWVADDGAAVAVWTTPESVEAGAVFAEIGPRMAELSGSRLAAQQQMEGLLAPHRPKEPAWFLATVGVSPDHQGKGLGSAVVLPGVEAAERAGVPAFLETSAPRNLPFYERLGFTVTADVEVPEGPRTWCMTRKPGA

SEQ ID NO: 17955 - protein, 699 aa, Artificial Sequence
  Synthetic Polypeptide
MALPVTALLLPLALLLHAARPQVQLVESGGGLVQPGGSLRLSCAASGFTFTNHAMSWVRQAPGKGLELVSSISGNGRTTYYADSVKGRFTISRDISKNTLDLQMNSLRAEDTAVYYCAKDGGETLVDSRGQGTLVTVSSLEDKTHTCPPCPAPIKTDVITMDPKDNCSKDANDTLLLQLTNTSAYYMYLLLLLKSVVYFAIITCCLLRRTAFCCNGEKSRAKRSGSGATNFSLLKQAGDVEENPGPTSMDWIWRILFLVGAATGAHSFEVQVLESGGGLVQPGGSLRLSCAASGFTFSNFAMSWVRQAPGKGLEWVSTISGSAGTTDYADSVKGRFTISRDNSKKTLYLQMNSLRVEDTAVYYCADGRGPFFDYRGQGTLVTVSSTRDKTHTCPPCPAEVKTDSTDHVKPKETENTKQPSKSCHKPKAIVHTEKVNMMSLTVLGLRMLFAKTVAVNFLLTAKLFFLRAKRSGSGVKQTLNFDLLKLAGDVESNPGPSRGHMTEYKPTVRLATRDDVPRAVRTLAAAFADYPATRHTVDPDRHIERVTELQELFLTRVGLDIGKVWVADDGAAVAVWTTPESVEAGAVFAEIGPRMAELSGSRLAAQQQMEGLLAPHRPKEPAWFLATVGVSPDHQGKGLGSAVVLPGVEAAERAGVPAFLETSAPRNLPFYERLGFTVTADVEVPEGPRTWCMTRKPGA

SEQ ID NO: 17956 - protein, 466 aa, Artificial Sequence
  Synthetic Polypeptide
MALPVTALLLPLALLLHAARPQVQLVESGGGLVQPGGSLRLSCAASGFTFTNHAMSWVRQAPGKGLELVSSISGNGRTTYYADSVKGRFTISRDISKNTLDLQMNSLRAEDTAVYYCAKDGGETLVDSRGQGTLVTVSSLEDKTHTCPPCPAPIKTDVITMDPKDNCSKDANDTLLLQLTNTSAYYMYLLLLLKSVVYFAIITCCLLRRTAFCCNGEKSRAKRSGSGATNFSLLKQAGDVEENPGPTSMDWIWRILFLVGAATGAHSFEVQVLESGGGLVQPGGSLRLSCAASGFTFSNFAMSWVRQAPGKGLEWVSTISGSAGTTDYADSVKGRFTISRDNSKKTLYLQMNSLRVEDTAVYYCADGRGPFFDYRGQGTLVTVSSTRDKTHTCPPCPAEVKTDSTDHVKPKETENTKQPSKSCHKPKAIVHTEKVNMMSLTVLGLRMLFAKTVAVNFLLTAKLFFL

SEQ ID NO: 17957 - protein, 726 aa, Artificial Sequence
  Synthetic Polypeptide
MALPVTALLLPLALLLHAARPEVQLVESGGGLVQAGGSLRLSCAASGRTFSMGWFRQAPGKEREFVAAITYSGGSPYYADSVKGRFTISRDNAKNTVYLQMNSLKPEDTAVYYCAANPTYGSDWNAENWGQGTQVTVSSLESGGGGSFEEVQLVESGGGLVQPGGSLRLSCAASGFSFSDFWMSWVRQAPGKGLEWVATISQAGSEKDYVDSVKGRFTISRDNAKKSLYLQMNSLRAEDTAVYYCASGVYSFDYRGQGTLVTVSSTREQKLISEEDLAKPTTTPAPRPPTPAPTIASQPLSLRPEACRPAAGGAVHTRGLDFACDIYIWAPLAGTCGVLLLSLVITLYCKRGRKKLLYIFKQPFMRPVQTTQEEDGCSCRFPEEEEGGCELRVKFSRSADAPAYQQGQNQLYNELNLGRREEYDVLDKRRGRDPEMGGKPRRKNPQEGLYNELQKDKMAEAYSEIGMKGERRRGKGHDGLYQGLSTATKDTYDALHMQALPPRSSGSGEGRGSLLTCGDVEENPGPHMTEYKPTVRLATRDDVPRAVRTLAAAFADYPATRHTVDPDRHIERVTELQELFLTRVGLDIGKVWVADDGAAVAVWTTPESVEAGAVFAEIGPRMAELSGSRLAAQQQMEGLLAPHRPKEPAWFLATVGVSPDHQGKGLGSAVVLPGVEAAERAGVPAFLETSAPRNLPFYERLGFTVTADVEVPEGPRTWCMTRKPGA

SEQ ID NO: 17958 - protein, 720 aa, Artificial Sequence
  Synthetic Polypeptide
MALPVTALLLPLALLLHAARPEVQLVESGGGLVQAGGSLRLSCAASGRTFSMGWFRQAPGKEREFVAAITYSGGSPYYADSVKGRFTISRDNAKNTVYLQMNSLKPEDTAVYYCAANPTYGSDWNAENWGQGTQVTVSSLESGGGGSFEEVQLVESGGGLVQPGGSLRLSCAASGFSFSDFWMSWVRQAPGKGLEWVATISQAGSEKDYVDSVKGRFTISRDNAKKSLYLQMNSLRAEDTAVYYCASGVYSFDYRGQGTLVTVSSTREQKLISEEDLKIEVMYPPPYLDNEKSNGTIIHVKGKHLCPSPLFPGPSKPFWVLVVVGGVLACYSLLVTVAFIIFWVRSKRSRLLHSDYMNMTPRRPGPTRKHYQPYAPPRDFAAYRSRVKFSRSADAPAYQQGQNQLYNELNLGRREEYDVLDKRRGRDPEMGGKPRRKNPQEGLYNELQKDKMAEAYSEIGMKGERRRGKGHDGLYQGLSTATKDTYDALHMQALPPRSSGSGEGRGSLLTCGDVEENPGPHMTEYKPTVRLATRDDVPRAVRTLAAAFADYPATRHTVDPDRHIERVTELQELFLTRVGLDIGKVWVADDGAAVAVWTTPESVEAGAVFAEIGPRMAELSGSRLAAQQQMEGLLAPHRPKEPAWFLATVGVSPDHQGKGLGSAVVLPGVEAAERAGVPAFLETSAPRNLPFYERLGFTVTADVEVPEGPRTWCMTRKPGA

SEQ ID NO: 17959 - protein, 497 aa, Artificial Sequence
  Synthetic Polypeptide
MALPVTALLLPLALLLHAARPEVQLVESGGGLVQAGGSLRLSCAASGRTFSMGWFRQAPGKEREFVAAITYSGGSPYYADSVKGRFTISRDNAKNTVYLQMNSLKPEDTAVYYCAANPTYGSDWNAENWGQGTQVTVSSLESGGGGSFEEVQLVESGGGLVQPGGSLRLSCAASGFSFSDFWMSWVRQAPGKGLEWVATISQAGSEKDYVDSVKGRFTISRDNAKKSLYLQMNSLRAEDTAVYYCASGVYSFDYRGQGTLVTVSSTREQKLISEEDLKIEVMYPPPYLDNEKSNGTIIHVKGKHLCPSPLFPGPSKPFWVLVVVGGVLACYSLLVTVAFIIFWVRSKRSRLLHSDYMNMTPRRPGPTRKHYQPYAPPRDFAAYRSRVKFSRSADAPAYQQGQNQLYNELNLGRREEYDVLDKRRGRDPEMGGKPRRKNPQEGLYNELQKDKMAEAYSEIGMKGERRRGKGHDGLYQGLSTATKDTYDALHMQALPPR

SEQ ID NO: 17960 - protein, 503 aa, Artificial Sequence
  Synthetic Polypeptide
MALPVTALLLPLALLLHAARPEVQLVESGGGLVQAGGSLRLSCAASGRTFSMGWFRQAPGKEREFVAAITYSGGSPYYADSVKGRFTISRDNAKNTVYLQMNSLKPEDTAVYYCAANPTYGSDWNAENWGQGTQVTVSSLESGGGGSFEEVQLVESGGGLVQPGGSLRLSCAASGFSFSDFWMSWVRQAPGKGLEWVATISQAGSEKDYVDSVKGRFTISRDNAKKSLYLQMNSLRAEDTAVYYCASGVYSFDYRGQGTLVTVSSTREQKLISEEDLAKPTTTPAPRPPTPAPTIASQPLSLRPEACRPAAGGAVHTRGLDFACDIYIWAPLAGTCGVLLLSLVITLYCKRGRKKLLYIFKQPFMRPVQTTQEEDGCSCRFPEEEEGGCELRVKFSRSADAPAYQQGQNQLYNELNLGRREEYDVLDKRRGRDPEMGGKPRRKNPQEGLYNELQKDKMAEAYSEIGMKGERRRGKGHDGLYQGLSTATKDTYDALHMQALPPR

SEQ ID NO: 17961 - protein, 504 aa, Artificial Sequence
  Synthetic Polypeptide
MALPVTALLLPLALLLHAARPEEVQLVESGGGLVQPGGSLRLSCAASGFSFSDFWMSWVRQAPGKGLEWVATISQAGSEKDYVDSVKGRFTISRDNAKKSLYLQMNSLRAEDTAVYYCASGVYSFDYRGQGTLVTVSSLESGGGGSFEEVQLVESGGGLVQAGGSLRLSCAASGRTFSMGWFRQAPGKEREFVAAITYSGGSPYYADSVKGRFTISRDNAKNTVYLQMNSLKPEDTAVYYCAANPTYGSDWNAENWGQGTQVTVSSTREQKLISEEDLAKPTTTPAPRPPTPAPTIASQPLSLRPEACRPAAGGAVHTRGLDFACDIYIWAPLAGTCGVLLLSLVITLYCKRGRKKLLYIFKQPFMRPVQTTQEEDGCSCRFPEEEEGGCELRVKFSRSADAPAYQQGQNQLYNELNLGRREEYDVLDKRRGRDPEMGGKPRRKNPQEGLYNELQKDKMAEAYSEIGMKGERRRGKGHDGLYQGLSTATKDTYDALHMQALPPR

SEQ ID NO: 17962 - protein, 916 aa, Artificial Sequence
  Synthetic Polypeptide
MALPVTALLLPLALLLHAARPEVQLVESGGGLVQAGGSLRLSCAASGRTFSMGWFRQAPGKEREFVAAITYSGGSPYYADSVKGRFTISRDNAKNTVYLQMNSLKPEDTAVYYCAANPTYGSDWNAENWGQGTQVTVSSLESGGGGSFEEVQLVESGGGLVQPGGSLRLSCAASGFSFSDFWMSWVRQAPGKGLEWVATISQAGSEKDYVDSVKGRFTISRDNAKKSLYLQMNSLRAEDTAVYYCASGVYSFDYRGQGTLVTVSSTREQKLISEEDLAKPTTTPAPRPPTPAPTIASQPLSLRPEACRPAAGGAVHTRGLDFACDIYIWAPLAGTCGVLLLSLVITLYCGRARVKFSRSADAPAYQQGQNQLYNELNLGRREEYDVLDKRRGRDPEMGGKPRRKNPQEGLYNELQKDKMAEAYSEIGMKGERRRGKGHDGLYQGLSTATKDTYDALHMQALPPRSRGSGATNFSLLKQAGDVEENPGPGIHMATYEVLCEVARKLGTDDREVVLFLLNVFIPQPTLAQLIGALRALKEEGRLTFPLLAECLFRAGRRDLLRDLLHLDPRFLERHLAGTMSYFSPYQLTVLHVDGELCARDIRSLIFLSKDTIGSRSTPQTFLHWVYCMENLDLLGPTDVDALMSMLRSLSRVDLQRQVQTLMGLHLSGPSHSQHYRHTPLETDFYDYKDDDDKTSGSGEGRGSLLTCGDVEENPGPHMTEYKPTVRLATRDDVPRAVRTLAAAFADYPATRHTVDPDRHIERVTELQELFLTRVGLDIGKVWVADDGAAVAVWTTPESVEAGAVFAEIGPRMAELSGSRLAAQQQMEGLLAPHRPKEPAWFLATVGVSPDHQGKGLGSAVVLPGVEAAERAGVPAFLETSAPRNLPFYERLGFTVTADVEVPEGPRTWCMTRKPGA

SEQ ID NO: 17963 - protein, 861 aa, Artificial Sequence
  Synthetic Polypeptide
MALPVTALLLPLALLLHAARPEVQLVESGGGLVQAGGSLRLSCAASGRTFSMGWFRQAPGKEREFVAAITYSGGSPYYADSVKGRFTISRDNAKNTVYLQMNSLKPEDTAVYYCAANPTYGSDWNAENWGQGTQVTVSSLEIQNPDPAVYQLRDSKSSDKSVCLFTDFDSQTNVSQSKDSDVYITDKCVLDMRSMDFKSNSAVAWSNKSDFACANAFNNSIIPEDTFFPSSDVPCDVKLVEKSFETDTNLNFQNLSVIGFRILLLKVAGFNLLMTLRLWSSRAKRSGSGVKQTLNFDLLKLAGDVESNPGPTSMDWIWRILFLVGAATGAHSFEEVQLVESGGGLVQPGGSLRLSCAASGFSFSDFWMSWVRQAPGKGLEWVATISQAGSEKDYVDSVKGRFTISRDNAKKSLYLQMNSLRAEDTAVYYCASGVYSFDYRGQGTLVTVSSTREDLKNVFPPEVAVFEPSKAEIAHTQKATLVCLATGFYPDHVELSWWVNGKEVHSGVCTDPQPLKEQPALNDSRYCLSSRLRVSATFWQNPRNHFRCQVQFYGLSENDEWTQDRAKPVTQIVSAEAWGRADCGITSASYHQGVLSATILYEILLGKATLYAVLVSALVLMAMVKRKDSRGRAKRSGSGATNFSLLKQAGDVEENPGPSRGHMTEYKPTVRLATRDDVPRAVRTLAAAFADYPATRHTVDPDRHIERVTELQELFLTRVGLDIGKVWVADDGAAVAVWTTPESVEAGAVFAEIGPRMAELSGSRLAAQQQMEGLLAPHRPKEPAWFLATVGVSPDHQGKGLGSAVVLPGVEAAERAGVPAFLETSAPRNLPFYERLGFTVTADVEVPEGPRTWCMTRKPGA

SEQ ID NO: 17964 - protein, 860 aa, Artificial Sequence
  Synthetic Polypeptide
MALPVTALLLPLALLLHAARPEVQLVESGGGLVQAGGSLRLSCAASGRTFSMGWFRQAPGKEREFVAAITYSGGSPYYADSVKGRFTISRDNAKNTVYLQMNSLKPEDTAVYYCAANPTYGSDWNAENWGQGTQVTVSSLEDLKNVFPPEVAVFEPSKAEIAHTQKATLVCLATGFYPDHVELSWWVNGKEVHSGVCTDPQPLKEQPALNDSRYCLSSRLRVSATFWQNPRNHFRCQVQFYGLSENDEWTQDRAKPVTQIVSAEAWGRADCGITSASYHQGVLSATILYEILLGKATLYAVLVSALVLMAMVKRKDSRGRAKRSGSGATNFSLLKQAGDVEENPGPTSMDWIWRILFLVGAATGAHSFEEVQLVESGGGLVQPGGSLRLSCAASGFSFSDFWMSWVRQAPGKGLEWVATISQAGSEKDYVDSVKGRFTISRDNAKKSLYLQMNSLRAEDTAVYYCASGVYSFDYRGQGTLVTVSSTRIQNPDPAVYQLRDSKSSDKSVCLFTDFDSQTNVSQSKDSDVYITDKCVLDMRSMDFKSNSAVAWSNKSDFACANAFNNSIIPEDTFFPSSDVPCDVKLVEKSFETDTNLNFQNLSVIGFRILLLKVAGFNLLMTLRLWSSRAKRSGSGVKQTLNFDLLKLAGDVESNPGPSRGHMTEYKPTVRLATRDDVPRAVRTLAAAFADYPATRHTVDPDRHIERVTELQELFLTRVGLDIGKVWVADDGAAVAVWTTPESVEAGAVFAEIGPRMAELSGSRLAAQQQMEGLLAPHRPKEPAWFLATVGVSPDHQGKGLGSAVVLPGVEAAERAGVPAFLETSAPRNLPFYERLGFTVTADVEVPEGPRTWCMTRKPGA

SEQ ID NO: 17965 - protein, 627 aa, Artificial Sequence
  Synthetic Polypeptide
MALPVTALLLPLALLLHAARPEVQLVESGGGLVQAGGSLRLSCAASGRTFSMGWFRQAPGKEREFVAAITYSGGSPYYADSVKGRFTISRDNAKNTVYLQMNSLKPEDTAVYYCAANPTYGSDWNAENWGQGTQVTVSSLEDLKNVFPPEVAVFEPSEAEISHTQKATLVCLATGFYPDHVELSWWVNGKEVHSGVCTDPQPLKEQPALNDSRYCLSSRLRVSATFWQNPRNHFRCQVQFYGLSENDEWTQDRAKPVTQIVSAEAWGRADCGFTSESYQQGVLSATILYEILLGKATLYAVLVSALVLMAMVKRKDSRGRAKRSGSGATNFSLLKQAGDVEENPGPTSMDWIWRILFLVGAATGAHSFEEVQLVESGGGLVQPGGSLRLSCAASGFSFSDFWMSWVRQAPGKGLEWVATISQAGSEKDYVDSVKGRFTISRDNAKKSLYLQMNSLRAEDTAVYYCASGVYSFDYRGQGTLVTVSSTRIQNPDPAVYQLRDSKSSDKSVCLFTDFDSQTNVSQSKDSDVYITDKCVLDMRSMDFKSNSAVAWSNKSDFACANAFNNSIIPEDTFFPSPESSCDVKLVEKSFETDTNLNFQNLSVIGFRILLLKVAGFNLLMTLRLWSS

SEQ ID NO: 17966 - protein, 852 aa, Artificial Sequence
  Synthetic Polypeptide
MALPVTALLLPLALLLHAARPEVQLVESGGGLVQAGGSLRLSCAASGRTFSMGWFRQAPGKEREFVAAITYSGGSPYYADSVKGRFTISRDNAKNTVYLQMNSLKPEDTAVYYCAANPTYGSDWNAENWGQGTQVTVSSLEDLKNVFPPEVAVFEPSEAEISHTQKATLVCLATGFYPDHVELSWWVNGKEVHSGVCTDPQPLKEQPALNDSRYCLSSRLRVSATFWQNPRNHFRCQVQFYGLSENDEWTQDRAKPVTQIVSAEAWGRADCGFTSESYQQGVLSATILYEILLGKATLYAVLVSALVLMAMVKRKDSRGRAKRSGSGATNFSLLKQAGDVEENPGPTSMDWIWRILFLVGAATGAHSFEEVQLVESGGGLVQPGGSLRLSCAASGFSFSDFWMSWVRQAPGKGLEWVATISQAGSEKDYVDSVKGRFTISRDNAKKSLYLQMNSLRAEDTAVYYCASGVYSFDYRGQGTLVTVSSTRIQNPDPAVYQLRDSKSSDKSVCLFTDFDSQTNVSQSKDSDVYITDKCVLDMRSMDFKSNSAVAWSNKSDFACANAFNNSIIPEDTFFPSPESSCDVKLVEKSFETDTNLNFQNLSVIGFRILLLKVAGFNLLMTLRLWSSRAKRSGSGVKQTLNFDLLKLAGDVESNPGPSRGGIHTMATYEVLCEVARKLGTDDREVVLFLLNVFIPQPTLAQLIGALRALKEEGRLTFPLLAECLFRAGRRDLLRDLLHLDPRFLERHLAGTMSYFSPYQLTVLHVDGELCARDIRSLIFLSKDTIGSRSTPQTFLHWVYCMENLDLLGPTDVDALMSMLRSLSRVDLQRQVQTLMGLHLSGPSHSQHYRHTP

SEQ ID NO: 17967 - protein, 631 aa, Artificial Sequence
  Synthetic Polypeptide
MALPVTALLLPLALLLHAARPEVQLVESGGGLVQAGGSLRLSCAASGRTFSMGWFRQAPGKEREFVAAITYSGGSPYYADSVKGRFTISRDNAKNTVYLQMNSLKPEDTAVYYCAANPTYGSDWNAENWGQGTQVTVSSLEIQNPDPAVYQLRDSKSSDKSVCLFTDFDSQTNVSQSKDSDVYITDKCVLDMRSMDFKSNSAVAWSNKSDFACANAFNNSIIPEDTFFPSPESSCDVKLVEKSFETDTNLNFQNLSVIGFRILLLKVAGFNLLMTLRLWSSRAKRSGSGVKQTLNFDLLKLAGDVESNPGPTSMDWIWRILFLVGAATGAHSFEEVQLVESGGGLVQPGGSLRLSCAASGFSFSDFWMSWVRQAPGKGLEWVATISQAGSEKDYVDSVKGRFTISRDNAKKSLYLQMNSLRAEDTAVYYCASGVYSFDYRGQGTLVTVSSTREDLKNVFPPEVAVFEPSEAEISHTQKATLVCLATGFYPDHVELSWWVNGKEVHSGVCTDPQPLKEQPALNDSRYCLSSRLRVSATFWQNPRNHFRCQVQFYGLSENDEWTQDRAKPVTQIVSAEAWGRADCGFTSESYQQGVLSATILYEILLGKATLYAVLVSALVLMAMVKRKDSRG

SEQ ID NO: 17968 - protein, 853 aa, Artificial Sequence
  Synthetic Polypeptide
MALPVTALLLPLALLLHAARPEVQLVESGGGLVQAGGSLRLSCAASGRTFSMGWFRQAPGKEREFVAAITYSGGSPYYADSVKGRFTISRDNAKNTVYLQMNSLKPEDTAVYYCAANPTYGSDWNAENWGQGTQVTVSSLEIQNPDPAVYQLRDSKSSDKSVCLFTDFDSQTNVSQSKDSDVYITDKCVLDMRSMDFKSNSAVAWSNKSDFACANAFNNSIIPEDTFFPSPESSCDVKLVEKSFETDTNLNFQNLSVIGFRILLLKVAGFNLLMTLRLWSSRAKRSGSGVKQTLNFDLLKLAGDVESNPGPTSMDWIWRILFLVGAATGAHSFEEVQLVESGGGLVQPGGSLRLSCAASGFSFSDFWMSWVRQAPGKGLEWVATISQAGSEKDYVDSVKGRFTISRDNAKKSLYLQMNSLRAEDTAVYYCASGVYSFDYRGQGTLVTVSSTREDLKNVFPPEVAVFEPSEAEISHTQKATLVCLATGFYPDHVELSWWVNGKEVHSGVCTDPQPLKEQPALNDSRYCLSSRLRVSATFWQNPRNHFRCQVQFYGLSENDEWTQDRAKPVTQIVSAEAWGRADCGFTSESYQQGVLSATILYEILLGKATLYAVLVSALVLMAMVKRKDSRGRAKRSGSGATNFSLLKQAGDVEENPGPSRGGIHTMATYEVLCEVARKLGTDDREVVLFLLNVFIPQPTLAQLIGALRALKEEGRLTFPLLAECLFRAGRRDLLRDLLHLDPRFLERHLAGTMSYFSPYQLTVLHVDGELCARDIRSLIFLSKDTIGSRSTPQTFLHWVYCMENLDLLGPTDVDALMSMLRSLSRVDLQRQVQTLMGLHLSGPSHSQHYRHTP

SEQ ID NO: 17969 - protein, 900 aa, Artificial Sequence
  Synthetic Polypeptide
MALPVTALLLPLALLLHAARPLEGKPIPNPLLGLDSTGSGEDLKNVFPPEVAVFEPSKAEIAHTQKATLVCLATGFYPDHVELSWWVNGKEVHSGVCTDPQPLKEQPALNDSRYCLSSRLRVSATFWQNPRNHFRCQVQFYGLSENDEWTQDRAKPVTQIVSAEAWGRADCGITSASYHQGVLSATILYEILLGKATLYAVLVSALVLMAMVKRKDSRGRAKRSGSGATNFSLLKQAGDVEENPGPTSMALPVTALLLPLALLLHAARPEVQLVESGGGLVQAGGSLRLSCAASGRTFSMGWFRQAPGKEREFVAAITYSGGSPYYADSVKGRFTISRDNAKNTVYLQMNSLKPEDTAVYYCAANPTYGSDWNAENWGQGTQVTVSSLESGGGGSFEEVQLVESGGGLVQPGGSLRLSCAASGFSFSDFWMSWVRQAPGKGLEWVATISQAGSEKDYVDSVKGRFTISRDNAKKSLYLQMNSLRAEDTAVYYCASGVYSFDYRGQGTLVTVSSTREQKLISEEDGSGIQNPDPAVYQLRDSKSSDKSVCLFTDFDSQTNVSQSKDSDVYITDKCVLDMRSMDFKSNSAVAWSNKSDFACANAFNNSIIPEDTFFPSSDVPCDVKLVEKSFETDTNLNFQNLSVIGFRILLLKVAGFNLLMTLRLWSSRAKRSGSGVKQTLNFDLLKLAGDVESNPGPSRGHMTEYKPTVRLATRDDVPRAVRTLAAAFADYPATRHTVDPDRHIERVTELQELFLTRVGLDIGKVWVADDGAAVAVWTTPESVEAGAVFAEIGPRMAELSGSRLAAQQQMEGLLAPHRPKEPAWFLATVGVSPDHQGKGLGSAVVLPGVEAAERAGVPAFLETSAPRNLPFYERLGFTVTADVEVPEGPRTWCMTRKPGA

SEQ ID NO: 17970 - protein, 901 aa, Artificial Sequence
  Synthetic Polypeptide
MALPVTALLLPLALLLHAARPLEQKLISEEDLGSGDRPDPAVYQLRDSKSSDKSVCLFTDFDSQTNVSQSKDSDVYITDKCVLDMRSMDFKSNSAVAWSNKSDFACANAFNNSIIPEDTFFPSPESSCDVKLVEKSFETDTNLNFQNLSVIGFRILLLKVAGFNLLMTLRLWSSSSRAKRSGSGVKQTLNFDLLKLAGDVESNPGPTSMALPVTALLLPLALLLHAARPEVQLVESGGGLVQAGGSLRLSCAASGRTFSMGWFRQAPGKEREFVAAITYSGGSPYYADSVKGRFTISRDNAKNTVYLQMNSLKPEDTAVYYCAANPTYGSDWNAENWGQGTQVTVSSLESGGGGSFEEVQLVESGGGLVQPGGSLRLSCAASGFSFSDFWMSWVRQAPGKGLEWVATISQAGSEKDYVDSVKGRFTISRDNAKKSLYLQMNSLRAEDTAVYYCASGVYSFDYRGQGTLVTVSSTRGKPIPNPLLGLDSTGSGEDLKNVFPPEVAVFEPSEAEISHTQKATLVCLATGFYPDHVELSWWVNGKEVHSGVCTDPQPLKEQPALNDSRYCLSSRLRVSATFWQNPRNHFRCQVQFYGLSENDEWTQDRAKPVTQIVSAEAWGRADCGFTSESYQQGVLSATILYEILLGKATLYAVLVSALVLMAMVKRKDSRGRAKRSGSGATNFSLLKQAGDVEENPGPSRGHMTEYKPTVRLATRDDVPRAVRTLAAAFADYPATRHTVDPDRHIERVTELQELFLTRVGLDIGKVWVADDGAAVAVWTTPESVEAGAVFAEIGPRMAELSGSRLAAQQQMEGLLAPHRPKEPAWFLATVGVSPDHQGKGLGSAVVLPGVEAAERAGVPAFLETSAPRNLPFYERLGFTVTADVEVPEGPRTWCMTRKPGA

SEQ ID NO: 17971 - protein, 860 aa, Artificial Sequence
  Synthetic Polypeptide
MALPVTALLLPLALLLHAARPEVQLVESGGGLVQAGGSLRLSCAASGRTFSMGWFRQAPGKEREFVAAITYSGGSPYYADSVKGRFTISRDNAKNTVYLQMNSLKPEDTAVYYCAANPTYGSDWNAENWGQGTQVTVSSLEDLKNVFPPEVAVFEPSEAEISHTQKATLVCLATGFYPDHVELSWWVNGKEVHSGVSTDPQPLKEQPALNDSRYCLSSRLRVSATFWQNPRNHFRCQVQFYGLSENDEWTQDRAKPVTQIVSAEAWGRADCGFTSESYQQGVLSATILYEILLGKATLYAVLVSALVLMAMVKRKDSRGRAKRSGSGATNFSLLKQAGDVEENPGPTSMDWIWRILFLVGAATGAHSFEEVQLVESGGGLVQPGGSLRLSCAASGFSFSDFWMSWVRQAPGKGLEWVATISQAGSEKDYVDSVKGRFTISRDNAKKSLYLQMNSLRAEDTAVYYCASGVYSFDYRGQGTLVTVSSTRIQNPDPAVYQLRDSKSSDKSVCLFTDFDSQTNVSQSKDSDVYITDKTVLDMRSMDFKSNSAVAWSNKSDFACANAFNNSIIPEDTFFPSPESSCDVKLVEKSFETDTNLNFQNLSVIGFRILLLKVAGFNLLMTLRLWSSRAKRSGSGVKQTLNFDLLKLAGDVESNPGPSRGHMTEYKPTVRLATRDDVPRAVRTLAAAFADYPATRHTVDPDRHIERVTELQELFLTRVGLDIGKVWVADDGAAVAVWTTPESVEAGAVFAEIGPRMAELSGSRLAAQQQMEGLLAPHRPKEPAWFLATVGVSPDHQGKGLGSAVVLPGVEAAERAGVPAFLETSAPRNLPFYERLGFTVTADVEVPEGPRTWCMTRKPGA

SEQ ID NO: 17972 - protein, 942 aa, Artificial Sequence
  Synthetic Polypeptide
MALPVTALLLPLALLLHAARPEVQLVESGGGLVQAGGSLRLSCAASGRTFSMGWFRQAPGKEREFVAAITYSGGSPYYADSVKGRFTISRDNAKNTVYLQMNSLKPEDTAVYYCAANPTYGSDWNAENWGQGTQVTVSSLEDLKNVFPPEVAVFEPSEAEISHTQKATLVCLATGFYPDHVELSWWVNGKEVHSGVSTDPQPLKEQPALNDSRYCLSSRLRVSATFWQNPRNHFRCQVQFYGLSENDEWTQDRAKPVTQIVSAEAWGRADCGFTSESYQQGVLSATILYEILLGKATLYAVLVSALVLMAMVKRKDSRGRAKRSGSGATNFSLLKQAGDVEENPGPTSMDWIWRILFLVGAATGAHSFEEVQLVESGGGLVQPGGSLRLSCAASGFSFSDFWMSWVRQAPGKGLEWVATISQAGSEKDYVDSVKGRFTISRDNAKKSLYLQMNSLRAEDTAVYYCASGVYSFDYRGQGTLVTVSSTREQKLISEEDGSGTPFPSLAPPIMLLVDGKQQMVVVCLVLDVAPPGLDSPIWFSAGNGSALDAFTYGPSPATDGTWTNLAHLSLPSEELASWEPLVCHTGPGAEGHSRSTQPMHLSGEASTARTCPQEPLRGTPGGALWLGVLRLLLFKLLLFDLLLTCSCLCDPAGPLPSPATTTRLRALGSHRLHPATETGGREATSSPRPQPRDRRWGDTPPGRKPGSPVRAKRSGSGVKQTLNFDLLKLAGDVESNPGPSRGHMTEYKPTVRLATRDDVPRAVRTLAAAFADYPATRHTVDPDRHIERVTELQELFLTRVGLDIGKVWVADDGAAVAVWTTPESVEAGAVFAEIGPRMAELSGSRLAAQQQMEGLLAPHRPKEPAWFLATVGVSPDHQGKGLGSAVVLPGVEAAERAGVPAFLETSAPRNLPFYERLGFTVTADVEVPEGPRTWCMTRKPGA

SEQ ID NO: 17973 - protein, 955 aa, Artificial Sequence
  Synthetic Polypeptide
MALPVTALLLPLALLLHAARPLEDLKNVFPPEVAVFEPSEAEISHTQKATLVCLATGFYPDHVELSWWVNGKEVHSGVSTDPQPLKEQPALNDSRYCLSSRLRVSATFWQNPRNHFRCQVQFYGLSENDEWTQDRAKPVTQIVSAEAWGRADCGFTSESYQQGVLSATILYEILLGKATLYAVLVSALVLMAMVKRKDSRGRAKRSGSGATNFSLLKQAGDVEENPGPTSMALPVTALLLPLALLLHAARPEVQLVESGGGLVQAGGSLRLSCAASGRTFSMGWFRQAPGKEREFVAAITYSGGSPYYADSVKGRFTISRDNAKNTVYLQMNSLKPEDTAVYYCAANPTYGSDWNAENWGQGTQVTVSSLESGGGGSFEEVQLVESGGGLVQPGGSLRLSCAASGFSFSDFWMSWVRQAPGKGLEWVATISQAGSEKDYVDSVKGRFTISRDNAKKSLYLQMNSLRAEDTAVYYCASGVYSFDYRGQGTLVTVSSTREQKLISEEDLGSGTPFPSLAPPIMLLVDGKQQMVVVCLVLDVAPPGLDSPIWFSAGNGSALDAFTYGPSPATDGTWTNLAHLSLPSEELASWEPLVCHTGPGAEGHSRSTQPMHLSGEASTARTCPQEPLRGTPGGALWLGVLRLLLFKLLLFDLLLTCSCLCDPAGPLPSPATTTRLRALGSHRLHPATETGGREATSSPRPQPRDRRWGDTPPGRKPGSPVRAKRSGSGVKQTLNFDLLKLAGDVESNPGPSRSRGHMTEYKPTVRLATRDDVPRAVRTLAAAFADYPATRHTVDPDRHIERVTELQELFLTRVGLDIGKVWVADDGAAVAVWTTPESVEAGAVFAEIGPRMAELSGSRLAAQQQMEGLLAPHRPKEPAWFLATVGVSPDHQGKGLGSAVVLPGVEAAERAGVPAFLETSAPRNLPFYERLGFTVTADVEVPEGPRTWCMTRKPGA

SEQ ID NO: 17974 - protein, 897 aa, Artificial Sequence
  Synthetic Polypeptide
MALPVTALLLPLALLLHAARPEVQLVESGGGLVQAGGSLRLSCAASGRTFSMGWFRQAPGKEREFVAAITYSGGSPYYADSVKGRFTISRDNAKNTVYLQMNSLKPEDTAVYYCAANPTYGSDWNAENWGQGTQVTVSSLEGKPIPNPLLGLDSTGSGDKQLDADVSPKPTIFLPSIAETKLQKAGTYLCLLEKFFPDVIKIHWQEKKSNTILGSQEGNTMKTNDTYMKFSWLTVPEKSLDKEHRCIVRHENNKNGVDQEIIFPPIKTDVITMDPKDNCSKDANDTLLLQLTNTSAYYMYLLLLLKSVVYFAIITCCLLRRTAFCCNGEKSRAKRSGSGATNFSLLKQAGDVEENPGPTSMDWIWRILFLVGAATGAHSFEEVQLVESGGGLVQPGGSLRLSCAASGFSFSDFWMSWVRQAPGKGLEWVATISQAGSEKDYVDSVKGRFTISRDNAKKSLYLQMNSLRAEDTAVYYCASGVYSFDYRGQGTLVTVSSTREQKLISEEDGSGSQPHTKPSVFVMKNGTNVACLVKEFYPKDIRINLVSSKKITEFDPAIVISPSGKYNAVKLGKYEDSNSVTCSVQHDNKTVHSTDFEVKTDSTDHVKPKETENTKQPSKSCHKPKAIVHTEKVNMMSLTVLGLRMLFAKTVAVNFLLTAKLFFLRAKRSGSGVKQTLNFDLLKLAGDVESNPGPSRGHMTEYKPTVRLATRDDVPRAVRTLAAAFADYPATRHTVDPDRHIERVTELQELFLTRVGLDIGKVWVADDGAAVAVWTTPESVEAGAVFAEIGPRMAELSGSRLAAQQQMEGLLAPHRPKEPAWFLATVGVSPDHQGKGLGSAVVLPGVEAAERAGVPAFLETSAPRNLPFYERLGFTVTADVEVPEGPRTWCMTRKPGA

SEQ ID NO: 17975 - protein, 635 aa, Artificial Sequence
  Synthetic Polypeptide
MALPVTALLLPLALLLHAARPEVQLVESGGGLVQAGGSLRLSCAASGRTFSMGWFRQAPGKEREFVAAITYSGGSPYYADSVKGRFTISRDNAKNTVYLQMNSLKPEDTAVYYCAANPTYGSDWNAENWGQGTQVTVSSLESQPHTKPSVFVMKNGTNVACLVKEFYPKDIRINLVSSKKITEFDPAIVISPSGKYNAVKLGKYEDSNSVTCSVQHDNKTVHSTDFEVKTDSTDHVKPKETENTKQPSKSCHKPKAIVHTEKVNMMSLTVLGLRMLFAKTVAVNFLLTAKLFFLRAKRSGSGATNFSLLKQAGDVEENPGPTSMDWIWRILFLVGAATGAHSFEEVQLVESGGGLVQPGGSLRLSCAASGFSFSDFWMSWVRQAPGKGLEWVATISQAGSEKDYVDSVKGRFTISRDNAKKSLYLQMNSLRAEDTAVYYCASGVYSFDYRGQGTLVTVSSTRDKQLDADVSPKPTIFLPSIAETKLQKAGTYLCLLEKFFPDVIKIHWQEKKSNTILGSQEGNTMKTNDTYMKFSWLTVPEKSLDKEHRCIVRHENNKNGVDQEIIFPPIKTDVITMDPKDNCSKDANDTLLLQLTNTSAYYMYLLLLLKSVVYFAIITCCLLRRTAFCCNGEKS

SEQ ID NO: 17976 - protein, 907 aa, Artificial Sequence
  Synthetic Polypeptide
MALPVTALLLPLALLLHAARPLEGKPIPNPLLGLDSTGSGDKQLDADVSPKPTIFLPSIAETKLQKAGTYLCLLEKFFPDVIKIHWQEKKSNTILGSQEGNTMKTNDTYMKFSWLTVPEKSLDKEHRCIVRHENNKNGVDQEIIFPPIKTDVITMDPKDNCSKDANDTLLLQLTNTSAYYMYLLLLLKSVVYFAIITCCLLRRTAFCCNGEKSRAKRSGSGATNFSLLKQAGDVEENPGPTSMALPVTALLLPLALLLHAARPEVQLVESGGGLVQAGGSLRLSCAASGRTFSMGWFRQAPGKEREFVAAITYSGGSPYYADSVKGRFTISRDNAKNTVYLQMNSLKPEDTAVYYCAANPTYGSDWNAENWGQGTQVTVSSLESGGGGSFEEVQLVESGGGLVQPGGSLRLSCAASGFSFSDFWMSWVRQAPGKGLEWVATISQAGSEKDYVDSVKGRFTISRDNAKKSLYLQMNSLRAEDTAVYYCASGVYSFDYRGQGTLVTVSSTREQKLISEEDGSGSQPHTKPSVFVMKNGTNVACLVKEFYPKDIRINLVSSKKITEFDPAIVISPSGKYNAVKLGKYEDSNSVTCSVQHDNKTVHSTDFEVKTDSTDHVKPKETENTKQPSKSCHKPKAIVHTEKVNMMSLTVLGLRMLFAKTVAVNFLLTAKLFFLRAKRSGSGVKQTLNFDLLKLAGDVESNPGPSRGHMTEYKPTVRLATRDDVPRAVRTLAAAFADYPATRHTVDPDRHIERVTELQELFLTRVGLDIGKVWVADDGAAVAVWTTPESVEAGAVFAEIGPRMAELSGSRLAAQQQMEGLLAPHRPKEPAWFLATVGVSPDHQGKGLGSAVVLPGVEAAERAGVPAFLETSAPRNLPFYERLGFTVTADVEVPEGPRTWCMTRKPGA

SEQ ID NO: 17977 - protein, 1037 aa, Artificial Sequence
  Synthetic Polypeptide
MALPVTALLLPLALLLHAARPEVQLVESGGGLVQAGGSLRLSCAASGRTFSMGWFRQAPGKEREFVAAITYSGGSPYYADSVKGRFTISRDNAKNTVYLQMNSLKPEDTAVYYCAANPTYGSDWNAENWGQGTQVTVSSGQPKANPTVTLFPPSSEELQANKATLVCLISDFYPGAVTVAWKADGSPVKAGVETTKPSKQSNNKYAASSYLSLTPEQWKSHRSYSCQVTHEGSTVEKTVAPTECSGSQSFGLLDPKLCYLLDGILFIYGVILTALFLRVKFSRSADAPAYQQGQNQLYNELNLGRREEYDVLDKRRGRDPEMGGKPQRRKNPQEGLYNELQKDKMAEAYSEIGMKGERRRGKGHDGLYQGLSTATKDTYDALHMQALPPRRAKRSGSGATNFSLLKQAGDVEENPGPTSMDWIWRILFLVGAATGAHSFEEVQLVESGGGLVQPGGSLRLSCAASGFSFSDFWMSWVRQAPGKGLEWVATISQAGSEKDYVDSVKGRFTISRDNAKKSLYLQMNSLRAEDTAVYYCASGVYSFDYRGQGTLVTVSSASTKGPSVFPLAPSSKSTSGGTAALGCLVKDYFPEPVTVSWNSGALTSGVHTFPAVLQSSGLYSLSSVVTVPSSSLGTQTYICNVNHKPSNTKVDKRVEPKSCGTQSFGLLDPKLCYLLDGILFIYGVILTALFLRVKFSRSADAPAYQQGQNQLYNELNLGRREEYDVLDKRRGRDPEMGGKPQRRKNPQEGLYNELQKDKMAEAYSEIGMKGERRRGKGHDGLYQGLSTATKDTYDALHMQALPPRRAKRSGSGVKQTLNFDLLKLAGDVESNPGPSRGHMTEYKPTVRLATRDDVPRAVRTLAAAFADYPATRHTVDPDRHIERVTELQELFLTRVGLDIGKVWVADDGAAVAVWTTPESVEAGAVFAEIGPRMAELSGSRLAAQQQMEGLLAPHRPKEPAWFLATVGVSPDHQGKGLGSAVVLPGVEAAERAGVPAFLETSAPRNLPFYERLGFTVTADVEVPEGPRTWCMTRKPGA

SEQ ID NO: 17978 - protein, 823 aa, Artificial Sequence
  Synthetic Polypeptide
MALPVTALLLPLALLLHAARPEVQLVESGGGLVQAGGSLRLSCAASGRTFSMGWFRQAPGKEREFVAAITYSGGSPYYADSVKGRFTISRDNAKNTVYLQMNSLKPEDTAVYYCAANPTYGSDWNAENWGQGTQVTVSSLEDLKNVFPPEVAVFEPSEAEISHTQKATLVCLATGFYPDHVELSWWVNGKEVHSGVSTDPQPLKEQPALNDSRYCLSSRLRVSATFWQNPRNHFRCQVQFYGLSENDEWTQDRAKPVTQIVSAEAWGRADCGSQSFGLLDPKLCYLLDGILFIYGVILTALFLRVKFSRSADAPAYQQGQNQLYNELNLGRREEYDVLDKRRGRDPEMGGKPQRRKNPQEGLYNELQKDKMAEAYSEIGMKGERRRGKGHDGLYQGLSTATKDTYDALHMQALPPRRAKRSGSGATNFSLLKQAGDVEENPGPTSMDWIWRILFLVGAATGAHSFEEVQLVESGGGLVQPGGSLRLSCAASGFSFSDFWMSWVRQAPGKGLEWVATISQAGSEKDYVDSVKGRFTISRDNAKKSLYLQMNSLRAEDTAVYYCASGVYSFDYRGQGTLVTVSSTRIQNPDPAVYQLRDSKSSDKSVCLFTDFDSQTNVSQSKDSDVYITDKTVLDMRSMDFKSNSAVAWSNKSDFACANAFNNSIIPEDTFFPSPESSCGTQSFGLLDPKLCYLLDGILFIYGVILTALFLRVKFSRSADAPAYQQGQNQLYNELNLGRREEYDVLDKRRGRDPEMGGKPQRRKNPQEGLYNELQKDKMAEAYSEIGMKGERRRGKGHDGLYQGLSTATKDTYDALHMQALPPR

SEQ ID NO: 17979 - protein, 823 aa, Artificial Sequence
  Synthetic Polypeptide
MALPVTALLLPLALLLHAARPEVQLVESGGGLVQAGGSLRLSCAASGRTFSMGWFRQAPGKEREFVAAITYSGGSPYYADSVKGRFTISRDNAKNTVYLQMNSLKPEDTAVYYCAANPTYGSDWNAENWGQGTQVTVSSLEDLKNVFPPEVAVFEPSKAEIAHTQKATLVCLATGFYPDHVELSWWVNGKEVHSGVCTDPQPLKEQPALNDSRYCLSSRLRVSATFWQNPRNHFRCQVQFYGLSENDEWTQDRAKPVTQIVSAEAWGRADCGSQSFGLLDPKLCYLLDGILFIYGVILTALFLRVKFSRSADAPAYQQGQNQLYNELNLGRREEYDVLDKRRGRDPEMGGKPQRRKNPQEGLYNELQKDKMAEAYSEIGMKGERRRGKGHDGLYQGLSTATKDTYDALHMQALPPRRAKRSGSGATNFSLLKQAGDVEENPGPTSMDWIWRILFLVGAATGAHSFEEVQLVESGGGLVQPGGSLRLSCAASGFSFSDFWMSWVRQAPGKGLEWVATISQAGSEKDYVDSVKGRFTISRDNAKKSLYLQMNSLRAEDTAVYYCASGVYSFDYRGQGTLVTVSSTRIQNPDPAVYQLRDSKSSDKSVCLFTDFDSQTNVSQSKDSDVYITDKCVLDMRSMDFKSNSAVAWSNKSDFACANAFNNSIIPEDTFFPSSDVPCGTQSFGLLDPKLCYLLDGILFIYGVILTALFLRVKFSRSADAPAYQQGQNQLYNELNLGRREEYDVLDKRRGRDPEMGGKPQRRKNPQEGLYNELQKDKMAEAYSEIGMKGERRRGKGHDGLYQGLSTATKDTYDALHMQALPPR

SEQ ID NO: 17980 - protein, 894 aa, Artificial Sequence
  Synthetic Polypeptide
MALPVTALLLPLALLLHAARPEVQLVESGGGLVQAGGSLRLSCAASGRTFSMGWFRQAPGKEREFVAAITYSGGSPYYADSVKGRFTISRDNAKNTVYLQMNSLKPEDTAVYYCAANPTYGSDWNAENWGQGTQVTVSSLEGKPIPNPLLGLDSTGSGEDLKNVFPPEVAVFEPSEAEISHTQKATLVCLATGFYPDHVELSWWVNGKEVHSGVSTDPQPLKEQPALNDSRYCLSSRLRVSATFWQNPRNHFRCQVQFYGLSENDEWTQDRAKPVTQIVSAEAWGRADCGSQSFGLLDPKLCYLLDGILFIYGVILTALFLRVKFSRSADAPAYQQGQNQLYNELNLGRREEYDVLDKRRGRDPEMGGKPQRRKNPQEGLYNELQKDKMAEAYSEIGMKGERRRGKGHDGLYQGLSTATKDTYDALHMQALPPRRAKRSGSGATNFSLLKQAGDVEENPGPTSMDWIWRILFLVGAATGAHSFEEVQLVESGGGLVQPGGSLRLSCAASGFSFSDFWMSWVRQAPGKGLEWVATISQAGSEKDYVDSVKGRFTISRDNAKKSLYLQMNSLRAEDTAVYYCASGVYSFDYRGQGTLVTVSSTREQKLISEEDGSGIQNPDPAVYQLRDSKSSDKSVCLFTDFDSQTNVSQSKDSDVYITDKTVLDMRSMDFKSNSAVAWSNKSDFACANAFNNSIIPEDTFFPSPESSCGTQSFGLLDPKLCYLLDGILFIYGVILTALFLRSKRSRLLHSDYMNMTPRRPGPTRKHYQPYAPPRDFAAYRSRVKFSRSADAPAYQQGQNQLYNELNLGRREEYDVLDKRRGRDPEMGGKPQRRKNPQEGLYNELQKDKMAEAYSEIGMKGERRRGKGHDGLYQGLSTATKDTYDALHMQALPPR

SEQ ID NO: 17981 - protein, 935 aa, Artificial Sequence
  Synthetic Polypeptide
MALPVTALLLPLALLLHAARPEVQLVESGGGLVQAGGSLRLSCAASGRTFSMGWFRQAPGKEREFVAAITYSGGSPYYADSVKGRFTISRDNAKNTVYLQMNSLKPEDTAVYYCAANPTYGSDWNAENWGQGTQVTVSSLEGKPIPNPLLGLDSTGSGEDLKNVFPPEVAVFEPSEAEISHTQKATLVCLATGFYPDHVELSWWVNGKEVHSGVSTDPQPLKEQPALNDSRYCLSSRLRVSATFWQNPRNHFRCQVQFYGLSENDEWTQDRAKPVTQIVSAEAWGRADCGSQSFGLLDPKLCYLLDGILFIYGVILTALFLRSKRSRLLHSDYMNMTPRRPGPTRKHYQPYAPPRDFAAYRSRVKFSRSADAPAYQQGQNQLYNELNLGRREEYDVLDKRRGRDPEMGGKPQRRKNPQEGLYNELQKDKMAEAYSEIGMKGERRRGKGHDGLYQGLSTATKDTYDALHMQALPPRRAKRSGSGATNFSLLKQAGDVEENPGPTSMDWIWRILFLVGAATGAHSFEEVQLVESGGGLVQPGGSLRLSCAASGFSFSDFWMSWVRQAPGKGLEWVATISQAGSEKDYVDSVKGRFTISRDNAKKSLYLQMNSLRAEDTAVYYCASGVYSFDYRGQGTLVTVSSTREQKLISEEDGSGIQNPDPAVYQLRDSKSSDKSVCLFTDFDSQTNVSQSKDSDVYITDKTVLDMRSMDFKSNSAVAWSNKSDFACANAFNNSIIPEDTFFPSPESSCGTQSFGLLDPKLCYLLDGILFIYGVILTALFLRSKRSRLLHSDYMNMTPRRPGPTRKHYQPYAPPRDFAAYRSRVKFSRSADAPAYQQGQNQLYNELNLGRREEYDVLDKRRGRDPEMGGKPQRRKNPQEGLYNELQKDKMAEAYSEIGMKGERRRGKGHDGLYQGLSTATKDTYDALHMQALPPR

SEQ ID NO: 17982 - protein, 896 aa, Artificial Sequence
  Synthetic Polypeptide
MALPVTALLLPLALLLHAARPEVQLVESGGGLVQAGGSLRLSCAASGRTFSMGWFRQAPGKEREFVAAITYSGGSPYYADSVKGRFTISRDNAKNTVYLQMNSLKPEDTAVYYCAANPTYGSDWNAENWGQGTQVTVSSLEGKPIPNPLLGLDSTGSGEDLKNVFPPEVAVFEPSEAEISHTQKATLVCLATGFYPDHVELSWWVNGKEVHSGVSTDPQPLKEQPALNDSRYCLSSRLRVSATFWQNPRNHFRCQVQFYGLSENDEWTQDRAKPVTQIVSAEAWGRADCGSQSFGLLDPKLCYLLDGILFIYGVILTALFLRVKFSRSADAPAYQQGQNQLYNELNLGRREEYDVLDKRRGRDPEMGGKPQRRKNPQEGLYNELQKDKMAEAYSEIGMKGERRRGKGHDGLYQGLSTATKDTYDALHMQALPPRRAKRSGSGATNFSLLKQAGDVEENPGPTSMDWIWRILFLVGAATGAHSFEEVQLVESGGGLVQPGGSLRLSCAASGFSFSDFWMSWVRQAPGKGLEWVATISQAGSEKDYVDSVKGRFTISRDNAKKSLYLQMNSLRAEDTAVYYCASGVYSFDYRGQGTLVTVSSTREQKLISEEDLGSGIQNPDPAVYQLRDSKSSDKSVCLFTDFDSQTNVSQSKDSDVYITDKTVLDMRSMDFKSNSAVAWSNKSDFACANAFNNSIIPEDTFFPSPESSCGTQSFGLLDPKLCYLLDGILFIYGVILTALFLKRGRKKLLYIFKQPFMRPVQTTQEEDGCSCRFPEEEEGGCELRVKFSRSADAPAYQQGQNQLYNELNLGRREEYDVLDKRRGRDPEMGGKPQRRKNPQEGLYNELQKDKMAEAYSEIGMKGERRRGKGHDGLYQGLSTATKDTYDALHMQALPPR

SEQ ID NO: 17983 - protein, 938 aa, Artificial Sequence
  Synthetic Polypeptide
MALPVTALLLPLALLLHAARPEVQLVESGGGLVQAGGSLRLSCAASGRTFSMGWFRQAPGKEREFVAAITYSGGSPYYADSVKGRFTISRDNAKNTVYLQMNSLKPEDTAVYYCAANPTYGSDWNAENWGQGTQVTVSSLEGKPIPNPLLGLDSTGSGEDLKNVFPPEVAVFEPSEAEISHTQKATLVCLATGFYPDHVELSWWVNGKEVHSGVSTDPQPLKEQPALNDSRYCLSSRLRVSATFWQNPRNHFRCQVQFYGLSENDEWTQDRAKPVTQIVSAEAWGRADCGSQSFGLLDPKLCYLLDGILFIYGVILTALFLKRGRKKLLYIFKQPFMRPVQTTQEEDGCSCRFPEEEEGGCELRVKFSRSADAPAYQQGQNQLYNELNLGRREEYDVLDKRRGRDPEMGGKPQRRKNPQEGLYNELQKDKMAEAYSEIGMKGERRRGKGHDGLYQGLSTATKDTYDALHMQALPPRRAKRSGSGATNFSLLKQAGDVEENPGPTSMDWIWRILFLVGAATGAHSFEEVQLVESGGGLVQPGGSLRLSCAASGFSFSDFWMSWVRQAPGKGLEWVATISQAGSEKDYVDSVKGRFTISRDNAKKSLYLQMNSLRAEDTAVYYCASGVYSFDYRGQGTLVTVSSTREQKLISEEDLGSGIQNPDPAVYQLRDSKSSDKSVCLFTDFDSQTNVSQSKDSDVYITDKTVLDMRSMDFKSNSAVAWSNKSDFACANAFNNSIIPEDTFFPSPESSCGTQSFGLLDPKLCYLLDGILFIYGVILTALFLKRGRKKLLYIFKQPFMRPVQTTQEEDGCSCRFPEEEEGGCELRVKFSRSADAPAYQQGQNQLYNELNLGRREEYDVLDKRRGRDPEMGGKPQRRKNPQEGLYNELQKDKMAEAYSEIGMKGERRRGKGHDGLYQGLSTATKDTYDALHMQALPPR

SEQ ID NO: 17984 - protein, 828 aa, Artificial Sequence
  Synthetic Polypeptide
MALPVTALLLPLALLLHAARPEVQLVESGGGLVQAGGSLRLSCAASGRTFSMGWFRQAPGKEREFVAAITYSGGSPYYADSVKGRFTISRDNAKNTVYLQMNSLKPEDTAVYYCAANPTYGSDWNAENWGQGTQVTVSSLEQSFGLLDPKLCYLLDGILFIYGVILTALFLRVKFSRSADAPAYQQGQNQLYNELNLGRREEYDVLDKRRGRDPEMGGKPQRRKNPQEGLYNELQKDKMAEAYSEIGMKGERRRGKGHDGLYQGLSTATKDTYDALHMQALPPRRAKRSGSGATNFSLLKQAGDVEENPGPTSMDWIWRILFLVGAATGAHSFEEVQLVESGGGLVQPGGSLRLSCAASGFSFSDFWMSWVRQAPGKGLEWVATISQAGSEKDYVDSVKGRFTISRDNAKKSLYLQMNSLRAEDTAVYYCASGVYSFDYRGQGTLVTVSSTRQSFGLLDPKLCYLLDGILFIYGVILTALFLRVKFSRSADAPAYQQGQNQLYNELNLGRREEYDVLDKRRGRDPEMGGKPQRRKNPQEGLYNELQKDKMAEAYSEIGMKGERRRGKGHDGLYQGLSTATKDTYDALHMQALPPRRAKRSGSGVKQTLNFDLLKLAGDVESNPGPSRGHMTEYKPTVRLATRDDVPRAVRTLAAAFADYPATRHTVDPDRHIERVTELQELFLTRVGLDIGKVWVADDGAAVAVWTTPESVEAGAVFAEIGPRMAELSGSRLAAQQQMEGLLAPHRPKEPAWFLATVGVSPDHQGKGLGSAVVLPGVEAAERAGVPAFLETSAPRNLPFYERLGFTVTADVEVPEGPRTWCMTRKPGA

SEQ ID NO: 17985 - protein, 653 aa, Artificial Sequence
  Synthetic Polypeptide
MALPVTALLLPLALLLHAARPEVQLVESGGGLVQAGGSLRLSCAASGRTFSMGWFRQAPGKEREFVAAITYSGGSPYYADSVKGRFTISRDNAKNTVYLQMNSLKPEDTAVYYCAANPTYGSDWNAENWGQGTQVTVSSLEGQPKANPTVTLFPPSSEELQANKATLVCLISDFYPGAVTVAWKADGSPVKAGVETTKPSKQSNNKYAASSYLSLTPEQWKSHRSYSCQVTHEGSTVEKTVAPTECSPIKTDVITMDPKDNCSKDANDTLLLQLTNTSAYYMYLLLLLKSVVYFAIITCCLLRRTAFCCNGEKSRAKRSGSGATNFSLLKQAGDVEENPGPTSMDWIWRILFLVGAATGAHSFEEVQLVESGGGLVQPGGSLRLSCAASGFSFSDFWMSWVRQAPGKGLEWVATISQAGSEKDYVDSVKGRFTISRDNAKKSLYLQMNSLRAEDTAVYYCASGVYSFDYRGQGTLVTVSSTRASTKGPSVFPLAPSSKSTSGGTAALGCLVKDYFPEPVTVSWNSGALTSGVHTFPAVLQSSGLYSLSSVVTVPSSSLGTQTYICNVNHKPSNTKVDKRVEPKSCEVKTDSTDHVKPKETENTKQPSKSCHKPKAIVHTEKVNMMSLTVLGLRMLFAKTVAVNFLLTAKLFFL

SEQ ID NO: 17986 - protein, 631 aa, Artificial Sequence
  Synthetic Polypeptide
MALPVTALLLPLALLLHAARPEVQLVESGGGLVQAGGSLRLSCAASGRTFSMGWFRQAPGKEREFVAAITYSGGSPYYADSVKGRFTISRDNAKNTVYLQMNSLKPEDTAVYYCAANPTYGSDWNAENWGQGTQVTVSSLEGQPKANPTVTLFPPSSEELQANKATLVCLISDFYPGAVTVAWKADGSPVKAGVETTKPSKQSNNKYAASSYLSLTPEQWKSHRSYSCQVTHEGSTVEKTVAPTECSGRADCGITSASYHQGVLSATILYEILLGKATLYAVLVSALVLMAMVKRKDSRGRAKRSGSGATNFSLLKQAGDVEENPGPTSMDWIWRILFLVGAATGAHSFEEVQLVESGGGLVQPGGSLRLSCAASGFSFSDFWMSWVRQAPGKGLEWVATISQAGSEKDYVDSVKGRFTISRDNAKKSLYLQMNSLRAEDTAVYYCASGVYSFDYRGQGTLVTVSSTRASTKGPSVFPLAPSSKSTSGGTAALGCLVKDYFPEPVTVSWNSGALTSGVHTFPAVLQSSGLYSLSSVVTVPSSSLGTQTYICNVNHKPSNTKVDKRVEPKSCIPEDTFFPSSDVPCDVKLVEKSFETDTNLNFQNLSVIGFRILLLKVAGFNLLMTLRLWSS

SEQ ID NO: 17987 - protein, 631 aa, Artificial Sequence
  Synthetic Polypeptide
MALPVTALLLPLALLLHAARPEVQLVESGGGLVQAGGSLRLSCAASGRTFSMGWFRQAPGKEREFVAAITYSGGSPYYADSVKGRFTISRDNAKNTVYLQMNSLKPEDTAVYYCAANPTYGSDWNAENWGQGTQVTVSSLEGQPKANPTVTLFPPSSEELQANKATLVCLISDFYPGAVTVAWKADGSPVKAGVETTKPSKQSNNKYAASSYLSLTPEQWKSHRSYSCQVTHEGSTVEKTVAPTECSGRADCGFTSESYQQGVLSATILYEILLGKATLYAVLVSALVLMAMVKRKDSRGRAKRSGSGATNFSLLKQAGDVEENPGPTSMDWIWRILFLVGAATGAHSFEEVQLVESGGGLVQPGGSLRLSCAASGFSFSDFWMSWVRQAPGKGLEWVATISQAGSEKDYVDSVKGRFTISRDNAKKSLYLQMNSLRAEDTAVYYCASGVYSFDYRGQGTLVTVSSTRASTKGPSVFPLAPSSKSTSGGTAALGCLVKDYFPEPVTVSWNSGALTSGVHTFPAVLQSSGLYSLSSVVTVPSSSLGTQTYICNVNHKPSNTKVDKRVEPKSCIPEDTFFPSPESSCDVKLVEKSFETDTNLNFQNLSVIGFRILLLKVAGFNLLMTLRLWSS

SEQ ID NO: 17988 - protein, 452 aa, Artificial Sequence
  Synthetic Polypeptide
MALPVTALLLPLALLLHAARPEVQLVESGGGLVQAGGSLRLSCAASGRTFSMGWFRQAPGKEREFVAAITYSGGSPYYADSVKGRFTISRDNAKNTVYLQMNSLKPEDTAVYYCAANPTYGSDWNAENWGQGTQVTVSSLESGGGGSFEEVQLVESGGGLVQPGGSLRLSCAASGFSFSDFWMSWVRQAPGKGLEWVATISQAGSEKDYVDSVKGRFTISRDNAKKSLYLQMNSLRAEDTAVYYCASGVYSFDYRGQGTLVTVSSTRDGNEEMGGITQTPYKVSISGTTVILTCPQYPGSEILWQHNDKNIGGDEDDKNIGSDEDHLSLKEFSELEQSGYYVCYPRGSKPEDANFYLYLRARVCENCMEMDVMSVATIVIVDICITGGLLLLVYYWSKNRKAKAKPVTRGAGAGGRQRGQNKERPPPVPNPDYEPIRKGQRDLYSGLNQRRI

SEQ ID NO: 17989 - protein, 417 aa, Artificial Sequence
  Synthetic Polypeptide
MALPVTALLLPLALLLHAARPEVQLVESGGGLVQAGGSLRLSCAASGRTFSMGWFRQAPGKEREFVAAITYSGGSPYYADSVKGRFTISRDNAKNTVYLQMNSLKPEDTAVYYCAANPTYGSDWNAENWGQGTQVTVSSLESGGGGSFEEVQLVESGGGLVQPGGSLRLSCAASGFSFSDFWMSWVRQAPGKGLEWVATISQAGSEKDYVDSVKGRFTISRDNAKKSLYLQMNSLRAEDTAVYYCASGVYSFDYRGQGTLVTVSSTRFKIPIEELEDRVFVNCNTSITWVEGTVGTLLSDITRLDLGKRILDPRGIYRCNGTDIYKDKESTVQVHYRMCQSCVELDPATVAGIIVTDVIATLLLALGVFCFAGHETGRLSGAADTQALLRNDQVYQPLRDRDDAQYSHLGGNWARNK

SEQ ID NO: 17990 - protein, 427 aa, Artificial Sequence
  Synthetic Polypeptide
MALPVTALLLPLALLLHAARPEVQLVESGGGLVQAGGSLRLSCAASGRTFSMGWFRQAPGKEREFVAAITYSGGSPYYADSVKGRFTISRDNAKNTVYLQMNSLKPEDTAVYYCAANPTYGSDWNAENWGQGTQVTVSSLESGGGGSFEEVQLVESGGGLVQPGGSLRLSCAASGFSFSDFWMSWVRQAPGKGLEWVATISQAGSEKDYVDSVKGRFTISRDNAKKSLYLQMNSLRAEDTAVYYCASGVYSFDYRGQGTLVTVSSTRQSIKGNHLVKVYDYQEDGSVLLTCDAEAKNITWFKDGKMIGFLTEDKKKWNLGSNAKDPRGMYQCKGSQNKSKPLQVYYRMCQNCIELNAATISGFLFAEIVSIFVLAVGVYFIAGQDGVRQSRASDKQTLLPNDQLYQPLKDREDDQYSHLQGNQLRRN

SEQ ID NO: 17991 - protein, 410 aa, Artificial Sequence
  Synthetic Polypeptide
MALPVTALLLPLALLLHAARPEVQLVESGGGLVQAGGSLRLSCAASGRTFSMGWFRQAPGKEREFVAAITYSGGSPYYADSVKGRFTISRDNAKNTVYLQMNSLKPEDTAVYYCAANPTYGSDWNAENWGQGTQVTVSSLESGGGGSFEEVQLVESGGGLVQPGGSLRLSCAASGFSFSDFWMSWVRQAPGKGLEWVATISQAGSEKDYVDSVKGRFTISRDNAKKSLYLQMNSLRAEDTAVYYCASGVYSFDYRGQGTLVTVSSTRQSFGLLDPKLCYLLDGILFIYGVILTALFLRVKFSRSADAPAYQQGQNQLYNELNLGRREEYDVLDKRRGRDPEMGGKPQRRKNPQEGLYNELQKDKMAEAYSEIGMKGERRRGKGHDGLYQGLSTATKDTYDALHMQALPPR

SEQ ID NO: 17992 - protein, 453 aa, Artificial Sequence
  Synthetic Polypeptide
MALPVTALLLPLALLLHAARPEEVQLVESGGGLVQPGGSLRLSCAASGFSFSDFWMSWVRQAPGKGLEWVATISQAGSEKDYVDSVKGRFTISRDNAKKSLYLQMNSLRAEDTAVYYCASGVYSFDYRGQGTLVTVSSLESGGGGSFEEVQLVESGGGLVQAGGSLRLSCAASGRTFSMGWFRQAPGKEREFVAAITYSGGSPYYADSVKGRFTISRDNAKNTVYLQMNSLKPEDTAVYYCAANPTYGSDWNAENWGQGTQVTVSSTRDGNEEMGGITQTPYKVSISGTTVILTCPQYPGSEILWQHNDKNIGGDEDDKNIGSDEDHLSLKEFSELEQSGYYVCYPRGSKPEDANFYLYLRARVCENCMEMDVMSVATIVIVDICITGGLLLLVYYWSKNRKAKAKPVTRGAGAGGRQRGQNKERPPPVPNPDYEPIRKGQRDLYSGLNQRRI

SEQ ID NO: 17993 - protein, 418 aa, Artificial Sequence
  Synthetic Polypeptide
MALPVTALLLPLALLLHAARPEEVQLVESGGGLVQPGGSLRLSCAASGFSFSDFWMSWVRQAPGKGLEWVATISQAGSEKDYVDSVKGRFTISRDNAKKSLYLQMNSLRAEDTAVYYCASGVYSFDYRGQGTLVTVSSLESGGGGSFEEVQLVESGGGLVQAGGSLRLSCAASGRTFSMGWFRQAPGKEREFVAAITYSGGSPYYADSVKGRFTISRDNAKNTVYLQMNSLKPEDTAVYYCAANPTYGSDWNAENWGQGTQVTVSSTRFKIPIEELEDRVFVNCNTSITWVEGTVGTLLSDITRLDLGKRILDPRGIYRCNGTDIYKDKESTVQVHYRMCQSCVELDPATVAGIIVTDVIATLLLALGVFCFAGHETGRLSGAADTQALLRNDQVYQPLRDRDDAQYSHLGGNWARNK

SEQ ID NO: 17994 - protein, 428 aa, Artificial Sequence
  Synthetic Polypeptide
MALPVTALLLPLALLLHAARPEEVQLVESGGGLVQPGGSLRLSCAASGFSFSDFWMSWVRQAPGKGLEWVATISQAGSEKDYVDSVKGRFTISRDNAKKSLYLQMNSLRAEDTAVYYCASGVYSFDYRGQGTLVTVSSLESGGGGSFEEVQLVESGGGLVQAGGSLRLSCAASGRTFSMGWFRQAPGKEREFVAAITYSGGSPYYADSVKGRFTISRDNAKNTVYLQMNSLKPEDTAVYYCAANPTYGSDWNAENWGQGTQVTVSSTRQSIKGNHLVKVYDYQEDGSVLLTCDAEAKNITWFKDGKMIGFLTEDKKKWNLGSNAKDPRGMYQCKGSQNKSKPLQVYYRMCQNCIELNAATISGFLFAEIVSIFVLAVGVYFIAGQDGVRQSRASDKQTLLPNDQLYQPLKDREDDQYSHLQGNQLRRN

SEQ ID NO: 17995 - protein, 411 aa, Artificial Sequence
  Synthetic Polypeptide
MALPVTALLLPLALLLHAARPEEVQLVESGGGLVQPGGSLRLSCAASGFSFSDFWMSWVRQAPGKGLEWVATISQAGSEKDYVDSVKGRFTISRDNAKKSLYLQMNSLRAEDTAVYYCASGVYSFDYRGQGTLVTVSSLESGGGGSFEEVQLVESGGGLVQAGGSLRLSCAASGRTFSMGWFRQAPGKEREFVAAITYSGGSPYYADSVKGRFTISRDNAKNTVYLQMNSLKPEDTAVYYCAANPTYGSDWNAENWGQGTQVTVSSTRQSFGLLDPKLCYLLDGILFIYGVILTALFLRVKFSRSADAPAYQQGQNQLYNELNLGRREEYDVLDKRRGRDPEMGGKPQRRKNPQEGLYNELQKDKMAEAYSEIGMKGERRRGKGHDGLYQGLSTATKDTYDALHMQALPPR

SEQ ID NO: 17996 - protein, 643 aa, Artificial Sequence
  Synthetic Polypeptide
MALPVTALLLPLALLLHAARPEVQLVESGGGLVQAGGSLRLSCAASGRTFSMGWFRQAPGKEREFVAAITYSGGSPYYADSVKGRFTISRDNAKNTVYLQMNSLKPEDTAVYYCAANPTYGSDWNAENWGQGTQVTVSSLESGGGGSFEEVQLVESGGGLVQPGGSLRLSCAASGFSFSDFWMSWVRQAPGKGLEWVATISQAGSEKDYVDSVKGRFTISRDNAKKSLYLQMNSLRAEDTAVYYCASGVYSFDYRGQGTLVTVSSTRGSGIQNPDPAVYQLRDSKSSDKSVCLFTDFDSQTNVSQSKDSDVYITDKTVLDMRSMDFKSNSAVAWSNKSDFACANAFNNSIIPEDTFFPSPESSCDVKLVEKSFETDTNLNFQNLSVIGFRILLLKVAGFNLLMTLRLWSSRAKRSGSGVKQTLNFDLLKLAGDVESNPGPSRGHMTEYKPTVRLATRDDVPRAVRTLAAAFADYPATRHTVDPDRHIERVTELQELFLTRVGLDIGKVWVADDGAAVAVWTTPESVEAGAVFAEIGPRMAELSGSRLAAQQQMEGLLAPHRPKEPAWFLATVGVSPDHQGKGLGSAVVLPGVEAAERAGVPAFLETSAPRNLPFYERLGFTVTADVEVPEGPRTWCMTRKPGA

SEQ ID NO: 17997 - protein, 675 aa, Artificial Sequence
  Synthetic Polypeptide
MALPVTALLLPLALLLHAARPEVQLVESGGGLVQAGGSLRLSCAASGRTFSMGWFRQAPGKEREFVAAITYSGGSPYYADSVKGRFTISRDNAKNTVYLQMNSLKPEDTAVYYCAANPTYGSDWNAENWGQGTQVTVSSLESGGGGSFEEVQLVESGGGLVQPGGSLRLSCAASGFSFSDFWMSWVRQAPGKGLEWVATISQAGSEKDYVDSVKGRFTISRDNAKKSLYLQMNSLRAEDTAVYYCASGVYSFDYRGQGTLVTVSSLEDLKNVFPPEVAVFEPSEAEISHTQKATLVCLATGFYPDHVELSWWVNGKEVHSGVSTDPQPLKEQPALNDSRYCLSSRLRVSATFWQNPRNHFRCQVQFYGLSENDEWTQDRAKPVTQIVSAEAWGRADCGFTSESYQQGVLSATILYEILLGKATLYAVLVSALVLMAMVKRKDSRGRAKRSGSGATNFSLLKQAGDVEENPGPTRGHMTEYKPTVRLATRDDVPRAVRTLAAAFADYPATRHTVDPDRHIERVTELQELFLTRVGLDIGKVWVADDGAAVAVWTTPESVEAGAVFAEIGPRMAELSGSRLAAQQQMEGLLAPHRPKEPAWFLATVGVSPDHQGKGLGSAVVLPGVEAAERAGVPAFLETSAPRNLPFYERLGFTVTADVEVPEGPRTWCMTRKPGA

SEQ ID NO: 17998 - protein, 725 aa, Artificial Sequence
  Synthetic Polypeptide
MALPVTALLLPLALLLHAARPEVQLVESGGGLVQAGGSLRLSCAASGRTFSMGWFRQAPGKEREFVAAITYSGGSPYYADSVKGRFTISRDNAKNTVYLQMNSLKPEDTAVYYCAANPTYGSDWNAENWGQGTQVTVSSLESGGGGSFEEVQLVESGGGLVQPGGSLRLSCAASGFSFSDFWMSWVRQAPGKGLEWVATISQAGSEKDYVDSVKGRFTISRDNAKKSLYLQMNSLRAEDTAVYYCASGVYSFDYRGQGTLVTVSSTREQKLISEEDLGSGTPFPSLAPPIMLLVDGKQQMVVVCLVLDVAPPGLDSPIWFSAGNGSALDAFTYGPSPATDGTWTNLAHLSLPSEELASWEPLVCHTGPGAEGHSRSTQPMHLSGEASTARTCPQEPLRGTPGGALWLGVLRLLLFKLLLFDLLLTCSCLCDPAGPLPSPATTTRLRALGSHRLHPATETGGREATSSPRPQPRDRRWGDTPPGRKPGSPVRAKRSGSGVKQTLNFDLLKLAGDVESNPGPSRSRGHMTEYKPTVRLATRDDVPRAVRTLAAAFADYPATRHTVDPDRHIERVTELQELFLTRVGLDIGKVWVADDGAAVAVWTTPESVEAGAVFAEIGPRMAELSGSRLAAQQQMEGLLAPHRPKEPAWFLATVGVSPDHQGKGLGSAVVLPGVEAAERAGVPAFLETSAPRNLPFYERLGFTVTADVEVPEGPRTWCMTRKPGA

SEQ ID NO: 17999 - protein, 549 aa, Artificial Sequence; identical to SEQ ID NO: 17853
  Synthetic Polypeptide

SEQ ID NO: 18000 - protein, 319 aa, Artificial Sequence; identical to SEQ ID NO: 17854
  Synthetic Polypeptide

SEQ ID NO: 18001 - protein, 445 aa, Artificial Sequence
  Synthetic Polypeptide
MDWIWRILFLVGAATGAHSFEEVQLVESGGGLVQPGGSLRLSCAASGFSFSDFWMSWVRQAPGKGLEWVATISQAGSEKDYVDSVKGRFTISRDNAKKSLYLQMNSLRAEDTAVYYCASGVYSFDYRGQGTLVTVSSTRIQNPDPAVYQLRDSKSSDKSVCLFTDFDSQTNVSQSKDSDVYITDKTVLDMRSMDFKSNSAVAWSNKSDFACANAFNNSIIPEDTFFPSPESSCDVKLVEKSFETDTNLNFQNLSVIGFRILLLKVAGFNLLMTLRLWSSRAKRSGSGVKQTLNFDLLKLAGDVESNPGPSRGHMAKPLSQEESTLIERATATINSIPISEDYSVASAALSSDGRIFTGVNVYHFTGGPCAELVVLGTAAAAAAGNLTCIVAIGNENRGILSPCGRCRQVLLDLHPGIKAIVKDSDGQPTAVGIRELLPSGYVWEG

SEQ ID NO: 18002 - protein, 279 aa, Artificial Sequence
  Synthetic Polypeptide
MDWIWRILFLVGAATGAHSFEEVQLVESGGGLVQPGGSLRLSCAASGFSFSDFWMSWVRQAPGKGLEWVATISQAGSEKDYVDSVKGRFTISRDNAKKSLYLQMNSLRAEDTAVYYCASGVYSFDYRGQGTLVTVSSTRIQNPDPAVYQLRDSKSSDKSVCLFTDFDSQTNVSQSKDSDVYITDKTVLDMRSMDFKSNSAVAWSNKSDFACANAFNNSIIPEDTFFPSPESSCDVKLVEKSFETDTNLNFQNLSVIGFRILLLKVAGFNLLMTLRLWSS

SEQ ID NO: 18003 - protein, 567 aa, Artificial Sequence; identical to SEQ ID NO: 17857
  Synthetic Polypeptide

SEQ ID NO: 18004 - protein, 337 aa, Artificial Sequence; identical to SEQ ID NO: 17858
  Synthetic Polypeptide

SEQ ID NO: 18005 - protein, 457 aa, Artificial Sequence
  Synthetic Polypeptide
MDWIWRILFLVGAATGAHSFEEVQLVESGGGLVQPGGSLRLSCAASGFSFSDFWMSWVRQAPGKGLEWVATISQAGSEKDYVDSVKGRFTISRDNAKKSLYLQMNSLRAEDTAVYYCASGVYSFDYRGQGTLVTVSSTREQKLISEEDGSGIQNPDPAVYQLRDSKSSDKSVCLFTDFDSQTNVSQSKDSDVYITDKCVLDMRSMDFKSNSAVAWSNKSDFACANAFNNSIIPEDTFFPSPESSCDVKLVEKSFETDTNLNFQNLSVIGFRILLLKVAGFNLLMTLRLWSSRAKRSGSGVKQTLNFDLLKLAGDVESNPGPSRGHMAKPLSQEESTLIERATATINSIPISEDYSVASAALSSDGRIFTGVNVYHFTGGPCAELVVLGTAAAAAAGNLTCIVAIGNENRGILSPCGRCRQVLLDLHPGIKAIVKDSDGQPTAVGIRELLPSGYVWEG

SEQ ID NO: 18006 - protein, 291 aa, Artificial Sequence
  Synthetic Polypeptide
MDWIWRILFLVGAATGAHSFEEVQLVESGGGLVQPGGSLRLSCAASGFSFSDFWMSWVRQAPGKGLEWVATISQAGSEKDYVDSVKGRFTISRDNAKKSLYLQMNSLRAEDTAVYYCASGVYSFDYRGQGTLVTVSSTREQKLISEEDGSGIQNPDPAVYQLRDSKSSDKSVCLFTDFDSQTNVSQSKDSDVYITDKCVLDMRSMDFKSNSAVAWSNKSDFACANAFNNSIIPEDTFFPSPESSCDVKLVEKSFETDTNLNFQNLSVIGFRILLLKVAGFNLLMTLRLWSS

SEQ ID NO: 18007 - protein, 643 aa, Artificial Sequence
  Synthetic Polypeptide
MALPVTALLLPLALLLHAARPEVQLVESGGGLVQAGGSLRLSCAASGRTFSMGWFRQAPGKEREFVAAITYSGGSPYYADSVKGRFTISRDNAKNTVYLQMNSLKPEDTAVYYCAANPTYGSDWNAENWGQGTQVTVSSLESGGGGSFEEVQLVESGGGLVQPGGSLRLSCAASGFSFSDFWMSWVRQAPGKGLEWVATISQAGSEKDYVDSVKGRFTISRDNAKKSLYLQMNSLRAEDTAVYYCASGVYSFDYRGQGTLVTVSSTRGSGIQNPDPAVYQLRDSKSSDKSVCLFTDFDSQTNVSQSKDSDVYITDKTVLDMRSMDFKSNSAVAWSNKSDFACANAFNNSIIPEDTFFPSSDVPCDVKLVEKSFETDTNLNFQNLSVIGFRILLLKVAGFNLLMTLRLWSSRAKRSGSGVKQTLNFDLLKLAGDVESNPGPSRGHMTEYKPTVRLATRDDVPRAVRTLAAAFADYPATRHTVDPDRHIERVTELQELFLTRVGLDIGKVWVADDGAAVAVWTTPESVEAGAVFAEIGPRMAELSGSRLAAQQQMEGLLAPHRPKEPAWFLATVGVSPDHQGKGLGSAVVLPGVEAAERAGVPAFLETSAPRNLPFYERLGFTVTADVEVPEGPRTWCMTRKPGA

SEQ ID NO: 18008 - protein, 675 aa, Artificial Sequence
  Synthetic Polypeptide
MALPVTALLLPLALLLHAARPEVQLVESGGGLVQAGGSLRLSCAASGRTFSMGWFRQAPGKEREFVAAITYSGGSPYYADSVKGRFTISRDNAKNTVYLQMNSLKPEDTAVYYCAANPTYGSDWNAENWGQGTQVTVSSLESGGGGSFEEVQLVESGGGLVQPGGSLRLSCAASGFSFSDFWMSWVRQAPGKGLEWVATISQAGSEKDYVDSVKGRFTISRDNAKKSLYLQMNSLRAEDTAVYYCASGVYSFDYRGQGTLVTVSSLEDLKNVFPPEVAVFEPSKAEIAHTQKATLVCLATGFYPDHVELSWWVNGKEVHSGVSTDPQPLKEQPALNDSRYCLSSRLRVSATFWQNPRNHFRCQVQFYGLSENDEWTQDRAKPVTQIVSAEAWGRADCGITSASYHQGVLSATILYEILLGKATLYAVLVSALVLMAMVKRKDSRGRAKRSGSGATNFSLLKQAGDVEENPGPTRGHMTEYKPTVRLATRDDVPRAVRTLAAAFADYPATRHTVDPDRHIERVTELQELFLTRVGLDIGKVWVADDGAAVAVWTTPESVEAGAVFAEIGPRMAELSGSRLAAQQQMEGLLAPHRPKEPAWFLATVGVSPDHQGKGLGSAVVLPGVEAAERAGVPAFLETSAPRNLPFYERLGFTVTADVEVPEGPRTWCMTRKPGA

SEQ ID NO: 18009 - protein, 698 aa, Artificial Sequence
  Synthetic Polypeptide
MALPVTALLLPLALLLHAARPEVQLVESGGGLVQAGGSLRLSCAASGRTFSMGWFRQAPGKEREFVAAITYSGGSPYYADSVKGRFTISRDNAKNTVYLQMNSLKPEDTAVYYCAANPTYGSDWNAENWGQGTQVTVSSLESGGGGSFEEVQLVESGGGLVQPGGSLRLSCAASGFSFSDFWMSWVRQAPGKGLEWVATISQAGSEKDYVDSVKGRFTISRDNAKKSLYLQMNSLRAEDTAVYYCASGVYSFDYRGQGTLVTVSSTRGSGGGGSGGGGSGDGNEEMGGITQTPYKVSISGTTVILTCPQYPGSEILWQHNDKNIGGDEDDKNIGSDEDHLSLKEFSELEQSGYYVCYPRGSKPEDANFYLYLRARVCENCMEMDVMSVATIVIVDICITGGLLLLVYYWSKNRKAKAKPVTRGAGAGGRQRGQNKERPPPVPNPDYEPIRKGQRDLYSGLNQRRIRAKRSGSGVKQTLNFDLLKLAGDVESNPGPSRGHMTEYKPTVRLATRDDVPRAVRTLAAAFADYPATRHTVDPDRHIERVTELQELFLTRVGLDIGKVWVADDGAAVAVWTTPESVEAGAVFAEIGPRMAELSGSRLAAQQQMEGLLAPHRPKEPAWFLATVGVSPDHQGKGLGSAVVLPGVEAAERAGVPAFLETSAPRNLPFYERLGFTVTADVEVPEGPRTWCMTRKPGA

SEQ ID NO: 18010 - protein, 663 aa, Artificial Sequence
  Synthetic Polypeptide
MALPVTALLLPLALLLHAARPEVQLVESGGGLVQAGGSLRLSCAASGRTFSMGWFRQAPGKEREFVAAITYSGGSPYYADSVKGRFTISRDNAKNTVYLQMNSLKPEDTAVYYCAANPTYGSDWNAENWGQGTQVTVSSLESGGGGSFEEVQLVESGGGLVQPGGSLRLSCAASGFSFSDFWMSWVRQAPGKGLEWVATISQAGSEKDYVDSVKGRFTISRDNAKKSLYLQMNSLRAEDTAVYYCASGVYSFDYRGQGTLVTVSSTRGSGGGGSGGGGSGFKIPIEELEDRVFVNCNTSITWVEGTVGTLLSDITRLDLGKRILDPRGIYRCNGTDIYKDKESTVQVHYRMCQSCVELDPATVAGIIVTDVIATLLLALGVFCFAGHETGRLSGAADTQALLRNDQVYQPLRDRDDAQYSHLGGNWARNKRAKRSGSGVKQTLNFDLLKLAGDVESNPGPSRGHMTEYKPTVRLATRDDVPRAVRTLAAAFADYPATRHTVDPDRHIERVTELQELFLTRVGLDIGKVWVADDGAAVAVWTTPESVEAGAVFAEIGPRMAELSGSRLAAQQQMEGLLAPHRPKEPAWFLATVGVSPDHQGKGLGSAVVLPGVEAAERAGVPAFLETSAPRNLPFYERLGFTVTADVEVPEGPRTWCMTRKPGA

SEQ ID NO: 18011 - protein, 673 aa, Artificial Sequence
  Synthetic Polypeptide
MALPVTALLLPLALLLHAARPEVQLVESGGGLVQAGGSLRLSCAASGRTFSMGWFRQAPGKEREFVAAITYSGGSPYYADSVKGRFTISRDNAKNTVYLQMNSLKPEDTAVYYCAANPTYGSDWNAENWGQGTQVTVSSLESGGGGSFEEVQLVESGGGLVQPGGSLRLSCAASGFSFSDFWMSWVRQAPGKGLEWVATISQAGSEKDYVDSVKGRFTISRDNAKKSLYLQMNSLRAEDTAVYYCASGVYSFDYRGQGTLVTVSSTRGSGGGGSGGGGSGQSIKGNHLVKVYDYQEDGSVLLTCDAEAKNITWFKDGKMIGFLTEDKKKWNLGSNAKDPRGMYQCKGSQNKSKPLQVYYRMCQNCIELNAATISGFLFAEIVSIFVLAVGVYFIAGQDGVRQSRASDKQTLLPNDQLYQPLKDREDDQYSHLQGNQLRRNRAKRSGSGVKQTLNFDLLKLAGDVESNPGPSRGHMTEYKPTVRLATRDDVPRAVRTLAAAFADYPATRHTVDPDRHIERVTELQELFLTRVGLDIGKVWVADDGAAVAVWTTPESVEAGAVFAEIGPRMAELSGSRLAAQQQMEGLLAPHRPKEPAWFLATVGVSPDHQGKGLGSAVVLPGVEAAERAGVPAFLETSAPRNLPFYERLGFTVTADVEVPEGPRTWCMTRKPGA

SEQ ID NO: 18012 - protein, 656 aa, Artificial Sequence
  Synthetic Polypeptide
MALPVTALLLPLALLLHAARPEVQLVESGGGLVQAGGSLRLSCAASGRTFSMGWFRQAPGKEREFVAAITYSGGSPYYADSVKGRFTISRDNAKNTVYLQMNSLKPEDTAVYYCAANPTYGSDWNAENWGQGTQVTVSSLESGGGGSFEEVQLVESGGGLVQPGGSLRLSCAASGFSFSDFWMSWVRQAPGKGLEWVATISQAGSEKDYVDSVKGRFTISRDNAKKSLYLQMNSLRAEDTAVYYCASGVYSFDYRGQGTLVTVSSTRGSGGGGSGGGGSGQSFGLLDPKLCYLLDGILFIYGVILTALFLRVKFSRSADAPAYQQGQNQLYNELNLGRREEYDVLDKRRGRDPEMGGKPQRRKNPQEGLYNELQKDKMAEAYSEIGMKGERRRGKGHDGLYQGLSTATKDTYDALHMQALPPRRAKRSGSGVKQTLNFDLLKLAGDVESNPGPSRGHMTEYKPTVRLATRDDVPRAVRTLAAAFADYPATRHTVDPDRHIERVTELQELFLTRVGLDIGKVWVADDGAAVAVWTTPESVEAGAVFAEIGPRMAELSGSRLAAQQQMEGLLAPHRPKEPAWFLATVGVSPDHQGKGLGSAVVLPGVEAAERAGVPAFLETSAPRNLPFYERLGFTVTADVEVPEGPRTWCMTRKPGA

SEQ ID NO: 18013 - protein, 864 aa, Artificial Sequence
  Synthetic Polypeptide
MALPVTALLLPLALLLHAARPEVQLVESGGGLVQAGGSLRLSCAASGRTFSMGWFRQAPGKEREFVAAITYSGGSPYYADSVKGRFTISRDNAKNTVYLQMNSLKPEDTAVYYCAANPTYGSDWNAENWGQGTQVTVSSLEGQPKANPTVTLFPPSSEELQANKATLVCLISDFYPGAVTVAWKADGSPVKAGVETTKPSKQSNNKYAASSYLSLTPEQWKSHRSYSCQVTHEGSTVEKTVAPTECSGRADCGFTSESYQQGVLSATILYEILLGKATLYAVLVSALVLMAMVKRKDSRGRAKRSGSGATNFSLLKQAGDVEENPGPTSMDWIWRILFLVGAATGAHSFEEVQLVESGGGLVQPGGSLRLSCAASGFSFSDFWMSWVRQAPGKGLEWVATISQAGSEKDYVDSVKGRFTISRDNAKKSLYLQMNSLRAEDTAVYYCASGVYSFDYRGQGTLVTVSSTRASTKGPSVFPLAPSSKSTSGGTAALGCLVKDYFPEPVTVSWNSGALTSGVHTFPAVLQSSGLYSLSSVVTVPSSSLGTQTYICNVNHKPSNTKVDKRVEPKSCIPEDTFFPSPESSCDVKLVEKSFETDTNLNFQNLSVIGFRILLLKVAGFNLLMTLRLWSSRAKRSGSGVKQTLNFDLLKLAGDVESNPGPSRGHMTEYKPTVRLATRDDVPRAVRTLAAAFADYPATRHTVDPDRHIERVTELQELFLTRVGLDIGKVWVADDGAAVAVWTTPESVEAGAVFAEIGPRMAELSGSRLAAQQQMEGLLAPHRPKEPAWFLATVGVSPDHQGKGLGSAVVLPGVEAAERAGVPAFLETSAPRNLPFYERLGFTVTADVEVPEGPRTWCMTRKPGA

SEQ ID NO: 18014 - protein, 631 aa, Artificial Sequence; identical to SEQ ID NO: 17987
  Synthetic Polypeptide

SEQ ID NO: 18015 - protein, 659 aa, Artificial Sequence
  Synthetic Polypeptide
MALPVTALLLPLALLLHAARPEVQLVESGGGLVQAGGSLRLSCAASGRTFSMGWFRQAPGKEREFVAAITYSGGSPYYADSVKGRFTISRDNAKNTVYLQMNSLKPEDTAVYYCAANPTYGSDWNAENWGQGTQVTVSSLEGSGRADCGFTSESYQQGVLSATILYEILLGKATLYAVLVSALVLMAMVKRKDSRGRAKRSGSGATNFSLLKQAGDVEENPGPTSMDWIWRILFLVGAATGAHSFEEVQLVESGGGLVQPGGSLRLSCAASGFSFSDFWMSWVRQAPGKGLEWVATISQAGSEKDYVDSVKGRFTISRDNAKKSLYLQMNSLRAEDTAVYYCASGVYSFDYRGQGTLVTVSSTRGSIPEDTFFPSPESSCDVKLVEKSFETDTNLNFQNLSVIGFRILLLKVAGFNLLMTLRLWSSRAKRSGSGVKQTLNFDLLKLAGDVESNPGPSRGHMTEYKPTVRLATRDDVPRAVRTLAAAFADYPATRHTVDPDRHIERVTELQELFLTRVGLDIGKVWVADDGAAVAVWTTPESVEAGAVFAEIGPRMAELSGSRLAAQQQMEGLLAPHRPKEPAWFLATVGVSPDHQGKGLGSAVVLPGVEAAERAGVPAFLETSAPRNLPFYERLGFTVTADVEVPEGPRTWCMTRKPGA

SEQ ID NO: 18016 - protein, 426 aa, Artificial Sequence
  Synthetic Polypeptide
MALPVTALLLPLALLLHAARPEVQLVESGGGLVQAGGSLRLSCAASGRTFSMGWFRQAPGKEREFVAAITYSGGSPYYADSVKGRFTISRDNAKNTVYLQMNSLKPEDTAVYYCAANPTYGSDWNAENWGQGTQVTVSSLEGSGRADCGFTSESYQQGVLSATILYEILLGKATLYAVLVSALVLMAMVKRKDSRGRAKRSGSGATNFSLLKQAGDVEENPGPTSMDWIWRILFLVGAATGAHSFEEVQLVESGGGLVQPGGSLRLSCAASGFSFSDFWMSWVRQAPGKGLEWVATISQAGSEKDYVDSVKGRFTISRDNAKKSLYLQMNSLRAEDTAVYYCASGVYSFDYRGQGTLVTVSSTRGSIPEDTFFPSPESSCDVKLVEKSFETDTNLNFQNLSVIGFRILLLKVAGFNLLMTLRLWSS

SEQ ID NO: 18017 - protein, 668 aa, Artificial Sequence
  Synthetic Polypeptide
MALPVTALLLPLALLLHAARPEVQLVESGGGLVQAGGSLRLSCAASGRTFSMGWFRQAPGKEREFVAAITYSGGSPYYADSVKGRFTISRDNAKNTVYLQMNSLKPEDTAVYYCAANPTYGSDWNAENWGQGTQVTVSSLEDKTHTCPPCPAGRADCGFTSESYQQGVLSATILYEILLGKATLYAVLVSALVLMAMVKRKDSRGRAKRSGSGATNFSLLKQAGDVEENPGPTSMDWIWRILFLVGAATGAHSFEEVQLVESGGGLVQPGGSLRLSCAASGFSFSDFWMSWVRQAPGKGLEWVATISQAGSEKDYVDSVKGRFTISRDNAKKSLYLQMNSLRAEDTAVYYCASGVYSFDYRGQGTLVTVSSTRGSIPEDTFFPSPESSCDVKLVEKSFETDTNLNFQNLSVIGFRILLLKVAGFNLLMTLRLWSSRAKRSGSGVKQTLNFDLLKLAGDVESNPGPSRGHMTEYKPTVRLATRDDVPRAVRTLAAAFADYPATRHTVDPDRHIERVTELQELFLTRVGLDIGKVWVADDGAAVAVWTTPESVEAGAVFAEIGPRMAELSGSRLAAQQQMEGLLAPHRPKEPAWFLATVGVSPDHQGKGLGSAVVLPGVEAAERAGVPAFLETSAPRNLPFYERLGFTVTADVEVPEGPRTWCMTRKPGA

SEQ ID NO: 18018 - protein, 668 aa, Artificial Sequence
  Synthetic Polypeptide
MALPVTALLLPLALLLHAARPEVQLVESGGGLVQAGGSLRLSCAASGRTFSMGWFRQAPGKEREFVAAITYSGGSPYYADSVKGRFTISRDNAKNTVYLQMNSLKPEDTAVYYCAANPTYGSDWNAENWGQGTQVTVSSLEGSGRADCGFTSESYQQGVLSATILYEILLGKATLYAVLVSALVLMAMVKRKDSRGRAKRSGSGATNFSLLKQAGDVEENPGPTSMDWIWRILFLVGAATGAHSFEEVQLVESGGGLVQPGGSLRLSCAASGFSFSDFWMSWVRQAPGKGLEWVATISQAGSEKDYVDSVKGRFTISRDNAKKSLYLQMNSLRAEDTAVYYCASGVYSFDYRGQGTLVTVSSTRDKTHTCPPCPAIPEDTFFPSPESSCDVKLVEKSFETDTNLNFQNLSVIGFRILLLKVAGFNLLMTLRLWSSRAKRSGSGVKQTLNFDLLKLAGDVESNPGPSRGHMTEYKPTVRLATRDDVPRAVRTLAAAFADYPATRHTVDPDRHIERVTELQELFLTRVGLDIGKVWVADDGAAVAVWTTPESVEAGAVFAEIGPRMAELSGSRLAAQQQMEGLLAPHRPKEPAWFLATVGVSPDHQGKGLGSAVVLPGVEAAERAGVPAFLETSAPRNLPFYERLGFTVTADVEVPEGPRTWCMTRKPGA

SEQ ID NO: 18019 - protein, 677 aa, Artificial Sequence
  Synthetic Polypeptide
MALPVTALLLPLALLLHAARPEVQLVESGGGLVQAGGSLRLSCAASGRTFSMGWFRQAPGKEREFVAAITYSGGSPYYADSVKGRFTISRDNAKNTVYLQMNSLKPEDTAVYYCAANPTYGSDWNAENWGQGTQVTVSSLEDKTHTCPPCPAGRADCGFTSESYQQGVLSATILYEILLGKATLYAVLVSALVLMAMVKRKDSRGRAKRSGSGATNFSLLKQAGDVEENPGPTSMDWIWRILFLVGAATGAHSFEEVQLVESGGGLVQPGGSLRLSCAASGFSFSDFWMSWVRQAPGKGLEWVATISQAGSEKDYVDSVKGRFTISRDNAKKSLYLQMNSLRAEDTAVYYCASGVYSFDYRGQGTLVTVSSTRDKTHTCPPCPAIPEDTFFPSPESSCDVKLVEKSFETDTNLNFQNLSVIGFRILLLKVAGFNLLMTLRLWSSRAKRSGSGVKQTLNFDLLKLAGDVESNPGPSRGHMTEYKPTVRLATRDDVPRAVRTLAAAFADYPATRHTVDPDRHIERVTELQELFLTRVGLDIGKVWVADDGAAVAVWTTPESVEAGAVFAEIGPRMAELSGSRLAAQQQMEGLLAPHRPKEPAWFLATVGVSPDHQGKGLGSAVVLPGVEAAERAGVPAFLETSAPRNLPFYERLGFTVTADVEVPEGPRTWCMTRKPGA

SEQ ID NO: 18020 - protein, 444 aa, Artificial Sequence
  Synthetic Polypeptide
MALPVTALLLPLALLLHAARPEVQLVESGGGLVQAGGSLRLSCAASGRTFSMGWFRQAPGKEREFVAAITYSGGSPYYADSVKGRFTISRDNAKNTVYLQMNSLKPEDTAVYYCAANPTYGSDWNAENWGQGTQVTVSSLEDKTHTCPPCPAGRADCGFTSESYQQGVLSATILYEILLGKATLYAVLVSALVLMAMVKRKDSRGRAKRSGSGATNFSLLKQAGDVEENPGPTSMDWIWRILFLVGAATGAHSFEEVQLVESGGGLVQPGGSLRLSCAASGFSFSDFWMSWVRQAPGKGLEWVATISQAGSEKDYVDSVKGRFTISRDNAKKSLYLQMNSLRAEDTAVYYCASGVYSFDYRGQGTLVTVSSTRDKTHTCPPCPAIPEDTFFPSPESSCDVKLVEKSFETDTNLNFQNLSVIGFRILLLKVAGFNLLMTLRLWSS

SEQ ID NO: 18021 - protein, 435 aa, Artificial Sequence
  Synthetic Polypeptide
MALPVTALLLPLALLLHAARPEVQLVESGGGLVQAGGSLRLSCAASGRTFSMGWFRQAPGKEREFVAAITYSGGSPYYADSVKGRFTISRDNAKNTVYLQMNSLKPEDTAVYYCAANPTYGSDWNAENWGQGTQVTVSSLEGSGRADCGFTSESYQQGVLSATILYEILLGKATLYAVLVSALVLMAMVKRKDSRGRAKRSGSGATNFSLLKQAGDVEENPGPTSMDWIWRILFLVGAATGAHSFEEVQLVESGGGLVQPGGSLRLSCAASGFSFSDFWMSWVRQAPGKGLEWVATISQAGSEKDYVDSVKGRFTISRDNAKKSLYLQMNSLRAEDTAVYYCASGVYSFDYRGQGTLVTVSSTRDKTHTCPPCPAIPEDTFFPSPESSCDVKLVEKSFETDTNLNFQNLSVIGFRILLLKVAGFNLLMTLRLWSS

SEQ ID NO: 18022 - protein, 886 aa, Artificial Sequence
  Synthetic Polypeptide
MALPVTALLLPLALLLHAARPEVQLVESGGGLVQAGGSLRLSCAASGRTFSMGWFRQAPGKEREFVAAITYSGGSPYYADSVKGRFTISRDNAKNTVYLQMNSLKPEDTAVYYCAANPTYGSDWNAENWGQGTQVTVSSLEGQPKANPTVTLFPPSSEELQANKATLVCLISDFYPGAVTVAWKADGSPVKAGVETTKPSKQSNNKYAASSYLSLTPEQWKSHRSYSCQVTHEGSTVEKTVAPTECSPIKTDVITMDPKDNCSKDANDTLLLQLTNTSAYYMYLLLLLKSVVYFAIITCCLLRRTAFCCNGEKSRAKRSGSGATNFSLLKQAGDVEENPGPTSMDWIWRILFLVGAATGAHSFEEVQLVESGGGLVQPGGSLRLSCAASGFSFSDFWMSWVRQAPGKGLEWVATISQAGSEKDYVDSVKGRFTISRDNAKKSLYLQMNSLRAEDTAVYYCASGVYSFDYRGQGTLVTVSSTRASTKGPSVFPLAPSSKSTSGGTAALGCLVKDYFPEPVTVSWNSGALTSGVHTFPAVLQSSGLYSLSSVVTVPSSSLGTQTYICNVNHKPSNTKVDKRVEPKSCEVKTDSTDHVKPKETENTKQPSKSCHKPKAIVHTEKVNMMSLTVLGLRMLFAKTVAVNFLLTAKLFFLRAKRSGSGVKQTLNFDLLKLAGDVESNPGPSRGHMTEYKPTVRLATRDDVPRAVRTLAAAFADYPATRHTVDPDRHIERVTELQELFLTRVGLDIGKVWVADDGAAVAVWTTPESVEAGAVFAEIGPRMAELSGSRLAAQQQMEGLLAPHRPKEPAWFLATVGVSPDHQGKGLGSAVVLPGVEAAERAGVPAFLETSAPRNLPFYERLGFTVTADVEVPEGPRTWCMTRKPGA

SEQ ID NO: 18023 - protein, 653 aa, Artificial Sequence; identical to SEQ ID NO: 17985
  Synthetic Polypeptide

SEQ ID NO: 18024 - protein, 681 aa, Artificial Sequence
  Synthetic Polypeptide
MALPVTALLLPLALLLHAARPEVQLVESGGGLVQAGGSLRLSCAASGRTFSMGWFRQAPGKEREFVAAITYSGGSPYYADSVKGRFTISRDNAKNTVYLQMNSLKPEDTAVYYCAANPTYGSDWNAENWGQGTQVTVSSLEGSPIKTDVITMDPKDNCSKDANDTLLLQLTNTSAYYMYLLLLLKSVVYFAIITCCLLRRTAFCCNGEKSRAKRSGSGATNFSLLKQAGDVEENPGPTSMDWIWRILFLVGAATGAHSFEEVQLVESGGGLVQPGGSLRLSCAASGFSFSDFWMSWVRQAPGKGLEWVATISQAGSEKDYVDSVKGRFTISRDNAKKSLYLQMNSLRAEDTAVYYCASGVYSFDYRGQGTLVTVSSTRGSEVKTDSTDHVKPKETENTKQPSKSCHKPKAIVHTEKVNMMSLTVLGLRMLFAKTVAVNFLLTAKLFFLRAKRSGSGVKQTLNFDLLKLAGDVESNPGPSRGHMTEYKPTVRLATRDDVPRAVRTLAAAFADYPATRHTVDPDRHIERVTELQELFLTRVGLDIGKVWVADDGAAVAVWTTPESVEAGAVFAEIGPRMAELSGSRLAAQQQMEGLLAPHRPKEPAWFLATVGVSPDHQGKGLGSAVVLPGVEAAERAGVPAFLETSAPRNLPFYERLGFTVTADVEVPEGPRTWCMTRKPGA

SEQ ID NO: 18025 - protein, 448 aa, Artificial Sequence
  Synthetic Polypeptide
MALPVTALLLPLALLLHAARPEVQLVESGGGLVQAGGSLRLSCAASGRTFSMGWFRQAPGKEREFVAAITYSGGSPYYADSVKGRFTISRDNAKNTVYLQMNSLKPEDTAVYYCAANPTYGSDWNAENWGQGTQVTVSSLEGSPIKTDVITMDPKDNCSKDANDTLLLQLTNTSAYYMYLLLLLKSVVYFAIITCCLLRRTAFCCNGEKSRAKRSGSGATNFSLLKQAGDVEENPGPTSMDWIWRILFLVGAATGAHSFEEVQLVESGGGLVQPGGSLRLSCAASGFSFSDFWMSWVRQAPGKGLEWVATISQAGSEKDYVDSVKGRFTISRDNAKKSLYLQMNSLRAEDTAVYYCASGVYSFDYRGQGTLVTVSSTRGSEVKTDSTDHVKPKETENTKQPSKSCHKPKAIVHTEKVNMMSLTVLGLRMLFAKTVAVNFLLTAKLFFL

SEQ ID NO: 18026 - protein, 690 aa, Artificial Sequence
  Synthetic Polypeptide
MALPVTALLLPLALLLHAARPEVQLVESGGGLVQAGGSLRLSCAASGRTFSMGWFRQAPGKEREFVAAITYSGGSPYYADSVKGRFTISRDNAKNTVYLQMNSLKPEDTAVYYCAANPTYGSDWNAENWGQGTQVTVSSLEDKTHTCPPCPAPIKTDVITMDPKDNCSKDANDTLLLQLTNTSAYYMYLLLLLKSVVYFAIITCCLLRRTAFCCNGEKSRAKRSGSGATNFSLLKQAGDVEENPGPTSMDWIWRILFLVGAATGAHSFEEVQLVESGGGLVQPGGSLRLSCAASGFSFSDFWMSWVRQAPGKGLEWVATISQAGSEKDYVDSVKGRFTISRDNAKKSLYLQMNSLRAEDTAVYYCASGVYSFDYRGQGTLVTVSSTRGSEVKTDSTDHVKPKETENTKQPSKSCHKPKAIVHTEKVNMMSLTVLGLRMLFAKTVAVNFLLTAKLFFLRAKRSGSGVKQTLNFDLLKLAGDVESNPGPSRGHMTEYKPTVRLATRDDVPRAVRTLAAAFADYPATRHTVDPDRHIERVTELQELFLTRVGLDIGKVWVADDGAAVAVWTTPESVEAGAVFAEIGPRMAELSGSRLAAQQQMEGLLAPHRPKEPAWFLATVGVSPDHQGKGLGSAVVLPGVEAAERAGVPAFLETSAPRNLPFYERLGFTVTADVEVPEGPRTWCMTRKPGA

SEQ ID NO: 18027 - protein, 690 aa, Artificial Sequence
  Synthetic Polypeptide
MALPVTALLLPLALLLHAARPEVQLVESGGGLVQAGGSLRLSCAASGRTFSMGWFRQAPGKEREFVAAITYSGGSPYYADSVKGRFTISRDNAKNTVYLQMNSLKPEDTAVYYCAANPTYGSDWNAENWGQGTQVTVSSLEGSPIKTDVITMDPKDNCSKDANDTLLLQLTNTSAYYMYLLLLLKSVVYFAIITCCLLRRTAFCCNGEKSRAKRSGSGATNFSLLKQAGDVEENPGPTSMDWIWRILFLVGAATGAHSFEEVQLVESGGGLVQPGGSLRLSCAASGFSFSDFWMSWVRQAPGKGLEWVATISQAGSEKDYVDSVKGRFTISRDNAKKSLYLQMNSLRAEDTAVYYCASGVYSFDYRGQGTLVTVSSTRDKTHTCPPCPAEVKTDSTDHVKPKETENTKQPSKSCHKPKAIVHTEKVNMMSLTVLGLRMLFAKTVAVNFLLTAKLFFLRAKRSGSGVKQTLNFDLLKLAGDVESNPGPSRGHMTEYKPTVRLATRDDVPRAVRTLAAAFADYPATRHTVDPDRHIERVTELQELFLTRVGLDIGKVWVADDGAAVAVWTTPESVEAGAVFAEIGPRMAELSGSRLAAQQQMEGLLAPHRPKEPAWFLATVGVSPDHQGKGLGSAVVLPGVEAAERAGVPAFLETSAPRNLPFYERLGFTVTADVEVPEGPRTWCMTRKPGA

SEQ ID NO: 18028 - protein, 699 aa, Artificial Sequence
  Synthetic Polypeptide
MALPVTALLLPLALLLHAARPEVQLVESGGGLVQAGGSLRLSCAASGRTFSMGWFRQAPGKEREFVAAITYSGGSPYYADSVKGRFTISRDNAKNTVYLQMNSLKPEDTAVYYCAANPTYGSDWNAENWGQGTQVTVSSLEDKTHTCPPCPAPIKTDVITMDPKDNCSKDANDTLLLQLTNTSAYYMYLLLLLKSVVYFAIITCCLLRRTAFCCNGEKSRAKRSGSGATNFSLLKQAGDVEENPGPTSMDWIWRILFLVGAATGAHSFEEVQLVESGGGLVQPGGSLRLSCAASGFSFSDFWMSWVRQAPGKGLEWVATISQAGSEKDYVDSVKGRFTISRDNAKKSLYLQMNSLRAEDTAVYYCASGVYSFDYRGQGTLVTVSSTRDKTHTCPPCPAEVKTDSTDHVKPKETENTKQPSKSCHKPKAIVHTEKVNMMSLTVLGLRMLFAKTVAVNFLLTAKLFFLRAKRSGSGVKQTLNFDLLKLAGDVESNPGPSRGHMTEYKPTVRLATRDDVPRAVRTLAAAFADYPATRHTVDPDRHIERVTELQELFLTRVGLDIGKVWVADDGAAVAVWTTPESVEAGAVFAEIGPRMAELSGSRLAAQQQMEGLLAPHRPKEPAWFLATVGVSPDHQGKGLGSAVVLPGVEAAERAGVPAFLETSAPRNLPFYERLGFTVTADVEVPEGPRTWCMTRKPGA

SEQ ID NO: 18029 - protein, 466 aa, Artificial Sequence
  Synthetic Polypeptide
MALPVTALLLPLALLLHAARPEVQLVESGGGLVQAGGSLRLSCAASGRTFSMGWFRQAPGKEREFVAAITYSGGSPYYADSVKGRFTISRDNAKNTVYLQMNSLKPEDTAVYYCAANPTYGSDWNAENWGQGTQVTVSSLEDKTHTCPPCPAPIKTDVITMDPKDNCSKDANDTLLLQLTNTSAYYMYLLLLLKSVVYFAIITCCLLRRTAFCCNGEKSRAKRSGSGATNFSLLKQAGDVEENPGPTSMDWIWRILFLVGAATGAHSFEEVQLVESGGGLVQPGGSLRLSCAASGFSFSDFWMSWVRQAPGKGLEWVATISQAGSEKDYVDSVKGRFTISRDNAKKSLYLQMNSLRAEDTAVYYCASGVYSFDYRGQGTLVTVSSTRDKTHTCPPCPAEVKTDSTDHVKPKETENTKQPSKSCHKPKAIVHTEKVNMMSLTVLGLRMLFAKTVAVNFLLTAKLFFL

SEQ ID NO: 18030 - protein, 726 aa, Artificial Sequence
  Synthetic Polypeptide
MALPVTALLLPLALLLHAARPDIQMTQSPSSLSASVGDRVTITCKASDHINNWLAWYQQKPGQAPKLLIYGATTLETGVPSRFSGSGSGTDYTLTISSLQPEDFATYYCQQSWNTPWTFGQGTKLEIKRGGGGSGGGGSGGGGSQVQLQQPGAELVKPGASVKMSCKASGYAFSSYWINWMKQKPGQGLEWIGQIYPGDGDTNYNGKFKGRATLTADTSSSTAYMQLSSLTSEDSAVYFCARSITTVVGCAMDYWGQGTSVTVSSTREQKLISEEDLAKPTTTPAPRPPTPAPTIASQPLSLRPEACRPAAGGAVHTRGLDFACDIYIWAPLAGTCGVLLLSLVITLYCKRGRKKLLYIFKQPFMRPVQTTQEEDGCSCRFPEEEEGGCELRVKFSRSADAPAYQQGQNQLYNELNLGRREEYDVLDKRRGRDPEMGGKPRRKNPQEGLYNELQKDKMAEAYSEIGMKGERRRGKGHDGLYQGLSTATKDTYDALHMQALPPRSSGSGEGRGSLLTCGDVEENPGPHMTEYKPTVRLATRDDVPRAVRTLAAAFADYPATRHTVDPDRHIERVTELQELFLTRVGLDIGKVWVADDGAAVAVWTTPESVEAGAVFAEIGPRMAELSGSRLAAQQQMEGLLAPHRPKEPAWFLATVGVSPDHQGKGLGSAVVLPGVEAAERAGVPAFLETSAPRNLPFYERLGFTVTADVEVPEGPRTWCMTRKPGA

SEQ ID NO: 18031 - protein, 720 aa, Artificial Sequence
  Synthetic Polypeptide
MALPVTALLLPLALLLHAARPDIQMTQSPSSLSASVGDRVTITCKASDHINNWLAWYQQKPGQAPKLLIYGATTLETGVPSRFSGSGSGTDYTLTISSLQPEDFATYYCQQSWNTPWTFGQGTKLEIKRGGGGSGGGGSGGGGSQVQLQQPGAELVKPGASVKMSCKASGYAFSSYWINWMKQKPGQGLEWIGQIYPGDGDTNYNGKFKGRATLTADTSSSTAYMQLSSLTSEDSAVYFCARSITTVVGCAMDYWGQGTSVTVSSTREQKLISEEDLKIEVMYPPPYLDNEKSNGTIIHVKGKHLCPSPLFPGPSKPFWVLVVVGGVLACYSLLVTVAFIIFWVRSKRSRLLHSDYMNMTPRRPGPTRKHYQPYAPPRDFAAYRSRVKFSRSADAPAYQQGQNQLYNELNLGRREEYDVLDKRRGRDPEMGGKPRRKNPQEGLYNELQKDKMAEAYSEIGMKGERRRGKGHDGLYQGLSTATKDTYDALHMQALPPRSSGSGEGRGSLLTCGDVEENPGPHMTEYKPTVRLATRDDVPRAVRTLAAAFADYPATRHTVDPDRHIERVTELQELFLTRVGLDIGKVWVADDGAAVAVWTTPESVEAGAVFAEIGPRMAELSGSRLAAQQQMEGLLAPHRPKEPAWFLATVGVSPDHQGKGLGSAVVLPGVEAAERAGVPAFLETSAPRNLPFYERLGFTVTADVEVPEGPRTWCMTRKPGA

SEQ ID NO: 18032 - protein, 497 aa, Artificial Sequence
  Synthetic Polypeptide
MALPVTALLLPLALLLHAARPDIQMTQSPSSLSASVGDRVTITCKASDHINNWLAWYQQKPGQAPKLLIYGATTLETGVPSRFSGSGSGTDYTLTISSLQPEDFATYYCQQSWNTPWTFGQGTKLEIKRGGGGSGGGGSGGGGSQVQLQQPGAELVKPGASVKMSCKASGYAFSSYWINWMKQKPGQGLEWIGQIYPGDGDTNYNGKFKGRATLTADTSSSTAYMQLSSLTSEDSAVYFCARSITTVVGCAMDYWGQGTSVTVSSTREQKLISEEDLKIEVMYPPPYLDNEKSNGTIIHVKGKHLCPSPLFPGPSKPFWVLVVVGGVLACYSLLVTVAFIIFWVRSKRSRLLHSDYMNMTPRRPGPTRKHYQPYAPPRDFAAYRSRVKFSRSADAPAYQQGQNQLYNELNLGRREEYDVLDKRRGRDPEMGGKPRRKNPQEGLYNELQKDKMAEAYSEIGMKGERRRGKGHDGLYQGLSTATKDTYDALHMQALPPR

SEQ ID NO: 18033 - protein, 503 aa, Artificial Sequence
  Synthetic Polypeptide
MALPVTALLLPLALLLHAARPDIQMTQSPSSLSASVGDRVTITCKASDHINNWLAWYQQKPGQAPKLLIYGATTLETGVPSRFSGSGSGTDYTLTISSLQPEDFATYYCQQSWNTPWTFGQGTKLEIKRGGGGSGGGGSGGGGSQVQLQQPGAELVKPGASVKMSCKASGYAFSSYWINWMKQKPGQGLEWIGQIYPGDGDTNYNGKFKGRATLTADTSSSTAYMQLSSLTSEDSAVYFCARSITTVVGCAMDYWGQGTSVTVSSTREQKLISEEDLAKPTTTPAPRPPTPAPTIASQPLSLRPEACRPAAGGAVHTRGLDFACDIYIWAPLAGTCGVLLLSLVITLYCKRGRKKLLYIFKQPFMRPVQTTQEEDGCSCRFPEEEEGGCELRVKFSRSADAPAYQQGQNQLYNELNLGRREEYDVLDKRRGRDPEMGGKPRRKNPQEGLYNELQKDKMAEAYSEIGMKGERRRGKGHDGLYQGLSTATKDTYDALHMQALPPR

SEQ ID NO: 18034 - protein, 503 aa, Artificial Sequence
  Synthetic Polypeptide
MALPVTALLLPLALLLHAARPQVQLQQPGAELVKPGASVKMSCKASGYAFSSYWINWMKQKPGQGLEWIGQIYPGDGDTNYNGKFKGRATLTADTSSSTAYMQLSSLTSEDSAVYFCARSITTVVGCAMDYWGQGTSVTVSSGGGGSGGGGSGGGGSDIQMTQSPSSLSASVGDRVTITCKASDHINNWLAWYQQKPGQAPKLLIYGATTLETGVPSRFSGSGSGTDYTLTISSLQPEDFATYYCQQSWNTPWTFGQGTKLEIKRTREQKLISEEDLAKPTTTPAPRPPTPAPTIASQPLSLRPEACRPAAGGAVHTRGLDFACDIYIWAPLAGTCGVLLLSLVITLYCKRGRKKLLYIFKQPFMRPVQTTQEEDGCSCRFPEEEEGGCELRVKFSRSADAPAYQQGQNQLYNELNLGRREEYDVLDKRRGRDPEMGGKPRRKNPQEGLYNELQKDKMAEAYSEIGMKGERRRGKGHDGLYQGLSTATKDTYDALHMQALPPR

SEQ ID NO: 18035 - protein, 916 aa, Artificial Sequence
  Synthetic Polypeptide
MALPVTALLLPLALLLHAARPDIQMTQSPSSLSASVGDRVTITCKASDHINNWLAWYQQKPGQAPKLLIYGATTLETGVPSRFSGSGSGTDYTLTISSLQPEDFATYYCQQSWNTPWTFGQGTKLEIKRGGGGSGGGGSGGGGSQVQLQQPGAELVKPGASVKMSCKASGYAFSSYWINWMKQKPGQGLEWIGQIYPGDGDTNYNGKFKGRATLTADTSSSTAYMQLSSLTSEDSAVYFCARSITTVVGCAMDYWGQGTSVTVSSTREQKLISEEDLAKPTTTPAPRPPTPAPTIASQPLSLRPEACRPAAGGAVHTRGLDFACDIYIWAPLAGTCGVLLLSLVITLYCGRARVKFSRSADAPAYQQGQNQLYNELNLGRREEYDVLDKRRGRDPEMGGKPRRKNPQEGLYNELQKDKMAEAYSEIGMKGERRRGKGHDGLYQGLSTATKDTYDALHMQALPPRSRGSGATNFSLLKQAGDVEENPGPGIHMATYEVLCEVARKLGTDDREVVLFLLNVFIPQPTLAQLIGALRALKEEGRLTFPLLAECLFRAGRRDLLRDLLHLDPRFLERHLAGTMSYFSPYQLTVLHVDGELCARDIRSLIFLSKDTIGSRSTPQTFLHWVYCMENLDLLGPTDVDALMSMLRSLSRVDLQRQVQTLMGLHLSGPSHSQHYRHTPLETDFYDYKDDDDKTSGSGEGRGSLLTCGDVEENPGPHMTEYKPTVRLATRDDVPRAVRTLAAAFADYPATRHTVDPDRHIERVTELQELFLTRVGLDIGKVWVADDGAAVAVWTTPESVEAGAVFAEIGPRMAELSGSRLAAQQQMEGLLAPHRPKEPAWFLATVGVSPDHQGKGLGSAVVLPGVEAAERAGVPAFLETSAPRNLPFYERLGFTVTADVEVPEGPRTWCMTRKPGA

SEQ ID NO: 18036 - protein, 856 aa, Artificial Sequence
  Synthetic Polypeptide
MALPVTALLLPLALLLHAARPDIQMTQSPSSLSASVGDRVTITCKASDHINNWLAWYQQKPGQAPKLLIYGATTLETGVPSRFSGSGSGTDYTLTISSLQPEDFATYYCQQSWNTPWTFGQGTKLEIKRLEIQNPDPAVYQLRDSKSSDKSVCLFTDFDSQTNVSQSKDSDVYITDKCVLDMRSMDFKSNSAVAWSNKSDFACANAFNNSIIPEDTFFPSSDVPCDVKLVEKSFETDTNLNFQNLSVIGFRILLLKVAGFNLLMTLRLWSSRAKRSGSGVKQTLNFDLLKLAGDVESNPGPTSMDWIWRILFLVGAATGAHSFEQVQLQQPGAELVKPGASVKMSCKASGYAFSSYWINWMKQKPGQGLEWIGQIYPGDGDTNYNGKFKGRATLTADTSSSTAYMQLSSLTSEDSAVYFCARSITTVVGCAMDYWGQGTSVTVSSTREDLKNVFPPEVAVFEPSKAEIAHTQKATLVCLATGFYPDHVELSWWVNGKEVHSGVCTDPQPLKEQPALNDSRYCLSSRLRVSATFWQNPRNHFRCQVQFYGLSENDEWTQDRAKPVTQIVSAEAWGRADCGITSASYHQGVLSATILYEILLGKATLYAVLVSALVLMAMVKRKDSRGRAKRSGSGATNFSLLKQAGDVEENPGPSRGHMTEYKPTVRLATRDDVPRAVRTLAAAFADYPATRHTVDPDRHIERVTELQELFLTRVGLDIGKVWVADDGAAVAVWTTPESVEAGAVFAEIGPRMAELSGSRLAAQQQMEGLLAPHRPKEPAWFLATVGVSPDHQGKGLGSAVVLPGVEAAERAGVPAFLETSAPRNLPFYERLGFTVTADVEVPEGPRTWCMTRKPGA

SEQ ID NO: 18037 - protein, 855 aa, Artificial Sequence
  Synthetic Polypeptide
MALPVTALLLPLALLLHAARPDIQMTQSPSSLSASVGDRVTITCKASDHINNWLAWYQQKPGQAPKLLIYGATTLETGVPSRFSGSGSGTDYTLTISSLQPEDFATYYCQQSWNTPWTFGQGTKLEIKRLEDLKNVFPPEVAVFEPSKAEIAHTQKATLVCLATGFYPDHVELSWWVNGKEVHSGVCTDPQPLKEQPALNDSRYCLSSRLRVSATFWQNPRNHFRCQVQFYGLSENDEWTQDRAKPVTQIVSAEAWGRADCGITSASYHQGVLSATILYEILLGKATLYAVLVSALVLMAMVKRKDSRGRAKRSGSGATNFSLLKQAGDVEENPGPTSMDWIWRILFLVGAATGAHSFEQVQLQQPGAELVKPGASVKMSCKASGYAFSSYWINWMKQKPGQGLEWIGQIYPGDGDTNYNGKFKGRATLTADTSSSTAYMQLSSLTSEDSAVYFCARSITTVVGCAMDYWGQGTSVTVSSTRIQNPDPAVYQLRDSKSSDKSVCLFTDFDSQTNVSQSKDSDVYITDKCVLDMRSMDFKSNSAVAWSNKSDFACANAFNNSIIPEDTFFPSSDVPCDVKLVEKSFETDTNLNFQNLSVIGFRILLLKVAGFNLLMTLRLWSSRAKRSGSGVKQTLNFDLLKLAGDVESNPGPSRGHMTEYKPTVRLATRDDVPRAVRTLAAAFADYPATRHTVDPDRHIERVTELQELFLTRVGLDIGKVWVADDGAAVAVWTTPESVEAGAVFAEIGPRMAELSGSRLAAQQQMEGLLAPHRPKEPAWFLATVGVSPDHQGKGLGSAVVLPGVEAAERAGVPAFLETSAPRNLPFYERLGFTVTADVEVPEGPRTWCMTRKPGA

SEQ ID NO: 18038 - protein, 622 aa, Artificial Sequence
  Synthetic Polypeptide
MALPVTALLLPLALLLHAARPDIQMTQSPSSLSASVGDRVTITCKASDHINNWLAWYQQKPGQAPKLLIYGATTLETGVPSRFSGSGSGTDYTLTISSLQPEDFATYYCQQSWNTPWTFGQGTKLEIKRLEDLKNVFPPEVAVFEPSEAEISHTQKATLVCLATGFYPDHVELSWWVNGKEVHSGVCTDPQPLKEQPALNDSRYCLSSRLRVSATFWQNPRNHFRCQVQFYGLSENDEWTQDRAKPVTQIVSAEAWGRADCGFTSESYQQGVLSATILYEILLGKATLYAVLVSALVLMAMVKRKDSRGRAKRSGSGATNFSLLKQAGDVEENPGPTSMDWIWRILFLVGAATGAHSFEQVQLQQPGAELVKPGASVKMSCKASGYAFSSYWINWMKQKPGQGLEWIGQIYPGDGDTNYNGKFKGRATLTADTSSSTAYMQLSSLTSEDSAVYFCARSITTVVGCAMDYWGQGTSVTVSSTRIQNPDPAVYQLRDSKSSDKSVCLFTDFDSQTNVSQSKDSDVYITDKCVLDMRSMDFKSNSAVAWSNKSDFACANAFNNSIIPEDTFFPSPESSCDVKLVEKSFETDTNLNFQNLSVIGFRILLLKVAGFNLLMTLRLWSS

SEQ ID NO: 18039 - protein, 847 aa, Artificial Sequence
  Synthetic Polypeptide
MALPVTALLLPLALLLHAARPDIQMTQSPSSLSASVGDRVTITCKASDHINNWLAWYQQKPGQAPKLLIYGATTLETGVPSRFSGSGSGTDYTLTISSLQPEDFATYYCQQSWNTPWTFGQGTKLEIKRLEDLKNVFPPEVAVFEPSEAEISHTQKATLVCLATGFYPDHVELSWWVNGKEVHSGVCTDPQPLKEQPALNDSRYCLSSRLRVSATFWQNPRNHFRCQVQFYGLSENDEWTQDRAKPVTQIVSAEAWGRADCGFTSESYQQGVLSATILYEILLGKATLYAVLVSALVLMAMVKRKDSRGRAKRSGSGATNFSLLKQAGDVEENPGPTSMDWIWRILFLVGAATGAHSFEQVQLQQPGAELVKPGASVKMSCKASGYAFSSYWINWMKQKPGQGLEWIGQIYPGDGDTNYNGKFKGRATLTADTSSSTAYMQLSSLTSEDSAVYFCARSITTVVGCAMDYWGQGTSVTVSSTRIQNPDPAVYQLRDSKSSDKSVCLFTDFDSQTNVSQSKDSDVYITDKCVLDMRSMDFKSNSAVAWSNKSDFACANAFNNSIIPEDTFFPSPESSCDVKLVEKSFETDTNLNFQNLSVIGFRILLLKVAGFNLLMTLRLWSSRAKRSGSGVKQTLNFDLLKLAGDVESNPGPSRGGIHTMATYEVLCEVARKLGTDDREVVLFLLNVFIPQPTLAQLIGALRALKEEGRLTFPLLAECLFRAGRRDLLRDLLHLDPRFLERHLAGTMSYFSPYQLTVLHVDGELCARDIRSLIFLSKDTIGSRSTPQTFLHWVYCMENLDLLGPTDVDALMSMLRSLSRVDLQRQVQTLMGLHLSGPSHSQHYRHTP

SEQ ID NO: 18040 - protein, 626 aa, Artificial Sequence
  Synthetic Polypeptide
MALPVTALLLPLALLLHAARPDIQMTQSPSSLSASVGDRVTITCKASDHINNWLAWYQQKPGQAPKLLIYGATTLETGVPSRFSGSGSGTDYTLTISSLQPEDFATYYCQQSWNTPWTFGQGTKLEIKRLEIQNPDPAVYQLRDSKSSDKSVCLFTDFDSQTNVSQSKDSDVYITDKCVLDMRSMDFKSNSAVAWSNKSDFACANAFNNSIIPEDTFFPSPESSCDVKLVEKSFETDTNLNFQNLSVIGFRILLLKVAGFNLLMTLRLWSSRAKRSGSGVKQTLNFDLLKLAGDVESNPGPTSMDWIWRILFLVGAATGAHSFEQVQLQQPGAELVKPGASVKMSCKASGYAFSSYWINWMKQKPGQGLEWIGQIYPGDGDTNYNGKFKGRATLTADTSSSTAYMQLSSLTSEDSAVYFCARSITTVVGCAMDYWGQGTSVTVSSTREDLKNVFPPEVAVFEPSEAEISHTQKATLVCLATGFYPDHVELSWWVNGKEVHSGVCTDPQPLKEQPALNDSRYCLSSRLRVSATFWQNPRNHFRCQVQFYGLSENDEWTQDRAKPVTQIVSAEAWGRADCGFTSESYQQGVLSATILYEILLGKATLYAVLVSALVLMAMVKRKDSRG

SEQ ID NO: 18041 - protein, 848 aa, Artificial Sequence
  Synthetic Polypeptide
MALPVTALLLPLALLLHAARPDIQMTQSPSSLSASVGDRVTITCKASDHINNWLAWYQQKPGQAPKLLIYGATTLETGVPSRFSGSGSGTDYTLTISSLQPEDFATYYCQQSWNTPWTFGQGTKLEIKRLEIQNPDPAVYQLRDSKSSDKSVCLFTDFDSQTNVSQSKDSDVYITDKCVLDMRSMDFKSNSAVAWSNKSDFACANAFNNSIIPEDTFFPSPESSCDVKLVEKSFETDTNLNFQNLSVIGFRILLLKVAGFNLLMTLRLWSSRAKRSGSGVKQTLNFDLLKLAGDVESNPGPTSMDWIWRILFLVGAATGAHSFEQVQLQQPGAELVKPGASVKMSCKASGYAFSSYWINWMKQKPGQGLEWIGQIYPGDGDTNYNGKFKGRATLTADTSSSTAYMQLSSLTSEDSAVYFCARSITTVVGCAMDYWGQGTSVTVSSTREDLKNVFPPEVAVFEPSEAEISHTQKATLVCLATGFYPDHVELSWWVNGKEVHSGVCTDPQPLKEQPALNDSRYCLSSRLRVSATFWQNPRNHFRCQVQFYGLSENDEWTQDRAKPVTQIVSAEAWGRADCGFTSESYQQGVLSATILYEILLGKATLYAVLVSALVLMAMVKRKDSRGRAKRSGSGATNFSLLKQAGDVEENPGPSRGGIHTMATYEVLCEVARKLGTDDREVVLFLLNVFIPQPTLAQLIGALRALKEEGRLTFPLLAECLFRAGRRDLLRDLLHLDPRFLERHLAGTMSYFSPYQLTVLHVDGELCARDIRSLIFLSKDTIGSRSTPQTFLHWVYCMENLDLLGPTDVDALMSMLRSLSRVDLQRQVQTLMGLHLSGPSHSQHYRHTP

SEQ ID NO: 18042 - protein, 900 aa, Artificial Sequence
  Synthetic Polypeptide
MALPVTALLLPLALLLHAARPLEGKPIPNPLLGLDSTGSGEDLKNVFPPEVAVFEPSKAEIAHTQKATLVCLATGFYPDHVELSWWVNGKEVHSGVCTDPQPLKEQPALNDSRYCLSSRLRVSATFWQNPRNHFRCQVQFYGLSENDEWTQDRAKPVTQIVSAEAWGRADCGITSASYHQGVLSATILYEILLGKATLYAVLVSALVLMAMVKRKDSRGRAKRSGSGATNFSLLKQAGDVEENPGPTSMALPVTALLLPLALLLHAARPDIQMTQSPSSLSASVGDRVTITCKASDHINNWLAWYQQKPGQAPKLLIYGATTLETGVPSRFSGSGSGTDYTLTISSLQPEDFATYYCQQSWNTPWTFGQGTKLEIKRGGGGSGGGGSGGGGSQVQLQQPGAELVKPGASVKMSCKASGYAFSSYWINWMKQKPGQGLEWIGQIYPGDGDTNYNGKFKGRATLTADTSSSTAYMQLSSLTSEDSAVYFCARSITTVVGCAMDYWGQGTSVTVSSTREQKLISEEDGSGIQNPDPAVYQLRDSKSSDKSVCLFTDFDSQTNVSQSKDSDVYITDKCVLDMRSMDFKSNSAVAWSNKSDFACANAFNNSIIPEDTFFPSSDVPCDVKLVEKSFETDTNLNFQNLSVIGFRILLLKVAGFNLLMTLRLWSSRAKRSGSGVKQTLNFDLLKLAGDVESNPGPSRGHMTEYKPTVRLATRDDVPRAVRTLAAAFADYPATRHTVDPDRHIERVTELQELFLTRVGLDIGKVWVADDGAAVAVWTTPESVEAGAVFAEIGPRMAELSGSRLAAQQQMEGLLAPHRPKEPAWFLATVGVSPDHQGKGLGSAVVLPGVEAAERAGVPAFLETSAPRNLPFYERLGFTVTADVEVPEGPRTWCMTRKPGA

SEQ ID NO: 18043 - protein, 901 aa, Artificial Sequence
  Synthetic Polypeptide
MALPVTALLLPLALLLHAARPLEQKLISEEDLGSGDRPDPAVYQLRDSKSSDKSVCLFTDFDSQTNVSQSKDSDVYITDKCVLDMRSMDFKSNSAVAWSNKSDFACANAFNNSIIPEDTFFPSPESSCDVKLVEKSFETDTNLNFQNLSVIGFRILLLKVAGFNLLMTLRLWSSSSRAKRSGSGVKQTLNFDLLKLAGDVESNPGPTSMALPVTALLLPLALLLHAARPDIQMTQSPSSLSASVGDRVTITCKASDHINNWLAWYQQKPGQAPKLLIYGATTLETGVPSRFSGSGSGTDYTLTISSLQPEDFATYYCQQSWNTPWTFGQGTKLEIKRGGGGSGGGGSGGGGSQVQLQQPGAELVKPGASVKMSCKASGYAFSSYWINWMKQKPGQGLEWIGQIYPGDGDTNYNGKFKGRATLTADTSSSTAYMQLSSLTSEDSAVYFCARSITTVVGCAMDYWGQGTSVTVSSTRGKPIPNPLLGLDSTGSGEDLKNVFPPEVAVFEPSEAEISHTQKATLVCLATGFYPDHVELSWWVNGKEVHSGVCTDPQPLKEQPALNDSRYCLSSRLRVSATFWQNPRNHFRCQVQFYGLSENDEWTQDRAKPVTQIVSAEAWGRADCGFTSESYQQGVLSATILYEILLGKATLYAVLVSALVLMAMVKRKDSRGRAKRSGSGATNFSLLKQAGDVEENPGPSRGHMTEYKPTVRLATRDDVPRAVRTLAAAFADYPATRHTVDPDRHIERVTELQELFLTRVGLDIGKVWVADDGAAVAVWTTPESVEAGAVFAEIGPRMAELSGSRLAAQQQMEGLLAPHRPKEPAWFLATVGVSPDHQGKGLGSAVVLPGVEAAERAGVPAFLETSAPRNLPFYERLGFTVTADVEVPEGPRTWCMTRKPGA

SEQ ID NO: 18044 - protein, 855 aa, Artificial Sequence
  Synthetic Polypeptide
MALPVTALLLPLALLLHAARPDIQMTQSPSSLSASVGDRVTITCKASDHINNWLAWYQQKPGQAPKLLIYGATTLETGVPSRFSGSGSGTDYTLTISSLQPEDFATYYCQQSWNTPWTFGQGTKLEIKRLEDLKNVFPPEVAVFEPSEAEISHTQKATLVCLATGFYPDHVELSWWVNGKEVHSGVSTDPQPLKEQPALNDSRYCLSSRLRVSATFWQNPRNHFRCQVQFYGLSENDEWTQDRAKPVTQIVSAEAWGRADCGFTSESYQQGVLSATILYEILLGKATLYAVLVSALVLMAMVKRKDSRGRAKRSGSGATNFSLLKQAGDVEENPGPTSMDWIWRILFLVGAATGAHSFEQVQLQQPGAELVKPGASVKMSCKASGYAFSSYWINWMKQKPGQGLEWIGQIYPGDGDTNYNGKFKGRATLTADTSSSTAYMQLSSLTSEDSAVYFCARSITTVVGCAMDYWGQGTSVTVSSTRIQNPDPAVYQLRDSKSSDKSVCLFTDFDSQTNVSQSKDSDVYITDKTVLDMRSMDFKSNSAVAWSNKSDFACANAFNNSIIPEDTFFPSPESSCDVKLVEKSFETDTNLNFQNLSVIGFRILLLKVAGFNLLMTLRLWSSRAKRSGSGVKQTLNFDLLKLAGDVESNPGPSRGHMTEYKPTVRLATRDDVPRAVRTLAAAFADYPATRHTVDPDRHIERVTELQELFLTRVGLDIGKVWVADDGAAVAVWTTPESVEAGAVFAEIGPRMAELSGSRLAAQQQMEGLLAPHRPKEPAWFLATVGVSPDHQGKGLGSAVVLPGVEAAERAGVPAFLETSAPRNLPFYERLGFTVTADVEVPEGPRTWCMTRKPGA

SEQ ID NO: 18045 - protein, 937 aa, Artificial Sequence
  Synthetic Polypeptide
MALPVTALLLPLALLLHAARPDIQMTQSPSSLSASVGDRVTITCKASDHINNWLAWYQQKPGQAPKLLIYGATTLETGVPSRFSGSGSGTDYTLTISSLQPEDFATYYCQQSWNTPWTFGQGTKLEIKRLEDLKNVFPPEVAVFEPSEAEISHTQKATLVCLATGFYPDHVELSWWVNGKEVHSGVSTDPQPLKEQPALNDSRYCLSSRLRVSATFWQNPRNHFRCQVQFYGLSENDEWTQDRAKPVTQIVSAEAWGRADCGFTSESYQQGVLSATILYEILLGKATLYAVLVSALVLMAMVKRKDSRGRAKRSGSGATNFSLLKQAGDVEENPGPTSMDWIWRILFLVGAATGAHSFEQVQLQQPGAELVKPGASVKMSCKASGYAFSSYWINWMKQKPGQGLEWIGQIYPGDGDTNYNGKFKGRATLTADTSSSTAYMQLSSLTSEDSAVYFCARSITTVVGCAMDYWGQGTSVTVSSTREQKLISEEDGSGTPFPSLAPPIMLLVDGKQQMVVVCLVLDVAPPGLDSPIWFSAGNGSALDAFTYGPSPATDGTWTNLAHLSLPSEELASWEPLVCHTGPGAEGHSRSTQPMHLSGEASTARTCPQEPLRGTPGGALWLGVLRLLLFKLLLFDLLLTCSCLCDPAGPLPSPATTTRLRALGSHRLHPATETGGREATSSPRPQPRDRRWGDTPPGRKPGSPVRAKRSGSGVKQTLNFDLLKLAGDVESNPGPSRGHMTEYKPTVRLATRDDVPRAVRTLAAAFADYPATRHTVDPDRHIERVTELQELFLTRVGLDIGKVWVADDGAAVAVWTTPESVEAGAVFAEIGPRMAELSGSRLAAQQQMEGLLAPHRPKEPAWFLATVGVSPDHQGKGLGSAVVLPGVEAAERAGVPAFLETSAPRNLPFYERLGFTVTADVEVPEGPRTWCMTRKPGA

SEQ ID NO: 18046 - protein, 955 aa, Artificial Sequence
  Synthetic Polypeptide
MALPVTALLLPLALLLHAARPLEDLKNVFPPEVAVFEPSEAEISHTQKATLVCLATGFYPDHVELSWWVNGKEVHSGVSTDPQPLKEQPALNDSRYCLSSRLRVSATFWQNPRNHFRCQVQFYGLSENDEWTQDRAKPVTQIVSAEAWGRADCGFTSESYQQGVLSATILYEILLGKATLYAVLVSALVLMAMVKRKDSRGRAKRSGSGATNFSLLKQAGDVEENPGPTSMALPVTALLLPLALLLHAARPDIQMTQSPSSLSASVGDRVTITCKASDHINNWLAWYQQKPGQAPKLLIYGATTLETGVPSRFSGSGSGTDYTLTISSLQPEDFATYYCQQSWNTPWTFGQGTKLEIKRGGGGSGGGGSGGGGSQVQLQQPGAELVKPGASVKMSCKASGYAFSSYWINWMKQKPGQGLEWIGQIYPGDGDTNYNGKFKGRATLTADTSSSTAYMQLSSLTSEDSAVYFCARSITTVVGCAMDYWGQGTSVTVSSTREQKLISEEDLGSGTPFPSLAPPIMLLVDGKQQMVVVCLVLDVAPPGLDSPIWFSAGNGSALDAFTYGPSPATDGTWTNLAHLSLPSEELASWEPLVCHTGPGAEGHSRSTQPMHLSGEASTARTCPQEPLRGTPGGALWLGVLRLLLFKLLLFDLLLTCSCLCDPAGPLPSPATTTRLRALGSHRLHPATETGGREATSSPRPQPRDRRWGDTPPGRKPGSPVRAKRSGSGVKQTLNFDLLKLAGDVESNPGPSRSRGHMTEYKPTVRLATRDDVPRAVRTLAAAFADYPATRHTVDPDRHIERVTELQELFLTRVGLDIGKVWVADDGAAVAVWTTPESVEAGAVFAEIGPRMAELSGSRLAAQQQMEGLLAPHRPKEPAWFLATVGVSPDHQGKGLGSAVVLPGVEAAERAGVPAFLETSAPRNLPFYERLGFTVTADVEVPEGPRTWCMTRKPGA

SEQ ID NO: 18047 - protein, 892 aa, Artificial Sequence
  Synthetic Polypeptide
MALPVTALLLPLALLLHAARPDIQMTQSPSSLSASVGDRVTITCKASDHINNWLAWYQQKPGQAPKLLIYGATTLETGVPSRFSGSGSGTDYTLTISSLQPEDFATYYCQQSWNTPWTFGQGTKLEIKRLEGKPIPNPLLGLDSTGSGDKQLDADVSPKPTIFLPSIAETKLQKAGTYLCLLEKFFPDVIKIHWQEKKSNTILGSQEGNTMKTNDTYMKFSWLTVPEKSLDKEHRCIVRHENNKNGVDQEIIFPPIKTDVITMDPKDNCSKDANDTLLLQLTNTSAYYMYLLLLLKSVVYFAIITCCLLRRTAFCCNGEKSRAKRSGSGATNFSLLKQAGDVEENPGPTSMDWIWRILFLVGAATGAHSFEQVQLQQPGAELVKPGASVKMSCKASGYAFSSYWINWMKQKPGQGLEWIGQIYPGDGDTNYNGKFKGRATLTADTSSSTAYMQLSSLTSEDSAVYFCARSITTVVGCAMDYWGQGTSVTVSSTREQKLISEEDGSGSQPHTKPSVFVMKNGTNVACLVKEFYPKDIRINLVSSKKITEFDPAIVISPSGKYNAVKLGKYEDSNSVTCSVQHDNKTVHSTDFEVKTDSTDHVKPKETENTKQPSKSCHKPKAIVHTEKVNMMSLTVLGLRMLFAKTVAVNFLLTAKLFFLRAKRSGSGVKQTLNFDLLKLAGDVESNPGPSRGHMTEYKPTVRLATRDDVPRAVRTLAAAFADYPATRHTVDPDRHIERVTELQELFLTRVGLDIGKVWVADDGAAVAVWTTPESVEAGAVFAEIGPRMAELSGSRLAAQQQMEGLLAPHRPKEPAWFLATVGVSPDHQGKGLGSAVVLPGVEAAERAGVPAFLETSAPRNLPFYERLGFTVTADVEVPEGPRTWCMTRKPGA

SEQ ID NO: 18048 - protein, 630 aa, Artificial Sequence
  Synthetic Polypeptide
MALPVTALLLPLALLLHAARPDIQMTQSPSSLSASVGDRVTITCKASDHINNWLAWYQQKPGQAPKLLIYGATTLETGVPSRFSGSGSGTDYTLTISSLQPEDFATYYCQQSWNTPWTFGQGTKLEIKRLESQPHTKPSVFVMKNGTNVACLVKEFYPKDIRINLVSSKKITEFDPAIVISPSGKYNAVKLGKYEDSNSVTCSVQHDNKTVHSTDFEVKTDSTDHVKPKETENTKQPSKSCHKPKAIVHTEKVNMMSLTVLGLRMLFAKTVAVNFLLTAKLFFLRAKRSGSGATNFSLLKQAGDVEENPGPTSMDWIWRILFLVGAATGAHSFEQVQLQQPGAELVKPGASVKMSCKASGYAFSSYWINWMKQKPGQGLEWIGQIYPGDGDTNYNGKFKGRATLTADTSSSTAYMQLSSLTSEDSAVYFCARSITTVVGCAMDYWGQGTSVTVSSTRDKQLDADVSPKPTIFLPSIAETKLQKAGTYLCLLEKFFPDVIKIHWQEKKSNTILGSQEGNTMKTNDTYMKFSWLTVPEKSLDKEHRCIVRHENNKNGVDQEIIFPPIKTDVITMDPKDNCSKDANDTLLLQLTNTSAYYMYLLLLLKSVVYFAIITCCLLRRTAFCCNGEKS

SEQ ID NO: 18049 - protein, 907 aa, Artificial Sequence
  Synthetic Polypeptide
MALPVTALLLPLALLLHAARPLEGKPIPNPLLGLDSTGSGDKQLDADVSPKPTIFLPSIAETKLQKAGTYLCLLEKFFPDVIKIHWQEKKSNTILGSQEGNTMKTNDTYMKFSWLTVPEKSLDKEHRCIVRHENNKNGVDQEIIFPPIKTDVITMDPKDNCSKDANDTLLLQLTNTSAYYMYLLLLLKSVVYFAIITCCLLRRTAFCCNGEKSRAKRSGSGATNFSLLKQAGDVEENPGPTSMALPVTALLLPLALLLHAARPDIQMTQSPSSLSASVGDRVTITCKASDHINNWLAWYQQKPGQAPKLLIYGATTLETGVPSRFSGSGSGTDYTLTISSLQPEDFATYYCQQSWNTPWTFGQGTKLEIKRGGGGSGGGGSGGGGSQVQLQQPGAELVKPGASVKMSCKASGYAFSSYWINWMKQKPGQGLEWIGQIYPGDGDTNYNGKFKGRATLTADTSSSTAYMQLSSLTSEDSAVYFCARSITTVVGCAMDYWGQGTSVTVSSTREQKLISEEDGSGSQPHTKPSVFVMKNGTNVACLVKEFYPKDIRINLVSSKKITEFDPAIVISPSGKYNAVKLGKYEDSNSVTCSVQHDNKTVHSTDFEVKTDSTDHVKPKETENTKQPSKSCHKPKAIVHTEKVNMMSLTVLGLRMLFAKTVAVNFLLTAKLFFLRAKRSGSGVKQTLNFDLLKLAGDVESNPGPSRGHMTEYKPTVRLATRDDVPRAVRTLAAAFADYPATRHTVDPDRHIERVTELQELFLTRVGLDIGKVWVADDGAAVAVWTTPESVEAGAVFAEIGPRMAELSGSRLAAQQQMEGLLAPHRPKEPAWFLATVGVSPDHQGKGLGSAVVLPGVEAAERAGVPAFLETSAPRNLPFYERLGFTVTADVEVPEGPRTWCMTRKPGA

SEQ ID NO: 18050 - protein, 1032 aa, Artificial Sequence
  Synthetic Polypeptide
MALPVTALLLPLALLLHAARPDIQMTQSPSSLSASVGDRVTITCKASDHINNWLAWYQQKPGQAPKLLIYGATTLETGVPSRFSGSGSGTDYTLTISSLQPEDFATYYCQQSWNTPWTFGQGTKLEIKRGQPKANPTVTLFPPSSEELQANKATLVCLISDFYPGAVTVAWKADGSPVKAGVETTKPSKQSNNKYAASSYLSLTPEQWKSHRSYSCQVTHEGSTVEKTVAPTECSGSQSFGLLDPKLCYLLDGILFIYGVILTALFLRVKFSRSADAPAYQQGQNQLYNELNLGRREEYDVLDKRRGRDPEMGGKPQRRKNPQEGLYNELQKDKMAEAYSEIGMKGERRRGKGHDGLYQGLSTATKDTYDALHMQALPPRRAKRSGSGATNFSLLKQAGDVEENPGPTSMDWIWRILFLVGAATGAHSFEQVQLQQPGAELVKPGASVKMSCKASGYAFSSYWINWMKQKPGQGLEWIGQIYPGDGDTNYNGKFKGRATLTADTSSSTAYMQLSSLTSEDSAVYFCARSITTVVGCAMDYWGQGTSVTVSSASTKGPSVFPLAPSSKSTSGGTAALGCLVKDYFPEPVTVSWNSGALTSGVHTFPAVLQSSGLYSLSSVVTVPSSSLGTQTYICNVNHKPSNTKVDKRVEPKSCGTQSFGLLDPKLCYLLDGILFIYGVILTALFLRVKFSRSADAPAYQQGQNQLYNELNLGRREEYDVLDKRRGRDPEMGGKPQRRKNPQEGLYNELQKDKMAEAYSEIGMKGERRRGKGHDGLYQGLSTATKDTYDALHMQALPPRRAKRSGSGVKQTLNFDLLKLAGDVESNPGPSRGHMTEYKPTVRLATRDDVPRAVRTLAAAFADYPATRHTVDPDRHIERVTELQELFLTRVGLDIGKVWVADDGAAVAVWTTPESVEAGAVFAEIGPRMAELSGSRLAAQQQMEGLLAPHRPKEPAWFLATVGVSPDHQGKGLGSAVVLPGVEAAERAGVPAFLETSAPRNLPFYERLGFTVTADVEVPEGPRTWCMTRKPGA

SEQ ID NO: 18051 - protein, 818 aa, Artificial Sequence
  Synthetic Polypeptide
MALPVTALLLPLALLLHAARPDIQMTQSPSSLSASVGDRVTITCKASDHINNWLAWYQQKPGQAPKLLIYGATTLETGVPSRFSGSGSGTDYTLTISSLQPEDFATYYCQQSWNTPWTFGQGTKLEIKRLEDLKNVFPPEVAVFEPSEAEISHTQKATLVCLATGFYPDHVELSWWVNGKEVHSGVSTDPQPLKEQPALNDSRYCLSSRLRVSATFWQNPRNHFRCQVQFYGLSENDEWTQDRAKPVTQIVSAEAWGRADCGSQSFGLLDPKLCYLLDGILFIYGVILTALFLRVKFSRSADAPAYQQGQNQLYNELNLGRREEYDVLDKRRGRDPEMGGKPQRRKNPQEGLYNELQKDKMAEAYSEIGMKGERRRGKGHDGLYQGLSTATKDTYDALHMQALPPRRAKRSGSGATNFSLLKQAGDVEENPGPTSMDWIWRILFLVGAATGAHSFEQVQLQQPGAELVKPGASVKMSCKASGYAFSSYWINWMKQKPGQGLEWIGQIYPGDGDTNYNGKFKGRATLTADTSSSTAYMQLSSLTSEDSAVYFCARSITTVVGCAMDYWGQGTSVTVSSTRIQNPDPAVYQLRDSKSSDKSVCLFTDFDSQTNVSQSKDSDVYITDKTVLDMRSMDFKSNSAVAWSNKSDFACANAFNNSIIPEDTFFPSPESSCGTQSFGLLDPKLCYLLDGILFIYGVILTALFLRVKFSRSADAPAYQQGQNQLYNELNLGRREEYDVLDKRRGRDPEMGGKPQRRKNPQEGLYNELQKDKMAEAYSEIGMKGERRRGKGHDGLYQGLSTATKDTYDALHMQALPPR

SEQ ID NO: 18052 - protein, 818 aa, Artificial Sequence
  Synthetic Polypeptide
MALPVTALLLPLALLLHAARPDIQMTQSPSSLSASVGDRVTITCKASDHINNWLAWYQQKPGQAPKLLIYGATTLETGVPSRFSGSGSGTDYTLTISSLQPEDFATYYCQQSWNTPWTFGQGTKLEIKRLEDLKNVFPPEVAVFEPSKAEIAHTQKATLVCLATGFYPDHVELSWWVNGKEVHSGVCTDPQPLKEQPALNDSRYCLSSRLRVSATFWQNPRNHFRCQVQFYGLSENDEWTQDRAKPVTQIVSAEAWGRADCGSQSFGLLDPKLCYLLDGILFIYGVILTALFLRVKFSRSADAPAYQQGQNQLYNELNLGRREEYDVLDKRRGRDPEMGGKPQRRKNPQEGLYNELQKDKMAEAYSEIGMKGERRRGKGHDGLYQGLSTATKDTYDALHMQALPPRRAKRSGSGATNFSLLKQAGDVEENPGPTSMDWIWRILFLVGAATGAHSFEQVQLQQPGAELVKPGASVKMSCKASGYAFSSYWINWMKQKPGQGLEWIGQIYPGDGDTNYNGKFKGRATLTADTSSSTAYMQLSSLTSEDSAVYFCARSITTVVGCAMDYWGQGTSVTVSSTRIQNPDPAVYQLRDSKSSDKSVCLFTDFDSQTNVSQSKDSDVYITDKCVLDMRSMDFKSNSAVAWSNKSDFACANAFNNSIIPEDTFFPSSDVPCGTQSFGLLDPKLCYLLDGILFIYGVILTALFLRVKFSRSADAPAYQQGQNQLYNELNLGRREEYDVLDKRRGRDPEMGGKPQRRKNPQEGLYNELQKDKMAEAYSEIGMKGERRRGKGHDGLYQGLSTATKDTYDALHMQALPPR

SEQ ID NO: 18053 - protein, 889 aa, Artificial Sequence
  Synthetic Polypeptide
MALPVTALLLPLALLLHAARPDIQMTQSPSSLSASVGDRVTITCKASDHINNWLAWYQQKPGQAPKLLIYGATTLETGVPSRFSGSGSGTDYTLTISSLQPEDFATYYCQQSWNTPWTFGQGTKLEIKRLEGKPIPNPLLGLDSTGSGEDLKNVFPPEVAVFEPSEAEISHTQKATLVCLATGFYPDHVELSWWVNGKEVHSGVSTDPQPLKEQPALNDSRYCLSSRLRVSATFWQNPRNHFRCQVQFYGLSENDEWTQDRAKPVTQIVSAEAWGRADCGSQSFGLLDPKLCYLLDGILFIYGVILTALFLRVKFSRSADAPAYQQGQNQLYNELNLGRREEYDVLDKRRGRDPEMGGKPQRRKNPQEGLYNELQKDKMAEAYSEIGMKGERRRGKGHDGLYQGLSTATKDTYDALHMQALPPRRAKRSGSGATNFSLLKQAGDVEENPGPTSMDWIWRILFLVGAATGAHSFEQVQLQQPGAELVKPGASVKMSCKASGYAFSSYWINWMKQKPGQGLEWIGQIYPGDGDTNYNGKFKGRATLTADTSSSTAYMQLSSLTSEDSAVYFCARSITTVVGCAMDYWGQGTSVTVSSTREQKLISEEDGSGIQNPDPAVYQLRDSKSSDKSVCLFTDFDSQTNVSQSKDSDVYITDKTVLDMRSMDFKSNSAVAWSNKSDFACANAFNNSIIPEDTFFPSPESSCGTQSFGLLDPKLCYLLDGILFIYGVILTALFLRSKRSRLLHSDYMNMTPRRPGPTRKHYQPYAPPRDFAAYRSRVKFSRSADAPAYQQGQNQLYNELNLGRREEYDVLDKRRGRDPEMGGKPQRRKNPQEGLYNELQKDKMAEAYSEIGMKGERRRGKGHDGLYQGLSTATKDTYDALHMQALPPR

SEQ ID NO: 18054 - protein, 930 aa, Artificial Sequence
  Synthetic Polypeptide
MALPVTALLLPLALLLHAARPDIQMTQSPSSLSASVGDRVTITCKASDHINNWLAWYQQKPGQAPKLLIYGATTLETGVPSRFSGSGSGTDYTLTISSLQPEDFATYYCQQSWNTPWTFGQGTKLEIKRLEGKPIPNPLLGLDSTGSGEDLKNVFPPEVAVFEPSEAEISHTQKATLVCLATGFYPDHVELSWWVNGKEVHSGVSTDPQPLKEQPALNDSRYCLSSRLRVSATFWQNPRNHFRCQVQFYGLSENDEWTQDRAKPVTQIVSAEAWGRADCGSQSFGLLDPKLCYLLDGILFIYGVILTALFLRSKRSRLLHSDYMNMTPRRPGPTRKHYQPYAPPRDFAAYRSRVKFSRSADAPAYQQGQNQLYNELNLGRREEYDVLDKRRGRDPEMGGKPQRRKNPQEGLYNELQKDKMAEAYSEIGMKGERRRGKGHDGLYQGLSTATKDTYDALHMQALPPRRAKRSGSGATNFSLLKQAGDVEENPGPTSMDWIWRILFLVGAATGAHSFEQVQLQQPGAELVKPGASVKMSCKASGYAFSSYWINWMKQKPGQGLEWIGQIYPGDGDTNYNGKFKGRATLTADTSSSTAYMQLSSLTSEDSAVYFCARSITTVVGCAMDYWGQGTSVTVSSTREQKLISEEDGSGIQNPDPAVYQLRDSKSSDKSVCLFTDFDSQTNVSQSKDSDVYITDKTVLDMRSMDFKSNSAVAWSNKSDFACANAFNNSIIPEDTFFPSPESSCGTQSFGLLDPKLCYLLDGILFIYGVILTALFLRSKRSRLLHSDYMNMTPRRPGPTRKHYQPYAPPRDFAAYRSRVKFSRSADAPAYQQGQNQLYNELNLGRREEYDVLDKRRGRDPEMGGKPQRRKNPQEGLYNELQKDKMAEAYSEIGMKGERRRGKGHDGLYQGLSTATKDTYDALHMQALPPR

SEQ ID NO: 18055 - protein, 891 aa, Artificial Sequence
  Synthetic Polypeptide
MALPVTALLLPLALLLHAARPDIQMTQSPSSLSASVGDRVTITCKASDHINNWLAWYQQKPGQAPKLLIYGATTLETGVPSRFSGSGSGTDYTLTISSLQPEDFATYYCQQSWNTPWTFGQGTKLEIKRLEGKPIPNPLLGLDSTGSGEDLKNVFPPEVAVFEPSEAEISHTQKATLVCLATGFYPDHVELSWWVNGKEVHSGVSTDPQPLKEQPALNDSRYCLSSRLRVSATFWQNPRNHFRCQVQFYGLSENDEWTQDRAKPVTQIVSAEAWGRADCGSQSFGLLDPKLCYLLDGILFIYGVILTALFLRVKFSRSADAPAYQQGQNQLYNELNLGRREEYDVLDKRRGRDPEMGGKPQRRKNPQEGLYNELQKDKMAEAYSEIGMKGERRRGKGHDGLYQGLSTATKDTYDALHMQALPPRRAKRSGSGATNFSLLKQAGDVEENPGPTSMDWIWRILFLVGAATGAHSFEQVQLQQPGAELVKPGASVKMSCKASGYAFSSYWINWMKQKPGQGLEWIGQIYPGDGDTNYNGKFKGRATLTADTSSSTAYMQLSSLTSEDSAVYFCARSITTVVGCAMDYWGQGTSVTVSSTREQKLISEEDLGSGIQNPDPAVYQLRDSKSSDKSVCLFTDFDSQTNVSQSKDSDVYITDKTVLDMRSMDFKSNSAVAWSNKSDFACANAFNNSIIPEDTFFPSPESSCGTQSFGLLDPKLCYLLDGILFIYGVILTALFLKRGRKKLLYIFKQPFMRPVQTTQEEDGCSCRFPEEEEGGCELRVKFSRSADAPAYQQGQNQLYNELNLGRREEYDVLDKRRGRDPEMGGKPQRRKNPQEGLYNELQKDKMAEAYSEIGMKGERRRGKGHDGLYQGLSTATKDTYDALHMQALPPR

SEQ ID NO: 18056 - protein, 933 aa, Artificial Sequence
  Synthetic Polypeptide
MALPVTALLLPLALLLHAARPDIQMTQSPSSLSASVGDRVTITCKASDHINNWLAWYQQKPGQAPKLLIYGATTLETGVPSRFSGSGSGTDYTLTISSLQPEDFATYYCQQSWNTPWTFGQGTKLEIKRLEGKPIPNPLLGLDSTGSGEDLKNVFPPEVAVFEPSEAEISHTQKATLVCLATGFYPDHVELSWWVNGKEVHSGVSTDPQPLKEQPALNDSRYCLSSRLRVSATFWQNPRNHFRCQVQFYGLSENDEWTQDRAKPVTQIVSAEAWGRADCGSQSFGLLDPKLCYLLDGILFIYGVILTALFLKRGRKKLLYIFKQPFMRPVQTTQEEDGCSCRFPEEEEGGCELRVKFSRSADAPAYQQGQNQLYNELNLGRREEYDVLDKRRGRDPEMGGKPQRRKNPQEGLYNELQKDKMAEAYSEIGMKGERRRGKGHDGLYQGLSTATKDTYDALHMQALPPRRAKRSGSGATNFSLLKQAGDVEENPGPTSMDWIWRILFLVGAATGAHSFEQVQLQQPGAELVKPGASVKMSCKASGYAFSSYWINWMKQKPGQGLEWIGQIYPGDGDTNYNGKFKGRATLTADTSSSTAYMQLSSLTSEDSAVYFCARSITTVVGCAMDYWGQGTSVTVSSTREQKLISEEDLGSGIQNPDPAVYQLRDSKSSDKSVCLFTDFDSQTNVSQSKDSDVYITDKTVLDMRSMDFKSNSAVAWSNKSDFACANAFNNSIIPEDTFFPSPESSCGTQSFGLLDPKLCYLLDGILFIYGVILTALFLKRGRKKLLYIFKQPFMRPVQTTQEEDGCSCRFPEEEEGGCELRVKFSRSADAPAYQQGQNQLYNELNLGRREEYDVLDKRRGRDPEMGGKPQRRKNPQEGLYNELQKDKMAEAYSEIGMKGERRRGKGHDGLYQGLSTATKDTYDALHMQALPPR

SEQ ID NO: 18057 - protein, 823 aa, Artificial Sequence
  Synthetic Polypeptide
MALPVTALLLPLALLLHAARPDIQMTQSPSSLSASVGDRVTITCKASDHINNWLAWYQQKPGQAPKLLIYGATTLETGVPSRFSGSGSGTDYTLTISSLQPEDFATYYCQQSWNTPWTFGQGTKLEIKRLEQSFGLLDPKLCYLLDGILFIYGVILTALFLRVKFSRSADAPAYQQGQNQLYNELNLGRREEYDVLDKRRGRDPEMGGKPQRRKNPQEGLYNELQKDKMAEAYSEIGMKGERRRGKGHDGLYQGLSTATKDTYDALHMQALPPRRAKRSGSGATNFSLLKQAGDVEENPGPTSMDWIWRILFLVGAATGAHSFEQVQLQQPGAELVKPGASVKMSCKASGYAFSSYWINWMKQKPGQGLEWIGQIYPGDGDTNYNGKFKGRATLTADTSSSTAYMQLSSLTSEDSAVYFCARSITTVVGCAMDYWGQGTSVTVSSTRQSFGLLDPKLCYLLDGILFIYGVILTALFLRVKFSRSADAPAYQQGQNQLYNELNLGRREEYDVLDKRRGRDPEMGGKPQRRKNPQEGLYNELQKDKMAEAYSEIGMKGERRRGKGHDGLYQGLSTATKDTYDALHMQALPPRRAKRSGSGVKQTLNFDLLKLAGDVESNPGPSRGHMTEYKPTVRLATRDDVPRAVRTLAAAFADYPATRHTVDPDRHIERVTELQELFLTRVGLDIGKVWVADDGAAVAVWTTPESVEAGAVFAEIGPRMAELSGSRLAAQQQMEGLLAPHRPKEPAWFLATVGVSPDHQGKGLGSAVVLPGVEAAERAGVPAFLETSAPRNLPFYERLGFTVTADVEVPEGPRTWCMTRKPGA

SEQ ID NO: 18058 - protein, 648 aa, Artificial Sequence
  Synthetic Polypeptide
MALPVTALLLPLALLLHAARPDIQMTQSPSSLSASVGDRVTITCKASDHINNWLAWYQQKPGQAPKLLIYGATTLETGVPSRFSGSGSGTDYTLTISSLQPEDFATYYCQQSWNTPWTFGQGTKLEIKRLEGQPKANPTVTLFPPSSEELQANKATLVCLISDFYPGAVTVAWKADGSPVKAGVETTKPSKQSNNKYAASSYLSLTPEQWKSHRSYSCQVTHEGSTVEKTVAPTECSPIKTDVITMDPKDNCSKDANDTLLLQLTNTSAYYMYLLLLLKSVVYFAIITCCLLRRTAFCCNGEKSRAKRSGSGATNFSLLKQAGDVEENPGPTSMDWIWRILFLVGAATGAHSFEQVQLQQPGAELVKPGASVKMSCKASGYAFSSYWINWMKQKPGQGLEWIGQIYPGDGDTNYNGKFKGRATLTADTSSSTAYMQLSSLTSEDSAVYFCARSITTVVGCAMDYWGQGTSVTVSSTRASTKGPSVFPLAPSSKSTSGGTAALGCLVKDYFPEPVTVSWNSGALTSGVHTFPAVLQSSGLYSLSSVVTVPSSSLGTQTYICNVNHKPSNTKVDKRVEPKSCEVKTDSTDHVKPKETENTKQPSKSCHKPKAIVHTEKVNMMSLTVLGLRMLFAKTVAVNFLLTAKLFFL

SEQ ID NO: 18059 - protein, 626 aa, Artificial Sequence
  Synthetic Polypeptide
MALPVTALLLPLALLLHAARPDIQMTQSPSSLSASVGDRVTITCKASDHINNWLAWYQQKPGQAPKLLIYGATTLETGVPSRFSGSGSGTDYTLTISSLQPEDFATYYCQQSWNTPWTFGQGTKLEIKRLEGQPKANPTVTLFPPSSEELQANKATLVCLISDFYPGAVTVAWKADGSPVKAGVETTKPSKQSNNKYAASSYLSLTPEQWKSHRSYSCQVTHEGSTVEKTVAPTECSGRADCGITSASYHQGVLSATILYEILLGKATLYAVLVSALVLMAMVKRKDSRGRAKRSGSGATNFSLLKQAGDVEENPGPTSMDWIWRILFLVGAATGAHSFEQVQLQQPGAELVKPGASVKMSCKASGYAFSSYWINWMKQKPGQGLEWIGQIYPGDGDTNYNGKFKGRATLTADTSSSTAYMQLSSLTSEDSAVYFCARSITTVVGCAMDYWGQGTSVTVSSTRASTKGPSVFPLAPSSKSTSGGTAALGCLVKDYFPEPVTVSWNSGALTSGVHTFPAVLQSSGLYSLSSVVTVPSSSLGTQTYICNVNHKPSNTKVDKRVEPKSCIPEDTFFPSSDVPCDVKLVEKSFETDTNLNFQNLSVIGFRILLLKVAGFNLLMTLRLWSS

SEQ ID NO: 18060 - protein, 626 aa, Artificial Sequence
  Synthetic Polypeptide
MALPVTALLLPLALLLHAARPDIQMTQSPSSLSASVGDRVTITCKASDHINNWLAWYQQKPGQAPKLLIYGATTLETGVPSRFSGSGSGTDYTLTISSLQPEDFATYYCQQSWNTPWTFGQGTKLEIKRLEGQPKANPTVTLFPPSSEELQANKATLVCLISDFYPGAVTVAWKADGSPVKAGVETTKPSKQSNNKYAASSYLSLTPEQWKSHRSYSCQVTHEGSTVEKTVAPTECSGRADCGFTSESYQQGVLSATILYEILLGKATLYAVLVSALVLMAMVKRKDSRGRAKRSGSGATNFSLLKQAGDVEENPGPTSMDWIWRILFLVGAATGAHSFEQVQLQQPGAELVKPGASVKMSCKASGYAFSSYWINWMKQKPGQGLEWIGQIYPGDGDTNYNGKFKGRATLTADTSSSTAYMQLSSLTSEDSAVYFCARSITTVVGCAMDYWGQGTSVTVSSTRASTKGPSVFPLAPSSKSTSGGTAALGCLVKDYFPEPVTVSWNSGALTSGVHTFPAVLQSSGLYSLSSVVTVPSSSLGTQTYICNVNHKPSNTKVDKRVEPKSCIPEDTFFPSPESSCDVKLVEKSFETDTNLNFQNLSVIGFRILLLKVAGFNLLMTLRLWSS

SEQ ID NO: 18061 - protein, 452 aa, Artificial Sequence
  Synthetic Polypeptide
MALPVTALLLPLALLLHAARPDIQMTQSPSSLSASVGDRVTITCKASDHINNWLAWYQQKPGQAPKLLIYGATTLETGVPSRFSGSGSGTDYTLTISSLQPEDFATYYCQQSWNTPWTFGQGTKLEIKRGGGGSGGGGSGGGGSQVQLQQPGAELVKPGASVKMSCKASGYAFSSYWINWMKQKPGQGLEWIGQIYPGDGDTNYNGKFKGRATLTADTSSSTAYMQLSSLTSEDSAVYFCARSITTVVGCAMDYWGQGTSVTVSSTRDGNEEMGGITQTPYKVSISGTTVILTCPQYPGSEILWQHNDKNIGGDEDDKNIGSDEDHLSLKEFSELEQSGYYVCYPRGSKPEDANFYLYLRARVCENCMEMDVMSVATIVIVDICITGGLLLLVYYWSKNRKAKAKPVTRGAGAGGRQRGQNKERPPPVPNPDYEPIRKGQRDLYSGLNQRRI

SEQ ID NO: 18062 - protein, 417 aa, Artificial Sequence
  Synthetic Polypeptide
MALPVTALLLPLALLLHAARPDIQMTQSPSSLSASVGDRVTITCKASDHINNWLAWYQQKPGQAPKLLIYGATTLETGVPSRFSGSGSGTDYTLTISSLQPEDFATYYCQQSWNTPWTFGQGTKLEIKRGGGGSGGGGSGGGGSQVQLQQPGAELVKPGASVKMSCKASGYAFSSYWINWMKQKPGQGLEWIGQIYPGDGDTNYNGKFKGRATLTADTSSSTAYMQLSSLTSEDSAVYFCARSITTVVGCAMDYWGQGTSVTVSSTRFKIPIEELEDRVFVNCNTSITWVEGTVGTLLSDITRLDLGKRILDPRGIYRCNGTDIYKDKESTVQVHYRMCQSCVELDPATVAGIIVTDVIATLLLALGVFCFAGHETGRLSGAADTQALLRNDQVYQPLRDRDDAQYSHLGGNWARNK

SEQ ID NO: 18063 - protein, 427 aa, Artificial Sequence
  Synthetic Polypeptide
MALPVTALLLPLALLLHAARPDIQMTQSPSSLSASVGDRVTITCKASDHINNWLAWYQQKPGQAPKLLIYGATTLETGVPSRFSGSGSGTDYTLTISSLQPEDFATYYCQQSWNTPWTFGQGTKLEIKRGGGGSGGGGSGGGGSQVQLQQPGAELVKPGASVKMSCKASGYAFSSYWINWMKQKPGQGLEWIGQIYPGDGDTNYNGKFKGRATLTADTSSSTAYMQLSSLTSEDSAVYFCARSITTVVGCAMDYWGQGTSVTVSSTRQSIKGNHLVKVYDYQEDGSVLLTCDAEAKNITWFKDGKMIGFLTEDKKKWNLGSNAKDPRGMYQCKGSQNKSKPLQVYYRMCQNCIELNAATISGFLFAEIVSIFVLAVGVYFIAGQDGVRQSRASDKQTLLPNDQLYQPLKDREDDQYSHLQGNQLRRN

SEQ ID NO: 18064 - protein, 410 aa, Artificial Sequence
  Synthetic Polypeptide
MALPVTALLLPLALLLHAARPDIQMTQSPSSLSASVGDRVTITCKASDHINNWLAWYQQKPGQAPKLLIYGATTLETGVPSRFSGSGSGTDYTLTISSLQPEDFATYYCQQSWNTPWTFGQGTKLEIKRGGGGSGGGGSGGGGSQVQLQQPGAELVKPGASVKMSCKASGYAFSSYWINWMKQKPGQGLEWIGQIYPGDGDTNYNGKFKGRATLTADTSSSTAYMQLSSLTSEDSAVYFCARSITTVVGCAMDYWGQGTSVTVSSTRQSFGLLDPKLCYLLDGILFIYGVILTALFLRVKFSRSADAPAYQQGQNQLYNELNLGRREEYDVLDKRRGRDPEMGGKPQRRKNPQEGLYNELQKDKMAEAYSEIGMKGERRRGKGHDGLYQGLSTATKDTYDALHMQALPPR

SEQ ID NO: 18065 - protein, 452 aa, Artificial Sequence
  Synthetic Polypeptide
MALPVTALLLPLALLLHAARPQVQLQQPGAELVKPGASVKMSCKASGYAFSSYWINWMKQKPGQGLEWIGQIYPGDGDTNYNGKFKGRATLTADTSSSTAYMQLSSLTSEDSAVYFCARSITTVVGCAMDYWGQGTSVTVSSGGGGSGGGGSGGGGSDIQMTQSPSSLSASVGDRVTITCKASDHINNWLAWYQQKPGQAPKLLIYGATTLETGVPSRFSGSGSGTDYTLTISSLQPEDFATYYCQQSWNTPWTFGQGTKLEIKRTRDGNEEMGGITQTPYKVSISGTTVILTCPQYPGSEILWQHNDKNIGGDEDDKNIGSDEDHLSLKEFSELEQSGYYVCYPRGSKPEDANFYLYLRARVCENCMEMDVMSVATIVIVDICITGGLLLLVYYWSKNRKAKAKPVTRGAGAGGRQRGQNKERPPPVPNPDYEPIRKGQRDLYSGLNQRRI

SEQ ID NO: 18066 - protein, 417 aa, Artificial Sequence
  Synthetic Polypeptide
MALPVTALLLPLALLLHAARPQVQLQQPGAELVKPGASVKMSCKASGYAFSSYWINWMKQKPGQGLEWIGQIYPGDGDTNYNGKFKGRATLTADTSSSTAYMQLSSLTSEDSAVYFCARSITTVVGCAMDYWGQGTSVTVSSGGGGSGGGGSGGGGSDIQMTQSPSSLSASVGDRVTITCKASDHINNWLAWYQQKPGQAPKLLIYGATTLETGVPSRFSGSGSGTDYTLTISSLQPEDFATYYCQQSWNTPWTFGQGTKLEIKRTRFKIPIEELEDRVFVNCNTSITWVEGTVGTLLSDITRLDLGKRILDPRGIYRCNGTDIYKDKESTVQVHYRMCQSCVELDPATVAGIIVTDVIATLLLALGVFCFAGHETGRLSGAADTQALLRNDQVYQPLRDRDDAQYSHLGGNWARNK

SEQ ID NO: 18067 - protein, 427 aa, Artificial Sequence
  Synthetic Polypeptide
MALPVTALLLPLALLLHAARPQVQLQQPGAELVKPGASVKMSCKASGYAFSSYWINWMKQKPGQGLEWIGQIYPGDGDTNYNGKFKGRATLTADTSSSTAYMQLSSLTSEDSAVYFCARSITTVVGCAMDYWGQGTSVTVSSGGGGSGGGGSGGGGSDIQMTQSPSSLSASVGDRVTITCKASDHINNWLAWYQQKPGQAPKLLIYGATTLETGVPSRFSGSGSGTDYTLTISSLQPEDFATYYCQQSWNTPWTFGQGTKLEIKRTRQSIKGNHLVKVYDYQEDGSVLLTCDAEAKNITWFKDGKMIGFLTEDKKKWNLGSNAKDPRGMYQCKGSQNKSKPLQVYYRMCQNCIELNAATISGFLFAEIVSIFVLAVGVYFIAGQDGVRQSRASDKQTLLPNDQLYQPLKDREDDQYSHLQGNQLRRN

SEQ ID NO: 18068 - protein, 410 aa, Artificial Sequence
  Synthetic Polypeptide
MALPVTALLLPLALLLHAARPQVQLQQPGAELVKPGASVKMSCKASGYAFSSYWINWMKQKPGQGLEWIGQIYPGDGDTNYNGKFKGRATLTADTSSSTAYMQLSSLTSEDSAVYFCARSITTVVGCAMDYWGQGTSVTVSSGGGGSGGGGSGGGGSDIQMTQSPSSLSASVGDRVTITCKASDHINNWLAWYQQKPGQAPKLLIYGATTLETGVPSRFSGSGSGTDYTLTISSLQPEDFATYYCQQSWNTPWTFGQGTKLEIKRTRQSFGLLDPKLCYLLDGILFIYGVILTALFLRVKFSRSADAPAYQQGQNQLYNELNLGRREEYDVLDKRRGRDPEMGGKPQRRKNPQEGLYNELQKDKMAEAYSEIGMKGERRRGKGHDGLYQGLSTATKDTYDALHMQALPPR

SEQ ID NO: 18069 - protein, 643 aa, Artificial Sequence
  Synthetic Polypeptide
MALPVTALLLPLALLLHAARPDIQMTQSPSSLSASVGDRVTITCKASDHINNWLAWYQQKPGQAPKLLIYGATTLETGVPSRFSGSGSGTDYTLTISSLQPEDFATYYCQQSWNTPWTFGQGTKLEIKRGGGGSGGGGSGGGGSQVQLQQPGAELVKPGASVKMSCKASGYAFSSYWINWMKQKPGQGLEWIGQIYPGDGDTNYNGKFKGRATLTADTSSSTAYMQLSSLTSEDSAVYFCARSITTVVGCAMDYWGQGTSVTVSSTRGSGIQNPDPAVYQLRDSKSSDKSVCLFTDFDSQTNVSQSKDSDVYITDKTVLDMRSMDFKSNSAVAWSNKSDFACANAFNNSIIPEDTFFPSPESSCDVKLVEKSFETDTNLNFQNLSVIGFRILLLKVAGFNLLMTLRLWSSRAKRSGSGVKQTLNFDLLKLAGDVESNPGPSRGHMTEYKPTVRLATRDDVPRAVRTLAAAFADYPATRHTVDPDRHIERVTELQELFLTRVGLDIGKVWVADDGAAVAVWTTPESVEAGAVFAEIGPRMAELSGSRLAAQQQMEGLLAPHRPKEPAWFLATVGVSPDHQGKGLGSAVVLPGVEAAERAGVPAFLETSAPRNLPFYERLGFTVTADVEVPEGPRTWCMTRKPGA

SEQ ID NO: 18070 - protein, 675 aa, Artificial Sequence
  Synthetic Polypeptide
MALPVTALLLPLALLLHAARPDIQMTQSPSSLSASVGDRVTITCKASDHINNWLAWYQQKPGQAPKLLIYGATTLETGVPSRFSGSGSGTDYTLTISSLQPEDFATYYCQQSWNTPWTFGQGTKLEIKRGGGGSGGGGSGGGGSQVQLQQPGAELVKPGASVKMSCKASGYAFSSYWINWMKQKPGQGLEWIGQIYPGDGDTNYNGKFKGRATLTADTSSSTAYMQLSSLTSEDSAVYFCARSITTVVGCAMDYWGQGTSVTVSSLEDLKNVFPPEVAVFEPSEAEISHTQKATLVCLATGFYPDHVELSWWVNGKEVHSGVSTDPQPLKEQPALNDSRYCLSSRLRVSATFWQNPRNHFRCQVQFYGLSENDEWTQDRAKPVTQIVSAEAWGRADCGFTSESYQQGVLSATILYEILLGKATLYAVLVSALVLMAMVKRKDSRGRAKRSGSGATNFSLLKQAGDVEENPGPTRGHMTEYKPTVRLATRDDVPRAVRTLAAAFADYPATRHTVDPDRHIERVTELQELFLTRVGLDIGKVWVADDGAAVAVWTTPESVEAGAVFAEIGPRMAELSGSRLAAQQQMEGLLAPHRPKEPAWFLATVGVSPDHQGKGLGSAVVLPGVEAAERAGVPAFLETSAPRNLPFYERLGFTVTADVEVPEGPRTWCMTRKPGA

SEQ ID NO: 18071 - protein, 725 aa, Artificial Sequence
  Synthetic Polypeptide
MALPVTALLLPLALLLHAARPDIQMTQSPSSLSASVGDRVTITCKASDHINNWLAWYQQKPGQAPKLLIYGATTLETGVPSRFSGSGSGTDYTLTISSLQPEDFATYYCQQSWNTPWTFGQGTKLEIKRGGGGSGGGGSGGGGSQVQLQQPGAELVKPGASVKMSCKASGYAFSSYWINWMKQKPGQGLEWIGQIYPGDGDTNYNGKFKGRATLTADTSSSTAYMQLSSLTSEDSAVYFCARSITTVVGCAMDYWGQGTSVTVSSTREQKLISEEDLGSGTPFPSLAPPIMLLVDGKQQMVVVCLVLDVAPPGLDSPIWFSAGNGSALDAFTYGPSPATDGTWTNLAHLSLPSEELASWEPLVCHTGPGAEGHSRSTQPMHLSGEASTARTCPQEPLRGTPGGALWLGVLRLLLFKLLLFDLLLTCSCLCDPAGPLPSPATTTRLRALGSHRLHPATETGGREATSSPRPQPRDRRWGDTPPGRKPGSPVRAKRSGSGVKQTLNFDLLKLAGDVESNPGPSRSRGHMTEYKPTVRLATRDDVPRAVRTLAAAFADYPATRHTVDPDRHIERVTELQELFLTRVGLDIGKVWVADDGAAVAVWTTPESVEAGAVFAEIGPRMAELSGSRLAAQQQMEGLLAPHRPKEPAWFLATVGVSPDHQGKGLGSAVVLPGVEAAERAGVPAFLETSAPRNLPFYERLGFTVTADVEVPEGPRTWCMTRKPGA

SEQ ID NO: 18072 - protein, 539 aa, Artificial Sequence
  Synthetic Polypeptide
MALPVTALLLPLALLLHAARPDIQMTQSPSSLSASVGDRVTITCKASDHINNWLAWYQQKPGQAPKLLIYGATTLETGVPSRFSGSGSGTDYTLTISSLQPEDFATYYCQQSWNTPWTFGQGTKLEIKRLEDLKNVFPPEVAVFEPSEAEISHTQKATLVCLATGFYPDHVELSWWVNGKEVHSGVSTDPQPLKEQPALNDSRYCLSSRLRVSATFWQNPRNHFRCQVQFYGLSENDEWTQDRAKPVTQIVSAEAWGRADCGFTSESYQQGVLSATILYEILLGKATLYAVLVSALVLMAMVKRKDSRGRAKRSGSGATNFSLLKQAGDVEENPGPTRGHMTEYKPTVRLATRDDVPRAVRTLAAAFADYPATRHTVDPDRHIERVTELQELFLTRVGLDIGKVWVADDGAAVAVWTTPESVEAGAVFAEIGPRMAELSGSRLAAQQQMEGLLAPHRPKEPAWFLATVGVSPDHQGKGLGSAVVLPGVEAAERAGVPAFLETSAPRNLPFYERLGFTVTADVEVPEGPRTWCMTRKPGA

SEQ ID NO: 18073 - protein, 309 aa, Artificial Sequence
  Synthetic Polypeptide
MALPVTALLLPLALLLHAARPDIQMTQSPSSLSASVGDRVTITCKASDHINNWLAWYQQKPGQAPKLLIYGATTLETGVPSRFSGSGSGTDYTLTISSLQPEDFATYYCQQSWNTPWTFGQGTKLEIKRLEDLKNVFPPEVAVFEPSEAEISHTQKATLVCLATGFYPDHVELSWWVNGKEVHSGVSTDPQPLKEQPALNDSRYCLSSRLRVSATFWQNPRNHFRCQVQFYGLSENDEWTQDRAKPVTQIVSAEAWGRADCGFTSESYQQGVLSATILYEILLGKATLYAVLVSALVLMAMVKRKDSRG

SEQ ID NO: 18074 - protein, 450 aa, Artificial Sequence; identical to SEQ ID NO: 14845
  Synthetic Polypeptide

SEQ ID NO: 18075 - protein, 284 aa, Artificial Sequence; identical to SEQ ID NO: 14846
  Synthetic Polypeptide

SEQ ID NO: 18076 - protein, 557 aa, Artificial Sequence
  Synthetic Polypeptide
MALPVTALLLPLALLLHAARPDIQMTQSPSSLSASVGDRVTITCKASDHINNWLAWYQQKPGQAPKLLIYGATTLETGVPSRFSGSGSGTDYTLTISSLQPEDFATYYCQQSWNTPWTFGQGTKLEIKRLEGKPIPNPLLGLDSTGSGEDLKNVFPPEVAVFEPSEAEISHTQKATLVCLATGFYPDHVELSWWVNGKEVHSGVCTDPQPLKEQPALNDSRYCLSSRLRVSATFWQNPRNHFRCQVQFYGLSENDEWTQDRAKPVTQIVSAEAWGRADCGFTSESYQQGVLSATILYEILLGKATLYAVLVSALVLMAMVKRKDSRGRAKRSGSGATNFSLLKQAGDVEENPGPTRGHMTEYKPTVRLATRDDVPRAVRTLAAAFADYPATRHTVDPDRHIERVTELQELFLTRVGLDIGKVWVADDGAAVAVWTTPESVEAGAVFAEIGPRMAELSGSRLAAQQQMEGLLAPHRPKEPAWFLATVGVSPDHQGKGLGSAVVLPGVEAAERAGVPAFLETSAPRNLPFYERLGFTVTADVEVPEGPRTWCMTRKPGA

SEQ ID NO: 18077 - protein, 327 aa, Artificial Sequence
  Synthetic Polypeptide
MALPVTALLLPLALLLHAARPDIQMTQSPSSLSASVGDRVTITCKASDHINNWLAWYQQKPGQAPKLLIYGATTLETGVPSRFSGSGSGTDYTLTISSLQPEDFATYYCQQSWNTPWTFGQGTKLEIKRLEGKPIPNPLLGLDSTGSGEDLKNVFPPEVAVFEPSEAEISHTQKATLVCLATGFYPDHVELSWWVNGKEVHSGVCTDPQPLKEQPALNDSRYCLSSRLRVSATFWQNPRNHFRCQVQFYGLSENDEWTQDRAKPVTQIVSAEAWGRADCGFTSESYQQGVLSATILYEILLGKATLYAVLVSALVLMAMVKRKDSRG

SEQ ID NO: 18078 - protein, 462 aa, Artificial Sequence; identical to SEQ ID NO: 14849
  Synthetic Polypeptide

SEQ ID NO: 18079 - protein, 296 aa, Artificial Sequence; identical to SEQ ID NO: 14850
  Synthetic Polypeptide

SEQ ID NO: 18080 - protein, 643 aa, Artificial Sequence
  Synthetic Polypeptide
MALPVTALLLPLALLLHAARPDIQMTQSPSSLSASVGDRVTITCKASDHINNWLAWYQQKPGQAPKLLIYGATTLETGVPSRFSGSGSGTDYTLTISSLQPEDFATYYCQQSWNTPWTFGQGTKLEIKRGGGGSGGGGSGGGGSQVQLQQPGAELVKPGASVKMSCKASGYAFSSYWINWMKQKPGQGLEWIGQIYPGDGDTNYNGKFKGRATLTADTSSSTAYMQLSSLTSEDSAVYFCARSITTVVGCAMDYWGQGTSVTVSSTRGSGIQNPDPAVYQLRDSKSSDKSVCLFTDFDSQTNVSQSKDSDVYITDKTVLDMRSMDFKSNSAVAWSNKSDFACANAFNNSIIPEDTFFPSSDVPCDVKLVEKSFETDTNLNFQNLSVIGFRILLLKVAGFNLLMTLRLWSSRAKRSGSGVKQTLNFDLLKLAGDVESNPGPSRGHMTEYKPTVRLATRDDVPRAVRTLAAAFADYPATRHTVDPDRHIERVTELQELFLTRVGLDIGKVWVADDGAAVAVWTTPESVEAGAVFAEIGPRMAELSGSRLAAQQQMEGLLAPHRPKEPAWFLATVGVSPDHQGKGLGSAVVLPGVEAAERAGVPAFLETSAPRNLPFYERLGFTVTADVEVPEGPRTWCMTRKPGA

SEQ ID NO: 18081 - protein, 675 aa, Artificial Sequence
  Synthetic Polypeptide
MALPVTALLLPLALLLHAARPDIQMTQSPSSLSASVGDRVTITCKASDHINNWLAWYQQKPGQAPKLLIYGATTLETGVPSRFSGSGSGTDYTLTISSLQPEDFATYYCQQSWNTPWTFGQGTKLEIKRGGGGSGGGGSGGGGSQVQLQQPGAELVKPGASVKMSCKASGYAFSSYWINWMKQKPGQGLEWIGQIYPGDGDTNYNGKFKGRATLTADTSSSTAYMQLSSLTSEDSAVYFCARSITTVVGCAMDYWGQGTSVTVSSLEDLKNVFPPEVAVFEPSKAEIAHTQKATLVCLATGFYPDHVELSWWVNGKEVHSGVSTDPQPLKEQPALNDSRYCLSSRLRVSATFWQNPRNHFRCQVQFYGLSENDEWTQDRAKPVTQIVSAEAWGRADCGITSASYHQGVLSATILYEILLGKATLYAVLVSALVLMAMVKRKDSRGRAKRSGSGATNFSLLKQAGDVEENPGPTRGHMTEYKPTVRLATRDDVPRAVRTLAAAFADYPATRHTVDPDRHIERVTELQELFLTRVGLDIGKVWVADDGAAVAVWTTPESVEAGAVFAEIGPRMAELSGSRLAAQQQMEGLLAPHRPKEPAWFLATVGVSPDHQGKGLGSAVVLPGVEAAERAGVPAFLETSAPRNLPFYERLGFTVTADVEVPEGPRTWCMTRKPGA

SEQ ID NO: 18082 - protein, 698 aa, Artificial Sequence
  Synthetic Polypeptide
MALPVTALLLPLALLLHAARPDIQMTQSPSSLSASVGDRVTITCKASDHINNWLAWYQQKPGQAPKLLIYGATTLETGVPSRFSGSGSGTDYTLTISSLQPEDFATYYCQQSWNTPWTFGQGTKLEIKRGGGGSGGGGSGGGGSQVQLQQPGAELVKPGASVKMSCKASGYAFSSYWINWMKQKPGQGLEWIGQIYPGDGDTNYNGKFKGRATLTADTSSSTAYMQLSSLTSEDSAVYFCARSITTVVGCAMDYWGQGTSVTVSSTRGSGGGGSGGGGSGDGNEEMGGITQTPYKVSISGTTVILTCPQYPGSEILWQHNDKNIGGDEDDKNIGSDEDHLSLKEFSELEQSGYYVCYPRGSKPEDANFYLYLRARVCENCMEMDVMSVATIVIVDICITGGLLLLVYYWSKNRKAKAKPVTRGAGAGGRQRGQNKERPPPVPNPDYEPIRKGQRDLYSGLNQRRIRAKRSGSGVKQTLNFDLLKLAGDVESNPGPSRGHMTEYKPTVRLATRDDVPRAVRTLAAAFADYPATRHTVDPDRHIERVTELQELFLTRVGLDIGKVWVADDGAAVAVWTTPESVEAGAVFAEIGPRMAELSGSRLAAQQQMEGLLAPHRPKEPAWFLATVGVSPDHQGKGLGSAVVLPGVEAAERAGVPAFLETSAPRNLPFYERLGFTVTADVEVPEGPRTWCMTRKPGA

SEQ ID NO: 18083 - protein, 663 aa, Artificial Sequence
  Synthetic Polypeptide
MALPVTALLLPLALLLHAARPDIQMTQSPSSLSASVGDRVTITCKASDHINNWLAWYQQKPGQAPKLLIYGATTLETGVPSRFSGSGSGTDYTLTISSLQPEDFATYYCQQSWNTPWTFGQGTKLEIKRGGGGSGGGGSGGGGSQVQLQQPGAELVKPGASVKMSCKASGYAFSSYWINWMKQKPGQGLEWIGQIYPGDGDTNYNGKFKGRATLTADTSSSTAYMQLSSLTSEDSAVYFCARSITTVVGCAMDYWGQGTSVTVSSTRGSGGGGSGGGGSGFKIPIEELEDRVFVNCNTSITWVEGTVGTLLSDITRLDLGKRILDPRGIYRCNGTDIYKDKESTVQVHYRMCQSCVELDPATVAGIIVTDVIATLLLALGVFCFAGHETGRLSGAADTQALLRNDQVYQPLRDRDDAQYSHLGGNWARNKRAKRSGSGVKQTLNFDLLKLAGDVESNPGPSRGHMTEYKPTVRLATRDDVPRAVRTLAAAFADYPATRHTVDPDRHIERVTELQELFLTRVGLDIGKVWVADDGAAVAVWTTPESVEAGAVFAEIGPRMAELSGSRLAAQQQMEGLLAPHRPKEPAWFLATVGVSPDHQGKGLGSAVVLPGVEAAERAGVPAFLETSAPRNLPFYERLGFTVTADVEVPEGPRTWCMTRKPGA

SEQ ID NO: 18084 - protein, 673 aa, Artificial Sequence
  Synthetic Polypeptide
MALPVTALLLPLALLLHAARPDIQMTQSPSSLSASVGDRVTITCKASDHINNWLAWYQQKPGQAPKLLIYGATTLETGVPSRFSGSGSGTDYTLTISSLQPEDFATYYCQQSWNTPWTFGQGTKLEIKRGGGGSGGGGSGGGGSQVQLQQPGAELVKPGASVKMSCKASGYAFSSYWINWMKQKPGQGLEWIGQIYPGDGDTNYNGKFKGRATLTADTSSSTAYMQLSSLTSEDSAVYFCARSITTVVGCAMDYWGQGTSVTVSSTRGSGGGGSGGGGSGQSIKGNHLVKVYDYQEDGSVLLTCDAEAKNITWFKDGKMIGFLTEDKKKWNLGSNAKDPRGMYQCKGSQNKSKPLQVYYRMCQNCIELNAATISGFLFAEIVSIFVLAVGVYFIAGQDGVRQSRASDKQTLLPNDQLYQPLKDREDDQYSHLQGNQLRRNRAKRSGSGVKQTLNFDLLKLAGDVESNPGPSRGHMTEYKPTVRLATRDDVPRAVRTLAAAFADYPATRHTVDPDRHIERVTELQELFLTRVGLDIGKVWVADDGAAVAVWTTPESVEAGAVFAEIGPRMAELSGSRLAAQQQMEGLLAPHRPKEPAWFLATVGVSPDHQGKGLGSAVVLPGVEAAERAGVPAFLETSAPRNLPFYERLGFTVTADVEVPEGPRTWCMTRKPGA

SEQ ID NO: 18085 - protein, 656 aa, Artificial Sequence
  Synthetic Polypeptide
MALPVTALLLPLALLLHAARPDIQMTQSPSSLSASVGDRVTITCKASDHINNWLAWYQQKPGQAPKLLIYGATTLETGVPSRFSGSGSGTDYTLTISSLQPEDFATYYCQQSWNTPWTFGQGTKLEIKRGGGGSGGGGSGGGGSQVQLQQPGAELVKPGASVKMSCKASGYAFSSYWINWMKQKPGQGLEWIGQIYPGDGDTNYNGKFKGRATLTADTSSSTAYMQLSSLTSEDSAVYFCARSITTVVGCAMDYWGQGTSVTVSSTRGSGGGGSGGGGSGQSFGLLDPKLCYLLDGILFIYGVILTALFLRVKFSRSADAPAYQQGQNQLYNELNLGRREEYDVLDKRRGRDPEMGGKPQRRKNPQEGLYNELQKDKMAEAYSEIGMKGERRRGKGHDGLYQGLSTATKDTYDALHMQALPPRRAKRSGSGVKQTLNFDLLKLAGDVESNPGPSRGHMTEYKPTVRLATRDDVPRAVRTLAAAFADYPATRHTVDPDRHIERVTELQELFLTRVGLDIGKVWVADDGAAVAVWTTPESVEAGAVFAEIGPRMAELSGSRLAAQQQMEGLLAPHRPKEPAWFLATVGVSPDHQGKGLGSAVVLPGVEAAERAGVPAFLETSAPRNLPFYERLGFTVTADVEVPEGPRTWCMTRKPGA

SEQ ID NO: 18086 - protein, 757 aa, Artificial Sequence; identical to SEQ ID NO: 12659
  Synthetic Polypeptide

SEQ ID NO: 18087 - protein, 761 aa, Artificial Sequence; identical to SEQ ID NO: 12824
  Synthetic Polypeptide

SEQ ID NO: 18088 - protein, 953 aa, Artificial Sequence; identical to SEQ ID NO: 12989
  Synthetic Polypeptide

SEQ ID NO: 18089 - protein, 783 aa, Artificial Sequence; identical to SEQ ID NO: 13649
  Synthetic Polypeptide

SEQ ID NO: 18090 - protein, 764 aa, Artificial Sequence; identical to SEQ ID NO: 13979
  Synthetic Polypeptide

SEQ ID NO: 18091 - protein, 898 aa, Artificial Sequence; identical to SEQ ID NO: 13319
  Synthetic Polypeptide

SEQ ID NO: 18092 - protein, 1090 aa, Artificial Sequence; identical to SEQ ID NO: 13484
  Synthetic Polypeptide

SEQ ID NO: 18093 - protein, 920 aa, Artificial Sequence; identical to SEQ ID NO: 13814
  Synthetic Polypeptide

SEQ ID NO: 18094 - protein, 901 aa, Artificial Sequence; identical to SEQ ID NO: 14144
  Synthetic Polypeptide

SEQ ID NO: 18095 - protein, 758 aa, Artificial Sequence; identical to SEQ ID NO: 16911
  Synthetic Polypeptide

SEQ ID NO: 18096 - protein, 759 aa, Artificial Sequence; identical to SEQ ID NO: 16951
  Synthetic Polypeptide

SEQ ID NO: 18097 - protein, 886 aa, Artificial Sequence; identical to SEQ ID NO: 17089
  Synthetic Polypeptide

SEQ ID NO: 18098 - protein, 895 aa, Artificial Sequence
  Synthetic Polypeptide
MALPVTALLLPLALLLHAARPEVQVLESGGGLVQPGGSLRLSCAASGFTFSNFAMSWVRQAPGKGLEWVSTISGSAGTTDYADSVKGRFTISRDNSKKTLYLQMNSLRVEDTAVYYCADGRGPFFDYRGQGTLVTVSSGTGGGGSGGGGSGGGGSEFDIQMTQSPSSLSASVGDRVTITCKASDHINNWLAWYQQKPGQAPKLLIYGATTLETGVPSRFSGSGSGTDYTLTISSLQPEDFATYYCQQSWNTPWTFGQGTKLEIKRLEDLKNVFPPEVAVFEPSEAEISHTQKATLVCLATGFYPDHVELSWWVNGKEVHSGVCTDPQPLKEQPALNDSRYCLSSRLRVSATFWQNPRNHFRCQVQFYGLSENDEWTQDRAKPVTQIVSAEAWGRADCGFTSESYQQGVLSATILYEILLGKATLYAVLVSALVLMAMVKRKDSRGRAKRSGSGATNFSLLKQAGDVEENPGPTSMDWIWRILFLVGAATGAHSGPEVQLVESGGGLVQAGGSLRLSCAASGRTFSMGWFRQAPGKEREFVAAITYSGGSPYYASSVRGRFTISRDNAKNTVYLQMNSLKPEDTAVYYCAANPTYGSDWNAENWGQGTQVTVSSGSGGGGSGGGGSGGGGSFEQVQLQQPGAELVKPGASVKMSCKASGYAFSSYWINWMKQKPGQGLEWIGQIYPGDGDTNYNGKFKGRATLTADTSSSTAYMQLSSLTSEDSAVYFCARSITTVVGCAMDYWGQGTSVTVSSTRIQNPDPAVYQLRDSKSSDKSVCLFTDFDSQTNVSQSKDSDVYITDKCVLDMRSMDFKSNSAVAWSNKSDFACANAFNNSIIPEDTFFPSPESSCDVKLVEKSFETDTNLNFQNLSVIGFRILLLKVAGFNLLMTLRLWSS

SEQ ID NO: 18099 - protein, 727 aa, Artificial Sequence
  Synthetic Polypeptide
MALPVTALLLPLALLLHAARPSYVLTQPPSVSVAPGQTARITCGGNNIGSKSVHWYQQPPGQAPVVVVYDDSDRPSGIPERFSGSNSGNTATLTISRVEAGDEAVYYCQVWDSSSDHVVFGGGTKLTVLGGGGSGGGGSGGGGSQLQLQESGPGLVKPSETLSLTCTVSGGSISSSSYFWGWIRQPPGKGLEWIGSIYYSGITYYNPSLKSRVTISVDTSKNQFSLKLSSVTAADTAVYYCARHDGAVAGLFDYWGQGTLVTVSSATREQKLISEEDLAKPTTTPAPRPPTPAPTIASQPLSLRPEACRPAAGGAVHTRGLDFACDIYIWAPLAGTCGVLLLSLVITLYCKRGRKKLLYIFKQPFMRPVQTTQEEDGCSCRFPEEEEGGCELRVKFSRSADAPAYQQGQNQLYNELNLGRREEYDVLDKRRGRDPEMGGKPRRKNPQEGLYNELQKDKMAEAYSEIGMKGERRRGKGHDGLYQGLSTATKDTYDALHMQALPPRSSGSGEGRGSLLTCGDVEENPGPHMTEYKPTVRLATRDDVPRAVRTLAAAFADYPATRHTVDPDRHIERVTELQELFLTRVGLDIGKVWVADDGAAVAVWTTPESVEAGAVFAEIGPRMAELSGSRLAAQQQMEGLLAPHRPKEPAWFLATVGVSPDHQGKGLGSAVVLPGVEAAERAGVPAFLETSAPRNLPFYERLGFTVTADVEVPEGPRTWCMTRKPGA

SEQ ID NO: 18100 - protein, 721 aa, Artificial Sequence
  Synthetic Polypeptide
MALPVTALLLPLALLLHAARPSYVLTQPPSVSVAPGQTARITCGGNNIGSKSVHWYQQPPGQAPVVVVYDDSDRPSGIPERFSGSNSGNTATLTISRVEAGDEAVYYCQVWDSSSDHVVFGGGTKLTVLGGGGSGGGGSGGGGSQLQLQESGPGLVKPSETLSLTCTVSGGSISSSSYFWGWIRQPPGKGLEWIGSIYYSGITYYNPSLKSRVTISVDTSKNQFSLKLSSVTAADTAVYYCARHDGAVAGLFDYWGQGTLVTVSSATREQKLISEEDLKIEVMYPPPYLDNEKSNGTIIHVKGKHLCPSPLFPGPSKPFWVLVVVGGVLACYSLLVTVAFIIFWVRSKRSRLLHSDYMNMTPRRPGPTRKHYQPYAPPRDFAAYRSRVKFSRSADAPAYQQGQNQLYNELNLGRREEYDVLDKRRGRDPEMGGKPRRKNPQEGLYNELQKDKMAEAYSEIGMKGERRRGKGHDGLYQGLSTATKDTYDALHMQALPPRSSGSGEGRGSLLTCGDVEENPGPHMTEYKPTVRLATRDDVPRAVRTLAAAFADYPATRHTVDPDRHIERVTELQELFLTRVGLDIGKVWVADDGAAVAVWTTPESVEAGAVFAEIGPRMAELSGSRLAAQQQMEGLLAPHRPKEPAWFLATVGVSPDHQGKGLGSAVVLPGVEAAERAGVPAFLETSAPRNLPFYERLGFTVTADVEVPEGPRTWCMTRKPGA

SEQ ID NO: 18101 - protein, 498 aa, Artificial Sequence
  Synthetic Polypeptide
MALPVTALLLPLALLLHAARPSYVLTQPPSVSVAPGQTARITCGGNNIGSKSVHWYQQPPGQAPVVVVYDDSDRPSGIPERFSGSNSGNTATLTISRVEAGDEAVYYCQVWDSSSDHVVFGGGTKLTVLGGGGSGGGGSGGGGSQLQLQESGPGLVKPSETLSLTCTVSGGSISSSSYFWGWIRQPPGKGLEWIGSIYYSGITYYNPSLKSRVTISVDTSKNQFSLKLSSVTAADTAVYYCARHDGAVAGLFDYWGQGTLVTVSSATREQKLISEEDLKIEVMYPPPYLDNEKSNGTIIHVKGKHLCPSPLFPGPSKPFWVLVVVGGVLACYSLLVTVAFIIFWVRSKRSRLLHSDYMNMTPRRPGPTRKHYQPYAPPRDFAAYRSRVKFSRSADAPAYQQGQNQLYNELNLGRREEYDVLDKRRGRDPEMGGKPRRKNPQEGLYNELQKDKMAEAYSEIGMKGERRRGKGHDGLYQGLSTATKDTYDALHMQALPPR

SEQ ID NO: 18102 - protein, 504 aa, Artificial Sequence
  Synthetic Polypeptide
MALPVTALLLPLALLLHAARPSYVLTQPPSVSVAPGQTARITCGGNNIGSKSVHWYQQPPGQAPVVVVYDDSDRPSGIPERFSGSNSGNTATLTISRVEAGDEAVYYCQVWDSSSDHVVFGGGTKLTVLGGGGSGGGGSGGGGSQLQLQESGPGLVKPSETLSLTCTVSGGSISSSSYFWGWIRQPPGKGLEWIGSIYYSGITYYNPSLKSRVTISVDTSKNQFSLKLSSVTAADTAVYYCARHDGAVAGLFDYWGQGTLVTVSSATREQKLISEEDLAKPTTTPAPRPPTPAPTIASQPLSLRPEACRPAAGGAVHTRGLDFACDIYIWAPLAGTCGVLLLSLVITLYCKRGRKKLLYIFKQPFMRPVQTTQEEDGCSCRFPEEEEGGCELRVKFSRSADAPAYQQGQNQLYNELNLGRREEYDVLDKRRGRDPEMGGKPRRKNPQEGLYNELQKDKMAEAYSEIGMKGERRRGKGHDGLYQGLSTATKDTYDALHMQALPPR

SEQ ID NO: 18103 - protein, 504 aa, Artificial Sequence
  Synthetic Polypeptide
MALPVTALLLPLALLLHAARPQLQLQESGPGLVKPSETLSLTCTVSGGSISSSSYFWGWIRQPPGKGLEWIGSIYYSGITYYNPSLKSRVTISVDTSKNQFSLKLSSVTAADTAVYYCARHDGAVAGLFDYWGQGTLVTVSSAGGGGSGGGGSGGGGSSYVLTQPPSVSVAPGQTARITCGGNNIGSKSVHWYQQPPGQAPVVVVYDDSDRPSGIPERFSGSNSGNTATLTISRVEAGDEAVYYCQVWDSSSDHVVFGGGTKLTVLTREQKLISEEDLAKPTTTPAPRPPTPAPTIASQPLSLRPEACRPAAGGAVHTRGLDFACDIYIWAPLAGTCGVLLLSLVITLYCKRGRKKLLYIFKQPFMRPVQTTQEEDGCSCRFPEEEEGGCELRVKFSRSADAPAYQQGQNQLYNELNLGRREEYDVLDKRRGRDPEMGGKPRRKNPQEGLYNELQKDKMAEAYSEIGMKGERRRGKGHDGLYQGLSTATKDTYDALHMQALPPR

SEQ ID NO: 18104 - protein, 917 aa, Artificial Sequence
  Synthetic Polypeptide
MALPVTALLLPLALLLHAARPSYVLTQPPSVSVAPGQTARITCGGNNIGSKSVHWYQQPPGQAPVVVVYDDSDRPSGIPERFSGSNSGNTATLTISRVEAGDEAVYYCQVWDSSSDHVVFGGGTKLTVLGGGGSGGGGSGGGGSQLQLQESGPGLVKPSETLSLTCTVSGGSISSSSYFWGWIRQPPGKGLEWIGSIYYSGITYYNPSLKSRVTISVDTSKNQFSLKLSSVTAADTAVYYCARHDGAVAGLFDYWGQGTLVTVSSATREQKLISEEDLAKPTTTPAPRPPTPAPTIASQPLSLRPEACRPAAGGAVHTRGLDFACDIYIWAPLAGTCGVLLLSLVITLYCGRARVKFSRSADAPAYQQGQNQLYNELNLGRREEYDVLDKRRGRDPEMGGKPRRKNPQEGLYNELQKDKMAEAYSEIGMKGERRRGKGHDGLYQGLSTATKDTYDALHMQALPPRSRGSGATNFSLLKQAGDVEENPGPGIHMATYEVLCEVARKLGTDDREVVLFLLNVFIPQPTLAQLIGALRALKEEGRLTFPLLAECLFRAGRRDLLRDLLHLDPRFLERHLAGTMSYFSPYQLTVLHVDGELCARDIRSLIFLSKDTIGSRSTPQTFLHWVYCMENLDLLGPTDVDALMSMLRSLSRVDLQRQVQTLMGLHLSGPSHSQHYRHTPLETDFYDYKDDDDKTSGSGEGRGSLLTCGDVEENPGPHMTEYKPTVRLATRDDVPRAVRTLAAAFADYPATRHTVDPDRHIERVTELQELFLTRVGLDIGKVWVADDGAAVAVWTTPESVEAGAVFAEIGPRMAELSGSRLAAQQQMEGLLAPHRPKEPAWFLATVGVSPDHQGKGLGSAVVLPGVEAAERAGVPAFLETSAPRNLPFYERLGFTVTADVEVPEGPRTWCMTRKPGA

SEQ ID NO: 18105 - protein, 857 aa, Artificial Sequence
  Synthetic Polypeptide
MALPVTALLLPLALLLHAARPSYVLTQPPSVSVAPGQTARITCGGNNIGSKSVHWYQQPPGQAPVVVVYDDSDRPSGIPERFSGSNSGNTATLTISRVEAGDEAVYYCQVWDSSSDHVVFGGGTKLTVLLEIQNPDPAVYQLRDSKSSDKSVCLFTDFDSQTNVSQSKDSDVYITDKCVLDMRSMDFKSNSAVAWSNKSDFACANAFNNSIIPEDTFFPSSDVPCDVKLVEKSFETDTNLNFQNLSVIGFRILLLKVAGFNLLMTLRLWSSRAKRSGSGVKQTLNFDLLKLAGDVESNPGPTSMDWIWRILFLVGAATGAHSFEQLQLQESGPGLVKPSETLSLTCTVSGGSISSSSYFWGWIRQPPGKGLEWIGSIYYSGITYYNPSLKSRVTISVDTSKNQFSLKLSSVTAADTAVYYCARHDGAVAGLFDYWGQGTLVTVSSATREDLKNVFPPEVAVFEPSKAEIAHTQKATLVCLATGFYPDHVELSWWVNGKEVHSGVCTDPQPLKEQPALNDSRYCLSSRLRVSATFWQNPRNHFRCQVQFYGLSENDEWTQDRAKPVTQIVSAEAWGRADCGITSASYHQGVLSATILYEILLGKATLYAVLVSALVLMAMVKRKDSRGRAKRSGSGATNFSLLKQAGDVEENPGPSRGHMTEYKPTVRLATRDDVPRAVRTLAAAFADYPATRHTVDPDRHIERVTELQELFLTRVGLDIGKVWVADDGAAVAVWTTPESVEAGAVFAEIGPRMAELSGSRLAAQQQMEGLLAPHRPKEPAWFLATVGVSPDHQGKGLGSAVVLPGVEAAERAGVPAFLETSAPRNLPFYERLGFTVTADVEVPEGPRTWCMTRKPGA

SEQ ID NO: 18106 - protein, 856 aa, Artificial Sequence
  Synthetic Polypeptide
MALPVTALLLPLALLLHAARPSYVLTQPPSVSVAPGQTARITCGGNNIGSKSVHWYQQPPGQAPVVVVYDDSDRPSGIPERFSGSNSGNTATLTISRVEAGDEAVYYCQVWDSSSDHVVFGGGTKLTVLLEDLKNVFPPEVAVFEPSKAEIAHTQKATLVCLATGFYPDHVELSWWVNGKEVHSGVCTDPQPLKEQPALNDSRYCLSSRLRVSATFWQNPRNHFRCQVQFYGLSENDEWTQDRAKPVTQIVSAEAWGRADCGITSASYHQGVLSATILYEILLGKATLYAVLVSALVLMAMVKRKDSRGRAKRSGSGATNFSLLKQAGDVEENPGPTSMDWIWRILFLVGAATGAHSFEQLQLQESGPGLVKPSETLSLTCTVSGGSISSSSYFWGWIRQPPGKGLEWIGSIYYSGITYYNPSLKSRVTISVDTSKNQFSLKLSSVTAADTAVYYCARHDGAVAGLFDYWGQGTLVTVSSATRIQNPDPAVYQLRDSKSSDKSVCLFTDFDSQTNVSQSKDSDVYITDKCVLDMRSMDFKSNSAVAWSNKSDFACANAFNNSIIPEDTFFPSSDVPCDVKLVEKSFETDTNLNFQNLSVIGFRILLLKVAGFNLLMTLRLWSSRAKRSGSGVKQTLNFDLLKLAGDVESNPGPSRGHMTEYKPTVRLATRDDVPRAVRTLAAAFADYPATRHTVDPDRHIERVTELQELFLTRVGLDIGKVWVADDGAAVAVWTTPESVEAGAVFAEIGPRMAELSGSRLAAQQQMEGLLAPHRPKEPAWFLATVGVSPDHQGKGLGSAVVLPGVEAAERAGVPAFLETSAPRNLPFYERLGFTVTADVEVPEGPRTWCMTRKPGA

SEQ ID NO: 18107 - protein, 623 aa, Artificial Sequence
  Synthetic Polypeptide
MALPVTALLLPLALLLHAARPSYVLTQPPSVSVAPGQTARITCGGNNIGSKSVHWYQQPPGQAPVVVVYDDSDRPSGIPERFSGSNSGNTATLTISRVEAGDEAVYYCQVWDSSSDHVVFGGGTKLTVLLEDLKNVFPPEVAVFEPSEAEISHTQKATLVCLATGFYPDHVELSWWVNGKEVHSGVCTDPQPLKEQPALNDSRYCLSSRLRVSATFWQNPRNHFRCQVQFYGLSENDEWTQDRAKPVTQIVSAEAWGRADCGFTSESYQQGVLSATILYEILLGKATLYAVLVSALVLMAMVKRKDSRGRAKRSGSGATNFSLLKQAGDVEENPGPTSMDWIWRILFLVGAATGAHSFEQLQLQESGPGLVKPSETLSLTCTVSGGSISSSSYFWGWIRQPPGKGLEWIGSIYYSGITYYNPSLKSRVTISVDTSKNQFSLKLSSVTAADTAVYYCARHDGAVAGLFDYWGQGTLVTVSSATRIQNPDPAVYQLRDSKSSDKSVCLFTDFDSQTNVSQSKDSDVYITDKCVLDMRSMDFKSNSAVAWSNKSDFACANAFNNSIIPEDTFFPSPESSCDVKLVEKSFETDTNLNFQNLSVIGFRILLLKVAGFNLLMTLRLWSS

SEQ ID NO: 18108 - protein, 848 aa, Artificial Sequence
  Synthetic Polypeptide
MALPVTALLLPLALLLHAARPSYVLTQPPSVSVAPGQTARITCGGNNIGSKSVHWYQQPPGQAPVVVVYDDSDRPSGIPERFSGSNSGNTATLTISRVEAGDEAVYYCQVWDSSSDHVVFGGGTKLTVLLEDLKNVFPPEVAVFEPSEAEISHTQKATLVCLATGFYPDHVELSWWVNGKEVHSGVCTDPQPLKEQPALNDSRYCLSSRLRVSATFWQNPRNHFRCQVQFYGLSENDEWTQDRAKPVTQIVSAEAWGRADCGFTSESYQQGVLSATILYEILLGKATLYAVLVSALVLMAMVKRKDSRGRAKRSGSGATNFSLLKQAGDVEENPGPTSMDWIWRILFLVGAATGAHSFEQLQLQESGPGLVKPSETLSLTCTVSGGSISSSSYFWGWIRQPPGKGLEWIGSIYYSGITYYNPSLKSRVTISVDTSKNQFSLKLSSVTAADTAVYYCARHDGAVAGLFDYWGQGTLVTVSSATRIQNPDPAVYQLRDSKSSDKSVCLFTDFDSQTNVSQSKDSDVYITDKCVLDMRSMDFKSNSAVAWSNKSDFACANAFNNSIIPEDTFFPSPESSCDVKLVEKSFETDTNLNFQNLSVIGFRILLLKVAGFNLLMTLRLWSSRAKRSGSGVKQTLNFDLLKLAGDVESNPGPSRGGIHTMATYEVLCEVARKLGTDDREVVLFLLNVFIPQPTLAQLIGALRALKEEGRLTFPLLAECLFRAGRRDLLRDLLHLDPRFLERHLAGTMSYFSPYQLTVLHVDGELCARDIRSLIFLSKDTIGSRSTPQTFLHWVYCMENLDLLGPTDVDALMSMLRSLSRVDLQRQVQTLMGLHLSGPSHSQHYRHTP

SEQ ID NO: 18109 - protein, 627 aa, Artificial Sequence
  Synthetic Polypeptide
MALPVTALLLPLALLLHAARPSYVLTQPPSVSVAPGQTARITCGGNNIGSKSVHWYQQPPGQAPVVVVYDDSDRPSGIPERFSGSNSGNTATLTISRVEAGDEAVYYCQVWDSSSDHVVFGGGTKLTVLLEIQNPDPAVYQLRDSKSSDKSVCLFTDFDSQTNVSQSKDSDVYITDKCVLDMRSMDFKSNSAVAWSNKSDFACANAFNNSIIPEDTFFPSPESSCDVKLVEKSFETDTNLNFQNLSVIGFRILLLKVAGFNLLMTLRLWSSRAKRSGSGVKQTLNFDLLKLAGDVESNPGPTSMDWIWRILFLVGAATGAHSFEQLQLQESGPGLVKPSETLSLTCTVSGGSISSSSYFWGWIRQPPGKGLEWIGSIYYSGITYYNPSLKSRVTISVDTSKNQFSLKLSSVTAADTAVYYCARHDGAVAGLFDYWGQGTLVTVSSATREDLKNVFPPEVAVFEPSEAEISHTQKATLVCLATGFYPDHVELSWWVNGKEVHSGVCTDPQPLKEQPALNDSRYCLSSRLRVSATFWQNPRNHFRCQVQFYGLSENDEWTQDRAKPVTQIVSAEAWGRADCGFTSESYQQGVLSATILYEILLGKATLYAVLVSALVLMAMVKRKDSRG

SEQ ID NO: 18110 - protein, 849 aa, Artificial Sequence
  Synthetic Polypeptide
MALPVTALLLPLALLLHAARPSYVLTQPPSVSVAPGQTARITCGGNNIGSKSVHWYQQPPGQAPVVVVYDDSDRPSGIPERFSGSNSGNTATLTISRVEAGDEAVYYCQVWDSSSDHVVFGGGTKLTVLLEIQNPDPAVYQLRDSKSSDKSVCLFTDFDSQTNVSQSKDSDVYITDKCVLDMRSMDFKSNSAVAWSNKSDFACANAFNNSIIPEDTFFPSPESSCDVKLVEKSFETDTNLNFQNLSVIGFRILLLKVAGFNLLMTLRLWSSRAKRSGSGVKQTLNFDLLKLAGDVESNPGPTSMDWIWRILFLVGAATGAHSFEQLQLQESGPGLVKPSETLSLTCTVSGGSISSSSYFWGWIRQPPGKGLEWIGSIYYSGITYYNPSLKSRVTISVDTSKNQFSLKLSSVTAADTAVYYCARHDGAVAGLFDYWGQGTLVTVSSATREDLKNVFPPEVAVFEPSEAEISHTQKATLVCLATGFYPDHVELSWWVNGKEVHSGVCTDPQPLKEQPALNDSRYCLSSRLRVSATFWQNPRNHFRCQVQFYGLSENDEWTQDRAKPVTQIVSAEAWGRADCGFTSESYQQGVLSATILYEILLGKATLYAVLVSALVLMAMVKRKDSRGRAKRSGSGATNFSLLKQAGDVEENPGPSRGGIHTMATYEVLCEVARKLGTDDREVVLFLLNVFIPQPTLAQLIGALRALKEEGRLTFPLLAECLFRAGRRDLLRDLLHLDPRFLERHLAGTMSYFSPYQLTVLHVDGELCARDIRSLIFLSKDTIGSRSTPQTFLHWVYCMENLDLLGPTDVDALMSMLRSLSRVDLQRQVQTLMGLHLSGPSHSQHYRHTP

SEQ ID NO: 18111 - protein, 901 aa, Artificial Sequence
  Synthetic Polypeptide
MALPVTALLLPLALLLHAARPLEGKPIPNPLLGLDSTGSGEDLKNVFPPEVAVFEPSKAEIAHTQKATLVCLATGFYPDHVELSWWVNGKEVHSGVCTDPQPLKEQPALNDSRYCLSSRLRVSATFWQNPRNHFRCQVQFYGLSENDEWTQDRAKPVTQIVSAEAWGRADCGITSASYHQGVLSATILYEILLGKATLYAVLVSALVLMAMVKRKDSRGRAKRSGSGATNFSLLKQAGDVEENPGPTSMALPVTALLLPLALLLHAARPSYVLTQPPSVSVAPGQTARITCGGNNIGSKSVHWYQQPPGQAPVVVVYDDSDRPSGIPERFSGSNSGNTATLTISRVEAGDEAVYYCQVWDSSSDHVVFGGGTKLTVLGGGGSGGGGSGGGGSQLQLQESGPGLVKPSETLSLTCTVSGGSISSSSYFWGWIRQPPGKGLEWIGSIYYSGITYYNPSLKSRVTISVDTSKNQFSLKLSSVTAADTAVYYCARHDGAVAGLFDYWGQGTLVTVSSATREQKLISEEDGSGIQNPDPAVYQLRDSKSSDKSVCLFTDFDSQTNVSQSKDSDVYITDKCVLDMRSMDFKSNSAVAWSNKSDFACANAFNNSIIPEDTFFPSSDVPCDVKLVEKSFETDTNLNFQNLSVIGFRILLLKVAGFNLLMTLRLWSSRAKRSGSGVKQTLNFDLLKLAGDVESNPGPSRGHMTEYKPTVRLATRDDVPRAVRTLAAAFADYPATRHTVDPDRHIERVTELQELFLTRVGLDIGKVWVADDGAAVAVWTTPESVEAGAVFAEIGPRMAELSGSRLAAQQQMEGLLAPHRPKEPAWFLATVGVSPDHQGKGLGSAVVLPGVEAAERAGVPAFLETSAPRNLPFYERLGFTVTADVEVPEGPRTWCMTRKPGA

SEQ ID NO: 18112 - protein, 902 aa, Artificial Sequence
  Synthetic Polypeptide
MALPVTALLLPLALLLHAARPLEQKLISEEDLGSGDRPDPAVYQLRDSKSSDKSVCLFTDFDSQTNVSQSKDSDVYITDKCVLDMRSMDFKSNSAVAWSNKSDFACANAFNNSIIPEDTFFPSPESSCDVKLVEKSFETDTNLNFQNLSVIGFRILLLKVAGFNLLMTLRLWSSSSRAKRSGSGVKQTLNFDLLKLAGDVESNPGPTSMALPVTALLLPLALLLHAARPSYVLTQPPSVSVAPGQTARITCGGNNIGSKSVHWYQQPPGQAPVVVVYDDSDRPSGIPERFSGSNSGNTATLTISRVEAGDEAVYYCQVWDSSSDHVVFGGGTKLTVLGGGGSGGGGSGGGGSQLQLQESGPGLVKPSETLSLTCTVSGGSISSSSYFWGWIRQPPGKGLEWIGSIYYSGITYYNPSLKSRVTISVDTSKNQFSLKLSSVTAADTAVYYCARHDGAVAGLFDYWGQGTLVTVSSATRGKPIPNPLLGLDSTGSGEDLKNVFPPEVAVFEPSEAEISHTQKATLVCLATGFYPDHVELSWWVNGKEVHSGVCTDPQPLKEQPALNDSRYCLSSRLRVSATFWQNPRNHFRCQVQFYGLSENDEWTQDRAKPVTQIVSAEAWGRADCGFTSESYQQGVLSATILYEILLGKATLYAVLVSALVLMAMVKRKDSRGRAKRSGSGATNFSLLKQAGDVEENPGPSRGHMTEYKPTVRLATRDDVPRAVRTLAAAFADYPATRHTVDPDRHIERVTELQELFLTRVGLDIGKVWVADDGAAVAVWTTPESVEAGAVFAEIGPRMAELSGSRLAAQQQMEGLLAPHRPKEPAWFLATVGVSPDHQGKGLGSAVVLPGVEAAERAGVPAFLETSAPRNLPFYERLGFTVTADVEVPEGPRTWCMTRKPGA

SEQ ID NO: 18113 - protein, 856 aa, Artificial Sequence
  Synthetic Polypeptide
MALPVTALLLPLALLLHAARPSYVLTQPPSVSVAPGQTARITCGGNNIGSKSVHWYQQPPGQAPVVVVYDDSDRPSGIPERFSGSNSGNTATLTISRVEAGDEAVYYCQVWDSSSDHVVFGGGTKLTVLLEDLKNVFPPEVAVFEPSEAEISHTQKATLVCLATGFYPDHVELSWWVNGKEVHSGVSTDPQPLKEQPALNDSRYCLSSRLRVSATFWQNPRNHFRCQVQFYGLSENDEWTQDRAKPVTQIVSAEAWGRADCGFTSESYQQGVLSATILYEILLGKATLYAVLVSALVLMAMVKRKDSRGRAKRSGSGATNFSLLKQAGDVEENPGPTSMDWIWRILFLVGAATGAHSFEQLQLQESGPGLVKPSETLSLTCTVSGGSISSSSYFWGWIRQPPGKGLEWIGSIYYSGITYYNPSLKSRVTISVDTSKNQFSLKLSSVTAADTAVYYCARHDGAVAGLFDYWGQGTLVTVSSATRIQNPDPAVYQLRDSKSSDKSVCLFTDFDSQTNVSQSKDSDVYITDKTVLDMRSMDFKSNSAVAWSNKSDFACANAFNNSIIPEDTFFPSPESSCDVKLVEKSFETDTNLNFQNLSVIGFRILLLKVAGFNLLMTLRLWSSRAKRSGSGVKQTLNFDLLKLAGDVESNPGPSRGHMTEYKPTVRLATRDDVPRAVRTLAAAFADYPATRHTVDPDRHIERVTELQELFLTRVGLDIGKVWVADDGAAVAVWTTPESVEAGAVFAEIGPRMAELSGSRLAAQQQMEGLLAPHRPKEPAWFLATVGVSPDHQGKGLGSAVVLPGVEAAERAGVPAFLETSAPRNLPFYERLGFTVTADVEVPEGPRTWCMTRKPGA

SEQ ID NO: 18114 - protein, 938 aa, Artificial Sequence
  Synthetic Polypeptide
MALPVTALLLPLALLLHAARPSYVLTQPPSVSVAPGQTARITCGGNNIGSKSVHWYQQPPGQAPVVVVYDDSDRPSGIPERFSGSNSGNTATLTISRVEAGDEAVYYCQVWDSSSDHVVFGGGTKLTVLLEDLKNVFPPEVAVFEPSEAEISHTQKATLVCLATGFYPDHVELSWWVNGKEVHSGVSTDPQPLKEQPALNDSRYCLSSRLRVSATFWQNPRNHFRCQVQFYGLSENDEWTQDRAKPVTQIVSAEAWGRADCGFTSESYQQGVLSATILYEILLGKATLYAVLVSALVLMAMVKRKDSRGRAKRSGSGATNFSLLKQAGDVEENPGPTSMDWIWRILFLVGAATGAHSFEQLQLQESGPGLVKPSETLSLTCTVSGGSISSSSYFWGWIRQPPGKGLEWIGSIYYSGITYYNPSLKSRVTISVDTSKNQFSLKLSSVTAADTAVYYCARHDGAVAGLFDYWGQGTLVTVSSATREQKLISEEDGSGTPFPSLAPPIMLLVDGKQQMVVVCLVLDVAPPGLDSPIWFSAGNGSALDAFTYGPSPATDGTWTNLAHLSLPSEELASWEPLVCHTGPGAEGHSRSTQPMHLSGEASTARTCPQEPLRGTPGGALWLGVLRLLLFKLLLFDLLLTCSCLCDPAGPLPSPATTTRLRALGSHRLHPATETGGREATSSPRPQPRDRRWGDTPPGRKPGSPVRAKRSGSGVKQTLNFDLLKLAGDVESNPGPSRGHMTEYKPTVRLATRDDVPRAVRTLAAAFADYPATRHTVDPDRHIERVTELQELFLTRVGLDIGKVWVADDGAAVAVWTTPESVEAGAVFAEIGPRMAELSGSRLAAQQQMEGLLAPHRPKEPAWFLATVGVSPDHQGKGLGSAVVLPGVEAAERAGVPAFLETSAPRNLPFYERLGFTVTADVEVPEGPRTWCMTRKPGA

SEQ ID NO: 18115 - protein, 956 aa, Artificial Sequence
  Synthetic Polypeptide
MALPVTALLLPLALLLHAARPLEDLKNVFPPEVAVFEPSEAEISHTQKATLVCLATGFYPDHVELSWWVNGKEVHSGVSTDPQPLKEQPALNDSRYCLSSRLRVSATFWQNPRNHFRCQVQFYGLSENDEWTQDRAKPVTQIVSAEAWGRADCGFTSESYQQGVLSATILYEILLGKATLYAVLVSALVLMAMVKRKDSRGRAKRSGSGATNFSLLKQAGDVEENPGPTSMALPVTALLLPLALLLHAARPSYVLTQPPSVSVAPGQTARITCGGNNIGSKSVHWYQQPPGQAPVVVVYDDSDRPSGIPERFSGSNSGNTATLTISRVEAGDEAVYYCQVWDSSSDHVVFGGGTKLTVLGGGGSGGGGSGGGGSQLQLQESGPGLVKPSETLSLTCTVSGGSISSSSYFWGWIRQPPGKGLEWIGSIYYSGITYYNPSLKSRVTISVDTSKNQFSLKLSSVTAADTAVYYCARHDGAVAGLFDYWGQGTLVTVSSATREQKLISEEDLGSGTPFPSLAPPIMLLVDGKQQMVVVCLVLDVAPPGLDSPIWFSAGNGSALDAFTYGPSPATDGTWTNLAHLSLPSEELASWEPLVCHTGPGAEGHSRSTQPMHLSGEASTARTCPQEPLRGTPGGALWLGVLRLLLFKLLLFDLLLTCSCLCDPAGPLPSPATTTRLRALGSHRLHPATETGGREATSSPRPQPRDRRWGDTPPGRKPGSPVRAKRSGSGVKQTLNFDLLKLAGDVESNPGPSRSRGHMTEYKPTVRLATRDDVPRAVRTLAAAFADYPATRHTVDPDRHIERVTELQELFLTRVGLDIGKVWVADDGAAVAVWTTPESVEAGAVFAEIGPRMAELSGSRLAAQQQMEGLLAPHRPKEPAWFLATVGVSPDHQGKGLGSAVVLPGVEAAERAGVPAFLETSAPRNLPFYERLGFTVTADVEVPEGPRTWCMTRKPGA

SEQ ID NO: 18116 - protein, 893 aa, Artificial Sequence
  Synthetic Polypeptide
MALPVTALLLPLALLLHAARPSYVLTQPPSVSVAPGQTARITCGGNNIGSKSVHWYQQPPGQAPVVVVYDDSDRPSGIPERFSGSNSGNTATLTISRVEAGDEAVYYCQVWDSSSDHVVFGGGTKLTVLLEGKPIPNPLLGLDSTGSGDKQLDADVSPKPTIFLPSIAETKLQKAGTYLCLLEKFFPDVIKIHWQEKKSNTILGSQEGNTMKTNDTYMKFSWLTVPEKSLDKEHRCIVRHENNKNGVDQEIIFPPIKTDVITMDPKDNCSKDANDTLLLQLTNTSAYYMYLLLLLKSVVYFAIITCCLLRRTAFCCNGEKSRAKRSGSGATNFSLLKQAGDVEENPGPTSMDWIWRILFLVGAATGAHSFEQLQLQESGPGLVKPSETLSLTCTVSGGSISSSSYFWGWIRQPPGKGLEWIGSIYYSGITYYNPSLKSRVTISVDTSKNQFSLKLSSVTAADTAVYYCARHDGAVAGLFDYWGQGTLVTVSSATREQKLISEEDGSGSQPHTKPSVFVMKNGTNVACLVKEFYPKDIRINLVSSKKITEFDPAIVISPSGKYNAVKLGKYEDSNSVTCSVQHDNKTVHSTDFEVKTDSTDHVKPKETENTKQPSKSCHKPKAIVHTEKVNMMSLTVLGLRMLFAKTVAVNFLLTAKLFFLRAKRSGSGVKQTLNFDLLKLAGDVESNPGPSRGHMTEYKPTVRLATRDDVPRAVRTLAAAFADYPATRHTVDPDRHIERVTELQELFLTRVGLDIGKVWVADDGAAVAVWTTPESVEAGAVFAEIGPRMAELSGSRLAAQQQMEGLLAPHRPKEPAWFLATVGVSPDHQGKGLGSAVVLPGVEAAERAGVPAFLETSAPRNLPFYERLGFTVTADVEVPEGPRTWCMTRKPGA

SEQ ID NO: 18117 - protein, 631 aa, Artificial Sequence
  Synthetic Polypeptide
MALPVTALLLPLALLLHAARPSYVLTQPPSVSVAPGQTARITCGGNNIGSKSVHWYQQPPGQAPVVVVYDDSDRPSGIPERFSGSNSGNTATLTISRVEAGDEAVYYCQVWDSSSDHVVFGGGTKLTVLLESQPHTKPSVFVMKNGTNVACLVKEFYPKDIRINLVSSKKITEFDPAIVISPSGKYNAVKLGKYEDSNSVTCSVQHDNKTVHSTDFEVKTDSTDHVKPKETENTKQPSKSCHKPKAIVHTEKVNMMSLTVLGLRMLFAKTVAVNFLLTAKLFFLRAKRSGSGATNFSLLKQAGDVEENPGPTSMDWIWRILFLVGAATGAHSFEQLQLQESGPGLVKPSETLSLTCTVSGGSISSSSYFWGWIRQPPGKGLEWIGSIYYSGITYYNPSLKSRVTISVDTSKNQFSLKLSSVTAADTAVYYCARHDGAVAGLFDYWGQGTLVTVSSATRDKQLDADVSPKPTIFLPSIAETKLQKAGTYLCLLEKFFPDVIKIHWQEKKSNTILGSQEGNTMKTNDTYMKFSWLTVPEKSLDKEHRCIVRHENNKNGVDQEIIFPPIKTDVITMDPKDNCSKDANDTLLLQLTNTSAYYMYLLLLLKSVVYFAIITCCLLRRTAFCCNGEKS

SEQ ID NO: 18118 - protein, 908 aa, Artificial Sequence
  Synthetic Polypeptide
MALPVTALLLPLALLLHAARPLEGKPIPNPLLGLDSTGSGDKQLDADVSPKPTIFLPSIAETKLQKAGTYLCLLEKFFPDVIKIHWQEKKSNTILGSQEGNTMKTNDTYMKFSWLTVPEKSLDKEHRCIVRHENNKNGVDQEIIFPPIKTDVITMDPKDNCSKDANDTLLLQLTNTSAYYMYLLLLLKSVVYFAIITCCLLRRTAFCCNGEKSRAKRSGSGATNFSLLKQAGDVEENPGPTSMALPVTALLLPLALLLHAARPSYVLTQPPSVSVAPGQTARITCGGNNIGSKSVHWYQQPPGQAPVVVVYDDSDRPSGIPERFSGSNSGNTATLTISRVEAGDEAVYYCQVWDSSSDHVVFGGGTKLTVLGGGGSGGGGSGGGGSQLQLQESGPGLVKPSETLSLTCTVSGGSISSSSYFWGWIRQPPGKGLEWIGSIYYSGITYYNPSLKSRVTISVDTSKNQFSLKLSSVTAADTAVYYCARHDGAVAGLFDYWGQGTLVTVSSATREQKLISEEDGSGSQPHTKPSVFVMKNGTNVACLVKEFYPKDIRINLVSSKKITEFDPAIVISPSGKYNAVKLGKYEDSNSVTCSVQHDNKTVHSTDFEVKTDSTDHVKPKETENTKQPSKSCHKPKAIVHTEKVNMMSLTVLGLRMLFAKTVAVNFLLTAKLFFLRAKRSGSGVKQTLNFDLLKLAGDVESNPGPSRGHMTEYKPTVRLATRDDVPRAVRTLAAAFADYPATRHTVDPDRHIERVTELQELFLTRVGLDIGKVWVADDGAAVAVWTTPESVEAGAVFAEIGPRMAELSGSRLAAQQQMEGLLAPHRPKEPAWFLATVGVSPDHQGKGLGSAVVLPGVEAAERAGVPAFLETSAPRNLPFYERLGFTVTADVEVPEGPRTWCMTRKPGA

SEQ ID NO: 18119 - protein, 1033 aa, Artificial Sequence
  Synthetic Polypeptide
MALPVTALLLPLALLLHAARPSYVLTQPPSVSVAPGQTARITCGGNNIGSKSVHWYQQPPGQAPVVVVYDDSDRPSGIPERFSGSNSGNTATLTISRVEAGDEAVYYCQVWDSSSDHVVFGGGTKLTVLGQPKANPTVTLFPPSSEELQANKATLVCLISDFYPGAVTVAWKADGSPVKAGVETTKPSKQSNNKYAASSYLSLTPEQWKSHRSYSCQVTHEGSTVEKTVAPTECSGSQSFGLLDPKLCYLLDGILFIYGVILTALFLRVKFSRSADAPAYQQGQNQLYNELNLGRREEYDVLDKRRGRDPEMGGKPQRRKNPQEGLYNELQKDKMAEAYSEIGMKGERRRGKGHDGLYQGLSTATKDTYDALHMQALPPRRAKRSGSGATNFSLLKQAGDVEENPGPTSMDWIWRILFLVGAATGAHSFEQLQLQESGPGLVKPSETLSLTCTVSGGSISSSSYFWGWIRQPPGKGLEWIGSIYYSGITYYNPSLKSRVTISVDTSKNQFSLKLSSVTAADTAVYYCARHDGAVAGLFDYWGQGTLVTVSSAASTKGPSVFPLAPSSKSTSGGTAALGCLVKDYFPEPVTVSWNSGALTSGVHTFPAVLQSSGLYSLSSVVTVPSSSLGTQTYICNVNHKPSNTKVDKRVEPKSCGTQSFGLLDPKLCYLLDGILFIYGVILTALFLRVKFSRSADAPAYQQGQNQLYNELNLGRREEYDVLDKRRGRDPEMGGKPQRRKNPQEGLYNELQKDKMAEAYSEIGMKGERRRGKGHDGLYQGLSTATKDTYDALHMQALPPRRAKRSGSGVKQTLNFDLLKLAGDVESNPGPSRGHMTEYKPTVRLATRDDVPRAVRTLAAAFADYPATRHTVDPDRHIERVTELQELFLTRVGLDIGKVWVADDGAAVAVWTTPESVEAGAVFAEIGPRMAELSGSRLAAQQQMEGLLAPHRPKEPAWFLATVGVSPDHQGKGLGSAVVLPGVEAAERAGVPAFLETSAPRNLPFYERLGFTVTADVEVPEGPRTWCMTRKPGA

SEQ ID NO: 18120 - protein, 819 aa, Artificial Sequence
  Synthetic Polypeptide
MALPVTALLLPLALLLHAARPSYVLTQPPSVSVAPGQTARITCGGNNIGSKSVHWYQQPPGQAPVVVVYDDSDRPSGIPERFSGSNSGNTATLTISRVEAGDEAVYYCQVWDSSSDHVVFGGGTKLTVLLEDLKNVFPPEVAVFEPSEAEISHTQKATLVCLATGFYPDHVELSWWVNGKEVHSGVSTDPQPLKEQPALNDSRYCLSSRLRVSATFWQNPRNHFRCQVQFYGLSENDEWTQDRAKPVTQIVSAEAWGRADCGSQSFGLLDPKLCYLLDGILFIYGVILTALFLRVKFSRSADAPAYQQGQNQLYNELNLGRREEYDVLDKRRGRDPEMGGKPQRRKNPQEGLYNELQKDKMAEAYSEIGMKGERRRGKGHDGLYQGLSTATKDTYDALHMQALPPRRAKRSGSGATNFSLLKQAGDVEENPGPTSMDWIWRILFLVGAATGAHSFEQLQLQESGPGLVKPSETLSLTCTVSGGSISSSSYFWGWIRQPPGKGLEWIGSIYYSGITYYNPSLKSRVTISVDTSKNQFSLKLSSVTAADTAVYYCARHDGAVAGLFDYWGQGTLVTVSSATRIQNPDPAVYQLRDSKSSDKSVCLFTDFDSQTNVSQSKDSDVYITDKTVLDMRSMDFKSNSAVAWSNKSDFACANAFNNSIIPEDTFFPSPESSCGTQSFGLLDPKLCYLLDGILFIYGVILTALFLRVKFSRSADAPAYQQGQNQLYNELNLGRREEYDVLDKRRGRDPEMGGKPQRRKNPQEGLYNELQKDKMAEAYSEIGMKGERRRGKGHDGLYQGLSTATKDTYDALHMQALPPR

SEQ ID NO: 18121 - protein, 819 aa, Artificial Sequence
  Synthetic Polypeptide
MALPVTALLLPLALLLHAARPSYVLTQPPSVSVAPGQTARITCGGNNIGSKSVHWYQQPPGQAPVVVVYDDSDRPSGIPERFSGSNSGNTATLTISRVEAGDEAVYYCQVWDSSSDHVVFGGGTKLTVLLEDLKNVFPPEVAVFEPSKAEIAHTQKATLVCLATGFYPDHVELSWWVNGKEVHSGVCTDPQPLKEQPALNDSRYCLSSRLRVSATFWQNPRNHFRCQVQFYGLSENDEWTQDRAKPVTQIVSAEAWGRADCGSQSFGLLDPKLCYLLDGILFIYGVILTALFLRVKFSRSADAPAYQQGQNQLYNELNLGRREEYDVLDKRRGRDPEMGGKPQRRKNPQEGLYNELQKDKMAEAYSEIGMKGERRRGKGHDGLYQGLSTATKDTYDALHMQALPPRRAKRSGSGATNFSLLKQAGDVEENPGPTSMDWIWRILFLVGAATGAHSFEQLQLQESGPGLVKPSETLSLTCTVSGGSISSSSYFWGWIRQPPGKGLEWIGSIYYSGITYYNPSLKSRVTISVDTSKNQFSLKLSSVTAADTAVYYCARHDGAVAGLFDYWGQGTLVTVSSATRIQNPDPAVYQLRDSKSSDKSVCLFTDFDSQTNVSQSKDSDVYITDKCVLDMRSMDFKSNSAVAWSNKSDFACANAFNNSIIPEDTFFPSSDVPCGTQSFGLLDPKLCYLLDGILFIYGVILTALFLRVKFSRSADAPAYQQGQNQLYNELNLGRREEYDVLDKRRGRDPEMGGKPQRRKNPQEGLYNELQKDKMAEAYSEIGMKGERRRGKGHDGLYQGLSTATKDTYDALHMQALPPR

SEQ ID NO: 18122 - protein, 890 aa, Artificial Sequence
  Synthetic Polypeptide
MALPVTALLLPLALLLHAARPSYVLTQPPSVSVAPGQTARITCGGNNIGSKSVHWYQQPPGQAPVVVVYDDSDRPSGIPERFSGSNSGNTATLTISRVEAGDEAVYYCQVWDSSSDHVVFGGGTKLTVLLEGKPIPNPLLGLDSTGSGEDLKNVFPPEVAVFEPSEAEISHTQKATLVCLATGFYPDHVELSWWVNGKEVHSGVSTDPQPLKEQPALNDSRYCLSSRLRVSATFWQNPRNHFRCQVQFYGLSENDEWTQDRAKPVTQIVSAEAWGRADCGSQSFGLLDPKLCYLLDGILFIYGVILTALFLRVKFSRSADAPAYQQGQNQLYNELNLGRREEYDVLDKRRGRDPEMGGKPQRRKNPQEGLYNELQKDKMAEAYSEIGMKGERRRGKGHDGLYQGLSTATKDTYDALHMQALPPRRAKRSGSGATNFSLLKQAGDVEENPGPTSMDWIWRILFLVGAATGAHSFEQLQLQESGPGLVKPSETLSLTCTVSGGSISSSSYFWGWIRQPPGKGLEWIGSIYYSGITYYNPSLKSRVTISVDTSKNQFSLKLSSVTAADTAVYYCARHDGAVAGLFDYWGQGTLVTVSSATREQKLISEEDGSGIQNPDPAVYQLRDSKSSDKSVCLFTDFDSQTNVSQSKDSDVYITDKTVLDMRSMDFKSNSAVAWSNKSDFACANAFNNSIIPEDTFFPSPESSCGTQSFGLLDPKLCYLLDGILFIYGVILTALFLRSKRSRLLHSDYMNMTPRRPGPTRKHYQPYAPPRDFAAYRSRVKFSRSADAPAYQQGQNQLYNELNLGRREEYDVLDKRRGRDPEMGGKPQRRKNPQEGLYNELQKDKMAEAYSEIGMKGERRRGKGHDGLYQGLSTATKDTYDALHMQALPPR

SEQ ID NO: 18123 - protein, 931 aa, Artificial Sequence
  Synthetic Polypeptide
MALPVTALLLPLALLLHAARPSYVLTQPPSVSVAPGQTARITCGGNNIGSKSVHWYQQPPGQAPVVVVYDDSDRPSGIPERFSGSNSGNTATLTISRVEAGDEAVYYCQVWDSSSDHVVFGGGTKLTVLLEGKPIPNPLLGLDSTGSGEDLKNVFPPEVAVFEPSEAEISHTQKATLVCLATGFYPDHVELSWWVNGKEVHSGVSTDPQPLKEQPALNDSRYCLSSRLRVSATFWQNPRNHFRCQVQFYGLSENDEWTQDRAKPVTQIVSAEAWGRADCGSQSFGLLDPKLCYLLDGILFIYGVILTALFLRSKRSRLLHSDYMNMTPRRPGPTRKHYQPYAPPRDFAAYRSRVKFSRSADAPAYQQGQNQLYNELNLGRREEYDVLDKRRGRDPEMGGKPQRRKNPQEGLYNELQKDKMAEAYSEIGMKGERRRGKGHDGLYQGLSTATKDTYDALHMQALPPRRAKRSGSGATNFSLLKQAGDVEENPGPTSMDWIWRILFLVGAATGAHSFEQLQLQESGPGLVKPSETLSLTCTVSGGSISSSSYFWGWIRQPPGKGLEWIGSIYYSGITYYNPSLKSRVTISVDTSKNQFSLKLSSVTAADTAVYYCARHDGAVAGLFDYWGQGTLVTVSSATREQKLISEEDGSGIQNPDPAVYQLRDSKSSDKSVCLFTDFDSQTNVSQSKDSDVYITDKTVLDMRSMDFKSNSAVAWSNKSDFACANAFNNSIIPEDTFFPSPESSCGTQSFGLLDPKLCYLLDGILFIYGVILTALFLRSKRSRLLHSDYMNMTPRRPGPTRKHYQPYAPPRDFAAYRSRVKFSRSADAPAYQQGQNQLYNELNLGRREEYDVLDKRRGRDPEMGGKPQRRKNPQEGLYNELQKDKMAEAYSEIGMKGERRRGKGHDGLYQGLSTATKDTYDALHMQALPPR

SEQ ID NO: 18124 - protein, 892 aa, Artificial Sequence
  Synthetic Polypeptide
MALPVTALLLPLALLLHAARPSYVLTQPPSVSVAPGQTARITCGGNNIGSKSVHWYQQPPGQAPVVVVYDDSDRPSGIPERFSGSNSGNTATLTISRVEAGDEAVYYCQVWDSSSDHVVFGGGTKLTVLLEGKPIPNPLLGLDSTGSGEDLKNVFPPEVAVFEPSEAEISHTQKATLVCLATGFYPDHVELSWWVNGKEVHSGVSTDPQPLKEQPALNDSRYCLSSRLRVSATFWQNPRNHFRCQVQFYGLSENDEWTQDRAKPVTQIVSAEAWGRADCGSQSFGLLDPKLCYLLDGILFIYGVILTALFLRVKFSRSADAPAYQQGQNQLYNELNLGRREEYDVLDKRRGRDPEMGGKPQRRKNPQEGLYNELQKDKMAEAYSEIGMKGERRRGKGHDGLYQGLSTATKDTYDALHMQALPPRRAKRSGSGATNFSLLKQAGDVEENPGPTSMDWIWRILFLVGAATGAHSFEQLQLQESGPGLVKPSETLSLTCTVSGGSISSSSYFWGWIRQPPGKGLEWIGSIYYSGITYYNPSLKSRVTISVDTSKNQFSLKLSSVTAADTAVYYCARHDGAVAGLFDYWGQGTLVTVSSATREQKLISEEDLGSGIQNPDPAVYQLRDSKSSDKSVCLFTDFDSQTNVSQSKDSDVYITDKTVLDMRSMDFKSNSAVAWSNKSDFACANAFNNSIIPEDTFFPSPESSCGTQSFGLLDPKLCYLLDGILFIYGVILTALFLKRGRKKLLYIFKQPFMRPVQTTQEEDGCSCRFPEEEEGGCELRVKFSRSADAPAYQQGQNQLYNELNLGRREEYDVLDKRRGRDPEMGGKPQRRKNPQEGLYNELQKDKMAEAYSEIGMKGERRRGKGHDGLYQGLSTATKDTYDALHMQALPPR

SEQ ID NO: 18125 - protein, 934 aa, Artificial Sequence
  Synthetic Polypeptide
MALPVTALLLPLALLLHAARPSYVLTQPPSVSVAPGQTARITCGGNNIGSKSVHWYQQPPGQAPVVVVYDDSDRPSGIPERFSGSNSGNTATLTISRVEAGDEAVYYCQVWDSSSDHVVFGGGTKLTVLLEGKPIPNPLLGLDSTGSGEDLKNVFPPEVAVFEPSEAEISHTQKATLVCLATGFYPDHVELSWWVNGKEVHSGVSTDPQPLKEQPALNDSRYCLSSRLRVSATFWQNPRNHFRCQVQFYGLSENDEWTQDRAKPVTQIVSAEAWGRADCGSQSFGLLDPKLCYLLDGILFIYGVILTALFLKRGRKKLLYIFKQPFMRPVQTTQEEDGCSCRFPEEEEGGCELRVKFSRSADAPAYQQGQNQLYNELNLGRREEYDVLDKRRGRDPEMGGKPQRRKNPQEGLYNELQKDKMAEAYSEIGMKGERRRGKGHDGLYQGLSTATKDTYDALHMQALPPRRAKRSGSGATNFSLLKQAGDVEENPGPTSMDWIWRILFLVGAATGAHSFEQLQLQESGPGLVKPSETLSLTCTVSGGSISSSSYFWGWIRQPPGKGLEWIGSIYYSGITYYNPSLKSRVTISVDTSKNQFSLKLSSVTAADTAVYYCARHDGAVAGLFDYWGQGTLVTVSSATREQKLISEEDLGSGIQNPDPAVYQLRDSKSSDKSVCLFTDFDSQTNVSQSKDSDVYITDKTVLDMRSMDFKSNSAVAWSNKSDFACANAFNNSIIPEDTFFPSPESSCGTQSFGLLDPKLCYLLDGILFIYGVILTALFLKRGRKKLLYIFKQPFMRPVQTTQEEDGCSCRFPEEEEGGCELRVKFSRSADAPAYQQGQNQLYNELNLGRREEYDVLDKRRGRDPEMGGKPQRRKNPQEGLYNELQKDKMAEAYSEIGMKGERRRGKGHDGLYQGLSTATKDTYDALHMQALPPR

SEQ ID NO: 18126 - protein, 824 aa, Artificial Sequence
  Synthetic Polypeptide
MALPVTALLLPLALLLHAARPSYVLTQPPSVSVAPGQTARITCGGNNIGSKSVHWYQQPPGQAPVVVVYDDSDRPSGIPERFSGSNSGNTATLTISRVEAGDEAVYYCQVWDSSSDHVVFGGGTKLTVLLEQSFGLLDPKLCYLLDGILFIYGVILTALFLRVKFSRSADAPAYQQGQNQLYNELNLGRREEYDVLDKRRGRDPEMGGKPQRRKNPQEGLYNELQKDKMAEAYSEIGMKGERRRGKGHDGLYQGLSTATKDTYDALHMQALPPRRAKRSGSGATNFSLLKQAGDVEENPGPTSMDWIWRILFLVGAATGAHSFEQLQLQESGPGLVKPSETLSLTCTVSGGSISSSSYFWGWIRQPPGKGLEWIGSIYYSGITYYNPSLKSRVTISVDTSKNQFSLKLSSVTAADTAVYYCARHDGAVAGLFDYWGQGTLVTVSSATRQSFGLLDPKLCYLLDGILFIYGVILTALFLRVKFSRSADAPAYQQGQNQLYNELNLGRREEYDVLDKRRGRDPEMGGKPQRRKNPQEGLYNELQKDKMAEAYSEIGMKGERRRGKGHDGLYQGLSTATKDTYDALHMQALPPRRAKRSGSGVKQTLNFDLLKLAGDVESNPGPSRGHMTEYKPTVRLATRDDVPRAVRTLAAAFADYPATRHTVDPDRHIERVTELQELFLTRVGLDIGKVWVADDGAAVAVWTTPESVEAGAVFAEIGPRMAELSGSRLAAQQQMEGLLAPHRPKEPAWFLATVGVSPDHQGKGLGSAVVLPGVEAAERAGVPAFLETSAPRNLPFYERLGFTVTADVEVPEGPRTWCMTRKPGA

SEQ ID NO: 18127 - protein, 649 aa, Artificial Sequence
  Synthetic Polypeptide
MALPVTALLLPLALLLHAARPSYVLTQPPSVSVAPGQTARITCGGNNIGSKSVHWYQQPPGQAPVVVVYDDSDRPSGIPERFSGSNSGNTATLTISRVEAGDEAVYYCQVWDSSSDHVVFGGGTKLTVLLEGQPKANPTVTLFPPSSEELQANKATLVCLISDFYPGAVTVAWKADGSPVKAGVETTKPSKQSNNKYAASSYLSLTPEQWKSHRSYSCQVTHEGSTVEKTVAPTECSPIKTDVITMDPKDNCSKDANDTLLLQLTNTSAYYMYLLLLLKSVVYFAIITCCLLRRTAFCCNGEKSRAKRSGSGATNFSLLKQAGDVEENPGPTSMDWIWRILFLVGAATGAHSFEQLQLQESGPGLVKPSETLSLTCTVSGGSISSSSYFWGWIRQPPGKGLEWIGSIYYSGITYYNPSLKSRVTISVDTSKNQFSLKLSSVTAADTAVYYCARHDGAVAGLFDYWGQGTLVTVSSATRASTKGPSVFPLAPSSKSTSGGTAALGCLVKDYFPEPVTVSWNSGALTSGVHTFPAVLQSSGLYSLSSVVTVPSSSLGTQTYICNVNHKPSNTKVDKRVEPKSCEVKTDSTDHVKPKETENTKQPSKSCHKPKAIVHTEKVNMMSLTVLGLRMLFAKTVAVNFLLTAKLFFL

SEQ ID NO: 18128 - protein, 627 aa, Artificial Sequence
  Synthetic Polypeptide
MALPVTALLLPLALLLHAARPSYVLTQPPSVSVAPGQTARITCGGNNIGSKSVHWYQQPPGQAPVVVVYDDSDRPSGIPERFSGSNSGNTATLTISRVEAGDEAVYYCQVWDSSSDHVVFGGGTKLTVLLEGQPKANPTVTLFPPSSEELQANKATLVCLISDFYPGAVTVAWKADGSPVKAGVETTKPSKQSNNKYAASSYLSLTPEQWKSHRSYSCQVTHEGSTVEKTVAPTECSGRADCGITSASYHQGVLSATILYEILLGKATLYAVLVSALVLMAMVKRKDSRGRAKRSGSGATNFSLLKQAGDVEENPGPTSMDWIWRILFLVGAATGAHSFEQLQLQESGPGLVKPSETLSLTCTVSGGSISSSSYFWGWIRQPPGKGLEWIGSIYYSGITYYNPSLKSRVTISVDTSKNQFSLKLSSVTAADTAVYYCARHDGAVAGLFDYWGQGTLVTVSSATRASTKGPSVFPLAPSSKSTSGGTAALGCLVKDYFPEPVTVSWNSGALTSGVHTFPAVLQSSGLYSLSSVVTVPSSSLGTQTYICNVNHKPSNTKVDKRVEPKSCIPEDTFFPSSDVPCDVKLVEKSFETDTNLNFQNLSVIGFRILLLKVAGFNLLMTLRLWSS

SEQ ID NO: 18129 - protein, 627 aa, Artificial Sequence
  Synthetic Polypeptide
MALPVTALLLPLALLLHAARPSYVLTQPPSVSVAPGQTARITCGGNNIGSKSVHWYQQPPGQAPVVVVYDDSDRPSGIPERFSGSNSGNTATLTISRVEAGDEAVYYCQVWDSSSDHVVFGGGTKLTVLLEGQPKANPTVTLFPPSSEELQANKATLVCLISDFYPGAVTVAWKADGSPVKAGVETTKPSKQSNNKYAASSYLSLTPEQWKSHRSYSCQVTHEGSTVEKTVAPTECSGRADCGFTSESYQQGVLSATILYEILLGKATLYAVLVSALVLMAMVKRKDSRGRAKRSGSGATNFSLLKQAGDVEENPGPTSMDWIWRILFLVGAATGAHSFEQLQLQESGPGLVKPSETLSLTCTVSGGSISSSSYFWGWIRQPPGKGLEWIGSIYYSGITYYNPSLKSRVTISVDTSKNQFSLKLSSVTAADTAVYYCARHDGAVAGLFDYWGQGTLVTVSSATRASTKGPSVFPLAPSSKSTSGGTAALGCLVKDYFPEPVTVSWNSGALTSGVHTFPAVLQSSGLYSLSSVVTVPSSSLGTQTYICNVNHKPSNTKVDKRVEPKSCIPEDTFFPSPESSCDVKLVEKSFETDTNLNFQNLSVIGFRILLLKVAGFNLLMTLRLWSS

SEQ ID NO: 18130 - protein, 453 aa, Artificial Sequence
  Synthetic Polypeptide
MALPVTALLLPLALLLHAARPSYVLTQPPSVSVAPGQTARITCGGNNIGSKSVHWYQQPPGQAPVVVVYDDSDRPSGIPERFSGSNSGNTATLTISRVEAGDEAVYYCQVWDSSSDHVVFGGGTKLTVLGGGGSGGGGSGGGGSQLQLQESGPGLVKPSETLSLTCTVSGGSISSSSYFWGWIRQPPGKGLEWIGSIYYSGITYYNPSLKSRVTISVDTSKNQFSLKLSSVTAADTAVYYCARHDGAVAGLFDYWGQGTLVTVSSATRDGNEEMGGITQTPYKVSISGTTVILTCPQYPGSEILWQHNDKNIGGDEDDKNIGSDEDHLSLKEFSELEQSGYYVCYPRGSKPEDANFYLYLRARVCENCMEMDVMSVATIVIVDICITGGLLLLVYYWSKNRKAKAKPVTRGAGAGGRQRGQNKERPPPVPNPDYEPIRKGQRDLYSGLNQRRI

SEQ ID NO: 18131 - protein, 418 aa, Artificial Sequence
  Synthetic Polypeptide
MALPVTALLLPLALLLHAARPSYVLTQPPSVSVAPGQTARITCGGNNIGSKSVHWYQQPPGQAPVVVVYDDSDRPSGIPERFSGSNSGNTATLTISRVEAGDEAVYYCQVWDSSSDHVVFGGGTKLTVLGGGGSGGGGSGGGGSQLQLQESGPGLVKPSETLSLTCTVSGGSISSSSYFWGWIRQPPGKGLEWIGSIYYSGITYYNPSLKSRVTISVDTSKNQFSLKLSSVTAADTAVYYCARHDGAVAGLFDYWGQGTLVTVSSATRFKIPIEELEDRVFVNCNTSITWVEGTVGTLLSDITRLDLGKRILDPRGIYRCNGTDIYKDKESTVQVHYRMCQSCVELDPATVAGIIVTDVIATLLLALGVFCFAGHETGRLSGAADTQALLRNDQVYQPLRDRDDAQYSHLGGNWARNK

SEQ ID NO: 18132 - protein, 428 aa, Artificial Sequence
  Synthetic Polypeptide
MALPVTALLLPLALLLHAARPSYVLTQPPSVSVAPGQTARITCGGNNIGSKSVHWYQQPPGQAPVVVVYDDSDRPSGIPERFSGSNSGNTATLTISRVEAGDEAVYYCQVWDSSSDHVVFGGGTKLTVLGGGGSGGGGSGGGGSQLQLQESGPGLVKPSETLSLTCTVSGGSISSSSYFWGWIRQPPGKGLEWIGSIYYSGITYYNPSLKSRVTISVDTSKNQFSLKLSSVTAADTAVYYCARHDGAVAGLFDYWGQGTLVTVSSATRQSIKGNHLVKVYDYQEDGSVLLTCDAEAKNITWFKDGKMIGFLTEDKKKWNLGSNAKDPRGMYQCKGSQNKSKPLQVYYRMCQNCIELNAATISGFLFAEIVSIFVLAVGVYFIAGQDGVRQSRASDKQTLLPNDQLYQPLKDREDDQYSHLQGNQLRRN

SEQ ID NO: 18133 - protein, 411 aa, Artificial Sequence
  Synthetic Polypeptide
MALPVTALLLPLALLLHAARPSYVLTQPPSVSVAPGQTARITCGGNNIGSKSVHWYQQPPGQAPVVVVYDDSDRPSGIPERFSGSNSGNTATLTISRVEAGDEAVYYCQVWDSSSDHVVFGGGTKLTVLGGGGSGGGGSGGGGSQLQLQESGPGLVKPSETLSLTCTVSGGSISSSSYFWGWIRQPPGKGLEWIGSIYYSGITYYNPSLKSRVTISVDTSKNQFSLKLSSVTAADTAVYYCARHDGAVAGLFDYWGQGTLVTVSSATRQSFGLLDPKLCYLLDGILFIYGVILTALFLRVKFSRSADAPAYQQGQNQLYNELNLGRREEYDVLDKRRGRDPEMGGKPQRRKNPQEGLYNELQKDKMAEAYSEIGMKGERRRGKGHDGLYQGLSTATKDTYDALHMQALPPR

SEQ ID NO: 18134 - protein, 453 aa, Artificial Sequence
  Synthetic Polypeptide
MALPVTALLLPLALLLHAARPQLQLQESGPGLVKPSETLSLTCTVSGGSISSSSYFWGWIRQPPGKGLEWIGSIYYSGITYYNPSLKSRVTISVDTSKNQFSLKLSSVTAADTAVYYCARHDGAVAGLFDYWGQGTLVTVSSAGGGGSGGGGSGGGGSSYVLTQPPSVSVAPGQTARITCGGNNIGSKSVHWYQQPPGQAPVVVVYDDSDRPSGIPERFSGSNSGNTATLTISRVEAGDEAVYYCQVWDSSSDHVVFGGGTKLTVLTRDGNEEMGGITQTPYKVSISGTTVILTCPQYPGSEILWQHNDKNIGGDEDDKNIGSDEDHLSLKEFSELEQSGYYVCYPRGSKPEDANFYLYLRARVCENCMEMDVMSVATIVIVDICITGGLLLLVYYWSKNRKAKAKPVTRGAGAGGRQRGQNKERPPPVPNPDYEPIRKGQRDLYSGLNQRRI

SEQ ID NO: 18135 - protein, 418 aa, Artificial Sequence
  Synthetic Polypeptide
MALPVTALLLPLALLLHAARPQLQLQESGPGLVKPSETLSLTCTVSGGSISSSSYFWGWIRQPPGKGLEWIGSIYYSGITYYNPSLKSRVTISVDTSKNQFSLKLSSVTAADTAVYYCARHDGAVAGLFDYWGQGTLVTVSSAGGGGSGGGGSGGGGSSYVLTQPPSVSVAPGQTARITCGGNNIGSKSVHWYQQPPGQAPVVVVYDDSDRPSGIPERFSGSNSGNTATLTISRVEAGDEAVYYCQVWDSSSDHVVFGGGTKLTVLTRFKIPIEELEDRVFVNCNTSITWVEGTVGTLLSDITRLDLGKRILDPRGIYRCNGTDIYKDKESTVQVHYRMCQSCVELDPATVAGIIVTDVIATLLLALGVFCFAGHETGRLSGAADTQALLRNDQVYQPLRDRDDAQYSHLGGNWARNK

SEQ ID NO: 18136 - protein, 428 aa, Artificial Sequence
  Synthetic Polypeptide
MALPVTALLLPLALLLHAARPQLQLQESGPGLVKPSETLSLTCTVSGGSISSSSYFWGWIRQPPGKGLEWIGSIYYSGITYYNPSLKSRVTISVDTSKNQFSLKLSSVTAADTAVYYCARHDGAVAGLFDYWGQGTLVTVSSAGGGGSGGGGSGGGGSSYVLTQPPSVSVAPGQTARITCGGNNIGSKSVHWYQQPPGQAPVVVVYDDSDRPSGIPERFSGSNSGNTATLTISRVEAGDEAVYYCQVWDSSSDHVVFGGGTKLTVLTRQSIKGNHLVKVYDYQEDGSVLLTCDAEAKNITWFKDGKMIGFLTEDKKKWNLGSNAKDPRGMYQCKGSQNKSKPLQVYYRMCQNCIELNAATISGFLFAEIVSIFVLAVGVYFIAGQDGVRQSRASDKQTLLPNDQLYQPLKDREDDQYSHLQGNQLRRN

SEQ ID NO: 18137 - protein, 411 aa, Artificial Sequence
  Synthetic Polypeptide
MALPVTALLLPLALLLHAARPQLQLQESGPGLVKPSETLSLTCTVSGGSISSSSYFWGWIRQPPGKGLEWIGSIYYSGITYYNPSLKSRVTISVDTSKNQFSLKLSSVTAADTAVYYCARHDGAVAGLFDYWGQGTLVTVSSAGGGGSGGGGSGGGGSSYVLTQPPSVSVAPGQTARITCGGNNIGSKSVHWYQQPPGQAPVVVVYDDSDRPSGIPERFSGSNSGNTATLTISRVEAGDEAVYYCQVWDSSSDHVVFGGGTKLTVLTRQSFGLLDPKLCYLLDGILFIYGVILTALFLRVKFSRSADAPAYQQGQNQLYNELNLGRREEYDVLDKRRGRDPEMGGKPQRRKNPQEGLYNELQKDKMAEAYSEIGMKGERRRGKGHDGLYQGLSTATKDTYDALHMQALPPR

SEQ ID NO: 18138 - protein, 644 aa, Artificial Sequence
  Synthetic Polypeptide
MALPVTALLLPLALLLHAARPSYVLTQPPSVSVAPGQTARITCGGNNIGSKSVHWYQQPPGQAPVVVVYDDSDRPSGIPERFSGSNSGNTATLTISRVEAGDEAVYYCQVWDSSSDHVVFGGGTKLTVLGGGGSGGGGSGGGGSQLQLQESGPGLVKPSETLSLTCTVSGGSISSSSYFWGWIRQPPGKGLEWIGSIYYSGITYYNPSLKSRVTISVDTSKNQFSLKLSSVTAADTAVYYCARHDGAVAGLFDYWGQGTLVTVSSATRGSGIQNPDPAVYQLRDSKSSDKSVCLFTDFDSQTNVSQSKDSDVYITDKTVLDMRSMDFKSNSAVAWSNKSDFACANAFNNSIIPEDTFFPSPESSCDVKLVEKSFETDTNLNFQNLSVIGFRILLLKVAGFNLLMTLRLWSSRAKRSGSGVKQTLNFDLLKLAGDVESNPGPSRGHMTEYKPTVRLATRDDVPRAVRTLAAAFADYPATRHTVDPDRHIERVTELQELFLTRVGLDIGKVWVADDGAAVAVWTTPESVEAGAVFAEIGPRMAELSGSRLAAQQQMEGLLAPHRPKEPAWFLATVGVSPDHQGKGLGSAVVLPGVEAAERAGVPAFLETSAPRNLPFYERLGFTVTADVEVPEGPRTWCMTRKPGA

SEQ ID NO: 18139 - protein, 676 aa, Artificial Sequence
  Synthetic Polypeptide
MALPVTALLLPLALLLHAARPSYVLTQPPSVSVAPGQTARITCGGNNIGSKSVHWYQQPPGQAPVVVVYDDSDRPSGIPERFSGSNSGNTATLTISRVEAGDEAVYYCQVWDSSSDHVVFGGGTKLTVLGGGGSGGGGSGGGGSQLQLQESGPGLVKPSETLSLTCTVSGGSISSSSYFWGWIRQPPGKGLEWIGSIYYSGITYYNPSLKSRVTISVDTSKNQFSLKLSSVTAADTAVYYCARHDGAVAGLFDYWGQGTLVTVSSALEDLKNVFPPEVAVFEPSEAEISHTQKATLVCLATGFYPDHVELSWWVNGKEVHSGVSTDPQPLKEQPALNDSRYCLSSRLRVSATFWQNPRNHFRCQVQFYGLSENDEWTQDRAKPVTQIVSAEAWGRADCGFTSESYQQGVLSATILYEILLGKATLYAVLVSALVLMAMVKRKDSRGRAKRSGSGATNFSLLKQAGDVEENPGPTRGHMTEYKPTVRLATRDDVPRAVRTLAAAFADYPATRHTVDPDRHIERVTELQELFLTRVGLDIGKVWVADDGAAVAVWTTPESVEAGAVFAEIGPRMAELSGSRLAAQQQMEGLLAPHRPKEPAWFLATVGVSPDHQGKGLGSAVVLPGVEAAERAGVPAFLETSAPRNLPFYERLGFTVTADVEVPEGPRTWCMTRKPGA

SEQ ID NO: 18140 - protein, 726 aa, Artificial Sequence
  Synthetic Polypeptide
MALPVTALLLPLALLLHAARPSYVLTQPPSVSVAPGQTARITCGGNNIGSKSVHWYQQPPGQAPVVVVYDDSDRPSGIPERFSGSNSGNTATLTISRVEAGDEAVYYCQVWDSSSDHVVFGGGTKLTVLGGGGSGGGGSGGGGSQLQLQESGPGLVKPSETLSLTCTVSGGSISSSSYFWGWIRQPPGKGLEWIGSIYYSGITYYNPSLKSRVTISVDTSKNQFSLKLSSVTAADTAVYYCARHDGAVAGLFDYWGQGTLVTVSSATREQKLISEEDLGSGTPFPSLAPPIMLLVDGKQQMVVVCLVLDVAPPGLDSPIWFSAGNGSALDAFTYGPSPATDGTWTNLAHLSLPSEELASWEPLVCHTGPGAEGHSRSTQPMHLSGEASTARTCPQEPLRGTPGGALWLGVLRLLLFKLLLFDLLLTCSCLCDPAGPLPSPATTTRLRALGSHRLHPATETGGREATSSPRPQPRDRRWGDTPPGRKPGSPVRAKRSGSGVKQTLNFDLLKLAGDVESNPGPSRSRGHMTEYKPTVRLATRDDVPRAVRTLAAAFADYPATRHTVDPDRHIERVTELQELFLTRVGLDIGKVWVADDGAAVAVWTTPESVEAGAVFAEIGPRMAELSGSRLAAQQQMEGLLAPHRPKEPAWFLATVGVSPDHQGKGLGSAVVLPGVEAAERAGVPAFLETSAPRNLPFYERLGFTVTADVEVPEGPRTWCMTRKPGA

SEQ ID NO: 18141 - protein, 539 aa, Artificial Sequence
  Synthetic Polypeptide
MALPVTALLLPLALLLHAARPSYVLTQPPSVSVAPGQTARITCGGNNIGSKSVHWYQQPPGQAPVVVVYDDSDRPSGIPERFSGSNSGNTATLTISRVEAGDEAVYYCQVWDSSSDHVVFGGGTKLTVLLEDLKNVFPPEVAVFEPSEAEISHTQKATLVCLATGFYPDHVELSWWVNGKEVHSGVSTDPQPLKEQPALNDSRYCLSSRLRVSATFWQNPRNHFRCQVQFYGLSENDEWTQDRAKPVTQIVSAEAWGRADCGFTSESYQQGVLSATILYEILLGKATLYAVLVSALVLMAMVKRKDSRGRAKRSGSGATNFSLLKQAGDVEENPGPTRGHMTEYKPTVRLATRDDVPRAVRTLAAAFADYPATRHTVDPDRHIERVTELQELFLTRVGLDIGKVWVADDGAAVAVWTTPESVEAGAVFAEIGPRMAELSGSRLAAQQQMEGLLAPHRPKEPAWFLATVGVSPDHQGKGLGSAVVLPGVEAAERAGVPAFLETSAPRNLPFYERLGFTVTADVEVPEGPRTWCMTRKPGA

SEQ ID NO: 18142 - protein, 309 aa, Artificial Sequence
  Synthetic Polypeptide
MALPVTALLLPLALLLHAARPSYVLTQPPSVSVAPGQTARITCGGNNIGSKSVHWYQQPPGQAPVVVVYDDSDRPSGIPERFSGSNSGNTATLTISRVEAGDEAVYYCQVWDSSSDHVVFGGGTKLTVLLEDLKNVFPPEVAVFEPSEAEISHTQKATLVCLATGFYPDHVELSWWVNGKEVHSGVSTDPQPLKEQPALNDSRYCLSSRLRVSATFWQNPRNHFRCQVQFYGLSENDEWTQDRAKPVTQIVSAEAWGRADCGFTSESYQQGVLSATILYEILLGKATLYAVLVSALVLMAMVKRKDSRG

SEQ ID NO: 18143 - protein, 451 aa, Artificial Sequence
  Synthetic Polypeptide
MDWIWRILFLVGAATGAHSFEQLQLQESGPGLVKPSETLSLTCTVSGGSISSSSYFWGWIRQPPGKGLEWIGSIYYSGITYYNPSLKSRVTISVDTSKNQFSLKLSSVTAADTAVYYCARHDGAVAGLFDYWGQGTLVTVSSATRIQNPDPAVYQLRDSKSSDKSVCLFTDFDSQTNVSQSKDSDVYITDKTVLDMRSMDFKSNSAVAWSNKSDFACANAFNNSIIPEDTFFPSPESSCDVKLVEKSFETDTNLNFQNLSVIGFRILLLKVAGFNLLMTLRLWSSRAKRSGSGVKQTLNFDLLKLAGDVESNPGPSRGHMAKPLSQEESTLIERATATINSIPISEDYSVASAALSSDGRIFTGVNVYHFTGGPCAELVVLGTAAAAAAGNLTCIVAIGNENRGILSPCGRCRQVLLDLHPGIKAIVKDSDGQPTAVGIRELLPSGYVWEG

SEQ ID NO: 18144 - protein, 285 aa, Artificial Sequence
  Synthetic Polypeptide
MDWIWRILFLVGAATGAHSFEQLQLQESGPGLVKPSETLSLTCTVSGGSISSSSYFWGWIRQPPGKGLEWIGSIYYSGITYYNPSLKSRVTISVDTSKNQFSLKLSSVTAADTAVYYCARHDGAVAGLFDYWGQGTLVTVSSATRIQNPDPAVYQLRDSKSSDKSVCLFTDFDSQTNVSQSKDSDVYITDKTVLDMRSMDFKSNSAVAWSNKSDFACANAFNNSIIPEDTFFPSPESSCDVKLVEKSFETDTNLNFQNLSVIGFRILLLKVAGFNLLMTLRLWSS

SEQ ID NO: 18145 - protein, 557 aa, Artificial Sequence
  Synthetic Polypeptide
MALPVTALLLPLALLLHAARPSYVLTQPPSVSVAPGQTARITCGGNNIGSKSVHWYQQPPGQAPVVVVYDDSDRPSGIPERFSGSNSGNTATLTISRVEAGDEAVYYCQVWDSSSDHVVFGGGTKLTVLLEGKPIPNPLLGLDSTGSGEDLKNVFPPEVAVFEPSEAEISHTQKATLVCLATGFYPDHVELSWWVNGKEVHSGVCTDPQPLKEQPALNDSRYCLSSRLRVSATFWQNPRNHFRCQVQFYGLSENDEWTQDRAKPVTQIVSAEAWGRADCGFTSESYQQGVLSATILYEILLGKATLYAVLVSALVLMAMVKRKDSRGRAKRSGSGATNFSLLKQAGDVEENPGPTRGHMTEYKPTVRLATRDDVPRAVRTLAAAFADYPATRHTVDPDRHIERVTELQELFLTRVGLDIGKVWVADDGAAVAVWTTPESVEAGAVFAEIGPRMAELSGSRLAAQQQMEGLLAPHRPKEPAWFLATVGVSPDHQGKGLGSAVVLPGVEAAERAGVPAFLETSAPRNLPFYERLGFTVTADVEVPEGPRTWCMTRKPGA

SEQ ID NO: 18146 - protein, 327 aa, Artificial Sequence
  Synthetic Polypeptide
MALPVTALLLPLALLLHAARPSYVLTQPPSVSVAPGQTARITCGGNNIGSKSVHWYQQPPGQAPVVVVYDDSDRPSGIPERFSGSNSGNTATLTISRVEAGDEAVYYCQVWDSSSDHVVFGGGTKLTVLLEGKPIPNPLLGLDSTGSGEDLKNVFPPEVAVFEPSEAEISHTQKATLVCLATGFYPDHVELSWWVNGKEVHSGVCTDPQPLKEQPALNDSRYCLSSRLRVSATFWQNPRNHFRCQVQFYGLSENDEWTQDRAKPVTQIVSAEAWGRADCGFTSESYQQGVLSATILYEILLGKATLYAVLVSALVLMAMVKRKDSRG

SEQ ID NO: 18147 - protein, 463 aa, Artificial Sequence
  Synthetic Polypeptide
MDWIWRILFLVGAATGAHSFEQLQLQESGPGLVKPSETLSLTCTVSGGSISSSSYFWGWIRQPPGKGLEWIGSIYYSGITYYNPSLKSRVTISVDTSKNQFSLKLSSVTAADTAVYYCARHDGAVAGLFDYWGQGTLVTVSSATREQKLISEEDGSGIQNPDPAVYQLRDSKSSDKSVCLFTDFDSQTNVSQSKDSDVYITDKCVLDMRSMDFKSNSAVAWSNKSDFACANAFNNSIIPEDTFFPSPESSCDVKLVEKSFETDTNLNFQNLSVIGFRILLLKVAGFNLLMTLRLWSSRAKRSGSGVKQTLNFDLLKLAGDVESNPGPSRGHMAKPLSQEESTLIERATATINSIPISEDYSVASAALSSDGRIFTGVNVYHFTGGPCAELVVLGTAAAAAAGNLTCIVAIGNENRGILSPCGRCRQVLLDLHPGIKAIVKDSDGQPTAVGIRELLPSGYVWEG

SEQ ID NO: 18148 - protein, 297 aa, Artificial Sequence
  Synthetic Polypeptide
MDWIWRILFLVGAATGAHSFEQLQLQESGPGLVKPSETLSLTCTVSGGSISSSSYFWGWIRQPPGKGLEWIGSIYYSGITYYNPSLKSRVTISVDTSKNQFSLKLSSVTAADTAVYYCARHDGAVAGLFDYWGQGTLVTVSSATREQKLISEEDGSGIQNPDPAVYQLRDSKSSDKSVCLFTDFDSQTNVSQSKDSDVYITDKCVLDMRSMDFKSNSAVAWSNKSDFACANAFNNSIIPEDTFFPSPESSCDVKLVEKSFETDTNLNFQNLSVIGFRILLLKVAGFNLLMTLRLWSS

SEQ ID NO: 18149 - protein, 644 aa, Artificial Sequence
  Synthetic Polypeptide
MALPVTALLLPLALLLHAARPSYVLTQPPSVSVAPGQTARITCGGNNIGSKSVHWYQQPPGQAPVVVVYDDSDRPSGIPERFSGSNSGNTATLTISRVEAGDEAVYYCQVWDSSSDHVVFGGGTKLTVLGGGGSGGGGSGGGGSQLQLQESGPGLVKPSETLSLTCTVSGGSISSSSYFWGWIRQPPGKGLEWIGSIYYSGITYYNPSLKSRVTISVDTSKNQFSLKLSSVTAADTAVYYCARHDGAVAGLFDYWGQGTLVTVSSATRGSGIQNPDPAVYQLRDSKSSDKSVCLFTDFDSQTNVSQSKDSDVYITDKTVLDMRSMDFKSNSAVAWSNKSDFACANAFNNSIIPEDTFFPSSDVPCDVKLVEKSFETDTNLNFQNLSVIGFRILLLKVAGFNLLMTLRLWSSRAKRSGSGVKQTLNFDLLKLAGDVESNPGPSRGHMTEYKPTVRLATRDDVPRAVRTLAAAFADYPATRHTVDPDRHIERVTELQELFLTRVGLDIGKVWVADDGAAVAVWTTPESVEAGAVFAEIGPRMAELSGSRLAAQQQMEGLLAPHRPKEPAWFLATVGVSPDHQGKGLGSAVVLPGVEAAERAGVPAFLETSAPRNLPFYERLGFTVTADVEVPEGPRTWCMTRKPGA

SEQ ID NO: 18150 - protein, 676 aa, Artificial Sequence
  Synthetic Polypeptide
MALPVTALLLPLALLLHAARPSYVLTQPPSVSVAPGQTARITCGGNNIGSKSVHWYQQPPGQAPVVVVYDDSDRPSGIPERFSGSNSGNTATLTISRVEAGDEAVYYCQVWDSSSDHVVFGGGTKLTVLGGGGSGGGGSGGGGSQLQLQESGPGLVKPSETLSLTCTVSGGSISSSSYFWGWIRQPPGKGLEWIGSIYYSGITYYNPSLKSRVTISVDTSKNQFSLKLSSVTAADTAVYYCARHDGAVAGLFDYWGQGTLVTVSSALEDLKNVFPPEVAVFEPSKAEIAHTQKATLVCLATGFYPDHVELSWWVNGKEVHSGVSTDPQPLKEQPALNDSRYCLSSRLRVSATFWQNPRNHFRCQVQFYGLSENDEWTQDRAKPVTQIVSAEAWGRADCGITSASYHQGVLSATILYEILLGKATLYAVLVSALVLMAMVKRKDSRGRAKRSGSGATNFSLLKQAGDVEENPGPTRGHMTEYKPTVRLATRDDVPRAVRTLAAAFADYPATRHTVDPDRHIERVTELQELFLTRVGLDIGKVWVADDGAAVAVWTTPESVEAGAVFAEIGPRMAELSGSRLAAQQQMEGLLAPHRPKEPAWFLATVGVSPDHQGKGLGSAVVLPGVEAAERAGVPAFLETSAPRNLPFYERLGFTVTADVEVPEGPRTWCMTRKPGA

SEQ ID NO: 18151 - protein, 699 aa, Artificial Sequence
  Synthetic Polypeptide
MALPVTALLLPLALLLHAARPSYVLTQPPSVSVAPGQTARITCGGNNIGSKSVHWYQQPPGQAPVVVVYDDSDRPSGIPERFSGSNSGNTATLTISRVEAGDEAVYYCQVWDSSSDHVVFGGGTKLTVLGGGGSGGGGSGGGGSQLQLQESGPGLVKPSETLSLTCTVSGGSISSSSYFWGWIRQPPGKGLEWIGSIYYSGITYYNPSLKSRVTISVDTSKNQFSLKLSSVTAADTAVYYCARHDGAVAGLFDYWGQGTLVTVSSATRGSGGGGSGGGGSGDGNEEMGGITQTPYKVSISGTTVILTCPQYPGSEILWQHNDKNIGGDEDDKNIGSDEDHLSLKEFSELEQSGYYVCYPRGSKPEDANFYLYLRARVCENCMEMDVMSVATIVIVDICITGGLLLLVYYWSKNRKAKAKPVTRGAGAGGRQRGQNKERPPPVPNPDYEPIRKGQRDLYSGLNQRRIRAKRSGSGVKQTLNFDLLKLAGDVESNPGPSRGHMTEYKPTVRLATRDDVPRAVRTLAAAFADYPATRHTVDPDRHIERVTELQELFLTRVGLDIGKVWVADDGAAVAVWTTPESVEAGAVFAEIGPRMAELSGSRLAAQQQMEGLLAPHRPKEPAWFLATVGVSPDHQGKGLGSAVVLPGVEAAERAGVPAFLETSAPRNLPFYERLGFTVTADVEVPEGPRTWCMTRKPGA

SEQ ID NO: 18152 - protein, 664 aa, Artificial Sequence
  Synthetic Polypeptide
MALPVTALLLPLALLLHAARPSYVLTQPPSVSVAPGQTARITCGGNNIGSKSVHWYQQPPGQAPVVVVYDDSDRPSGIPERFSGSNSGNTATLTISRVEAGDEAVYYCQVWDSSSDHVVFGGGTKLTVLGGGGSGGGGSGGGGSQLQLQESGPGLVKPSETLSLTCTVSGGSISSSSYFWGWIRQPPGKGLEWIGSIYYSGITYYNPSLKSRVTISVDTSKNQFSLKLSSVTAADTAVYYCARHDGAVAGLFDYWGQGTLVTVSSATRGSGGGGSGGGGSGFKIPIEELEDRVFVNCNTSITWVEGTVGTLLSDITRLDLGKRILDPRGIYRCNGTDIYKDKESTVQVHYRMCQSCVELDPATVAGIIVTDVIATLLLALGVFCFAGHETGRLSGAADTQALLRNDQVYQPLRDRDDAQYSHLGGNWARNKRAKRSGSGVKQTLNFDLLKLAGDVESNPGPSRGHMTEYKPTVRLATRDDVPRAVRTLAAAFADYPATRHTVDPDRHIERVTELQELFLTRVGLDIGKVWVADDGAAVAVWTTPESVEAGAVFAEIGPRMAELSGSRLAAQQQMEGLLAPHRPKEPAWFLATVGVSPDHQGKGLGSAVVLPGVEAAERAGVPAFLETSAPRNLPFYERLGFTVTADVEVPEGPRTWCMTRKPGA

SEQ ID NO: 18153 - protein, 674 aa, Artificial Sequence
  Synthetic Polypeptide
MALPVTALLLPLALLLHAARPSYVLTQPPSVSVAPGQTARITCGGNNIGSKSVHWYQQPPGQAPVVVVYDDSDRPSGIPERFSGSNSGNTATLTISRVEAGDEAVYYCQVWDSSSDHVVFGGGTKLTVLGGGGSGGGGSGGGGSQLQLQESGPGLVKPSETLSLTCTVSGGSISSSSYFWGWIRQPPGKGLEWIGSIYYSGITYYNPSLKSRVTISVDTSKNQFSLKLSSVTAADTAVYYCARHDGAVAGLFDYWGQGTLVTVSSATRGSGGGGSGGGGSGQSIKGNHLVKVYDYQEDGSVLLTCDAEAKNITWFKDGKMIGFLTEDKKKWNLGSNAKDPRGMYQCKGSQNKSKPLQVYYRMCQNCIELNAATISGFLFAEIVSIFVLAVGVYFIAGQDGVRQSRASDKQTLLPNDQLYQPLKDREDDQYSHLQGNQLRRNRAKRSGSGVKQTLNFDLLKLAGDVESNPGPSRGHMTEYKPTVRLATRDDVPRAVRTLAAAFADYPATRHTVDPDRHIERVTELQELFLTRVGLDIGKVWVADDGAAVAVWTTPESVEAGAVFAEIGPRMAELSGSRLAAQQQMEGLLAPHRPKEPAWFLATVGVSPDHQGKGLGSAVVLPGVEAAERAGVPAFLETSAPRNLPFYERLGFTVTADVEVPEGPRTWCMTRKPGA

SEQ ID NO: 18154 - protein, 657 aa, Artificial Sequence
  Synthetic Polypeptide
MALPVTALLLPLALLLHAARPSYVLTQPPSVSVAPGQTARITCGGNNIGSKSVHWYQQPPGQAPVVVVYDDSDRPSGIPERFSGSNSGNTATLTISRVEAGDEAVYYCQVWDSSSDHVVFGGGTKLTVLGGGGSGGGGSGGGGSQLQLQESGPGLVKPSETLSLTCTVSGGSISSSSYFWGWIRQPPGKGLEWIGSIYYSGITYYNPSLKSRVTISVDTSKNQFSLKLSSVTAADTAVYYCARHDGAVAGLFDYWGQGTLVTVSSATRGSGGGGSGGGGSGQSFGLLDPKLCYLLDGILFIYGVILTALFLRVKFSRSADAPAYQQGQNQLYNELNLGRREEYDVLDKRRGRDPEMGGKPQRRKNPQEGLYNELQKDKMAEAYSEIGMKGERRRGKGHDGLYQGLSTATKDTYDALHMQALPPRRAKRSGSGVKQTLNFDLLKLAGDVESNPGPSRGHMTEYKPTVRLATRDDVPRAVRTLAAAFADYPATRHTVDPDRHIERVTELQELFLTRVGLDIGKVWVADDGAAVAVWTTPESVEAGAVFAEIGPRMAELSGSRLAAQQQMEGLLAPHRPKEPAWFLATVGVSPDHQGKGLGSAVVLPGVEAAERAGVPAFLETSAPRNLPFYERLGFTVTADVEVPEGPRTWCMTRKPGA

SEQ ID NO: 18155 - protein, 758 aa, Artificial Sequence
  Synthetic Polypeptide
MALPVTALLLPLALLLHAARPEVQLVESGGGLVQPGGSLRLSCAASGFSFSDFWMSWVRQAPGKGLEWVATISQAGSEKDYVDSVKGRFTISRDNAKKSLYLQMNSLRAEDTAVYYCASGVYSFDYRGQGTLVTVSSGTGGGGSGGGGSGGGGSEFSYVLTQPPSVSVAPGQTARITCGGNNIGSKSVHWYQQPPGQAPVVVVYDDSDRPSGIPERFSGSNSGNTATLTISRVEAGDEAVYYCQVWDSSSDHVVFGGGTKLTVLLEDLKNVFPPEVAVFEPSEAEISHTQKATLVCLATGFYPDHVELSWWVNGKEVHSGVCTDPQPLKEQPALNDSRYCLSSRLRVSATFWQNPRNHFRCQVQFYGLSENDEWTQDRAKPVTQIVSAEAWGRADCGFTSESYQQGVLSATILYEILLGKATLYAVLVSALVLMAMVKRKDSRGRAKRSGSGATNFSLLKQAGDVEENPGPTSMDWIWRILFLVGAATGAHSFEQLQLQESGPGLVKPSETLSLTCTVSGGSISSSSYFWGWIRQPPGKGLEWIGSIYYSGITYYNPSLKSRVTISVDTSKNQFSLKLSSVTAADTAVYYCARHDGAVAGLFDYWGQGTLVTVSSATRIQNPDPAVYQLRDSKSSDKSVCLFTDFDSQTNVSQSKDSDVYITDKCVLDMRSMDFKSNSAVAWSNKSDFACANAFNNSIIPEDTFFPSPESSCDVKLVEKSFETDTNLNFQNLSVIGFRILLLKVAGFNLLMTLRLWSS

SEQ ID NO: 18156 - protein, 762 aa, Artificial Sequence
  Synthetic Polypeptide
MALPVTALLLPLALLLHAARPEVQLVESGGGLVQPGGSLRLSCAASGFSFSDFWMSWVRQAPGKGLEWVATISQAGSEKDYVDSVKGRFTISRDNAKKSLYLQMNSLRAEDTAVYYCASGVYSFDYRGQGTLVTVSSGTGGGGSGGGGSGGGGSEFSYVLTQPPSVSVAPGQTARITCGGNNIGSKSVHWYQQPPGQAPVVVVYDDSDRPSGIPERFSGSNSGNTATLTISRVEAGDEAVYYCQVWDSSSDHVVFGGGTKLTVLLEIQNPDPAVYQLRDSKSSDKSVCLFTDFDSQTNVSQSKDSDVYITDKCVLDMRSMDFKSNSAVAWSNKSDFACANAFNNSIIPEDTFFPSPESSCDVKLVEKSFETDTNLNFQNLSVIGFRILLLKVAGFNLLMTLRLWSSRAKRSGSGVKQTLNFDLLKLAGDVESNPGPTSMDWIWRILFLVGAATGAHSFEQLQLQESGPGLVKPSETLSLTCTVSGGSISSSSYFWGWIRQPPGKGLEWIGSIYYSGITYYNPSLKSRVTISVDTSKNQFSLKLSSVTAADTAVYYCARHDGAVAGLFDYWGQGTLVTVSSATREDLKNVFPPEVAVFEPSEAEISHTQKATLVCLATGFYPDHVELSWWVNGKEVHSGVCTDPQPLKEQPALNDSRYCLSSRLRVSATFWQNPRNHFRCQVQFYGLSENDEWTQDRAKPVTQIVSAEAWGRADCGFTSESYQQGVLSATILYEILLGKATLYAVLVSALVLMAMVKRKDSRG

SEQ ID NO: 18157 - protein, 954 aa, Artificial Sequence
  Synthetic Polypeptide
MALPVTALLLPLALLLHAARPEVQLVESGGGLVQPGGSLRLSCAASGFSFSDFWMSWVRQAPGKGLEWVATISQAGSEKDYVDSVKGRFTISRDNAKKSLYLQMNSLRAEDTAVYYCASGVYSFDYRGQGTLVTVSSGTGGGGSGGGGSGGGGSEFSYVLTQPPSVSVAPGQTARITCGGNNIGSKSVHWYQQPPGQAPVVVVYDDSDRPSGIPERFSGSNSGNTATLTISRVEAGDEAVYYCQVWDSSSDHVVFGGGTKLTVLLEDLKNVFPPEVAVFEPSEAEISHTQKATLVCLATGFYPDHVELSWWVNGKEVHSGVSTDPQPLKEQPALNDSRYCLSSRLRVSATFWQNPRNHFRCQVQFYGLSENDEWTQDRAKPVTQIVSAEAWGRADCGSQSFGLLDPKLCYLLDGILFIYGVILTALFLRVKFSRSADAPAYQQGQNQLYNELNLGRREEYDVLDKRRGRDPEMGGKPQRRKNPQEGLYNELQKDKMAEAYSEIGMKGERRRGKGHDGLYQGLSTATKDTYDALHMQALPPRRAKRSGSGATNFSLLKQAGDVEENPGPTSMDWIWRILFLVGAATGAHSFEQLQLQESGPGLVKPSETLSLTCTVSGGSISSSSYFWGWIRQPPGKGLEWIGSIYYSGITYYNPSLKSRVTISVDTSKNQFSLKLSSVTAADTAVYYCARHDGAVAGLFDYWGQGTLVTVSSATRIQNPDPAVYQLRDSKSSDKSVCLFTDFDSQTNVSQSKDSDVYITDKTVLDMRSMDFKSNSAVAWSNKSDFACANAFNNSIIPEDTFFPSPESSCGTQSFGLLDPKLCYLLDGILFIYGVILTALFLRVKFSRSADAPAYQQGQNQLYNELNLGRREEYDVLDKRRGRDPEMGGKPQRRKNPQEGLYNELQKDKMAEAYSEIGMKGERRRGKGHDGLYQGLSTATKDTYDALHMQALPPR

SEQ ID NO: 18158 - protein, 784 aa, Artificial Sequence
  Synthetic Polypeptide
MALPVTALLLPLALLLHAARPEVQLVESGGGLVQPGGSLRLSCAASGFSFSDFWMSWVRQAPGKGLEWVATISQAGSEKDYVDSVKGRFTISRDNAKKSLYLQMNSLRAEDTAVYYCASGVYSFDYRGQGTLVTVSSGTGGGGSGGGGSGGGGSEFSYVLTQPPSVSVAPGQTARITCGGNNIGSKSVHWYQQPPGQAPVVVVYDDSDRPSGIPERFSGSNSGNTATLTISRVEAGDEAVYYCQVWDSSSDHVVFGGGTKLTVLLEGQPKANPTVTLFPPSSEELQANKATLVCLISDFYPGAVTVAWKADGSPVKAGVETTKPSKQSNNKYAASSYLSLTPEQWKSHRSYSCQVTHEGSTVEKTVAPTECSPIKTDVITMDPKDNCSKDANDTLLLQLTNTSAYYMYLLLLLKSVVYFAIITCCLLRRTAFCCNGEKSRAKRSGSGATNFSLLKQAGDVEENPGPTSMDWIWRILFLVGAATGAHSFEQLQLQESGPGLVKPSETLSLTCTVSGGSISSSSYFWGWIRQPPGKGLEWIGSIYYSGITYYNPSLKSRVTISVDTSKNQFSLKLSSVTAADTAVYYCARHDGAVAGLFDYWGQGTLVTVSSATRASTKGPSVFPLAPSSKSTSGGTAALGCLVKDYFPEPVTVSWNSGALTSGVHTFPAVLQSSGLYSLSSVVTVPSSSLGTQTYICNVNHKPSNTKVDKRVEPKSCEVKTDSTDHVKPKETENTKQPSKSCHKPKAIVHTEKVNMMSLTVLGLRMLFAKTVAVNFLLTAKLFFL

SEQ ID NO: 18159 - protein, 765 aa, Artificial Sequence
  Synthetic Polypeptide
MALPVTALLLPLALLLHAARPEVQLVESGGGLVQPGGSLRLSCAASGFSFSDFWMSWVRQAPGKGLEWVATISQAGSEKDYVDSVKGRFTISRDNAKKSLYLQMNSLRAEDTAVYYCASGVYSFDYRGQGTLVTVSSGTGGGGSGGGGSGGGGSEFSYVLTQPPSVSVAPGQTARITCGGNNIGSKSVHWYQQPPGQAPVVVVYDDSDRPSGIPERFSGSNSGNTATLTISRVEAGDEAVYYCQVWDSSSDHVVFGGGTKLTVLLEGQPKANPTVTLFPPSSEELQANKATLVCLISDFYPGAVTVAWKADGSPVKAGVETTKPSKQSNNKYAASSYLSLTPEQWKSHRSYSCQVTHEGSTVEKTVAPTECSGRADCGFTSESYQQGVLSATILYEILLGKATLYAVLVSALVLMAMVKRKDSRGRAKRSGSGVKQTLNFDLLKLAGDVESNPGPTSMDWIWRILFLVGAATGAHSFEQLQLQESGPGLVKPSETLSLTCTVSGGSISSSSYFWGWIRQPPGKGLEWIGSIYYSGITYYNPSLKSRVTISVDTSKNQFSLKLSSVTAADTAVYYCARHDGAVAGLFDYWGQGTLVTVSSATRASTKGPSVFPLAPSSKSTSGGTAALGCLVKDYFPEPVTVSWNSGALTSGVHTFPAVLQSSGLYSLSSVVTVPSSSLGTQTYICNVNHKPSNTKVDKRVEPKSCIPEDTFFPSPESSCDVKLVEKSFETDTNLNFQNLSVIGFRILLLKVAGFNLLMTLRLWSS

SEQ ID NO: 18160 - protein, 899 aa, Artificial Sequence
  Synthetic Polypeptide
MALPVTALLLPLALLLHAARPEVQLVESGGGLVQPGGSLRLSCAASGFSFSDFWMSWVRQAPGKGLEWVATISQAGSEKDYVDSVKGRFTISRDNAKKSLYLQMNSLRAEDTAVYYCASGVYSFDYRGQGTLVTVSSGTGGGGSGGGGSGGGGSEFSYVLTQPPSVSVAPGQTARITCGGNNIGSKSVHWYQQPPGQAPVVVVYDDSDRPSGIPERFSGSNSGNTATLTISRVEAGDEAVYYCQVWDSSSDHVVFGGGTKLTVLLEIQNPDPAVYQLRDSKSSDKSVCLFTDFDSQTNVSQSKDSDVYITDKCVLDMRSMDFKSNSAVAWSNKSDFACANAFNNSIIPEDTFFPSPESSCDVKLVEKSFETDTNLNFQNLSVIGFRILLLKVAGFNLLMTLRLWSSRAKRSGSGVKQTLNFDLLKLAGDVESNPGPTSMDWIWRILFLVGAATGAHSGPQLQLQESGPGLVKPSETLSLTCTVSGDSISSGDYYWGWIRQPPGKGLEWIGHIYYSGVTYYNPSLKSRVTISVDTSRNQFSLKLSSVTAADTAVYYCTREDSSNWRSRGQGTLVTVSSGSGGGGSGGGGSGGGGSFEQLQLQESGPGLVKPSETLSLTCTVSGGSISSSSYFWGWIRQPPGKGLEWIGSIYYSGITYYNPSLKSRVTISVDTSKNQFSLKLSSVTAADTAVYYCARHDGAVAGLFDYWGQGTLVTVSSATREDLKNVFPPEVAVFEPSEAEISHTQKATLVCLATGFYPDHVELSWWVNGKEVHSGVCTDPQPLKEQPALNDSRYCLSSRLRVSATFWQNPRNHFRCQVQFYGLSENDEWTQDRAKPVTQIVSAEAWGRADCGFTSESYQQGVLSATILYEILLGKATLYAVLVSALVLMAMVKRKDSRG

SEQ ID NO: 18161 - protein, 1091 aa, Artificial Sequence
  Synthetic Polypeptide
MALPVTALLLPLALLLHAARPEVQLVESGGGLVQPGGSLRLSCAASGFSFSDFWMSWVRQAPGKGLEWVATISQAGSEKDYVDSVKGRFTISRDNAKKSLYLQMNSLRAEDTAVYYCASGVYSFDYRGQGTLVTVSSGTGGGGSGGGGSGGGGSEFSYVLTQPPSVSVAPGQTARITCGGNNIGSKSVHWYQQPPGQAPVVVVYDDSDRPSGIPERFSGSNSGNTATLTISRVEAGDEAVYYCQVWDSSSDHVVFGGGTKLTVLLEDLKNVFPPEVAVFEPSEAEISHTQKATLVCLATGFYPDHVELSWWVNGKEVHSGVSTDPQPLKEQPALNDSRYCLSSRLRVSATFWQNPRNHFRCQVQFYGLSENDEWTQDRAKPVTQIVSAEAWGRADCGSQSFGLLDPKLCYLLDGILFIYGVILTALFLRVKFSRSADAPAYQQGQNQLYNELNLGRREEYDVLDKRRGRDPEMGGKPQRRKNPQEGLYNELQKDKMAEAYSEIGMKGERRRGKGHDGLYQGLSTATKDTYDALHMQALPPRRAKRSGSGATNFSLLKQAGDVEENPGPTSMDWIWRILFLVGAATGAHSGPQLQLQESGPGLVKPSETLSLTCTVSGDSISSGDYYWGWIRQPPGKGLEWIGHIYYSGVTYYNPSLKSRVTISVDTSRNQFSLKLSSVTAADTAVYYCTREDSSNWRSRGQGTLVTVSSGSGGGGSGGGGSGGGGSFEQLQLQESGPGLVKPSETLSLTCTVSGGSISSSSYFWGWIRQPPGKGLEWIGSIYYSGITYYNPSLKSRVTISVDTSKNQFSLKLSSVTAADTAVYYCARHDGAVAGLFDYWGQGTLVTVSSATRIQNPDPAVYQLRDSKSSDKSVCLFTDFDSQTNVSQSKDSDVYITDKTVLDMRSMDFKSNSAVAWSNKSDFACANAFNNSIIPEDTFFPSPESSCGTQSFGLLDPKLCYLLDGILFIYGVILTALFLRVKFSRSADAPAYQQGQNQLYNELNLGRREEYDVLDKRRGRDPEMGGKPQRRKNPQEGLYNELQKDKMAEAYSEIGMKGERRRGKGHDGLYQGLSTATKDTYDALHMQALPPR

SEQ ID NO: 18162 - protein, 921 aa, Artificial Sequence
  Synthetic Polypeptide
MALPVTALLLPLALLLHAARPEVQLVESGGGLVQPGGSLRLSCAASGFSFSDFWMSWVRQAPGKGLEWVATISQAGSEKDYVDSVKGRFTISRDNAKKSLYLQMNSLRAEDTAVYYCASGVYSFDYRGQGTLVTVSSGTGGGGSGGGGSGGGGSEFSYVLTQPPSVSVAPGQTARITCGGNNIGSKSVHWYQQPPGQAPVVVVYDDSDRPSGIPERFSGSNSGNTATLTISRVEAGDEAVYYCQVWDSSSDHVVFGGGTKLTVLLEGQPKANPTVTLFPPSSEELQANKATLVCLISDFYPGAVTVAWKADGSPVKAGVETTKPSKQSNNKYAASSYLSLTPEQWKSHRSYSCQVTHEGSTVEKTVAPTECSPIKTDVITMDPKDNCSKDANDTLLLQLTNTSAYYMYLLLLLKSVVYFAIITCCLLRRTAFCCNGEKSRAKRSGSGATNFSLLKQAGDVEENPGPTSMDWIWRILFLVGAATGAHSGPQLQLQESGPGLVKPSETLSLTCTVSGDSISSGDYYWGWIRQPPGKGLEWIGHIYYSGVTYYNPSLKSRVTISVDTSRNQFSLKLSSVTAADTAVYYCTREDSSNWRSRGQGTLVTVSSGSGGGGSGGGGSGGGGSFEQLQLQESGPGLVKPSETLSLTCTVSGGSISSSSYFWGWIRQPPGKGLEWIGSIYYSGITYYNPSLKSRVTISVDTSKNQFSLKLSSVTAADTAVYYCARHDGAVAGLFDYWGQGTLVTVSSATRASTKGPSVFPLAPSSKSTSGGTAALGCLVKDYFPEPVTVSWNSGALTSGVHTFPAVLQSSGLYSLSSVVTVPSSSLGTQTYICNVNHKPSNTKVDKRVEPKSCEVKTDSTDHVKPKETENTKQPSKSCHKPKAIVHTEKVNMMSLTVLGLRMLFAKTVAVNFLLTAKLFFL

SEQ ID NO: 18163 - protein, 902 aa, Artificial Sequence
  Synthetic Polypeptide
MALPVTALLLPLALLLHAARPEVQLVESGGGLVQPGGSLRLSCAASGFSFSDFWMSWVRQAPGKGLEWVATISQAGSEKDYVDSVKGRFTISRDNAKKSLYLQMNSLRAEDTAVYYCASGVYSFDYRGQGTLVTVSSGTGGGGSGGGGSGGGGSEFSYVLTQPPSVSVAPGQTARITCGGNNIGSKSVHWYQQPPGQAPVVVVYDDSDRPSGIPERFSGSNSGNTATLTISRVEAGDEAVYYCQVWDSSSDHVVFGGGTKLTVLLEGQPKANPTVTLFPPSSEELQANKATLVCLISDFYPGAVTVAWKADGSPVKAGVETTKPSKQSNNKYAASSYLSLTPEQWKSHRSYSCQVTHEGSTVEKTVAPTECSGRADCGFTSESYQQGVLSATILYEILLGKATLYAVLVSALVLMAMVKRKDSRGRAKRSGSGVKQTLNFDLLKLAGDVESNPGPTSMDWIWRILFLVGAATGAHSGPQLQLQESGPGLVKPSETLSLTCTVSGDSISSGDYYWGWIRQPPGKGLEWIGHIYYSGVTYYNPSLKSRVTISVDTSRNQFSLKLSSVTAADTAVYYCTREDSSNWRSRGQGTLVTVSSGSGGGGSGGGGSGGGGSFEQLQLQESGPGLVKPSETLSLTCTVSGGSISSSSYFWGWIRQPPGKGLEWIGSIYYSGITYYNPSLKSRVTISVDTSKNQFSLKLSSVTAADTAVYYCARHDGAVAGLFDYWGQGTLVTVSSATRASTKGPSVFPLAPSSKSTSGGTAALGCLVKDYFPEPVTVSWNSGALTSGVHTFPAVLQSSGLYSLSSVVTVPSSSLGTQTYICNVNHKPSNTKVDKRVEPKSCIPEDTFFPSPESSCDVKLVEKSFETDTNLNFQNLSVIGFRILLLKVAGFNLLMTLRLWSS

SEQ ID NO: 18164 - protein, 759 aa, Artificial Sequence
  Synthetic Polypeptide
MALPVTALLLPLALLLHAARPEVQVLESGGGLVQPGGSLRLSCAASGFTFSNFAMSWVRQAPGKGLEWVSTISGSAGTTDYADSVKGRFTISRDNSKKTLYLQMNSLRVEDTAVYYCADGRGPFFDYRGQGTLVTVSSGTGGGGSGGGGSGGGGSEFSYVLTQPPSVSVAPGQTARITCGGNNIGSKSVHWYQQPPGQAPVVVVYDDSDRPSGIPERFSGSNSGNTATLTISRVEAGDEAVYYCQVWDSSSDHVVFGGGTKLTVLLEDLKNVFPPEVAVFEPSEAEISHTQKATLVCLATGFYPDHVELSWWVNGKEVHSGVCTDPQPLKEQPALNDSRYCLSSRLRVSATFWQNPRNHFRCQVQFYGLSENDEWTQDRAKPVTQIVSAEAWGRADCGFTSESYQQGVLSATILYEILLGKATLYAVLVSALVLMAMVKRKDSRGRAKRSGSGATNFSLLKQAGDVEENPGPTSMDWIWRILFLVGAATGAHSFEQLQLQESGPGLVKPSETLSLTCTVSGGSISSSSYFWGWIRQPPGKGLEWIGSIYYSGITYYNPSLKSRVTISVDTSKNQFSLKLSSVTAADTAVYYCARHDGAVAGLFDYWGQGTLVTVSSATRIQNPDPAVYQLRDSKSSDKSVCLFTDFDSQTNVSQSKDSDVYITDKCVLDMRSMDFKSNSAVAWSNKSDFACANAFNNSIIPEDTFFPSPESSCDVKLVEKSFETDTNLNFQNLSVIGFRILLLKVAGFNLLMTLRLWSS

SEQ ID NO: 18165 - protein, 760 aa, Artificial Sequence
  Synthetic Polypeptide
MALPVTALLLPLALLLHAARPSYVLTQPPSVSVAPGQTARITCGGNNIGSKSVHWYQQPPGQAPVVVVYDDSDRPSGIPERFSGSNSGNTATLTISRVEAGDEAVYYCQVWDSSSDHVVFGGGTKLTVLLEDLKNVFPPEVAVFEPSEAEISHTQKATLVCLATGFYPDHVELSWWVNGKEVHSGVCTDPQPLKEQPALNDSRYCLSSRLRVSATFWQNPRNHFRCQVQFYGLSENDEWTQDRAKPVTQIVSAEAWGRADCGFTSESYQQGVLSATILYEILLGKATLYAVLVSALVLMAMVKRKDSRGRAKRSGSGATNFSLLKQAGDVEENPGPTSMDWIWRILFLVGAATGAHSGPEVQLVESGGGLVQAGGSLRLSCAASGRTFSMGWFRQAPGKEREFVAAITYSGGSPYYADSVKGRFTISRDNAKNTVYLQMNSLKPEDTAVYYCAANPTYGSDWNAENWGQGTQVTVSSGSGGGGSGGGGSGGGGSFEQLQLQESGPGLVKPSETLSLTCTVSGGSISSSSYFWGWIRQPPGKGLEWIGSIYYSGITYYNPSLKSRVTISVDTSKNQFSLKLSSVTAADTAVYYCARHDGAVAGLFDYWGQGTLVTVSSATRIQNPDPAVYQLRDSKSSDKSVCLFTDFDSQTNVSQSKDSDVYITDKCVLDMRSMDFKSNSAVAWSNKSDFACANAFNNSIIPEDTFFPSPESSCDVKLVEKSFETDTNLNFQNLSVIGFRILLLKVAGFNLLMTLRLWSS

SEQ ID NO: 18166 - protein, 887 aa, Artificial Sequence
  Synthetic Polypeptide
MALPVTALLLPLALLLHAARPSYVLTQPPSVSVAPGQTARITCGGNNIGSKSVHWYQQPPGQAPVVVVYDDSDRPSGIPERFSGSNSGNTATLTISRVEAGDEAVYYCQVWDSSSDHVVFGGGTKLTVLLEDLKNVFPPEVAVFEPSEAEISHTQKATLVCLATGFYPDHVELSWWVNGKEVHSGVCTDPQPLKEQPALNDSRYCLSSRLRVSATFWQNPRNHFRCQVQFYGLSENDEWTQDRAKPVTQIVSAEAWGRADCGFTSESYQQGVLSATILYEILLGKATLYAVLVSALVLMAMVKRKDSRGRAKRSGSGATNFSLLKQAGDVEENPGPTSMDWIWRILFLVGAATGAHSQLQLQESGPGLVKPSETLSLTCTVSGGSISSGDYYWGWIRQPPGKGLEWIGSISYSGSTYYNPSLKSRVTISVDTSRNQFSLKLSSVTAADTAVYYCTREDSSNWRSRGQGTLVTVSSSGGGGSGGGGSEVQLVESGGGLVQAGGSLRLSCAASGRTFSMGWFRQAPGKEREFVAAITYSGGSPYYADSVKGRFTISRDNAKNTVYLQMNSLKPEDTAVYYCAANPTYGSDWNAENWGQGTQVTVSSGSGGGGSGGGGSGGGGSFEQLQLQESGPGLVKPSETLSLTCTVSGGSISSSSYFWGWIRQPPGKGLEWIGSIYYSGITYYNPSLKSRVTISVDTSKNQFSLKLSSVTAADTAVYYCARHDGAVAGLFDYWGQGTLVTVSSATRIQNPDPAVYQLRDSKSSDKSVCLFTDFDSQTNVSQSKDSDVYITDKCVLDMRSMDFKSNSAVAWSNKSDFACANAFNNSIIPEDTFFPSPESSCDVKLVEKSFETDTNLNFQNLSVIGFRILLLKVAGFNLLMTLRLWSS

SEQ ID NO: 18167 - protein, 896 aa, Artificial Sequence
  Synthetic Polypeptide
MALPVTALLLPLALLLHAARPEVQVLESGGGLVQPGGSLRLSCAASGFTFSNFAMSWVRQAPGKGLEWVSTISGSAGTTDYADSVKGRFTISRDNSKKTLYLQMNSLRVEDTAVYYCADGRGPFFDYRGQGTLVTVSSGTGGGGSGGGGSGGGGSEFSYVLTQPPSVSVAPGQTARITCGGNNIGSKSVHWYQQPPGQAPVVVVYDDSDRPSGIPERFSGSNSGNTATLTISRVEAGDEAVYYCQVWDSSSDHVVFGGGTKLTVLLEDLKNVFPPEVAVFEPSEAEISHTQKATLVCLATGFYPDHVELSWWVNGKEVHSGVCTDPQPLKEQPALNDSRYCLSSRLRVSATFWQNPRNHFRCQVQFYGLSENDEWTQDRAKPVTQIVSAEAWGRADCGFTSESYQQGVLSATILYEILLGKATLYAVLVSALVLMAMVKRKDSRGRAKRSGSGATNFSLLKQAGDVEENPGPTSMDWIWRILFLVGAATGAHSGPEVQLVESGGGLVQAGGSLRLSCAASGRTFSMGWFRQAPGKEREFVAAITYSGGSPYYASSVRGRFTISRDNAKNTVYLQMNSLKPEDTAVYYCAANPTYGSDWNAENWGQGTQVTVSSGSGGGGSGGGGSGGGGSFEQLQLQESGPGLVKPSETLSLTCTVSGGSISSSSYFWGWIRQPPGKGLEWIGSIYYSGITYYNPSLKSRVTISVDTSKNQFSLKLSSVTAADTAVYYCARHDGAVAGLFDYWGQGTLVTVSSATRIQNPDPAVYQLRDSKSSDKSVCLFTDFDSQTNVSQSKDSDVYITDKCVLDMRSMDFKSNSAVAWSNKSDFACANAFNNSIIPEDTFFPSPESSCDVKLVEKSFETDTNLNFQNLSVIGFRILLLKVAGFNLLMTLRLWSS

SEQ ID NO: 18168 - protein, 727 aa, Artificial Sequence
  Synthetic Polypeptide
MALPVTALLLPLALLLHAARPSYVLTQPPSVSVAPGQTARITCGGNNIGSKSVHWYQQPPGQAPVVVVYDDSDRPSGIPERFSGSNSGNTATLTISRVEAGDEAVYYCQVWDSSSDHVVFGGGTKLTVLGGGGSGGGGSGGGGSQLQLQESGPGLVKPSETLSLTCTVSGGSISSGSYIWGWIRQPPGKGLEWIGSIYYSGITYYNPSLKSRVTISVDTSKNQFSLKLSSVTAADTAVYYCARHDGAVAGLFDYWGQGTLVTVSSATREQKLISEEDLAKPTTTPAPRPPTPAPTIASQPLSLRPEACRPAAGGAVHTRGLDFACDIYIWAPLAGTCGVLLLSLVITLYCKRGRKKLLYIFKQPFMRPVQTTQEEDGCSCRFPEEEEGGCELRVKFSRSADAPAYQQGQNQLYNELNLGRREEYDVLDKRRGRDPEMGGKPRRKNPQEGLYNELQKDKMAEAYSEIGMKGERRRGKGHDGLYQGLSTATKDTYDALHMQALPPRSSGSGEGRGSLLTCGDVEENPGPHMTEYKPTVRLATRDDVPRAVRTLAAAFADYPATRHTVDPDRHIERVTELQELFLTRVGLDIGKVWVADDGAAVAVWTTPESVEAGAVFAEIGPRMAELSGSRLAAQQQMEGLLAPHRPKEPAWFLATVGVSPDHQGKGLGSAVVLPGVEAAERAGVPAFLETSAPRNLPFYERLGFTVTADVEVPEGPRTWCMTRKPGA

SEQ ID NO: 18169 - protein, 721 aa, Artificial Sequence
  Synthetic Polypeptide
MALPVTALLLPLALLLHAARPSYVLTQPPSVSVAPGQTARITCGGNNIGSKSVHWYQQPPGQAPVVVVYDDSDRPSGIPERFSGSNSGNTATLTISRVEAGDEAVYYCQVWDSSSDHVVFGGGTKLTVLGGGGSGGGGSGGGGSQLQLQESGPGLVKPSETLSLTCTVSGGSISSGSYIWGWIRQPPGKGLEWIGSIYYSGITYYNPSLKSRVTISVDTSKNQFSLKLSSVTAADTAVYYCARHDGAVAGLFDYWGQGTLVTVSSATREQKLISEEDLKIEVMYPPPYLDNEKSNGTIIHVKGKHLCPSPLFPGPSKPFWVLVVVGGVLACYSLLVTVAFIIFWVRSKRSRLLHSDYMNMTPRRPGPTRKHYQPYAPPRDFAAYRSRVKFSRSADAPAYQQGQNQLYNELNLGRREEYDVLDKRRGRDPEMGGKPRRKNPQEGLYNELQKDKMAEAYSEIGMKGERRRGKGHDGLYQGLSTATKDTYDALHMQALPPRSSGSGEGRGSLLTCGDVEENPGPHMTEYKPTVRLATRDDVPRAVRTLAAAFADYPATRHTVDPDRHIERVTELQELFLTRVGLDIGKVWVADDGAAVAVWTTPESVEAGAVFAEIGPRMAELSGSRLAAQQQMEGLLAPHRPKEPAWFLATVGVSPDHQGKGLGSAVVLPGVEAAERAGVPAFLETSAPRNLPFYERLGFTVTADVEVPEGPRTWCMTRKPGA

SEQ ID NO: 18170 - protein, 498 aa, Artificial Sequence
  Synthetic Polypeptide
MALPVTALLLPLALLLHAARPSYVLTQPPSVSVAPGQTARITCGGNNIGSKSVHWYQQPPGQAPVVVVYDDSDRPSGIPERFSGSNSGNTATLTISRVEAGDEAVYYCQVWDSSSDHVVFGGGTKLTVLGGGGSGGGGSGGGGSQLQLQESGPGLVKPSETLSLTCTVSGGSISSGSYIWGWIRQPPGKGLEWIGSIYYSGITYYNPSLKSRVTISVDTSKNQFSLKLSSVTAADTAVYYCARHDGAVAGLFDYWGQGTLVTVSSATREQKLISEEDLKIEVMYPPPYLDNEKSNGTIIHVKGKHLCPSPLFPGPSKPFWVLVVVGGVLACYSLLVTVAFIIFWVRSKRSRLLHSDYMNMTPRRPGPTRKHYQPYAPPRDFAAYRSRVKFSRSADAPAYQQGQNQLYNELNLGRREEYDVLDKRRGRDPEMGGKPRRKNPQEGLYNELQKDKMAEAYSEIGMKGERRRGKGHDGLYQGLSTATKDTYDALHMQALPPR

SEQ ID NO: 18171 - protein, 504 aa, Artificial Sequence
  Synthetic Polypeptide
MALPVTALLLPLALLLHAARPSYVLTQPPSVSVAPGQTARITCGGNNIGSKSVHWYQQPPGQAPVVVVYDDSDRPSGIPERFSGSNSGNTATLTISRVEAGDEAVYYCQVWDSSSDHVVFGGGTKLTVLGGGGSGGGGSGGGGSQLQLQESGPGLVKPSETLSLTCTVSGGSISSGSYIWGWIRQPPGKGLEWIGSIYYSGITYYNPSLKSRVTISVDTSKNQFSLKLSSVTAADTAVYYCARHDGAVAGLFDYWGQGTLVTVSSATREQKLISEEDLAKPTTTPAPRPPTPAPTIASQPLSLRPEACRPAAGGAVHTRGLDFACDIYIWAPLAGTCGVLLLSLVITLYCKRGRKKLLYIFKQPFMRPVQTTQEEDGCSCRFPEEEEGGCELRVKFSRSADAPAYQQGQNQLYNELNLGRREEYDVLDKRRGRDPEMGGKPRRKNPQEGLYNELQKDKMAEAYSEIGMKGERRRGKGHDGLYQGLSTATKDTYDALHMQALPPR

SEQ ID NO: 18172 - protein, 504 aa, Artificial Sequence
  Synthetic Polypeptide
MALPVTALLLPLALLLHAARPQLQLQESGPGLVKPSETLSLTCTVSGGSISSGSYIWGWIRQPPGKGLEWIGSIYYSGITYYNPSLKSRVTISVDTSKNQFSLKLSSVTAADTAVYYCARHDGAVAGLFDYWGQGTLVTVSSAGGGGSGGGGSGGGGSSYVLTQPPSVSVAPGQTARITCGGNNIGSKSVHWYQQPPGQAPVVVVYDDSDRPSGIPERFSGSNSGNTATLTISRVEAGDEAVYYCQVWDSSSDHVVFGGGTKLTVLTREQKLISEEDLAKPTTTPAPRPPTPAPTIASQPLSLRPEACRPAAGGAVHTRGLDFACDIYIWAPLAGTCGVLLLSLVITLYCKRGRKKLLYIFKQPFMRPVQTTQEEDGCSCRFPEEEEGGCELRVKFSRSADAPAYQQGQNQLYNELNLGRREEYDVLDKRRGRDPEMGGKPRRKNPQEGLYNELQKDKMAEAYSEIGMKGERRRGKGHDGLYQGLSTATKDTYDALHMQALPPR

SEQ ID NO: 18173 - protein, 917 aa, Artificial Sequence
  Synthetic Polypeptide
MALPVTALLLPLALLLHAARPSYVLTQPPSVSVAPGQTARITCGGNNIGSKSVHWYQQPPGQAPVVVVYDDSDRPSGIPERFSGSNSGNTATLTISRVEAGDEAVYYCQVWDSSSDHVVFGGGTKLTVLGGGGSGGGGSGGGGSQLQLQESGPGLVKPSETLSLTCTVSGGSISSGSYIWGWIRQPPGKGLEWIGSIYYSGITYYNPSLKSRVTISVDTSKNQFSLKLSSVTAADTAVYYCARHDGAVAGLFDYWGQGTLVTVSSATREQKLISEEDLAKPTTTPAPRPPTPAPTIASQPLSLRPEACRPAAGGAVHTRGLDFACDIYIWAPLAGTCGVLLLSLVITLYCGRARVKFSRSADAPAYQQGQNQLYNELNLGRREEYDVLDKRRGRDPEMGGKPRRKNPQEGLYNELQKDKMAEAYSEIGMKGERRRGKGHDGLYQGLSTATKDTYDALHMQALPPRSRGSGATNFSLLKQAGDVEENPGPGIHMATYEVLCEVARKLGTDDREVVLFLLNVFIPQPTLAQLIGALRALKEEGRLTFPLLAECLFRAGRRDLLRDLLHLDPRFLERHLAGTMSYFSPYQLTVLHVDGELCARDIRSLIFLSKDTIGSRSTPQTFLHWVYCMENLDLLGPTDVDALMSMLRSLSRVDLQRQVQTLMGLHLSGPSHSQHYRHTPLETDFYDYKDDDDKTSGSGEGRGSLLTCGDVEENPGPHMTEYKPTVRLATRDDVPRAVRTLAAAFADYPATRHTVDPDRHIERVTELQELFLTRVGLDIGKVWVADDGAAVAVWTTPESVEAGAVFAEIGPRMAELSGSRLAAQQQMEGLLAPHRPKEPAWFLATVGVSPDHQGKGLGSAVVLPGVEAAERAGVPAFLETSAPRNLPFYERLGFTVTADVEVPEGPRTWCMTRKPGA

SEQ ID NO: 18174 - protein, 857 aa, Artificial Sequence
  Synthetic Polypeptide
MALPVTALLLPLALLLHAARPSYVLTQPPSVSVAPGQTARITCGGNNIGSKSVHWYQQPPGQAPVVVVYDDSDRPSGIPERFSGSNSGNTATLTISRVEAGDEAVYYCQVWDSSSDHVVFGGGTKLTVLLEIQNPDPAVYQLRDSKSSDKSVCLFTDFDSQTNVSQSKDSDVYITDKCVLDMRSMDFKSNSAVAWSNKSDFACANAFNNSIIPEDTFFPSSDVPCDVKLVEKSFETDTNLNFQNLSVIGFRILLLKVAGFNLLMTLRLWSSRAKRSGSGVKQTLNFDLLKLAGDVESNPGPTSMDWIWRILFLVGAATGAHSFEQLQLQESGPGLVKPSETLSLTCTVSGGSISSGSYIWGWIRQPPGKGLEWIGSIYYSGITYYNPSLKSRVTISVDTSKNQFSLKLSSVTAADTAVYYCARHDGAVAGLFDYWGQGTLVTVSSATREDLKNVFPPEVAVFEPSKAEIAHTQKATLVCLATGFYPDHVELSWWVNGKEVHSGVCTDPQPLKEQPALNDSRYCLSSRLRVSATFWQNPRNHFRCQVQFYGLSENDEWTQDRAKPVTQIVSAEAWGRADCGITSASYHQGVLSATILYEILLGKATLYAVLVSALVLMAMVKRKDSRGRAKRSGSGATNFSLLKQAGDVEENPGPSRGHMTEYKPTVRLATRDDVPRAVRTLAAAFADYPATRHTVDPDRHIERVTELQELFLTRVGLDIGKVWVADDGAAVAVWTTPESVEAGAVFAEIGPRMAELSGSRLAAQQQMEGLLAPHRPKEPAWFLATVGVSPDHQGKGLGSAVVLPGVEAAERAGVPAFLETSAPRNLPFYERLGFTVTADVEVPEGPRTWCMTRKPGA

SEQ ID NO: 18175 - protein, 856 aa, Artificial Sequence
  Synthetic Polypeptide
MALPVTALLLPLALLLHAARPSYVLTQPPSVSVAPGQTARITCGGNNIGSKSVHWYQQPPGQAPVVVVYDDSDRPSGIPERFSGSNSGNTATLTISRVEAGDEAVYYCQVWDSSSDHVVFGGGTKLTVLLEDLKNVFPPEVAVFEPSKAEIAHTQKATLVCLATGFYPDHVELSWWVNGKEVHSGVCTDPQPLKEQPALNDSRYCLSSRLRVSATFWQNPRNHFRCQVQFYGLSENDEWTQDRAKPVTQIVSAEAWGRADCGITSASYHQGVLSATILYEILLGKATLYAVLVSALVLMAMVKRKDSRGRAKRSGSGATNFSLLKQAGDVEENPGPTSMDWIWRILFLVGAATGAHSFEQLQLQESGPGLVKPSETLSLTCTVSGGSISSGSYIWGWIRQPPGKGLEWIGSIYYSGITYYNPSLKSRVTISVDTSKNQFSLKLSSVTAADTAVYYCARHDGAVAGLFDYWGQGTLVTVSSATRIQNPDPAVYQLRDSKSSDKSVCLFTDFDSQTNVSQSKDSDVYITDKCVLDMRSMDFKSNSAVAWSNKSDFACANAFNNSIIPEDTFFPSSDVPCDVKLVEKSFETDTNLNFQNLSVIGFRILLLKVAGFNLLMTLRLWSSRAKRSGSGVKQTLNFDLLKLAGDVESNPGPSRGHMTEYKPTVRLATRDDVPRAVRTLAAAFADYPATRHTVDPDRHIERVTELQELFLTRVGLDIGKVWVADDGAAVAVWTTPESVEAGAVFAEIGPRMAELSGSRLAAQQQMEGLLAPHRPKEPAWFLATVGVSPDHQGKGLGSAVVLPGVEAAERAGVPAFLETSAPRNLPFYERLGFTVTADVEVPEGPRTWCMTRKPGA

SEQ ID NO: 18176 - protein, 623 aa, Artificial Sequence
  Synthetic Polypeptide
MALPVTALLLPLALLLHAARPSYVLTQPPSVSVAPGQTARITCGGNNIGSKSVHWYQQPPGQAPVVVVYDDSDRPSGIPERFSGSNSGNTATLTISRVEAGDEAVYYCQVWDSSSDHVVFGGGTKLTVLLEDLKNVFPPEVAVFEPSEAEISHTQKATLVCLATGFYPDHVELSWWVNGKEVHSGVCTDPQPLKEQPALNDSRYCLSSRLRVSATFWQNPRNHFRCQVQFYGLSENDEWTQDRAKPVTQIVSAEAWGRADCGFTSESYQQGVLSATILYEILLGKATLYAVLVSALVLMAMVKRKDSRGRAKRSGSGATNFSLLKQAGDVEENPGPTSMDWIWRILFLVGAATGAHSFEQLQLQESGPGLVKPSETLSLTCTVSGGSISSGSYIWGWIRQPPGKGLEWIGSIYYSGITYYNPSLKSRVTISVDTSKNQFSLKLSSVTAADTAVYYCARHDGAVAGLFDYWGQGTLVTVSSATRIQNPDPAVYQLRDSKSSDKSVCLFTDFDSQTNVSQSKDSDVYITDKCVLDMRSMDFKSNSAVAWSNKSDFACANAFNNSIIPEDTFFPSPESSCDVKLVEKSFETDTNLNFQNLSVIGFRILLLKVAGFNLLMTLRLWSS

SEQ ID NO: 18177 - protein, 848 aa, Artificial Sequence
  Synthetic Polypeptide
MALPVTALLLPLALLLHAARPSYVLTQPPSVSVAPGQTARITCGGNNIGSKSVHWYQQPPGQAPVVVVYDDSDRPSGIPERFSGSNSGNTATLTISRVEAGDEAVYYCQVWDSSSDHVVFGGGTKLTVLLEDLKNVFPPEVAVFEPSEAEISHTQKATLVCLATGFYPDHVELSWWVNGKEVHSGVCTDPQPLKEQPALNDSRYCLSSRLRVSATFWQNPRNHFRCQVQFYGLSENDEWTQDRAKPVTQIVSAEAWGRADCGFTSESYQQGVLSATILYEILLGKATLYAVLVSALVLMAMVKRKDSRGRAKRSGSGATNFSLLKQAGDVEENPGPTSMDWIWRILFLVGAATGAHSFEQLQLQESGPGLVKPSETLSLTCTVSGGSISSGSYIWGWIRQPPGKGLEWIGSIYYSGITYYNPSLKSRVTISVDTSKNQFSLKLSSVTAADTAVYYCARHDGAVAGLFDYWGQGTLVTVSSATRIQNPDPAVYQLRDSKSSDKSVCLFTDFDSQTNVSQSKDSDVYITDKCVLDMRSMDFKSNSAVAWSNKSDFACANAFNNSIIPEDTFFPSPESSCDVKLVEKSFETDTNLNFQNLSVIGFRILLLKVAGFNLLMTLRLWSSRAKRSGSGVKQTLNFDLLKLAGDVESNPGPSRGGIHTMATYEVLCEVARKLGTDDREVVLFLLNVFIPQPTLAQLIGALRALKEEGRLTFPLLAECLFRAGRRDLLRDLLHLDPRFLERHLAGTMSYFSPYQLTVLHVDGELCARDIRSLIFLSKDTIGSRSTPQTFLHWVYCMENLDLLGPTDVDALMSMLRSLSRVDLQRQVQTLMGLHLSGPSHSQHYRHTP

SEQ ID NO: 18178 - protein, 627 aa, Artificial Sequence
  Synthetic Polypeptide
MALPVTALLLPLALLLHAARPSYVLTQPPSVSVAPGQTARITCGGNNIGSKSVHWYQQPPGQAPVVVVYDDSDRPSGIPERFSGSNSGNTATLTISRVEAGDEAVYYCQVWDSSSDHVVFGGGTKLTVLLEIQNPDPAVYQLRDSKSSDKSVCLFTDFDSQTNVSQSKDSDVYITDKCVLDMRSMDFKSNSAVAWSNKSDFACANAFNNSIIPEDTFFPSPESSCDVKLVEKSFETDTNLNFQNLSVIGFRILLLKVAGFNLLMTLRLWSSRAKRSGSGVKQTLNFDLLKLAGDVESNPGPTSMDWIWRILFLVGAATGAHSFEQLQLQESGPGLVKPSETLSLTCTVSGGSISSGSYIWGWIRQPPGKGLEWIGSIYYSGITYYNPSLKSRVTISVDTSKNQFSLKLSSVTAADTAVYYCARHDGAVAGLFDYWGQGTLVTVSSATREDLKNVFPPEVAVFEPSEAEISHTQKATLVCLATGFYPDHVELSWWVNGKEVHSGVCTDPQPLKEQPALNDSRYCLSSRLRVSATFWQNPRNHFRCQVQFYGLSENDEWTQDRAKPVTQIVSAEAWGRADCGFTSESYQQGVLSATILYEILLGKATLYAVLVSALVLMAMVKRKDSRG

SEQ ID NO: 18179 - protein, 849 aa, Artificial Sequence
  Synthetic Polypeptide
MALPVTALLLPLALLLHAARPSYVLTQPPSVSVAPGQTARITCGGNNIGSKSVHWYQQPPGQAPVVVVYDDSDRPSGIPERFSGSNSGNTATLTISRVEAGDEAVYYCQVWDSSSDHVVFGGGTKLTVLLEIQNPDPAVYQLRDSKSSDKSVCLFTDFDSQTNVSQSKDSDVYITDKCVLDMRSMDFKSNSAVAWSNKSDFACANAFNNSIIPEDTFFPSPESSCDVKLVEKSFETDTNLNFQNLSVIGFRILLLKVAGFNLLMTLRLWSSRAKRSGSGVKQTLNFDLLKLAGDVESNPGPTSMDWIWRILFLVGAATGAHSFEQLQLQESGPGLVKPSETLSLTCTVSGGSISSGSYIWGWIRQPPGKGLEWIGSIYYSGITYYNPSLKSRVTISVDTSKNQFSLKLSSVTAADTAVYYCARHDGAVAGLFDYWGQGTLVTVSSATREDLKNVFPPEVAVFEPSEAEISHTQKATLVCLATGFYPDHVELSWWVNGKEVHSGVCTDPQPLKEQPALNDSRYCLSSRLRVSATFWQNPRNHFRCQVQFYGLSENDEWTQDRAKPVTQIVSAEAWGRADCGFTSESYQQGVLSATILYEILLGKATLYAVLVSALVLMAMVKRKDSRGRAKRSGSGATNFSLLKQAGDVEENPGPSRGGIHTMATYEVLCEVARKLGTDDREVVLFLLNVFIPQPTLAQLIGALRALKEEGRLTFPLLAECLFRAGRRDLLRDLLHLDPRFLERHLAGTMSYFSPYQLTVLHVDGELCARDIRSLIFLSKDTIGSRSTPQTFLHWVYCMENLDLLGPTDVDALMSMLRSLSRVDLQRQVQTLMGLHLSGPSHSQHYRHTP

SEQ ID NO: 18180 - protein, 901 aa, Artificial Sequence
  Synthetic Polypeptide
MALPVTALLLPLALLLHAARPLEGKPIPNPLLGLDSTGSGEDLKNVFPPEVAVFEPSKAEIAHTQKATLVCLATGFYPDHVELSWWVNGKEVHSGVCTDPQPLKEQPALNDSRYCLSSRLRVSATFWQNPRNHFRCQVQFYGLSENDEWTQDRAKPVTQIVSAEAWGRADCGITSASYHQGVLSATILYEILLGKATLYAVLVSALVLMAMVKRKDSRGRAKRSGSGATNFSLLKQAGDVEENPGPTSMALPVTALLLPLALLLHAARPSYVLTQPPSVSVAPGQTARITCGGNNIGSKSVHWYQQPPGQAPVVVVYDDSDRPSGIPERFSGSNSGNTATLTISRVEAGDEAVYYCQVWDSSSDHVVFGGGTKLTVLGGGGSGGGGSGGGGSQLQLQESGPGLVKPSETLSLTCTVSGGSISSGSYIWGWIRQPPGKGLEWIGSIYYSGITYYNPSLKSRVTISVDTSKNQFSLKLSSVTAADTAVYYCARHDGAVAGLFDYWGQGTLVTVSSATREQKLISEEDGSGIQNPDPAVYQLRDSKSSDKSVCLFTDFDSQTNVSQSKDSDVYITDKCVLDMRSMDFKSNSAVAWSNKSDFACANAFNNSIIPEDTFFPSSDVPCDVKLVEKSFETDTNLNFQNLSVIGFRILLLKVAGFNLLMTLRLWSSRAKRSGSGVKQTLNFDLLKLAGDVESNPGPSRGHMTEYKPTVRLATRDDVPRAVRTLAAAFADYPATRHTVDPDRHIERVTELQELFLTRVGLDIGKVWVADDGAAVAVWTTPESVEAGAVFAEIGPRMAELSGSRLAAQQQMEGLLAPHRPKEPAWFLATVGVSPDHQGKGLGSAVVLPGVEAAERAGVPAFLETSAPRNLPFYERLGFTVTADVEVPEGPRTWCMTRKPGA

SEQ ID NO: 18181 - protein, 902 aa, Artificial Sequence
  Synthetic Polypeptide
MALPVTALLLPLALLLHAARPLEQKLISEEDLGSGDRPDPAVYQLRDSKSSDKSVCLFTDFDSQTNVSQSKDSDVYITDKCVLDMRSMDFKSNSAVAWSNKSDFACANAFNNSIIPEDTFFPSPESSCDVKLVEKSFETDTNLNFQNLSVIGFRILLLKVAGFNLLMTLRLWSSSSRAKRSGSGVKQTLNFDLLKLAGDVESNPGPTSMALPVTALLLPLALLLHAARPSYVLTQPPSVSVAPGQTARITCGGNNIGSKSVHWYQQPPGQAPVVVVYDDSDRPSGIPERFSGSNSGNTATLTISRVEAGDEAVYYCQVWDSSSDHVVFGGGTKLTVLGGGGSGGGGSGGGGSQLQLQESGPGLVKPSETLSLTCTVSGGSISSGSYIWGWIRQPPGKGLEWIGSIYYSGITYYNPSLKSRVTISVDTSKNQFSLKLSSVTAADTAVYYCARHDGAVAGLFDYWGQGTLVTVSSATRGKPIPNPLLGLDSTGSGEDLKNVFPPEVAVFEPSEAEISHTQKATLVCLATGFYPDHVELSWWVNGKEVHSGVCTDPQPLKEQPALNDSRYCLSSRLRVSATFWQNPRNHFRCQVQFYGLSENDEWTQDRAKPVTQIVSAEAWGRADCGFTSESYQQGVLSATILYEILLGKATLYAVLVSALVLMAMVKRKDSRGRAKRSGSGATNFSLLKQAGDVEENPGPSRGHMTEYKPTVRLATRDDVPRAVRTLAAAFADYPATRHTVDPDRHIERVTELQELFLTRVGLDIGKVWVADDGAAVAVWTTPESVEAGAVFAEIGPRMAELSGSRLAAQQQMEGLLAPHRPKEPAWFLATVGVSPDHQGKGLGSAVVLPGVEAAERAGVPAFLETSAPRNLPFYERLGFTVTADVEVPEGPRTWCMTRKPGA

SEQ ID NO: 18182 - protein, 856 aa, Artificial Sequence
  Synthetic Polypeptide
MALPVTALLLPLALLLHAARPSYVLTQPPSVSVAPGQTARITCGGNNIGSKSVHWYQQPPGQAPVVVVYDDSDRPSGIPERFSGSNSGNTATLTISRVEAGDEAVYYCQVWDSSSDHVVFGGGTKLTVLLEDLKNVFPPEVAVFEPSEAEISHTQKATLVCLATGFYPDHVELSWWVNGKEVHSGVSTDPQPLKEQPALNDSRYCLSSRLRVSATFWQNPRNHFRCQVQFYGLSENDEWTQDRAKPVTQIVSAEAWGRADCGFTSESYQQGVLSATILYEILLGKATLYAVLVSALVLMAMVKRKDSRGRAKRSGSGATNFSLLKQAGDVEENPGPTSMDWIWRILFLVGAATGAHSFEQLQLQESGPGLVKPSETLSLTCTVSGGSISSGSYIWGWIRQPPGKGLEWIGSIYYSGITYYNPSLKSRVTISVDTSKNQFSLKLSSVTAADTAVYYCARHDGAVAGLFDYWGQGTLVTVSSATRIQNPDPAVYQLRDSKSSDKSVCLFTDFDSQTNVSQSKDSDVYITDKTVLDMRSMDFKSNSAVAWSNKSDFACANAFNNSIIPEDTFFPSPESSCDVKLVEKSFETDTNLNFQNLSVIGFRILLLKVAGFNLLMTLRLWSSRAKRSGSGVKQTLNFDLLKLAGDVESNPGPSRGHMTEYKPTVRLATRDDVPRAVRTLAAAFADYPATRHTVDPDRHIERVTELQELFLTRVGLDIGKVWVADDGAAVAVWTTPESVEAGAVFAEIGPRMAELSGSRLAAQQQMEGLLAPHRPKEPAWFLATVGVSPDHQGKGLGSAVVLPGVEAAERAGVPAFLETSAPRNLPFYERLGFTVTADVEVPEGPRTWCMTRKPGA

SEQ ID NO: 18183 - protein, 938 aa, Artificial Sequence
  Synthetic Polypeptide
MALPVTALLLPLALLLHAARPSYVLTQPPSVSVAPGQTARITCGGNNIGSKSVHWYQQPPGQAPVVVVYDDSDRPSGIPERFSGSNSGNTATLTISRVEAGDEAVYYCQVWDSSSDHVVFGGGTKLTVLLEDLKNVFPPEVAVFEPSEAEISHTQKATLVCLATGFYPDHVELSWWVNGKEVHSGVSTDPQPLKEQPALNDSRYCLSSRLRVSATFWQNPRNHFRCQVQFYGLSENDEWTQDRAKPVTQIVSAEAWGRADCGFTSESYQQGVLSATILYEILLGKATLYAVLVSALVLMAMVKRKDSRGRAKRSGSGATNFSLLKQAGDVEENPGPTSMDWIWRILFLVGAATGAHSFEQLQLQESGPGLVKPSETLSLTCTVSGGSISSGSYIWGWIRQPPGKGLEWIGSIYYSGITYYNPSLKSRVTISVDTSKNQFSLKLSSVTAADTAVYYCARHDGAVAGLFDYWGQGTLVTVSSATREQKLISEEDGSGTPFPSLAPPIMLLVDGKQQMVVVCLVLDVAPPGLDSPIWFSAGNGSALDAFTYGPSPATDGTWTNLAHLSLPSEELASWEPLVCHTGPGAEGHSRSTQPMHLSGEASTARTCPQEPLRGTPGGALWLGVLRLLLFKLLLFDLLLTCSCLCDPAGPLPSPATTTRLRALGSHRLHPATETGGREATSSPRPQPRDRRWGDTPPGRKPGSPVRAKRSGSGVKQTLNFDLLKLAGDVESNPGPSRGHMTEYKPTVRLATRDDVPRAVRTLAAAFADYPATRHTVDPDRHIERVTELQELFLTRVGLDIGKVWVADDGAAVAVWTTPESVEAGAVFAEIGPRMAELSGSRLAAQQQMEGLLAPHRPKEPAWFLATVGVSPDHQGKGLGSAVVLPGVEAAERAGVPAFLETSAPRNLPFYERLGFTVTADVEVPEGPRTWCMTRKPGA

SEQ ID NO: 18184 - protein, 956 aa, Artificial Sequence
  Synthetic Polypeptide
MALPVTALLLPLALLLHAARPLEDLKNVFPPEVAVFEPSEAEISHTQKATLVCLATGFYPDHVELSWWVNGKEVHSGVSTDPQPLKEQPALNDSRYCLSSRLRVSATFWQNPRNHFRCQVQFYGLSENDEWTQDRAKPVTQIVSAEAWGRADCGFTSESYQQGVLSATILYEILLGKATLYAVLVSALVLMAMVKRKDSRGRAKRSGSGATNFSLLKQAGDVEENPGPTSMALPVTALLLPLALLLHAARPSYVLTQPPSVSVAPGQTARITCGGNNIGSKSVHWYQQPPGQAPVVVVYDDSDRPSGIPERFSGSNSGNTATLTISRVEAGDEAVYYCQVWDSSSDHVVFGGGTKLTVLGGGGSGGGGSGGGGSQLQLQESGPGLVKPSETLSLTCTVSGGSISSGSYIWGWIRQPPGKGLEWIGSIYYSGITYYNPSLKSRVTISVDTSKNQFSLKLSSVTAADTAVYYCARHDGAVAGLFDYWGQGTLVTVSSATREQKLISEEDLGSGTPFPSLAPPIMLLVDGKQQMVVVCLVLDVAPPGLDSPIWFSAGNGSALDAFTYGPSPATDGTWTNLAHLSLPSEELASWEPLVCHTGPGAEGHSRSTQPMHLSGEASTARTCPQEPLRGTPGGALWLGVLRLLLFKLLLFDLLLTCSCLCDPAGPLPSPATTTRLRALGSHRLHPATETGGREATSSPRPQPRDRRWGDTPPGRKPGSPVRAKRSGSGVKQTLNFDLLKLAGDVESNPGPSRSRGHMTEYKPTVRLATRDDVPRAVRTLAAAFADYPATRHTVDPDRHIERVTELQELFLTRVGLDIGKVWVADDGAAVAVWTTPESVEAGAVFAEIGPRMAELSGSRLAAQQQMEGLLAPHRPKEPAWFLATVGVSPDHQGKGLGSAVVLPGVEAAERAGVPAFLETSAPRNLPFYERLGFTVTADVEVPEGPRTWCMTRKPGA

SEQ ID NO: 18185 - protein, 893 aa, Artificial Sequence
  Synthetic Polypeptide
MALPVTALLLPLALLLHAARPSYVLTQPPSVSVAPGQTARITCGGNNIGSKSVHWYQQPPGQAPVVVVYDDSDRPSGIPERFSGSNSGNTATLTISRVEAGDEAVYYCQVWDSSSDHVVFGGGTKLTVLLEGKPIPNPLLGLDSTGSGDKQLDADVSPKPTIFLPSIAETKLQKAGTYLCLLEKFFPDVIKIHWQEKKSNTILGSQEGNTMKTNDTYMKFSWLTVPEKSLDKEHRCIVRHENNKNGVDQEIIFPPIKTDVITMDPKDNCSKDANDTLLLQLTNTSAYYMYLLLLLKSVVYFAIITCCLLRRTAFCCNGEKSRAKRSGSGATNFSLLKQAGDVEENPGPTSMDWIWRILFLVGAATGAHSFEQLQLQESGPGLVKPSETLSLTCTVSGGSISSGSYIWGWIRQPPGKGLEWIGSIYYSGITYYNPSLKSRVTISVDTSKNQFSLKLSSVTAADTAVYYCARHDGAVAGLFDYWGQGTLVTVSSATREQKLISEEDGSGSQPHTKPSVFVMKNGTNVACLVKEFYPKDIRINLVSSKKITEFDPAIVISPSGKYNAVKLGKYEDSNSVTCSVQHDNKTVHSTDFEVKTDSTDHVKPKETENTKQPSKSCHKPKAIVHTEKVNMMSLTVLGLRMLFAKTVAVNFLLTAKLFFLRAKRSGSGVKQTLNFDLLKLAGDVESNPGPSRGHMTEYKPTVRLATRDDVPRAVRTLAAAFADYPATRHTVDPDRHIERVTELQELFLTRVGLDIGKVWVADDGAAVAVWTTPESVEAGAVFAEIGPRMAELSGSRLAAQQQMEGLLAPHRPKEPAWFLATVGVSPDHQGKGLGSAVVLPGVEAAERAGVPAFLETSAPRNLPFYERLGFTVTADVEVPEGPRTWCMTRKPGA

SEQ ID NO: 18186 - protein, 631 aa, Artificial Sequence
  Synthetic Polypeptide
MALPVTALLLPLALLLHAARPSYVLTQPPSVSVAPGQTARITCGGNNIGSKSVHWYQQPPGQAPVVVVYDDSDRPSGIPERFSGSNSGNTATLTISRVEAGDEAVYYCQVWDSSSDHVVFGGGTKLTVLLESQPHTKPSVFVMKNGTNVACLVKEFYPKDIRINLVSSKKITEFDPAIVISPSGKYNAVKLGKYEDSNSVTCSVQHDNKTVHSTDFEVKTDSTDHVKPKETENTKQPSKSCHKPKAIVHTEKVNMMSLTVLGLRMLFAKTVAVNFLLTAKLFFLRAKRSGSGATNFSLLKQAGDVEENPGPTSMDWIWRILFLVGAATGAHSFEQLQLQESGPGLVKPSETLSLTCTVSGGSISSGSYIWGWIRQPPGKGLEWIGSIYYSGITYYNPSLKSRVTISVDTSKNQFSLKLSSVTAADTAVYYCARHDGAVAGLFDYWGQGTLVTVSSATRDKQLDADVSPKPTIFLPSIAETKLQKAGTYLCLLEKFFPDVIKIHWQEKKSNTILGSQEGNTMKTNDTYMKFSWLTVPEKSLDKEHRCIVRHENNKNGVDQEIIFPPIKTDVITMDPKDNCSKDANDTLLLQLTNTSAYYMYLLLLLKSVVYFAIITCCLLRRTAFCCNGEKS

SEQ ID NO: 18187 - protein, 908 aa, Artificial Sequence
  Synthetic Polypeptide
MALPVTALLLPLALLLHAARPLEGKPIPNPLLGLDSTGSGDKQLDADVSPKPTIFLPSIAETKLQKAGTYLCLLEKFFPDVIKIHWQEKKSNTILGSQEGNTMKTNDTYMKFSWLTVPEKSLDKEHRCIVRHENNKNGVDQEIIFPPIKTDVITMDPKDNCSKDANDTLLLQLTNTSAYYMYLLLLLKSVVYFAIITCCLLRRTAFCCNGEKSRAKRSGSGATNFSLLKQAGDVEENPGPTSMALPVTALLLPLALLLHAARPSYVLTQPPSVSVAPGQTARITCGGNNIGSKSVHWYQQPPGQAPVVVVYDDSDRPSGIPERFSGSNSGNTATLTISRVEAGDEAVYYCQVWDSSSDHVVFGGGTKLTVLGGGGSGGGGSGGGGSQLQLQESGPGLVKPSETLSLTCTVSGGSISSGSYIWGWIRQPPGKGLEWIGSIYYSGITYYNPSLKSRVTISVDTSKNQFSLKLSSVTAADTAVYYCARHDGAVAGLFDYWGQGTLVTVSSATREQKLISEEDGSGSQPHTKPSVFVMKNGTNVACLVKEFYPKDIRINLVSSKKITEFDPAIVISPSGKYNAVKLGKYEDSNSVTCSVQHDNKTVHSTDFEVKTDSTDHVKPKETENTKQPSKSCHKPKAIVHTEKVNMMSLTVLGLRMLFAKTVAVNFLLTAKLFFLRAKRSGSGVKQTLNFDLLKLAGDVESNPGPSRGHMTEYKPTVRLATRDDVPRAVRTLAAAFADYPATRHTVDPDRHIERVTELQELFLTRVGLDIGKVWVADDGAAVAVWTTPESVEAGAVFAEIGPRMAELSGSRLAAQQQMEGLLAPHRPKEPAWFLATVGVSPDHQGKGLGSAVVLPGVEAAERAGVPAFLETSAPRNLPFYERLGFTVTADVEVPEGPRTWCMTRKPGA

SEQ ID NO: 18188 - protein, 1033 aa, Artificial Sequence
  Synthetic Polypeptide
MALPVTALLLPLALLLHAARPSYVLTQPPSVSVAPGQTARITCGGNNIGSKSVHWYQQPPGQAPVVVVYDDSDRPSGIPERFSGSNSGNTATLTISRVEAGDEAVYYCQVWDSSSDHVVFGGGTKLTVLGQPKANPTVTLFPPSSEELQANKATLVCLISDFYPGAVTVAWKADGSPVKAGVETTKPSKQSNNKYAASSYLSLTPEQWKSHRSYSCQVTHEGSTVEKTVAPTECSGSQSFGLLDPKLCYLLDGILFIYGVILTALFLRVKFSRSADAPAYQQGQNQLYNELNLGRREEYDVLDKRRGRDPEMGGKPQRRKNPQEGLYNELQKDKMAEAYSEIGMKGERRRGKGHDGLYQGLSTATKDTYDALHMQALPPRRAKRSGSGATNFSLLKQAGDVEENPGPTSMDWIWRILFLVGAATGAHSFEQLQLQESGPGLVKPSETLSLTCTVSGGSISSGSYIWGWIRQPPGKGLEWIGSIYYSGITYYNPSLKSRVTISVDTSKNQFSLKLSSVTAADTAVYYCARHDGAVAGLFDYWGQGTLVTVSSAASTKGPSVFPLAPSSKSTSGGTAALGCLVKDYFPEPVTVSWNSGALTSGVHTFPAVLQSSGLYSLSSVVTVPSSSLGTQTYICNVNHKPSNTKVDKRVEPKSCGTQSFGLLDPKLCYLLDGILFIYGVILTALFLRVKFSRSADAPAYQQGQNQLYNELNLGRREEYDVLDKRRGRDPEMGGKPQRRKNPQEGLYNELQKDKMAEAYSEIGMKGERRRGKGHDGLYQGLSTATKDTYDALHMQALPPRRAKRSGSGVKQTLNFDLLKLAGDVESNPGPSRGHMTEYKPTVRLATRDDVPRAVRTLAAAFADYPATRHTVDPDRHIERVTELQELFLTRVGLDIGKVWVADDGAAVAVWTTPESVEAGAVFAEIGPRMAELSGSRLAAQQQMEGLLAPHRPKEPAWFLATVGVSPDHQGKGLGSAVVLPGVEAAERAGVPAFLETSAPRNLPFYERLGFTVTADVEVPEGPRTWCMTRKPGA

SEQ ID NO: 18189 - protein, 819 aa, Artificial Sequence
  Synthetic Polypeptide
MALPVTALLLPLALLLHAARPSYVLTQPPSVSVAPGQTARITCGGNNIGSKSVHWYQQPPGQAPVVVVYDDSDRPSGIPERFSGSNSGNTATLTISRVEAGDEAVYYCQVWDSSSDHVVFGGGTKLTVLLEDLKNVFPPEVAVFEPSEAEISHTQKATLVCLATGFYPDHVELSWWVNGKEVHSGVSTDPQPLKEQPALNDSRYCLSSRLRVSATFWQNPRNHFRCQVQFYGLSENDEWTQDRAKPVTQIVSAEAWGRADCGSQSFGLLDPKLCYLLDGILFIYGVILTALFLRVKFSRSADAPAYQQGQNQLYNELNLGRREEYDVLDKRRGRDPEMGGKPQRRKNPQEGLYNELQKDKMAEAYSEIGMKGERRRGKGHDGLYQGLSTATKDTYDALHMQALPPRRAKRSGSGATNFSLLKQAGDVEENPGPTSMDWIWRILFLVGAATGAHSFEQLQLQESGPGLVKPSETLSLTCTVSGGSISSGSYIWGWIRQPPGKGLEWIGSIYYSGITYYNPSLKSRVTISVDTSKNQFSLKLSSVTAADTAVYYCARHDGAVAGLFDYWGQGTLVTVSSATRIQNPDPAVYQLRDSKSSDKSVCLFTDFDSQTNVSQSKDSDVYITDKTVLDMRSMDFKSNSAVAWSNKSDFACANAFNNSIIPEDTFFPSPESSCGTQSFGLLDPKLCYLLDGILFIYGVILTALFLRVKFSRSADAPAYQQGQNQLYNELNLGRREEYDVLDKRRGRDPEMGGKPQRRKNPQEGLYNELQKDKMAEAYSEIGMKGERRRGKGHDGLYQGLSTATKDTYDALHMQALPPR

SEQ ID NO: 18190 - protein, 819 aa, Artificial Sequence
  Synthetic Polypeptide
MALPVTALLLPLALLLHAARPSYVLTQPPSVSVAPGQTARITCGGNNIGSKSVHWYQQPPGQAPVVVVYDDSDRPSGIPERFSGSNSGNTATLTISRVEAGDEAVYYCQVWDSSSDHVVFGGGTKLTVLLEDLKNVFPPEVAVFEPSKAEIAHTQKATLVCLATGFYPDHVELSWWVNGKEVHSGVCTDPQPLKEQPALNDSRYCLSSRLRVSATFWQNPRNHFRCQVQFYGLSENDEWTQDRAKPVTQIVSAEAWGRADCGSQSFGLLDPKLCYLLDGILFIYGVILTALFLRVKFSRSADAPAYQQGQNQLYNELNLGRREEYDVLDKRRGRDPEMGGKPQRRKNPQEGLYNELQKDKMAEAYSEIGMKGERRRGKGHDGLYQGLSTATKDTYDALHMQALPPRRAKRSGSGATNFSLLKQAGDVEENPGPTSMDWIWRILFLVGAATGAHSFEQLQLQESGPGLVKPSETLSLTCTVSGGSISSGSYIWGWIRQPPGKGLEWIGSIYYSGITYYNPSLKSRVTISVDTSKNQFSLKLSSVTAADTAVYYCARHDGAVAGLFDYWGQGTLVTVSSATRIQNPDPAVYQLRDSKSSDKSVCLFTDFDSQTNVSQSKDSDVYITDKCVLDMRSMDFKSNSAVAWSNKSDFACANAFNNSIIPEDTFFPSSDVPCGTQSFGLLDPKLCYLLDGILFIYGVILTALFLRVKFSRSADAPAYQQGQNQLYNELNLGRREEYDVLDKRRGRDPEMGGKPQRRKNPQEGLYNELQKDKMAEAYSEIGMKGERRRGKGHDGLYQGLSTATKDTYDALHMQALPPR

SEQ ID NO: 18191 - protein, 890 aa, Artificial Sequence
  Synthetic Polypeptide
MALPVTALLLPLALLLHAARPSYVLTQPPSVSVAPGQTARITCGGNNIGSKSVHWYQQPPGQAPVVVVYDDSDRPSGIPERFSGSNSGNTATLTISRVEAGDEAVYYCQVWDSSSDHVVFGGGTKLTVLLEGKPIPNPLLGLDSTGSGEDLKNVFPPEVAVFEPSEAEISHTQKATLVCLATGFYPDHVELSWWVNGKEVHSGVSTDPQPLKEQPALNDSRYCLSSRLRVSATFWQNPRNHFRCQVQFYGLSENDEWTQDRAKPVTQIVSAEAWGRADCGSQSFGLLDPKLCYLLDGILFIYGVILTALFLRVKFSRSADAPAYQQGQNQLYNELNLGRREEYDVLDKRRGRDPEMGGKPQRRKNPQEGLYNELQKDKMAEAYSEIGMKGERRRGKGHDGLYQGLSTATKDTYDALHMQALPPRRAKRSGSGATNFSLLKQAGDVEENPGPTSMDWIWRILFLVGAATGAHSFEQLQLQESGPGLVKPSETLSLTCTVSGGSISSGSYIWGWIRQPPGKGLEWIGSIYYSGITYYNPSLKSRVTISVDTSKNQFSLKLSSVTAADTAVYYCARHDGAVAGLFDYWGQGTLVTVSSATREQKLISEEDGSGIQNPDPAVYQLRDSKSSDKSVCLFTDFDSQTNVSQSKDSDVYITDKTVLDMRSMDFKSNSAVAWSNKSDFACANAFNNSIIPEDTFFPSPESSCGTQSFGLLDPKLCYLLDGILFIYGVILTALFLRSKRSRLLHSDYMNMTPRRPGPTRKHYQPYAPPRDFAAYRSRVKFSRSADAPAYQQGQNQLYNELNLGRREEYDVLDKRRGRDPEMGGKPQRRKNPQEGLYNELQKDKMAEAYSEIGMKGERRRGKGHDGLYQGLSTATKDTYDALHMQALPPR

SEQ ID NO: 18192 - protein, 931 aa, Artificial Sequence
  Synthetic Polypeptide
MALPVTALLLPLALLLHAARPSYVLTQPPSVSVAPGQTARITCGGNNIGSKSVHWYQQPPGQAPVVVVYDDSDRPSGIPERFSGSNSGNTATLTISRVEAGDEAVYYCQVWDSSSDHVVFGGGTKLTVLLEGKPIPNPLLGLDSTGSGEDLKNVFPPEVAVFEPSEAEISHTQKATLVCLATGFYPDHVELSWWVNGKEVHSGVSTDPQPLKEQPALNDSRYCLSSRLRVSATFWQNPRNHFRCQVQFYGLSENDEWTQDRAKPVTQIVSAEAWGRADCGSQSFGLLDPKLCYLLDGILFIYGVILTALFLRSKRSRLLHSDYMNMTPRRPGPTRKHYQPYAPPRDFAAYRSRVKFSRSADAPAYQQGQNQLYNELNLGRREEYDVLDKRRGRDPEMGGKPQRRKNPQEGLYNELQKDKMAEAYSEIGMKGERRRGKGHDGLYQGLSTATKDTYDALHMQALPPRRAKRSGSGATNFSLLKQAGDVEENPGPTSMDWIWRILFLVGAATGAHSFEQLQLQESGPGLVKPSETLSLTCTVSGGSISSGSYIWGWIRQPPGKGLEWIGSIYYSGITYYNPSLKSRVTISVDTSKNQFSLKLSSVTAADTAVYYCARHDGAVAGLFDYWGQGTLVTVSSATREQKLISEEDGSGIQNPDPAVYQLRDSKSSDKSVCLFTDFDSQTNVSQSKDSDVYITDKTVLDMRSMDFKSNSAVAWSNKSDFACANAFNNSIIPEDTFFPSPESSCGTQSFGLLDPKLCYLLDGILFIYGVILTALFLRSKRSRLLHSDYMNMTPRRPGPTRKHYQPYAPPRDFAAYRSRVKFSRSADAPAYQQGQNQLYNELNLGRREEYDVLDKRRGRDPEMGGKPQRRKNPQEGLYNELQKDKMAEAYSEIGMKGERRRGKGHDGLYQGLSTATKDTYDALHMQALPPR

SEQ ID NO: 18193 - protein, 892 aa, Artificial Sequence
  Synthetic Polypeptide
MALPVTALLLPLALLLHAARPSYVLTQPPSVSVAPGQTARITCGGNNIGSKSVHWYQQPPGQAPVVVVYDDSDRPSGIPERFSGSNSGNTATLTISRVEAGDEAVYYCQVWDSSSDHVVFGGGTKLTVLLEGKPIPNPLLGLDSTGSGEDLKNVFPPEVAVFEPSEAEISHTQKATLVCLATGFYPDHVELSWWVNGKEVHSGVSTDPQPLKEQPALNDSRYCLSSRLRVSATFWQNPRNHFRCQVQFYGLSENDEWTQDRAKPVTQIVSAEAWGRADCGSQSFGLLDPKLCYLLDGILFIYGVILTALFLRVKFSRSADAPAYQQGQNQLYNELNLGRREEYDVLDKRRGRDPEMGGKPQRRKNPQEGLYNELQKDKMAEAYSEIGMKGERRRGKGHDGLYQGLSTATKDTYDALHMQALPPRRAKRSGSGATNFSLLKQAGDVEENPGPTSMDWIWRILFLVGAATGAHSFEQLQLQESGPGLVKPSETLSLTCTVSGGSISSGSYIWGWIRQPPGKGLEWIGSIYYSGITYYNPSLKSRVTISVDTSKNQFSLKLSSVTAADTAVYYCARHDGAVAGLFDYWGQGTLVTVSSATREQKLISEEDLGSGIQNPDPAVYQLRDSKSSDKSVCLFTDFDSQTNVSQSKDSDVYITDKTVLDMRSMDFKSNSAVAWSNKSDFACANAFNNSIIPEDTFFPSPESSCGTQSFGLLDPKLCYLLDGILFIYGVILTALFLKRGRKKLLYIFKQPFMRPVQTTQEEDGCSCRFPEEEEGGCELRVKFSRSADAPAYQQGQNQLYNELNLGRREEYDVLDKRRGRDPEMGGKPQRRKNPQEGLYNELQKDKMAEAYSEIGMKGERRRGKGHDGLYQGLSTATKDTYDALHMQALPPR

SEQ ID NO: 18194 - protein, 934 aa, Artificial Sequence
  Synthetic Polypeptide
MALPVTALLLPLALLLHAARPSYVLTQPPSVSVAPGQTARITCGGNNIGSKSVHWYQQPPGQAPVVVVYDDSDRPSGIPERFSGSNSGNTATLTISRVEAGDEAVYYCQVWDSSSDHVVFGGGTKLTVLLEGKPIPNPLLGLDSTGSGEDLKNVFPPEVAVFEPSEAEISHTQKATLVCLATGFYPDHVELSWWVNGKEVHSGVSTDPQPLKEQPALNDSRYCLSSRLRVSATFWQNPRNHFRCQVQFYGLSENDEWTQDRAKPVTQIVSAEAWGRADCGSQSFGLLDPKLCYLLDGILFIYGVILTALFLKRGRKKLLYIFKQPFMRPVQTTQEEDGCSCRFPEEEEGGCELRVKFSRSADAPAYQQGQNQLYNELNLGRREEYDVLDKRRGRDPEMGGKPQRRKNPQEGLYNELQKDKMAEAYSEIGMKGERRRGKGHDGLYQGLSTATKDTYDALHMQALPPRRAKRSGSGATNFSLLKQAGDVEENPGPTSMDWIWRILFLVGAATGAHSFEQLQLQESGPGLVKPSETLSLTCTVSGGSISSGSYIWGWIRQPPGKGLEWIGSIYYSGITYYNPSLKSRVTISVDTSKNQFSLKLSSVTAADTAVYYCARHDGAVAGLFDYWGQGTLVTVSSATREQKLISEEDLGSGIQNPDPAVYQLRDSKSSDKSVCLFTDFDSQTNVSQSKDSDVYITDKTVLDMRSMDFKSNSAVAWSNKSDFACANAFNNSIIPEDTFFPSPESSCGTQSFGLLDPKLCYLLDGILFIYGVILTALFLKRGRKKLLYIFKQPFMRPVQTTQEEDGCSCRFPEEEEGGCELRVKFSRSADAPAYQQGQNQLYNELNLGRREEYDVLDKRRGRDPEMGGKPQRRKNPQEGLYNELQKDKMAEAYSEIGMKGERRRGKGHDGLYQGLSTATKDTYDALHMQALPPR

SEQ ID NO: 18195 - protein, 824 aa, Artificial Sequence
  Synthetic Polypeptide
MALPVTALLLPLALLLHAARPSYVLTQPPSVSVAPGQTARITCGGNNIGSKSVHWYQQPPGQAPVVVVYDDSDRPSGIPERFSGSNSGNTATLTISRVEAGDEAVYYCQVWDSSSDHVVFGGGTKLTVLLEQSFGLLDPKLCYLLDGILFIYGVILTALFLRVKFSRSADAPAYQQGQNQLYNELNLGRREEYDVLDKRRGRDPEMGGKPQRRKNPQEGLYNELQKDKMAEAYSEIGMKGERRRGKGHDGLYQGLSTATKDTYDALHMQALPPRRAKRSGSGATNFSLLKQAGDVEENPGPTSMDWIWRILFLVGAATGAHSFEQLQLQESGPGLVKPSETLSLTCTVSGGSISSGSYIWGWIRQPPGKGLEWIGSIYYSGITYYNPSLKSRVTISVDTSKNQFSLKLSSVTAADTAVYYCARHDGAVAGLFDYWGQGTLVTVSSATRQSFGLLDPKLCYLLDGILFIYGVILTALFLRVKFSRSADAPAYQQGQNQLYNELNLGRREEYDVLDKRRGRDPEMGGKPQRRKNPQEGLYNELQKDKMAEAYSEIGMKGERRRGKGHDGLYQGLSTATKDTYDALHMQALPPRRAKRSGSGVKQTLNFDLLKLAGDVESNPGPSRGHMTEYKPTVRLATRDDVPRAVRTLAAAFADYPATRHTVDPDRHIERVTELQELFLTRVGLDIGKVWVADDGAAVAVWTTPESVEAGAVFAEIGPRMAELSGSRLAAQQQMEGLLAPHRPKEPAWFLATVGVSPDHQGKGLGSAVVLPGVEAAERAGVPAFLETSAPRNLPFYERLGFTVTADVEVPEGPRTWCMTRKPGA

SEQ ID NO: 18196 - protein, 649 aa, Artificial Sequence
  Synthetic Polypeptide
MALPVTALLLPLALLLHAARPSYVLTQPPSVSVAPGQTARITCGGNNIGSKSVHWYQQPPGQAPVVVVYDDSDRPSGIPERFSGSNSGNTATLTISRVEAGDEAVYYCQVWDSSSDHVVFGGGTKLTVLLEGQPKANPTVTLFPPSSEELQANKATLVCLISDFYPGAVTVAWKADGSPVKAGVETTKPSKQSNNKYAASSYLSLTPEQWKSHRSYSCQVTHEGSTVEKTVAPTECSPIKTDVITMDPKDNCSKDANDTLLLQLTNTSAYYMYLLLLLKSVVYFAIITCCLLRRTAFCCNGEKSRAKRSGSGATNFSLLKQAGDVEENPGPTSMDWIWRILFLVGAATGAHSFEQLQLQESGPGLVKPSETLSLTCTVSGGSISSGSYIWGWIRQPPGKGLEWIGSIYYSGITYYNPSLKSRVTISVDTSKNQFSLKLSSVTAADTAVYYCARHDGAVAGLFDYWGQGTLVTVSSATRASTKGPSVFPLAPSSKSTSGGTAALGCLVKDYFPEPVTVSWNSGALTSGVHTFPAVLQSSGLYSLSSVVTVPSSSLGTQTYICNVNHKPSNTKVDKRVEPKSCEVKTDSTDHVKPKETENTKQPSKSCHKPKAIVHTEKVNMMSLTVLGLRMLFAKTVAVNFLLTAKLFFL

SEQ ID NO: 18197 - protein, 627 aa, Artificial Sequence
  Synthetic Polypeptide
MALPVTALLLPLALLLHAARPSYVLTQPPSVSVAPGQTARITCGGNNIGSKSVHWYQQPPGQAPVVVVYDDSDRPSGIPERFSGSNSGNTATLTISRVEAGDEAVYYCQVWDSSSDHVVFGGGTKLTVLLEGQPKANPTVTLFPPSSEELQANKATLVCLISDFYPGAVTVAWKADGSPVKAGVETTKPSKQSNNKYAASSYLSLTPEQWKSHRSYSCQVTHEGSTVEKTVAPTECSGRADCGITSASYHQGVLSATILYEILLGKATLYAVLVSALVLMAMVKRKDSRGRAKRSGSGATNFSLLKQAGDVEENPGPTSMDWIWRILFLVGAATGAHSFEQLQLQESGPGLVKPSETLSLTCTVSGGSISSGSYIWGWIRQPPGKGLEWIGSIYYSGITYYNPSLKSRVTISVDTSKNQFSLKLSSVTAADTAVYYCARHDGAVAGLFDYWGQGTLVTVSSATRASTKGPSVFPLAPSSKSTSGGTAALGCLVKDYFPEPVTVSWNSGALTSGVHTFPAVLQSSGLYSLSSVVTVPSSSLGTQTYICNVNHKPSNTKVDKRVEPKSCIPEDTFFPSSDVPCDVKLVEKSFETDTNLNFQNLSVIGFRILLLKVAGFNLLMTLRLWSS

SEQ ID NO: 18198 - protein, 627 aa, Artificial Sequence
  Synthetic Polypeptide
MALPVTALLLPLALLLHAARPSYVLTQPPSVSVAPGQTARITCGGNNIGSKSVHWYQQPPGQAPVVVVYDDSDRPSGIPERFSGSNSGNTATLTISRVEAGDEAVYYCQVWDSSSDHVVFGGGTKLTVLLEGQPKANPTVTLFPPSSEELQANKATLVCLISDFYPGAVTVAWKADGSPVKAGVETTKPSKQSNNKYAASSYLSLTPEQWKSHRSYSCQVTHEGSTVEKTVAPTECSGRADCGFTSESYQQGVLSATILYEILLGKATLYAVLVSALVLMAMVKRKDSRGRAKRSGSGATNFSLLKQAGDVEENPGPTSMDWIWRILFLVGAATGAHSFEQLQLQESGPGLVKPSETLSLTCTVSGGSISSGSYIWGWIRQPPGKGLEWIGSIYYSGITYYNPSLKSRVTISVDTSKNQFSLKLSSVTAADTAVYYCARHDGAVAGLFDYWGQGTLVTVSSATRASTKGPSVFPLAPSSKSTSGGTAALGCLVKDYFPEPVTVSWNSGALTSGVHTFPAVLQSSGLYSLSSVVTVPSSSLGTQTYICNVNHKPSNTKVDKRVEPKSCIPEDTFFPSPESSCDVKLVEKSFETDTNLNFQNLSVIGFRILLLKVAGFNLLMTLRLWSS

SEQ ID NO: 18199 - protein, 453 aa, Artificial Sequence
  Synthetic Polypeptide
MALPVTALLLPLALLLHAARPSYVLTQPPSVSVAPGQTARITCGGNNIGSKSVHWYQQPPGQAPVVVVYDDSDRPSGIPERFSGSNSGNTATLTISRVEAGDEAVYYCQVWDSSSDHVVFGGGTKLTVLGGGGSGGGGSGGGGSQLQLQESGPGLVKPSETLSLTCTVSGGSISSGSYIWGWIRQPPGKGLEWIGSIYYSGITYYNPSLKSRVTISVDTSKNQFSLKLSSVTAADTAVYYCARHDGAVAGLFDYWGQGTLVTVSSATRDGNEEMGGITQTPYKVSISGTTVILTCPQYPGSEILWQHNDKNIGGDEDDKNIGSDEDHLSLKEFSELEQSGYYVCYPRGSKPEDANFYLYLRARVCENCMEMDVMSVATIVIVDICITGGLLLLVYYWSKNRKAKAKPVTRGAGAGGRQRGQNKERPPPVPNPDYEPIRKGQRDLYSGLNQRRI

SEQ ID NO: 18200 - protein, 418 aa, Artificial Sequence
  Synthetic Polypeptide
MALPVTALLLPLALLLHAARPSYVLTQPPSVSVAPGQTARITCGGNNIGSKSVHWYQQPPGQAPVVVVYDDSDRPSGIPERFSGSNSGNTATLTISRVEAGDEAVYYCQVWDSSSDHVVFGGGTKLTVLGGGGSGGGGSGGGGSQLQLQESGPGLVKPSETLSLTCTVSGGSISSGSYIWGWIRQPPGKGLEWIGSIYYSGITYYNPSLKSRVTISVDTSKNQFSLKLSSVTAADTAVYYCARHDGAVAGLFDYWGQGTLVTVSSATRFKIPIEELEDRVFVNCNTSITWVEGTVGTLLSDITRLDLGKRILDPRGIYRCNGTDIYKDKESTVQVHYRMCQSCVELDPATVAGIIVTDVIATLLLALGVFCFAGHETGRLSGAADTQALLRNDQVYQPLRDRDDAQYSHLGGNWARNK

SEQ ID NO: 18201 - protein, 428 aa, Artificial Sequence
  Synthetic Polypeptide
MALPVTALLLPLALLLHAARPSYVLTQPPSVSVAPGQTARITCGGNNIGSKSVHWYQQPPGQAPVVVVYDDSDRPSGIPERFSGSNSGNTATLTISRVEAGDEAVYYCQVWDSSSDHVVFGGGTKLTVLGGGGSGGGGSGGGGSQLQLQESGPGLVKPSETLSLTCTVSGGSISSGSYIWGWIRQPPGKGLEWIGSIYYSGITYYNPSLKSRVTISVDTSKNQFSLKLSSVTAADTAVYYCARHDGAVAGLFDYWGQGTLVTVSSATRQSIKGNHLVKVYDYQEDGSVLLTCDAEAKNITWFKDGKMIGFLTEDKKKWNLGSNAKDPRGMYQCKGSQNKSKPLQVYYRMCQNCIELNAATISGFLFAEIVSIFVLAVGVYFIAGQDGVRQSRASDKQTLLPNDQLYQPLKDREDDQYSHLQGNQLRRN

SEQ ID NO: 18202 - protein, 411 aa, Artificial Sequence
  Synthetic Polypeptide
MALPVTALLLPLALLLHAARPSYVLTQPPSVSVAPGQTARITCGGNNIGSKSVHWYQQPPGQAPVVVVYDDSDRPSGIPERFSGSNSGNTATLTISRVEAGDEAVYYCQVWDSSSDHVVFGGGTKLTVLGGGGSGGGGSGGGGSQLQLQESGPGLVKPSETLSLTCTVSGGSISSGSYIWGWIRQPPGKGLEWIGSIYYSGITYYNPSLKSRVTISVDTSKNQFSLKLSSVTAADTAVYYCARHDGAVAGLFDYWGQGTLVTVSSATRQSFGLLDPKLCYLLDGILFIYGVILTALFLRVKFSRSADAPAYQQGQNQLYNELNLGRREEYDVLDKRRGRDPEMGGKPQRRKNPQEGLYNELQKDKMAEAYSEIGMKGERRRGKGHDGLYQGLSTATKDTYDALHMQALPPR

SEQ ID NO: 18203 - protein, 453 aa, Artificial Sequence
  Synthetic Polypeptide
MALPVTALLLPLALLLHAARPQLQLQESGPGLVKPSETLSLTCTVSGGSISSGSYIWGWIRQPPGKGLEWIGSIYYSGITYYNPSLKSRVTISVDTSKNQFSLKLSSVTAADTAVYYCARHDGAVAGLFDYWGQGTLVTVSSAGGGGSGGGGSGGGGSSYVLTQPPSVSVAPGQTARITCGGNNIGSKSVHWYQQPPGQAPVVVVYDDSDRPSGIPERFSGSNSGNTATLTISRVEAGDEAVYYCQVWDSSSDHVVFGGGTKLTVLTRDGNEEMGGITQTPYKVSISGTTVILTCPQYPGSEILWQHNDKNIGGDEDDKNIGSDEDHLSLKEFSELEQSGYYVCYPRGSKPEDANFYLYLRARVCENCMEMDVMSVATIVIVDICITGGLLLLVYYWSKNRKAKAKPVTRGAGAGGRQRGQNKERPPPVPNPDYEPIRKGQRDLYSGLNQRRI

SEQ ID NO: 18204 - protein, 418 aa, Artificial Sequence
  Synthetic Polypeptide
MALPVTALLLPLALLLHAARPQLQLQESGPGLVKPSETLSLTCTVSGGSISSGSYIWGWIRQPPGKGLEWIGSIYYSGITYYNPSLKSRVTISVDTSKNQFSLKLSSVTAADTAVYYCARHDGAVAGLFDYWGQGTLVTVSSAGGGGSGGGGSGGGGSSYVLTQPPSVSVAPGQTARITCGGNNIGSKSVHWYQQPPGQAPVVVVYDDSDRPSGIPERFSGSNSGNTATLTISRVEAGDEAVYYCQVWDSSSDHVVFGGGTKLTVLTRFKIPIEELEDRVFVNCNTSITWVEGTVGTLLSDITRLDLGKRILDPRGIYRCNGTDIYKDKESTVQVHYRMCQSCVELDPATVAGIIVTDVIATLLLALGVFCFAGHETGRLSGAADTQALLRNDQVYQPLRDRDDAQYSHLGGNWARNK

SEQ ID NO: 18205 - protein, 428 aa, Artificial Sequence
  Synthetic Polypeptide
MALPVTALLLPLALLLHAARPQLQLQESGPGLVKPSETLSLTCTVSGGSISSGSYIWGWIRQPPGKGLEWIGSIYYSGITYYNPSLKSRVTISVDTSKNQFSLKLSSVTAADTAVYYCARHDGAVAGLFDYWGQGTLVTVSSAGGGGSGGGGSGGGGSSYVLTQPPSVSVAPGQTARITCGGNNIGSKSVHWYQQPPGQAPVVVVYDDSDRPSGIPERFSGSNSGNTATLTISRVEAGDEAVYYCQVWDSSSDHVVFGGGTKLTVLTRQSIKGNHLVKVYDYQEDGSVLLTCDAEAKNITWFKDGKMIGFLTEDKKKWNLGSNAKDPRGMYQCKGSQNKSKPLQVYYRMCQNCIELNAATISGFLFAEIVSIFVLAVGVYFIAGQDGVRQSRASDKQTLLPNDQLYQPLKDREDDQYSHLQGNQLRRN

SEQ ID NO: 18206 - protein, 411 aa, Artificial Sequence
  Synthetic Polypeptide
MALPVTALLLPLALLLHAARPQLQLQESGPGLVKPSETLSLTCTVSGGSISSGSYIWGWIRQPPGKGLEWIGSIYYSGITYYNPSLKSRVTISVDTSKNQFSLKLSSVTAADTAVYYCARHDGAVAGLFDYWGQGTLVTVSSAGGGGSGGGGSGGGGSSYVLTQPPSVSVAPGQTARITCGGNNIGSKSVHWYQQPPGQAPVVVVYDDSDRPSGIPERFSGSNSGNTATLTISRVEAGDEAVYYCQVWDSSSDHVVFGGGTKLTVLTRQSFGLLDPKLCYLLDGILFIYGVILTALFLRVKFSRSADAPAYQQGQNQLYNELNLGRREEYDVLDKRRGRDPEMGGKPQRRKNPQEGLYNELQKDKMAEAYSEIGMKGERRRGKGHDGLYQGLSTATKDTYDALHMQALPPR

SEQ ID NO: 18207 - protein, 644 aa, Artificial Sequence
  Synthetic Polypeptide
MALPVTALLLPLALLLHAARPSYVLTQPPSVSVAPGQTARITCGGNNIGSKSVHWYQQPPGQAPVVVVYDDSDRPSGIPERFSGSNSGNTATLTISRVEAGDEAVYYCQVWDSSSDHVVFGGGTKLTVLGGGGSGGGGSGGGGSQLQLQESGPGLVKPSETLSLTCTVSGGSISSGSYIWGWIRQPPGKGLEWIGSIYYSGITYYNPSLKSRVTISVDTSKNQFSLKLSSVTAADTAVYYCARHDGAVAGLFDYWGQGTLVTVSSATRGSGIQNPDPAVYQLRDSKSSDKSVCLFTDFDSQTNVSQSKDSDVYITDKTVLDMRSMDFKSNSAVAWSNKSDFACANAFNNSIIPEDTFFPSPESSCDVKLVEKSFETDTNLNFQNLSVIGFRILLLKVAGFNLLMTLRLWSSRAKRSGSGVKQTLNFDLLKLAGDVESNPGPSRGHMTEYKPTVRLATRDDVPRAVRTLAAAFADYPATRHTVDPDRHIERVTELQELFLTRVGLDIGKVWVADDGAAVAVWTTPESVEAGAVFAEIGPRMAELSGSRLAAQQQMEGLLAPHRPKEPAWFLATVGVSPDHQGKGLGSAVVLPGVEAAERAGVPAFLETSAPRNLPFYERLGFTVTADVEVPEGPRTWCMTRKPGA

SEQ ID NO: 18208 - protein, 676 aa, Artificial Sequence
  Synthetic Polypeptide
MALPVTALLLPLALLLHAARPSYVLTQPPSVSVAPGQTARITCGGNNIGSKSVHWYQQPPGQAPVVVVYDDSDRPSGIPERFSGSNSGNTATLTISRVEAGDEAVYYCQVWDSSSDHVVFGGGTKLTVLGGGGSGGGGSGGGGSQLQLQESGPGLVKPSETLSLTCTVSGGSISSGSYIWGWIRQPPGKGLEWIGSIYYSGITYYNPSLKSRVTISVDTSKNQFSLKLSSVTAADTAVYYCARHDGAVAGLFDYWGQGTLVTVSSALEDLKNVFPPEVAVFEPSEAEISHTQKATLVCLATGFYPDHVELSWWVNGKEVHSGVSTDPQPLKEQPALNDSRYCLSSRLRVSATFWQNPRNHFRCQVQFYGLSENDEWTQDRAKPVTQIVSAEAWGRADCGFTSESYQQGVLSATILYEILLGKATLYAVLVSALVLMAMVKRKDSRGRAKRSGSGATNFSLLKQAGDVEENPGPTRGHMTEYKPTVRLATRDDVPRAVRTLAAAFADYPATRHTVDPDRHIERVTELQELFLTRVGLDIGKVWVADDGAAVAVWTTPESVEAGAVFAEIGPRMAELSGSRLAAQQQMEGLLAPHRPKEPAWFLATVGVSPDHQGKGLGSAVVLPGVEAAERAGVPAFLETSAPRNLPFYERLGFTVTADVEVPEGPRTWCMTRKPGA

SEQ ID NO: 18209 - protein, 726 aa, Artificial Sequence
  Synthetic Polypeptide
MALPVTALLLPLALLLHAARPSYVLTQPPSVSVAPGQTARITCGGNNIGSKSVHWYQQPPGQAPVVVVYDDSDRPSGIPERFSGSNSGNTATLTISRVEAGDEAVYYCQVWDSSSDHVVFGGGTKLTVLGGGGSGGGGSGGGGSQLQLQESGPGLVKPSETLSLTCTVSGGSISSGSYIWGWIRQPPGKGLEWIGSIYYSGITYYNPSLKSRVTISVDTSKNQFSLKLSSVTAADTAVYYCARHDGAVAGLFDYWGQGTLVTVSSATREQKLISEEDLGSGTPFPSLAPPIMLLVDGKQQMVVVCLVLDVAPPGLDSPIWFSAGNGSALDAFTYGPSPATDGTWTNLAHLSLPSEELASWEPLVCHTGPGAEGHSRSTQPMHLSGEASTARTCPQEPLRGTPGGALWLGVLRLLLFKLLLFDLLLTCSCLCDPAGPLPSPATTTRLRALGSHRLHPATETGGREATSSPRPQPRDRRWGDTPPGRKPGSPVRAKRSGSGVKQTLNFDLLKLAGDVESNPGPSRSRGHMTEYKPTVRLATRDDVPRAVRTLAAAFADYPATRHTVDPDRHIERVTELQELFLTRVGLDIGKVWVADDGAAVAVWTTPESVEAGAVFAEIGPRMAELSGSRLAAQQQMEGLLAPHRPKEPAWFLATVGVSPDHQGKGLGSAVVLPGVEAAERAGVPAFLETSAPRNLPFYERLGFTVTADVEVPEGPRTWCMTRKPGA

SEQ ID NO: 18210 - protein, 539 aa, Artificial Sequence; identical to SEQ ID NO: 18141
  Synthetic Polypeptide

SEQ ID NO: 18211 - protein, 309 aa, Artificial Sequence; identical to SEQ ID NO: 18142
  Synthetic Polypeptide

SEQ ID NO: 18212 - protein, 451 aa, Artificial Sequence
  Synthetic Polypeptide
MDWIWRILFLVGAATGAHSFEQLQLQESGPGLVKPSETLSLTCTVSGGSISSGSYIWGWIRQPPGKGLEWIGSIYYSGITYYNPSLKSRVTISVDTSKNQFSLKLSSVTAADTAVYYCARHDGAVAGLFDYWGQGTLVTVSSATRIQNPDPAVYQLRDSKSSDKSVCLFTDFDSQTNVSQSKDSDVYITDKTVLDMRSMDFKSNSAVAWSNKSDFACANAFNNSIIPEDTFFPSPESSCDVKLVEKSFETDTNLNFQNLSVIGFRILLLKVAGFNLLMTLRLWSSRAKRSGSGVKQTLNFDLLKLAGDVESNPGPSRGHMAKPLSQEESTLIERATATINSIPISEDYSVASAALSSDGRIFTGVNVYHFTGGPCAELVVLGTAAAAAAGNLTCIVAIGNENRGILSPCGRCRQVLLDLHPGIKAIVKDSDGQPTAVGIRELLPSGYVWEG

SEQ ID NO: 18213 - protein, 285 aa, Artificial Sequence
  Synthetic Polypeptide
MDWIWRILFLVGAATGAHSFEQLQLQESGPGLVKPSETLSLTCTVSGGSISSGSYIWGWIRQPPGKGLEWIGSIYYSGITYYNPSLKSRVTISVDTSKNQFSLKLSSVTAADTAVYYCARHDGAVAGLFDYWGQGTLVTVSSATRIQNPDPAVYQLRDSKSSDKSVCLFTDFDSQTNVSQSKDSDVYITDKTVLDMRSMDFKSNSAVAWSNKSDFACANAFNNSIIPEDTFFPSPESSCDVKLVEKSFETDTNLNFQNLSVIGFRILLLKVAGFNLLMTLRLWSS

SEQ ID NO: 18214 - protein, 557 aa, Artificial Sequence; identical to SEQ ID NO: 18145
  Synthetic Polypeptide

SEQ ID NO: 18215 - protein, 327 aa, Artificial Sequence; identical to SEQ ID NO: 18146
  Synthetic Polypeptide

SEQ ID NO: 18216 - protein, 463 aa, Artificial Sequence
  Synthetic Polypeptide
MDWIWRILFLVGAATGAHSFEQLQLQESGPGLVKPSETLSLTCTVSGGSISSGSYIWGWIRQPPGKGLEWIGSIYYSGITYYNPSLKSRVTISVDTSKNQFSLKLSSVTAADTAVYYCARHDGAVAGLFDYWGQGTLVTVSSATREQKLISEEDGSGIQNPDPAVYQLRDSKSSDKSVCLFTDFDSQTNVSQSKDSDVYITDKCVLDMRSMDFKSNSAVAWSNKSDFACANAFNNSIIPEDTFFPSPESSCDVKLVEKSFETDTNLNFQNLSVIGFRILLLKVAGFNLLMTLRLWSSRAKRSGSGVKQTLNFDLLKLAGDVESNPGPSRGHMAKPLSQEESTLIERATATINSIPISEDYSVASAALSSDGRIFTGVNVYHFTGGPCAELVVLGTAAAAAAGNLTCIVAIGNENRGILSPCGRCRQVLLDLHPGIKAIVKDSDGQPTAVGIRELLPSGYVWEG

SEQ ID NO: 18217 - protein, 297 aa, Artificial Sequence
  Synthetic Polypeptide
MDWIWRILFLVGAATGAHSFEQLQLQESGPGLVKPSETLSLTCTVSGGSISSGSYIWGWIRQPPGKGLEWIGSIYYSGITYYNPSLKSRVTISVDTSKNQFSLKLSSVTAADTAVYYCARHDGAVAGLFDYWGQGTLVTVSSATREQKLISEEDGSGIQNPDPAVYQLRDSKSSDKSVCLFTDFDSQTNVSQSKDSDVYITDKCVLDMRSMDFKSNSAVAWSNKSDFACANAFNNSIIPEDTFFPSPESSCDVKLVEKSFETDTNLNFQNLSVIGFRILLLKVAGFNLLMTLRLWSS

SEQ ID NO: 18218 - protein, 644 aa, Artificial Sequence
  Synthetic Polypeptide
MALPVTALLLPLALLLHAARPSYVLTQPPSVSVAPGQTARITCGGNNIGSKSVHWYQQPPGQAPVVVVYDDSDRPSGIPERFSGSNSGNTATLTISRVEAGDEAVYYCQVWDSSSDHVVFGGGTKLTVLGGGGSGGGGSGGGGSQLQLQESGPGLVKPSETLSLTCTVSGGSISSGSYIWGWIRQPPGKGLEWIGSIYYSGITYYNPSLKSRVTISVDTSKNQFSLKLSSVTAADTAVYYCARHDGAVAGLFDYWGQGTLVTVSSATRGSGIQNPDPAVYQLRDSKSSDKSVCLFTDFDSQTNVSQSKDSDVYITDKTVLDMRSMDFKSNSAVAWSNKSDFACANAFNNSIIPEDTFFPSSDVPCDVKLVEKSFETDTNLNFQNLSVIGFRILLLKVAGFNLLMTLRLWSSRAKRSGSGVKQTLNFDLLKLAGDVESNPGPSRGHMTEYKPTVRLATRDDVPRAVRTLAAAFADYPATRHTVDPDRHIERVTELQELFLTRVGLDIGKVWVADDGAAVAVWTTPESVEAGAVFAEIGPRMAELSGSRLAAQQQMEGLLAPHRPKEPAWFLATVGVSPDHQGKGLGSAVVLPGVEAAERAGVPAFLETSAPRNLPFYERLGFTVTADVEVPEGPRTWCMTRKPGA

SEQ ID NO: 18219 - protein, 676 aa, Artificial Sequence
  Synthetic Polypeptide
MALPVTALLLPLALLLHAARPSYVLTQPPSVSVAPGQTARITCGGNNIGSKSVHWYQQPPGQAPVVVVYDDSDRPSGIPERFSGSNSGNTATLTISRVEAGDEAVYYCQVWDSSSDHVVFGGGTKLTVLGGGGSGGGGSGGGGSQLQLQESGPGLVKPSETLSLTCTVSGGSISSGSYIWGWIRQPPGKGLEWIGSIYYSGITYYNPSLKSRVTISVDTSKNQFSLKLSSVTAADTAVYYCARHDGAVAGLFDYWGQGTLVTVSSALEDLKNVFPPEVAVFEPSKAEIAHTQKATLVCLATGFYPDHVELSWWVNGKEVHSGVSTDPQPLKEQPALNDSRYCLSSRLRVSATFWQNPRNHFRCQVQFYGLSENDEWTQDRAKPVTQIVSAEAWGRADCGITSASYHQGVLSATILYEILLGKATLYAVLVSALVLMAMVKRKDSRGRAKRSGSGATNFSLLKQAGDVEENPGPTRGHMTEYKPTVRLATRDDVPRAVRTLAAAFADYPATRHTVDPDRHIERVTELQELFLTRVGLDIGKVWVADDGAAVAVWTTPESVEAGAVFAEIGPRMAELSGSRLAAQQQMEGLLAPHRPKEPAWFLATVGVSPDHQGKGLGSAVVLPGVEAAERAGVPAFLETSAPRNLPFYERLGFTVTADVEVPEGPRTWCMTRKPGA

SEQ ID NO: 18220 - protein, 699 aa, Artificial Sequence
  Synthetic Polypeptide
MALPVTALLLPLALLLHAARPSYVLTQPPSVSVAPGQTARITCGGNNIGSKSVHWYQQPPGQAPVVVVYDDSDRPSGIPERFSGSNSGNTATLTISRVEAGDEAVYYCQVWDSSSDHVVFGGGTKLTVLGGGGSGGGGSGGGGSQLQLQESGPGLVKPSETLSLTCTVSGGSISSGSYIWGWIRQPPGKGLEWIGSIYYSGITYYNPSLKSRVTISVDTSKNQFSLKLSSVTAADTAVYYCARHDGAVAGLFDYWGQGTLVTVSSATRGSGGGGSGGGGSGDGNEEMGGITQTPYKVSISGTTVILTCPQYPGSEILWQHNDKNIGGDEDDKNIGSDEDHLSLKEFSELEQSGYYVCYPRGSKPEDANFYLYLRARVCENCMEMDVMSVATIVIVDICITGGLLLLVYYWSKNRKAKAKPVTRGAGAGGRQRGQNKERPPPVPNPDYEPIRKGQRDLYSGLNQRRIRAKRSGSGVKQTLNFDLLKLAGDVESNPGPSRGHMTEYKPTVRLATRDDVPRAVRTLAAAFADYPATRHTVDPDRHIERVTELQELFLTRVGLDIGKVWVADDGAAVAVWTTPESVEAGAVFAEIGPRMAELSGSRLAAQQQMEGLLAPHRPKEPAWFLATVGVSPDHQGKGLGSAVVLPGVEAAERAGVPAFLETSAPRNLPFYERLGFTVTADVEVPEGPRTWCMTRKPGA

SEQ ID NO: 18221 - protein, 664 aa, Artificial Sequence
  Synthetic Polypeptide
MALPVTALLLPLALLLHAARPSYVLTQPPSVSVAPGQTARITCGGNNIGSKSVHWYQQPPGQAPVVVVYDDSDRPSGIPERFSGSNSGNTATLTISRVEAGDEAVYYCQVWDSSSDHVVFGGGTKLTVLGGGGSGGGGSGGGGSQLQLQESGPGLVKPSETLSLTCTVSGGSISSGSYIWGWIRQPPGKGLEWIGSIYYSGITYYNPSLKSRVTISVDTSKNQFSLKLSSVTAADTAVYYCARHDGAVAGLFDYWGQGTLVTVSSATRGSGGGGSGGGGSGFKIPIEELEDRVFVNCNTSITWVEGTVGTLLSDITRLDLGKRILDPRGIYRCNGTDIYKDKESTVQVHYRMCQSCVELDPATVAGIIVTDVIATLLLALGVFCFAGHETGRLSGAADTQALLRNDQVYQPLRDRDDAQYSHLGGNWARNKRAKRSGSGVKQTLNFDLLKLAGDVESNPGPSRGHMTEYKPTVRLATRDDVPRAVRTLAAAFADYPATRHTVDPDRHIERVTELQELFLTRVGLDIGKVWVADDGAAVAVWTTPESVEAGAVFAEIGPRMAELSGSRLAAQQQMEGLLAPHRPKEPAWFLATVGVSPDHQGKGLGSAVVLPGVEAAERAGVPAFLETSAPRNLPFYERLGFTVTADVEVPEGPRTWCMTRKPGA

SEQ ID NO: 18222 - protein, 674 aa, Artificial Sequence
  Synthetic Polypeptide
MALPVTALLLPLALLLHAARPSYVLTQPPSVSVAPGQTARITCGGNNIGSKSVHWYQQPPGQAPVVVVYDDSDRPSGIPERFSGSNSGNTATLTISRVEAGDEAVYYCQVWDSSSDHVVFGGGTKLTVLGGGGSGGGGSGGGGSQLQLQESGPGLVKPSETLSLTCTVSGGSISSGSYIWGWIRQPPGKGLEWIGSIYYSGITYYNPSLKSRVTISVDTSKNQFSLKLSSVTAADTAVYYCARHDGAVAGLFDYWGQGTLVTVSSATRGSGGGGSGGGGSGQSIKGNHLVKVYDYQEDGSVLLTCDAEAKNITWFKDGKMIGFLTEDKKKWNLGSNAKDPRGMYQCKGSQNKSKPLQVYYRMCQNCIELNAATISGFLFAEIVSIFVLAVGVYFIAGQDGVRQSRASDKQTLLPNDQLYQPLKDREDDQYSHLQGNQLRRNRAKRSGSGVKQTLNFDLLKLAGDVESNPGPSRGHMTEYKPTVRLATRDDVPRAVRTLAAAFADYPATRHTVDPDRHIERVTELQELFLTRVGLDIGKVWVADDGAAVAVWTTPESVEAGAVFAEIGPRMAELSGSRLAAQQQMEGLLAPHRPKEPAWFLATVGVSPDHQGKGLGSAVVLPGVEAAERAGVPAFLETSAPRNLPFYERLGFTVTADVEVPEGPRTWCMTRKPGA

SEQ ID NO: 18223 - protein, 657 aa, Artificial Sequence
  Synthetic Polypeptide
MALPVTALLLPLALLLHAARPSYVLTQPPSVSVAPGQTARITCGGNNIGSKSVHWYQQPPGQAPVVVVYDDSDRPSGIPERFSGSNSGNTATLTISRVEAGDEAVYYCQVWDSSSDHVVFGGGTKLTVLGGGGSGGGGSGGGGSQLQLQESGPGLVKPSETLSLTCTVSGGSISSGSYIWGWIRQPPGKGLEWIGSIYYSGITYYNPSLKSRVTISVDTSKNQFSLKLSSVTAADTAVYYCARHDGAVAGLFDYWGQGTLVTVSSATRGSGGGGSGGGGSGQSFGLLDPKLCYLLDGILFIYGVILTALFLRVKFSRSADAPAYQQGQNQLYNELNLGRREEYDVLDKRRGRDPEMGGKPQRRKNPQEGLYNELQKDKMAEAYSEIGMKGERRRGKGHDGLYQGLSTATKDTYDALHMQALPPRRAKRSGSGVKQTLNFDLLKLAGDVESNPGPSRGHMTEYKPTVRLATRDDVPRAVRTLAAAFADYPATRHTVDPDRHIERVTELQELFLTRVGLDIGKVWVADDGAAVAVWTTPESVEAGAVFAEIGPRMAELSGSRLAAQQQMEGLLAPHRPKEPAWFLATVGVSPDHQGKGLGSAVVLPGVEAAERAGVPAFLETSAPRNLPFYERLGFTVTADVEVPEGPRTWCMTRKPGA

SEQ ID NO: 18224 - protein, 758 aa, Artificial Sequence
  Synthetic Polypeptide
MALPVTALLLPLALLLHAARPEVQLVESGGGLVQPGGSLRLSCAASGFSFSDFWMSWVRQAPGKGLEWVATISQAGSEKDYVDSVKGRFTISRDNAKKSLYLQMNSLRAEDTAVYYCASGVYSFDYRGQGTLVTVSSGTGGGGSGGGGSGGGGSEFSYVLTQPPSVSVAPGQTARITCGGNNIGSKSVHWYQQPPGQAPVVVVYDDSDRPSGIPERFSGSNSGNTATLTISRVEAGDEAVYYCQVWDSSSDHVVFGGGTKLTVLLEDLKNVFPPEVAVFEPSEAEISHTQKATLVCLATGFYPDHVELSWWVNGKEVHSGVCTDPQPLKEQPALNDSRYCLSSRLRVSATFWQNPRNHFRCQVQFYGLSENDEWTQDRAKPVTQIVSAEAWGRADCGFTSESYQQGVLSATILYEILLGKATLYAVLVSALVLMAMVKRKDSRGRAKRSGSGATNFSLLKQAGDVEENPGPTSMDWIWRILFLVGAATGAHSFEQLQLQESGPGLVKPSETLSLTCTVSGGSISSGSYIWGWIRQPPGKGLEWIGSIYYSGITYYNPSLKSRVTISVDTSKNQFSLKLSSVTAADTAVYYCARHDGAVAGLFDYWGQGTLVTVSSATRIQNPDPAVYQLRDSKSSDKSVCLFTDFDSQTNVSQSKDSDVYITDKCVLDMRSMDFKSNSAVAWSNKSDFACANAFNNSIIPEDTFFPSPESSCDVKLVEKSFETDTNLNFQNLSVIGFRILLLKVAGFNLLMTLRLWSS

SEQ ID NO: 18225 - protein, 762 aa, Artificial Sequence
  Synthetic Polypeptide
MALPVTALLLPLALLLHAARPEVQLVESGGGLVQPGGSLRLSCAASGFSFSDFWMSWVRQAPGKGLEWVATISQAGSEKDYVDSVKGRFTISRDNAKKSLYLQMNSLRAEDTAVYYCASGVYSFDYRGQGTLVTVSSGTGGGGSGGGGSGGGGSEFSYVLTQPPSVSVAPGQTARITCGGNNIGSKSVHWYQQPPGQAPVVVVYDDSDRPSGIPERFSGSNSGNTATLTISRVEAGDEAVYYCQVWDSSSDHVVFGGGTKLTVLLEIQNPDPAVYQLRDSKSSDKSVCLFTDFDSQTNVSQSKDSDVYITDKCVLDMRSMDFKSNSAVAWSNKSDFACANAFNNSIIPEDTFFPSPESSCDVKLVEKSFETDTNLNFQNLSVIGFRILLLKVAGFNLLMTLRLWSSRAKRSGSGVKQTLNFDLLKLAGDVESNPGPTSMDWIWRILFLVGAATGAHSFEQLQLQESGPGLVKPSETLSLTCTVSGGSISSGSYIWGWIRQPPGKGLEWIGSIYYSGITYYNPSLKSRVTISVDTSKNQFSLKLSSVTAADTAVYYCARHDGAVAGLFDYWGQGTLVTVSSATREDLKNVFPPEVAVFEPSEAEISHTQKATLVCLATGFYPDHVELSWWVNGKEVHSGVCTDPQPLKEQPALNDSRYCLSSRLRVSATFWQNPRNHFRCQVQFYGLSENDEWTQDRAKPVTQIVSAEAWGRADCGFTSESYQQGVLSATILYEILLGKATLYAVLVSALVLMAMVKRKDSRG

SEQ ID NO: 18226 - protein, 954 aa, Artificial Sequence
  Synthetic Polypeptide
MALPVTALLLPLALLLHAARPEVQLVESGGGLVQPGGSLRLSCAASGFSFSDFWMSWVRQAPGKGLEWVATISQAGSEKDYVDSVKGRFTISRDNAKKSLYLQMNSLRAEDTAVYYCASGVYSFDYRGQGTLVTVSSGTGGGGSGGGGSGGGGSEFSYVLTQPPSVSVAPGQTARITCGGNNIGSKSVHWYQQPPGQAPVVVVYDDSDRPSGIPERFSGSNSGNTATLTISRVEAGDEAVYYCQVWDSSSDHVVFGGGTKLTVLLEDLKNVFPPEVAVFEPSEAEISHTQKATLVCLATGFYPDHVELSWWVNGKEVHSGVSTDPQPLKEQPALNDSRYCLSSRLRVSATFWQNPRNHFRCQVQFYGLSENDEWTQDRAKPVTQIVSAEAWGRADCGSQSFGLLDPKLCYLLDGILFIYGVILTALFLRVKFSRSADAPAYQQGQNQLYNELNLGRREEYDVLDKRRGRDPEMGGKPQRRKNPQEGLYNELQKDKMAEAYSEIGMKGERRRGKGHDGLYQGLSTATKDTYDALHMQALPPRRAKRSGSGATNFSLLKQAGDVEENPGPTSMDWIWRILFLVGAATGAHSFEQLQLQESGPGLVKPSETLSLTCTVSGGSISSGSYIWGWIRQPPGKGLEWIGSIYYSGITYYNPSLKSRVTISVDTSKNQFSLKLSSVTAADTAVYYCARHDGAVAGLFDYWGQGTLVTVSSATRIQNPDPAVYQLRDSKSSDKSVCLFTDFDSQTNVSQSKDSDVYITDKTVLDMRSMDFKSNSAVAWSNKSDFACANAFNNSIIPEDTFFPSPESSCGTQSFGLLDPKLCYLLDGILFIYGVILTALFLRVKFSRSADAPAYQQGQNQLYNELNLGRREEYDVLDKRRGRDPEMGGKPQRRKNPQEGLYNELQKDKMAEAYSEIGMKGERRRGKGHDGLYQGLSTATKDTYDALHMQALPPR

SEQ ID NO: 18227 - protein, 784 aa, Artificial Sequence
  Synthetic Polypeptide
MALPVTALLLPLALLLHAARPEVQLVESGGGLVQPGGSLRLSCAASGFSFSDFWMSWVRQAPGKGLEWVATISQAGSEKDYVDSVKGRFTISRDNAKKSLYLQMNSLRAEDTAVYYCASGVYSFDYRGQGTLVTVSSGTGGGGSGGGGSGGGGSEFSYVLTQPPSVSVAPGQTARITCGGNNIGSKSVHWYQQPPGQAPVVVVYDDSDRPSGIPERFSGSNSGNTATLTISRVEAGDEAVYYCQVWDSSSDHVVFGGGTKLTVLLEGQPKANPTVTLFPPSSEELQANKATLVCLISDFYPGAVTVAWKADGSPVKAGVETTKPSKQSNNKYAASSYLSLTPEQWKSHRSYSCQVTHEGSTVEKTVAPTECSPIKTDVITMDPKDNCSKDANDTLLLQLTNTSAYYMYLLLLLKSVVYFAIITCCLLRRTAFCCNGEKSRAKRSGSGATNFSLLKQAGDVEENPGPTSMDWIWRILFLVGAATGAHSFEQLQLQESGPGLVKPSETLSLTCTVSGGSISSGSYIWGWIRQPPGKGLEWIGSIYYSGITYYNPSLKSRVTISVDTSKNQFSLKLSSVTAADTAVYYCARHDGAVAGLFDYWGQGTLVTVSSATRASTKGPSVFPLAPSSKSTSGGTAALGCLVKDYFPEPVTVSWNSGALTSGVHTFPAVLQSSGLYSLSSVVTVPSSSLGTQTYICNVNHKPSNTKVDKRVEPKSCEVKTDSTDHVKPKETENTKQPSKSCHKPKAIVHTEKVNMMSLTVLGLRMLFAKTVAVNFLLTAKLFFL

SEQ ID NO: 18228 - protein, 765 aa, Artificial Sequence
  Synthetic Polypeptide
MALPVTALLLPLALLLHAARPEVQLVESGGGLVQPGGSLRLSCAASGFSFSDFWMSWVRQAPGKGLEWVATISQAGSEKDYVDSVKGRFTISRDNAKKSLYLQMNSLRAEDTAVYYCASGVYSFDYRGQGTLVTVSSGTGGGGSGGGGSGGGGSEFSYVLTQPPSVSVAPGQTARITCGGNNIGSKSVHWYQQPPGQAPVVVVYDDSDRPSGIPERFSGSNSGNTATLTISRVEAGDEAVYYCQVWDSSSDHVVFGGGTKLTVLLEGQPKANPTVTLFPPSSEELQANKATLVCLISDFYPGAVTVAWKADGSPVKAGVETTKPSKQSNNKYAASSYLSLTPEQWKSHRSYSCQVTHEGSTVEKTVAPTECSGRADCGFTSESYQQGVLSATILYEILLGKATLYAVLVSALVLMAMVKRKDSRGRAKRSGSGVKQTLNFDLLKLAGDVESNPGPTSMDWIWRILFLVGAATGAHSFEQLQLQESGPGLVKPSETLSLTCTVSGGSISSGSYIWGWIRQPPGKGLEWIGSIYYSGITYYNPSLKSRVTISVDTSKNQFSLKLSSVTAADTAVYYCARHDGAVAGLFDYWGQGTLVTVSSATRASTKGPSVFPLAPSSKSTSGGTAALGCLVKDYFPEPVTVSWNSGALTSGVHTFPAVLQSSGLYSLSSVVTVPSSSLGTQTYICNVNHKPSNTKVDKRVEPKSCIPEDTFFPSPESSCDVKLVEKSFETDTNLNFQNLSVIGFRILLLKVAGFNLLMTLRLWSS

SEQ ID NO: 18229 - protein, 899 aa, Artificial Sequence
  Synthetic Polypeptide
MALPVTALLLPLALLLHAARPEVQLVESGGGLVQPGGSLRLSCAASGFSFSDFWMSWVRQAPGKGLEWVATISQAGSEKDYVDSVKGRFTISRDNAKKSLYLQMNSLRAEDTAVYYCASGVYSFDYRGQGTLVTVSSGTGGGGSGGGGSGGGGSEFSYVLTQPPSVSVAPGQTARITCGGNNIGSKSVHWYQQPPGQAPVVVVYDDSDRPSGIPERFSGSNSGNTATLTISRVEAGDEAVYYCQVWDSSSDHVVFGGGTKLTVLLEIQNPDPAVYQLRDSKSSDKSVCLFTDFDSQTNVSQSKDSDVYITDKCVLDMRSMDFKSNSAVAWSNKSDFACANAFNNSIIPEDTFFPSPESSCDVKLVEKSFETDTNLNFQNLSVIGFRILLLKVAGFNLLMTLRLWSSRAKRSGSGVKQTLNFDLLKLAGDVESNPGPTSMDWIWRILFLVGAATGAHSGPQLQLQESGPGLVKPSETLSLTCTVSGDSISSGDYYWGWIRQPPGKGLEWIGHIYYSGVTYYNPSLKSRVTISVDTSRNQFSLKLSSVTAADTAVYYCTREDSSNWRSRGQGTLVTVSSGSGGGGSGGGGSGGGGSFEQLQLQESGPGLVKPSETLSLTCTVSGGSISSGSYIWGWIRQPPGKGLEWIGSIYYSGITYYNPSLKSRVTISVDTSKNQFSLKLSSVTAADTAVYYCARHDGAVAGLFDYWGQGTLVTVSSATREDLKNVFPPEVAVFEPSEAEISHTQKATLVCLATGFYPDHVELSWWVNGKEVHSGVCTDPQPLKEQPALNDSRYCLSSRLRVSATFWQNPRNHFRCQVQFYGLSENDEWTQDRAKPVTQIVSAEAWGRADCGFTSESYQQGVLSATILYEILLGKATLYAVLVSALVLMAMVKRKDSRG

SEQ ID NO: 18230 - protein, 1091 aa, Artificial Sequence
  Synthetic Polypeptide
MALPVTALLLPLALLLHAARPEVQLVESGGGLVQPGGSLRLSCAASGFSFSDFWMSWVRQAPGKGLEWVATISQAGSEKDYVDSVKGRFTISRDNAKKSLYLQMNSLRAEDTAVYYCASGVYSFDYRGQGTLVTVSSGTGGGGSGGGGSGGGGSEFSYVLTQPPSVSVAPGQTARITCGGNNIGSKSVHWYQQPPGQAPVVVVYDDSDRPSGIPERFSGSNSGNTATLTISRVEAGDEAVYYCQVWDSSSDHVVFGGGTKLTVLLEDLKNVFPPEVAVFEPSEAEISHTQKATLVCLATGFYPDHVELSWWVNGKEVHSGVSTDPQPLKEQPALNDSRYCLSSRLRVSATFWQNPRNHFRCQVQFYGLSENDEWTQDRAKPVTQIVSAEAWGRADCGSQSFGLLDPKLCYLLDGILFIYGVILTALFLRVKFSRSADAPAYQQGQNQLYNELNLGRREEYDVLDKRRGRDPEMGGKPQRRKNPQEGLYNELQKDKMAEAYSEIGMKGERRRGKGHDGLYQGLSTATKDTYDALHMQALPPRRAKRSGSGATNFSLLKQAGDVEENPGPTSMDWIWRILFLVGAATGAHSGPQLQLQESGPGLVKPSETLSLTCTVSGDSISSGDYYWGWIRQPPGKGLEWIGHIYYSGVTYYNPSLKSRVTISVDTSRNQFSLKLSSVTAADTAVYYCTREDSSNWRSRGQGTLVTVSSGSGGGGSGGGGSGGGGSFEQLQLQESGPGLVKPSETLSLTCTVSGGSISSGSYIWGWIRQPPGKGLEWIGSIYYSGITYYNPSLKSRVTISVDTSKNQFSLKLSSVTAADTAVYYCARHDGAVAGLFDYWGQGTLVTVSSATRIQNPDPAVYQLRDSKSSDKSVCLFTDFDSQTNVSQSKDSDVYITDKTVLDMRSMDFKSNSAVAWSNKSDFACANAFNNSIIPEDTFFPSPESSCGTQSFGLLDPKLCYLLDGILFIYGVILTALFLRVKFSRSADAPAYQQGQNQLYNELNLGRREEYDVLDKRRGRDPEMGGKPQRRKNPQEGLYNELQKDKMAEAYSEIGMKGERRRGKGHDGLYQGLSTATKDTYDALHMQALPPR

SEQ ID NO: 18231 - protein, 921 aa, Artificial Sequence
  Synthetic Polypeptide
MALPVTALLLPLALLLHAARPEVQLVESGGGLVQPGGSLRLSCAASGFSFSDFWMSWVRQAPGKGLEWVATISQAGSEKDYVDSVKGRFTISRDNAKKSLYLQMNSLRAEDTAVYYCASGVYSFDYRGQGTLVTVSSGTGGGGSGGGGSGGGGSEFSYVLTQPPSVSVAPGQTARITCGGNNIGSKSVHWYQQPPGQAPVVVVYDDSDRPSGIPERFSGSNSGNTATLTISRVEAGDEAVYYCQVWDSSSDHVVFGGGTKLTVLLEGQPKANPTVTLFPPSSEELQANKATLVCLISDFYPGAVTVAWKADGSPVKAGVETTKPSKQSNNKYAASSYLSLTPEQWKSHRSYSCQVTHEGSTVEKTVAPTECSPIKTDVITMDPKDNCSKDANDTLLLQLTNTSAYYMYLLLLLKSVVYFAIITCCLLRRTAFCCNGEKSRAKRSGSGATNFSLLKQAGDVEENPGPTSMDWIWRILFLVGAATGAHSGPQLQLQESGPGLVKPSETLSLTCTVSGDSISSGDYYWGWIRQPPGKGLEWIGHIYYSGVTYYNPSLKSRVTISVDTSRNQFSLKLSSVTAADTAVYYCTREDSSNWRSRGQGTLVTVSSGSGGGGSGGGGSGGGGSFEQLQLQESGPGLVKPSETLSLTCTVSGGSISSGSYIWGWIRQPPGKGLEWIGSIYYSGITYYNPSLKSRVTISVDTSKNQFSLKLSSVTAADTAVYYCARHDGAVAGLFDYWGQGTLVTVSSATRASTKGPSVFPLAPSSKSTSGGTAALGCLVKDYFPEPVTVSWNSGALTSGVHTFPAVLQSSGLYSLSSVVTVPSSSLGTQTYICNVNHKPSNTKVDKRVEPKSCEVKTDSTDHVKPKETENTKQPSKSCHKPKAIVHTEKVNMMSLTVLGLRMLFAKTVAVNFLLTAKLFFL

SEQ ID NO: 18232 - protein, 902 aa, Artificial Sequence
  Synthetic Polypeptide
MALPVTALLLPLALLLHAARPEVQLVESGGGLVQPGGSLRLSCAASGFSFSDFWMSWVRQAPGKGLEWVATISQAGSEKDYVDSVKGRFTISRDNAKKSLYLQMNSLRAEDTAVYYCASGVYSFDYRGQGTLVTVSSGTGGGGSGGGGSGGGGSEFSYVLTQPPSVSVAPGQTARITCGGNNIGSKSVHWYQQPPGQAPVVVVYDDSDRPSGIPERFSGSNSGNTATLTISRVEAGDEAVYYCQVWDSSSDHVVFGGGTKLTVLLEGQPKANPTVTLFPPSSEELQANKATLVCLISDFYPGAVTVAWKADGSPVKAGVETTKPSKQSNNKYAASSYLSLTPEQWKSHRSYSCQVTHEGSTVEKTVAPTECSGRADCGFTSESYQQGVLSATILYEILLGKATLYAVLVSALVLMAMVKRKDSRGRAKRSGSGVKQTLNFDLLKLAGDVESNPGPTSMDWIWRILFLVGAATGAHSGPQLQLQESGPGLVKPSETLSLTCTVSGDSISSGDYYWGWIRQPPGKGLEWIGHIYYSGVTYYNPSLKSRVTISVDTSRNQFSLKLSSVTAADTAVYYCTREDSSNWRSRGQGTLVTVSSGSGGGGSGGGGSGGGGSFEQLQLQESGPGLVKPSETLSLTCTVSGGSISSGSYIWGWIRQPPGKGLEWIGSIYYSGITYYNPSLKSRVTISVDTSKNQFSLKLSSVTAADTAVYYCARHDGAVAGLFDYWGQGTLVTVSSATRASTKGPSVFPLAPSSKSTSGGTAALGCLVKDYFPEPVTVSWNSGALTSGVHTFPAVLQSSGLYSLSSVVTVPSSSLGTQTYICNVNHKPSNTKVDKRVEPKSCIPEDTFFPSPESSCDVKLVEKSFETDTNLNFQNLSVIGFRILLLKVAGFNLLMTLRLWSS

SEQ ID NO: 18233 - protein, 759 aa, Artificial Sequence
  Synthetic Polypeptide
MALPVTALLLPLALLLHAARPEVQVLESGGGLVQPGGSLRLSCAASGFTFSNFAMSWVRQAPGKGLEWVSTISGSAGTTDYADSVKGRFTISRDNSKKTLYLQMNSLRVEDTAVYYCADGRGPFFDYRGQGTLVTVSSGTGGGGSGGGGSGGGGSEFSYVLTQPPSVSVAPGQTARITCGGNNIGSKSVHWYQQPPGQAPVVVVYDDSDRPSGIPERFSGSNSGNTATLTISRVEAGDEAVYYCQVWDSSSDHVVFGGGTKLTVLLEDLKNVFPPEVAVFEPSEAEISHTQKATLVCLATGFYPDHVELSWWVNGKEVHSGVCTDPQPLKEQPALNDSRYCLSSRLRVSATFWQNPRNHFRCQVQFYGLSENDEWTQDRAKPVTQIVSAEAWGRADCGFTSESYQQGVLSATILYEILLGKATLYAVLVSALVLMAMVKRKDSRGRAKRSGSGATNFSLLKQAGDVEENPGPTSMDWIWRILFLVGAATGAHSFEQLQLQESGPGLVKPSETLSLTCTVSGGSISSGSYIWGWIRQPPGKGLEWIGSIYYSGITYYNPSLKSRVTISVDTSKNQFSLKLSSVTAADTAVYYCARHDGAVAGLFDYWGQGTLVTVSSATRIQNPDPAVYQLRDSKSSDKSVCLFTDFDSQTNVSQSKDSDVYITDKCVLDMRSMDFKSNSAVAWSNKSDFACANAFNNSIIPEDTFFPSPESSCDVKLVEKSFETDTNLNFQNLSVIGFRILLLKVAGFNLLMTLRLWSS

SEQ ID NO: 18234 - protein, 760 aa, Artificial Sequence
  Synthetic Polypeptide
MALPVTALLLPLALLLHAARPSYVLTQPPSVSVAPGQTARITCGGNNIGSKSVHWYQQPPGQAPVVVVYDDSDRPSGIPERFSGSNSGNTATLTISRVEAGDEAVYYCQVWDSSSDHVVFGGGTKLTVLLEDLKNVFPPEVAVFEPSEAEISHTQKATLVCLATGFYPDHVELSWWVNGKEVHSGVCTDPQPLKEQPALNDSRYCLSSRLRVSATFWQNPRNHFRCQVQFYGLSENDEWTQDRAKPVTQIVSAEAWGRADCGFTSESYQQGVLSATILYEILLGKATLYAVLVSALVLMAMVKRKDSRGRAKRSGSGATNFSLLKQAGDVEENPGPTSMDWIWRILFLVGAATGAHSGPEVQLVESGGGLVQAGGSLRLSCAASGRTFSMGWFRQAPGKEREFVAAITYSGGSPYYADSVKGRFTISRDNAKNTVYLQMNSLKPEDTAVYYCAANPTYGSDWNAENWGQGTQVTVSSGSGGGGSGGGGSGGGGSFEQLQLQESGPGLVKPSETLSLTCTVSGGSISSGSYIWGWIRQPPGKGLEWIGSIYYSGITYYNPSLKSRVTISVDTSKNQFSLKLSSVTAADTAVYYCARHDGAVAGLFDYWGQGTLVTVSSATRIQNPDPAVYQLRDSKSSDKSVCLFTDFDSQTNVSQSKDSDVYITDKCVLDMRSMDFKSNSAVAWSNKSDFACANAFNNSIIPEDTFFPSPESSCDVKLVEKSFETDTNLNFQNLSVIGFRILLLKVAGFNLLMTLRLWSS

SEQ ID NO: 18235 - protein, 887 aa, Artificial Sequence
  Synthetic Polypeptide
MALPVTALLLPLALLLHAARPSYVLTQPPSVSVAPGQTARITCGGNNIGSKSVHWYQQPPGQAPVVVVYDDSDRPSGIPERFSGSNSGNTATLTISRVEAGDEAVYYCQVWDSSSDHVVFGGGTKLTVLLEDLKNVFPPEVAVFEPSEAEISHTQKATLVCLATGFYPDHVELSWWVNGKEVHSGVCTDPQPLKEQPALNDSRYCLSSRLRVSATFWQNPRNHFRCQVQFYGLSENDEWTQDRAKPVTQIVSAEAWGRADCGFTSESYQQGVLSATILYEILLGKATLYAVLVSALVLMAMVKRKDSRGRAKRSGSGATNFSLLKQAGDVEENPGPTSMDWIWRILFLVGAATGAHSQLQLQESGPGLVKPSETLSLTCTVSGGSISSGDYYWGWIRQPPGKGLEWIGSISYSGSTYYNPSLKSRVTISVDTSRNQFSLKLSSVTAADTAVYYCTREDSSNWRSRGQGTLVTVSSSGGGGSGGGGSEVQLVESGGGLVQAGGSLRLSCAASGRTFSMGWFRQAPGKEREFVAAITYSGGSPYYADSVKGRFTISRDNAKNTVYLQMNSLKPEDTAVYYCAANPTYGSDWNAENWGQGTQVTVSSGSGGGGSGGGGSGGGGSFEQLQLQESGPGLVKPSETLSLTCTVSGGSISSGSYIWGWIRQPPGKGLEWIGSIYYSGITYYNPSLKSRVTISVDTSKNQFSLKLSSVTAADTAVYYCARHDGAVAGLFDYWGQGTLVTVSSATRIQNPDPAVYQLRDSKSSDKSVCLFTDFDSQTNVSQSKDSDVYITDKCVLDMRSMDFKSNSAVAWSNKSDFACANAFNNSIIPEDTFFPSPESSCDVKLVEKSFETDTNLNFQNLSVIGFRILLLKVAGFNLLMTLRLWSS

SEQ ID NO: 18236 - protein, 896 aa, Artificial Sequence
  Synthetic Polypeptide
MALPVTALLLPLALLLHAARPEVQVLESGGGLVQPGGSLRLSCAASGFTFSNFAMSWVRQAPGKGLEWVSTISGSAGTTDYADSVKGRFTISRDNSKKTLYLQMNSLRVEDTAVYYCADGRGPFFDYRGQGTLVTVSSGTGGGGSGGGGSGGGGSEFSYVLTQPPSVSVAPGQTARITCGGNNIGSKSVHWYQQPPGQAPVVVVYDDSDRPSGIPERFSGSNSGNTATLTISRVEAGDEAVYYCQVWDSSSDHVVFGGGTKLTVLLEDLKNVFPPEVAVFEPSEAEISHTQKATLVCLATGFYPDHVELSWWVNGKEVHSGVCTDPQPLKEQPALNDSRYCLSSRLRVSATFWQNPRNHFRCQVQFYGLSENDEWTQDRAKPVTQIVSAEAWGRADCGFTSESYQQGVLSATILYEILLGKATLYAVLVSALVLMAMVKRKDSRGRAKRSGSGATNFSLLKQAGDVEENPGPTSMDWIWRILFLVGAATGAHSGPEVQLVESGGGLVQAGGSLRLSCAASGRTFSMGWFRQAPGKEREFVAAITYSGGSPYYASSVRGRFTISRDNAKNTVYLQMNSLKPEDTAVYYCAANPTYGSDWNAENWGQGTQVTVSSGSGGGGSGGGGSGGGGSFEQLQLQESGPGLVKPSETLSLTCTVSGGSISSGSYIWGWIRQPPGKGLEWIGSIYYSGITYYNPSLKSRVTISVDTSKNQFSLKLSSVTAADTAVYYCARHDGAVAGLFDYWGQGTLVTVSSATRIQNPDPAVYQLRDSKSSDKSVCLFTDFDSQTNVSQSKDSDVYITDKCVLDMRSMDFKSNSAVAWSNKSDFACANAFNNSIIPEDTFFPSPESSCDVKLVEKSFETDTNLNFQNLSVIGFRILLLKVAGFNLLMTLRLWSS

SEQ ID NO: 18237 - protein, 727 aa, Artificial Sequence
  Synthetic Polypeptide
MALPVTALLLPLALLLHAARPSYVLTQPPSVSVAPGQTARITCGGNNIGSKSVHWYQQPPGQAPVVVVYDDSDRPSGIPERFSGSNSGNTATLTISRVEAGDEAVYYCQVWDSSSDHVVFGGGTKLTVLGGGGSGGGGSGGGGSQLQLQESGPGLVKPSETLSLTCTVSGGSISSGSYFWGWIRQPPGKGLEWIGSIYYSGITYYNPSLKSRVTISVDTSKNQFSLKLSSVTAADTAVYYCARHDGAMAGLFDYWGQGTLVTVSSATREQKLISEEDLAKPTTTPAPRPPTPAPTIASQPLSLRPEACRPAAGGAVHTRGLDFACDIYIWAPLAGTCGVLLLSLVITLYCKRGRKKLLYIFKQPFMRPVQTTQEEDGCSCRFPEEEEGGCELRVKFSRSADAPAYQQGQNQLYNELNLGRREEYDVLDKRRGRDPEMGGKPRRKNPQEGLYNELQKDKMAEAYSEIGMKGERRRGKGHDGLYQGLSTATKDTYDALHMQALPPRSSGSGEGRGSLLTCGDVEENPGPHMTEYKPTVRLATRDDVPRAVRTLAAAFADYPATRHTVDPDRHIERVTELQELFLTRVGLDIGKVWVADDGAAVAVWTTPESVEAGAVFAEIGPRMAELSGSRLAAQQQMEGLLAPHRPKEPAWFLATVGVSPDHQGKGLGSAVVLPGVEAAERAGVPAFLETSAPRNLPFYERLGFTVTADVEVPEGPRTWCMTRKPGA

SEQ ID NO: 18238 - protein, 721 aa, Artificial Sequence
  Synthetic Polypeptide
MALPVTALLLPLALLLHAARPSYVLTQPPSVSVAPGQTARITCGGNNIGSKSVHWYQQPPGQAPVVVVYDDSDRPSGIPERFSGSNSGNTATLTISRVEAGDEAVYYCQVWDSSSDHVVFGGGTKLTVLGGGGSGGGGSGGGGSQLQLQESGPGLVKPSETLSLTCTVSGGSISSGSYFWGWIRQPPGKGLEWIGSIYYSGITYYNPSLKSRVTISVDTSKNQFSLKLSSVTAADTAVYYCARHDGAMAGLFDYWGQGTLVTVSSATREQKLISEEDLKIEVMYPPPYLDNEKSNGTIIHVKGKHLCPSPLFPGPSKPFWVLVVVGGVLACYSLLVTVAFIIFWVRSKRSRLLHSDYMNMTPRRPGPTRKHYQPYAPPRDFAAYRSRVKFSRSADAPAYQQGQNQLYNELNLGRREEYDVLDKRRGRDPEMGGKPRRKNPQEGLYNELQKDKMAEAYSEIGMKGERRRGKGHDGLYQGLSTATKDTYDALHMQALPPRSSGSGEGRGSLLTCGDVEENPGPHMTEYKPTVRLATRDDVPRAVRTLAAAFADYPATRHTVDPDRHIERVTELQELFLTRVGLDIGKVWVADDGAAVAVWTTPESVEAGAVFAEIGPRMAELSGSRLAAQQQMEGLLAPHRPKEPAWFLATVGVSPDHQGKGLGSAVVLPGVEAAERAGVPAFLETSAPRNLPFYERLGFTVTADVEVPEGPRTWCMTRKPGA

SEQ ID NO: 18239 - protein, 498 aa, Artificial Sequence
  Synthetic Polypeptide
MALPVTALLLPLALLLHAARPSYVLTQPPSVSVAPGQTARITCGGNNIGSKSVHWYQQPPGQAPVVVVYDDSDRPSGIPERFSGSNSGNTATLTISRVEAGDEAVYYCQVWDSSSDHVVFGGGTKLTVLGGGGSGGGGSGGGGSQLQLQESGPGLVKPSETLSLTCTVSGGSISSGSYFWGWIRQPPGKGLEWIGSIYYSGITYYNPSLKSRVTISVDTSKNQFSLKLSSVTAADTAVYYCARHDGAMAGLFDYWGQGTLVTVSSATREQKLISEEDLKIEVMYPPPYLDNEKSNGTIIHVKGKHLCPSPLFPGPSKPFWVLVVVGGVLACYSLLVTVAFIIFWVRSKRSRLLHSDYMNMTPRRPGPTRKHYQPYAPPRDFAAYRSRVKFSRSADAPAYQQGQNQLYNELNLGRREEYDVLDKRRGRDPEMGGKPRRKNPQEGLYNELQKDKMAEAYSEIGMKGERRRGKGHDGLYQGLSTATKDTYDALHMQALPPR

SEQ ID NO: 18240 - protein, 504 aa, Artificial Sequence
  Synthetic Polypeptide
MALPVTALLLPLALLLHAARPSYVLTQPPSVSVAPGQTARITCGGNNIGSKSVHWYQQPPGQAPVVVVYDDSDRPSGIPERFSGSNSGNTATLTISRVEAGDEAVYYCQVWDSSSDHVVFGGGTKLTVLGGGGSGGGGSGGGGSQLQLQESGPGLVKPSETLSLTCTVSGGSISSGSYFWGWIRQPPGKGLEWIGSIYYSGITYYNPSLKSRVTISVDTSKNQFSLKLSSVTAADTAVYYCARHDGAMAGLFDYWGQGTLVTVSSATREQKLISEEDLAKPTTTPAPRPPTPAPTIASQPLSLRPEACRPAAGGAVHTRGLDFACDIYIWAPLAGTCGVLLLSLVITLYCKRGRKKLLYIFKQPFMRPVQTTQEEDGCSCRFPEEEEGGCELRVKFSRSADAPAYQQGQNQLYNELNLGRREEYDVLDKRRGRDPEMGGKPRRKNPQEGLYNELQKDKMAEAYSEIGMKGERRRGKGHDGLYQGLSTATKDTYDALHMQALPPR

SEQ ID NO: 18241 - protein, 504 aa, Artificial Sequence
  Synthetic Polypeptide
MALPVTALLLPLALLLHAARPQLQLQESGPGLVKPSETLSLTCTVSGGSISSGSYFWGWIRQPPGKGLEWIGSIYYSGITYYNPSLKSRVTISVDTSKNQFSLKLSSVTAADTAVYYCARHDGAMAGLFDYWGQGTLVTVSSAGGGGSGGGGSGGGGSSYVLTQPPSVSVAPGQTARITCGGNNIGSKSVHWYQQPPGQAPVVVVYDDSDRPSGIPERFSGSNSGNTATLTISRVEAGDEAVYYCQVWDSSSDHVVFGGGTKLTVLTREQKLISEEDLAKPTTTPAPRPPTPAPTIASQPLSLRPEACRPAAGGAVHTRGLDFACDIYIWAPLAGTCGVLLLSLVITLYCKRGRKKLLYIFKQPFMRPVQTTQEEDGCSCRFPEEEEGGCELRVKFSRSADAPAYQQGQNQLYNELNLGRREEYDVLDKRRGRDPEMGGKPRRKNPQEGLYNELQKDKMAEAYSEIGMKGERRRGKGHDGLYQGLSTATKDTYDALHMQALPPR

SEQ ID NO: 18242 - protein, 917 aa, Artificial Sequence
  Synthetic Polypeptide
MALPVTALLLPLALLLHAARPSYVLTQPPSVSVAPGQTARITCGGNNIGSKSVHWYQQPPGQAPVVVVYDDSDRPSGIPERFSGSNSGNTATLTISRVEAGDEAVYYCQVWDSSSDHVVFGGGTKLTVLGGGGSGGGGSGGGGSQLQLQESGPGLVKPSETLSLTCTVSGGSISSGSYFWGWIRQPPGKGLEWIGSIYYSGITYYNPSLKSRVTISVDTSKNQFSLKLSSVTAADTAVYYCARHDGAMAGLFDYWGQGTLVTVSSATREQKLISEEDLAKPTTTPAPRPPTPAPTIASQPLSLRPEACRPAAGGAVHTRGLDFACDIYIWAPLAGTCGVLLLSLVITLYCGRARVKFSRSADAPAYQQGQNQLYNELNLGRREEYDVLDKRRGRDPEMGGKPRRKNPQEGLYNELQKDKMAEAYSEIGMKGERRRGKGHDGLYQGLSTATKDTYDALHMQALPPRSRGSGATNFSLLKQAGDVEENPGPGIHMATYEVLCEVARKLGTDDREVVLFLLNVFIPQPTLAQLIGALRALKEEGRLTFPLLAECLFRAGRRDLLRDLLHLDPRFLERHLAGTMSYFSPYQLTVLHVDGELCARDIRSLIFLSKDTIGSRSTPQTFLHWVYCMENLDLLGPTDVDALMSMLRSLSRVDLQRQVQTLMGLHLSGPSHSQHYRHTPLETDFYDYKDDDDKTSGSGEGRGSLLTCGDVEENPGPHMTEYKPTVRLATRDDVPRAVRTLAAAFADYPATRHTVDPDRHIERVTELQELFLTRVGLDIGKVWVADDGAAVAVWTTPESVEAGAVFAEIGPRMAELSGSRLAAQQQMEGLLAPHRPKEPAWFLATVGVSPDHQGKGLGSAVVLPGVEAAERAGVPAFLETSAPRNLPFYERLGFTVTADVEVPEGPRTWCMTRKPGA

SEQ ID NO: 18243 - protein, 857 aa, Artificial Sequence
  Synthetic Polypeptide
MALPVTALLLPLALLLHAARPSYVLTQPPSVSVAPGQTARITCGGNNIGSKSVHWYQQPPGQAPVVVVYDDSDRPSGIPERFSGSNSGNTATLTISRVEAGDEAVYYCQVWDSSSDHVVFGGGTKLTVLLEIQNPDPAVYQLRDSKSSDKSVCLFTDFDSQTNVSQSKDSDVYITDKCVLDMRSMDFKSNSAVAWSNKSDFACANAFNNSIIPEDTFFPSSDVPCDVKLVEKSFETDTNLNFQNLSVIGFRILLLKVAGFNLLMTLRLWSSRAKRSGSGVKQTLNFDLLKLAGDVESNPGPTSMDWIWRILFLVGAATGAHSFEQLQLQESGPGLVKPSETLSLTCTVSGGSISSGSYFWGWIRQPPGKGLEWIGSIYYSGITYYNPSLKSRVTISVDTSKNQFSLKLSSVTAADTAVYYCARHDGAMAGLFDYWGQGTLVTVSSATREDLKNVFPPEVAVFEPSKAEIAHTQKATLVCLATGFYPDHVELSWWVNGKEVHSGVCTDPQPLKEQPALNDSRYCLSSRLRVSATFWQNPRNHFRCQVQFYGLSENDEWTQDRAKPVTQIVSAEAWGRADCGITSASYHQGVLSATILYEILLGKATLYAVLVSALVLMAMVKRKDSRGRAKRSGSGATNFSLLKQAGDVEENPGPSRGHMTEYKPTVRLATRDDVPRAVRTLAAAFADYPATRHTVDPDRHIERVTELQELFLTRVGLDIGKVWVADDGAAVAVWTTPESVEAGAVFAEIGPRMAELSGSRLAAQQQMEGLLAPHRPKEPAWFLATVGVSPDHQGKGLGSAVVLPGVEAAERAGVPAFLETSAPRNLPFYERLGFTVTADVEVPEGPRTWCMTRKPGA

SEQ ID NO: 18244 - protein, 856 aa, Artificial Sequence
  Synthetic Polypeptide
MALPVTALLLPLALLLHAARPSYVLTQPPSVSVAPGQTARITCGGNNIGSKSVHWYQQPPGQAPVVVVYDDSDRPSGIPERFSGSNSGNTATLTISRVEAGDEAVYYCQVWDSSSDHVVFGGGTKLTVLLEDLKNVFPPEVAVFEPSKAEIAHTQKATLVCLATGFYPDHVELSWWVNGKEVHSGVCTDPQPLKEQPALNDSRYCLSSRLRVSATFWQNPRNHFRCQVQFYGLSENDEWTQDRAKPVTQIVSAEAWGRADCGITSASYHQGVLSATILYEILLGKATLYAVLVSALVLMAMVKRKDSRGRAKRSGSGATNFSLLKQAGDVEENPGPTSMDWIWRILFLVGAATGAHSFEQLQLQESGPGLVKPSETLSLTCTVSGGSISSGSYFWGWIRQPPGKGLEWIGSIYYSGITYYNPSLKSRVTISVDTSKNQFSLKLSSVTAADTAVYYCARHDGAMAGLFDYWGQGTLVTVSSATRIQNPDPAVYQLRDSKSSDKSVCLFTDFDSQTNVSQSKDSDVYITDKCVLDMRSMDFKSNSAVAWSNKSDFACANAFNNSIIPEDTFFPSSDVPCDVKLVEKSFETDTNLNFQNLSVIGFRILLLKVAGFNLLMTLRLWSSRAKRSGSGVKQTLNFDLLKLAGDVESNPGPSRGHMTEYKPTVRLATRDDVPRAVRTLAAAFADYPATRHTVDPDRHIERVTELQELFLTRVGLDIGKVWVADDGAAVAVWTTPESVEAGAVFAEIGPRMAELSGSRLAAQQQMEGLLAPHRPKEPAWFLATVGVSPDHQGKGLGSAVVLPGVEAAERAGVPAFLETSAPRNLPFYERLGFTVTADVEVPEGPRTWCMTRKPGA

SEQ ID NO: 18245 - protein, 623 aa, Artificial Sequence
  Synthetic Polypeptide
MALPVTALLLPLALLLHAARPSYVLTQPPSVSVAPGQTARITCGGNNIGSKSVHWYQQPPGQAPVVVVYDDSDRPSGIPERFSGSNSGNTATLTISRVEAGDEAVYYCQVWDSSSDHVVFGGGTKLTVLLEDLKNVFPPEVAVFEPSEAEISHTQKATLVCLATGFYPDHVELSWWVNGKEVHSGVCTDPQPLKEQPALNDSRYCLSSRLRVSATFWQNPRNHFRCQVQFYGLSENDEWTQDRAKPVTQIVSAEAWGRADCGFTSESYQQGVLSATILYEILLGKATLYAVLVSALVLMAMVKRKDSRGRAKRSGSGATNFSLLKQAGDVEENPGPTSMDWIWRILFLVGAATGAHSFEQLQLQESGPGLVKPSETLSLTCTVSGGSISSGSYFWGWIRQPPGKGLEWIGSIYYSGITYYNPSLKSRVTISVDTSKNQFSLKLSSVTAADTAVYYCARHDGAMAGLFDYWGQGTLVTVSSATRIQNPDPAVYQLRDSKSSDKSVCLFTDFDSQTNVSQSKDSDVYITDKCVLDMRSMDFKSNSAVAWSNKSDFACANAFNNSIIPEDTFFPSPESSCDVKLVEKSFETDTNLNFQNLSVIGFRILLLKVAGFNLLMTLRLWSS

SEQ ID NO: 18246 - protein, 848 aa, Artificial Sequence
  Synthetic Polypeptide
MALPVTALLLPLALLLHAARPSYVLTQPPSVSVAPGQTARITCGGNNIGSKSVHWYQQPPGQAPVVVVYDDSDRPSGIPERFSGSNSGNTATLTISRVEAGDEAVYYCQVWDSSSDHVVFGGGTKLTVLLEDLKNVFPPEVAVFEPSEAEISHTQKATLVCLATGFYPDHVELSWWVNGKEVHSGVCTDPQPLKEQPALNDSRYCLSSRLRVSATFWQNPRNHFRCQVQFYGLSENDEWTQDRAKPVTQIVSAEAWGRADCGFTSESYQQGVLSATILYEILLGKATLYAVLVSALVLMAMVKRKDSRGRAKRSGSGATNFSLLKQAGDVEENPGPTSMDWIWRILFLVGAATGAHSFEQLQLQESGPGLVKPSETLSLTCTVSGGSISSGSYFWGWIRQPPGKGLEWIGSIYYSGITYYNPSLKSRVTISVDTSKNQFSLKLSSVTAADTAVYYCARHDGAMAGLFDYWGQGTLVTVSSATRIQNPDPAVYQLRDSKSSDKSVCLFTDFDSQTNVSQSKDSDVYITDKCVLDMRSMDFKSNSAVAWSNKSDFACANAFNNSIIPEDTFFPSPESSCDVKLVEKSFETDTNLNFQNLSVIGFRILLLKVAGFNLLMTLRLWSSRAKRSGSGVKQTLNFDLLKLAGDVESNPGPSRGGIHTMATYEVLCEVARKLGTDDREVVLFLLNVFIPQPTLAQLIGALRALKEEGRLTFPLLAECLFRAGRRDLLRDLLHLDPRFLERHLAGTMSYFSPYQLTVLHVDGELCARDIRSLIFLSKDTIGSRSTPQTFLHWVYCMENLDLLGPTDVDALMSMLRSLSRVDLQRQVQTLMGLHLSGPSHSQHYRHTP

SEQ ID NO: 18247 - protein, 627 aa, Artificial Sequence
  Synthetic Polypeptide
MALPVTALLLPLALLLHAARPSYVLTQPPSVSVAPGQTARITCGGNNIGSKSVHWYQQPPGQAPVVVVYDDSDRPSGIPERFSGSNSGNTATLTISRVEAGDEAVYYCQVWDSSSDHVVFGGGTKLTVLLEIQNPDPAVYQLRDSKSSDKSVCLFTDFDSQTNVSQSKDSDVYITDKCVLDMRSMDFKSNSAVAWSNKSDFACANAFNNSIIPEDTFFPSPESSCDVKLVEKSFETDTNLNFQNLSVIGFRILLLKVAGFNLLMTLRLWSSRAKRSGSGVKQTLNFDLLKLAGDVESNPGPTSMDWIWRILFLVGAATGAHSFEQLQLQESGPGLVKPSETLSLTCTVSGGSISSGSYFWGWIRQPPGKGLEWIGSIYYSGITYYNPSLKSRVTISVDTSKNQFSLKLSSVTAADTAVYYCARHDGAMAGLFDYWGQGTLVTVSSATREDLKNVFPPEVAVFEPSEAEISHTQKATLVCLATGFYPDHVELSWWVNGKEVHSGVCTDPQPLKEQPALNDSRYCLSSRLRVSATFWQNPRNHFRCQVQFYGLSENDEWTQDRAKPVTQIVSAEAWGRADCGFTSESYQQGVLSATILYEILLGKATLYAVLVSALVLMAMVKRKDSRG

SEQ ID NO: 18248 - protein, 849 aa, Artificial Sequence
  Synthetic Polypeptide
MALPVTALLLPLALLLHAARPSYVLTQPPSVSVAPGQTARITCGGNNIGSKSVHWYQQPPGQAPVVVVYDDSDRPSGIPERFSGSNSGNTATLTISRVEAGDEAVYYCQVWDSSSDHVVFGGGTKLTVLLEIQNPDPAVYQLRDSKSSDKSVCLFTDFDSQTNVSQSKDSDVYITDKCVLDMRSMDFKSNSAVAWSNKSDFACANAFNNSIIPEDTFFPSPESSCDVKLVEKSFETDTNLNFQNLSVIGFRILLLKVAGFNLLMTLRLWSSRAKRSGSGVKQTLNFDLLKLAGDVESNPGPTSMDWIWRILFLVGAATGAHSFEQLQLQESGPGLVKPSETLSLTCTVSGGSISSGSYFWGWIRQPPGKGLEWIGSIYYSGITYYNPSLKSRVTISVDTSKNQFSLKLSSVTAADTAVYYCARHDGAMAGLFDYWGQGTLVTVSSATREDLKNVFPPEVAVFEPSEAEISHTQKATLVCLATGFYPDHVELSWWVNGKEVHSGVCTDPQPLKEQPALNDSRYCLSSRLRVSATFWQNPRNHFRCQVQFYGLSENDEWTQDRAKPVTQIVSAEAWGRADCGFTSESYQQGVLSATILYEILLGKATLYAVLVSALVLMAMVKRKDSRGRAKRSGSGATNFSLLKQAGDVEENPGPSRGGIHTMATYEVLCEVARKLGTDDREVVLFLLNVFIPQPTLAQLIGALRALKEEGRLTFPLLAECLFRAGRRDLLRDLLHLDPRFLERHLAGTMSYFSPYQLTVLHVDGELCARDIRSLIFLSKDTIGSRSTPQTFLHWVYCMENLDLLGPTDVDALMSMLRSLSRVDLQRQVQTLMGLHLSGPSHSQHYRHTP

SEQ ID NO: 18249 - protein, 901 aa, Artificial Sequence
  Synthetic Polypeptide
MALPVTALLLPLALLLHAARPLEGKPIPNPLLGLDSTGSGEDLKNVFPPEVAVFEPSKAEIAHTQKATLVCLATGFYPDHVELSWWVNGKEVHSGVCTDPQPLKEQPALNDSRYCLSSRLRVSATFWQNPRNHFRCQVQFYGLSENDEWTQDRAKPVTQIVSAEAWGRADCGITSASYHQGVLSATILYEILLGKATLYAVLVSALVLMAMVKRKDSRGRAKRSGSGATNFSLLKQAGDVEENPGPTSMALPVTALLLPLALLLHAARPSYVLTQPPSVSVAPGQTARITCGGNNIGSKSVHWYQQPPGQAPVVVVYDDSDRPSGIPERFSGSNSGNTATLTISRVEAGDEAVYYCQVWDSSSDHVVFGGGTKLTVLGGGGSGGGGSGGGGSQLQLQESGPGLVKPSETLSLTCTVSGGSISSGSYFWGWIRQPPGKGLEWIGSIYYSGITYYNPSLKSRVTISVDTSKNQFSLKLSSVTAADTAVYYCARHDGAMAGLFDYWGQGTLVTVSSATREQKLISEEDGSGIQNPDPAVYQLRDSKSSDKSVCLFTDFDSQTNVSQSKDSDVYITDKCVLDMRSMDFKSNSAVAWSNKSDFACANAFNNSIIPEDTFFPSSDVPCDVKLVEKSFETDTNLNFQNLSVIGFRILLLKVAGFNLLMTLRLWSSRAKRSGSGVKQTLNFDLLKLAGDVESNPGPSRGHMTEYKPTVRLATRDDVPRAVRTLAAAFADYPATRHTVDPDRHIERVTELQELFLTRVGLDIGKVWVADDGAAVAVWTTPESVEAGAVFAEIGPRMAELSGSRLAAQQQMEGLLAPHRPKEPAWFLATVGVSPDHQGKGLGSAVVLPGVEAAERAGVPAFLETSAPRNLPFYERLGFTVTADVEVPEGPRTWCMTRKPGA

SEQ ID NO: 18250 - protein, 902 aa, Artificial Sequence
  Synthetic Polypeptide
MALPVTALLLPLALLLHAARPLEQKLISEEDLGSGDRPDPAVYQLRDSKSSDKSVCLFTDFDSQTNVSQSKDSDVYITDKCVLDMRSMDFKSNSAVAWSNKSDFACANAFNNSIIPEDTFFPSPESSCDVKLVEKSFETDTNLNFQNLSVIGFRILLLKVAGFNLLMTLRLWSSSSRAKRSGSGVKQTLNFDLLKLAGDVESNPGPTSMALPVTALLLPLALLLHAARPSYVLTQPPSVSVAPGQTARITCGGNNIGSKSVHWYQQPPGQAPVVVVYDDSDRPSGIPERFSGSNSGNTATLTISRVEAGDEAVYYCQVWDSSSDHVVFGGGTKLTVLGGGGSGGGGSGGGGSQLQLQESGPGLVKPSETLSLTCTVSGGSISSGSYFWGWIRQPPGKGLEWIGSIYYSGITYYNPSLKSRVTISVDTSKNQFSLKLSSVTAADTAVYYCARHDGAMAGLFDYWGQGTLVTVSSATRGKPIPNPLLGLDSTGSGEDLKNVFPPEVAVFEPSEAEISHTQKATLVCLATGFYPDHVELSWWVNGKEVHSGVCTDPQPLKEQPALNDSRYCLSSRLRVSATFWQNPRNHFRCQVQFYGLSENDEWTQDRAKPVTQIVSAEAWGRADCGFTSESYQQGVLSATILYEILLGKATLYAVLVSALVLMAMVKRKDSRGRAKRSGSGATNFSLLKQAGDVEENPGPSRGHMTEYKPTVRLATRDDVPRAVRTLAAAFADYPATRHTVDPDRHIERVTELQELFLTRVGLDIGKVWVADDGAAVAVWTTPESVEAGAVFAEIGPRMAELSGSRLAAQQQMEGLLAPHRPKEPAWFLATVGVSPDHQGKGLGSAVVLPGVEAAERAGVPAFLETSAPRNLPFYERLGFTVTADVEVPEGPRTWCMTRKPGA

SEQ ID NO: 18251 - protein, 856 aa, Artificial Sequence
  Synthetic Polypeptide
MALPVTALLLPLALLLHAARPSYVLTQPPSVSVAPGQTARITCGGNNIGSKSVHWYQQPPGQAPVVVVYDDSDRPSGIPERFSGSNSGNTATLTISRVEAGDEAVYYCQVWDSSSDHVVFGGGTKLTVLLEDLKNVFPPEVAVFEPSEAEISHTQKATLVCLATGFYPDHVELSWWVNGKEVHSGVSTDPQPLKEQPALNDSRYCLSSRLRVSATFWQNPRNHFRCQVQFYGLSENDEWTQDRAKPVTQIVSAEAWGRADCGFTSESYQQGVLSATILYEILLGKATLYAVLVSALVLMAMVKRKDSRGRAKRSGSGATNFSLLKQAGDVEENPGPTSMDWIWRILFLVGAATGAHSFEQLQLQESGPGLVKPSETLSLTCTVSGGSISSGSYFWGWIRQPPGKGLEWIGSIYYSGITYYNPSLKSRVTISVDTSKNQFSLKLSSVTAADTAVYYCARHDGAMAGLFDYWGQGTLVTVSSATRIQNPDPAVYQLRDSKSSDKSVCLFTDFDSQTNVSQSKDSDVYITDKTVLDMRSMDFKSNSAVAWSNKSDFACANAFNNSIIPEDTFFPSPESSCDVKLVEKSFETDTNLNFQNLSVIGFRILLLKVAGFNLLMTLRLWSSRAKRSGSGVKQTLNFDLLKLAGDVESNPGPSRGHMTEYKPTVRLATRDDVPRAVRTLAAAFADYPATRHTVDPDRHIERVTELQELFLTRVGLDIGKVWVADDGAAVAVWTTPESVEAGAVFAEIGPRMAELSGSRLAAQQQMEGLLAPHRPKEPAWFLATVGVSPDHQGKGLGSAVVLPGVEAAERAGVPAFLETSAPRNLPFYERLGFTVTADVEVPEGPRTWCMTRKPGA

SEQ ID NO: 18252 - protein, 938 aa, Artificial Sequence
  Synthetic Polypeptide
MALPVTALLLPLALLLHAARPSYVLTQPPSVSVAPGQTARITCGGNNIGSKSVHWYQQPPGQAPVVVVYDDSDRPSGIPERFSGSNSGNTATLTISRVEAGDEAVYYCQVWDSSSDHVVFGGGTKLTVLLEDLKNVFPPEVAVFEPSEAEISHTQKATLVCLATGFYPDHVELSWWVNGKEVHSGVSTDPQPLKEQPALNDSRYCLSSRLRVSATFWQNPRNHFRCQVQFYGLSENDEWTQDRAKPVTQIVSAEAWGRADCGFTSESYQQGVLSATILYEILLGKATLYAVLVSALVLMAMVKRKDSRGRAKRSGSGATNFSLLKQAGDVEENPGPTSMDWIWRILFLVGAATGAHSFEQLQLQESGPGLVKPSETLSLTCTVSGGSISSGSYFWGWIRQPPGKGLEWIGSIYYSGITYYNPSLKSRVTISVDTSKNQFSLKLSSVTAADTAVYYCARHDGAMAGLFDYWGQGTLVTVSSATREQKLISEEDGSGTPFPSLAPPIMLLVDGKQQMVVVCLVLDVAPPGLDSPIWFSAGNGSALDAFTYGPSPATDGTWTNLAHLSLPSEELASWEPLVCHTGPGAEGHSRSTQPMHLSGEASTARTCPQEPLRGTPGGALWLGVLRLLLFKLLLFDLLLTCSCLCDPAGPLPSPATTTRLRALGSHRLHPATETGGREATSSPRPQPRDRRWGDTPPGRKPGSPVRAKRSGSGVKQTLNFDLLKLAGDVESNPGPSRGHMTEYKPTVRLATRDDVPRAVRTLAAAFADYPATRHTVDPDRHIERVTELQELFLTRVGLDIGKVWVADDGAAVAVWTTPESVEAGAVFAEIGPRMAELSGSRLAAQQQMEGLLAPHRPKEPAWFLATVGVSPDHQGKGLGSAVVLPGVEAAERAGVPAFLETSAPRNLPFYERLGFTVTADVEVPEGPRTWCMTRKPGA

SEQ ID NO: 18253 - protein, 956 aa, Artificial Sequence
  Synthetic Polypeptide
MALPVTALLLPLALLLHAARPLEDLKNVFPPEVAVFEPSEAEISHTQKATLVCLATGFYPDHVELSWWVNGKEVHSGVSTDPQPLKEQPALNDSRYCLSSRLRVSATFWQNPRNHFRCQVQFYGLSENDEWTQDRAKPVTQIVSAEAWGRADCGFTSESYQQGVLSATILYEILLGKATLYAVLVSALVLMAMVKRKDSRGRAKRSGSGATNFSLLKQAGDVEENPGPTSMALPVTALLLPLALLLHAARPSYVLTQPPSVSVAPGQTARITCGGNNIGSKSVHWYQQPPGQAPVVVVYDDSDRPSGIPERFSGSNSGNTATLTISRVEAGDEAVYYCQVWDSSSDHVVFGGGTKLTVLGGGGSGGGGSGGGGSQLQLQESGPGLVKPSETLSLTCTVSGGSISSGSYFWGWIRQPPGKGLEWIGSIYYSGITYYNPSLKSRVTISVDTSKNQFSLKLSSVTAADTAVYYCARHDGAMAGLFDYWGQGTLVTVSSATREQKLISEEDLGSGTPFPSLAPPIMLLVDGKQQMVVVCLVLDVAPPGLDSPIWFSAGNGSALDAFTYGPSPATDGTWTNLAHLSLPSEELASWEPLVCHTGPGAEGHSRSTQPMHLSGEASTARTCPQEPLRGTPGGALWLGVLRLLLFKLLLFDLLLTCSCLCDPAGPLPSPATTTRLRALGSHRLHPATETGGREATSSPRPQPRDRRWGDTPPGRKPGSPVRAKRSGSGVKQTLNFDLLKLAGDVESNPGPSRSRGHMTEYKPTVRLATRDDVPRAVRTLAAAFADYPATRHTVDPDRHIERVTELQELFLTRVGLDIGKVWVADDGAAVAVWTTPESVEAGAVFAEIGPRMAELSGSRLAAQQQMEGLLAPHRPKEPAWFLATVGVSPDHQGKGLGSAVVLPGVEAAERAGVPAFLETSAPRNLPFYERLGFTVTADVEVPEGPRTWCMTRKPGA

SEQ ID NO: 18254 - protein, 893 aa, Artificial Sequence
  Synthetic Polypeptide
MALPVTALLLPLALLLHAARPSYVLTQPPSVSVAPGQTARITCGGNNIGSKSVHWYQQPPGQAPVVVVYDDSDRPSGIPERFSGSNSGNTATLTISRVEAGDEAVYYCQVWDSSSDHVVFGGGTKLTVLLEGKPIPNPLLGLDSTGSGDKQLDADVSPKPTIFLPSIAETKLQKAGTYLCLLEKFFPDVIKIHWQEKKSNTILGSQEGNTMKTNDTYMKFSWLTVPEKSLDKEHRCIVRHENNKNGVDQEIIFPPIKTDVITMDPKDNCSKDANDTLLLQLTNTSAYYMYLLLLLKSVVYFAIITCCLLRRTAFCCNGEKSRAKRSGSGATNFSLLKQAGDVEENPGPTSMDWIWRILFLVGAATGAHSFEQLQLQESGPGLVKPSETLSLTCTVSGGSISSGSYFWGWIRQPPGKGLEWIGSIYYSGITYYNPSLKSRVTISVDTSKNQFSLKLSSVTAADTAVYYCARHDGAMAGLFDYWGQGTLVTVSSATREQKLISEEDGSGSQPHTKPSVFVMKNGTNVACLVKEFYPKDIRINLVSSKKITEFDPAIVISPSGKYNAVKLGKYEDSNSVTCSVQHDNKTVHSTDFEVKTDSTDHVKPKETENTKQPSKSCHKPKAIVHTEKVNMMSLTVLGLRMLFAKTVAVNFLLTAKLFFLRAKRSGSGVKQTLNFDLLKLAGDVESNPGPSRGHMTEYKPTVRLATRDDVPRAVRTLAAAFADYPATRHTVDPDRHIERVTELQELFLTRVGLDIGKVWVADDGAAVAVWTTPESVEAGAVFAEIGPRMAELSGSRLAAQQQMEGLLAPHRPKEPAWFLATVGVSPDHQGKGLGSAVVLPGVEAAERAGVPAFLETSAPRNLPFYERLGFTVTADVEVPEGPRTWCMTRKPGA

SEQ ID NO: 18255 - protein, 631 aa, Artificial Sequence
  Synthetic Polypeptide
MALPVTALLLPLALLLHAARPSYVLTQPPSVSVAPGQTARITCGGNNIGSKSVHWYQQPPGQAPVVVVYDDSDRPSGIPERFSGSNSGNTATLTISRVEAGDEAVYYCQVWDSSSDHVVFGGGTKLTVLLESQPHTKPSVFVMKNGTNVACLVKEFYPKDIRINLVSSKKITEFDPAIVISPSGKYNAVKLGKYEDSNSVTCSVQHDNKTVHSTDFEVKTDSTDHVKPKETENTKQPSKSCHKPKAIVHTEKVNMMSLTVLGLRMLFAKTVAVNFLLTAKLFFLRAKRSGSGATNFSLLKQAGDVEENPGPTSMDWIWRILFLVGAATGAHSFEQLQLQESGPGLVKPSETLSLTCTVSGGSISSGSYFWGWIRQPPGKGLEWIGSIYYSGITYYNPSLKSRVTISVDTSKNQFSLKLSSVTAADTAVYYCARHDGAMAGLFDYWGQGTLVTVSSATRDKQLDADVSPKPTIFLPSIAETKLQKAGTYLCLLEKFFPDVIKIHWQEKKSNTILGSQEGNTMKTNDTYMKFSWLTVPEKSLDKEHRCIVRHENNKNGVDQEIIFPPIKTDVITMDPKDNCSKDANDTLLLQLTNTSAYYMYLLLLLKSVVYFAIITCCLLRRTAFCCNGEKS

SEQ ID NO: 18256 - protein, 908 aa, Artificial Sequence
  Synthetic Polypeptide
MALPVTALLLPLALLLHAARPLEGKPIPNPLLGLDSTGSGDKQLDADVSPKPTIFLPSIAETKLQKAGTYLCLLEKFFPDVIKIHWQEKKSNTILGSQEGNTMKTNDTYMKFSWLTVPEKSLDKEHRCIVRHENNKNGVDQEIIFPPIKTDVITMDPKDNCSKDANDTLLLQLTNTSAYYMYLLLLLKSVVYFAIITCCLLRRTAFCCNGEKSRAKRSGSGATNFSLLKQAGDVEENPGPTSMALPVTALLLPLALLLHAARPSYVLTQPPSVSVAPGQTARITCGGNNIGSKSVHWYQQPPGQAPVVVVYDDSDRPSGIPERFSGSNSGNTATLTISRVEAGDEAVYYCQVWDSSSDHVVFGGGTKLTVLGGGGSGGGGSGGGGSQLQLQESGPGLVKPSETLSLTCTVSGGSISSGSYFWGWIRQPPGKGLEWIGSIYYSGITYYNPSLKSRVTISVDTSKNQFSLKLSSVTAADTAVYYCARHDGAMAGLFDYWGQGTLVTVSSATREQKLISEEDGSGSQPHTKPSVFVMKNGTNVACLVKEFYPKDIRINLVSSKKITEFDPAIVISPSGKYNAVKLGKYEDSNSVTCSVQHDNKTVHSTDFEVKTDSTDHVKPKETENTKQPSKSCHKPKAIVHTEKVNMMSLTVLGLRMLFAKTVAVNFLLTAKLFFLRAKRSGSGVKQTLNFDLLKLAGDVESNPGPSRGHMTEYKPTVRLATRDDVPRAVRTLAAAFADYPATRHTVDPDRHIERVTELQELFLTRVGLDIGKVWVADDGAAVAVWTTPESVEAGAVFAEIGPRMAELSGSRLAAQQQMEGLLAPHRPKEPAWFLATVGVSPDHQGKGLGSAVVLPGVEAAERAGVPAFLETSAPRNLPFYERLGFTVTADVEVPEGPRTWCMTRKPGA

SEQ ID NO: 18257 - protein, 1033 aa, Artificial Sequence
  Synthetic Polypeptide
MALPVTALLLPLALLLHAARPSYVLTQPPSVSVAPGQTARITCGGNNIGSKSVHWYQQPPGQAPVVVVYDDSDRPSGIPERFSGSNSGNTATLTISRVEAGDEAVYYCQVWDSSSDHVVFGGGTKLTVLGQPKANPTVTLFPPSSEELQANKATLVCLISDFYPGAVTVAWKADGSPVKAGVETTKPSKQSNNKYAASSYLSLTPEQWKSHRSYSCQVTHEGSTVEKTVAPTECSGSQSFGLLDPKLCYLLDGILFIYGVILTALFLRVKFSRSADAPAYQQGQNQLYNELNLGRREEYDVLDKRRGRDPEMGGKPQRRKNPQEGLYNELQKDKMAEAYSEIGMKGERRRGKGHDGLYQGLSTATKDTYDALHMQALPPRRAKRSGSGATNFSLLKQAGDVEENPGPTSMDWIWRILFLVGAATGAHSFEQLQLQESGPGLVKPSETLSLTCTVSGGSISSGSYFWGWIRQPPGKGLEWIGSIYYSGITYYNPSLKSRVTISVDTSKNQFSLKLSSVTAADTAVYYCARHDGAMAGLFDYWGQGTLVTVSSAASTKGPSVFPLAPSSKSTSGGTAALGCLVKDYFPEPVTVSWNSGALTSGVHTFPAVLQSSGLYSLSSVVTVPSSSLGTQTYICNVNHKPSNTKVDKRVEPKSCGTQSFGLLDPKLCYLLDGILFIYGVILTALFLRVKFSRSADAPAYQQGQNQLYNELNLGRREEYDVLDKRRGRDPEMGGKPQRRKNPQEGLYNELQKDKMAEAYSEIGMKGERRRGKGHDGLYQGLSTATKDTYDALHMQALPPRRAKRSGSGVKQTLNFDLLKLAGDVESNPGPSRGHMTEYKPTVRLATRDDVPRAVRTLAAAFADYPATRHTVDPDRHIERVTELQELFLTRVGLDIGKVWVADDGAAVAVWTTPESVEAGAVFAEIGPRMAELSGSRLAAQQQMEGLLAPHRPKEPAWFLATVGVSPDHQGKGLGSAVVLPGVEAAERAGVPAFLETSAPRNLPFYERLGFTVTADVEVPEGPRTWCMTRKPGA

SEQ ID NO: 18258 - protein, 819 aa, Artificial Sequence
  Synthetic Polypeptide
MALPVTALLLPLALLLHAARPSYVLTQPPSVSVAPGQTARITCGGNNIGSKSVHWYQQPPGQAPVVVVYDDSDRPSGIPERFSGSNSGNTATLTISRVEAGDEAVYYCQVWDSSSDHVVFGGGTKLTVLLEDLKNVFPPEVAVFEPSEAEISHTQKATLVCLATGFYPDHVELSWWVNGKEVHSGVSTDPQPLKEQPALNDSRYCLSSRLRVSATFWQNPRNHFRCQVQFYGLSENDEWTQDRAKPVTQIVSAEAWGRADCGSQSFGLLDPKLCYLLDGILFIYGVILTALFLRVKFSRSADAPAYQQGQNQLYNELNLGRREEYDVLDKRRGRDPEMGGKPQRRKNPQEGLYNELQKDKMAEAYSEIGMKGERRRGKGHDGLYQGLSTATKDTYDALHMQALPPRRAKRSGSGATNFSLLKQAGDVEENPGPTSMDWIWRILFLVGAATGAHSFEQLQLQESGPGLVKPSETLSLTCTVSGGSISSGSYFWGWIRQPPGKGLEWIGSIYYSGITYYNPSLKSRVTISVDTSKNQFSLKLSSVTAADTAVYYCARHDGAMAGLFDYWGQGTLVTVSSATRIQNPDPAVYQLRDSKSSDKSVCLFTDFDSQTNVSQSKDSDVYITDKTVLDMRSMDFKSNSAVAWSNKSDFACANAFNNSIIPEDTFFPSPESSCGTQSFGLLDPKLCYLLDGILFIYGVILTALFLRVKFSRSADAPAYQQGQNQLYNELNLGRREEYDVLDKRRGRDPEMGGKPQRRKNPQEGLYNELQKDKMAEAYSEIGMKGERRRGKGHDGLYQGLSTATKDTYDALHMQALPPR

SEQ ID NO: 18259 - protein, 819 aa, Artificial Sequence
  Synthetic Polypeptide
MALPVTALLLPLALLLHAARPSYVLTQPPSVSVAPGQTARITCGGNNIGSKSVHWYQQPPGQAPVVVVYDDSDRPSGIPERFSGSNSGNTATLTISRVEAGDEAVYYCQVWDSSSDHVVFGGGTKLTVLLEDLKNVFPPEVAVFEPSKAEIAHTQKATLVCLATGFYPDHVELSWWVNGKEVHSGVCTDPQPLKEQPALNDSRYCLSSRLRVSATFWQNPRNHFRCQVQFYGLSENDEWTQDRAKPVTQIVSAEAWGRADCGSQSFGLLDPKLCYLLDGILFIYGVILTALFLRVKFSRSADAPAYQQGQNQLYNELNLGRREEYDVLDKRRGRDPEMGGKPQRRKNPQEGLYNELQKDKMAEAYSEIGMKGERRRGKGHDGLYQGLSTATKDTYDALHMQALPPRRAKRSGSGATNFSLLKQAGDVEENPGPTSMDWIWRILFLVGAATGAHSFEQLQLQESGPGLVKPSETLSLTCTVSGGSISSGSYFWGWIRQPPGKGLEWIGSIYYSGITYYNPSLKSRVTISVDTSKNQFSLKLSSVTAADTAVYYCARHDGAMAGLFDYWGQGTLVTVSSATRIQNPDPAVYQLRDSKSSDKSVCLFTDFDSQTNVSQSKDSDVYITDKCVLDMRSMDFKSNSAVAWSNKSDFACANAFNNSIIPEDTFFPSSDVPCGTQSFGLLDPKLCYLLDGILFIYGVILTALFLRVKFSRSADAPAYQQGQNQLYNELNLGRREEYDVLDKRRGRDPEMGGKPQRRKNPQEGLYNELQKDKMAEAYSEIGMKGERRRGKGHDGLYQGLSTATKDTYDALHMQALPPR

SEQ ID NO: 18260 - protein, 890 aa, Artificial Sequence
  Synthetic Polypeptide
MALPVTALLLPLALLLHAARPSYVLTQPPSVSVAPGQTARITCGGNNIGSKSVHWYQQPPGQAPVVVVYDDSDRPSGIPERFSGSNSGNTATLTISRVEAGDEAVYYCQVWDSSSDHVVFGGGTKLTVLLEGKPIPNPLLGLDSTGSGEDLKNVFPPEVAVFEPSEAEISHTQKATLVCLATGFYPDHVELSWWVNGKEVHSGVSTDPQPLKEQPALNDSRYCLSSRLRVSATFWQNPRNHFRCQVQFYGLSENDEWTQDRAKPVTQIVSAEAWGRADCGSQSFGLLDPKLCYLLDGILFIYGVILTALFLRVKFSRSADAPAYQQGQNQLYNELNLGRREEYDVLDKRRGRDPEMGGKPQRRKNPQEGLYNELQKDKMAEAYSEIGMKGERRRGKGHDGLYQGLSTATKDTYDALHMQALPPRRAKRSGSGATNFSLLKQAGDVEENPGPTSMDWIWRILFLVGAATGAHSFEQLQLQESGPGLVKPSETLSLTCTVSGGSISSGSYFWGWIRQPPGKGLEWIGSIYYSGITYYNPSLKSRVTISVDTSKNQFSLKLSSVTAADTAVYYCARHDGAMAGLFDYWGQGTLVTVSSATREQKLISEEDGSGIQNPDPAVYQLRDSKSSDKSVCLFTDFDSQTNVSQSKDSDVYITDKTVLDMRSMDFKSNSAVAWSNKSDFACANAFNNSIIPEDTFFPSPESSCGTQSFGLLDPKLCYLLDGILFIYGVILTALFLRSKRSRLLHSDYMNMTPRRPGPTRKHYQPYAPPRDFAAYRSRVKFSRSADAPAYQQGQNQLYNELNLGRREEYDVLDKRRGRDPEMGGKPQRRKNPQEGLYNELQKDKMAEAYSEIGMKGERRRGKGHDGLYQGLSTATKDTYDALHMQALPPR

SEQ ID NO: 18261 - protein, 931 aa, Artificial Sequence
  Synthetic Polypeptide
MALPVTALLLPLALLLHAARPSYVLTQPPSVSVAPGQTARITCGGNNIGSKSVHWYQQPPGQAPVVVVYDDSDRPSGIPERFSGSNSGNTATLTISRVEAGDEAVYYCQVWDSSSDHVVFGGGTKLTVLLEGKPIPNPLLGLDSTGSGEDLKNVFPPEVAVFEPSEAEISHTQKATLVCLATGFYPDHVELSWWVNGKEVHSGVSTDPQPLKEQPALNDSRYCLSSRLRVSATFWQNPRNHFRCQVQFYGLSENDEWTQDRAKPVTQIVSAEAWGRADCGSQSFGLLDPKLCYLLDGILFIYGVILTALFLRSKRSRLLHSDYMNMTPRRPGPTRKHYQPYAPPRDFAAYRSRVKFSRSADAPAYQQGQNQLYNELNLGRREEYDVLDKRRGRDPEMGGKPQRRKNPQEGLYNELQKDKMAEAYSEIGMKGERRRGKGHDGLYQGLSTATKDTYDALHMQALPPRRAKRSGSGATNFSLLKQAGDVEENPGPTSMDWIWRILFLVGAATGAHSFEQLQLQESGPGLVKPSETLSLTCTVSGGSISSGSYFWGWIRQPPGKGLEWIGSIYYSGITYYNPSLKSRVTISVDTSKNQFSLKLSSVTAADTAVYYCARHDGAMAGLFDYWGQGTLVTVSSATREQKLISEEDGSGIQNPDPAVYQLRDSKSSDKSVCLFTDFDSQTNVSQSKDSDVYITDKTVLDMRSMDFKSNSAVAWSNKSDFACANAFNNSIIPEDTFFPSPESSCGTQSFGLLDPKLCYLLDGILFIYGVILTALFLRSKRSRLLHSDYMNMTPRRPGPTRKHYQPYAPPRDFAAYRSRVKFSRSADAPAYQQGQNQLYNELNLGRREEYDVLDKRRGRDPEMGGKPQRRKNPQEGLYNELQKDKMAEAYSEIGMKGERRRGKGHDGLYQGLSTATKDTYDALHMQALPPR

SEQ ID NO: 18262 - protein, 892 aa, Artificial Sequence
  Synthetic Polypeptide
MALPVTALLLPLALLLHAARPSYVLTQPPSVSVAPGQTARITCGGNNIGSKSVHWYQQPPGQAPVVVVYDDSDRPSGIPERFSGSNSGNTATLTISRVEAGDEAVYYCQVWDSSSDHVVFGGGTKLTVLLEGKPIPNPLLGLDSTGSGEDLKNVFPPEVAVFEPSEAEISHTQKATLVCLATGFYPDHVELSWWVNGKEVHSGVSTDPQPLKEQPALNDSRYCLSSRLRVSATFWQNPRNHFRCQVQFYGLSENDEWTQDRAKPVTQIVSAEAWGRADCGSQSFGLLDPKLCYLLDGILFIYGVILTALFLRVKFSRSADAPAYQQGQNQLYNELNLGRREEYDVLDKRRGRDPEMGGKPQRRKNPQEGLYNELQKDKMAEAYSEIGMKGERRRGKGHDGLYQGLSTATKDTYDALHMQALPPRRAKRSGSGATNFSLLKQAGDVEENPGPTSMDWIWRILFLVGAATGAHSFEQLQLQESGPGLVKPSETLSLTCTVSGGSISSGSYFWGWIRQPPGKGLEWIGSIYYSGITYYNPSLKSRVTISVDTSKNQFSLKLSSVTAADTAVYYCARHDGAMAGLFDYWGQGTLVTVSSATREQKLISEEDLGSGIQNPDPAVYQLRDSKSSDKSVCLFTDFDSQTNVSQSKDSDVYITDKTVLDMRSMDFKSNSAVAWSNKSDFACANAFNNSIIPEDTFFPSPESSCGTQSFGLLDPKLCYLLDGILFIYGVILTALFLKRGRKKLLYIFKQPFMRPVQTTQEEDGCSCRFPEEEEGGCELRVKFSRSADAPAYQQGQNQLYNELNLGRREEYDVLDKRRGRDPEMGGKPQRRKNPQEGLYNELQKDKMAEAYSEIGMKGERRRGKGHDGLYQGLSTATKDTYDALHMQALPPR

SEQ ID NO: 18263 - protein, 934 aa, Artificial Sequence
  Synthetic Polypeptide
MALPVTALLLPLALLLHAARPSYVLTQPPSVSVAPGQTARITCGGNNIGSKSVHWYQQPPGQAPVVVVYDDSDRPSGIPERFSGSNSGNTATLTISRVEAGDEAVYYCQVWDSSSDHVVFGGGTKLTVLLEGKPIPNPLLGLDSTGSGEDLKNVFPPEVAVFEPSEAEISHTQKATLVCLATGFYPDHVELSWWVNGKEVHSGVSTDPQPLKEQPALNDSRYCLSSRLRVSATFWQNPRNHFRCQVQFYGLSENDEWTQDRAKPVTQIVSAEAWGRADCGSQSFGLLDPKLCYLLDGILFIYGVILTALFLKRGRKKLLYIFKQPFMRPVQTTQEEDGCSCRFPEEEEGGCELRVKFSRSADAPAYQQGQNQLYNELNLGRREEYDVLDKRRGRDPEMGGKPQRRKNPQEGLYNELQKDKMAEAYSEIGMKGERRRGKGHDGLYQGLSTATKDTYDALHMQALPPRRAKRSGSGATNFSLLKQAGDVEENPGPTSMDWIWRILFLVGAATGAHSFEQLQLQESGPGLVKPSETLSLTCTVSGGSISSGSYFWGWIRQPPGKGLEWIGSIYYSGITYYNPSLKSRVTISVDTSKNQFSLKLSSVTAADTAVYYCARHDGAMAGLFDYWGQGTLVTVSSATREQKLISEEDLGSGIQNPDPAVYQLRDSKSSDKSVCLFTDFDSQTNVSQSKDSDVYITDKTVLDMRSMDFKSNSAVAWSNKSDFACANAFNNSIIPEDTFFPSPESSCGTQSFGLLDPKLCYLLDGILFIYGVILTALFLKRGRKKLLYIFKQPFMRPVQTTQEEDGCSCRFPEEEEGGCELRVKFSRSADAPAYQQGQNQLYNELNLGRREEYDVLDKRRGRDPEMGGKPQRRKNPQEGLYNELQKDKMAEAYSEIGMKGERRRGKGHDGLYQGLSTATKDTYDALHMQALPPR

SEQ ID NO: 18264 - protein, 824 aa, Artificial Sequence
  Synthetic Polypeptide
MALPVTALLLPLALLLHAARPSYVLTQPPSVSVAPGQTARITCGGNNIGSKSVHWYQQPPGQAPVVVVYDDSDRPSGIPERFSGSNSGNTATLTISRVEAGDEAVYYCQVWDSSSDHVVFGGGTKLTVLLEQSFGLLDPKLCYLLDGILFIYGVILTALFLRVKFSRSADAPAYQQGQNQLYNELNLGRREEYDVLDKRRGRDPEMGGKPQRRKNPQEGLYNELQKDKMAEAYSEIGMKGERRRGKGHDGLYQGLSTATKDTYDALHMQALPPRRAKRSGSGATNFSLLKQAGDVEENPGPTSMDWIWRILFLVGAATGAHSFEQLQLQESGPGLVKPSETLSLTCTVSGGSISSGSYFWGWIRQPPGKGLEWIGSIYYSGITYYNPSLKSRVTISVDTSKNQFSLKLSSVTAADTAVYYCARHDGAMAGLFDYWGQGTLVTVSSATRQSFGLLDPKLCYLLDGILFIYGVILTALFLRVKFSRSADAPAYQQGQNQLYNELNLGRREEYDVLDKRRGRDPEMGGKPQRRKNPQEGLYNELQKDKMAEAYSEIGMKGERRRGKGHDGLYQGLSTATKDTYDALHMQALPPRRAKRSGSGVKQTLNFDLLKLAGDVESNPGPSRGHMTEYKPTVRLATRDDVPRAVRTLAAAFADYPATRHTVDPDRHIERVTELQELFLTRVGLDIGKVWVADDGAAVAVWTTPESVEAGAVFAEIGPRMAELSGSRLAAQQQMEGLLAPHRPKEPAWFLATVGVSPDHQGKGLGSAVVLPGVEAAERAGVPAFLETSAPRNLPFYERLGFTVTADVEVPEGPRTWCMTRKPGA

SEQ ID NO: 18265 - protein, 649 aa, Artificial Sequence
  Synthetic Polypeptide
MALPVTALLLPLALLLHAARPSYVLTQPPSVSVAPGQTARITCGGNNIGSKSVHWYQQPPGQAPVVVVYDDSDRPSGIPERFSGSNSGNTATLTISRVEAGDEAVYYCQVWDSSSDHVVFGGGTKLTVLLEGQPKANPTVTLFPPSSEELQANKATLVCLISDFYPGAVTVAWKADGSPVKAGVETTKPSKQSNNKYAASSYLSLTPEQWKSHRSYSCQVTHEGSTVEKTVAPTECSPIKTDVITMDPKDNCSKDANDTLLLQLTNTSAYYMYLLLLLKSVVYFAIITCCLLRRTAFCCNGEKSRAKRSGSGATNFSLLKQAGDVEENPGPTSMDWIWRILFLVGAATGAHSFEQLQLQESGPGLVKPSETLSLTCTVSGGSISSGSYFWGWIRQPPGKGLEWIGSIYYSGITYYNPSLKSRVTISVDTSKNQFSLKLSSVTAADTAVYYCARHDGAMAGLFDYWGQGTLVTVSSATRASTKGPSVFPLAPSSKSTSGGTAALGCLVKDYFPEPVTVSWNSGALTSGVHTFPAVLQSSGLYSLSSVVTVPSSSLGTQTYICNVNHKPSNTKVDKRVEPKSCEVKTDSTDHVKPKETENTKQPSKSCHKPKAIVHTEKVNMMSLTVLGLRMLFAKTVAVNFLLTAKLFFL

SEQ ID NO: 18266 - protein, 627 aa, Artificial Sequence
  Synthetic Polypeptide
MALPVTALLLPLALLLHAARPSYVLTQPPSVSVAPGQTARITCGGNNIGSKSVHWYQQPPGQAPVVVVYDDSDRPSGIPERFSGSNSGNTATLTISRVEAGDEAVYYCQVWDSSSDHVVFGGGTKLTVLLEGQPKANPTVTLFPPSSEELQANKATLVCLISDFYPGAVTVAWKADGSPVKAGVETTKPSKQSNNKYAASSYLSLTPEQWKSHRSYSCQVTHEGSTVEKTVAPTECSGRADCGITSASYHQGVLSATILYEILLGKATLYAVLVSALVLMAMVKRKDSRGRAKRSGSGATNFSLLKQAGDVEENPGPTSMDWIWRILFLVGAATGAHSFEQLQLQESGPGLVKPSETLSLTCTVSGGSISSGSYFWGWIRQPPGKGLEWIGSIYYSGITYYNPSLKSRVTISVDTSKNQFSLKLSSVTAADTAVYYCARHDGAMAGLFDYWGQGTLVTVSSATRASTKGPSVFPLAPSSKSTSGGTAALGCLVKDYFPEPVTVSWNSGALTSGVHTFPAVLQSSGLYSLSSVVTVPSSSLGTQTYICNVNHKPSNTKVDKRVEPKSCIPEDTFFPSSDVPCDVKLVEKSFETDTNLNFQNLSVIGFRILLLKVAGFNLLMTLRLWSS

SEQ ID NO: 18267 - protein, 627 aa, Artificial Sequence
  Synthetic Polypeptide
MALPVTALLLPLALLLHAARPSYVLTQPPSVSVAPGQTARITCGGNNIGSKSVHWYQQPPGQAPVVVVYDDSDRPSGIPERFSGSNSGNTATLTISRVEAGDEAVYYCQVWDSSSDHVVFGGGTKLTVLLEGQPKANPTVTLFPPSSEELQANKATLVCLISDFYPGAVTVAWKADGSPVKAGVETTKPSKQSNNKYAASSYLSLTPEQWKSHRSYSCQVTHEGSTVEKTVAPTECSGRADCGFTSESYQQGVLSATILYEILLGKATLYAVLVSALVLMAMVKRKDSRGRAKRSGSGATNFSLLKQAGDVEENPGPTSMDWIWRILFLVGAATGAHSFEQLQLQESGPGLVKPSETLSLTCTVSGGSISSGSYFWGWIRQPPGKGLEWIGSIYYSGITYYNPSLKSRVTISVDTSKNQFSLKLSSVTAADTAVYYCARHDGAMAGLFDYWGQGTLVTVSSATRASTKGPSVFPLAPSSKSTSGGTAALGCLVKDYFPEPVTVSWNSGALTSGVHTFPAVLQSSGLYSLSSVVTVPSSSLGTQTYICNVNHKPSNTKVDKRVEPKSCIPEDTFFPSPESSCDVKLVEKSFETDTNLNFQNLSVIGFRILLLKVAGFNLLMTLRLWSS

SEQ ID NO: 18268 - protein, 453 aa, Artificial Sequence
  Synthetic Polypeptide
MALPVTALLLPLALLLHAARPSYVLTQPPSVSVAPGQTARITCGGNNIGSKSVHWYQQPPGQAPVVVVYDDSDRPSGIPERFSGSNSGNTATLTISRVEAGDEAVYYCQVWDSSSDHVVFGGGTKLTVLGGGGSGGGGSGGGGSQLQLQESGPGLVKPSETLSLTCTVSGGSISSGSYFWGWIRQPPGKGLEWIGSIYYSGITYYNPSLKSRVTISVDTSKNQFSLKLSSVTAADTAVYYCARHDGAMAGLFDYWGQGTLVTVSSATRDGNEEMGGITQTPYKVSISGTTVILTCPQYPGSEILWQHNDKNIGGDEDDKNIGSDEDHLSLKEFSELEQSGYYVCYPRGSKPEDANFYLYLRARVCENCMEMDVMSVATIVIVDICITGGLLLLVYYWSKNRKAKAKPVTRGAGAGGRQRGQNKERPPPVPNPDYEPIRKGQRDLYSGLNQRRI

SEQ ID NO: 18269 - protein, 418 aa, Artificial Sequence
  Synthetic Polypeptide
MALPVTALLLPLALLLHAARPSYVLTQPPSVSVAPGQTARITCGGNNIGSKSVHWYQQPPGQAPVVVVYDDSDRPSGIPERFSGSNSGNTATLTISRVEAGDEAVYYCQVWDSSSDHVVFGGGTKLTVLGGGGSGGGGSGGGGSQLQLQESGPGLVKPSETLSLTCTVSGGSISSGSYFWGWIRQPPGKGLEWIGSIYYSGITYYNPSLKSRVTISVDTSKNQFSLKLSSVTAADTAVYYCARHDGAMAGLFDYWGQGTLVTVSSATRFKIPIEELEDRVFVNCNTSITWVEGTVGTLLSDITRLDLGKRILDPRGIYRCNGTDIYKDKESTVQVHYRMCQSCVELDPATVAGIIVTDVIATLLLALGVFCFAGHETGRLSGAADTQALLRNDQVYQPLRDRDDAQYSHLGGNWARNK

SEQ ID NO: 18270 - protein, 428 aa, Artificial Sequence
  Synthetic Polypeptide
MALPVTALLLPLALLLHAARPSYVLTQPPSVSVAPGQTARITCGGNNIGSKSVHWYQQPPGQAPVVVVYDDSDRPSGIPERFSGSNSGNTATLTISRVEAGDEAVYYCQVWDSSSDHVVFGGGTKLTVLGGGGSGGGGSGGGGSQLQLQESGPGLVKPSETLSLTCTVSGGSISSGSYFWGWIRQPPGKGLEWIGSIYYSGITYYNPSLKSRVTISVDTSKNQFSLKLSSVTAADTAVYYCARHDGAMAGLFDYWGQGTLVTVSSATRQSIKGNHLVKVYDYQEDGSVLLTCDAEAKNITWFKDGKMIGFLTEDKKKWNLGSNAKDPRGMYQCKGSQNKSKPLQVYYRMCQNCIELNAATISGFLFAEIVSIFVLAVGVYFIAGQDGVRQSRASDKQTLLPNDQLYQPLKDREDDQYSHLQGNQLRRN

SEQ ID NO: 18271 - protein, 411 aa, Artificial Sequence
  Synthetic Polypeptide
MALPVTALLLPLALLLHAARPSYVLTQPPSVSVAPGQTARITCGGNNIGSKSVHWYQQPPGQAPVVVVYDDSDRPSGIPERFSGSNSGNTATLTISRVEAGDEAVYYCQVWDSSSDHVVFGGGTKLTVLGGGGSGGGGSGGGGSQLQLQESGPGLVKPSETLSLTCTVSGGSISSGSYFWGWIRQPPGKGLEWIGSIYYSGITYYNPSLKSRVTISVDTSKNQFSLKLSSVTAADTAVYYCARHDGAMAGLFDYWGQGTLVTVSSATRQSFGLLDPKLCYLLDGILFIYGVILTALFLRVKFSRSADAPAYQQGQNQLYNELNLGRREEYDVLDKRRGRDPEMGGKPQRRKNPQEGLYNELQKDKMAEAYSEIGMKGERRRGKGHDGLYQGLSTATKDTYDALHMQALPPR

SEQ ID NO: 18272 - protein, 453 aa, Artificial Sequence
  Synthetic Polypeptide
MALPVTALLLPLALLLHAARPQLQLQESGPGLVKPSETLSLTCTVSGGSISSGSYFWGWIRQPPGKGLEWIGSIYYSGITYYNPSLKSRVTISVDTSKNQFSLKLSSVTAADTAVYYCARHDGAMAGLFDYWGQGTLVTVSSAGGGGSGGGGSGGGGSSYVLTQPPSVSVAPGQTARITCGGNNIGSKSVHWYQQPPGQAPVVVVYDDSDRPSGIPERFSGSNSGNTATLTISRVEAGDEAVYYCQVWDSSSDHVVFGGGTKLTVLTRDGNEEMGGITQTPYKVSISGTTVILTCPQYPGSEILWQHNDKNIGGDEDDKNIGSDEDHLSLKEFSELEQSGYYVCYPRGSKPEDANFYLYLRARVCENCMEMDVMSVATIVIVDICITGGLLLLVYYWSKNRKAKAKPVTRGAGAGGRQRGQNKERPPPVPNPDYEPIRKGQRDLYSGLNQRRI

SEQ ID NO: 18273 - protein, 418 aa, Artificial Sequence
  Synthetic Polypeptide
MALPVTALLLPLALLLHAARPQLQLQESGPGLVKPSETLSLTCTVSGGSISSGSYFWGWIRQPPGKGLEWIGSIYYSGITYYNPSLKSRVTISVDTSKNQFSLKLSSVTAADTAVYYCARHDGAMAGLFDYWGQGTLVTVSSAGGGGSGGGGSGGGGSSYVLTQPPSVSVAPGQTARITCGGNNIGSKSVHWYQQPPGQAPVVVVYDDSDRPSGIPERFSGSNSGNTATLTISRVEAGDEAVYYCQVWDSSSDHVVFGGGTKLTVLTRFKIPIEELEDRVFVNCNTSITWVEGTVGTLLSDITRLDLGKRILDPRGIYRCNGTDIYKDKESTVQVHYRMCQSCVELDPATVAGIIVTDVIATLLLALGVFCFAGHETGRLSGAADTQALLRNDQVYQPLRDRDDAQYSHLGGNWARNK

SEQ ID NO: 18274 - protein, 428 aa, Artificial Sequence
  Synthetic Polypeptide
MALPVTALLLPLALLLHAARPQLQLQESGPGLVKPSETLSLTCTVSGGSISSGSYFWGWIRQPPGKGLEWIGSIYYSGITYYNPSLKSRVTISVDTSKNQFSLKLSSVTAADTAVYYCARHDGAMAGLFDYWGQGTLVTVSSAGGGGSGGGGSGGGGSSYVLTQPPSVSVAPGQTARITCGGNNIGSKSVHWYQQPPGQAPVVVVYDDSDRPSGIPERFSGSNSGNTATLTISRVEAGDEAVYYCQVWDSSSDHVVFGGGTKLTVLTRQSIKGNHLVKVYDYQEDGSVLLTCDAEAKNITWFKDGKMIGFLTEDKKKWNLGSNAKDPRGMYQCKGSQNKSKPLQVYYRMCQNCIELNAATISGFLFAEIVSIFVLAVGVYFIAGQDGVRQSRASDKQTLLPNDQLYQPLKDREDDQYSHLQGNQLRRN

SEQ ID NO: 18275 - protein, 411 aa, Artificial Sequence
  Synthetic Polypeptide
MALPVTALLLPLALLLHAARPQLQLQESGPGLVKPSETLSLTCTVSGGSISSGSYFWGWIRQPPGKGLEWIGSIYYSGITYYNPSLKSRVTISVDTSKNQFSLKLSSVTAADTAVYYCARHDGAMAGLFDYWGQGTLVTVSSAGGGGSGGGGSGGGGSSYVLTQPPSVSVAPGQTARITCGGNNIGSKSVHWYQQPPGQAPVVVVYDDSDRPSGIPERFSGSNSGNTATLTISRVEAGDEAVYYCQVWDSSSDHVVFGGGTKLTVLTRQSFGLLDPKLCYLLDGILFIYGVILTALFLRVKFSRSADAPAYQQGQNQLYNELNLGRREEYDVLDKRRGRDPEMGGKPQRRKNPQEGLYNELQKDKMAEAYSEIGMKGERRRGKGHDGLYQGLSTATKDTYDALHMQALPPR

SEQ ID NO: 18276 - protein, 644 aa, Artificial Sequence
  Synthetic Polypeptide
MALPVTALLLPLALLLHAARPSYVLTQPPSVSVAPGQTARITCGGNNIGSKSVHWYQQPPGQAPVVVVYDDSDRPSGIPERFSGSNSGNTATLTISRVEAGDEAVYYCQVWDSSSDHVVFGGGTKLTVLGGGGSGGGGSGGGGSQLQLQESGPGLVKPSETLSLTCTVSGGSISSGSYFWGWIRQPPGKGLEWIGSIYYSGITYYNPSLKSRVTISVDTSKNQFSLKLSSVTAADTAVYYCARHDGAMAGLFDYWGQGTLVTVSSATRGSGIQNPDPAVYQLRDSKSSDKSVCLFTDFDSQTNVSQSKDSDVYITDKTVLDMRSMDFKSNSAVAWSNKSDFACANAFNNSIIPEDTFFPSPESSCDVKLVEKSFETDTNLNFQNLSVIGFRILLLKVAGFNLLMTLRLWSSRAKRSGSGVKQTLNFDLLKLAGDVESNPGPSRGHMTEYKPTVRLATRDDVPRAVRTLAAAFADYPATRHTVDPDRHIERVTELQELFLTRVGLDIGKVWVADDGAAVAVWTTPESVEAGAVFAEIGPRMAELSGSRLAAQQQMEGLLAPHRPKEPAWFLATVGVSPDHQGKGLGSAVVLPGVEAAERAGVPAFLETSAPRNLPFYERLGFTVTADVEVPEGPRTWCMTRKPGA

SEQ ID NO: 18277 - protein, 676 aa, Artificial Sequence
  Synthetic Polypeptide
MALPVTALLLPLALLLHAARPSYVLTQPPSVSVAPGQTARITCGGNNIGSKSVHWYQQPPGQAPVVVVYDDSDRPSGIPERFSGSNSGNTATLTISRVEAGDEAVYYCQVWDSSSDHVVFGGGTKLTVLGGGGSGGGGSGGGGSQLQLQESGPGLVKPSETLSLTCTVSGGSISSGSYFWGWIRQPPGKGLEWIGSIYYSGITYYNPSLKSRVTISVDTSKNQFSLKLSSVTAADTAVYYCARHDGAMAGLFDYWGQGTLVTVSSALEDLKNVFPPEVAVFEPSEAEISHTQKATLVCLATGFYPDHVELSWWVNGKEVHSGVSTDPQPLKEQPALNDSRYCLSSRLRVSATFWQNPRNHFRCQVQFYGLSENDEWTQDRAKPVTQIVSAEAWGRADCGFTSESYQQGVLSATILYEILLGKATLYAVLVSALVLMAMVKRKDSRGRAKRSGSGATNFSLLKQAGDVEENPGPTRGHMTEYKPTVRLATRDDVPRAVRTLAAAFADYPATRHTVDPDRHIERVTELQELFLTRVGLDIGKVWVADDGAAVAVWTTPESVEAGAVFAEIGPRMAELSGSRLAAQQQMEGLLAPHRPKEPAWFLATVGVSPDHQGKGLGSAVVLPGVEAAERAGVPAFLETSAPRNLPFYERLGFTVTADVEVPEGPRTWCMTRKPGA

SEQ ID NO: 18278 - protein, 726 aa, Artificial Sequence
  Synthetic Polypeptide
MALPVTALLLPLALLLHAARPSYVLTQPPSVSVAPGQTARITCGGNNIGSKSVHWYQQPPGQAPVVVVYDDSDRPSGIPERFSGSNSGNTATLTISRVEAGDEAVYYCQVWDSSSDHVVFGGGTKLTVLGGGGSGGGGSGGGGSQLQLQESGPGLVKPSETLSLTCTVSGGSISSGSYFWGWIRQPPGKGLEWIGSIYYSGITYYNPSLKSRVTISVDTSKNQFSLKLSSVTAADTAVYYCARHDGAMAGLFDYWGQGTLVTVSSATREQKLISEEDLGSGTPFPSLAPPIMLLVDGKQQMVVVCLVLDVAPPGLDSPIWFSAGNGSALDAFTYGPSPATDGTWTNLAHLSLPSEELASWEPLVCHTGPGAEGHSRSTQPMHLSGEASTARTCPQEPLRGTPGGALWLGVLRLLLFKLLLFDLLLTCSCLCDPAGPLPSPATTTRLRALGSHRLHPATETGGREATSSPRPQPRDRRWGDTPPGRKPGSPVRAKRSGSGVKQTLNFDLLKLAGDVESNPGPSRSRGHMTEYKPTVRLATRDDVPRAVRTLAAAFADYPATRHTVDPDRHIERVTELQELFLTRVGLDIGKVWVADDGAAVAVWTTPESVEAGAVFAEIGPRMAELSGSRLAAQQQMEGLLAPHRPKEPAWFLATVGVSPDHQGKGLGSAVVLPGVEAAERAGVPAFLETSAPRNLPFYERLGFTVTADVEVPEGPRTWCMTRKPGA

SEQ ID NO: 18279 - protein, 539 aa, Artificial Sequence; identical to SEQ ID NO: 18141
  Synthetic Polypeptide

SEQ ID NO: 18280 - protein, 309 aa, Artificial Sequence; identical to SEQ ID NO: 18142
  Synthetic Polypeptide

SEQ ID NO: 18281 - protein, 451 aa, Artificial Sequence
  Synthetic Polypeptide
MDWIWRILFLVGAATGAHSFEQLQLQESGPGLVKPSETLSLTCTVSGGSISSGSYFWGWIRQPPGKGLEWIGSIYYSGITYYNPSLKSRVTISVDTSKNQFSLKLSSVTAADTAVYYCARHDGAMAGLFDYWGQGTLVTVSSATRIQNPDPAVYQLRDSKSSDKSVCLFTDFDSQTNVSQSKDSDVYITDKTVLDMRSMDFKSNSAVAWSNKSDFACANAFNNSIIPEDTFFPSPESSCDVKLVEKSFETDTNLNFQNLSVIGFRILLLKVAGFNLLMTLRLWSSRAKRSGSGVKQTLNFDLLKLAGDVESNPGPSRGHMAKPLSQEESTLIERATATINSIPISEDYSVASAALSSDGRIFTGVNVYHFTGGPCAELVVLGTAAAAAAGNLTCIVAIGNENRGILSPCGRCRQVLLDLHPGIKAIVKDSDGQPTAVGIRELLPSGYVWEG

SEQ ID NO: 18282 - protein, 285 aa, Artificial Sequence
  Synthetic Polypeptide
MDWIWRILFLVGAATGAHSFEQLQLQESGPGLVKPSETLSLTCTVSGGSISSGSYFWGWIRQPPGKGLEWIGSIYYSGITYYNPSLKSRVTISVDTSKNQFSLKLSSVTAADTAVYYCARHDGAMAGLFDYWGQGTLVTVSSATRIQNPDPAVYQLRDSKSSDKSVCLFTDFDSQTNVSQSKDSDVYITDKTVLDMRSMDFKSNSAVAWSNKSDFACANAFNNSIIPEDTFFPSPESSCDVKLVEKSFETDTNLNFQNLSVIGFRILLLKVAGFNLLMTLRLWSS

SEQ ID NO: 18283 - protein, 557 aa, Artificial Sequence; identical to SEQ ID NO: 18145
  Synthetic Polypeptide

SEQ ID NO: 18284 - protein, 327 aa, Artificial Sequence; identical to SEQ ID NO: 18146
  Synthetic Polypeptide

SEQ ID NO: 18285 - protein, 463 aa, Artificial Sequence
  Synthetic Polypeptide
MDWIWRILFLVGAATGAHSFEQLQLQESGPGLVKPSETLSLTCTVSGGSISSGSYFWGWIRQPPGKGLEWIGSIYYSGITYYNPSLKSRVTISVDTSKNQFSLKLSSVTAADTAVYYCARHDGAMAGLFDYWGQGTLVTVSSATREQKLISEEDGSGIQNPDPAVYQLRDSKSSDKSVCLFTDFDSQTNVSQSKDSDVYITDKCVLDMRSMDFKSNSAVAWSNKSDFACANAFNNSIIPEDTFFPSPESSCDVKLVEKSFETDTNLNFQNLSVIGFRILLLKVAGFNLLMTLRLWSSRAKRSGSGVKQTLNFDLLKLAGDVESNPGPSRGHMAKPLSQEESTLIERATATINSIPISEDYSVASAALSSDGRIFTGVNVYHFTGGPCAELVVLGTAAAAAAGNLTCIVAIGNENRGILSPCGRCRQVLLDLHPGIKAIVKDSDGQPTAVGIRELLPSGYVWEG

SEQ ID NO: 18286 - protein, 297 aa, Artificial Sequence
  Synthetic Polypeptide
MDWIWRILFLVGAATGAHSFEQLQLQESGPGLVKPSETLSLTCTVSGGSISSGSYFWGWIRQPPGKGLEWIGSIYYSGITYYNPSLKSRVTISVDTSKNQFSLKLSSVTAADTAVYYCARHDGAMAGLFDYWGQGTLVTVSSATREQKLISEEDGSGIQNPDPAVYQLRDSKSSDKSVCLFTDFDSQTNVSQSKDSDVYITDKCVLDMRSMDFKSNSAVAWSNKSDFACANAFNNSIIPEDTFFPSPESSCDVKLVEKSFETDTNLNFQNLSVIGFRILLLKVAGFNLLMTLRLWSS

SEQ ID NO: 18287 - protein, 644 aa, Artificial Sequence
  Synthetic Polypeptide
MALPVTALLLPLALLLHAARPSYVLTQPPSVSVAPGQTARITCGGNNIGSKSVHWYQQPPGQAPVVVVYDDSDRPSGIPERFSGSNSGNTATLTISRVEAGDEAVYYCQVWDSSSDHVVFGGGTKLTVLGGGGSGGGGSGGGGSQLQLQESGPGLVKPSETLSLTCTVSGGSISSGSYFWGWIRQPPGKGLEWIGSIYYSGITYYNPSLKSRVTISVDTSKNQFSLKLSSVTAADTAVYYCARHDGAMAGLFDYWGQGTLVTVSSATRGSGIQNPDPAVYQLRDSKSSDKSVCLFTDFDSQTNVSQSKDSDVYITDKTVLDMRSMDFKSNSAVAWSNKSDFACANAFNNSIIPEDTFFPSSDVPCDVKLVEKSFETDTNLNFQNLSVIGFRILLLKVAGFNLLMTLRLWSSRAKRSGSGVKQTLNFDLLKLAGDVESNPGPSRGHMTEYKPTVRLATRDDVPRAVRTLAAAFADYPATRHTVDPDRHIERVTELQELFLTRVGLDIGKVWVADDGAAVAVWTTPESVEAGAVFAEIGPRMAELSGSRLAAQQQMEGLLAPHRPKEPAWFLATVGVSPDHQGKGLGSAVVLPGVEAAERAGVPAFLETSAPRNLPFYERLGFTVTADVEVPEGPRTWCMTRKPGA

SEQ ID NO: 18288 - protein, 676 aa, Artificial Sequence
  Synthetic Polypeptide
MALPVTALLLPLALLLHAARPSYVLTQPPSVSVAPGQTARITCGGNNIGSKSVHWYQQPPGQAPVVVVYDDSDRPSGIPERFSGSNSGNTATLTISRVEAGDEAVYYCQVWDSSSDHVVFGGGTKLTVLGGGGSGGGGSGGGGSQLQLQESGPGLVKPSETLSLTCTVSGGSISSGSYFWGWIRQPPGKGLEWIGSIYYSGITYYNPSLKSRVTISVDTSKNQFSLKLSSVTAADTAVYYCARHDGAMAGLFDYWGQGTLVTVSSALEDLKNVFPPEVAVFEPSKAEIAHTQKATLVCLATGFYPDHVELSWWVNGKEVHSGVSTDPQPLKEQPALNDSRYCLSSRLRVSATFWQNPRNHFRCQVQFYGLSENDEWTQDRAKPVTQIVSAEAWGRADCGITSASYHQGVLSATILYEILLGKATLYAVLVSALVLMAMVKRKDSRGRAKRSGSGATNFSLLKQAGDVEENPGPTRGHMTEYKPTVRLATRDDVPRAVRTLAAAFADYPATRHTVDPDRHIERVTELQELFLTRVGLDIGKVWVADDGAAVAVWTTPESVEAGAVFAEIGPRMAELSGSRLAAQQQMEGLLAPHRPKEPAWFLATVGVSPDHQGKGLGSAVVLPGVEAAERAGVPAFLETSAPRNLPFYERLGFTVTADVEVPEGPRTWCMTRKPGA

SEQ ID NO: 18289 - protein, 699 aa, Artificial Sequence
  Synthetic Polypeptide
MALPVTALLLPLALLLHAARPSYVLTQPPSVSVAPGQTARITCGGNNIGSKSVHWYQQPPGQAPVVVVYDDSDRPSGIPERFSGSNSGNTATLTISRVEAGDEAVYYCQVWDSSSDHVVFGGGTKLTVLGGGGSGGGGSGGGGSQLQLQESGPGLVKPSETLSLTCTVSGGSISSGSYFWGWIRQPPGKGLEWIGSIYYSGITYYNPSLKSRVTISVDTSKNQFSLKLSSVTAADTAVYYCARHDGAMAGLFDYWGQGTLVTVSSATRGSGGGGSGGGGSGDGNEEMGGITQTPYKVSISGTTVILTCPQYPGSEILWQHNDKNIGGDEDDKNIGSDEDHLSLKEFSELEQSGYYVCYPRGSKPEDANFYLYLRARVCENCMEMDVMSVATIVIVDICITGGLLLLVYYWSKNRKAKAKPVTRGAGAGGRQRGQNKERPPPVPNPDYEPIRKGQRDLYSGLNQRRIRAKRSGSGVKQTLNFDLLKLAGDVESNPGPSRGHMTEYKPTVRLATRDDVPRAVRTLAAAFADYPATRHTVDPDRHIERVTELQELFLTRVGLDIGKVWVADDGAAVAVWTTPESVEAGAVFAEIGPRMAELSGSRLAAQQQMEGLLAPHRPKEPAWFLATVGVSPDHQGKGLGSAVVLPGVEAAERAGVPAFLETSAPRNLPFYERLGFTVTADVEVPEGPRTWCMTRKPGA

SEQ ID NO: 18290 - protein, 664 aa, Artificial Sequence
  Synthetic Polypeptide
MALPVTALLLPLALLLHAARPSYVLTQPPSVSVAPGQTARITCGGNNIGSKSVHWYQQPPGQAPVVVVYDDSDRPSGIPERFSGSNSGNTATLTISRVEAGDEAVYYCQVWDSSSDHVVFGGGTKLTVLGGGGSGGGGSGGGGSQLQLQESGPGLVKPSETLSLTCTVSGGSISSGSYFWGWIRQPPGKGLEWIGSIYYSGITYYNPSLKSRVTISVDTSKNQFSLKLSSVTAADTAVYYCARHDGAMAGLFDYWGQGTLVTVSSATRGSGGGGSGGGGSGFKIPIEELEDRVFVNCNTSITWVEGTVGTLLSDITRLDLGKRILDPRGIYRCNGTDIYKDKESTVQVHYRMCQSCVELDPATVAGIIVTDVIATLLLALGVFCFAGHETGRLSGAADTQALLRNDQVYQPLRDRDDAQYSHLGGNWARNKRAKRSGSGVKQTLNFDLLKLAGDVESNPGPSRGHMTEYKPTVRLATRDDVPRAVRTLAAAFADYPATRHTVDPDRHIERVTELQELFLTRVGLDIGKVWVADDGAAVAVWTTPESVEAGAVFAEIGPRMAELSGSRLAAQQQMEGLLAPHRPKEPAWFLATVGVSPDHQGKGLGSAVVLPGVEAAERAGVPAFLETSAPRNLPFYERLGFTVTADVEVPEGPRTWCMTRKPGA

SEQ ID NO: 18291 - protein, 674 aa, Artificial Sequence
  Synthetic Polypeptide
MALPVTALLLPLALLLHAARPSYVLTQPPSVSVAPGQTARITCGGNNIGSKSVHWYQQPPGQAPVVVVYDDSDRPSGIPERFSGSNSGNTATLTISRVEAGDEAVYYCQVWDSSSDHVVFGGGTKLTVLGGGGSGGGGSGGGGSQLQLQESGPGLVKPSETLSLTCTVSGGSISSGSYFWGWIRQPPGKGLEWIGSIYYSGITYYNPSLKSRVTISVDTSKNQFSLKLSSVTAADTAVYYCARHDGAMAGLFDYWGQGTLVTVSSATRGSGGGGSGGGGSGQSIKGNHLVKVYDYQEDGSVLLTCDAEAKNITWFKDGKMIGFLTEDKKKWNLGSNAKDPRGMYQCKGSQNKSKPLQVYYRMCQNCIELNAATISGFLFAEIVSIFVLAVGVYFIAGQDGVRQSRASDKQTLLPNDQLYQPLKDREDDQYSHLQGNQLRRNRAKRSGSGVKQTLNFDLLKLAGDVESNPGPSRGHMTEYKPTVRLATRDDVPRAVRTLAAAFADYPATRHTVDPDRHIERVTELQELFLTRVGLDIGKVWVADDGAAVAVWTTPESVEAGAVFAEIGPRMAELSGSRLAAQQQMEGLLAPHRPKEPAWFLATVGVSPDHQGKGLGSAVVLPGVEAAERAGVPAFLETSAPRNLPFYERLGFTVTADVEVPEGPRTWCMTRKPGA

SEQ ID NO: 18292 - protein, 657 aa, Artificial Sequence
  Synthetic Polypeptide
MALPVTALLLPLALLLHAARPSYVLTQPPSVSVAPGQTARITCGGNNIGSKSVHWYQQPPGQAPVVVVYDDSDRPSGIPERFSGSNSGNTATLTISRVEAGDEAVYYCQVWDSSSDHVVFGGGTKLTVLGGGGSGGGGSGGGGSQLQLQESGPGLVKPSETLSLTCTVSGGSISSGSYFWGWIRQPPGKGLEWIGSIYYSGITYYNPSLKSRVTISVDTSKNQFSLKLSSVTAADTAVYYCARHDGAMAGLFDYWGQGTLVTVSSATRGSGGGGSGGGGSGQSFGLLDPKLCYLLDGILFIYGVILTALFLRVKFSRSADAPAYQQGQNQLYNELNLGRREEYDVLDKRRGRDPEMGGKPQRRKNPQEGLYNELQKDKMAEAYSEIGMKGERRRGKGHDGLYQGLSTATKDTYDALHMQALPPRRAKRSGSGVKQTLNFDLLKLAGDVESNPGPSRGHMTEYKPTVRLATRDDVPRAVRTLAAAFADYPATRHTVDPDRHIERVTELQELFLTRVGLDIGKVWVADDGAAVAVWTTPESVEAGAVFAEIGPRMAELSGSRLAAQQQMEGLLAPHRPKEPAWFLATVGVSPDHQGKGLGSAVVLPGVEAAERAGVPAFLETSAPRNLPFYERLGFTVTADVEVPEGPRTWCMTRKPGA

SEQ ID NO: 18293 - protein, 758 aa, Artificial Sequence
  Synthetic Polypeptide
MALPVTALLLPLALLLHAARPEVQLVESGGGLVQPGGSLRLSCAASGFSFSDFWMSWVRQAPGKGLEWVATISQAGSEKDYVDSVKGRFTISRDNAKKSLYLQMNSLRAEDTAVYYCASGVYSFDYRGQGTLVTVSSGTGGGGSGGGGSGGGGSEFSYVLTQPPSVSVAPGQTARITCGGNNIGSKSVHWYQQPPGQAPVVVVYDDSDRPSGIPERFSGSNSGNTATLTISRVEAGDEAVYYCQVWDSSSDHVVFGGGTKLTVLLEDLKNVFPPEVAVFEPSEAEISHTQKATLVCLATGFYPDHVELSWWVNGKEVHSGVCTDPQPLKEQPALNDSRYCLSSRLRVSATFWQNPRNHFRCQVQFYGLSENDEWTQDRAKPVTQIVSAEAWGRADCGFTSESYQQGVLSATILYEILLGKATLYAVLVSALVLMAMVKRKDSRGRAKRSGSGATNFSLLKQAGDVEENPGPTSMDWIWRILFLVGAATGAHSFEQLQLQESGPGLVKPSETLSLTCTVSGGSISSGSYFWGWIRQPPGKGLEWIGSIYYSGITYYNPSLKSRVTISVDTSKNQFSLKLSSVTAADTAVYYCARHDGAMAGLFDYWGQGTLVTVSSATRIQNPDPAVYQLRDSKSSDKSVCLFTDFDSQTNVSQSKDSDVYITDKCVLDMRSMDFKSNSAVAWSNKSDFACANAFNNSIIPEDTFFPSPESSCDVKLVEKSFETDTNLNFQNLSVIGFRILLLKVAGFNLLMTLRLWSS

SEQ ID NO: 18294 - protein, 762 aa, Artificial Sequence
  Synthetic Polypeptide
MALPVTALLLPLALLLHAARPEVQLVESGGGLVQPGGSLRLSCAASGFSFSDFWMSWVRQAPGKGLEWVATISQAGSEKDYVDSVKGRFTISRDNAKKSLYLQMNSLRAEDTAVYYCASGVYSFDYRGQGTLVTVSSGTGGGGSGGGGSGGGGSEFSYVLTQPPSVSVAPGQTARITCGGNNIGSKSVHWYQQPPGQAPVVVVYDDSDRPSGIPERFSGSNSGNTATLTISRVEAGDEAVYYCQVWDSSSDHVVFGGGTKLTVLLEIQNPDPAVYQLRDSKSSDKSVCLFTDFDSQTNVSQSKDSDVYITDKCVLDMRSMDFKSNSAVAWSNKSDFACANAFNNSIIPEDTFFPSPESSCDVKLVEKSFETDTNLNFQNLSVIGFRILLLKVAGFNLLMTLRLWSSRAKRSGSGVKQTLNFDLLKLAGDVESNPGPTSMDWIWRILFLVGAATGAHSFEQLQLQESGPGLVKPSETLSLTCTVSGGSISSGSYFWGWIRQPPGKGLEWIGSIYYSGITYYNPSLKSRVTISVDTSKNQFSLKLSSVTAADTAVYYCARHDGAMAGLFDYWGQGTLVTVSSATREDLKNVFPPEVAVFEPSEAEISHTQKATLVCLATGFYPDHVELSWWVNGKEVHSGVCTDPQPLKEQPALNDSRYCLSSRLRVSATFWQNPRNHFRCQVQFYGLSENDEWTQDRAKPVTQIVSAEAWGRADCGFTSESYQQGVLSATILYEILLGKATLYAVLVSALVLMAMVKRKDSRG

SEQ ID NO: 18295 - protein, 954 aa, Artificial Sequence
  Synthetic Polypeptide
MALPVTALLLPLALLLHAARPEVQLVESGGGLVQPGGSLRLSCAASGFSFSDFWMSWVRQAPGKGLEWVATISQAGSEKDYVDSVKGRFTISRDNAKKSLYLQMNSLRAEDTAVYYCASGVYSFDYRGQGTLVTVSSGTGGGGSGGGGSGGGGSEFSYVLTQPPSVSVAPGQTARITCGGNNIGSKSVHWYQQPPGQAPVVVVYDDSDRPSGIPERFSGSNSGNTATLTISRVEAGDEAVYYCQVWDSSSDHVVFGGGTKLTVLLEDLKNVFPPEVAVFEPSEAEISHTQKATLVCLATGFYPDHVELSWWVNGKEVHSGVSTDPQPLKEQPALNDSRYCLSSRLRVSATFWQNPRNHFRCQVQFYGLSENDEWTQDRAKPVTQIVSAEAWGRADCGSQSFGLLDPKLCYLLDGILFIYGVILTALFLRVKFSRSADAPAYQQGQNQLYNELNLGRREEYDVLDKRRGRDPEMGGKPQRRKNPQEGLYNELQKDKMAEAYSEIGMKGERRRGKGHDGLYQGLSTATKDTYDALHMQALPPRRAKRSGSGATNFSLLKQAGDVEENPGPTSMDWIWRILFLVGAATGAHSFEQLQLQESGPGLVKPSETLSLTCTVSGGSISSGSYFWGWIRQPPGKGLEWIGSIYYSGITYYNPSLKSRVTISVDTSKNQFSLKLSSVTAADTAVYYCARHDGAMAGLFDYWGQGTLVTVSSATRIQNPDPAVYQLRDSKSSDKSVCLFTDFDSQTNVSQSKDSDVYITDKTVLDMRSMDFKSNSAVAWSNKSDFACANAFNNSIIPEDTFFPSPESSCGTQSFGLLDPKLCYLLDGILFIYGVILTALFLRVKFSRSADAPAYQQGQNQLYNELNLGRREEYDVLDKRRGRDPEMGGKPQRRKNPQEGLYNELQKDKMAEAYSEIGMKGERRRGKGHDGLYQGLSTATKDTYDALHMQALPPR

SEQ ID NO: 18296 - protein, 784 aa, Artificial Sequence
  Synthetic Polypeptide
MALPVTALLLPLALLLHAARPEVQLVESGGGLVQPGGSLRLSCAASGFSFSDFWMSWVRQAPGKGLEWVATISQAGSEKDYVDSVKGRFTISRDNAKKSLYLQMNSLRAEDTAVYYCASGVYSFDYRGQGTLVTVSSGTGGGGSGGGGSGGGGSEFSYVLTQPPSVSVAPGQTARITCGGNNIGSKSVHWYQQPPGQAPVVVVYDDSDRPSGIPERFSGSNSGNTATLTISRVEAGDEAVYYCQVWDSSSDHVVFGGGTKLTVLLEGQPKANPTVTLFPPSSEELQANKATLVCLISDFYPGAVTVAWKADGSPVKAGVETTKPSKQSNNKYAASSYLSLTPEQWKSHRSYSCQVTHEGSTVEKTVAPTECSPIKTDVITMDPKDNCSKDANDTLLLQLTNTSAYYMYLLLLLKSVVYFAIITCCLLRRTAFCCNGEKSRAKRSGSGATNFSLLKQAGDVEENPGPTSMDWIWRILFLVGAATGAHSFEQLQLQESGPGLVKPSETLSLTCTVSGGSISSGSYFWGWIRQPPGKGLEWIGSIYYSGITYYNPSLKSRVTISVDTSKNQFSLKLSSVTAADTAVYYCARHDGAMAGLFDYWGQGTLVTVSSATRASTKGPSVFPLAPSSKSTSGGTAALGCLVKDYFPEPVTVSWNSGALTSGVHTFPAVLQSSGLYSLSSVVTVPSSSLGTQTYICNVNHKPSNTKVDKRVEPKSCEVKTDSTDHVKPKETENTKQPSKSCHKPKAIVHTEKVNMMSLTVLGLRMLFAKTVAVNFLLTAKLFFL

SEQ ID NO: 18297 - protein, 765 aa, Artificial Sequence
  Synthetic Polypeptide
MALPVTALLLPLALLLHAARPEVQLVESGGGLVQPGGSLRLSCAASGFSFSDFWMSWVRQAPGKGLEWVATISQAGSEKDYVDSVKGRFTISRDNAKKSLYLQMNSLRAEDTAVYYCASGVYSFDYRGQGTLVTVSSGTGGGGSGGGGSGGGGSEFSYVLTQPPSVSVAPGQTARITCGGNNIGSKSVHWYQQPPGQAPVVVVYDDSDRPSGIPERFSGSNSGNTATLTISRVEAGDEAVYYCQVWDSSSDHVVFGGGTKLTVLLEGQPKANPTVTLFPPSSEELQANKATLVCLISDFYPGAVTVAWKADGSPVKAGVETTKPSKQSNNKYAASSYLSLTPEQWKSHRSYSCQVTHEGSTVEKTVAPTECSGRADCGFTSESYQQGVLSATILYEILLGKATLYAVLVSALVLMAMVKRKDSRGRAKRSGSGVKQTLNFDLLKLAGDVESNPGPTSMDWIWRILFLVGAATGAHSFEQLQLQESGPGLVKPSETLSLTCTVSGGSISSGSYFWGWIRQPPGKGLEWIGSIYYSGITYYNPSLKSRVTISVDTSKNQFSLKLSSVTAADTAVYYCARHDGAMAGLFDYWGQGTLVTVSSATRASTKGPSVFPLAPSSKSTSGGTAALGCLVKDYFPEPVTVSWNSGALTSGVHTFPAVLQSSGLYSLSSVVTVPSSSLGTQTYICNVNHKPSNTKVDKRVEPKSCIPEDTFFPSPESSCDVKLVEKSFETDTNLNFQNLSVIGFRILLLKVAGFNLLMTLRLWSS

SEQ ID NO: 18298 - protein, 899 aa, Artificial Sequence
  Synthetic Polypeptide
MALPVTALLLPLALLLHAARPEVQLVESGGGLVQPGGSLRLSCAASGFSFSDFWMSWVRQAPGKGLEWVATISQAGSEKDYVDSVKGRFTISRDNAKKSLYLQMNSLRAEDTAVYYCASGVYSFDYRGQGTLVTVSSGTGGGGSGGGGSGGGGSEFSYVLTQPPSVSVAPGQTARITCGGNNIGSKSVHWYQQPPGQAPVVVVYDDSDRPSGIPERFSGSNSGNTATLTISRVEAGDEAVYYCQVWDSSSDHVVFGGGTKLTVLLEIQNPDPAVYQLRDSKSSDKSVCLFTDFDSQTNVSQSKDSDVYITDKCVLDMRSMDFKSNSAVAWSNKSDFACANAFNNSIIPEDTFFPSPESSCDVKLVEKSFETDTNLNFQNLSVIGFRILLLKVAGFNLLMTLRLWSSRAKRSGSGVKQTLNFDLLKLAGDVESNPGPTSMDWIWRILFLVGAATGAHSGPQLQLQESGPGLVKPSETLSLTCTVSGDSISSGDYYWGWIRQPPGKGLEWIGHIYYSGVTYYNPSLKSRVTISVDTSRNQFSLKLSSVTAADTAVYYCTREDSSNWRSRGQGTLVTVSSGSGGGGSGGGGSGGGGSFEQLQLQESGPGLVKPSETLSLTCTVSGGSISSGSYFWGWIRQPPGKGLEWIGSIYYSGITYYNPSLKSRVTISVDTSKNQFSLKLSSVTAADTAVYYCARHDGAMAGLFDYWGQGTLVTVSSATREDLKNVFPPEVAVFEPSEAEISHTQKATLVCLATGFYPDHVELSWWVNGKEVHSGVCTDPQPLKEQPALNDSRYCLSSRLRVSATFWQNPRNHFRCQVQFYGLSENDEWTQDRAKPVTQIVSAEAWGRADCGFTSESYQQGVLSATILYEILLGKATLYAVLVSALVLMAMVKRKDSRG

SEQ ID NO: 18299 - protein, 1091 aa, Artificial Sequence
  Synthetic Polypeptide
MALPVTALLLPLALLLHAARPEVQLVESGGGLVQPGGSLRLSCAASGFSFSDFWMSWVRQAPGKGLEWVATISQAGSEKDYVDSVKGRFTISRDNAKKSLYLQMNSLRAEDTAVYYCASGVYSFDYRGQGTLVTVSSGTGGGGSGGGGSGGGGSEFSYVLTQPPSVSVAPGQTARITCGGNNIGSKSVHWYQQPPGQAPVVVVYDDSDRPSGIPERFSGSNSGNTATLTISRVEAGDEAVYYCQVWDSSSDHVVFGGGTKLTVLLEDLKNVFPPEVAVFEPSEAEISHTQKATLVCLATGFYPDHVELSWWVNGKEVHSGVSTDPQPLKEQPALNDSRYCLSSRLRVSATFWQNPRNHFRCQVQFYGLSENDEWTQDRAKPVTQIVSAEAWGRADCGSQSFGLLDPKLCYLLDGILFIYGVILTALFLRVKFSRSADAPAYQQGQNQLYNELNLGRREEYDVLDKRRGRDPEMGGKPQRRKNPQEGLYNELQKDKMAEAYSEIGMKGERRRGKGHDGLYQGLSTATKDTYDALHMQALPPRRAKRSGSGATNFSLLKQAGDVEENPGPTSMDWIWRILFLVGAATGAHSGPQLQLQESGPGLVKPSETLSLTCTVSGDSISSGDYYWGWIRQPPGKGLEWIGHIYYSGVTYYNPSLKSRVTISVDTSRNQFSLKLSSVTAADTAVYYCTREDSSNWRSRGQGTLVTVSSGSGGGGSGGGGSGGGGSFEQLQLQESGPGLVKPSETLSLTCTVSGGSISSGSYFWGWIRQPPGKGLEWIGSIYYSGITYYNPSLKSRVTISVDTSKNQFSLKLSSVTAADTAVYYCARHDGAMAGLFDYWGQGTLVTVSSATRIQNPDPAVYQLRDSKSSDKSVCLFTDFDSQTNVSQSKDSDVYITDKTVLDMRSMDFKSNSAVAWSNKSDFACANAFNNSIIPEDTFFPSPESSCGTQSFGLLDPKLCYLLDGILFIYGVILTALFLRVKFSRSADAPAYQQGQNQLYNELNLGRREEYDVLDKRRGRDPEMGGKPQRRKNPQEGLYNELQKDKMAEAYSEIGMKGERRRGKGHDGLYQGLSTATKDTYDALHMQALPPR

SEQ ID NO: 18300 - protein, 921 aa, Artificial Sequence
  Synthetic Polypeptide
MALPVTALLLPLALLLHAARPEVQLVESGGGLVQPGGSLRLSCAASGFSFSDFWMSWVRQAPGKGLEWVATISQAGSEKDYVDSVKGRFTISRDNAKKSLYLQMNSLRAEDTAVYYCASGVYSFDYRGQGTLVTVSSGTGGGGSGGGGSGGGGSEFSYVLTQPPSVSVAPGQTARITCGGNNIGSKSVHWYQQPPGQAPVVVVYDDSDRPSGIPERFSGSNSGNTATLTISRVEAGDEAVYYCQVWDSSSDHVVFGGGTKLTVLLEGQPKANPTVTLFPPSSEELQANKATLVCLISDFYPGAVTVAWKADGSPVKAGVETTKPSKQSNNKYAASSYLSLTPEQWKSHRSYSCQVTHEGSTVEKTVAPTECSPIKTDVITMDPKDNCSKDANDTLLLQLTNTSAYYMYLLLLLKSVVYFAIITCCLLRRTAFCCNGEKSRAKRSGSGATNFSLLKQAGDVEENPGPTSMDWIWRILFLVGAATGAHSGPQLQLQESGPGLVKPSETLSLTCTVSGDSISSGDYYWGWIRQPPGKGLEWIGHIYYSGVTYYNPSLKSRVTISVDTSRNQFSLKLSSVTAADTAVYYCTREDSSNWRSRGQGTLVTVSSGSGGGGSGGGGSGGGGSFEQLQLQESGPGLVKPSETLSLTCTVSGGSISSGSYFWGWIRQPPGKGLEWIGSIYYSGITYYNPSLKSRVTISVDTSKNQFSLKLSSVTAADTAVYYCARHDGAMAGLFDYWGQGTLVTVSSATRASTKGPSVFPLAPSSKSTSGGTAALGCLVKDYFPEPVTVSWNSGALTSGVHTFPAVLQSSGLYSLSSVVTVPSSSLGTQTYICNVNHKPSNTKVDKRVEPKSCEVKTDSTDHVKPKETENTKQPSKSCHKPKAIVHTEKVNMMSLTVLGLRMLFAKTVAVNFLLTAKLFFL

SEQ ID NO: 18301 - protein, 902 aa, Artificial Sequence
  Synthetic Polypeptide
MALPVTALLLPLALLLHAARPEVQLVESGGGLVQPGGSLRLSCAASGFSFSDFWMSWVRQAPGKGLEWVATISQAGSEKDYVDSVKGRFTISRDNAKKSLYLQMNSLRAEDTAVYYCASGVYSFDYRGQGTLVTVSSGTGGGGSGGGGSGGGGSEFSYVLTQPPSVSVAPGQTARITCGGNNIGSKSVHWYQQPPGQAPVVVVYDDSDRPSGIPERFSGSNSGNTATLTISRVEAGDEAVYYCQVWDSSSDHVVFGGGTKLTVLLEGQPKANPTVTLFPPSSEELQANKATLVCLISDFYPGAVTVAWKADGSPVKAGVETTKPSKQSNNKYAASSYLSLTPEQWKSHRSYSCQVTHEGSTVEKTVAPTECSGRADCGFTSESYQQGVLSATILYEILLGKATLYAVLVSALVLMAMVKRKDSRGRAKRSGSGVKQTLNFDLLKLAGDVESNPGPTSMDWIWRILFLVGAATGAHSGPQLQLQESGPGLVKPSETLSLTCTVSGDSISSGDYYWGWIRQPPGKGLEWIGHIYYSGVTYYNPSLKSRVTISVDTSRNQFSLKLSSVTAADTAVYYCTREDSSNWRSRGQGTLVTVSSGSGGGGSGGGGSGGGGSFEQLQLQESGPGLVKPSETLSLTCTVSGGSISSGSYFWGWIRQPPGKGLEWIGSIYYSGITYYNPSLKSRVTISVDTSKNQFSLKLSSVTAADTAVYYCARHDGAMAGLFDYWGQGTLVTVSSATRASTKGPSVFPLAPSSKSTSGGTAALGCLVKDYFPEPVTVSWNSGALTSGVHTFPAVLQSSGLYSLSSVVTVPSSSLGTQTYICNVNHKPSNTKVDKRVEPKSCIPEDTFFPSPESSCDVKLVEKSFETDTNLNFQNLSVIGFRILLLKVAGFNLLMTLRLWSS

SEQ ID NO: 18302 - protein, 759 aa, Artificial Sequence
  Synthetic Polypeptide
MALPVTALLLPLALLLHAARPEVQVLESGGGLVQPGGSLRLSCAASGFTFSNFAMSWVRQAPGKGLEWVSTISGSAGTTDYADSVKGRFTISRDNSKKTLYLQMNSLRVEDTAVYYCADGRGPFFDYRGQGTLVTVSSGTGGGGSGGGGSGGGGSEFSYVLTQPPSVSVAPGQTARITCGGNNIGSKSVHWYQQPPGQAPVVVVYDDSDRPSGIPERFSGSNSGNTATLTISRVEAGDEAVYYCQVWDSSSDHVVFGGGTKLTVLLEDLKNVFPPEVAVFEPSEAEISHTQKATLVCLATGFYPDHVELSWWVNGKEVHSGVCTDPQPLKEQPALNDSRYCLSSRLRVSATFWQNPRNHFRCQVQFYGLSENDEWTQDRAKPVTQIVSAEAWGRADCGFTSESYQQGVLSATILYEILLGKATLYAVLVSALVLMAMVKRKDSRGRAKRSGSGATNFSLLKQAGDVEENPGPTSMDWIWRILFLVGAATGAHSFEQLQLQESGPGLVKPSETLSLTCTVSGGSISSGSYFWGWIRQPPGKGLEWIGSIYYSGITYYNPSLKSRVTISVDTSKNQFSLKLSSVTAADTAVYYCARHDGAMAGLFDYWGQGTLVTVSSATRIQNPDPAVYQLRDSKSSDKSVCLFTDFDSQTNVSQSKDSDVYITDKCVLDMRSMDFKSNSAVAWSNKSDFACANAFNNSIIPEDTFFPSPESSCDVKLVEKSFETDTNLNFQNLSVIGFRILLLKVAGFNLLMTLRLWSS

SEQ ID NO: 18303 - protein, 760 aa, Artificial Sequence
  Synthetic Polypeptide
MALPVTALLLPLALLLHAARPSYVLTQPPSVSVAPGQTARITCGGNNIGSKSVHWYQQPPGQAPVVVVYDDSDRPSGIPERFSGSNSGNTATLTISRVEAGDEAVYYCQVWDSSSDHVVFGGGTKLTVLLEDLKNVFPPEVAVFEPSEAEISHTQKATLVCLATGFYPDHVELSWWVNGKEVHSGVCTDPQPLKEQPALNDSRYCLSSRLRVSATFWQNPRNHFRCQVQFYGLSENDEWTQDRAKPVTQIVSAEAWGRADCGFTSESYQQGVLSATILYEILLGKATLYAVLVSALVLMAMVKRKDSRGRAKRSGSGATNFSLLKQAGDVEENPGPTSMDWIWRILFLVGAATGAHSGPEVQLVESGGGLVQAGGSLRLSCAASGRTFSMGWFRQAPGKEREFVAAITYSGGSPYYADSVKGRFTISRDNAKNTVYLQMNSLKPEDTAVYYCAANPTYGSDWNAENWGQGTQVTVSSGSGGGGSGGGGSGGGGSFEQLQLQESGPGLVKPSETLSLTCTVSGGSISSGSYFWGWIRQPPGKGLEWIGSIYYSGITYYNPSLKSRVTISVDTSKNQFSLKLSSVTAADTAVYYCARHDGAMAGLFDYWGQGTLVTVSSATRIQNPDPAVYQLRDSKSSDKSVCLFTDFDSQTNVSQSKDSDVYITDKCVLDMRSMDFKSNSAVAWSNKSDFACANAFNNSIIPEDTFFPSPESSCDVKLVEKSFETDTNLNFQNLSVIGFRILLLKVAGFNLLMTLRLWSS

SEQ ID NO: 18304 - protein, 887 aa, Artificial Sequence
  Synthetic Polypeptide
MALPVTALLLPLALLLHAARPSYVLTQPPSVSVAPGQTARITCGGNNIGSKSVHWYQQPPGQAPVVVVYDDSDRPSGIPERFSGSNSGNTATLTISRVEAGDEAVYYCQVWDSSSDHVVFGGGTKLTVLLEDLKNVFPPEVAVFEPSEAEISHTQKATLVCLATGFYPDHVELSWWVNGKEVHSGVCTDPQPLKEQPALNDSRYCLSSRLRVSATFWQNPRNHFRCQVQFYGLSENDEWTQDRAKPVTQIVSAEAWGRADCGFTSESYQQGVLSATILYEILLGKATLYAVLVSALVLMAMVKRKDSRGRAKRSGSGATNFSLLKQAGDVEENPGPTSMDWIWRILFLVGAATGAHSQLQLQESGPGLVKPSETLSLTCTVSGGSISSGDYYWGWIRQPPGKGLEWIGSISYSGSTYYNPSLKSRVTISVDTSRNQFSLKLSSVTAADTAVYYCTREDSSNWRSRGQGTLVTVSSSGGGGSGGGGSEVQLVESGGGLVQAGGSLRLSCAASGRTFSMGWFRQAPGKEREFVAAITYSGGSPYYADSVKGRFTISRDNAKNTVYLQMNSLKPEDTAVYYCAANPTYGSDWNAENWGQGTQVTVSSGSGGGGSGGGGSGGGGSFEQLQLQESGPGLVKPSETLSLTCTVSGGSISSGSYFWGWIRQPPGKGLEWIGSIYYSGITYYNPSLKSRVTISVDTSKNQFSLKLSSVTAADTAVYYCARHDGAMAGLFDYWGQGTLVTVSSATRIQNPDPAVYQLRDSKSSDKSVCLFTDFDSQTNVSQSKDSDVYITDKCVLDMRSMDFKSNSAVAWSNKSDFACANAFNNSIIPEDTFFPSPESSCDVKLVEKSFETDTNLNFQNLSVIGFRILLLKVAGFNLLMTLRLWSS

SEQ ID NO: 18305 - protein, 896 aa, Artificial Sequence
  Synthetic Polypeptide
MALPVTALLLPLALLLHAARPEVQVLESGGGLVQPGGSLRLSCAASGFTFSNFAMSWVRQAPGKGLEWVSTISGSAGTTDYADSVKGRFTISRDNSKKTLYLQMNSLRVEDTAVYYCADGRGPFFDYRGQGTLVTVSSGTGGGGSGGGGSGGGGSEFSYVLTQPPSVSVAPGQTARITCGGNNIGSKSVHWYQQPPGQAPVVVVYDDSDRPSGIPERFSGSNSGNTATLTISRVEAGDEAVYYCQVWDSSSDHVVFGGGTKLTVLLEDLKNVFPPEVAVFEPSEAEISHTQKATLVCLATGFYPDHVELSWWVNGKEVHSGVCTDPQPLKEQPALNDSRYCLSSRLRVSATFWQNPRNHFRCQVQFYGLSENDEWTQDRAKPVTQIVSAEAWGRADCGFTSESYQQGVLSATILYEILLGKATLYAVLVSALVLMAMVKRKDSRGRAKRSGSGATNFSLLKQAGDVEENPGPTSMDWIWRILFLVGAATGAHSGPEVQLVESGGGLVQAGGSLRLSCAASGRTFSMGWFRQAPGKEREFVAAITYSGGSPYYASSVRGRFTISRDNAKNTVYLQMNSLKPEDTAVYYCAANPTYGSDWNAENWGQGTQVTVSSGSGGGGSGGGGSGGGGSFEQLQLQESGPGLVKPSETLSLTCTVSGGSISSGSYFWGWIRQPPGKGLEWIGSIYYSGITYYNPSLKSRVTISVDTSKNQFSLKLSSVTAADTAVYYCARHDGAMAGLFDYWGQGTLVTVSSATRIQNPDPAVYQLRDSKSSDKSVCLFTDFDSQTNVSQSKDSDVYITDKCVLDMRSMDFKSNSAVAWSNKSDFACANAFNNSIIPEDTFFPSPESSCDVKLVEKSFETDTNLNFQNLSVIGFRILLLKVAGFNLLMTLRLWSS

SEQ ID NO: 18306 - protein, 727 aa, Artificial Sequence
  Synthetic Polypeptide
MALPVTALLLPLALLLHAARPSYVLTQPPSVSVAPGQTARITCGGNNIGSKSVHWYQQPPGQAPVVVVYDDSDRPSGIPERFSGSNSGNTATLTISRVEAGDEAVYYCQVWDSSSDHVVFGGGTKLTVLGGGGSGGGGSGGGGSQLQLQESGPGLVKPSETLSLTCTVSGGSISSGSYFWGWIRQPPGKGLEWIGSIYYSGSTYYNPSLKSRVTISVDTSKNQFSLKLSSVTAADTAVYYCARHDGAVAGLFDYWGQGTLVTVSSATREQKLISEEDLAKPTTTPAPRPPTPAPTIASQPLSLRPEACRPAAGGAVHTRGLDFACDIYIWAPLAGTCGVLLLSLVITLYCKRGRKKLLYIFKQPFMRPVQTTQEEDGCSCRFPEEEEGGCELRVKFSRSADAPAYQQGQNQLYNELNLGRREEYDVLDKRRGRDPEMGGKPRRKNPQEGLYNELQKDKMAEAYSEIGMKGERRRGKGHDGLYQGLSTATKDTYDALHMQALPPRSSGSGEGRGSLLTCGDVEENPGPHMTEYKPTVRLATRDDVPRAVRTLAAAFADYPATRHTVDPDRHIERVTELQELFLTRVGLDIGKVWVADDGAAVAVWTTPESVEAGAVFAEIGPRMAELSGSRLAAQQQMEGLLAPHRPKEPAWFLATVGVSPDHQGKGLGSAVVLPGVEAAERAGVPAFLETSAPRNLPFYERLGFTVTADVEVPEGPRTWCMTRKPGA

SEQ ID NO: 18307 - protein, 721 aa, Artificial Sequence
  Synthetic Polypeptide
MALPVTALLLPLALLLHAARPSYVLTQPPSVSVAPGQTARITCGGNNIGSKSVHWYQQPPGQAPVVVVYDDSDRPSGIPERFSGSNSGNTATLTISRVEAGDEAVYYCQVWDSSSDHVVFGGGTKLTVLGGGGSGGGGSGGGGSQLQLQESGPGLVKPSETLSLTCTVSGGSISSGSYFWGWIRQPPGKGLEWIGSIYYSGSTYYNPSLKSRVTISVDTSKNQFSLKLSSVTAADTAVYYCARHDGAVAGLFDYWGQGTLVTVSSATREQKLISEEDLKIEVMYPPPYLDNEKSNGTIIHVKGKHLCPSPLFPGPSKPFWVLVVVGGVLACYSLLVTVAFIIFWVRSKRSRLLHSDYMNMTPRRPGPTRKHYQPYAPPRDFAAYRSRVKFSRSADAPAYQQGQNQLYNELNLGRREEYDVLDKRRGRDPEMGGKPRRKNPQEGLYNELQKDKMAEAYSEIGMKGERRRGKGHDGLYQGLSTATKDTYDALHMQALPPRSSGSGEGRGSLLTCGDVEENPGPHMTEYKPTVRLATRDDVPRAVRTLAAAFADYPATRHTVDPDRHIERVTELQELFLTRVGLDIGKVWVADDGAAVAVWTTPESVEAGAVFAEIGPRMAELSGSRLAAQQQMEGLLAPHRPKEPAWFLATVGVSPDHQGKGLGSAVVLPGVEAAERAGVPAFLETSAPRNLPFYERLGFTVTADVEVPEGPRTWCMTRKPGA

SEQ ID NO: 18308 - protein, 498 aa, Artificial Sequence
  Synthetic Polypeptide
MALPVTALLLPLALLLHAARPSYVLTQPPSVSVAPGQTARITCGGNNIGSKSVHWYQQPPGQAPVVVVYDDSDRPSGIPERFSGSNSGNTATLTISRVEAGDEAVYYCQVWDSSSDHVVFGGGTKLTVLGGGGSGGGGSGGGGSQLQLQESGPGLVKPSETLSLTCTVSGGSISSGSYFWGWIRQPPGKGLEWIGSIYYSGSTYYNPSLKSRVTISVDTSKNQFSLKLSSVTAADTAVYYCARHDGAVAGLFDYWGQGTLVTVSSATREQKLISEEDLKIEVMYPPPYLDNEKSNGTIIHVKGKHLCPSPLFPGPSKPFWVLVVVGGVLACYSLLVTVAFIIFWVRSKRSRLLHSDYMNMTPRRPGPTRKHYQPYAPPRDFAAYRSRVKFSRSADAPAYQQGQNQLYNELNLGRREEYDVLDKRRGRDPEMGGKPRRKNPQEGLYNELQKDKMAEAYSEIGMKGERRRGKGHDGLYQGLSTATKDTYDALHMQALPPR

SEQ ID NO: 18309 - protein, 504 aa, Artificial Sequence
  Synthetic Polypeptide
MALPVTALLLPLALLLHAARPSYVLTQPPSVSVAPGQTARITCGGNNIGSKSVHWYQQPPGQAPVVVVYDDSDRPSGIPERFSGSNSGNTATLTISRVEAGDEAVYYCQVWDSSSDHVVFGGGTKLTVLGGGGSGGGGSGGGGSQLQLQESGPGLVKPSETLSLTCTVSGGSISSGSYFWGWIRQPPGKGLEWIGSIYYSGSTYYNPSLKSRVTISVDTSKNQFSLKLSSVTAADTAVYYCARHDGAVAGLFDYWGQGTLVTVSSATREQKLISEEDLAKPTTTPAPRPPTPAPTIASQPLSLRPEACRPAAGGAVHTRGLDFACDIYIWAPLAGTCGVLLLSLVITLYCKRGRKKLLYIFKQPFMRPVQTTQEEDGCSCRFPEEEEGGCELRVKFSRSADAPAYQQGQNQLYNELNLGRREEYDVLDKRRGRDPEMGGKPRRKNPQEGLYNELQKDKMAEAYSEIGMKGERRRGKGHDGLYQGLSTATKDTYDALHMQALPPR

SEQ ID NO: 18310 - protein, 504 aa, Artificial Sequence
  Synthetic Polypeptide
MALPVTALLLPLALLLHAARPQLQLQESGPGLVKPSETLSLTCTVSGGSISSGSYFWGWIRQPPGKGLEWIGSIYYSGSTYYNPSLKSRVTISVDTSKNQFSLKLSSVTAADTAVYYCARHDGAVAGLFDYWGQGTLVTVSSAGGGGSGGGGSGGGGSSYVLTQPPSVSVAPGQTARITCGGNNIGSKSVHWYQQPPGQAPVVVVYDDSDRPSGIPERFSGSNSGNTATLTISRVEAGDEAVYYCQVWDSSSDHVVFGGGTKLTVLTREQKLISEEDLAKPTTTPAPRPPTPAPTIASQPLSLRPEACRPAAGGAVHTRGLDFACDIYIWAPLAGTCGVLLLSLVITLYCKRGRKKLLYIFKQPFMRPVQTTQEEDGCSCRFPEEEEGGCELRVKFSRSADAPAYQQGQNQLYNELNLGRREEYDVLDKRRGRDPEMGGKPRRKNPQEGLYNELQKDKMAEAYSEIGMKGERRRGKGHDGLYQGLSTATKDTYDALHMQALPPR

SEQ ID NO: 18311 - protein, 917 aa, Artificial Sequence
  Synthetic Polypeptide
MALPVTALLLPLALLLHAARPSYVLTQPPSVSVAPGQTARITCGGNNIGSKSVHWYQQPPGQAPVVVVYDDSDRPSGIPERFSGSNSGNTATLTISRVEAGDEAVYYCQVWDSSSDHVVFGGGTKLTVLGGGGSGGGGSGGGGSQLQLQESGPGLVKPSETLSLTCTVSGGSISSGSYFWGWIRQPPGKGLEWIGSIYYSGSTYYNPSLKSRVTISVDTSKNQFSLKLSSVTAADTAVYYCARHDGAVAGLFDYWGQGTLVTVSSATREQKLISEEDLAKPTTTPAPRPPTPAPTIASQPLSLRPEACRPAAGGAVHTRGLDFACDIYIWAPLAGTCGVLLLSLVITLYCGRARVKFSRSADAPAYQQGQNQLYNELNLGRREEYDVLDKRRGRDPEMGGKPRRKNPQEGLYNELQKDKMAEAYSEIGMKGERRRGKGHDGLYQGLSTATKDTYDALHMQALPPRSRGSGATNFSLLKQAGDVEENPGPGIHMATYEVLCEVARKLGTDDREVVLFLLNVFIPQPTLAQLIGALRALKEEGRLTFPLLAECLFRAGRRDLLRDLLHLDPRFLERHLAGTMSYFSPYQLTVLHVDGELCARDIRSLIFLSKDTIGSRSTPQTFLHWVYCMENLDLLGPTDVDALMSMLRSLSRVDLQRQVQTLMGLHLSGPSHSQHYRHTPLETDFYDYKDDDDKTSGSGEGRGSLLTCGDVEENPGPHMTEYKPTVRLATRDDVPRAVRTLAAAFADYPATRHTVDPDRHIERVTELQELFLTRVGLDIGKVWVADDGAAVAVWTTPESVEAGAVFAEIGPRMAELSGSRLAAQQQMEGLLAPHRPKEPAWFLATVGVSPDHQGKGLGSAVVLPGVEAAERAGVPAFLETSAPRNLPFYERLGFTVTADVEVPEGPRTWCMTRKPGA

SEQ ID NO: 18312 - protein, 857 aa, Artificial Sequence
  Synthetic Polypeptide
MALPVTALLLPLALLLHAARPSYVLTQPPSVSVAPGQTARITCGGNNIGSKSVHWYQQPPGQAPVVVVYDDSDRPSGIPERFSGSNSGNTATLTISRVEAGDEAVYYCQVWDSSSDHVVFGGGTKLTVLLEIQNPDPAVYQLRDSKSSDKSVCLFTDFDSQTNVSQSKDSDVYITDKCVLDMRSMDFKSNSAVAWSNKSDFACANAFNNSIIPEDTFFPSSDVPCDVKLVEKSFETDTNLNFQNLSVIGFRILLLKVAGFNLLMTLRLWSSRAKRSGSGVKQTLNFDLLKLAGDVESNPGPTSMDWIWRILFLVGAATGAHSFEQLQLQESGPGLVKPSETLSLTCTVSGGSISSGSYFWGWIRQPPGKGLEWIGSIYYSGSTYYNPSLKSRVTISVDTSKNQFSLKLSSVTAADTAVYYCARHDGAVAGLFDYWGQGTLVTVSSATREDLKNVFPPEVAVFEPSKAEIAHTQKATLVCLATGFYPDHVELSWWVNGKEVHSGVCTDPQPLKEQPALNDSRYCLSSRLRVSATFWQNPRNHFRCQVQFYGLSENDEWTQDRAKPVTQIVSAEAWGRADCGITSASYHQGVLSATILYEILLGKATLYAVLVSALVLMAMVKRKDSRGRAKRSGSGATNFSLLKQAGDVEENPGPSRGHMTEYKPTVRLATRDDVPRAVRTLAAAFADYPATRHTVDPDRHIERVTELQELFLTRVGLDIGKVWVADDGAAVAVWTTPESVEAGAVFAEIGPRMAELSGSRLAAQQQMEGLLAPHRPKEPAWFLATVGVSPDHQGKGLGSAVVLPGVEAAERAGVPAFLETSAPRNLPFYERLGFTVTADVEVPEGPRTWCMTRKPGA

SEQ ID NO: 18313 - protein, 856 aa, Artificial Sequence
  Synthetic Polypeptide
MALPVTALLLPLALLLHAARPSYVLTQPPSVSVAPGQTARITCGGNNIGSKSVHWYQQPPGQAPVVVVYDDSDRPSGIPERFSGSNSGNTATLTISRVEAGDEAVYYCQVWDSSSDHVVFGGGTKLTVLLEDLKNVFPPEVAVFEPSKAEIAHTQKATLVCLATGFYPDHVELSWWVNGKEVHSGVCTDPQPLKEQPALNDSRYCLSSRLRVSATFWQNPRNHFRCQVQFYGLSENDEWTQDRAKPVTQIVSAEAWGRADCGITSASYHQGVLSATILYEILLGKATLYAVLVSALVLMAMVKRKDSRGRAKRSGSGATNFSLLKQAGDVEENPGPTSMDWIWRILFLVGAATGAHSFEQLQLQESGPGLVKPSETLSLTCTVSGGSISSGSYFWGWIRQPPGKGLEWIGSIYYSGSTYYNPSLKSRVTISVDTSKNQFSLKLSSVTAADTAVYYCARHDGAVAGLFDYWGQGTLVTVSSATRIQNPDPAVYQLRDSKSSDKSVCLFTDFDSQTNVSQSKDSDVYITDKCVLDMRSMDFKSNSAVAWSNKSDFACANAFNNSIIPEDTFFPSSDVPCDVKLVEKSFETDTNLNFQNLSVIGFRILLLKVAGFNLLMTLRLWSSRAKRSGSGVKQTLNFDLLKLAGDVESNPGPSRGHMTEYKPTVRLATRDDVPRAVRTLAAAFADYPATRHTVDPDRHIERVTELQELFLTRVGLDIGKVWVADDGAAVAVWTTPESVEAGAVFAEIGPRMAELSGSRLAAQQQMEGLLAPHRPKEPAWFLATVGVSPDHQGKGLGSAVVLPGVEAAERAGVPAFLETSAPRNLPFYERLGFTVTADVEVPEGPRTWCMTRKPGA

SEQ ID NO: 18314 - protein, 623 aa, Artificial Sequence
  Synthetic Polypeptide
MALPVTALLLPLALLLHAARPSYVLTQPPSVSVAPGQTARITCGGNNIGSKSVHWYQQPPGQAPVVVVYDDSDRPSGIPERFSGSNSGNTATLTISRVEAGDEAVYYCQVWDSSSDHVVFGGGTKLTVLLEDLKNVFPPEVAVFEPSEAEISHTQKATLVCLATGFYPDHVELSWWVNGKEVHSGVCTDPQPLKEQPALNDSRYCLSSRLRVSATFWQNPRNHFRCQVQFYGLSENDEWTQDRAKPVTQIVSAEAWGRADCGFTSESYQQGVLSATILYEILLGKATLYAVLVSALVLMAMVKRKDSRGRAKRSGSGATNFSLLKQAGDVEENPGPTSMDWIWRILFLVGAATGAHSFEQLQLQESGPGLVKPSETLSLTCTVSGGSISSGSYFWGWIRQPPGKGLEWIGSIYYSGSTYYNPSLKSRVTISVDTSKNQFSLKLSSVTAADTAVYYCARHDGAVAGLFDYWGQGTLVTVSSATRIQNPDPAVYQLRDSKSSDKSVCLFTDFDSQTNVSQSKDSDVYITDKCVLDMRSMDFKSNSAVAWSNKSDFACANAFNNSIIPEDTFFPSPESSCDVKLVEKSFETDTNLNFQNLSVIGFRILLLKVAGFNLLMTLRLWSS

SEQ ID NO: 18315 - protein, 848 aa, Artificial Sequence
  Synthetic Polypeptide
MALPVTALLLPLALLLHAARPSYVLTQPPSVSVAPGQTARITCGGNNIGSKSVHWYQQPPGQAPVVVVYDDSDRPSGIPERFSGSNSGNTATLTISRVEAGDEAVYYCQVWDSSSDHVVFGGGTKLTVLLEDLKNVFPPEVAVFEPSEAEISHTQKATLVCLATGFYPDHVELSWWVNGKEVHSGVCTDPQPLKEQPALNDSRYCLSSRLRVSATFWQNPRNHFRCQVQFYGLSENDEWTQDRAKPVTQIVSAEAWGRADCGFTSESYQQGVLSATILYEILLGKATLYAVLVSALVLMAMVKRKDSRGRAKRSGSGATNFSLLKQAGDVEENPGPTSMDWIWRILFLVGAATGAHSFEQLQLQESGPGLVKPSETLSLTCTVSGGSISSGSYFWGWIRQPPGKGLEWIGSIYYSGSTYYNPSLKSRVTISVDTSKNQFSLKLSSVTAADTAVYYCARHDGAVAGLFDYWGQGTLVTVSSATRIQNPDPAVYQLRDSKSSDKSVCLFTDFDSQTNVSQSKDSDVYITDKCVLDMRSMDFKSNSAVAWSNKSDFACANAFNNSIIPEDTFFPSPESSCDVKLVEKSFETDTNLNFQNLSVIGFRILLLKVAGFNLLMTLRLWSSRAKRSGSGVKQTLNFDLLKLAGDVESNPGPSRGGIHTMATYEVLCEVARKLGTDDREVVLFLLNVFIPQPTLAQLIGALRALKEEGRLTFPLLAECLFRAGRRDLLRDLLHLDPRFLERHLAGTMSYFSPYQLTVLHVDGELCARDIRSLIFLSKDTIGSRSTPQTFLHWVYCMENLDLLGPTDVDALMSMLRSLSRVDLQRQVQTLMGLHLSGPSHSQHYRHTP

SEQ ID NO: 18316 - protein, 627 aa, Artificial Sequence
  Synthetic Polypeptide
MALPVTALLLPLALLLHAARPSYVLTQPPSVSVAPGQTARITCGGNNIGSKSVHWYQQPPGQAPVVVVYDDSDRPSGIPERFSGSNSGNTATLTISRVEAGDEAVYYCQVWDSSSDHVVFGGGTKLTVLLEIQNPDPAVYQLRDSKSSDKSVCLFTDFDSQTNVSQSKDSDVYITDKCVLDMRSMDFKSNSAVAWSNKSDFACANAFNNSIIPEDTFFPSPESSCDVKLVEKSFETDTNLNFQNLSVIGFRILLLKVAGFNLLMTLRLWSSRAKRSGSGVKQTLNFDLLKLAGDVESNPGPTSMDWIWRILFLVGAATGAHSFEQLQLQESGPGLVKPSETLSLTCTVSGGSISSGSYFWGWIRQPPGKGLEWIGSIYYSGSTYYNPSLKSRVTISVDTSKNQFSLKLSSVTAADTAVYYCARHDGAVAGLFDYWGQGTLVTVSSATREDLKNVFPPEVAVFEPSEAEISHTQKATLVCLATGFYPDHVELSWWVNGKEVHSGVCTDPQPLKEQPALNDSRYCLSSRLRVSATFWQNPRNHFRCQVQFYGLSENDEWTQDRAKPVTQIVSAEAWGRADCGFTSESYQQGVLSATILYEILLGKATLYAVLVSALVLMAMVKRKDSRG

SEQ ID NO: 18317 - protein, 849 aa, Artificial Sequence
  Synthetic Polypeptide
MALPVTALLLPLALLLHAARPSYVLTQPPSVSVAPGQTARITCGGNNIGSKSVHWYQQPPGQAPVVVVYDDSDRPSGIPERFSGSNSGNTATLTISRVEAGDEAVYYCQVWDSSSDHVVFGGGTKLTVLLEIQNPDPAVYQLRDSKSSDKSVCLFTDFDSQTNVSQSKDSDVYITDKCVLDMRSMDFKSNSAVAWSNKSDFACANAFNNSIIPEDTFFPSPESSCDVKLVEKSFETDTNLNFQNLSVIGFRILLLKVAGFNLLMTLRLWSSRAKRSGSGVKQTLNFDLLKLAGDVESNPGPTSMDWIWRILFLVGAATGAHSFEQLQLQESGPGLVKPSETLSLTCTVSGGSISSGSYFWGWIRQPPGKGLEWIGSIYYSGSTYYNPSLKSRVTISVDTSKNQFSLKLSSVTAADTAVYYCARHDGAVAGLFDYWGQGTLVTVSSATREDLKNVFPPEVAVFEPSEAEISHTQKATLVCLATGFYPDHVELSWWVNGKEVHSGVCTDPQPLKEQPALNDSRYCLSSRLRVSATFWQNPRNHFRCQVQFYGLSENDEWTQDRAKPVTQIVSAEAWGRADCGFTSESYQQGVLSATILYEILLGKATLYAVLVSALVLMAMVKRKDSRGRAKRSGSGATNFSLLKQAGDVEENPGPSRGGIHTMATYEVLCEVARKLGTDDREVVLFLLNVFIPQPTLAQLIGALRALKEEGRLTFPLLAECLFRAGRRDLLRDLLHLDPRFLERHLAGTMSYFSPYQLTVLHVDGELCARDIRSLIFLSKDTIGSRSTPQTFLHWVYCMENLDLLGPTDVDALMSMLRSLSRVDLQRQVQTLMGLHLSGPSHSQHYRHTP

SEQ ID NO: 18318 - protein, 901 aa, Artificial Sequence
  Synthetic Polypeptide
MALPVTALLLPLALLLHAARPLEGKPIPNPLLGLDSTGSGEDLKNVFPPEVAVFEPSKAEIAHTQKATLVCLATGFYPDHVELSWWVNGKEVHSGVCTDPQPLKEQPALNDSRYCLSSRLRVSATFWQNPRNHFRCQVQFYGLSENDEWTQDRAKPVTQIVSAEAWGRADCGITSASYHQGVLSATILYEILLGKATLYAVLVSALVLMAMVKRKDSRGRAKRSGSGATNFSLLKQAGDVEENPGPTSMALPVTALLLPLALLLHAARPSYVLTQPPSVSVAPGQTARITCGGNNIGSKSVHWYQQPPGQAPVVVVYDDSDRPSGIPERFSGSNSGNTATLTISRVEAGDEAVYYCQVWDSSSDHVVFGGGTKLTVLGGGGSGGGGSGGGGSQLQLQESGPGLVKPSETLSLTCTVSGGSISSGSYFWGWIRQPPGKGLEWIGSIYYSGSTYYNPSLKSRVTISVDTSKNQFSLKLSSVTAADTAVYYCARHDGAVAGLFDYWGQGTLVTVSSATREQKLISEEDGSGIQNPDPAVYQLRDSKSSDKSVCLFTDFDSQTNVSQSKDSDVYITDKCVLDMRSMDFKSNSAVAWSNKSDFACANAFNNSIIPEDTFFPSSDVPCDVKLVEKSFETDTNLNFQNLSVIGFRILLLKVAGFNLLMTLRLWSSRAKRSGSGVKQTLNFDLLKLAGDVESNPGPSRGHMTEYKPTVRLATRDDVPRAVRTLAAAFADYPATRHTVDPDRHIERVTELQELFLTRVGLDIGKVWVADDGAAVAVWTTPESVEAGAVFAEIGPRMAELSGSRLAAQQQMEGLLAPHRPKEPAWFLATVGVSPDHQGKGLGSAVVLPGVEAAERAGVPAFLETSAPRNLPFYERLGFTVTADVEVPEGPRTWCMTRKPGA

SEQ ID NO: 18319 - protein, 902 aa, Artificial Sequence
  Synthetic Polypeptide
MALPVTALLLPLALLLHAARPLEQKLISEEDLGSGDRPDPAVYQLRDSKSSDKSVCLFTDFDSQTNVSQSKDSDVYITDKCVLDMRSMDFKSNSAVAWSNKSDFACANAFNNSIIPEDTFFPSPESSCDVKLVEKSFETDTNLNFQNLSVIGFRILLLKVAGFNLLMTLRLWSSSSRAKRSGSGVKQTLNFDLLKLAGDVESNPGPTSMALPVTALLLPLALLLHAARPSYVLTQPPSVSVAPGQTARITCGGNNIGSKSVHWYQQPPGQAPVVVVYDDSDRPSGIPERFSGSNSGNTATLTISRVEAGDEAVYYCQVWDSSSDHVVFGGGTKLTVLGGGGSGGGGSGGGGSQLQLQESGPGLVKPSETLSLTCTVSGGSISSGSYFWGWIRQPPGKGLEWIGSIYYSGSTYYNPSLKSRVTISVDTSKNQFSLKLSSVTAADTAVYYCARHDGAVAGLFDYWGQGTLVTVSSATRGKPIPNPLLGLDSTGSGEDLKNVFPPEVAVFEPSEAEISHTQKATLVCLATGFYPDHVELSWWVNGKEVHSGVCTDPQPLKEQPALNDSRYCLSSRLRVSATFWQNPRNHFRCQVQFYGLSENDEWTQDRAKPVTQIVSAEAWGRADCGFTSESYQQGVLSATILYEILLGKATLYAVLVSALVLMAMVKRKDSRGRAKRSGSGATNFSLLKQAGDVEENPGPSRGHMTEYKPTVRLATRDDVPRAVRTLAAAFADYPATRHTVDPDRHIERVTELQELFLTRVGLDIGKVWVADDGAAVAVWTTPESVEAGAVFAEIGPRMAELSGSRLAAQQQMEGLLAPHRPKEPAWFLATVGVSPDHQGKGLGSAVVLPGVEAAERAGVPAFLETSAPRNLPFYERLGFTVTADVEVPEGPRTWCMTRKPGA

SEQ ID NO: 18320 - protein, 856 aa, Artificial Sequence
  Synthetic Polypeptide
MALPVTALLLPLALLLHAARPSYVLTQPPSVSVAPGQTARITCGGNNIGSKSVHWYQQPPGQAPVVVVYDDSDRPSGIPERFSGSNSGNTATLTISRVEAGDEAVYYCQVWDSSSDHVVFGGGTKLTVLLEDLKNVFPPEVAVFEPSEAEISHTQKATLVCLATGFYPDHVELSWWVNGKEVHSGVSTDPQPLKEQPALNDSRYCLSSRLRVSATFWQNPRNHFRCQVQFYGLSENDEWTQDRAKPVTQIVSAEAWGRADCGFTSESYQQGVLSATILYEILLGKATLYAVLVSALVLMAMVKRKDSRGRAKRSGSGATNFSLLKQAGDVEENPGPTSMDWIWRILFLVGAATGAHSFEQLQLQESGPGLVKPSETLSLTCTVSGGSISSGSYFWGWIRQPPGKGLEWIGSIYYSGSTYYNPSLKSRVTISVDTSKNQFSLKLSSVTAADTAVYYCARHDGAVAGLFDYWGQGTLVTVSSATRIQNPDPAVYQLRDSKSSDKSVCLFTDFDSQTNVSQSKDSDVYITDKTVLDMRSMDFKSNSAVAWSNKSDFACANAFNNSIIPEDTFFPSPESSCDVKLVEKSFETDTNLNFQNLSVIGFRILLLKVAGFNLLMTLRLWSSRAKRSGSGVKQTLNFDLLKLAGDVESNPGPSRGHMTEYKPTVRLATRDDVPRAVRTLAAAFADYPATRHTVDPDRHIERVTELQELFLTRVGLDIGKVWVADDGAAVAVWTTPESVEAGAVFAEIGPRMAELSGSRLAAQQQMEGLLAPHRPKEPAWFLATVGVSPDHQGKGLGSAVVLPGVEAAERAGVPAFLETSAPRNLPFYERLGFTVTADVEVPEGPRTWCMTRKPGA

SEQ ID NO: 18321 - protein, 938 aa, Artificial Sequence
  Synthetic Polypeptide
MALPVTALLLPLALLLHAARPSYVLTQPPSVSVAPGQTARITCGGNNIGSKSVHWYQQPPGQAPVVVVYDDSDRPSGIPERFSGSNSGNTATLTISRVEAGDEAVYYCQVWDSSSDHVVFGGGTKLTVLLEDLKNVFPPEVAVFEPSEAEISHTQKATLVCLATGFYPDHVELSWWVNGKEVHSGVSTDPQPLKEQPALNDSRYCLSSRLRVSATFWQNPRNHFRCQVQFYGLSENDEWTQDRAKPVTQIVSAEAWGRADCGFTSESYQQGVLSATILYEILLGKATLYAVLVSALVLMAMVKRKDSRGRAKRSGSGATNFSLLKQAGDVEENPGPTSMDWIWRILFLVGAATGAHSFEQLQLQESGPGLVKPSETLSLTCTVSGGSISSGSYFWGWIRQPPGKGLEWIGSIYYSGSTYYNPSLKSRVTISVDTSKNQFSLKLSSVTAADTAVYYCARHDGAVAGLFDYWGQGTLVTVSSATREQKLISEEDGSGTPFPSLAPPIMLLVDGKQQMVVVCLVLDVAPPGLDSPIWFSAGNGSALDAFTYGPSPATDGTWTNLAHLSLPSEELASWEPLVCHTGPGAEGHSRSTQPMHLSGEASTARTCPQEPLRGTPGGALWLGVLRLLLFKLLLFDLLLTCSCLCDPAGPLPSPATTTRLRALGSHRLHPATETGGREATSSPRPQPRDRRWGDTPPGRKPGSPVRAKRSGSGVKQTLNFDLLKLAGDVESNPGPSRGHMTEYKPTVRLATRDDVPRAVRTLAAAFADYPATRHTVDPDRHIERVTELQELFLTRVGLDIGKVWVADDGAAVAVWTTPESVEAGAVFAEIGPRMAELSGSRLAAQQQMEGLLAPHRPKEPAWFLATVGVSPDHQGKGLGSAVVLPGVEAAERAGVPAFLETSAPRNLPFYERLGFTVTADVEVPEGPRTWCMTRKPGA

SEQ ID NO: 18322 - protein, 956 aa, Artificial Sequence
  Synthetic Polypeptide
MALPVTALLLPLALLLHAARPLEDLKNVFPPEVAVFEPSEAEISHTQKATLVCLATGFYPDHVELSWWVNGKEVHSGVSTDPQPLKEQPALNDSRYCLSSRLRVSATFWQNPRNHFRCQVQFYGLSENDEWTQDRAKPVTQIVSAEAWGRADCGFTSESYQQGVLSATILYEILLGKATLYAVLVSALVLMAMVKRKDSRGRAKRSGSGATNFSLLKQAGDVEENPGPTSMALPVTALLLPLALLLHAARPSYVLTQPPSVSVAPGQTARITCGGNNIGSKSVHWYQQPPGQAPVVVVYDDSDRPSGIPERFSGSNSGNTATLTISRVEAGDEAVYYCQVWDSSSDHVVFGGGTKLTVLGGGGSGGGGSGGGGSQLQLQESGPGLVKPSETLSLTCTVSGGSISSGSYFWGWIRQPPGKGLEWIGSIYYSGSTYYNPSLKSRVTISVDTSKNQFSLKLSSVTAADTAVYYCARHDGAVAGLFDYWGQGTLVTVSSATREQKLISEEDLGSGTPFPSLAPPIMLLVDGKQQMVVVCLVLDVAPPGLDSPIWFSAGNGSALDAFTYGPSPATDGTWTNLAHLSLPSEELASWEPLVCHTGPGAEGHSRSTQPMHLSGEASTARTCPQEPLRGTPGGALWLGVLRLLLFKLLLFDLLLTCSCLCDPAGPLPSPATTTRLRALGSHRLHPATETGGREATSSPRPQPRDRRWGDTPPGRKPGSPVRAKRSGSGVKQTLNFDLLKLAGDVESNPGPSRSRGHMTEYKPTVRLATRDDVPRAVRTLAAAFADYPATRHTVDPDRHIERVTELQELFLTRVGLDIGKVWVADDGAAVAVWTTPESVEAGAVFAEIGPRMAELSGSRLAAQQQMEGLLAPHRPKEPAWFLATVGVSPDHQGKGLGSAVVLPGVEAAERAGVPAFLETSAPRNLPFYERLGFTVTADVEVPEGPRTWCMTRKPGA

SEQ ID NO: 18323 - protein, 893 aa, Artificial Sequence
  Synthetic Polypeptide
MALPVTALLLPLALLLHAARPSYVLTQPPSVSVAPGQTARITCGGNNIGSKSVHWYQQPPGQAPVVVVYDDSDRPSGIPERFSGSNSGNTATLTISRVEAGDEAVYYCQVWDSSSDHVVFGGGTKLTVLLEGKPIPNPLLGLDSTGSGDKQLDADVSPKPTIFLPSIAETKLQKAGTYLCLLEKFFPDVIKIHWQEKKSNTILGSQEGNTMKTNDTYMKFSWLTVPEKSLDKEHRCIVRHENNKNGVDQEIIFPPIKTDVITMDPKDNCSKDANDTLLLQLTNTSAYYMYLLLLLKSVVYFAIITCCLLRRTAFCCNGEKSRAKRSGSGATNFSLLKQAGDVEENPGPTSMDWIWRILFLVGAATGAHSFEQLQLQESGPGLVKPSETLSLTCTVSGGSISSGSYFWGWIRQPPGKGLEWIGSIYYSGSTYYNPSLKSRVTISVDTSKNQFSLKLSSVTAADTAVYYCARHDGAVAGLFDYWGQGTLVTVSSATREQKLISEEDGSGSQPHTKPSVFVMKNGTNVACLVKEFYPKDIRINLVSSKKITEFDPAIVISPSGKYNAVKLGKYEDSNSVTCSVQHDNKTVHSTDFEVKTDSTDHVKPKETENTKQPSKSCHKPKAIVHTEKVNMMSLTVLGLRMLFAKTVAVNFLLTAKLFFLRAKRSGSGVKQTLNFDLLKLAGDVESNPGPSRGHMTEYKPTVRLATRDDVPRAVRTLAAAFADYPATRHTVDPDRHIERVTELQELFLTRVGLDIGKVWVADDGAAVAVWTTPESVEAGAVFAEIGPRMAELSGSRLAAQQQMEGLLAPHRPKEPAWFLATVGVSPDHQGKGLGSAVVLPGVEAAERAGVPAFLETSAPRNLPFYERLGFTVTADVEVPEGPRTWCMTRKPGA

SEQ ID NO: 18324 - protein, 631 aa, Artificial Sequence
  Synthetic Polypeptide
MALPVTALLLPLALLLHAARPSYVLTQPPSVSVAPGQTARITCGGNNIGSKSVHWYQQPPGQAPVVVVYDDSDRPSGIPERFSGSNSGNTATLTISRVEAGDEAVYYCQVWDSSSDHVVFGGGTKLTVLLESQPHTKPSVFVMKNGTNVACLVKEFYPKDIRINLVSSKKITEFDPAIVISPSGKYNAVKLGKYEDSNSVTCSVQHDNKTVHSTDFEVKTDSTDHVKPKETENTKQPSKSCHKPKAIVHTEKVNMMSLTVLGLRMLFAKTVAVNFLLTAKLFFLRAKRSGSGATNFSLLKQAGDVEENPGPTSMDWIWRILFLVGAATGAHSFEQLQLQESGPGLVKPSETLSLTCTVSGGSISSGSYFWGWIRQPPGKGLEWIGSIYYSGSTYYNPSLKSRVTISVDTSKNQFSLKLSSVTAADTAVYYCARHDGAVAGLFDYWGQGTLVTVSSATRDKQLDADVSPKPTIFLPSIAETKLQKAGTYLCLLEKFFPDVIKIHWQEKKSNTILGSQEGNTMKTNDTYMKFSWLTVPEKSLDKEHRCIVRHENNKNGVDQEIIFPPIKTDVITMDPKDNCSKDANDTLLLQLTNTSAYYMYLLLLLKSVVYFAIITCCLLRRTAFCCNGEKS

SEQ ID NO: 18325 - protein, 908 aa, Artificial Sequence
  Synthetic Polypeptide
MALPVTALLLPLALLLHAARPLEGKPIPNPLLGLDSTGSGDKQLDADVSPKPTIFLPSIAETKLQKAGTYLCLLEKFFPDVIKIHWQEKKSNTILGSQEGNTMKTNDTYMKFSWLTVPEKSLDKEHRCIVRHENNKNGVDQEIIFPPIKTDVITMDPKDNCSKDANDTLLLQLTNTSAYYMYLLLLLKSVVYFAIITCCLLRRTAFCCNGEKSRAKRSGSGATNFSLLKQAGDVEENPGPTSMALPVTALLLPLALLLHAARPSYVLTQPPSVSVAPGQTARITCGGNNIGSKSVHWYQQPPGQAPVVVVYDDSDRPSGIPERFSGSNSGNTATLTISRVEAGDEAVYYCQVWDSSSDHVVFGGGTKLTVLGGGGSGGGGSGGGGSQLQLQESGPGLVKPSETLSLTCTVSGGSISSGSYFWGWIRQPPGKGLEWIGSIYYSGSTYYNPSLKSRVTISVDTSKNQFSLKLSSVTAADTAVYYCARHDGAVAGLFDYWGQGTLVTVSSATREQKLISEEDGSGSQPHTKPSVFVMKNGTNVACLVKEFYPKDIRINLVSSKKITEFDPAIVISPSGKYNAVKLGKYEDSNSVTCSVQHDNKTVHSTDFEVKTDSTDHVKPKETENTKQPSKSCHKPKAIVHTEKVNMMSLTVLGLRMLFAKTVAVNFLLTAKLFFLRAKRSGSGVKQTLNFDLLKLAGDVESNPGPSRGHMTEYKPTVRLATRDDVPRAVRTLAAAFADYPATRHTVDPDRHIERVTELQELFLTRVGLDIGKVWVADDGAAVAVWTTPESVEAGAVFAEIGPRMAELSGSRLAAQQQMEGLLAPHRPKEPAWFLATVGVSPDHQGKGLGSAVVLPGVEAAERAGVPAFLETSAPRNLPFYERLGFTVTADVEVPEGPRTWCMTRKPGA

SEQ ID NO: 18326 - protein, 1033 aa, Artificial Sequence
  Synthetic Polypeptide
MALPVTALLLPLALLLHAARPSYVLTQPPSVSVAPGQTARITCGGNNIGSKSVHWYQQPPGQAPVVVVYDDSDRPSGIPERFSGSNSGNTATLTISRVEAGDEAVYYCQVWDSSSDHVVFGGGTKLTVLGQPKANPTVTLFPPSSEELQANKATLVCLISDFYPGAVTVAWKADGSPVKAGVETTKPSKQSNNKYAASSYLSLTPEQWKSHRSYSCQVTHEGSTVEKTVAPTECSGSQSFGLLDPKLCYLLDGILFIYGVILTALFLRVKFSRSADAPAYQQGQNQLYNELNLGRREEYDVLDKRRGRDPEMGGKPQRRKNPQEGLYNELQKDKMAEAYSEIGMKGERRRGKGHDGLYQGLSTATKDTYDALHMQALPPRRAKRSGSGATNFSLLKQAGDVEENPGPTSMDWIWRILFLVGAATGAHSFEQLQLQESGPGLVKPSETLSLTCTVSGGSISSGSYFWGWIRQPPGKGLEWIGSIYYSGSTYYNPSLKSRVTISVDTSKNQFSLKLSSVTAADTAVYYCARHDGAVAGLFDYWGQGTLVTVSSAASTKGPSVFPLAPSSKSTSGGTAALGCLVKDYFPEPVTVSWNSGALTSGVHTFPAVLQSSGLYSLSSVVTVPSSSLGTQTYICNVNHKPSNTKVDKRVEPKSCGTQSFGLLDPKLCYLLDGILFIYGVILTALFLRVKFSRSADAPAYQQGQNQLYNELNLGRREEYDVLDKRRGRDPEMGGKPQRRKNPQEGLYNELQKDKMAEAYSEIGMKGERRRGKGHDGLYQGLSTATKDTYDALHMQALPPRRAKRSGSGVKQTLNFDLLKLAGDVESNPGPSRGHMTEYKPTVRLATRDDVPRAVRTLAAAFADYPATRHTVDPDRHIERVTELQELFLTRVGLDIGKVWVADDGAAVAVWTTPESVEAGAVFAEIGPRMAELSGSRLAAQQQMEGLLAPHRPKEPAWFLATVGVSPDHQGKGLGSAVVLPGVEAAERAGVPAFLETSAPRNLPFYERLGFTVTADVEVPEGPRTWCMTRKPGA

SEQ ID NO: 18327 - protein, 819 aa, Artificial Sequence
  Synthetic Polypeptide
MALPVTALLLPLALLLHAARPSYVLTQPPSVSVAPGQTARITCGGNNIGSKSVHWYQQPPGQAPVVVVYDDSDRPSGIPERFSGSNSGNTATLTISRVEAGDEAVYYCQVWDSSSDHVVFGGGTKLTVLLEDLKNVFPPEVAVFEPSEAEISHTQKATLVCLATGFYPDHVELSWWVNGKEVHSGVSTDPQPLKEQPALNDSRYCLSSRLRVSATFWQNPRNHFRCQVQFYGLSENDEWTQDRAKPVTQIVSAEAWGRADCGSQSFGLLDPKLCYLLDGILFIYGVILTALFLRVKFSRSADAPAYQQGQNQLYNELNLGRREEYDVLDKRRGRDPEMGGKPQRRKNPQEGLYNELQKDKMAEAYSEIGMKGERRRGKGHDGLYQGLSTATKDTYDALHMQALPPRRAKRSGSGATNFSLLKQAGDVEENPGPTSMDWIWRILFLVGAATGAHSFEQLQLQESGPGLVKPSETLSLTCTVSGGSISSGSYFWGWIRQPPGKGLEWIGSIYYSGSTYYNPSLKSRVTISVDTSKNQFSLKLSSVTAADTAVYYCARHDGAVAGLFDYWGQGTLVTVSSATRIQNPDPAVYQLRDSKSSDKSVCLFTDFDSQTNVSQSKDSDVYITDKTVLDMRSMDFKSNSAVAWSNKSDFACANAFNNSIIPEDTFFPSPESSCGTQSFGLLDPKLCYLLDGILFIYGVILTALFLRVKFSRSADAPAYQQGQNQLYNELNLGRREEYDVLDKRRGRDPEMGGKPQRRKNPQEGLYNELQKDKMAEAYSEIGMKGERRRGKGHDGLYQGLSTATKDTYDALHMQALPPR

SEQ ID NO: 18328 - protein, 819 aa, Artificial Sequence
  Synthetic Polypeptide
MALPVTALLLPLALLLHAARPSYVLTQPPSVSVAPGQTARITCGGNNIGSKSVHWYQQPPGQAPVVVVYDDSDRPSGIPERFSGSNSGNTATLTISRVEAGDEAVYYCQVWDSSSDHVVFGGGTKLTVLLEDLKNVFPPEVAVFEPSKAEIAHTQKATLVCLATGFYPDHVELSWWVNGKEVHSGVCTDPQPLKEQPALNDSRYCLSSRLRVSATFWQNPRNHFRCQVQFYGLSENDEWTQDRAKPVTQIVSAEAWGRADCGSQSFGLLDPKLCYLLDGILFIYGVILTALFLRVKFSRSADAPAYQQGQNQLYNELNLGRREEYDVLDKRRGRDPEMGGKPQRRKNPQEGLYNELQKDKMAEAYSEIGMKGERRRGKGHDGLYQGLSTATKDTYDALHMQALPPRRAKRSGSGATNFSLLKQAGDVEENPGPTSMDWIWRILFLVGAATGAHSFEQLQLQESGPGLVKPSETLSLTCTVSGGSISSGSYFWGWIRQPPGKGLEWIGSIYYSGSTYYNPSLKSRVTISVDTSKNQFSLKLSSVTAADTAVYYCARHDGAVAGLFDYWGQGTLVTVSSATRIQNPDPAVYQLRDSKSSDKSVCLFTDFDSQTNVSQSKDSDVYITDKCVLDMRSMDFKSNSAVAWSNKSDFACANAFNNSIIPEDTFFPSSDVPCGTQSFGLLDPKLCYLLDGILFIYGVILTALFLRVKFSRSADAPAYQQGQNQLYNELNLGRREEYDVLDKRRGRDPEMGGKPQRRKNPQEGLYNELQKDKMAEAYSEIGMKGERRRGKGHDGLYQGLSTATKDTYDALHMQALPPR

SEQ ID NO: 18329 - protein, 890 aa, Artificial Sequence
  Synthetic Polypeptide
MALPVTALLLPLALLLHAARPSYVLTQPPSVSVAPGQTARITCGGNNIGSKSVHWYQQPPGQAPVVVVYDDSDRPSGIPERFSGSNSGNTATLTISRVEAGDEAVYYCQVWDSSSDHVVFGGGTKLTVLLEGKPIPNPLLGLDSTGSGEDLKNVFPPEVAVFEPSEAEISHTQKATLVCLATGFYPDHVELSWWVNGKEVHSGVSTDPQPLKEQPALNDSRYCLSSRLRVSATFWQNPRNHFRCQVQFYGLSENDEWTQDRAKPVTQIVSAEAWGRADCGSQSFGLLDPKLCYLLDGILFIYGVILTALFLRVKFSRSADAPAYQQGQNQLYNELNLGRREEYDVLDKRRGRDPEMGGKPQRRKNPQEGLYNELQKDKMAEAYSEIGMKGERRRGKGHDGLYQGLSTATKDTYDALHMQALPPRRAKRSGSGATNFSLLKQAGDVEENPGPTSMDWIWRILFLVGAATGAHSFEQLQLQESGPGLVKPSETLSLTCTVSGGSISSGSYFWGWIRQPPGKGLEWIGSIYYSGSTYYNPSLKSRVTISVDTSKNQFSLKLSSVTAADTAVYYCARHDGAVAGLFDYWGQGTLVTVSSATREQKLISEEDGSGIQNPDPAVYQLRDSKSSDKSVCLFTDFDSQTNVSQSKDSDVYITDKTVLDMRSMDFKSNSAVAWSNKSDFACANAFNNSIIPEDTFFPSPESSCGTQSFGLLDPKLCYLLDGILFIYGVILTALFLRSKRSRLLHSDYMNMTPRRPGPTRKHYQPYAPPRDFAAYRSRVKFSRSADAPAYQQGQNQLYNELNLGRREEYDVLDKRRGRDPEMGGKPQRRKNPQEGLYNELQKDKMAEAYSEIGMKGERRRGKGHDGLYQGLSTATKDTYDALHMQALPPR

SEQ ID NO: 18330 - protein, 931 aa, Artificial Sequence
  Synthetic Polypeptide
MALPVTALLLPLALLLHAARPSYVLTQPPSVSVAPGQTARITCGGNNIGSKSVHWYQQPPGQAPVVVVYDDSDRPSGIPERFSGSNSGNTATLTISRVEAGDEAVYYCQVWDSSSDHVVFGGGTKLTVLLEGKPIPNPLLGLDSTGSGEDLKNVFPPEVAVFEPSEAEISHTQKATLVCLATGFYPDHVELSWWVNGKEVHSGVSTDPQPLKEQPALNDSRYCLSSRLRVSATFWQNPRNHFRCQVQFYGLSENDEWTQDRAKPVTQIVSAEAWGRADCGSQSFGLLDPKLCYLLDGILFIYGVILTALFLRSKRSRLLHSDYMNMTPRRPGPTRKHYQPYAPPRDFAAYRSRVKFSRSADAPAYQQGQNQLYNELNLGRREEYDVLDKRRGRDPEMGGKPQRRKNPQEGLYNELQKDKMAEAYSEIGMKGERRRGKGHDGLYQGLSTATKDTYDALHMQALPPRRAKRSGSGATNFSLLKQAGDVEENPGPTSMDWIWRILFLVGAATGAHSFEQLQLQESGPGLVKPSETLSLTCTVSGGSISSGSYFWGWIRQPPGKGLEWIGSIYYSGSTYYNPSLKSRVTISVDTSKNQFSLKLSSVTAADTAVYYCARHDGAVAGLFDYWGQGTLVTVSSATREQKLISEEDGSGIQNPDPAVYQLRDSKSSDKSVCLFTDFDSQTNVSQSKDSDVYITDKTVLDMRSMDFKSNSAVAWSNKSDFACANAFNNSIIPEDTFFPSPESSCGTQSFGLLDPKLCYLLDGILFIYGVILTALFLRSKRSRLLHSDYMNMTPRRPGPTRKHYQPYAPPRDFAAYRSRVKFSRSADAPAYQQGQNQLYNELNLGRREEYDVLDKRRGRDPEMGGKPQRRKNPQEGLYNELQKDKMAEAYSEIGMKGERRRGKGHDGLYQGLSTATKDTYDALHMQALPPR

SEQ ID NO: 18331 - protein, 892 aa, Artificial Sequence
  Synthetic Polypeptide
MALPVTALLLPLALLLHAARPSYVLTQPPSVSVAPGQTARITCGGNNIGSKSVHWYQQPPGQAPVVVVYDDSDRPSGIPERFSGSNSGNTATLTISRVEAGDEAVYYCQVWDSSSDHVVFGGGTKLTVLLEGKPIPNPLLGLDSTGSGEDLKNVFPPEVAVFEPSEAEISHTQKATLVCLATGFYPDHVELSWWVNGKEVHSGVSTDPQPLKEQPALNDSRYCLSSRLRVSATFWQNPRNHFRCQVQFYGLSENDEWTQDRAKPVTQIVSAEAWGRADCGSQSFGLLDPKLCYLLDGILFIYGVILTALFLRVKFSRSADAPAYQQGQNQLYNELNLGRREEYDVLDKRRGRDPEMGGKPQRRKNPQEGLYNELQKDKMAEAYSEIGMKGERRRGKGHDGLYQGLSTATKDTYDALHMQALPPRRAKRSGSGATNFSLLKQAGDVEENPGPTSMDWIWRILFLVGAATGAHSFEQLQLQESGPGLVKPSETLSLTCTVSGGSISSGSYFWGWIRQPPGKGLEWIGSIYYSGSTYYNPSLKSRVTISVDTSKNQFSLKLSSVTAADTAVYYCARHDGAVAGLFDYWGQGTLVTVSSATREQKLISEEDLGSGIQNPDPAVYQLRDSKSSDKSVCLFTDFDSQTNVSQSKDSDVYITDKTVLDMRSMDFKSNSAVAWSNKSDFACANAFNNSIIPEDTFFPSPESSCGTQSFGLLDPKLCYLLDGILFIYGVILTALFLKRGRKKLLYIFKQPFMRPVQTTQEEDGCSCRFPEEEEGGCELRVKFSRSADAPAYQQGQNQLYNELNLGRREEYDVLDKRRGRDPEMGGKPQRRKNPQEGLYNELQKDKMAEAYSEIGMKGERRRGKGHDGLYQGLSTATKDTYDALHMQALPPR

SEQ ID NO: 18332 - protein, 934 aa, Artificial Sequence
  Synthetic Polypeptide
MALPVTALLLPLALLLHAARPSYVLTQPPSVSVAPGQTARITCGGNNIGSKSVHWYQQPPGQAPVVVVYDDSDRPSGIPERFSGSNSGNTATLTISRVEAGDEAVYYCQVWDSSSDHVVFGGGTKLTVLLEGKPIPNPLLGLDSTGSGEDLKNVFPPEVAVFEPSEAEISHTQKATLVCLATGFYPDHVELSWWVNGKEVHSGVSTDPQPLKEQPALNDSRYCLSSRLRVSATFWQNPRNHFRCQVQFYGLSENDEWTQDRAKPVTQIVSAEAWGRADCGSQSFGLLDPKLCYLLDGILFIYGVILTALFLKRGRKKLLYIFKQPFMRPVQTTQEEDGCSCRFPEEEEGGCELRVKFSRSADAPAYQQGQNQLYNELNLGRREEYDVLDKRRGRDPEMGGKPQRRKNPQEGLYNELQKDKMAEAYSEIGMKGERRRGKGHDGLYQGLSTATKDTYDALHMQALPPRRAKRSGSGATNFSLLKQAGDVEENPGPTSMDWIWRILFLVGAATGAHSFEQLQLQESGPGLVKPSETLSLTCTVSGGSISSGSYFWGWIRQPPGKGLEWIGSIYYSGSTYYNPSLKSRVTISVDTSKNQFSLKLSSVTAADTAVYYCARHDGAVAGLFDYWGQGTLVTVSSATREQKLISEEDLGSGIQNPDPAVYQLRDSKSSDKSVCLFTDFDSQTNVSQSKDSDVYITDKTVLDMRSMDFKSNSAVAWSNKSDFACANAFNNSIIPEDTFFPSPESSCGTQSFGLLDPKLCYLLDGILFIYGVILTALFLKRGRKKLLYIFKQPFMRPVQTTQEEDGCSCRFPEEEEGGCELRVKFSRSADAPAYQQGQNQLYNELNLGRREEYDVLDKRRGRDPEMGGKPQRRKNPQEGLYNELQKDKMAEAYSEIGMKGERRRGKGHDGLYQGLSTATKDTYDALHMQALPPR

SEQ ID NO: 18333 - protein, 824 aa, Artificial Sequence
  Synthetic Polypeptide
MALPVTALLLPLALLLHAARPSYVLTQPPSVSVAPGQTARITCGGNNIGSKSVHWYQQPPGQAPVVVVYDDSDRPSGIPERFSGSNSGNTATLTISRVEAGDEAVYYCQVWDSSSDHVVFGGGTKLTVLLEQSFGLLDPKLCYLLDGILFIYGVILTALFLRVKFSRSADAPAYQQGQNQLYNELNLGRREEYDVLDKRRGRDPEMGGKPQRRKNPQEGLYNELQKDKMAEAYSEIGMKGERRRGKGHDGLYQGLSTATKDTYDALHMQALPPRRAKRSGSGATNFSLLKQAGDVEENPGPTSMDWIWRILFLVGAATGAHSFEQLQLQESGPGLVKPSETLSLTCTVSGGSISSGSYFWGWIRQPPGKGLEWIGSIYYSGSTYYNPSLKSRVTISVDTSKNQFSLKLSSVTAADTAVYYCARHDGAVAGLFDYWGQGTLVTVSSATRQSFGLLDPKLCYLLDGILFIYGVILTALFLRVKFSRSADAPAYQQGQNQLYNELNLGRREEYDVLDKRRGRDPEMGGKPQRRKNPQEGLYNELQKDKMAEAYSEIGMKGERRRGKGHDGLYQGLSTATKDTYDALHMQALPPRRAKRSGSGVKQTLNFDLLKLAGDVESNPGPSRGHMTEYKPTVRLATRDDVPRAVRTLAAAFADYPATRHTVDPDRHIERVTELQELFLTRVGLDIGKVWVADDGAAVAVWTTPESVEAGAVFAEIGPRMAELSGSRLAAQQQMEGLLAPHRPKEPAWFLATVGVSPDHQGKGLGSAVVLPGVEAAERAGVPAFLETSAPRNLPFYERLGFTVTADVEVPEGPRTWCMTRKPGA

SEQ ID NO: 18334 - protein, 649 aa, Artificial Sequence
  Synthetic Polypeptide
MALPVTALLLPLALLLHAARPSYVLTQPPSVSVAPGQTARITCGGNNIGSKSVHWYQQPPGQAPVVVVYDDSDRPSGIPERFSGSNSGNTATLTISRVEAGDEAVYYCQVWDSSSDHVVFGGGTKLTVLLEGQPKANPTVTLFPPSSEELQANKATLVCLISDFYPGAVTVAWKADGSPVKAGVETTKPSKQSNNKYAASSYLSLTPEQWKSHRSYSCQVTHEGSTVEKTVAPTECSPIKTDVITMDPKDNCSKDANDTLLLQLTNTSAYYMYLLLLLKSVVYFAIITCCLLRRTAFCCNGEKSRAKRSGSGATNFSLLKQAGDVEENPGPTSMDWIWRILFLVGAATGAHSFEQLQLQESGPGLVKPSETLSLTCTVSGGSISSGSYFWGWIRQPPGKGLEWIGSIYYSGSTYYNPSLKSRVTISVDTSKNQFSLKLSSVTAADTAVYYCARHDGAVAGLFDYWGQGTLVTVSSATRASTKGPSVFPLAPSSKSTSGGTAALGCLVKDYFPEPVTVSWNSGALTSGVHTFPAVLQSSGLYSLSSVVTVPSSSLGTQTYICNVNHKPSNTKVDKRVEPKSCEVKTDSTDHVKPKETENTKQPSKSCHKPKAIVHTEKVNMMSLTVLGLRMLFAKTVAVNFLLTAKLFFL

SEQ ID NO: 18335 - protein, 627 aa, Artificial Sequence
  Synthetic Polypeptide
MALPVTALLLPLALLLHAARPSYVLTQPPSVSVAPGQTARITCGGNNIGSKSVHWYQQPPGQAPVVVVYDDSDRPSGIPERFSGSNSGNTATLTISRVEAGDEAVYYCQVWDSSSDHVVFGGGTKLTVLLEGQPKANPTVTLFPPSSEELQANKATLVCLISDFYPGAVTVAWKADGSPVKAGVETTKPSKQSNNKYAASSYLSLTPEQWKSHRSYSCQVTHEGSTVEKTVAPTECSGRADCGITSASYHQGVLSATILYEILLGKATLYAVLVSALVLMAMVKRKDSRGRAKRSGSGATNFSLLKQAGDVEENPGPTSMDWIWRILFLVGAATGAHSFEQLQLQESGPGLVKPSETLSLTCTVSGGSISSGSYFWGWIRQPPGKGLEWIGSIYYSGSTYYNPSLKSRVTISVDTSKNQFSLKLSSVTAADTAVYYCARHDGAVAGLFDYWGQGTLVTVSSATRASTKGPSVFPLAPSSKSTSGGTAALGCLVKDYFPEPVTVSWNSGALTSGVHTFPAVLQSSGLYSLSSVVTVPSSSLGTQTYICNVNHKPSNTKVDKRVEPKSCIPEDTFFPSSDVPCDVKLVEKSFETDTNLNFQNLSVIGFRILLLKVAGFNLLMTLRLWSS

SEQ ID NO: 18336 - protein, 627 aa, Artificial Sequence
  Synthetic Polypeptide
MALPVTALLLPLALLLHAARPSYVLTQPPSVSVAPGQTARITCGGNNIGSKSVHWYQQPPGQAPVVVVYDDSDRPSGIPERFSGSNSGNTATLTISRVEAGDEAVYYCQVWDSSSDHVVFGGGTKLTVLLEGQPKANPTVTLFPPSSEELQANKATLVCLISDFYPGAVTVAWKADGSPVKAGVETTKPSKQSNNKYAASSYLSLTPEQWKSHRSYSCQVTHEGSTVEKTVAPTECSGRADCGFTSESYQQGVLSATILYEILLGKATLYAVLVSALVLMAMVKRKDSRGRAKRSGSGATNFSLLKQAGDVEENPGPTSMDWIWRILFLVGAATGAHSFEQLQLQESGPGLVKPSETLSLTCTVSGGSISSGSYFWGWIRQPPGKGLEWIGSIYYSGSTYYNPSLKSRVTISVDTSKNQFSLKLSSVTAADTAVYYCARHDGAVAGLFDYWGQGTLVTVSSATRASTKGPSVFPLAPSSKSTSGGTAALGCLVKDYFPEPVTVSWNSGALTSGVHTFPAVLQSSGLYSLSSVVTVPSSSLGTQTYICNVNHKPSNTKVDKRVEPKSCIPEDTFFPSPESSCDVKLVEKSFETDTNLNFQNLSVIGFRILLLKVAGFNLLMTLRLWSS

SEQ ID NO: 18337 - protein, 453 aa, Artificial Sequence
  Synthetic Polypeptide
MALPVTALLLPLALLLHAARPSYVLTQPPSVSVAPGQTARITCGGNNIGSKSVHWYQQPPGQAPVVVVYDDSDRPSGIPERFSGSNSGNTATLTISRVEAGDEAVYYCQVWDSSSDHVVFGGGTKLTVLGGGGSGGGGSGGGGSQLQLQESGPGLVKPSETLSLTCTVSGGSISSGSYFWGWIRQPPGKGLEWIGSIYYSGSTYYNPSLKSRVTISVDTSKNQFSLKLSSVTAADTAVYYCARHDGAVAGLFDYWGQGTLVTVSSATRDGNEEMGGITQTPYKVSISGTTVILTCPQYPGSEILWQHNDKNIGGDEDDKNIGSDEDHLSLKEFSELEQSGYYVCYPRGSKPEDANFYLYLRARVCENCMEMDVMSVATIVIVDICITGGLLLLVYYWSKNRKAKAKPVTRGAGAGGRQRGQNKERPPPVPNPDYEPIRKGQRDLYSGLNQRRI

SEQ ID NO: 18338 - protein, 418 aa, Artificial Sequence
  Synthetic Polypeptide
MALPVTALLLPLALLLHAARPSYVLTQPPSVSVAPGQTARITCGGNNIGSKSVHWYQQPPGQAPVVVVYDDSDRPSGIPERFSGSNSGNTATLTISRVEAGDEAVYYCQVWDSSSDHVVFGGGTKLTVLGGGGSGGGGSGGGGSQLQLQESGPGLVKPSETLSLTCTVSGGSISSGSYFWGWIRQPPGKGLEWIGSIYYSGSTYYNPSLKSRVTISVDTSKNQFSLKLSSVTAADTAVYYCARHDGAVAGLFDYWGQGTLVTVSSATRFKIPIEELEDRVFVNCNTSITWVEGTVGTLLSDITRLDLGKRILDPRGIYRCNGTDIYKDKESTVQVHYRMCQSCVELDPATVAGIIVTDVIATLLLALGVFCFAGHETGRLSGAADTQALLRNDQVYQPLRDRDDAQYSHLGGNWARNK

SEQ ID NO: 18339 - protein, 428 aa, Artificial Sequence
  Synthetic Polypeptide
MALPVTALLLPLALLLHAARPSYVLTQPPSVSVAPGQTARITCGGNNIGSKSVHWYQQPPGQAPVVVVYDDSDRPSGIPERFSGSNSGNTATLTISRVEAGDEAVYYCQVWDSSSDHVVFGGGTKLTVLGGGGSGGGGSGGGGSQLQLQESGPGLVKPSETLSLTCTVSGGSISSGSYFWGWIRQPPGKGLEWIGSIYYSGSTYYNPSLKSRVTISVDTSKNQFSLKLSSVTAADTAVYYCARHDGAVAGLFDYWGQGTLVTVSSATRQSIKGNHLVKVYDYQEDGSVLLTCDAEAKNITWFKDGKMIGFLTEDKKKWNLGSNAKDPRGMYQCKGSQNKSKPLQVYYRMCQNCIELNAATISGFLFAEIVSIFVLAVGVYFIAGQDGVRQSRASDKQTLLPNDQLYQPLKDREDDQYSHLQGNQLRRN

SEQ ID NO: 18340 - protein, 411 aa, Artificial Sequence
  Synthetic Polypeptide
MALPVTALLLPLALLLHAARPSYVLTQPPSVSVAPGQTARITCGGNNIGSKSVHWYQQPPGQAPVVVVYDDSDRPSGIPERFSGSNSGNTATLTISRVEAGDEAVYYCQVWDSSSDHVVFGGGTKLTVLGGGGSGGGGSGGGGSQLQLQESGPGLVKPSETLSLTCTVSGGSISSGSYFWGWIRQPPGKGLEWIGSIYYSGSTYYNPSLKSRVTISVDTSKNQFSLKLSSVTAADTAVYYCARHDGAVAGLFDYWGQGTLVTVSSATRQSFGLLDPKLCYLLDGILFIYGVILTALFLRVKFSRSADAPAYQQGQNQLYNELNLGRREEYDVLDKRRGRDPEMGGKPQRRKNPQEGLYNELQKDKMAEAYSEIGMKGERRRGKGHDGLYQGLSTATKDTYDALHMQALPPR

SEQ ID NO: 18341 - protein, 453 aa, Artificial Sequence
  Synthetic Polypeptide
MALPVTALLLPLALLLHAARPQLQLQESGPGLVKPSETLSLTCTVSGGSISSGSYFWGWIRQPPGKGLEWIGSIYYSGSTYYNPSLKSRVTISVDTSKNQFSLKLSSVTAADTAVYYCARHDGAVAGLFDYWGQGTLVTVSSAGGGGSGGGGSGGGGSSYVLTQPPSVSVAPGQTARITCGGNNIGSKSVHWYQQPPGQAPVVVVYDDSDRPSGIPERFSGSNSGNTATLTISRVEAGDEAVYYCQVWDSSSDHVVFGGGTKLTVLTRDGNEEMGGITQTPYKVSISGTTVILTCPQYPGSEILWQHNDKNIGGDEDDKNIGSDEDHLSLKEFSELEQSGYYVCYPRGSKPEDANFYLYLRARVCENCMEMDVMSVATIVIVDICITGGLLLLVYYWSKNRKAKAKPVTRGAGAGGRQRGQNKERPPPVPNPDYEPIRKGQRDLYSGLNQRRI

SEQ ID NO: 18342 - protein, 418 aa, Artificial Sequence
  Synthetic Polypeptide
MALPVTALLLPLALLLHAARPQLQLQESGPGLVKPSETLSLTCTVSGGSISSGSYFWGWIRQPPGKGLEWIGSIYYSGSTYYNPSLKSRVTISVDTSKNQFSLKLSSVTAADTAVYYCARHDGAVAGLFDYWGQGTLVTVSSAGGGGSGGGGSGGGGSSYVLTQPPSVSVAPGQTARITCGGNNIGSKSVHWYQQPPGQAPVVVVYDDSDRPSGIPERFSGSNSGNTATLTISRVEAGDEAVYYCQVWDSSSDHVVFGGGTKLTVLTRFKIPIEELEDRVFVNCNTSITWVEGTVGTLLSDITRLDLGKRILDPRGIYRCNGTDIYKDKESTVQVHYRMCQSCVELDPATVAGIIVTDVIATLLLALGVFCFAGHETGRLSGAADTQALLRNDQVYQPLRDRDDAQYSHLGGNWARNK

SEQ ID NO: 18343 - protein, 428 aa, Artificial Sequence
  Synthetic Polypeptide
MALPVTALLLPLALLLHAARPQLQLQESGPGLVKPSETLSLTCTVSGGSISSGSYFWGWIRQPPGKGLEWIGSIYYSGSTYYNPSLKSRVTISVDTSKNQFSLKLSSVTAADTAVYYCARHDGAVAGLFDYWGQGTLVTVSSAGGGGSGGGGSGGGGSSYVLTQPPSVSVAPGQTARITCGGNNIGSKSVHWYQQPPGQAPVVVVYDDSDRPSGIPERFSGSNSGNTATLTISRVEAGDEAVYYCQVWDSSSDHVVFGGGTKLTVLTRQSIKGNHLVKVYDYQEDGSVLLTCDAEAKNITWFKDGKMIGFLTEDKKKWNLGSNAKDPRGMYQCKGSQNKSKPLQVYYRMCQNCIELNAATISGFLFAEIVSIFVLAVGVYFIAGQDGVRQSRASDKQTLLPNDQLYQPLKDREDDQYSHLQGNQLRRN

SEQ ID NO: 18344 - protein, 411 aa, Artificial Sequence
  Synthetic Polypeptide
MALPVTALLLPLALLLHAARPQLQLQESGPGLVKPSETLSLTCTVSGGSISSGSYFWGWIRQPPGKGLEWIGSIYYSGSTYYNPSLKSRVTISVDTSKNQFSLKLSSVTAADTAVYYCARHDGAVAGLFDYWGQGTLVTVSSAGGGGSGGGGSGGGGSSYVLTQPPSVSVAPGQTARITCGGNNIGSKSVHWYQQPPGQAPVVVVYDDSDRPSGIPERFSGSNSGNTATLTISRVEAGDEAVYYCQVWDSSSDHVVFGGGTKLTVLTRQSFGLLDPKLCYLLDGILFIYGVILTALFLRVKFSRSADAPAYQQGQNQLYNELNLGRREEYDVLDKRRGRDPEMGGKPQRRKNPQEGLYNELQKDKMAEAYSEIGMKGERRRGKGHDGLYQGLSTATKDTYDALHMQALPPR

SEQ ID NO: 18345 - protein, 644 aa, Artificial Sequence
  Synthetic Polypeptide
MALPVTALLLPLALLLHAARPSYVLTQPPSVSVAPGQTARITCGGNNIGSKSVHWYQQPPGQAPVVVVYDDSDRPSGIPERFSGSNSGNTATLTISRVEAGDEAVYYCQVWDSSSDHVVFGGGTKLTVLGGGGSGGGGSGGGGSQLQLQESGPGLVKPSETLSLTCTVSGGSISSGSYFWGWIRQPPGKGLEWIGSIYYSGSTYYNPSLKSRVTISVDTSKNQFSLKLSSVTAADTAVYYCARHDGAVAGLFDYWGQGTLVTVSSATRGSGIQNPDPAVYQLRDSKSSDKSVCLFTDFDSQTNVSQSKDSDVYITDKTVLDMRSMDFKSNSAVAWSNKSDFACANAFNNSIIPEDTFFPSPESSCDVKLVEKSFETDTNLNFQNLSVIGFRILLLKVAGFNLLMTLRLWSSRAKRSGSGVKQTLNFDLLKLAGDVESNPGPSRGHMTEYKPTVRLATRDDVPRAVRTLAAAFADYPATRHTVDPDRHIERVTELQELFLTRVGLDIGKVWVADDGAAVAVWTTPESVEAGAVFAEIGPRMAELSGSRLAAQQQMEGLLAPHRPKEPAWFLATVGVSPDHQGKGLGSAVVLPGVEAAERAGVPAFLETSAPRNLPFYERLGFTVTADVEVPEGPRTWCMTRKPGA

SEQ ID NO: 18346 - protein, 676 aa, Artificial Sequence
  Synthetic Polypeptide
MALPVTALLLPLALLLHAARPSYVLTQPPSVSVAPGQTARITCGGNNIGSKSVHWYQQPPGQAPVVVVYDDSDRPSGIPERFSGSNSGNTATLTISRVEAGDEAVYYCQVWDSSSDHVVFGGGTKLTVLGGGGSGGGGSGGGGSQLQLQESGPGLVKPSETLSLTCTVSGGSISSGSYFWGWIRQPPGKGLEWIGSIYYSGSTYYNPSLKSRVTISVDTSKNQFSLKLSSVTAADTAVYYCARHDGAVAGLFDYWGQGTLVTVSSALEDLKNVFPPEVAVFEPSEAEISHTQKATLVCLATGFYPDHVELSWWVNGKEVHSGVSTDPQPLKEQPALNDSRYCLSSRLRVSATFWQNPRNHFRCQVQFYGLSENDEWTQDRAKPVTQIVSAEAWGRADCGFTSESYQQGVLSATILYEILLGKATLYAVLVSALVLMAMVKRKDSRGRAKRSGSGATNFSLLKQAGDVEENPGPTRGHMTEYKPTVRLATRDDVPRAVRTLAAAFADYPATRHTVDPDRHIERVTELQELFLTRVGLDIGKVWVADDGAAVAVWTTPESVEAGAVFAEIGPRMAELSGSRLAAQQQMEGLLAPHRPKEPAWFLATVGVSPDHQGKGLGSAVVLPGVEAAERAGVPAFLETSAPRNLPFYERLGFTVTADVEVPEGPRTWCMTRKPGA

SEQ ID NO: 18347 - protein, 726 aa, Artificial Sequence
  Synthetic Polypeptide
MALPVTALLLPLALLLHAARPSYVLTQPPSVSVAPGQTARITCGGNNIGSKSVHWYQQPPGQAPVVVVYDDSDRPSGIPERFSGSNSGNTATLTISRVEAGDEAVYYCQVWDSSSDHVVFGGGTKLTVLGGGGSGGGGSGGGGSQLQLQESGPGLVKPSETLSLTCTVSGGSISSGSYFWGWIRQPPGKGLEWIGSIYYSGSTYYNPSLKSRVTISVDTSKNQFSLKLSSVTAADTAVYYCARHDGAVAGLFDYWGQGTLVTVSSATREQKLISEEDLGSGTPFPSLAPPIMLLVDGKQQMVVVCLVLDVAPPGLDSPIWFSAGNGSALDAFTYGPSPATDGTWTNLAHLSLPSEELASWEPLVCHTGPGAEGHSRSTQPMHLSGEASTARTCPQEPLRGTPGGALWLGVLRLLLFKLLLFDLLLTCSCLCDPAGPLPSPATTTRLRALGSHRLHPATETGGREATSSPRPQPRDRRWGDTPPGRKPGSPVRAKRSGSGVKQTLNFDLLKLAGDVESNPGPSRSRGHMTEYKPTVRLATRDDVPRAVRTLAAAFADYPATRHTVDPDRHIERVTELQELFLTRVGLDIGKVWVADDGAAVAVWTTPESVEAGAVFAEIGPRMAELSGSRLAAQQQMEGLLAPHRPKEPAWFLATVGVSPDHQGKGLGSAVVLPGVEAAERAGVPAFLETSAPRNLPFYERLGFTVTADVEVPEGPRTWCMTRKPGA

SEQ ID NO: 18348 - protein, 539 aa, Artificial Sequence; identical to SEQ ID NO: 18141
  Synthetic Polypeptide

SEQ ID NO: 18349 - protein, 309 aa, Artificial Sequence; identical to SEQ ID NO: 18142
  Synthetic Polypeptide

SEQ ID NO: 18350 - protein, 451 aa, Artificial Sequence
  Synthetic Polypeptide
MDWIWRILFLVGAATGAHSFEQLQLQESGPGLVKPSETLSLTCTVSGGSISSGSYFWGWIRQPPGKGLEWIGSIYYSGSTYYNPSLKSRVTISVDTSKNQFSLKLSSVTAADTAVYYCARHDGAVAGLFDYWGQGTLVTVSSATRIQNPDPAVYQLRDSKSSDKSVCLFTDFDSQTNVSQSKDSDVYITDKTVLDMRSMDFKSNSAVAWSNKSDFACANAFNNSIIPEDTFFPSPESSCDVKLVEKSFETDTNLNFQNLSVIGFRILLLKVAGFNLLMTLRLWSSRAKRSGSGVKQTLNFDLLKLAGDVESNPGPSRGHMAKPLSQEESTLIERATATINSIPISEDYSVASAALSSDGRIFTGVNVYHFTGGPCAELVVLGTAAAAAAGNLTCIVAIGNENRGILSPCGRCRQVLLDLHPGIKAIVKDSDGQPTAVGIRELLPSGYVWEG

SEQ ID NO: 18351 - protein, 285 aa, Artificial Sequence
  Synthetic Polypeptide
MDWIWRILFLVGAATGAHSFEQLQLQESGPGLVKPSETLSLTCTVSGGSISSGSYFWGWIRQPPGKGLEWIGSIYYSGSTYYNPSLKSRVTISVDTSKNQFSLKLSSVTAADTAVYYCARHDGAVAGLFDYWGQGTLVTVSSATRIQNPDPAVYQLRDSKSSDKSVCLFTDFDSQTNVSQSKDSDVYITDKTVLDMRSMDFKSNSAVAWSNKSDFACANAFNNSIIPEDTFFPSPESSCDVKLVEKSFETDTNLNFQNLSVIGFRILLLKVAGFNLLMTLRLWSS

SEQ ID NO: 18352 - protein, 557 aa, Artificial Sequence; identical to SEQ ID NO: 18145
  Synthetic Polypeptide

SEQ ID NO: 18353 - protein, 327 aa, Artificial Sequence; identical to SEQ ID NO: 18146
  Synthetic Polypeptide

SEQ ID NO: 18354 - protein, 463 aa, Artificial Sequence
  Synthetic Polypeptide
MDWIWRILFLVGAATGAHSFEQLQLQESGPGLVKPSETLSLTCTVSGGSISSGSYFWGWIRQPPGKGLEWIGSIYYSGSTYYNPSLKSRVTISVDTSKNQFSLKLSSVTAADTAVYYCARHDGAVAGLFDYWGQGTLVTVSSATREQKLISEEDGSGIQNPDPAVYQLRDSKSSDKSVCLFTDFDSQTNVSQSKDSDVYITDKCVLDMRSMDFKSNSAVAWSNKSDFACANAFNNSIIPEDTFFPSPESSCDVKLVEKSFETDTNLNFQNLSVIGFRILLLKVAGFNLLMTLRLWSSRAKRSGSGVKQTLNFDLLKLAGDVESNPGPSRGHMAKPLSQEESTLIERATATINSIPISEDYSVASAALSSDGRIFTGVNVYHFTGGPCAELVVLGTAAAAAAGNLTCIVAIGNENRGILSPCGRCRQVLLDLHPGIKAIVKDSDGQPTAVGIRELLPSGYVWEG

SEQ ID NO: 18355 - protein, 297 aa, Artificial Sequence
  Synthetic Polypeptide
MDWIWRILFLVGAATGAHSFEQLQLQESGPGLVKPSETLSLTCTVSGGSISSGSYFWGWIRQPPGKGLEWIGSIYYSGSTYYNPSLKSRVTISVDTSKNQFSLKLSSVTAADTAVYYCARHDGAVAGLFDYWGQGTLVTVSSATREQKLISEEDGSGIQNPDPAVYQLRDSKSSDKSVCLFTDFDSQTNVSQSKDSDVYITDKCVLDMRSMDFKSNSAVAWSNKSDFACANAFNNSIIPEDTFFPSPESSCDVKLVEKSFETDTNLNFQNLSVIGFRILLLKVAGFNLLMTLRLWSS

SEQ ID NO: 18356 - protein, 644 aa, Artificial Sequence
  Synthetic Polypeptide
MALPVTALLLPLALLLHAARPSYVLTQPPSVSVAPGQTARITCGGNNIGSKSVHWYQQPPGQAPVVVVYDDSDRPSGIPERFSGSNSGNTATLTISRVEAGDEAVYYCQVWDSSSDHVVFGGGTKLTVLGGGGSGGGGSGGGGSQLQLQESGPGLVKPSETLSLTCTVSGGSISSGSYFWGWIRQPPGKGLEWIGSIYYSGSTYYNPSLKSRVTISVDTSKNQFSLKLSSVTAADTAVYYCARHDGAVAGLFDYWGQGTLVTVSSATRGSGIQNPDPAVYQLRDSKSSDKSVCLFTDFDSQTNVSQSKDSDVYITDKTVLDMRSMDFKSNSAVAWSNKSDFACANAFNNSIIPEDTFFPSSDVPCDVKLVEKSFETDTNLNFQNLSVIGFRILLLKVAGFNLLMTLRLWSSRAKRSGSGVKQTLNFDLLKLAGDVESNPGPSRGHMTEYKPTVRLATRDDVPRAVRTLAAAFADYPATRHTVDPDRHIERVTELQELFLTRVGLDIGKVWVADDGAAVAVWTTPESVEAGAVFAEIGPRMAELSGSRLAAQQQMEGLLAPHRPKEPAWFLATVGVSPDHQGKGLGSAVVLPGVEAAERAGVPAFLETSAPRNLPFYERLGFTVTADVEVPEGPRTWCMTRKPGA

SEQ ID NO: 18357 - protein, 676 aa, Artificial Sequence
  Synthetic Polypeptide
MALPVTALLLPLALLLHAARPSYVLTQPPSVSVAPGQTARITCGGNNIGSKSVHWYQQPPGQAPVVVVYDDSDRPSGIPERFSGSNSGNTATLTISRVEAGDEAVYYCQVWDSSSDHVVFGGGTKLTVLGGGGSGGGGSGGGGSQLQLQESGPGLVKPSETLSLTCTVSGGSISSGSYFWGWIRQPPGKGLEWIGSIYYSGSTYYNPSLKSRVTISVDTSKNQFSLKLSSVTAADTAVYYCARHDGAVAGLFDYWGQGTLVTVSSALEDLKNVFPPEVAVFEPSKAEIAHTQKATLVCLATGFYPDHVELSWWVNGKEVHSGVSTDPQPLKEQPALNDSRYCLSSRLRVSATFWQNPRNHFRCQVQFYGLSENDEWTQDRAKPVTQIVSAEAWGRADCGITSASYHQGVLSATILYEILLGKATLYAVLVSALVLMAMVKRKDSRGRAKRSGSGATNFSLLKQAGDVEENPGPTRGHMTEYKPTVRLATRDDVPRAVRTLAAAFADYPATRHTVDPDRHIERVTELQELFLTRVGLDIGKVWVADDGAAVAVWTTPESVEAGAVFAEIGPRMAELSGSRLAAQQQMEGLLAPHRPKEPAWFLATVGVSPDHQGKGLGSAVVLPGVEAAERAGVPAFLETSAPRNLPFYERLGFTVTADVEVPEGPRTWCMTRKPGA

SEQ ID NO: 18358 - protein, 699 aa, Artificial Sequence
  Synthetic Polypeptide
MALPVTALLLPLALLLHAARPSYVLTQPPSVSVAPGQTARITCGGNNIGSKSVHWYQQPPGQAPVVVVYDDSDRPSGIPERFSGSNSGNTATLTISRVEAGDEAVYYCQVWDSSSDHVVFGGGTKLTVLGGGGSGGGGSGGGGSQLQLQESGPGLVKPSETLSLTCTVSGGSISSGSYFWGWIRQPPGKGLEWIGSIYYSGSTYYNPSLKSRVTISVDTSKNQFSLKLSSVTAADTAVYYCARHDGAVAGLFDYWGQGTLVTVSSATRGSGGGGSGGGGSGDGNEEMGGITQTPYKVSISGTTVILTCPQYPGSEILWQHNDKNIGGDEDDKNIGSDEDHLSLKEFSELEQSGYYVCYPRGSKPEDANFYLYLRARVCENCMEMDVMSVATIVIVDICITGGLLLLVYYWSKNRKAKAKPVTRGAGAGGRQRGQNKERPPPVPNPDYEPIRKGQRDLYSGLNQRRIRAKRSGSGVKQTLNFDLLKLAGDVESNPGPSRGHMTEYKPTVRLATRDDVPRAVRTLAAAFADYPATRHTVDPDRHIERVTELQELFLTRVGLDIGKVWVADDGAAVAVWTTPESVEAGAVFAEIGPRMAELSGSRLAAQQQMEGLLAPHRPKEPAWFLATVGVSPDHQGKGLGSAVVLPGVEAAERAGVPAFLETSAPRNLPFYERLGFTVTADVEVPEGPRTWCMTRKPGA

SEQ ID NO: 18359 - protein, 664 aa, Artificial Sequence
  Synthetic Polypeptide
MALPVTALLLPLALLLHAARPSYVLTQPPSVSVAPGQTARITCGGNNIGSKSVHWYQQPPGQAPVVVVYDDSDRPSGIPERFSGSNSGNTATLTISRVEAGDEAVYYCQVWDSSSDHVVFGGGTKLTVLGGGGSGGGGSGGGGSQLQLQESGPGLVKPSETLSLTCTVSGGSISSGSYFWGWIRQPPGKGLEWIGSIYYSGSTYYNPSLKSRVTISVDTSKNQFSLKLSSVTAADTAVYYCARHDGAVAGLFDYWGQGTLVTVSSATRGSGGGGSGGGGSGFKIPIEELEDRVFVNCNTSITWVEGTVGTLLSDITRLDLGKRILDPRGIYRCNGTDIYKDKESTVQVHYRMCQSCVELDPATVAGIIVTDVIATLLLALGVFCFAGHETGRLSGAADTQALLRNDQVYQPLRDRDDAQYSHLGGNWARNKRAKRSGSGVKQTLNFDLLKLAGDVESNPGPSRGHMTEYKPTVRLATRDDVPRAVRTLAAAFADYPATRHTVDPDRHIERVTELQELFLTRVGLDIGKVWVADDGAAVAVWTTPESVEAGAVFAEIGPRMAELSGSRLAAQQQMEGLLAPHRPKEPAWFLATVGVSPDHQGKGLGSAVVLPGVEAAERAGVPAFLETSAPRNLPFYERLGFTVTADVEVPEGPRTWCMTRKPGA

SEQ ID NO: 18360 - protein, 674 aa, Artificial Sequence
  Synthetic Polypeptide
MALPVTALLLPLALLLHAARPSYVLTQPPSVSVAPGQTARITCGGNNIGSKSVHWYQQPPGQAPVVVVYDDSDRPSGIPERFSGSNSGNTATLTISRVEAGDEAVYYCQVWDSSSDHVVFGGGTKLTVLGGGGSGGGGSGGGGSQLQLQESGPGLVKPSETLSLTCTVSGGSISSGSYFWGWIRQPPGKGLEWIGSIYYSGSTYYNPSLKSRVTISVDTSKNQFSLKLSSVTAADTAVYYCARHDGAVAGLFDYWGQGTLVTVSSATRGSGGGGSGGGGSGQSIKGNHLVKVYDYQEDGSVLLTCDAEAKNITWFKDGKMIGFLTEDKKKWNLGSNAKDPRGMYQCKGSQNKSKPLQVYYRMCQNCIELNAATISGFLFAEIVSIFVLAVGVYFIAGQDGVRQSRASDKQTLLPNDQLYQPLKDREDDQYSHLQGNQLRRNRAKRSGSGVKQTLNFDLLKLAGDVESNPGPSRGHMTEYKPTVRLATRDDVPRAVRTLAAAFADYPATRHTVDPDRHIERVTELQELFLTRVGLDIGKVWVADDGAAVAVWTTPESVEAGAVFAEIGPRMAELSGSRLAAQQQMEGLLAPHRPKEPAWFLATVGVSPDHQGKGLGSAVVLPGVEAAERAGVPAFLETSAPRNLPFYERLGFTVTADVEVPEGPRTWCMTRKPGA

SEQ ID NO: 18361 - protein, 657 aa, Artificial Sequence
  Synthetic Polypeptide
MALPVTALLLPLALLLHAARPSYVLTQPPSVSVAPGQTARITCGGNNIGSKSVHWYQQPPGQAPVVVVYDDSDRPSGIPERFSGSNSGNTATLTISRVEAGDEAVYYCQVWDSSSDHVVFGGGTKLTVLGGGGSGGGGSGGGGSQLQLQESGPGLVKPSETLSLTCTVSGGSISSGSYFWGWIRQPPGKGLEWIGSIYYSGSTYYNPSLKSRVTISVDTSKNQFSLKLSSVTAADTAVYYCARHDGAVAGLFDYWGQGTLVTVSSATRGSGGGGSGGGGSGQSFGLLDPKLCYLLDGILFIYGVILTALFLRVKFSRSADAPAYQQGQNQLYNELNLGRREEYDVLDKRRGRDPEMGGKPQRRKNPQEGLYNELQKDKMAEAYSEIGMKGERRRGKGHDGLYQGLSTATKDTYDALHMQALPPRRAKRSGSGVKQTLNFDLLKLAGDVESNPGPSRGHMTEYKPTVRLATRDDVPRAVRTLAAAFADYPATRHTVDPDRHIERVTELQELFLTRVGLDIGKVWVADDGAAVAVWTTPESVEAGAVFAEIGPRMAELSGSRLAAQQQMEGLLAPHRPKEPAWFLATVGVSPDHQGKGLGSAVVLPGVEAAERAGVPAFLETSAPRNLPFYERLGFTVTADVEVPEGPRTWCMTRKPGA

SEQ ID NO: 18362 - protein, 758 aa, Artificial Sequence
  Synthetic Polypeptide
MALPVTALLLPLALLLHAARPEVQLVESGGGLVQPGGSLRLSCAASGFSFSDFWMSWVRQAPGKGLEWVATISQAGSEKDYVDSVKGRFTISRDNAKKSLYLQMNSLRAEDTAVYYCASGVYSFDYRGQGTLVTVSSGTGGGGSGGGGSGGGGSEFSYVLTQPPSVSVAPGQTARITCGGNNIGSKSVHWYQQPPGQAPVVVVYDDSDRPSGIPERFSGSNSGNTATLTISRVEAGDEAVYYCQVWDSSSDHVVFGGGTKLTVLLEDLKNVFPPEVAVFEPSEAEISHTQKATLVCLATGFYPDHVELSWWVNGKEVHSGVCTDPQPLKEQPALNDSRYCLSSRLRVSATFWQNPRNHFRCQVQFYGLSENDEWTQDRAKPVTQIVSAEAWGRADCGFTSESYQQGVLSATILYEILLGKATLYAVLVSALVLMAMVKRKDSRGRAKRSGSGATNFSLLKQAGDVEENPGPTSMDWIWRILFLVGAATGAHSFEQLQLQESGPGLVKPSETLSLTCTVSGGSISSGSYFWGWIRQPPGKGLEWIGSIYYSGSTYYNPSLKSRVTISVDTSKNQFSLKLSSVTAADTAVYYCARHDGAVAGLFDYWGQGTLVTVSSATRIQNPDPAVYQLRDSKSSDKSVCLFTDFDSQTNVSQSKDSDVYITDKCVLDMRSMDFKSNSAVAWSNKSDFACANAFNNSIIPEDTFFPSPESSCDVKLVEKSFETDTNLNFQNLSVIGFRILLLKVAGFNLLMTLRLWSS

SEQ ID NO: 18363 - protein, 762 aa, Artificial Sequence
  Synthetic Polypeptide
MALPVTALLLPLALLLHAARPEVQLVESGGGLVQPGGSLRLSCAASGFSFSDFWMSWVRQAPGKGLEWVATISQAGSEKDYVDSVKGRFTISRDNAKKSLYLQMNSLRAEDTAVYYCASGVYSFDYRGQGTLVTVSSGTGGGGSGGGGSGGGGSEFSYVLTQPPSVSVAPGQTARITCGGNNIGSKSVHWYQQPPGQAPVVVVYDDSDRPSGIPERFSGSNSGNTATLTISRVEAGDEAVYYCQVWDSSSDHVVFGGGTKLTVLLEIQNPDPAVYQLRDSKSSDKSVCLFTDFDSQTNVSQSKDSDVYITDKCVLDMRSMDFKSNSAVAWSNKSDFACANAFNNSIIPEDTFFPSPESSCDVKLVEKSFETDTNLNFQNLSVIGFRILLLKVAGFNLLMTLRLWSSRAKRSGSGVKQTLNFDLLKLAGDVESNPGPTSMDWIWRILFLVGAATGAHSFEQLQLQESGPGLVKPSETLSLTCTVSGGSISSGSYFWGWIRQPPGKGLEWIGSIYYSGSTYYNPSLKSRVTISVDTSKNQFSLKLSSVTAADTAVYYCARHDGAVAGLFDYWGQGTLVTVSSATREDLKNVFPPEVAVFEPSEAEISHTQKATLVCLATGFYPDHVELSWWVNGKEVHSGVCTDPQPLKEQPALNDSRYCLSSRLRVSATFWQNPRNHFRCQVQFYGLSENDEWTQDRAKPVTQIVSAEAWGRADCGFTSESYQQGVLSATILYEILLGKATLYAVLVSALVLMAMVKRKDSRG

SEQ ID NO: 18364 - protein, 954 aa, Artificial Sequence
  Synthetic Polypeptide
MALPVTALLLPLALLLHAARPEVQLVESGGGLVQPGGSLRLSCAASGFSFSDFWMSWVRQAPGKGLEWVATISQAGSEKDYVDSVKGRFTISRDNAKKSLYLQMNSLRAEDTAVYYCASGVYSFDYRGQGTLVTVSSGTGGGGSGGGGSGGGGSEFSYVLTQPPSVSVAPGQTARITCGGNNIGSKSVHWYQQPPGQAPVVVVYDDSDRPSGIPERFSGSNSGNTATLTISRVEAGDEAVYYCQVWDSSSDHVVFGGGTKLTVLLEDLKNVFPPEVAVFEPSEAEISHTQKATLVCLATGFYPDHVELSWWVNGKEVHSGVSTDPQPLKEQPALNDSRYCLSSRLRVSATFWQNPRNHFRCQVQFYGLSENDEWTQDRAKPVTQIVSAEAWGRADCGSQSFGLLDPKLCYLLDGILFIYGVILTALFLRVKFSRSADAPAYQQGQNQLYNELNLGRREEYDVLDKRRGRDPEMGGKPQRRKNPQEGLYNELQKDKMAEAYSEIGMKGERRRGKGHDGLYQGLSTATKDTYDALHMQALPPRRAKRSGSGATNFSLLKQAGDVEENPGPTSMDWIWRILFLVGAATGAHSFEQLQLQESGPGLVKPSETLSLTCTVSGGSISSGSYFWGWIRQPPGKGLEWIGSIYYSGSTYYNPSLKSRVTISVDTSKNQFSLKLSSVTAADTAVYYCARHDGAVAGLFDYWGQGTLVTVSSATRIQNPDPAVYQLRDSKSSDKSVCLFTDFDSQTNVSQSKDSDVYITDKTVLDMRSMDFKSNSAVAWSNKSDFACANAFNNSIIPEDTFFPSPESSCGTQSFGLLDPKLCYLLDGILFIYGVILTALFLRVKFSRSADAPAYQQGQNQLYNELNLGRREEYDVLDKRRGRDPEMGGKPQRRKNPQEGLYNELQKDKMAEAYSEIGMKGERRRGKGHDGLYQGLSTATKDTYDALHMQALPPR

SEQ ID NO: 18365 - protein, 784 aa, Artificial Sequence
  Synthetic Polypeptide
MALPVTALLLPLALLLHAARPEVQLVESGGGLVQPGGSLRLSCAASGFSFSDFWMSWVRQAPGKGLEWVATISQAGSEKDYVDSVKGRFTISRDNAKKSLYLQMNSLRAEDTAVYYCASGVYSFDYRGQGTLVTVSSGTGGGGSGGGGSGGGGSEFSYVLTQPPSVSVAPGQTARITCGGNNIGSKSVHWYQQPPGQAPVVVVYDDSDRPSGIPERFSGSNSGNTATLTISRVEAGDEAVYYCQVWDSSSDHVVFGGGTKLTVLLEGQPKANPTVTLFPPSSEELQANKATLVCLISDFYPGAVTVAWKADGSPVKAGVETTKPSKQSNNKYAASSYLSLTPEQWKSHRSYSCQVTHEGSTVEKTVAPTECSPIKTDVITMDPKDNCSKDANDTLLLQLTNTSAYYMYLLLLLKSVVYFAIITCCLLRRTAFCCNGEKSRAKRSGSGATNFSLLKQAGDVEENPGPTSMDWIWRILFLVGAATGAHSFEQLQLQESGPGLVKPSETLSLTCTVSGGSISSGSYFWGWIRQPPGKGLEWIGSIYYSGSTYYNPSLKSRVTISVDTSKNQFSLKLSSVTAADTAVYYCARHDGAVAGLFDYWGQGTLVTVSSATRASTKGPSVFPLAPSSKSTSGGTAALGCLVKDYFPEPVTVSWNSGALTSGVHTFPAVLQSSGLYSLSSVVTVPSSSLGTQTYICNVNHKPSNTKVDKRVEPKSCEVKTDSTDHVKPKETENTKQPSKSCHKPKAIVHTEKVNMMSLTVLGLRMLFAKTVAVNFLLTAKLFFL

SEQ ID NO: 18366 - protein, 765 aa, Artificial Sequence
  Synthetic Polypeptide
MALPVTALLLPLALLLHAARPEVQLVESGGGLVQPGGSLRLSCAASGFSFSDFWMSWVRQAPGKGLEWVATISQAGSEKDYVDSVKGRFTISRDNAKKSLYLQMNSLRAEDTAVYYCASGVYSFDYRGQGTLVTVSSGTGGGGSGGGGSGGGGSEFSYVLTQPPSVSVAPGQTARITCGGNNIGSKSVHWYQQPPGQAPVVVVYDDSDRPSGIPERFSGSNSGNTATLTISRVEAGDEAVYYCQVWDSSSDHVVFGGGTKLTVLLEGQPKANPTVTLFPPSSEELQANKATLVCLISDFYPGAVTVAWKADGSPVKAGVETTKPSKQSNNKYAASSYLSLTPEQWKSHRSYSCQVTHEGSTVEKTVAPTECSGRADCGFTSESYQQGVLSATILYEILLGKATLYAVLVSALVLMAMVKRKDSRGRAKRSGSGVKQTLNFDLLKLAGDVESNPGPTSMDWIWRILFLVGAATGAHSFEQLQLQESGPGLVKPSETLSLTCTVSGGSISSGSYFWGWIRQPPGKGLEWIGSIYYSGSTYYNPSLKSRVTISVDTSKNQFSLKLSSVTAADTAVYYCARHDGAVAGLFDYWGQGTLVTVSSATRASTKGPSVFPLAPSSKSTSGGTAALGCLVKDYFPEPVTVSWNSGALTSGVHTFPAVLQSSGLYSLSSVVTVPSSSLGTQTYICNVNHKPSNTKVDKRVEPKSCIPEDTFFPSPESSCDVKLVEKSFETDTNLNFQNLSVIGFRILLLKVAGFNLLMTLRLWSS

SEQ ID NO: 18367 - protein, 899 aa, Artificial Sequence
  Synthetic Polypeptide
MALPVTALLLPLALLLHAARPEVQLVESGGGLVQPGGSLRLSCAASGFSFSDFWMSWVRQAPGKGLEWVATISQAGSEKDYVDSVKGRFTISRDNAKKSLYLQMNSLRAEDTAVYYCASGVYSFDYRGQGTLVTVSSGTGGGGSGGGGSGGGGSEFSYVLTQPPSVSVAPGQTARITCGGNNIGSKSVHWYQQPPGQAPVVVVYDDSDRPSGIPERFSGSNSGNTATLTISRVEAGDEAVYYCQVWDSSSDHVVFGGGTKLTVLLEIQNPDPAVYQLRDSKSSDKSVCLFTDFDSQTNVSQSKDSDVYITDKCVLDMRSMDFKSNSAVAWSNKSDFACANAFNNSIIPEDTFFPSPESSCDVKLVEKSFETDTNLNFQNLSVIGFRILLLKVAGFNLLMTLRLWSSRAKRSGSGVKQTLNFDLLKLAGDVESNPGPTSMDWIWRILFLVGAATGAHSGPQLQLQESGPGLVKPSETLSLTCTVSGDSISSGDYYWGWIRQPPGKGLEWIGHIYYSGVTYYNPSLKSRVTISVDTSRNQFSLKLSSVTAADTAVYYCTREDSSNWRSRGQGTLVTVSSGSGGGGSGGGGSGGGGSFEQLQLQESGPGLVKPSETLSLTCTVSGGSISSGSYFWGWIRQPPGKGLEWIGSIYYSGSTYYNPSLKSRVTISVDTSKNQFSLKLSSVTAADTAVYYCARHDGAVAGLFDYWGQGTLVTVSSATREDLKNVFPPEVAVFEPSEAEISHTQKATLVCLATGFYPDHVELSWWVNGKEVHSGVCTDPQPLKEQPALNDSRYCLSSRLRVSATFWQNPRNHFRCQVQFYGLSENDEWTQDRAKPVTQIVSAEAWGRADCGFTSESYQQGVLSATILYEILLGKATLYAVLVSALVLMAMVKRKDSRG

SEQ ID NO: 18368 - protein, 1091 aa, Artificial Sequence
  Synthetic Polypeptide
MALPVTALLLPLALLLHAARPEVQLVESGGGLVQPGGSLRLSCAASGFSFSDFWMSWVRQAPGKGLEWVATISQAGSEKDYVDSVKGRFTISRDNAKKSLYLQMNSLRAEDTAVYYCASGVYSFDYRGQGTLVTVSSGTGGGGSGGGGSGGGGSEFSYVLTQPPSVSVAPGQTARITCGGNNIGSKSVHWYQQPPGQAPVVVVYDDSDRPSGIPERFSGSNSGNTATLTISRVEAGDEAVYYCQVWDSSSDHVVFGGGTKLTVLLEDLKNVFPPEVAVFEPSEAEISHTQKATLVCLATGFYPDHVELSWWVNGKEVHSGVSTDPQPLKEQPALNDSRYCLSSRLRVSATFWQNPRNHFRCQVQFYGLSENDEWTQDRAKPVTQIVSAEAWGRADCGSQSFGLLDPKLCYLLDGILFIYGVILTALFLRVKFSRSADAPAYQQGQNQLYNELNLGRREEYDVLDKRRGRDPEMGGKPQRRKNPQEGLYNELQKDKMAEAYSEIGMKGERRRGKGHDGLYQGLSTATKDTYDALHMQALPPRRAKRSGSGATNFSLLKQAGDVEENPGPTSMDWIWRILFLVGAATGAHSGPQLQLQESGPGLVKPSETLSLTCTVSGDSISSGDYYWGWIRQPPGKGLEWIGHIYYSGVTYYNPSLKSRVTISVDTSRNQFSLKLSSVTAADTAVYYCTREDSSNWRSRGQGTLVTVSSGSGGGGSGGGGSGGGGSFEQLQLQESGPGLVKPSETLSLTCTVSGGSISSGSYFWGWIRQPPGKGLEWIGSIYYSGSTYYNPSLKSRVTISVDTSKNQFSLKLSSVTAADTAVYYCARHDGAVAGLFDYWGQGTLVTVSSATRIQNPDPAVYQLRDSKSSDKSVCLFTDFDSQTNVSQSKDSDVYITDKTVLDMRSMDFKSNSAVAWSNKSDFACANAFNNSIIPEDTFFPSPESSCGTQSFGLLDPKLCYLLDGILFIYGVILTALFLRVKFSRSADAPAYQQGQNQLYNELNLGRREEYDVLDKRRGRDPEMGGKPQRRKNPQEGLYNELQKDKMAEAYSEIGMKGERRRGKGHDGLYQGLSTATKDTYDALHMQALPPR

SEQ ID NO: 18369 - protein, 921 aa, Artificial Sequence
  Synthetic Polypeptide
MALPVTALLLPLALLLHAARPEVQLVESGGGLVQPGGSLRLSCAASGFSFSDFWMSWVRQAPGKGLEWVATISQAGSEKDYVDSVKGRFTISRDNAKKSLYLQMNSLRAEDTAVYYCASGVYSFDYRGQGTLVTVSSGTGGGGSGGGGSGGGGSEFSYVLTQPPSVSVAPGQTARITCGGNNIGSKSVHWYQQPPGQAPVVVVYDDSDRPSGIPERFSGSNSGNTATLTISRVEAGDEAVYYCQVWDSSSDHVVFGGGTKLTVLLEGQPKANPTVTLFPPSSEELQANKATLVCLISDFYPGAVTVAWKADGSPVKAGVETTKPSKQSNNKYAASSYLSLTPEQWKSHRSYSCQVTHEGSTVEKTVAPTECSPIKTDVITMDPKDNCSKDANDTLLLQLTNTSAYYMYLLLLLKSVVYFAIITCCLLRRTAFCCNGEKSRAKRSGSGATNFSLLKQAGDVEENPGPTSMDWIWRILFLVGAATGAHSGPQLQLQESGPGLVKPSETLSLTCTVSGDSISSGDYYWGWIRQPPGKGLEWIGHIYYSGVTYYNPSLKSRVTISVDTSRNQFSLKLSSVTAADTAVYYCTREDSSNWRSRGQGTLVTVSSGSGGGGSGGGGSGGGGSFEQLQLQESGPGLVKPSETLSLTCTVSGGSISSGSYFWGWIRQPPGKGLEWIGSIYYSGSTYYNPSLKSRVTISVDTSKNQFSLKLSSVTAADTAVYYCARHDGAVAGLFDYWGQGTLVTVSSATRASTKGPSVFPLAPSSKSTSGGTAALGCLVKDYFPEPVTVSWNSGALTSGVHTFPAVLQSSGLYSLSSVVTVPSSSLGTQTYICNVNHKPSNTKVDKRVEPKSCEVKTDSTDHVKPKETENTKQPSKSCHKPKAIVHTEKVNMMSLTVLGLRMLFAKTVAVNFLLTAKLFFL

SEQ ID NO: 18370 - protein, 902 aa, Artificial Sequence
  Synthetic Polypeptide
MALPVTALLLPLALLLHAARPEVQLVESGGGLVQPGGSLRLSCAASGFSFSDFWMSWVRQAPGKGLEWVATISQAGSEKDYVDSVKGRFTISRDNAKKSLYLQMNSLRAEDTAVYYCASGVYSFDYRGQGTLVTVSSGTGGGGSGGGGSGGGGSEFSYVLTQPPSVSVAPGQTARITCGGNNIGSKSVHWYQQPPGQAPVVVVYDDSDRPSGIPERFSGSNSGNTATLTISRVEAGDEAVYYCQVWDSSSDHVVFGGGTKLTVLLEGQPKANPTVTLFPPSSEELQANKATLVCLISDFYPGAVTVAWKADGSPVKAGVETTKPSKQSNNKYAASSYLSLTPEQWKSHRSYSCQVTHEGSTVEKTVAPTECSGRADCGFTSESYQQGVLSATILYEILLGKATLYAVLVSALVLMAMVKRKDSRGRAKRSGSGVKQTLNFDLLKLAGDVESNPGPTSMDWIWRILFLVGAATGAHSGPQLQLQESGPGLVKPSETLSLTCTVSGDSISSGDYYWGWIRQPPGKGLEWIGHIYYSGVTYYNPSLKSRVTISVDTSRNQFSLKLSSVTAADTAVYYCTREDSSNWRSRGQGTLVTVSSGSGGGGSGGGGSGGGGSFEQLQLQESGPGLVKPSETLSLTCTVSGGSISSGSYFWGWIRQPPGKGLEWIGSIYYSGSTYYNPSLKSRVTISVDTSKNQFSLKLSSVTAADTAVYYCARHDGAVAGLFDYWGQGTLVTVSSATRASTKGPSVFPLAPSSKSTSGGTAALGCLVKDYFPEPVTVSWNSGALTSGVHTFPAVLQSSGLYSLSSVVTVPSSSLGTQTYICNVNHKPSNTKVDKRVEPKSCIPEDTFFPSPESSCDVKLVEKSFETDTNLNFQNLSVIGFRILLLKVAGFNLLMTLRLWSS

SEQ ID NO: 18371 - protein, 759 aa, Artificial Sequence
  Synthetic Polypeptide
MALPVTALLLPLALLLHAARPEVQVLESGGGLVQPGGSLRLSCAASGFTFSNFAMSWVRQAPGKGLEWVSTISGSAGTTDYADSVKGRFTISRDNSKKTLYLQMNSLRVEDTAVYYCADGRGPFFDYRGQGTLVTVSSGTGGGGSGGGGSGGGGSEFSYVLTQPPSVSVAPGQTARITCGGNNIGSKSVHWYQQPPGQAPVVVVYDDSDRPSGIPERFSGSNSGNTATLTISRVEAGDEAVYYCQVWDSSSDHVVFGGGTKLTVLLEDLKNVFPPEVAVFEPSEAEISHTQKATLVCLATGFYPDHVELSWWVNGKEVHSGVCTDPQPLKEQPALNDSRYCLSSRLRVSATFWQNPRNHFRCQVQFYGLSENDEWTQDRAKPVTQIVSAEAWGRADCGFTSESYQQGVLSATILYEILLGKATLYAVLVSALVLMAMVKRKDSRGRAKRSGSGATNFSLLKQAGDVEENPGPTSMDWIWRILFLVGAATGAHSFEQLQLQESGPGLVKPSETLSLTCTVSGGSISSGSYFWGWIRQPPGKGLEWIGSIYYSGSTYYNPSLKSRVTISVDTSKNQFSLKLSSVTAADTAVYYCARHDGAVAGLFDYWGQGTLVTVSSATRIQNPDPAVYQLRDSKSSDKSVCLFTDFDSQTNVSQSKDSDVYITDKCVLDMRSMDFKSNSAVAWSNKSDFACANAFNNSIIPEDTFFPSPESSCDVKLVEKSFETDTNLNFQNLSVIGFRILLLKVAGFNLLMTLRLWSS

SEQ ID NO: 18372 - protein, 760 aa, Artificial Sequence
  Synthetic Polypeptide
MALPVTALLLPLALLLHAARPSYVLTQPPSVSVAPGQTARITCGGNNIGSKSVHWYQQPPGQAPVVVVYDDSDRPSGIPERFSGSNSGNTATLTISRVEAGDEAVYYCQVWDSSSDHVVFGGGTKLTVLLEDLKNVFPPEVAVFEPSEAEISHTQKATLVCLATGFYPDHVELSWWVNGKEVHSGVCTDPQPLKEQPALNDSRYCLSSRLRVSATFWQNPRNHFRCQVQFYGLSENDEWTQDRAKPVTQIVSAEAWGRADCGFTSESYQQGVLSATILYEILLGKATLYAVLVSALVLMAMVKRKDSRGRAKRSGSGATNFSLLKQAGDVEENPGPTSMDWIWRILFLVGAATGAHSGPEVQLVESGGGLVQAGGSLRLSCAASGRTFSMGWFRQAPGKEREFVAAITYSGGSPYYADSVKGRFTISRDNAKNTVYLQMNSLKPEDTAVYYCAANPTYGSDWNAENWGQGTQVTVSSGSGGGGSGGGGSGGGGSFEQLQLQESGPGLVKPSETLSLTCTVSGGSISSGSYFWGWIRQPPGKGLEWIGSIYYSGSTYYNPSLKSRVTISVDTSKNQFSLKLSSVTAADTAVYYCARHDGAVAGLFDYWGQGTLVTVSSATRIQNPDPAVYQLRDSKSSDKSVCLFTDFDSQTNVSQSKDSDVYITDKCVLDMRSMDFKSNSAVAWSNKSDFACANAFNNSIIPEDTFFPSPESSCDVKLVEKSFETDTNLNFQNLSVIGFRILLLKVAGFNLLMTLRLWSS

SEQ ID NO: 18373 - protein, 887 aa, Artificial Sequence
  Synthetic Polypeptide
MALPVTALLLPLALLLHAARPSYVLTQPPSVSVAPGQTARITCGGNNIGSKSVHWYQQPPGQAPVVVVYDDSDRPSGIPERFSGSNSGNTATLTISRVEAGDEAVYYCQVWDSSSDHVVFGGGTKLTVLLEDLKNVFPPEVAVFEPSEAEISHTQKATLVCLATGFYPDHVELSWWVNGKEVHSGVCTDPQPLKEQPALNDSRYCLSSRLRVSATFWQNPRNHFRCQVQFYGLSENDEWTQDRAKPVTQIVSAEAWGRADCGFTSESYQQGVLSATILYEILLGKATLYAVLVSALVLMAMVKRKDSRGRAKRSGSGATNFSLLKQAGDVEENPGPTSMDWIWRILFLVGAATGAHSQLQLQESGPGLVKPSETLSLTCTVSGGSISSGDYYWGWIRQPPGKGLEWIGSISYSGSTYYNPSLKSRVTISVDTSRNQFSLKLSSVTAADTAVYYCTREDSSNWRSRGQGTLVTVSSSGGGGSGGGGSEVQLVESGGGLVQAGGSLRLSCAASGRTFSMGWFRQAPGKEREFVAAITYSGGSPYYADSVKGRFTISRDNAKNTVYLQMNSLKPEDTAVYYCAANPTYGSDWNAENWGQGTQVTVSSGSGGGGSGGGGSGGGGSFEQLQLQESGPGLVKPSETLSLTCTVSGGSISSGSYFWGWIRQPPGKGLEWIGSIYYSGSTYYNPSLKSRVTISVDTSKNQFSLKLSSVTAADTAVYYCARHDGAVAGLFDYWGQGTLVTVSSATRIQNPDPAVYQLRDSKSSDKSVCLFTDFDSQTNVSQSKDSDVYITDKCVLDMRSMDFKSNSAVAWSNKSDFACANAFNNSIIPEDTFFPSPESSCDVKLVEKSFETDTNLNFQNLSVIGFRILLLKVAGFNLLMTLRLWSS

SEQ ID NO: 18374 - protein, 896 aa, Artificial Sequence
  Synthetic Polypeptide
MALPVTALLLPLALLLHAARPEVQVLESGGGLVQPGGSLRLSCAASGFTFSNFAMSWVRQAPGKGLEWVSTISGSAGTTDYADSVKGRFTISRDNSKKTLYLQMNSLRVEDTAVYYCADGRGPFFDYRGQGTLVTVSSGTGGGGSGGGGSGGGGSEFSYVLTQPPSVSVAPGQTARITCGGNNIGSKSVHWYQQPPGQAPVVVVYDDSDRPSGIPERFSGSNSGNTATLTISRVEAGDEAVYYCQVWDSSSDHVVFGGGTKLTVLLEDLKNVFPPEVAVFEPSEAEISHTQKATLVCLATGFYPDHVELSWWVNGKEVHSGVCTDPQPLKEQPALNDSRYCLSSRLRVSATFWQNPRNHFRCQVQFYGLSENDEWTQDRAKPVTQIVSAEAWGRADCGFTSESYQQGVLSATILYEILLGKATLYAVLVSALVLMAMVKRKDSRGRAKRSGSGATNFSLLKQAGDVEENPGPTSMDWIWRILFLVGAATGAHSGPEVQLVESGGGLVQAGGSLRLSCAASGRTFSMGWFRQAPGKEREFVAAITYSGGSPYYASSVRGRFTISRDNAKNTVYLQMNSLKPEDTAVYYCAANPTYGSDWNAENWGQGTQVTVSSGSGGGGSGGGGSGGGGSFEQLQLQESGPGLVKPSETLSLTCTVSGGSISSGSYFWGWIRQPPGKGLEWIGSIYYSGSTYYNPSLKSRVTISVDTSKNQFSLKLSSVTAADTAVYYCARHDGAVAGLFDYWGQGTLVTVSSATRIQNPDPAVYQLRDSKSSDKSVCLFTDFDSQTNVSQSKDSDVYITDKCVLDMRSMDFKSNSAVAWSNKSDFACANAFNNSIIPEDTFFPSPESSCDVKLVEKSFETDTNLNFQNLSVIGFRILLLKVAGFNLLMTLRLWSS

SEQ ID NO: 18375 - protein, 727 aa, Artificial Sequence
  Synthetic Polypeptide
MALPVTALLLPLALLLHAARPSYVLTQPPSVSVAPGQTARITCGGNNIGSKSVHWYQQPPGQAPVVVVYDDSDRPSGIPERFSGSNSGNTATLTISRVEAGDEAVYYCQVWDSSSDHVVFGGGTKLTVLGGGGSGGGGSGGGGSQLQLQESGPGLVKPSETLSLTCTVSGGSISSGSYFWGWIRQPPGKGLEWIGSIYYSGISYYNPSLKSRVTISVDTSKNQFSLKLSSVTAADTAVYYCARHDGAVAGLFDYWGQGTLVTVSSATREQKLISEEDLAKPTTTPAPRPPTPAPTIASQPLSLRPEACRPAAGGAVHTRGLDFACDIYIWAPLAGTCGVLLLSLVITLYCKRGRKKLLYIFKQPFMRPVQTTQEEDGCSCRFPEEEEGGCELRVKFSRSADAPAYQQGQNQLYNELNLGRREEYDVLDKRRGRDPEMGGKPRRKNPQEGLYNELQKDKMAEAYSEIGMKGERRRGKGHDGLYQGLSTATKDTYDALHMQALPPRSSGSGEGRGSLLTCGDVEENPGPHMTEYKPTVRLATRDDVPRAVRTLAAAFADYPATRHTVDPDRHIERVTELQELFLTRVGLDIGKVWVADDGAAVAVWTTPESVEAGAVFAEIGPRMAELSGSRLAAQQQMEGLLAPHRPKEPAWFLATVGVSPDHQGKGLGSAVVLPGVEAAERAGVPAFLETSAPRNLPFYERLGFTVTADVEVPEGPRTWCMTRKPGA

SEQ ID NO: 18376 - protein, 721 aa, Artificial Sequence
  Synthetic Polypeptide
MALPVTALLLPLALLLHAARPSYVLTQPPSVSVAPGQTARITCGGNNIGSKSVHWYQQPPGQAPVVVVYDDSDRPSGIPERFSGSNSGNTATLTISRVEAGDEAVYYCQVWDSSSDHVVFGGGTKLTVLGGGGSGGGGSGGGGSQLQLQESGPGLVKPSETLSLTCTVSGGSISSGSYFWGWIRQPPGKGLEWIGSIYYSGISYYNPSLKSRVTISVDTSKNQFSLKLSSVTAADTAVYYCARHDGAVAGLFDYWGQGTLVTVSSATREQKLISEEDLKIEVMYPPPYLDNEKSNGTIIHVKGKHLCPSPLFPGPSKPFWVLVVVGGVLACYSLLVTVAFIIFWVRSKRSRLLHSDYMNMTPRRPGPTRKHYQPYAPPRDFAAYRSRVKFSRSADAPAYQQGQNQLYNELNLGRREEYDVLDKRRGRDPEMGGKPRRKNPQEGLYNELQKDKMAEAYSEIGMKGERRRGKGHDGLYQGLSTATKDTYDALHMQALPPRSSGSGEGRGSLLTCGDVEENPGPHMTEYKPTVRLATRDDVPRAVRTLAAAFADYPATRHTVDPDRHIERVTELQELFLTRVGLDIGKVWVADDGAAVAVWTTPESVEAGAVFAEIGPRMAELSGSRLAAQQQMEGLLAPHRPKEPAWFLATVGVSPDHQGKGLGSAVVLPGVEAAERAGVPAFLETSAPRNLPFYERLGFTVTADVEVPEGPRTWCMTRKPGA

SEQ ID NO: 18377 - protein, 498 aa, Artificial Sequence
  Synthetic Polypeptide
MALPVTALLLPLALLLHAARPSYVLTQPPSVSVAPGQTARITCGGNNIGSKSVHWYQQPPGQAPVVVVYDDSDRPSGIPERFSGSNSGNTATLTISRVEAGDEAVYYCQVWDSSSDHVVFGGGTKLTVLGGGGSGGGGSGGGGSQLQLQESGPGLVKPSETLSLTCTVSGGSISSGSYFWGWIRQPPGKGLEWIGSIYYSGISYYNPSLKSRVTISVDTSKNQFSLKLSSVTAADTAVYYCARHDGAVAGLFDYWGQGTLVTVSSATREQKLISEEDLKIEVMYPPPYLDNEKSNGTIIHVKGKHLCPSPLFPGPSKPFWVLVVVGGVLACYSLLVTVAFIIFWVRSKRSRLLHSDYMNMTPRRPGPTRKHYQPYAPPRDFAAYRSRVKFSRSADAPAYQQGQNQLYNELNLGRREEYDVLDKRRGRDPEMGGKPRRKNPQEGLYNELQKDKMAEAYSEIGMKGERRRGKGHDGLYQGLSTATKDTYDALHMQALPPR

SEQ ID NO: 18378 - protein, 504 aa, Artificial Sequence
  Synthetic Polypeptide
MALPVTALLLPLALLLHAARPSYVLTQPPSVSVAPGQTARITCGGNNIGSKSVHWYQQPPGQAPVVVVYDDSDRPSGIPERFSGSNSGNTATLTISRVEAGDEAVYYCQVWDSSSDHVVFGGGTKLTVLGGGGSGGGGSGGGGSQLQLQESGPGLVKPSETLSLTCTVSGGSISSGSYFWGWIRQPPGKGLEWIGSIYYSGISYYNPSLKSRVTISVDTSKNQFSLKLSSVTAADTAVYYCARHDGAVAGLFDYWGQGTLVTVSSATREQKLISEEDLAKPTTTPAPRPPTPAPTIASQPLSLRPEACRPAAGGAVHTRGLDFACDIYIWAPLAGTCGVLLLSLVITLYCKRGRKKLLYIFKQPFMRPVQTTQEEDGCSCRFPEEEEGGCELRVKFSRSADAPAYQQGQNQLYNELNLGRREEYDVLDKRRGRDPEMGGKPRRKNPQEGLYNELQKDKMAEAYSEIGMKGERRRGKGHDGLYQGLSTATKDTYDALHMQALPPR

SEQ ID NO: 18379 - protein, 504 aa, Artificial Sequence
  Synthetic Polypeptide
MALPVTALLLPLALLLHAARPQLQLQESGPGLVKPSETLSLTCTVSGGSISSGSYFWGWIRQPPGKGLEWIGSIYYSGISYYNPSLKSRVTISVDTSKNQFSLKLSSVTAADTAVYYCARHDGAVAGLFDYWGQGTLVTVSSAGGGGSGGGGSGGGGSSYVLTQPPSVSVAPGQTARITCGGNNIGSKSVHWYQQPPGQAPVVVVYDDSDRPSGIPERFSGSNSGNTATLTISRVEAGDEAVYYCQVWDSSSDHVVFGGGTKLTVLTREQKLISEEDLAKPTTTPAPRPPTPAPTIASQPLSLRPEACRPAAGGAVHTRGLDFACDIYIWAPLAGTCGVLLLSLVITLYCKRGRKKLLYIFKQPFMRPVQTTQEEDGCSCRFPEEEEGGCELRVKFSRSADAPAYQQGQNQLYNELNLGRREEYDVLDKRRGRDPEMGGKPRRKNPQEGLYNELQKDKMAEAYSEIGMKGERRRGKGHDGLYQGLSTATKDTYDALHMQALPPR

SEQ ID NO: 18380 - protein, 917 aa, Artificial Sequence
  Synthetic Polypeptide
MALPVTALLLPLALLLHAARPSYVLTQPPSVSVAPGQTARITCGGNNIGSKSVHWYQQPPGQAPVVVVYDDSDRPSGIPERFSGSNSGNTATLTISRVEAGDEAVYYCQVWDSSSDHVVFGGGTKLTVLGGGGSGGGGSGGGGSQLQLQESGPGLVKPSETLSLTCTVSGGSISSGSYFWGWIRQPPGKGLEWIGSIYYSGISYYNPSLKSRVTISVDTSKNQFSLKLSSVTAADTAVYYCARHDGAVAGLFDYWGQGTLVTVSSATREQKLISEEDLAKPTTTPAPRPPTPAPTIASQPLSLRPEACRPAAGGAVHTRGLDFACDIYIWAPLAGTCGVLLLSLVITLYCGRARVKFSRSADAPAYQQGQNQLYNELNLGRREEYDVLDKRRGRDPEMGGKPRRKNPQEGLYNELQKDKMAEAYSEIGMKGERRRGKGHDGLYQGLSTATKDTYDALHMQALPPRSRGSGATNFSLLKQAGDVEENPGPGIHMATYEVLCEVARKLGTDDREVVLFLLNVFIPQPTLAQLIGALRALKEEGRLTFPLLAECLFRAGRRDLLRDLLHLDPRFLERHLAGTMSYFSPYQLTVLHVDGELCARDIRSLIFLSKDTIGSRSTPQTFLHWVYCMENLDLLGPTDVDALMSMLRSLSRVDLQRQVQTLMGLHLSGPSHSQHYRHTPLETDFYDYKDDDDKTSGSGEGRGSLLTCGDVEENPGPHMTEYKPTVRLATRDDVPRAVRTLAAAFADYPATRHTVDPDRHIERVTELQELFLTRVGLDIGKVWVADDGAAVAVWTTPESVEAGAVFAEIGPRMAELSGSRLAAQQQMEGLLAPHRPKEPAWFLATVGVSPDHQGKGLGSAVVLPGVEAAERAGVPAFLETSAPRNLPFYERLGFTVTADVEVPEGPRTWCMTRKPGA

SEQ ID NO: 18381 - protein, 857 aa, Artificial Sequence
  Synthetic Polypeptide
MALPVTALLLPLALLLHAARPSYVLTQPPSVSVAPGQTARITCGGNNIGSKSVHWYQQPPGQAPVVVVYDDSDRPSGIPERFSGSNSGNTATLTISRVEAGDEAVYYCQVWDSSSDHVVFGGGTKLTVLLEIQNPDPAVYQLRDSKSSDKSVCLFTDFDSQTNVSQSKDSDVYITDKCVLDMRSMDFKSNSAVAWSNKSDFACANAFNNSIIPEDTFFPSSDVPCDVKLVEKSFETDTNLNFQNLSVIGFRILLLKVAGFNLLMTLRLWSSRAKRSGSGVKQTLNFDLLKLAGDVESNPGPTSMDWIWRILFLVGAATGAHSFEQLQLQESGPGLVKPSETLSLTCTVSGGSISSGSYFWGWIRQPPGKGLEWIGSIYYSGISYYNPSLKSRVTISVDTSKNQFSLKLSSVTAADTAVYYCARHDGAVAGLFDYWGQGTLVTVSSATREDLKNVFPPEVAVFEPSKAEIAHTQKATLVCLATGFYPDHVELSWWVNGKEVHSGVCTDPQPLKEQPALNDSRYCLSSRLRVSATFWQNPRNHFRCQVQFYGLSENDEWTQDRAKPVTQIVSAEAWGRADCGITSASYHQGVLSATILYEILLGKATLYAVLVSALVLMAMVKRKDSRGRAKRSGSGATNFSLLKQAGDVEENPGPSRGHMTEYKPTVRLATRDDVPRAVRTLAAAFADYPATRHTVDPDRHIERVTELQELFLTRVGLDIGKVWVADDGAAVAVWTTPESVEAGAVFAEIGPRMAELSGSRLAAQQQMEGLLAPHRPKEPAWFLATVGVSPDHQGKGLGSAVVLPGVEAAERAGVPAFLETSAPRNLPFYERLGFTVTADVEVPEGPRTWCMTRKPGA

SEQ ID NO: 18382 - protein, 856 aa, Artificial Sequence
  Synthetic Polypeptide
MALPVTALLLPLALLLHAARPSYVLTQPPSVSVAPGQTARITCGGNNIGSKSVHWYQQPPGQAPVVVVYDDSDRPSGIPERFSGSNSGNTATLTISRVEAGDEAVYYCQVWDSSSDHVVFGGGTKLTVLLEDLKNVFPPEVAVFEPSKAEIAHTQKATLVCLATGFYPDHVELSWWVNGKEVHSGVCTDPQPLKEQPALNDSRYCLSSRLRVSATFWQNPRNHFRCQVQFYGLSENDEWTQDRAKPVTQIVSAEAWGRADCGITSASYHQGVLSATILYEILLGKATLYAVLVSALVLMAMVKRKDSRGRAKRSGSGATNFSLLKQAGDVEENPGPTSMDWIWRILFLVGAATGAHSFEQLQLQESGPGLVKPSETLSLTCTVSGGSISSGSYFWGWIRQPPGKGLEWIGSIYYSGISYYNPSLKSRVTISVDTSKNQFSLKLSSVTAADTAVYYCARHDGAVAGLFDYWGQGTLVTVSSATRIQNPDPAVYQLRDSKSSDKSVCLFTDFDSQTNVSQSKDSDVYITDKCVLDMRSMDFKSNSAVAWSNKSDFACANAFNNSIIPEDTFFPSSDVPCDVKLVEKSFETDTNLNFQNLSVIGFRILLLKVAGFNLLMTLRLWSSRAKRSGSGVKQTLNFDLLKLAGDVESNPGPSRGHMTEYKPTVRLATRDDVPRAVRTLAAAFADYPATRHTVDPDRHIERVTELQELFLTRVGLDIGKVWVADDGAAVAVWTTPESVEAGAVFAEIGPRMAELSGSRLAAQQQMEGLLAPHRPKEPAWFLATVGVSPDHQGKGLGSAVVLPGVEAAERAGVPAFLETSAPRNLPFYERLGFTVTADVEVPEGPRTWCMTRKPGA

SEQ ID NO: 18383 - protein, 623 aa, Artificial Sequence
  Synthetic Polypeptide
MALPVTALLLPLALLLHAARPSYVLTQPPSVSVAPGQTARITCGGNNIGSKSVHWYQQPPGQAPVVVVYDDSDRPSGIPERFSGSNSGNTATLTISRVEAGDEAVYYCQVWDSSSDHVVFGGGTKLTVLLEDLKNVFPPEVAVFEPSEAEISHTQKATLVCLATGFYPDHVELSWWVNGKEVHSGVCTDPQPLKEQPALNDSRYCLSSRLRVSATFWQNPRNHFRCQVQFYGLSENDEWTQDRAKPVTQIVSAEAWGRADCGFTSESYQQGVLSATILYEILLGKATLYAVLVSALVLMAMVKRKDSRGRAKRSGSGATNFSLLKQAGDVEENPGPTSMDWIWRILFLVGAATGAHSFEQLQLQESGPGLVKPSETLSLTCTVSGGSISSGSYFWGWIRQPPGKGLEWIGSIYYSGISYYNPSLKSRVTISVDTSKNQFSLKLSSVTAADTAVYYCARHDGAVAGLFDYWGQGTLVTVSSATRIQNPDPAVYQLRDSKSSDKSVCLFTDFDSQTNVSQSKDSDVYITDKCVLDMRSMDFKSNSAVAWSNKSDFACANAFNNSIIPEDTFFPSPESSCDVKLVEKSFETDTNLNFQNLSVIGFRILLLKVAGFNLLMTLRLWSS

SEQ ID NO: 18384 - protein, 848 aa, Artificial Sequence
  Synthetic Polypeptide
MALPVTALLLPLALLLHAARPSYVLTQPPSVSVAPGQTARITCGGNNIGSKSVHWYQQPPGQAPVVVVYDDSDRPSGIPERFSGSNSGNTATLTISRVEAGDEAVYYCQVWDSSSDHVVFGGGTKLTVLLEDLKNVFPPEVAVFEPSEAEISHTQKATLVCLATGFYPDHVELSWWVNGKEVHSGVCTDPQPLKEQPALNDSRYCLSSRLRVSATFWQNPRNHFRCQVQFYGLSENDEWTQDRAKPVTQIVSAEAWGRADCGFTSESYQQGVLSATILYEILLGKATLYAVLVSALVLMAMVKRKDSRGRAKRSGSGATNFSLLKQAGDVEENPGPTSMDWIWRILFLVGAATGAHSFEQLQLQESGPGLVKPSETLSLTCTVSGGSISSGSYFWGWIRQPPGKGLEWIGSIYYSGISYYNPSLKSRVTISVDTSKNQFSLKLSSVTAADTAVYYCARHDGAVAGLFDYWGQGTLVTVSSATRIQNPDPAVYQLRDSKSSDKSVCLFTDFDSQTNVSQSKDSDVYITDKCVLDMRSMDFKSNSAVAWSNKSDFACANAFNNSIIPEDTFFPSPESSCDVKLVEKSFETDTNLNFQNLSVIGFRILLLKVAGFNLLMTLRLWSSRAKRSGSGVKQTLNFDLLKLAGDVESNPGPSRGGIHTMATYEVLCEVARKLGTDDREVVLFLLNVFIPQPTLAQLIGALRALKEEGRLTFPLLAECLFRAGRRDLLRDLLHLDPRFLERHLAGTMSYFSPYQLTVLHVDGELCARDIRSLIFLSKDTIGSRSTPQTFLHWVYCMENLDLLGPTDVDALMSMLRSLSRVDLQRQVQTLMGLHLSGPSHSQHYRHTP

SEQ ID NO: 18385 - protein, 627 aa, Artificial Sequence
  Synthetic Polypeptide
MALPVTALLLPLALLLHAARPSYVLTQPPSVSVAPGQTARITCGGNNIGSKSVHWYQQPPGQAPVVVVYDDSDRPSGIPERFSGSNSGNTATLTISRVEAGDEAVYYCQVWDSSSDHVVFGGGTKLTVLLEIQNPDPAVYQLRDSKSSDKSVCLFTDFDSQTNVSQSKDSDVYITDKCVLDMRSMDFKSNSAVAWSNKSDFACANAFNNSIIPEDTFFPSPESSCDVKLVEKSFETDTNLNFQNLSVIGFRILLLKVAGFNLLMTLRLWSSRAKRSGSGVKQTLNFDLLKLAGDVESNPGPTSMDWIWRILFLVGAATGAHSFEQLQLQESGPGLVKPSETLSLTCTVSGGSISSGSYFWGWIRQPPGKGLEWIGSIYYSGISYYNPSLKSRVTISVDTSKNQFSLKLSSVTAADTAVYYCARHDGAVAGLFDYWGQGTLVTVSSATREDLKNVFPPEVAVFEPSEAEISHTQKATLVCLATGFYPDHVELSWWVNGKEVHSGVCTDPQPLKEQPALNDSRYCLSSRLRVSATFWQNPRNHFRCQVQFYGLSENDEWTQDRAKPVTQIVSAEAWGRADCGFTSESYQQGVLSATILYEILLGKATLYAVLVSALVLMAMVKRKDSRG

SEQ ID NO: 18386 - protein, 849 aa, Artificial Sequence
  Synthetic Polypeptide
MALPVTALLLPLALLLHAARPSYVLTQPPSVSVAPGQTARITCGGNNIGSKSVHWYQQPPGQAPVVVVYDDSDRPSGIPERFSGSNSGNTATLTISRVEAGDEAVYYCQVWDSSSDHVVFGGGTKLTVLLEIQNPDPAVYQLRDSKSSDKSVCLFTDFDSQTNVSQSKDSDVYITDKCVLDMRSMDFKSNSAVAWSNKSDFACANAFNNSIIPEDTFFPSPESSCDVKLVEKSFETDTNLNFQNLSVIGFRILLLKVAGFNLLMTLRLWSSRAKRSGSGVKQTLNFDLLKLAGDVESNPGPTSMDWIWRILFLVGAATGAHSFEQLQLQESGPGLVKPSETLSLTCTVSGGSISSGSYFWGWIRQPPGKGLEWIGSIYYSGISYYNPSLKSRVTISVDTSKNQFSLKLSSVTAADTAVYYCARHDGAVAGLFDYWGQGTLVTVSSATREDLKNVFPPEVAVFEPSEAEISHTQKATLVCLATGFYPDHVELSWWVNGKEVHSGVCTDPQPLKEQPALNDSRYCLSSRLRVSATFWQNPRNHFRCQVQFYGLSENDEWTQDRAKPVTQIVSAEAWGRADCGFTSESYQQGVLSATILYEILLGKATLYAVLVSALVLMAMVKRKDSRGRAKRSGSGATNFSLLKQAGDVEENPGPSRGGIHTMATYEVLCEVARKLGTDDREVVLFLLNVFIPQPTLAQLIGALRALKEEGRLTFPLLAECLFRAGRRDLLRDLLHLDPRFLERHLAGTMSYFSPYQLTVLHVDGELCARDIRSLIFLSKDTIGSRSTPQTFLHWVYCMENLDLLGPTDVDALMSMLRSLSRVDLQRQVQTLMGLHLSGPSHSQHYRHTP

SEQ ID NO: 18387 - protein, 901 aa, Artificial Sequence
  Synthetic Polypeptide
MALPVTALLLPLALLLHAARPLEGKPIPNPLLGLDSTGSGEDLKNVFPPEVAVFEPSKAEIAHTQKATLVCLATGFYPDHVELSWWVNGKEVHSGVCTDPQPLKEQPALNDSRYCLSSRLRVSATFWQNPRNHFRCQVQFYGLSENDEWTQDRAKPVTQIVSAEAWGRADCGITSASYHQGVLSATILYEILLGKATLYAVLVSALVLMAMVKRKDSRGRAKRSGSGATNFSLLKQAGDVEENPGPTSMALPVTALLLPLALLLHAARPSYVLTQPPSVSVAPGQTARITCGGNNIGSKSVHWYQQPPGQAPVVVVYDDSDRPSGIPERFSGSNSGNTATLTISRVEAGDEAVYYCQVWDSSSDHVVFGGGTKLTVLGGGGSGGGGSGGGGSQLQLQESGPGLVKPSETLSLTCTVSGGSISSGSYFWGWIRQPPGKGLEWIGSIYYSGISYYNPSLKSRVTISVDTSKNQFSLKLSSVTAADTAVYYCARHDGAVAGLFDYWGQGTLVTVSSATREQKLISEEDGSGIQNPDPAVYQLRDSKSSDKSVCLFTDFDSQTNVSQSKDSDVYITDKCVLDMRSMDFKSNSAVAWSNKSDFACANAFNNSIIPEDTFFPSSDVPCDVKLVEKSFETDTNLNFQNLSVIGFRILLLKVAGFNLLMTLRLWSSRAKRSGSGVKQTLNFDLLKLAGDVESNPGPSRGHMTEYKPTVRLATRDDVPRAVRTLAAAFADYPATRHTVDPDRHIERVTELQELFLTRVGLDIGKVWVADDGAAVAVWTTPESVEAGAVFAEIGPRMAELSGSRLAAQQQMEGLLAPHRPKEPAWFLATVGVSPDHQGKGLGSAVVLPGVEAAERAGVPAFLETSAPRNLPFYERLGFTVTADVEVPEGPRTWCMTRKPGA

SEQ ID NO: 18388 - protein, 902 aa, Artificial Sequence
  Synthetic Polypeptide
MALPVTALLLPLALLLHAARPLEQKLISEEDLGSGDRPDPAVYQLRDSKSSDKSVCLFTDFDSQTNVSQSKDSDVYITDKCVLDMRSMDFKSNSAVAWSNKSDFACANAFNNSIIPEDTFFPSPESSCDVKLVEKSFETDTNLNFQNLSVIGFRILLLKVAGFNLLMTLRLWSSSSRAKRSGSGVKQTLNFDLLKLAGDVESNPGPTSMALPVTALLLPLALLLHAARPSYVLTQPPSVSVAPGQTARITCGGNNIGSKSVHWYQQPPGQAPVVVVYDDSDRPSGIPERFSGSNSGNTATLTISRVEAGDEAVYYCQVWDSSSDHVVFGGGTKLTVLGGGGSGGGGSGGGGSQLQLQESGPGLVKPSETLSLTCTVSGGSISSGSYFWGWIRQPPGKGLEWIGSIYYSGISYYNPSLKSRVTISVDTSKNQFSLKLSSVTAADTAVYYCARHDGAVAGLFDYWGQGTLVTVSSATRGKPIPNPLLGLDSTGSGEDLKNVFPPEVAVFEPSEAEISHTQKATLVCLATGFYPDHVELSWWVNGKEVHSGVCTDPQPLKEQPALNDSRYCLSSRLRVSATFWQNPRNHFRCQVQFYGLSENDEWTQDRAKPVTQIVSAEAWGRADCGFTSESYQQGVLSATILYEILLGKATLYAVLVSALVLMAMVKRKDSRGRAKRSGSGATNFSLLKQAGDVEENPGPSRGHMTEYKPTVRLATRDDVPRAVRTLAAAFADYPATRHTVDPDRHIERVTELQELFLTRVGLDIGKVWVADDGAAVAVWTTPESVEAGAVFAEIGPRMAELSGSRLAAQQQMEGLLAPHRPKEPAWFLATVGVSPDHQGKGLGSAVVLPGVEAAERAGVPAFLETSAPRNLPFYERLGFTVTADVEVPEGPRTWCMTRKPGA

SEQ ID NO: 18389 - protein, 856 aa, Artificial Sequence
  Synthetic Polypeptide
MALPVTALLLPLALLLHAARPSYVLTQPPSVSVAPGQTARITCGGNNIGSKSVHWYQQPPGQAPVVVVYDDSDRPSGIPERFSGSNSGNTATLTISRVEAGDEAVYYCQVWDSSSDHVVFGGGTKLTVLLEDLKNVFPPEVAVFEPSEAEISHTQKATLVCLATGFYPDHVELSWWVNGKEVHSGVSTDPQPLKEQPALNDSRYCLSSRLRVSATFWQNPRNHFRCQVQFYGLSENDEWTQDRAKPVTQIVSAEAWGRADCGFTSESYQQGVLSATILYEILLGKATLYAVLVSALVLMAMVKRKDSRGRAKRSGSGATNFSLLKQAGDVEENPGPTSMDWIWRILFLVGAATGAHSFEQLQLQESGPGLVKPSETLSLTCTVSGGSISSGSYFWGWIRQPPGKGLEWIGSIYYSGISYYNPSLKSRVTISVDTSKNQFSLKLSSVTAADTAVYYCARHDGAVAGLFDYWGQGTLVTVSSATRIQNPDPAVYQLRDSKSSDKSVCLFTDFDSQTNVSQSKDSDVYITDKTVLDMRSMDFKSNSAVAWSNKSDFACANAFNNSIIPEDTFFPSPESSCDVKLVEKSFETDTNLNFQNLSVIGFRILLLKVAGFNLLMTLRLWSSRAKRSGSGVKQTLNFDLLKLAGDVESNPGPSRGHMTEYKPTVRLATRDDVPRAVRTLAAAFADYPATRHTVDPDRHIERVTELQELFLTRVGLDIGKVWVADDGAAVAVWTTPESVEAGAVFAEIGPRMAELSGSRLAAQQQMEGLLAPHRPKEPAWFLATVGVSPDHQGKGLGSAVVLPGVEAAERAGVPAFLETSAPRNLPFYERLGFTVTADVEVPEGPRTWCMTRKPGA

SEQ ID NO: 18390 - protein, 938 aa, Artificial Sequence
  Synthetic Polypeptide
MALPVTALLLPLALLLHAARPSYVLTQPPSVSVAPGQTARITCGGNNIGSKSVHWYQQPPGQAPVVVVYDDSDRPSGIPERFSGSNSGNTATLTISRVEAGDEAVYYCQVWDSSSDHVVFGGGTKLTVLLEDLKNVFPPEVAVFEPSEAEISHTQKATLVCLATGFYPDHVELSWWVNGKEVHSGVSTDPQPLKEQPALNDSRYCLSSRLRVSATFWQNPRNHFRCQVQFYGLSENDEWTQDRAKPVTQIVSAEAWGRADCGFTSESYQQGVLSATILYEILLGKATLYAVLVSALVLMAMVKRKDSRGRAKRSGSGATNFSLLKQAGDVEENPGPTSMDWIWRILFLVGAATGAHSFEQLQLQESGPGLVKPSETLSLTCTVSGGSISSGSYFWGWIRQPPGKGLEWIGSIYYSGISYYNPSLKSRVTISVDTSKNQFSLKLSSVTAADTAVYYCARHDGAVAGLFDYWGQGTLVTVSSATREQKLISEEDGSGTPFPSLAPPIMLLVDGKQQMVVVCLVLDVAPPGLDSPIWFSAGNGSALDAFTYGPSPATDGTWTNLAHLSLPSEELASWEPLVCHTGPGAEGHSRSTQPMHLSGEASTARTCPQEPLRGTPGGALWLGVLRLLLFKLLLFDLLLTCSCLCDPAGPLPSPATTTRLRALGSHRLHPATETGGREATSSPRPQPRDRRWGDTPPGRKPGSPVRAKRSGSGVKQTLNFDLLKLAGDVESNPGPSRGHMTEYKPTVRLATRDDVPRAVRTLAAAFADYPATRHTVDPDRHIERVTELQELFLTRVGLDIGKVWVADDGAAVAVWTTPESVEAGAVFAEIGPRMAELSGSRLAAQQQMEGLLAPHRPKEPAWFLATVGVSPDHQGKGLGSAVVLPGVEAAERAGVPAFLETSAPRNLPFYERLGFTVTADVEVPEGPRTWCMTRKPGA

SEQ ID NO: 18391 - protein, 956 aa, Artificial Sequence
  Synthetic Polypeptide
MALPVTALLLPLALLLHAARPLEDLKNVFPPEVAVFEPSEAEISHTQKATLVCLATGFYPDHVELSWWVNGKEVHSGVSTDPQPLKEQPALNDSRYCLSSRLRVSATFWQNPRNHFRCQVQFYGLSENDEWTQDRAKPVTQIVSAEAWGRADCGFTSESYQQGVLSATILYEILLGKATLYAVLVSALVLMAMVKRKDSRGRAKRSGSGATNFSLLKQAGDVEENPGPTSMALPVTALLLPLALLLHAARPSYVLTQPPSVSVAPGQTARITCGGNNIGSKSVHWYQQPPGQAPVVVVYDDSDRPSGIPERFSGSNSGNTATLTISRVEAGDEAVYYCQVWDSSSDHVVFGGGTKLTVLGGGGSGGGGSGGGGSQLQLQESGPGLVKPSETLSLTCTVSGGSISSGSYFWGWIRQPPGKGLEWIGSIYYSGISYYNPSLKSRVTISVDTSKNQFSLKLSSVTAADTAVYYCARHDGAVAGLFDYWGQGTLVTVSSATREQKLISEEDLGSGTPFPSLAPPIMLLVDGKQQMVVVCLVLDVAPPGLDSPIWFSAGNGSALDAFTYGPSPATDGTWTNLAHLSLPSEELASWEPLVCHTGPGAEGHSRSTQPMHLSGEASTARTCPQEPLRGTPGGALWLGVLRLLLFKLLLFDLLLTCSCLCDPAGPLPSPATTTRLRALGSHRLHPATETGGREATSSPRPQPRDRRWGDTPPGRKPGSPVRAKRSGSGVKQTLNFDLLKLAGDVESNPGPSRSRGHMTEYKPTVRLATRDDVPRAVRTLAAAFADYPATRHTVDPDRHIERVTELQELFLTRVGLDIGKVWVADDGAAVAVWTTPESVEAGAVFAEIGPRMAELSGSRLAAQQQMEGLLAPHRPKEPAWFLATVGVSPDHQGKGLGSAVVLPGVEAAERAGVPAFLETSAPRNLPFYERLGFTVTADVEVPEGPRTWCMTRKPGA

SEQ ID NO: 18392 - protein, 893 aa, Artificial Sequence
  Synthetic Polypeptide
MALPVTALLLPLALLLHAARPSYVLTQPPSVSVAPGQTARITCGGNNIGSKSVHWYQQPPGQAPVVVVYDDSDRPSGIPERFSGSNSGNTATLTISRVEAGDEAVYYCQVWDSSSDHVVFGGGTKLTVLLEGKPIPNPLLGLDSTGSGDKQLDADVSPKPTIFLPSIAETKLQKAGTYLCLLEKFFPDVIKIHWQEKKSNTILGSQEGNTMKTNDTYMKFSWLTVPEKSLDKEHRCIVRHENNKNGVDQEIIFPPIKTDVITMDPKDNCSKDANDTLLLQLTNTSAYYMYLLLLLKSVVYFAIITCCLLRRTAFCCNGEKSRAKRSGSGATNFSLLKQAGDVEENPGPTSMDWIWRILFLVGAATGAHSFEQLQLQESGPGLVKPSETLSLTCTVSGGSISSGSYFWGWIRQPPGKGLEWIGSIYYSGISYYNPSLKSRVTISVDTSKNQFSLKLSSVTAADTAVYYCARHDGAVAGLFDYWGQGTLVTVSSATREQKLISEEDGSGSQPHTKPSVFVMKNGTNVACLVKEFYPKDIRINLVSSKKITEFDPAIVISPSGKYNAVKLGKYEDSNSVTCSVQHDNKTVHSTDFEVKTDSTDHVKPKETENTKQPSKSCHKPKAIVHTEKVNMMSLTVLGLRMLFAKTVAVNFLLTAKLFFLRAKRSGSGVKQTLNFDLLKLAGDVESNPGPSRGHMTEYKPTVRLATRDDVPRAVRTLAAAFADYPATRHTVDPDRHIERVTELQELFLTRVGLDIGKVWVADDGAAVAVWTTPESVEAGAVFAEIGPRMAELSGSRLAAQQQMEGLLAPHRPKEPAWFLATVGVSPDHQGKGLGSAVVLPGVEAAERAGVPAFLETSAPRNLPFYERLGFTVTADVEVPEGPRTWCMTRKPGA

SEQ ID NO: 18393 - protein, 631 aa, Artificial Sequence
  Synthetic Polypeptide
MALPVTALLLPLALLLHAARPSYVLTQPPSVSVAPGQTARITCGGNNIGSKSVHWYQQPPGQAPVVVVYDDSDRPSGIPERFSGSNSGNTATLTISRVEAGDEAVYYCQVWDSSSDHVVFGGGTKLTVLLESQPHTKPSVFVMKNGTNVACLVKEFYPKDIRINLVSSKKITEFDPAIVISPSGKYNAVKLGKYEDSNSVTCSVQHDNKTVHSTDFEVKTDSTDHVKPKETENTKQPSKSCHKPKAIVHTEKVNMMSLTVLGLRMLFAKTVAVNFLLTAKLFFLRAKRSGSGATNFSLLKQAGDVEENPGPTSMDWIWRILFLVGAATGAHSFEQLQLQESGPGLVKPSETLSLTCTVSGGSISSGSYFWGWIRQPPGKGLEWIGSIYYSGISYYNPSLKSRVTISVDTSKNQFSLKLSSVTAADTAVYYCARHDGAVAGLFDYWGQGTLVTVSSATRDKQLDADVSPKPTIFLPSIAETKLQKAGTYLCLLEKFFPDVIKIHWQEKKSNTILGSQEGNTMKTNDTYMKFSWLTVPEKSLDKEHRCIVRHENNKNGVDQEIIFPPIKTDVITMDPKDNCSKDANDTLLLQLTNTSAYYMYLLLLLKSVVYFAIITCCLLRRTAFCCNGEKS

SEQ ID NO: 18394 - protein, 908 aa, Artificial Sequence
  Synthetic Polypeptide
MALPVTALLLPLALLLHAARPLEGKPIPNPLLGLDSTGSGDKQLDADVSPKPTIFLPSIAETKLQKAGTYLCLLEKFFPDVIKIHWQEKKSNTILGSQEGNTMKTNDTYMKFSWLTVPEKSLDKEHRCIVRHENNKNGVDQEIIFPPIKTDVITMDPKDNCSKDANDTLLLQLTNTSAYYMYLLLLLKSVVYFAIITCCLLRRTAFCCNGEKSRAKRSGSGATNFSLLKQAGDVEENPGPTSMALPVTALLLPLALLLHAARPSYVLTQPPSVSVAPGQTARITCGGNNIGSKSVHWYQQPPGQAPVVVVYDDSDRPSGIPERFSGSNSGNTATLTISRVEAGDEAVYYCQVWDSSSDHVVFGGGTKLTVLGGGGSGGGGSGGGGSQLQLQESGPGLVKPSETLSLTCTVSGGSISSGSYFWGWIRQPPGKGLEWIGSIYYSGISYYNPSLKSRVTISVDTSKNQFSLKLSSVTAADTAVYYCARHDGAVAGLFDYWGQGTLVTVSSATREQKLISEEDGSGSQPHTKPSVFVMKNGTNVACLVKEFYPKDIRINLVSSKKITEFDPAIVISPSGKYNAVKLGKYEDSNSVTCSVQHDNKTVHSTDFEVKTDSTDHVKPKETENTKQPSKSCHKPKAIVHTEKVNMMSLTVLGLRMLFAKTVAVNFLLTAKLFFLRAKRSGSGVKQTLNFDLLKLAGDVESNPGPSRGHMTEYKPTVRLATRDDVPRAVRTLAAAFADYPATRHTVDPDRHIERVTELQELFLTRVGLDIGKVWVADDGAAVAVWTTPESVEAGAVFAEIGPRMAELSGSRLAAQQQMEGLLAPHRPKEPAWFLATVGVSPDHQGKGLGSAVVLPGVEAAERAGVPAFLETSAPRNLPFYERLGFTVTADVEVPEGPRTWCMTRKPGA

SEQ ID NO: 18395 - protein, 1033 aa, Artificial Sequence
  Synthetic Polypeptide
MALPVTALLLPLALLLHAARPSYVLTQPPSVSVAPGQTARITCGGNNIGSKSVHWYQQPPGQAPVVVVYDDSDRPSGIPERFSGSNSGNTATLTISRVEAGDEAVYYCQVWDSSSDHVVFGGGTKLTVLGQPKANPTVTLFPPSSEELQANKATLVCLISDFYPGAVTVAWKADGSPVKAGVETTKPSKQSNNKYAASSYLSLTPEQWKSHRSYSCQVTHEGSTVEKTVAPTECSGSQSFGLLDPKLCYLLDGILFIYGVILTALFLRVKFSRSADAPAYQQGQNQLYNELNLGRREEYDVLDKRRGRDPEMGGKPQRRKNPQEGLYNELQKDKMAEAYSEIGMKGERRRGKGHDGLYQGLSTATKDTYDALHMQALPPRRAKRSGSGATNFSLLKQAGDVEENPGPTSMDWIWRILFLVGAATGAHSFEQLQLQESGPGLVKPSETLSLTCTVSGGSISSGSYFWGWIRQPPGKGLEWIGSIYYSGISYYNPSLKSRVTISVDTSKNQFSLKLSSVTAADTAVYYCARHDGAVAGLFDYWGQGTLVTVSSAASTKGPSVFPLAPSSKSTSGGTAALGCLVKDYFPEPVTVSWNSGALTSGVHTFPAVLQSSGLYSLSSVVTVPSSSLGTQTYICNVNHKPSNTKVDKRVEPKSCGTQSFGLLDPKLCYLLDGILFIYGVILTALFLRVKFSRSADAPAYQQGQNQLYNELNLGRREEYDVLDKRRGRDPEMGGKPQRRKNPQEGLYNELQKDKMAEAYSEIGMKGERRRGKGHDGLYQGLSTATKDTYDALHMQALPPRRAKRSGSGVKQTLNFDLLKLAGDVESNPGPSRGHMTEYKPTVRLATRDDVPRAVRTLAAAFADYPATRHTVDPDRHIERVTELQELFLTRVGLDIGKVWVADDGAAVAVWTTPESVEAGAVFAEIGPRMAELSGSRLAAQQQMEGLLAPHRPKEPAWFLATVGVSPDHQGKGLGSAVVLPGVEAAERAGVPAFLETSAPRNLPFYERLGFTVTADVEVPEGPRTWCMTRKPGA

SEQ ID NO: 18396 - protein, 819 aa, Artificial Sequence
  Synthetic Polypeptide
MALPVTALLLPLALLLHAARPSYVLTQPPSVSVAPGQTARITCGGNNIGSKSVHWYQQPPGQAPVVVVYDDSDRPSGIPERFSGSNSGNTATLTISRVEAGDEAVYYCQVWDSSSDHVVFGGGTKLTVLLEDLKNVFPPEVAVFEPSEAEISHTQKATLVCLATGFYPDHVELSWWVNGKEVHSGVSTDPQPLKEQPALNDSRYCLSSRLRVSATFWQNPRNHFRCQVQFYGLSENDEWTQDRAKPVTQIVSAEAWGRADCGSQSFGLLDPKLCYLLDGILFIYGVILTALFLRVKFSRSADAPAYQQGQNQLYNELNLGRREEYDVLDKRRGRDPEMGGKPQRRKNPQEGLYNELQKDKMAEAYSEIGMKGERRRGKGHDGLYQGLSTATKDTYDALHMQALPPRRAKRSGSGATNFSLLKQAGDVEENPGPTSMDWIWRILFLVGAATGAHSFEQLQLQESGPGLVKPSETLSLTCTVSGGSISSGSYFWGWIRQPPGKGLEWIGSIYYSGISYYNPSLKSRVTISVDTSKNQFSLKLSSVTAADTAVYYCARHDGAVAGLFDYWGQGTLVTVSSATRIQNPDPAVYQLRDSKSSDKSVCLFTDFDSQTNVSQSKDSDVYITDKTVLDMRSMDFKSNSAVAWSNKSDFACANAFNNSIIPEDTFFPSPESSCGTQSFGLLDPKLCYLLDGILFIYGVILTALFLRVKFSRSADAPAYQQGQNQLYNELNLGRREEYDVLDKRRGRDPEMGGKPQRRKNPQEGLYNELQKDKMAEAYSEIGMKGERRRGKGHDGLYQGLSTATKDTYDALHMQALPPR

SEQ ID NO: 18397 - protein, 819 aa, Artificial Sequence
  Synthetic Polypeptide
MALPVTALLLPLALLLHAARPSYVLTQPPSVSVAPGQTARITCGGNNIGSKSVHWYQQPPGQAPVVVVYDDSDRPSGIPERFSGSNSGNTATLTISRVEAGDEAVYYCQVWDSSSDHVVFGGGTKLTVLLEDLKNVFPPEVAVFEPSKAEIAHTQKATLVCLATGFYPDHVELSWWVNGKEVHSGVCTDPQPLKEQPALNDSRYCLSSRLRVSATFWQNPRNHFRCQVQFYGLSENDEWTQDRAKPVTQIVSAEAWGRADCGSQSFGLLDPKLCYLLDGILFIYGVILTALFLRVKFSRSADAPAYQQGQNQLYNELNLGRREEYDVLDKRRGRDPEMGGKPQRRKNPQEGLYNELQKDKMAEAYSEIGMKGERRRGKGHDGLYQGLSTATKDTYDALHMQALPPRRAKRSGSGATNFSLLKQAGDVEENPGPTSMDWIWRILFLVGAATGAHSFEQLQLQESGPGLVKPSETLSLTCTVSGGSISSGSYFWGWIRQPPGKGLEWIGSIYYSGISYYNPSLKSRVTISVDTSKNQFSLKLSSVTAADTAVYYCARHDGAVAGLFDYWGQGTLVTVSSATRIQNPDPAVYQLRDSKSSDKSVCLFTDFDSQTNVSQSKDSDVYITDKCVLDMRSMDFKSNSAVAWSNKSDFACANAFNNSIIPEDTFFPSSDVPCGTQSFGLLDPKLCYLLDGILFIYGVILTALFLRVKFSRSADAPAYQQGQNQLYNELNLGRREEYDVLDKRRGRDPEMGGKPQRRKNPQEGLYNELQKDKMAEAYSEIGMKGERRRGKGHDGLYQGLSTATKDTYDALHMQALPPR

SEQ ID NO: 18398 - protein, 890 aa, Artificial Sequence
  Synthetic Polypeptide
MALPVTALLLPLALLLHAARPSYVLTQPPSVSVAPGQTARITCGGNNIGSKSVHWYQQPPGQAPVVVVYDDSDRPSGIPERFSGSNSGNTATLTISRVEAGDEAVYYCQVWDSSSDHVVFGGGTKLTVLLEGKPIPNPLLGLDSTGSGEDLKNVFPPEVAVFEPSEAEISHTQKATLVCLATGFYPDHVELSWWVNGKEVHSGVSTDPQPLKEQPALNDSRYCLSSRLRVSATFWQNPRNHFRCQVQFYGLSENDEWTQDRAKPVTQIVSAEAWGRADCGSQSFGLLDPKLCYLLDGILFIYGVILTALFLRVKFSRSADAPAYQQGQNQLYNELNLGRREEYDVLDKRRGRDPEMGGKPQRRKNPQEGLYNELQKDKMAEAYSEIGMKGERRRGKGHDGLYQGLSTATKDTYDALHMQALPPRRAKRSGSGATNFSLLKQAGDVEENPGPTSMDWIWRILFLVGAATGAHSFEQLQLQESGPGLVKPSETLSLTCTVSGGSISSGSYFWGWIRQPPGKGLEWIGSIYYSGISYYNPSLKSRVTISVDTSKNQFSLKLSSVTAADTAVYYCARHDGAVAGLFDYWGQGTLVTVSSATREQKLISEEDGSGIQNPDPAVYQLRDSKSSDKSVCLFTDFDSQTNVSQSKDSDVYITDKTVLDMRSMDFKSNSAVAWSNKSDFACANAFNNSIIPEDTFFPSPESSCGTQSFGLLDPKLCYLLDGILFIYGVILTALFLRSKRSRLLHSDYMNMTPRRPGPTRKHYQPYAPPRDFAAYRSRVKFSRSADAPAYQQGQNQLYNELNLGRREEYDVLDKRRGRDPEMGGKPQRRKNPQEGLYNELQKDKMAEAYSEIGMKGERRRGKGHDGLYQGLSTATKDTYDALHMQALPPR

SEQ ID NO: 18399 - protein, 931 aa, Artificial Sequence
  Synthetic Polypeptide
MALPVTALLLPLALLLHAARPSYVLTQPPSVSVAPGQTARITCGGNNIGSKSVHWYQQPPGQAPVVVVYDDSDRPSGIPERFSGSNSGNTATLTISRVEAGDEAVYYCQVWDSSSDHVVFGGGTKLTVLLEGKPIPNPLLGLDSTGSGEDLKNVFPPEVAVFEPSEAEISHTQKATLVCLATGFYPDHVELSWWVNGKEVHSGVSTDPQPLKEQPALNDSRYCLSSRLRVSATFWQNPRNHFRCQVQFYGLSENDEWTQDRAKPVTQIVSAEAWGRADCGSQSFGLLDPKLCYLLDGILFIYGVILTALFLRSKRSRLLHSDYMNMTPRRPGPTRKHYQPYAPPRDFAAYRSRVKFSRSADAPAYQQGQNQLYNELNLGRREEYDVLDKRRGRDPEMGGKPQRRKNPQEGLYNELQKDKMAEAYSEIGMKGERRRGKGHDGLYQGLSTATKDTYDALHMQALPPRRAKRSGSGATNFSLLKQAGDVEENPGPTSMDWIWRILFLVGAATGAHSFEQLQLQESGPGLVKPSETLSLTCTVSGGSISSGSYFWGWIRQPPGKGLEWIGSIYYSGISYYNPSLKSRVTISVDTSKNQFSLKLSSVTAADTAVYYCARHDGAVAGLFDYWGQGTLVTVSSATREQKLISEEDGSGIQNPDPAVYQLRDSKSSDKSVCLFTDFDSQTNVSQSKDSDVYITDKTVLDMRSMDFKSNSAVAWSNKSDFACANAFNNSIIPEDTFFPSPESSCGTQSFGLLDPKLCYLLDGILFIYGVILTALFLRSKRSRLLHSDYMNMTPRRPGPTRKHYQPYAPPRDFAAYRSRVKFSRSADAPAYQQGQNQLYNELNLGRREEYDVLDKRRGRDPEMGGKPQRRKNPQEGLYNELQKDKMAEAYSEIGMKGERRRGKGHDGLYQGLSTATKDTYDALHMQALPPR

SEQ ID NO: 18400 - protein, 892 aa, Artificial Sequence
  Synthetic Polypeptide
MALPVTALLLPLALLLHAARPSYVLTQPPSVSVAPGQTARITCGGNNIGSKSVHWYQQPPGQAPVVVVYDDSDRPSGIPERFSGSNSGNTATLTISRVEAGDEAVYYCQVWDSSSDHVVFGGGTKLTVLLEGKPIPNPLLGLDSTGSGEDLKNVFPPEVAVFEPSEAEISHTQKATLVCLATGFYPDHVELSWWVNGKEVHSGVSTDPQPLKEQPALNDSRYCLSSRLRVSATFWQNPRNHFRCQVQFYGLSENDEWTQDRAKPVTQIVSAEAWGRADCGSQSFGLLDPKLCYLLDGILFIYGVILTALFLRVKFSRSADAPAYQQGQNQLYNELNLGRREEYDVLDKRRGRDPEMGGKPQRRKNPQEGLYNELQKDKMAEAYSEIGMKGERRRGKGHDGLYQGLSTATKDTYDALHMQALPPRRAKRSGSGATNFSLLKQAGDVEENPGPTSMDWIWRILFLVGAATGAHSFEQLQLQESGPGLVKPSETLSLTCTVSGGSISSGSYFWGWIRQPPGKGLEWIGSIYYSGISYYNPSLKSRVTISVDTSKNQFSLKLSSVTAADTAVYYCARHDGAVAGLFDYWGQGTLVTVSSATREQKLISEEDLGSGIQNPDPAVYQLRDSKSSDKSVCLFTDFDSQTNVSQSKDSDVYITDKTVLDMRSMDFKSNSAVAWSNKSDFACANAFNNSIIPEDTFFPSPESSCGTQSFGLLDPKLCYLLDGILFIYGVILTALFLKRGRKKLLYIFKQPFMRPVQTTQEEDGCSCRFPEEEEGGCELRVKFSRSADAPAYQQGQNQLYNELNLGRREEYDVLDKRRGRDPEMGGKPQRRKNPQEGLYNELQKDKMAEAYSEIGMKGERRRGKGHDGLYQGLSTATKDTYDALHMQALPPR

SEQ ID NO: 18401 - protein, 934 aa, Artificial Sequence
  Synthetic Polypeptide
MALPVTALLLPLALLLHAARPSYVLTQPPSVSVAPGQTARITCGGNNIGSKSVHWYQQPPGQAPVVVVYDDSDRPSGIPERFSGSNSGNTATLTISRVEAGDEAVYYCQVWDSSSDHVVFGGGTKLTVLLEGKPIPNPLLGLDSTGSGEDLKNVFPPEVAVFEPSEAEISHTQKATLVCLATGFYPDHVELSWWVNGKEVHSGVSTDPQPLKEQPALNDSRYCLSSRLRVSATFWQNPRNHFRCQVQFYGLSENDEWTQDRAKPVTQIVSAEAWGRADCGSQSFGLLDPKLCYLLDGILFIYGVILTALFLKRGRKKLLYIFKQPFMRPVQTTQEEDGCSCRFPEEEEGGCELRVKFSRSADAPAYQQGQNQLYNELNLGRREEYDVLDKRRGRDPEMGGKPQRRKNPQEGLYNELQKDKMAEAYSEIGMKGERRRGKGHDGLYQGLSTATKDTYDALHMQALPPRRAKRSGSGATNFSLLKQAGDVEENPGPTSMDWIWRILFLVGAATGAHSFEQLQLQESGPGLVKPSETLSLTCTVSGGSISSGSYFWGWIRQPPGKGLEWIGSIYYSGISYYNPSLKSRVTISVDTSKNQFSLKLSSVTAADTAVYYCARHDGAVAGLFDYWGQGTLVTVSSATREQKLISEEDLGSGIQNPDPAVYQLRDSKSSDKSVCLFTDFDSQTNVSQSKDSDVYITDKTVLDMRSMDFKSNSAVAWSNKSDFACANAFNNSIIPEDTFFPSPESSCGTQSFGLLDPKLCYLLDGILFIYGVILTALFLKRGRKKLLYIFKQPFMRPVQTTQEEDGCSCRFPEEEEGGCELRVKFSRSADAPAYQQGQNQLYNELNLGRREEYDVLDKRRGRDPEMGGKPQRRKNPQEGLYNELQKDKMAEAYSEIGMKGERRRGKGHDGLYQGLSTATKDTYDALHMQALPPR

SEQ ID NO: 18402 - protein, 824 aa, Artificial Sequence
  Synthetic Polypeptide
MALPVTALLLPLALLLHAARPSYVLTQPPSVSVAPGQTARITCGGNNIGSKSVHWYQQPPGQAPVVVVYDDSDRPSGIPERFSGSNSGNTATLTISRVEAGDEAVYYCQVWDSSSDHVVFGGGTKLTVLLEQSFGLLDPKLCYLLDGILFIYGVILTALFLRVKFSRSADAPAYQQGQNQLYNELNLGRREEYDVLDKRRGRDPEMGGKPQRRKNPQEGLYNELQKDKMAEAYSEIGMKGERRRGKGHDGLYQGLSTATKDTYDALHMQALPPRRAKRSGSGATNFSLLKQAGDVEENPGPTSMDWIWRILFLVGAATGAHSFEQLQLQESGPGLVKPSETLSLTCTVSGGSISSGSYFWGWIRQPPGKGLEWIGSIYYSGISYYNPSLKSRVTISVDTSKNQFSLKLSSVTAADTAVYYCARHDGAVAGLFDYWGQGTLVTVSSATRQSFGLLDPKLCYLLDGILFIYGVILTALFLRVKFSRSADAPAYQQGQNQLYNELNLGRREEYDVLDKRRGRDPEMGGKPQRRKNPQEGLYNELQKDKMAEAYSEIGMKGERRRGKGHDGLYQGLSTATKDTYDALHMQALPPRRAKRSGSGVKQTLNFDLLKLAGDVESNPGPSRGHMTEYKPTVRLATRDDVPRAVRTLAAAFADYPATRHTVDPDRHIERVTELQELFLTRVGLDIGKVWVADDGAAVAVWTTPESVEAGAVFAEIGPRMAELSGSRLAAQQQMEGLLAPHRPKEPAWFLATVGVSPDHQGKGLGSAVVLPGVEAAERAGVPAFLETSAPRNLPFYERLGFTVTADVEVPEGPRTWCMTRKPGA

SEQ ID NO: 18403 - protein, 649 aa, Artificial Sequence
  Synthetic Polypeptide
MALPVTALLLPLALLLHAARPSYVLTQPPSVSVAPGQTARITCGGNNIGSKSVHWYQQPPGQAPVVVVYDDSDRPSGIPERFSGSNSGNTATLTISRVEAGDEAVYYCQVWDSSSDHVVFGGGTKLTVLLEGQPKANPTVTLFPPSSEELQANKATLVCLISDFYPGAVTVAWKADGSPVKAGVETTKPSKQSNNKYAASSYLSLTPEQWKSHRSYSCQVTHEGSTVEKTVAPTECSPIKTDVITMDPKDNCSKDANDTLLLQLTNTSAYYMYLLLLLKSVVYFAIITCCLLRRTAFCCNGEKSRAKRSGSGATNFSLLKQAGDVEENPGPTSMDWIWRILFLVGAATGAHSFEQLQLQESGPGLVKPSETLSLTCTVSGGSISSGSYFWGWIRQPPGKGLEWIGSIYYSGISYYNPSLKSRVTISVDTSKNQFSLKLSSVTAADTAVYYCARHDGAVAGLFDYWGQGTLVTVSSATRASTKGPSVFPLAPSSKSTSGGTAALGCLVKDYFPEPVTVSWNSGALTSGVHTFPAVLQSSGLYSLSSVVTVPSSSLGTQTYICNVNHKPSNTKVDKRVEPKSCEVKTDSTDHVKPKETENTKQPSKSCHKPKAIVHTEKVNMMSLTVLGLRMLFAKTVAVNFLLTAKLFFL

SEQ ID NO: 18404 - protein, 627 aa, Artificial Sequence
  Synthetic Polypeptide
MALPVTALLLPLALLLHAARPSYVLTQPPSVSVAPGQTARITCGGNNIGSKSVHWYQQPPGQAPVVVVYDDSDRPSGIPERFSGSNSGNTATLTISRVEAGDEAVYYCQVWDSSSDHVVFGGGTKLTVLLEGQPKANPTVTLFPPSSEELQANKATLVCLISDFYPGAVTVAWKADGSPVKAGVETTKPSKQSNNKYAASSYLSLTPEQWKSHRSYSCQVTHEGSTVEKTVAPTECSGRADCGITSASYHQGVLSATILYEILLGKATLYAVLVSALVLMAMVKRKDSRGRAKRSGSGATNFSLLKQAGDVEENPGPTSMDWIWRILFLVGAATGAHSFEQLQLQESGPGLVKPSETLSLTCTVSGGSISSGSYFWGWIRQPPGKGLEWIGSIYYSGISYYNPSLKSRVTISVDTSKNQFSLKLSSVTAADTAVYYCARHDGAVAGLFDYWGQGTLVTVSSATRASTKGPSVFPLAPSSKSTSGGTAALGCLVKDYFPEPVTVSWNSGALTSGVHTFPAVLQSSGLYSLSSVVTVPSSSLGTQTYICNVNHKPSNTKVDKRVEPKSCIPEDTFFPSSDVPCDVKLVEKSFETDTNLNFQNLSVIGFRILLLKVAGFNLLMTLRLWSS

SEQ ID NO: 18405 - protein, 627 aa, Artificial Sequence
  Synthetic Polypeptide
MALPVTALLLPLALLLHAARPSYVLTQPPSVSVAPGQTARITCGGNNIGSKSVHWYQQPPGQAPVVVVYDDSDRPSGIPERFSGSNSGNTATLTISRVEAGDEAVYYCQVWDSSSDHVVFGGGTKLTVLLEGQPKANPTVTLFPPSSEELQANKATLVCLISDFYPGAVTVAWKADGSPVKAGVETTKPSKQSNNKYAASSYLSLTPEQWKSHRSYSCQVTHEGSTVEKTVAPTECSGRADCGFTSESYQQGVLSATILYEILLGKATLYAVLVSALVLMAMVKRKDSRGRAKRSGSGATNFSLLKQAGDVEENPGPTSMDWIWRILFLVGAATGAHSFEQLQLQESGPGLVKPSETLSLTCTVSGGSISSGSYFWGWIRQPPGKGLEWIGSIYYSGISYYNPSLKSRVTISVDTSKNQFSLKLSSVTAADTAVYYCARHDGAVAGLFDYWGQGTLVTVSSATRASTKGPSVFPLAPSSKSTSGGTAALGCLVKDYFPEPVTVSWNSGALTSGVHTFPAVLQSSGLYSLSSVVTVPSSSLGTQTYICNVNHKPSNTKVDKRVEPKSCIPEDTFFPSPESSCDVKLVEKSFETDTNLNFQNLSVIGFRILLLKVAGFNLLMTLRLWSS

SEQ ID NO: 18406 - protein, 453 aa, Artificial Sequence
  Synthetic Polypeptide
MALPVTALLLPLALLLHAARPSYVLTQPPSVSVAPGQTARITCGGNNIGSKSVHWYQQPPGQAPVVVVYDDSDRPSGIPERFSGSNSGNTATLTISRVEAGDEAVYYCQVWDSSSDHVVFGGGTKLTVLGGGGSGGGGSGGGGSQLQLQESGPGLVKPSETLSLTCTVSGGSISSGSYFWGWIRQPPGKGLEWIGSIYYSGISYYNPSLKSRVTISVDTSKNQFSLKLSSVTAADTAVYYCARHDGAVAGLFDYWGQGTLVTVSSATRDGNEEMGGITQTPYKVSISGTTVILTCPQYPGSEILWQHNDKNIGGDEDDKNIGSDEDHLSLKEFSELEQSGYYVCYPRGSKPEDANFYLYLRARVCENCMEMDVMSVATIVIVDICITGGLLLLVYYWSKNRKAKAKPVTRGAGAGGRQRGQNKERPPPVPNPDYEPIRKGQRDLYSGLNQRRI

SEQ ID NO: 18407 - protein, 418 aa, Artificial Sequence
  Synthetic Polypeptide
MALPVTALLLPLALLLHAARPSYVLTQPPSVSVAPGQTARITCGGNNIGSKSVHWYQQPPGQAPVVVVYDDSDRPSGIPERFSGSNSGNTATLTISRVEAGDEAVYYCQVWDSSSDHVVFGGGTKLTVLGGGGSGGGGSGGGGSQLQLQESGPGLVKPSETLSLTCTVSGGSISSGSYFWGWIRQPPGKGLEWIGSIYYSGISYYNPSLKSRVTISVDTSKNQFSLKLSSVTAADTAVYYCARHDGAVAGLFDYWGQGTLVTVSSATRFKIPIEELEDRVFVNCNTSITWVEGTVGTLLSDITRLDLGKRILDPRGIYRCNGTDIYKDKESTVQVHYRMCQSCVELDPATVAGIIVTDVIATLLLALGVFCFAGHETGRLSGAADTQALLRNDQVYQPLRDRDDAQYSHLGGNWARNK

SEQ ID NO: 18408 - protein, 428 aa, Artificial Sequence
  Synthetic Polypeptide
MALPVTALLLPLALLLHAARPSYVLTQPPSVSVAPGQTARITCGGNNIGSKSVHWYQQPPGQAPVVVVYDDSDRPSGIPERFSGSNSGNTATLTISRVEAGDEAVYYCQVWDSSSDHVVFGGGTKLTVLGGGGSGGGGSGGGGSQLQLQESGPGLVKPSETLSLTCTVSGGSISSGSYFWGWIRQPPGKGLEWIGSIYYSGISYYNPSLKSRVTISVDTSKNQFSLKLSSVTAADTAVYYCARHDGAVAGLFDYWGQGTLVTVSSATRQSIKGNHLVKVYDYQEDGSVLLTCDAEAKNITWFKDGKMIGFLTEDKKKWNLGSNAKDPRGMYQCKGSQNKSKPLQVYYRMCQNCIELNAATISGFLFAEIVSIFVLAVGVYFIAGQDGVRQSRASDKQTLLPNDQLYQPLKDREDDQYSHLQGNQLRRN

SEQ ID NO: 18409 - protein, 411 aa, Artificial Sequence
  Synthetic Polypeptide
MALPVTALLLPLALLLHAARPSYVLTQPPSVSVAPGQTARITCGGNNIGSKSVHWYQQPPGQAPVVVVYDDSDRPSGIPERFSGSNSGNTATLTISRVEAGDEAVYYCQVWDSSSDHVVFGGGTKLTVLGGGGSGGGGSGGGGSQLQLQESGPGLVKPSETLSLTCTVSGGSISSGSYFWGWIRQPPGKGLEWIGSIYYSGISYYNPSLKSRVTISVDTSKNQFSLKLSSVTAADTAVYYCARHDGAVAGLFDYWGQGTLVTVSSATRQSFGLLDPKLCYLLDGILFIYGVILTALFLRVKFSRSADAPAYQQGQNQLYNELNLGRREEYDVLDKRRGRDPEMGGKPQRRKNPQEGLYNELQKDKMAEAYSEIGMKGERRRGKGHDGLYQGLSTATKDTYDALHMQALPPR

SEQ ID NO: 18410 - protein, 453 aa, Artificial Sequence
  Synthetic Polypeptide
MALPVTALLLPLALLLHAARPQLQLQESGPGLVKPSETLSLTCTVSGGSISSGSYFWGWIRQPPGKGLEWIGSIYYSGISYYNPSLKSRVTISVDTSKNQFSLKLSSVTAADTAVYYCARHDGAVAGLFDYWGQGTLVTVSSAGGGGSGGGGSGGGGSSYVLTQPPSVSVAPGQTARITCGGNNIGSKSVHWYQQPPGQAPVVVVYDDSDRPSGIPERFSGSNSGNTATLTISRVEAGDEAVYYCQVWDSSSDHVVFGGGTKLTVLTRDGNEEMGGITQTPYKVSISGTTVILTCPQYPGSEILWQHNDKNIGGDEDDKNIGSDEDHLSLKEFSELEQSGYYVCYPRGSKPEDANFYLYLRARVCENCMEMDVMSVATIVIVDICITGGLLLLVYYWSKNRKAKAKPVTRGAGAGGRQRGQNKERPPPVPNPDYEPIRKGQRDLYSGLNQRRI

SEQ ID NO: 18411 - protein, 418 aa, Artificial Sequence
  Synthetic Polypeptide
MALPVTALLLPLALLLHAARPQLQLQESGPGLVKPSETLSLTCTVSGGSISSGSYFWGWIRQPPGKGLEWIGSIYYSGISYYNPSLKSRVTISVDTSKNQFSLKLSSVTAADTAVYYCARHDGAVAGLFDYWGQGTLVTVSSAGGGGSGGGGSGGGGSSYVLTQPPSVSVAPGQTARITCGGNNIGSKSVHWYQQPPGQAPVVVVYDDSDRPSGIPERFSGSNSGNTATLTISRVEAGDEAVYYCQVWDSSSDHVVFGGGTKLTVLTRFKIPIEELEDRVFVNCNTSITWVEGTVGTLLSDITRLDLGKRILDPRGIYRCNGTDIYKDKESTVQVHYRMCQSCVELDPATVAGIIVTDVIATLLLALGVFCFAGHETGRLSGAADTQALLRNDQVYQPLRDRDDAQYSHLGGNWARNK

SEQ ID NO: 18412 - protein, 428 aa, Artificial Sequence
  Synthetic Polypeptide
MALPVTALLLPLALLLHAARPQLQLQESGPGLVKPSETLSLTCTVSGGSISSGSYFWGWIRQPPGKGLEWIGSIYYSGISYYNPSLKSRVTISVDTSKNQFSLKLSSVTAADTAVYYCARHDGAVAGLFDYWGQGTLVTVSSAGGGGSGGGGSGGGGSSYVLTQPPSVSVAPGQTARITCGGNNIGSKSVHWYQQPPGQAPVVVVYDDSDRPSGIPERFSGSNSGNTATLTISRVEAGDEAVYYCQVWDSSSDHVVFGGGTKLTVLTRQSIKGNHLVKVYDYQEDGSVLLTCDAEAKNITWFKDGKMIGFLTEDKKKWNLGSNAKDPRGMYQCKGSQNKSKPLQVYYRMCQNCIELNAATISGFLFAEIVSIFVLAVGVYFIAGQDGVRQSRASDKQTLLPNDQLYQPLKDREDDQYSHLQGNQLRRN

SEQ ID NO: 18413 - protein, 411 aa, Artificial Sequence
  Synthetic Polypeptide
MALPVTALLLPLALLLHAARPQLQLQESGPGLVKPSETLSLTCTVSGGSISSGSYFWGWIRQPPGKGLEWIGSIYYSGISYYNPSLKSRVTISVDTSKNQFSLKLSSVTAADTAVYYCARHDGAVAGLFDYWGQGTLVTVSSAGGGGSGGGGSGGGGSSYVLTQPPSVSVAPGQTARITCGGNNIGSKSVHWYQQPPGQAPVVVVYDDSDRPSGIPERFSGSNSGNTATLTISRVEAGDEAVYYCQVWDSSSDHVVFGGGTKLTVLTRQSFGLLDPKLCYLLDGILFIYGVILTALFLRVKFSRSADAPAYQQGQNQLYNELNLGRREEYDVLDKRRGRDPEMGGKPQRRKNPQEGLYNELQKDKMAEAYSEIGMKGERRRGKGHDGLYQGLSTATKDTYDALHMQALPPR

SEQ ID NO: 18414 - protein, 644 aa, Artificial Sequence
  Synthetic Polypeptide
MALPVTALLLPLALLLHAARPSYVLTQPPSVSVAPGQTARITCGGNNIGSKSVHWYQQPPGQAPVVVVYDDSDRPSGIPERFSGSNSGNTATLTISRVEAGDEAVYYCQVWDSSSDHVVFGGGTKLTVLGGGGSGGGGSGGGGSQLQLQESGPGLVKPSETLSLTCTVSGGSISSGSYFWGWIRQPPGKGLEWIGSIYYSGISYYNPSLKSRVTISVDTSKNQFSLKLSSVTAADTAVYYCARHDGAVAGLFDYWGQGTLVTVSSATRGSGIQNPDPAVYQLRDSKSSDKSVCLFTDFDSQTNVSQSKDSDVYITDKTVLDMRSMDFKSNSAVAWSNKSDFACANAFNNSIIPEDTFFPSPESSCDVKLVEKSFETDTNLNFQNLSVIGFRILLLKVAGFNLLMTLRLWSSRAKRSGSGVKQTLNFDLLKLAGDVESNPGPSRGHMTEYKPTVRLATRDDVPRAVRTLAAAFADYPATRHTVDPDRHIERVTELQELFLTRVGLDIGKVWVADDGAAVAVWTTPESVEAGAVFAEIGPRMAELSGSRLAAQQQMEGLLAPHRPKEPAWFLATVGVSPDHQGKGLGSAVVLPGVEAAERAGVPAFLETSAPRNLPFYERLGFTVTADVEVPEGPRTWCMTRKPGA

SEQ ID NO: 18415 - protein, 676 aa, Artificial Sequence
  Synthetic Polypeptide
MALPVTALLLPLALLLHAARPSYVLTQPPSVSVAPGQTARITCGGNNIGSKSVHWYQQPPGQAPVVVVYDDSDRPSGIPERFSGSNSGNTATLTISRVEAGDEAVYYCQVWDSSSDHVVFGGGTKLTVLGGGGSGGGGSGGGGSQLQLQESGPGLVKPSETLSLTCTVSGGSISSGSYFWGWIRQPPGKGLEWIGSIYYSGISYYNPSLKSRVTISVDTSKNQFSLKLSSVTAADTAVYYCARHDGAVAGLFDYWGQGTLVTVSSALEDLKNVFPPEVAVFEPSEAEISHTQKATLVCLATGFYPDHVELSWWVNGKEVHSGVSTDPQPLKEQPALNDSRYCLSSRLRVSATFWQNPRNHFRCQVQFYGLSENDEWTQDRAKPVTQIVSAEAWGRADCGFTSESYQQGVLSATILYEILLGKATLYAVLVSALVLMAMVKRKDSRGRAKRSGSGATNFSLLKQAGDVEENPGPTRGHMTEYKPTVRLATRDDVPRAVRTLAAAFADYPATRHTVDPDRHIERVTELQELFLTRVGLDIGKVWVADDGAAVAVWTTPESVEAGAVFAEIGPRMAELSGSRLAAQQQMEGLLAPHRPKEPAWFLATVGVSPDHQGKGLGSAVVLPGVEAAERAGVPAFLETSAPRNLPFYERLGFTVTADVEVPEGPRTWCMTRKPGA

SEQ ID NO: 18416 - protein, 726 aa, Artificial Sequence
  Synthetic Polypeptide
MALPVTALLLPLALLLHAARPSYVLTQPPSVSVAPGQTARITCGGNNIGSKSVHWYQQPPGQAPVVVVYDDSDRPSGIPERFSGSNSGNTATLTISRVEAGDEAVYYCQVWDSSSDHVVFGGGTKLTVLGGGGSGGGGSGGGGSQLQLQESGPGLVKPSETLSLTCTVSGGSISSGSYFWGWIRQPPGKGLEWIGSIYYSGISYYNPSLKSRVTISVDTSKNQFSLKLSSVTAADTAVYYCARHDGAVAGLFDYWGQGTLVTVSSATREQKLISEEDLGSGTPFPSLAPPIMLLVDGKQQMVVVCLVLDVAPPGLDSPIWFSAGNGSALDAFTYGPSPATDGTWTNLAHLSLPSEELASWEPLVCHTGPGAEGHSRSTQPMHLSGEASTARTCPQEPLRGTPGGALWLGVLRLLLFKLLLFDLLLTCSCLCDPAGPLPSPATTTRLRALGSHRLHPATETGGREATSSPRPQPRDRRWGDTPPGRKPGSPVRAKRSGSGVKQTLNFDLLKLAGDVESNPGPSRSRGHMTEYKPTVRLATRDDVPRAVRTLAAAFADYPATRHTVDPDRHIERVTELQELFLTRVGLDIGKVWVADDGAAVAVWTTPESVEAGAVFAEIGPRMAELSGSRLAAQQQMEGLLAPHRPKEPAWFLATVGVSPDHQGKGLGSAVVLPGVEAAERAGVPAFLETSAPRNLPFYERLGFTVTADVEVPEGPRTWCMTRKPGA

SEQ ID NO: 18417 - protein, 539 aa, Artificial Sequence; identical to SEQ ID NO: 18141
  Synthetic Polypeptide

SEQ ID NO: 18418 - protein, 309 aa, Artificial Sequence; identical to SEQ ID NO: 18142
  Synthetic Polypeptide

SEQ ID NO: 18419 - protein, 451 aa, Artificial Sequence
  Synthetic Polypeptide
MDWIWRILFLVGAATGAHSFEQLQLQESGPGLVKPSETLSLTCTVSGGSISSGSYFWGWIRQPPGKGLEWIGSIYYSGISYYNPSLKSRVTISVDTSKNQFSLKLSSVTAADTAVYYCARHDGAVAGLFDYWGQGTLVTVSSATRIQNPDPAVYQLRDSKSSDKSVCLFTDFDSQTNVSQSKDSDVYITDKTVLDMRSMDFKSNSAVAWSNKSDFACANAFNNSIIPEDTFFPSPESSCDVKLVEKSFETDTNLNFQNLSVIGFRILLLKVAGFNLLMTLRLWSSRAKRSGSGVKQTLNFDLLKLAGDVESNPGPSRGHMAKPLSQEESTLIERATATINSIPISEDYSVASAALSSDGRIFTGVNVYHFTGGPCAELVVLGTAAAAAAGNLTCIVAIGNENRGILSPCGRCRQVLLDLHPGIKAIVKDSDGQPTAVGIRELLPSGYVWEG

SEQ ID NO: 18420 - protein, 285 aa, Artificial Sequence
  Synthetic Polypeptide
MDWIWRILFLVGAATGAHSFEQLQLQESGPGLVKPSETLSLTCTVSGGSISSGSYFWGWIRQPPGKGLEWIGSIYYSGISYYNPSLKSRVTISVDTSKNQFSLKLSSVTAADTAVYYCARHDGAVAGLFDYWGQGTLVTVSSATRIQNPDPAVYQLRDSKSSDKSVCLFTDFDSQTNVSQSKDSDVYITDKTVLDMRSMDFKSNSAVAWSNKSDFACANAFNNSIIPEDTFFPSPESSCDVKLVEKSFETDTNLNFQNLSVIGFRILLLKVAGFNLLMTLRLWSS

SEQ ID NO: 18421 - protein, 557 aa, Artificial Sequence; identical to SEQ ID NO: 18145
  Synthetic Polypeptide

SEQ ID NO: 18422 - protein, 327 aa, Artificial Sequence; identical to SEQ ID NO: 18146
  Synthetic Polypeptide

SEQ ID NO: 18423 - protein, 463 aa, Artificial Sequence
  Synthetic Polypeptide
MDWIWRILFLVGAATGAHSFEQLQLQESGPGLVKPSETLSLTCTVSGGSISSGSYFWGWIRQPPGKGLEWIGSIYYSGISYYNPSLKSRVTISVDTSKNQFSLKLSSVTAADTAVYYCARHDGAVAGLFDYWGQGTLVTVSSATREQKLISEEDGSGIQNPDPAVYQLRDSKSSDKSVCLFTDFDSQTNVSQSKDSDVYITDKCVLDMRSMDFKSNSAVAWSNKSDFACANAFNNSIIPEDTFFPSPESSCDVKLVEKSFETDTNLNFQNLSVIGFRILLLKVAGFNLLMTLRLWSSRAKRSGSGVKQTLNFDLLKLAGDVESNPGPSRGHMAKPLSQEESTLIERATATINSIPISEDYSVASAALSSDGRIFTGVNVYHFTGGPCAELVVLGTAAAAAAGNLTCIVAIGNENRGILSPCGRCRQVLLDLHPGIKAIVKDSDGQPTAVGIRELLPSGYVWEG

SEQ ID NO: 18424 - protein, 297 aa, Artificial Sequence
  Synthetic Polypeptide
MDWIWRILFLVGAATGAHSFEQLQLQESGPGLVKPSETLSLTCTVSGGSISSGSYFWGWIRQPPGKGLEWIGSIYYSGISYYNPSLKSRVTISVDTSKNQFSLKLSSVTAADTAVYYCARHDGAVAGLFDYWGQGTLVTVSSATREQKLISEEDGSGIQNPDPAVYQLRDSKSSDKSVCLFTDFDSQTNVSQSKDSDVYITDKCVLDMRSMDFKSNSAVAWSNKSDFACANAFNNSIIPEDTFFPSPESSCDVKLVEKSFETDTNLNFQNLSVIGFRILLLKVAGFNLLMTLRLWSS

SEQ ID NO: 18425 - protein, 644 aa, Artificial Sequence
  Synthetic Polypeptide
MALPVTALLLPLALLLHAARPSYVLTQPPSVSVAPGQTARITCGGNNIGSKSVHWYQQPPGQAPVVVVYDDSDRPSGIPERFSGSNSGNTATLTISRVEAGDEAVYYCQVWDSSSDHVVFGGGTKLTVLGGGGSGGGGSGGGGSQLQLQESGPGLVKPSETLSLTCTVSGGSISSGSYFWGWIRQPPGKGLEWIGSIYYSGISYYNPSLKSRVTISVDTSKNQFSLKLSSVTAADTAVYYCARHDGAVAGLFDYWGQGTLVTVSSATRGSGIQNPDPAVYQLRDSKSSDKSVCLFTDFDSQTNVSQSKDSDVYITDKTVLDMRSMDFKSNSAVAWSNKSDFACANAFNNSIIPEDTFFPSSDVPCDVKLVEKSFETDTNLNFQNLSVIGFRILLLKVAGFNLLMTLRLWSSRAKRSGSGVKQTLNFDLLKLAGDVESNPGPSRGHMTEYKPTVRLATRDDVPRAVRTLAAAFADYPATRHTVDPDRHIERVTELQELFLTRVGLDIGKVWVADDGAAVAVWTTPESVEAGAVFAEIGPRMAELSGSRLAAQQQMEGLLAPHRPKEPAWFLATVGVSPDHQGKGLGSAVVLPGVEAAERAGVPAFLETSAPRNLPFYERLGFTVTADVEVPEGPRTWCMTRKPGA

SEQ ID NO: 18426 - protein, 676 aa, Artificial Sequence
  Synthetic Polypeptide
MALPVTALLLPLALLLHAARPSYVLTQPPSVSVAPGQTARITCGGNNIGSKSVHWYQQPPGQAPVVVVYDDSDRPSGIPERFSGSNSGNTATLTISRVEAGDEAVYYCQVWDSSSDHVVFGGGTKLTVLGGGGSGGGGSGGGGSQLQLQESGPGLVKPSETLSLTCTVSGGSISSGSYFWGWIRQPPGKGLEWIGSIYYSGISYYNPSLKSRVTISVDTSKNQFSLKLSSVTAADTAVYYCARHDGAVAGLFDYWGQGTLVTVSSALEDLKNVFPPEVAVFEPSKAEIAHTQKATLVCLATGFYPDHVELSWWVNGKEVHSGVSTDPQPLKEQPALNDSRYCLSSRLRVSATFWQNPRNHFRCQVQFYGLSENDEWTQDRAKPVTQIVSAEAWGRADCGITSASYHQGVLSATILYEILLGKATLYAVLVSALVLMAMVKRKDSRGRAKRSGSGATNFSLLKQAGDVEENPGPTRGHMTEYKPTVRLATRDDVPRAVRTLAAAFADYPATRHTVDPDRHIERVTELQELFLTRVGLDIGKVWVADDGAAVAVWTTPESVEAGAVFAEIGPRMAELSGSRLAAQQQMEGLLAPHRPKEPAWFLATVGVSPDHQGKGLGSAVVLPGVEAAERAGVPAFLETSAPRNLPFYERLGFTVTADVEVPEGPRTWCMTRKPGA

SEQ ID NO: 18427 - protein, 699 aa, Artificial Sequence
  Synthetic Polypeptide
MALPVTALLLPLALLLHAARPSYVLTQPPSVSVAPGQTARITCGGNNIGSKSVHWYQQPPGQAPVVVVYDDSDRPSGIPERFSGSNSGNTATLTISRVEAGDEAVYYCQVWDSSSDHVVFGGGTKLTVLGGGGSGGGGSGGGGSQLQLQESGPGLVKPSETLSLTCTVSGGSISSGSYFWGWIRQPPGKGLEWIGSIYYSGISYYNPSLKSRVTISVDTSKNQFSLKLSSVTAADTAVYYCARHDGAVAGLFDYWGQGTLVTVSSATRGSGGGGSGGGGSGDGNEEMGGITQTPYKVSISGTTVILTCPQYPGSEILWQHNDKNIGGDEDDKNIGSDEDHLSLKEFSELEQSGYYVCYPRGSKPEDANFYLYLRARVCENCMEMDVMSVATIVIVDICITGGLLLLVYYWSKNRKAKAKPVTRGAGAGGRQRGQNKERPPPVPNPDYEPIRKGQRDLYSGLNQRRIRAKRSGSGVKQTLNFDLLKLAGDVESNPGPSRGHMTEYKPTVRLATRDDVPRAVRTLAAAFADYPATRHTVDPDRHIERVTELQELFLTRVGLDIGKVWVADDGAAVAVWTTPESVEAGAVFAEIGPRMAELSGSRLAAQQQMEGLLAPHRPKEPAWFLATVGVSPDHQGKGLGSAVVLPGVEAAERAGVPAFLETSAPRNLPFYERLGFTVTADVEVPEGPRTWCMTRKPGA

SEQ ID NO: 18428 - protein, 664 aa, Artificial Sequence
  Synthetic Polypeptide
MALPVTALLLPLALLLHAARPSYVLTQPPSVSVAPGQTARITCGGNNIGSKSVHWYQQPPGQAPVVVVYDDSDRPSGIPERFSGSNSGNTATLTISRVEAGDEAVYYCQVWDSSSDHVVFGGGTKLTVLGGGGSGGGGSGGGGSQLQLQESGPGLVKPSETLSLTCTVSGGSISSGSYFWGWIRQPPGKGLEWIGSIYYSGISYYNPSLKSRVTISVDTSKNQFSLKLSSVTAADTAVYYCARHDGAVAGLFDYWGQGTLVTVSSATRGSGGGGSGGGGSGFKIPIEELEDRVFVNCNTSITWVEGTVGTLLSDITRLDLGKRILDPRGIYRCNGTDIYKDKESTVQVHYRMCQSCVELDPATVAGIIVTDVIATLLLALGVFCFAGHETGRLSGAADTQALLRNDQVYQPLRDRDDAQYSHLGGNWARNKRAKRSGSGVKQTLNFDLLKLAGDVESNPGPSRGHMTEYKPTVRLATRDDVPRAVRTLAAAFADYPATRHTVDPDRHIERVTELQELFLTRVGLDIGKVWVADDGAAVAVWTTPESVEAGAVFAEIGPRMAELSGSRLAAQQQMEGLLAPHRPKEPAWFLATVGVSPDHQGKGLGSAVVLPGVEAAERAGVPAFLETSAPRNLPFYERLGFTVTADVEVPEGPRTWCMTRKPGA

SEQ ID NO: 18429 - protein, 674 aa, Artificial Sequence
  Synthetic Polypeptide
MALPVTALLLPLALLLHAARPSYVLTQPPSVSVAPGQTARITCGGNNIGSKSVHWYQQPPGQAPVVVVYDDSDRPSGIPERFSGSNSGNTATLTISRVEAGDEAVYYCQVWDSSSDHVVFGGGTKLTVLGGGGSGGGGSGGGGSQLQLQESGPGLVKPSETLSLTCTVSGGSISSGSYFWGWIRQPPGKGLEWIGSIYYSGISYYNPSLKSRVTISVDTSKNQFSLKLSSVTAADTAVYYCARHDGAVAGLFDYWGQGTLVTVSSATRGSGGGGSGGGGSGQSIKGNHLVKVYDYQEDGSVLLTCDAEAKNITWFKDGKMIGFLTEDKKKWNLGSNAKDPRGMYQCKGSQNKSKPLQVYYRMCQNCIELNAATISGFLFAEIVSIFVLAVGVYFIAGQDGVRQSRASDKQTLLPNDQLYQPLKDREDDQYSHLQGNQLRRNRAKRSGSGVKQTLNFDLLKLAGDVESNPGPSRGHMTEYKPTVRLATRDDVPRAVRTLAAAFADYPATRHTVDPDRHIERVTELQELFLTRVGLDIGKVWVADDGAAVAVWTTPESVEAGAVFAEIGPRMAELSGSRLAAQQQMEGLLAPHRPKEPAWFLATVGVSPDHQGKGLGSAVVLPGVEAAERAGVPAFLETSAPRNLPFYERLGFTVTADVEVPEGPRTWCMTRKPGA

SEQ ID NO: 18430 - protein, 657 aa, Artificial Sequence
  Synthetic Polypeptide
MALPVTALLLPLALLLHAARPSYVLTQPPSVSVAPGQTARITCGGNNIGSKSVHWYQQPPGQAPVVVVYDDSDRPSGIPERFSGSNSGNTATLTISRVEAGDEAVYYCQVWDSSSDHVVFGGGTKLTVLGGGGSGGGGSGGGGSQLQLQESGPGLVKPSETLSLTCTVSGGSISSGSYFWGWIRQPPGKGLEWIGSIYYSGISYYNPSLKSRVTISVDTSKNQFSLKLSSVTAADTAVYYCARHDGAVAGLFDYWGQGTLVTVSSATRGSGGGGSGGGGSGQSFGLLDPKLCYLLDGILFIYGVILTALFLRVKFSRSADAPAYQQGQNQLYNELNLGRREEYDVLDKRRGRDPEMGGKPQRRKNPQEGLYNELQKDKMAEAYSEIGMKGERRRGKGHDGLYQGLSTATKDTYDALHMQALPPRRAKRSGSGVKQTLNFDLLKLAGDVESNPGPSRGHMTEYKPTVRLATRDDVPRAVRTLAAAFADYPATRHTVDPDRHIERVTELQELFLTRVGLDIGKVWVADDGAAVAVWTTPESVEAGAVFAEIGPRMAELSGSRLAAQQQMEGLLAPHRPKEPAWFLATVGVSPDHQGKGLGSAVVLPGVEAAERAGVPAFLETSAPRNLPFYERLGFTVTADVEVPEGPRTWCMTRKPGA

SEQ ID NO: 18431 - protein, 758 aa, Artificial Sequence
  Synthetic Polypeptide
MALPVTALLLPLALLLHAARPEVQLVESGGGLVQPGGSLRLSCAASGFSFSDFWMSWVRQAPGKGLEWVATISQAGSEKDYVDSVKGRFTISRDNAKKSLYLQMNSLRAEDTAVYYCASGVYSFDYRGQGTLVTVSSGTGGGGSGGGGSGGGGSEFSYVLTQPPSVSVAPGQTARITCGGNNIGSKSVHWYQQPPGQAPVVVVYDDSDRPSGIPERFSGSNSGNTATLTISRVEAGDEAVYYCQVWDSSSDHVVFGGGTKLTVLLEDLKNVFPPEVAVFEPSEAEISHTQKATLVCLATGFYPDHVELSWWVNGKEVHSGVCTDPQPLKEQPALNDSRYCLSSRLRVSATFWQNPRNHFRCQVQFYGLSENDEWTQDRAKPVTQIVSAEAWGRADCGFTSESYQQGVLSATILYEILLGKATLYAVLVSALVLMAMVKRKDSRGRAKRSGSGATNFSLLKQAGDVEENPGPTSMDWIWRILFLVGAATGAHSFEQLQLQESGPGLVKPSETLSLTCTVSGGSISSGSYFWGWIRQPPGKGLEWIGSIYYSGISYYNPSLKSRVTISVDTSKNQFSLKLSSVTAADTAVYYCARHDGAVAGLFDYWGQGTLVTVSSATRIQNPDPAVYQLRDSKSSDKSVCLFTDFDSQTNVSQSKDSDVYITDKCVLDMRSMDFKSNSAVAWSNKSDFACANAFNNSIIPEDTFFPSPESSCDVKLVEKSFETDTNLNFQNLSVIGFRILLLKVAGFNLLMTLRLWSS

SEQ ID NO: 18432 - protein, 762 aa, Artificial Sequence
  Synthetic Polypeptide
MALPVTALLLPLALLLHAARPEVQLVESGGGLVQPGGSLRLSCAASGFSFSDFWMSWVRQAPGKGLEWVATISQAGSEKDYVDSVKGRFTISRDNAKKSLYLQMNSLRAEDTAVYYCASGVYSFDYRGQGTLVTVSSGTGGGGSGGGGSGGGGSEFSYVLTQPPSVSVAPGQTARITCGGNNIGSKSVHWYQQPPGQAPVVVVYDDSDRPSGIPERFSGSNSGNTATLTISRVEAGDEAVYYCQVWDSSSDHVVFGGGTKLTVLLEIQNPDPAVYQLRDSKSSDKSVCLFTDFDSQTNVSQSKDSDVYITDKCVLDMRSMDFKSNSAVAWSNKSDFACANAFNNSIIPEDTFFPSPESSCDVKLVEKSFETDTNLNFQNLSVIGFRILLLKVAGFNLLMTLRLWSSRAKRSGSGVKQTLNFDLLKLAGDVESNPGPTSMDWIWRILFLVGAATGAHSFEQLQLQESGPGLVKPSETLSLTCTVSGGSISSGSYFWGWIRQPPGKGLEWIGSIYYSGISYYNPSLKSRVTISVDTSKNQFSLKLSSVTAADTAVYYCARHDGAVAGLFDYWGQGTLVTVSSATREDLKNVFPPEVAVFEPSEAEISHTQKATLVCLATGFYPDHVELSWWVNGKEVHSGVCTDPQPLKEQPALNDSRYCLSSRLRVSATFWQNPRNHFRCQVQFYGLSENDEWTQDRAKPVTQIVSAEAWGRADCGFTSESYQQGVLSATILYEILLGKATLYAVLVSALVLMAMVKRKDSRG

SEQ ID NO: 18433 - protein, 954 aa, Artificial Sequence
  Synthetic Polypeptide
MALPVTALLLPLALLLHAARPEVQLVESGGGLVQPGGSLRLSCAASGFSFSDFWMSWVRQAPGKGLEWVATISQAGSEKDYVDSVKGRFTISRDNAKKSLYLQMNSLRAEDTAVYYCASGVYSFDYRGQGTLVTVSSGTGGGGSGGGGSGGGGSEFSYVLTQPPSVSVAPGQTARITCGGNNIGSKSVHWYQQPPGQAPVVVVYDDSDRPSGIPERFSGSNSGNTATLTISRVEAGDEAVYYCQVWDSSSDHVVFGGGTKLTVLLEDLKNVFPPEVAVFEPSEAEISHTQKATLVCLATGFYPDHVELSWWVNGKEVHSGVSTDPQPLKEQPALNDSRYCLSSRLRVSATFWQNPRNHFRCQVQFYGLSENDEWTQDRAKPVTQIVSAEAWGRADCGSQSFGLLDPKLCYLLDGILFIYGVILTALFLRVKFSRSADAPAYQQGQNQLYNELNLGRREEYDVLDKRRGRDPEMGGKPQRRKNPQEGLYNELQKDKMAEAYSEIGMKGERRRGKGHDGLYQGLSTATKDTYDALHMQALPPRRAKRSGSGATNFSLLKQAGDVEENPGPTSMDWIWRILFLVGAATGAHSFEQLQLQESGPGLVKPSETLSLTCTVSGGSISSGSYFWGWIRQPPGKGLEWIGSIYYSGISYYNPSLKSRVTISVDTSKNQFSLKLSSVTAADTAVYYCARHDGAVAGLFDYWGQGTLVTVSSATRIQNPDPAVYQLRDSKSSDKSVCLFTDFDSQTNVSQSKDSDVYITDKTVLDMRSMDFKSNSAVAWSNKSDFACANAFNNSIIPEDTFFPSPESSCGTQSFGLLDPKLCYLLDGILFIYGVILTALFLRVKFSRSADAPAYQQGQNQLYNELNLGRREEYDVLDKRRGRDPEMGGKPQRRKNPQEGLYNELQKDKMAEAYSEIGMKGERRRGKGHDGLYQGLSTATKDTYDALHMQALPPR

SEQ ID NO: 18434 - protein, 784 aa, Artificial Sequence
  Synthetic Polypeptide
MALPVTALLLPLALLLHAARPEVQLVESGGGLVQPGGSLRLSCAASGFSFSDFWMSWVRQAPGKGLEWVATISQAGSEKDYVDSVKGRFTISRDNAKKSLYLQMNSLRAEDTAVYYCASGVYSFDYRGQGTLVTVSSGTGGGGSGGGGSGGGGSEFSYVLTQPPSVSVAPGQTARITCGGNNIGSKSVHWYQQPPGQAPVVVVYDDSDRPSGIPERFSGSNSGNTATLTISRVEAGDEAVYYCQVWDSSSDHVVFGGGTKLTVLLEGQPKANPTVTLFPPSSEELQANKATLVCLISDFYPGAVTVAWKADGSPVKAGVETTKPSKQSNNKYAASSYLSLTPEQWKSHRSYSCQVTHEGSTVEKTVAPTECSPIKTDVITMDPKDNCSKDANDTLLLQLTNTSAYYMYLLLLLKSVVYFAIITCCLLRRTAFCCNGEKSRAKRSGSGATNFSLLKQAGDVEENPGPTSMDWIWRILFLVGAATGAHSFEQLQLQESGPGLVKPSETLSLTCTVSGGSISSGSYFWGWIRQPPGKGLEWIGSIYYSGISYYNPSLKSRVTISVDTSKNQFSLKLSSVTAADTAVYYCARHDGAVAGLFDYWGQGTLVTVSSATRASTKGPSVFPLAPSSKSTSGGTAALGCLVKDYFPEPVTVSWNSGALTSGVHTFPAVLQSSGLYSLSSVVTVPSSSLGTQTYICNVNHKPSNTKVDKRVEPKSCEVKTDSTDHVKPKETENTKQPSKSCHKPKAIVHTEKVNMMSLTVLGLRMLFAKTVAVNFLLTAKLFFL

SEQ ID NO: 18435 - protein, 765 aa, Artificial Sequence
  Synthetic Polypeptide
MALPVTALLLPLALLLHAARPEVQLVESGGGLVQPGGSLRLSCAASGFSFSDFWMSWVRQAPGKGLEWVATISQAGSEKDYVDSVKGRFTISRDNAKKSLYLQMNSLRAEDTAVYYCASGVYSFDYRGQGTLVTVSSGTGGGGSGGGGSGGGGSEFSYVLTQPPSVSVAPGQTARITCGGNNIGSKSVHWYQQPPGQAPVVVVYDDSDRPSGIPERFSGSNSGNTATLTISRVEAGDEAVYYCQVWDSSSDHVVFGGGTKLTVLLEGQPKANPTVTLFPPSSEELQANKATLVCLISDFYPGAVTVAWKADGSPVKAGVETTKPSKQSNNKYAASSYLSLTPEQWKSHRSYSCQVTHEGSTVEKTVAPTECSGRADCGFTSESYQQGVLSATILYEILLGKATLYAVLVSALVLMAMVKRKDSRGRAKRSGSGVKQTLNFDLLKLAGDVESNPGPTSMDWIWRILFLVGAATGAHSFEQLQLQESGPGLVKPSETLSLTCTVSGGSISSGSYFWGWIRQPPGKGLEWIGSIYYSGISYYNPSLKSRVTISVDTSKNQFSLKLSSVTAADTAVYYCARHDGAVAGLFDYWGQGTLVTVSSATRASTKGPSVFPLAPSSKSTSGGTAALGCLVKDYFPEPVTVSWNSGALTSGVHTFPAVLQSSGLYSLSSVVTVPSSSLGTQTYICNVNHKPSNTKVDKRVEPKSCIPEDTFFPSPESSCDVKLVEKSFETDTNLNFQNLSVIGFRILLLKVAGFNLLMTLRLWSS

SEQ ID NO: 18436 - protein, 899 aa, Artificial Sequence
  Synthetic Polypeptide
MALPVTALLLPLALLLHAARPEVQLVESGGGLVQPGGSLRLSCAASGFSFSDFWMSWVRQAPGKGLEWVATISQAGSEKDYVDSVKGRFTISRDNAKKSLYLQMNSLRAEDTAVYYCASGVYSFDYRGQGTLVTVSSGTGGGGSGGGGSGGGGSEFSYVLTQPPSVSVAPGQTARITCGGNNIGSKSVHWYQQPPGQAPVVVVYDDSDRPSGIPERFSGSNSGNTATLTISRVEAGDEAVYYCQVWDSSSDHVVFGGGTKLTVLLEIQNPDPAVYQLRDSKSSDKSVCLFTDFDSQTNVSQSKDSDVYITDKCVLDMRSMDFKSNSAVAWSNKSDFACANAFNNSIIPEDTFFPSPESSCDVKLVEKSFETDTNLNFQNLSVIGFRILLLKVAGFNLLMTLRLWSSRAKRSGSGVKQTLNFDLLKLAGDVESNPGPTSMDWIWRILFLVGAATGAHSGPQLQLQESGPGLVKPSETLSLTCTVSGDSISSGDYYWGWIRQPPGKGLEWIGHIYYSGVTYYNPSLKSRVTISVDTSRNQFSLKLSSVTAADTAVYYCTREDSSNWRSRGQGTLVTVSSGSGGGGSGGGGSGGGGSFEQLQLQESGPGLVKPSETLSLTCTVSGGSISSGSYFWGWIRQPPGKGLEWIGSIYYSGISYYNPSLKSRVTISVDTSKNQFSLKLSSVTAADTAVYYCARHDGAVAGLFDYWGQGTLVTVSSATREDLKNVFPPEVAVFEPSEAEISHTQKATLVCLATGFYPDHVELSWWVNGKEVHSGVCTDPQPLKEQPALNDSRYCLSSRLRVSATFWQNPRNHFRCQVQFYGLSENDEWTQDRAKPVTQIVSAEAWGRADCGFTSESYQQGVLSATILYEILLGKATLYAVLVSALVLMAMVKRKDSRG

SEQ ID NO: 18437 - protein, 1091 aa, Artificial Sequence
  Synthetic Polypeptide
MALPVTALLLPLALLLHAARPEVQLVESGGGLVQPGGSLRLSCAASGFSFSDFWMSWVRQAPGKGLEWVATISQAGSEKDYVDSVKGRFTISRDNAKKSLYLQMNSLRAEDTAVYYCASGVYSFDYRGQGTLVTVSSGTGGGGSGGGGSGGGGSEFSYVLTQPPSVSVAPGQTARITCGGNNIGSKSVHWYQQPPGQAPVVVVYDDSDRPSGIPERFSGSNSGNTATLTISRVEAGDEAVYYCQVWDSSSDHVVFGGGTKLTVLLEDLKNVFPPEVAVFEPSEAEISHTQKATLVCLATGFYPDHVELSWWVNGKEVHSGVSTDPQPLKEQPALNDSRYCLSSRLRVSATFWQNPRNHFRCQVQFYGLSENDEWTQDRAKPVTQIVSAEAWGRADCGSQSFGLLDPKLCYLLDGILFIYGVILTALFLRVKFSRSADAPAYQQGQNQLYNELNLGRREEYDVLDKRRGRDPEMGGKPQRRKNPQEGLYNELQKDKMAEAYSEIGMKGERRRGKGHDGLYQGLSTATKDTYDALHMQALPPRRAKRSGSGATNFSLLKQAGDVEENPGPTSMDWIWRILFLVGAATGAHSGPQLQLQESGPGLVKPSETLSLTCTVSGDSISSGDYYWGWIRQPPGKGLEWIGHIYYSGVTYYNPSLKSRVTISVDTSRNQFSLKLSSVTAADTAVYYCTREDSSNWRSRGQGTLVTVSSGSGGGGSGGGGSGGGGSFEQLQLQESGPGLVKPSETLSLTCTVSGGSISSGSYFWGWIRQPPGKGLEWIGSIYYSGISYYNPSLKSRVTISVDTSKNQFSLKLSSVTAADTAVYYCARHDGAVAGLFDYWGQGTLVTVSSATRIQNPDPAVYQLRDSKSSDKSVCLFTDFDSQTNVSQSKDSDVYITDKTVLDMRSMDFKSNSAVAWSNKSDFACANAFNNSIIPEDTFFPSPESSCGTQSFGLLDPKLCYLLDGILFIYGVILTALFLRVKFSRSADAPAYQQGQNQLYNELNLGRREEYDVLDKRRGRDPEMGGKPQRRKNPQEGLYNELQKDKMAEAYSEIGMKGERRRGKGHDGLYQGLSTATKDTYDALHMQALPPR

SEQ ID NO: 18438 - protein, 921 aa, Artificial Sequence
  Synthetic Polypeptide
MALPVTALLLPLALLLHAARPEVQLVESGGGLVQPGGSLRLSCAASGFSFSDFWMSWVRQAPGKGLEWVATISQAGSEKDYVDSVKGRFTISRDNAKKSLYLQMNSLRAEDTAVYYCASGVYSFDYRGQGTLVTVSSGTGGGGSGGGGSGGGGSEFSYVLTQPPSVSVAPGQTARITCGGNNIGSKSVHWYQQPPGQAPVVVVYDDSDRPSGIPERFSGSNSGNTATLTISRVEAGDEAVYYCQVWDSSSDHVVFGGGTKLTVLLEGQPKANPTVTLFPPSSEELQANKATLVCLISDFYPGAVTVAWKADGSPVKAGVETTKPSKQSNNKYAASSYLSLTPEQWKSHRSYSCQVTHEGSTVEKTVAPTECSPIKTDVITMDPKDNCSKDANDTLLLQLTNTSAYYMYLLLLLKSVVYFAIITCCLLRRTAFCCNGEKSRAKRSGSGATNFSLLKQAGDVEENPGPTSMDWIWRILFLVGAATGAHSGPQLQLQESGPGLVKPSETLSLTCTVSGDSISSGDYYWGWIRQPPGKGLEWIGHIYYSGVTYYNPSLKSRVTISVDTSRNQFSLKLSSVTAADTAVYYCTREDSSNWRSRGQGTLVTVSSGSGGGGSGGGGSGGGGSFEQLQLQESGPGLVKPSETLSLTCTVSGGSISSGSYFWGWIRQPPGKGLEWIGSIYYSGISYYNPSLKSRVTISVDTSKNQFSLKLSSVTAADTAVYYCARHDGAVAGLFDYWGQGTLVTVSSATRASTKGPSVFPLAPSSKSTSGGTAALGCLVKDYFPEPVTVSWNSGALTSGVHTFPAVLQSSGLYSLSSVVTVPSSSLGTQTYICNVNHKPSNTKVDKRVEPKSCEVKTDSTDHVKPKETENTKQPSKSCHKPKAIVHTEKVNMMSLTVLGLRMLFAKTVAVNFLLTAKLFFL

SEQ ID NO: 18439 - protein, 902 aa, Artificial Sequence
  Synthetic Polypeptide
MALPVTALLLPLALLLHAARPEVQLVESGGGLVQPGGSLRLSCAASGFSFSDFWMSWVRQAPGKGLEWVATISQAGSEKDYVDSVKGRFTISRDNAKKSLYLQMNSLRAEDTAVYYCASGVYSFDYRGQGTLVTVSSGTGGGGSGGGGSGGGGSEFSYVLTQPPSVSVAPGQTARITCGGNNIGSKSVHWYQQPPGQAPVVVVYDDSDRPSGIPERFSGSNSGNTATLTISRVEAGDEAVYYCQVWDSSSDHVVFGGGTKLTVLLEGQPKANPTVTLFPPSSEELQANKATLVCLISDFYPGAVTVAWKADGSPVKAGVETTKPSKQSNNKYAASSYLSLTPEQWKSHRSYSCQVTHEGSTVEKTVAPTECSGRADCGFTSESYQQGVLSATILYEILLGKATLYAVLVSALVLMAMVKRKDSRGRAKRSGSGVKQTLNFDLLKLAGDVESNPGPTSMDWIWRILFLVGAATGAHSGPQLQLQESGPGLVKPSETLSLTCTVSGDSISSGDYYWGWIRQPPGKGLEWIGHIYYSGVTYYNPSLKSRVTISVDTSRNQFSLKLSSVTAADTAVYYCTREDSSNWRSRGQGTLVTVSSGSGGGGSGGGGSGGGGSFEQLQLQESGPGLVKPSETLSLTCTVSGGSISSGSYFWGWIRQPPGKGLEWIGSIYYSGISYYNPSLKSRVTISVDTSKNQFSLKLSSVTAADTAVYYCARHDGAVAGLFDYWGQGTLVTVSSATRASTKGPSVFPLAPSSKSTSGGTAALGCLVKDYFPEPVTVSWNSGALTSGVHTFPAVLQSSGLYSLSSVVTVPSSSLGTQTYICNVNHKPSNTKVDKRVEPKSCIPEDTFFPSPESSCDVKLVEKSFETDTNLNFQNLSVIGFRILLLKVAGFNLLMTLRLWSS

SEQ ID NO: 18440 - protein, 759 aa, Artificial Sequence
  Synthetic Polypeptide
MALPVTALLLPLALLLHAARPEVQVLESGGGLVQPGGSLRLSCAASGFTFSNFAMSWVRQAPGKGLEWVSTISGSAGTTDYADSVKGRFTISRDNSKKTLYLQMNSLRVEDTAVYYCADGRGPFFDYRGQGTLVTVSSGTGGGGSGGGGSGGGGSEFSYVLTQPPSVSVAPGQTARITCGGNNIGSKSVHWYQQPPGQAPVVVVYDDSDRPSGIPERFSGSNSGNTATLTISRVEAGDEAVYYCQVWDSSSDHVVFGGGTKLTVLLEDLKNVFPPEVAVFEPSEAEISHTQKATLVCLATGFYPDHVELSWWVNGKEVHSGVCTDPQPLKEQPALNDSRYCLSSRLRVSATFWQNPRNHFRCQVQFYGLSENDEWTQDRAKPVTQIVSAEAWGRADCGFTSESYQQGVLSATILYEILLGKATLYAVLVSALVLMAMVKRKDSRGRAKRSGSGATNFSLLKQAGDVEENPGPTSMDWIWRILFLVGAATGAHSFEQLQLQESGPGLVKPSETLSLTCTVSGGSISSGSYFWGWIRQPPGKGLEWIGSIYYSGISYYNPSLKSRVTISVDTSKNQFSLKLSSVTAADTAVYYCARHDGAVAGLFDYWGQGTLVTVSSATRIQNPDPAVYQLRDSKSSDKSVCLFTDFDSQTNVSQSKDSDVYITDKCVLDMRSMDFKSNSAVAWSNKSDFACANAFNNSIIPEDTFFPSPESSCDVKLVEKSFETDTNLNFQNLSVIGFRILLLKVAGFNLLMTLRLWSS

SEQ ID NO: 18441 - protein, 760 aa, Artificial Sequence
  Synthetic Polypeptide
MALPVTALLLPLALLLHAARPSYVLTQPPSVSVAPGQTARITCGGNNIGSKSVHWYQQPPGQAPVVVVYDDSDRPSGIPERFSGSNSGNTATLTISRVEAGDEAVYYCQVWDSSSDHVVFGGGTKLTVLLEDLKNVFPPEVAVFEPSEAEISHTQKATLVCLATGFYPDHVELSWWVNGKEVHSGVCTDPQPLKEQPALNDSRYCLSSRLRVSATFWQNPRNHFRCQVQFYGLSENDEWTQDRAKPVTQIVSAEAWGRADCGFTSESYQQGVLSATILYEILLGKATLYAVLVSALVLMAMVKRKDSRGRAKRSGSGATNFSLLKQAGDVEENPGPTSMDWIWRILFLVGAATGAHSGPEVQLVESGGGLVQAGGSLRLSCAASGRTFSMGWFRQAPGKEREFVAAITYSGGSPYYADSVKGRFTISRDNAKNTVYLQMNSLKPEDTAVYYCAANPTYGSDWNAENWGQGTQVTVSSGSGGGGSGGGGSGGGGSFEQLQLQESGPGLVKPSETLSLTCTVSGGSISSGSYFWGWIRQPPGKGLEWIGSIYYSGISYYNPSLKSRVTISVDTSKNQFSLKLSSVTAADTAVYYCARHDGAVAGLFDYWGQGTLVTVSSATRIQNPDPAVYQLRDSKSSDKSVCLFTDFDSQTNVSQSKDSDVYITDKCVLDMRSMDFKSNSAVAWSNKSDFACANAFNNSIIPEDTFFPSPESSCDVKLVEKSFETDTNLNFQNLSVIGFRILLLKVAGFNLLMTLRLWSS

SEQ ID NO: 18442 - protein, 887 aa, Artificial Sequence
  Synthetic Polypeptide
MALPVTALLLPLALLLHAARPSYVLTQPPSVSVAPGQTARITCGGNNIGSKSVHWYQQPPGQAPVVVVYDDSDRPSGIPERFSGSNSGNTATLTISRVEAGDEAVYYCQVWDSSSDHVVFGGGTKLTVLLEDLKNVFPPEVAVFEPSEAEISHTQKATLVCLATGFYPDHVELSWWVNGKEVHSGVCTDPQPLKEQPALNDSRYCLSSRLRVSATFWQNPRNHFRCQVQFYGLSENDEWTQDRAKPVTQIVSAEAWGRADCGFTSESYQQGVLSATILYEILLGKATLYAVLVSALVLMAMVKRKDSRGRAKRSGSGATNFSLLKQAGDVEENPGPTSMDWIWRILFLVGAATGAHSQLQLQESGPGLVKPSETLSLTCTVSGGSISSGDYYWGWIRQPPGKGLEWIGSISYSGSTYYNPSLKSRVTISVDTSRNQFSLKLSSVTAADTAVYYCTREDSSNWRSRGQGTLVTVSSSGGGGSGGGGSEVQLVESGGGLVQAGGSLRLSCAASGRTFSMGWFRQAPGKEREFVAAITYSGGSPYYADSVKGRFTISRDNAKNTVYLQMNSLKPEDTAVYYCAANPTYGSDWNAENWGQGTQVTVSSGSGGGGSGGGGSGGGGSFEQLQLQESGPGLVKPSETLSLTCTVSGGSISSGSYFWGWIRQPPGKGLEWIGSIYYSGISYYNPSLKSRVTISVDTSKNQFSLKLSSVTAADTAVYYCARHDGAVAGLFDYWGQGTLVTVSSATRIQNPDPAVYQLRDSKSSDKSVCLFTDFDSQTNVSQSKDSDVYITDKCVLDMRSMDFKSNSAVAWSNKSDFACANAFNNSIIPEDTFFPSPESSCDVKLVEKSFETDTNLNFQNLSVIGFRILLLKVAGFNLLMTLRLWSS

SEQ ID NO: 18443 - protein, 896 aa, Artificial Sequence
  Synthetic Polypeptide
MALPVTALLLPLALLLHAARPEVQVLESGGGLVQPGGSLRLSCAASGFTFSNFAMSWVRQAPGKGLEWVSTISGSAGTTDYADSVKGRFTISRDNSKKTLYLQMNSLRVEDTAVYYCADGRGPFFDYRGQGTLVTVSSGTGGGGSGGGGSGGGGSEFSYVLTQPPSVSVAPGQTARITCGGNNIGSKSVHWYQQPPGQAPVVVVYDDSDRPSGIPERFSGSNSGNTATLTISRVEAGDEAVYYCQVWDSSSDHVVFGGGTKLTVLLEDLKNVFPPEVAVFEPSEAEISHTQKATLVCLATGFYPDHVELSWWVNGKEVHSGVCTDPQPLKEQPALNDSRYCLSSRLRVSATFWQNPRNHFRCQVQFYGLSENDEWTQDRAKPVTQIVSAEAWGRADCGFTSESYQQGVLSATILYEILLGKATLYAVLVSALVLMAMVKRKDSRGRAKRSGSGATNFSLLKQAGDVEENPGPTSMDWIWRILFLVGAATGAHSGPEVQLVESGGGLVQAGGSLRLSCAASGRTFSMGWFRQAPGKEREFVAAITYSGGSPYYASSVRGRFTISRDNAKNTVYLQMNSLKPEDTAVYYCAANPTYGSDWNAENWGQGTQVTVSSGSGGGGSGGGGSGGGGSFEQLQLQESGPGLVKPSETLSLTCTVSGGSISSGSYFWGWIRQPPGKGLEWIGSIYYSGISYYNPSLKSRVTISVDTSKNQFSLKLSSVTAADTAVYYCARHDGAVAGLFDYWGQGTLVTVSSATRIQNPDPAVYQLRDSKSSDKSVCLFTDFDSQTNVSQSKDSDVYITDKCVLDMRSMDFKSNSAVAWSNKSDFACANAFNNSIIPEDTFFPSPESSCDVKLVEKSFETDTNLNFQNLSVIGFRILLLKVAGFNLLMTLRLWSS

SEQ ID NO: 18444-18445 - skipped (2 entries)

SEQ ID NO: 18446 - protein, 498 aa, Artificial Sequence
  Synthetic Polypeptide
MALPVTALLLPLALLLHAARPSYVLTQPPSVSVAPGQTARITCGGNNIGSKSVHWYQQPPGQAPVVVVYDDSDRPSGIPERFSGSNSGNTATLTISRVEAGDEAVYYCQVWDSSSDHVVFGGGTKLTVLGGGGSGGGGSGGGGSQLQLQESGPGLVKPSETLSLTCTVSGGSISSGSYFWGWIRQPPGKGLEWIGSIYYSGITYYNPGLKSRVTISVDTSKNQFSLKLSSVTAADTAVYYCARHDGAVAGLFDYWGQGTLVTVSSATREQKLISEEDLKIEVMYPPPYLDNEKSNGTIIHVKGKHLCPSPLFPGPSKPFWVLVVVGGVLACYSLLVTVAFIIFWVRSKRSRLLHSDYMNMTPRRPGPTRKHYQPYAPPRDFAAYRSRVKFSRSADAPAYQQGQNQLYNELNLGRREEYDVLDKRRGRDPEMGGKPRRKNPQEGLYNELQKDKMAEAYSEIGMKGERRRGKGHDGLYQGLSTATKDTYDALHMQALPPR

SEQ ID NO: 18447-18449 - skipped (3 entries)

SEQ ID NO: 18450 - protein, 857 aa, Artificial Sequence
  Synthetic Polypeptide
MALPVTALLLPLALLLHAARPSYVLTQPPSVSVAPGQTARITCGGNNIGSKSVHWYQQPPGQAPVVVVYDDSDRPSGIPERFSGSNSGNTATLTISRVEAGDEAVYYCQVWDSSSDHVVFGGGTKLTVLLEIQNPDPAVYQLRDSKSSDKSVCLFTDFDSQTNVSQSKDSDVYITDKCVLDMRSMDFKSNSAVAWSNKSDFACANAFNNSIIPEDTFFPSSDVPCDVKLVEKSFETDTNLNFQNLSVIGFRILLLKVAGFNLLMTLRLWSSRAKRSGSGVKQTLNFDLLKLAGDVESNPGPTSMDWIWRILFLVGAATGAHSFEQLQLQESGPGLVKPSETLSLTCTVSGGSISSGSYFWGWIRQPPGKGLEWIGSIYYSGITYYNPGLKSRVTISVDTSKNQFSLKLSSVTAADTAVYYCARHDGAVAGLFDYWGQGTLVTVSSATREDLKNVFPPEVAVFEPSKAEIAHTQKATLVCLATGFYPDHVELSWWVNGKEVHSGVCTDPQPLKEQPALNDSRYCLSSRLRVSATFWQNPRNHFRCQVQFYGLSENDEWTQDRAKPVTQIVSAEAWGRADCGITSASYHQGVLSATILYEILLGKATLYAVLVSALVLMAMVKRKDSRGRAKRSGSGATNFSLLKQAGDVEENPGPSRGHMTEYKPTVRLATRDDVPRAVRTLAAAFADYPATRHTVDPDRHIERVTELQELFLTRVGLDIGKVWVADDGAAVAVWTTPESVEAGAVFAEIGPRMAELSGSRLAAQQQMEGLLAPHRPKEPAWFLATVGVSPDHQGKGLGSAVVLPGVEAAERAGVPAFLETSAPRNLPFYERLGFTVTADVEVPEGPRTWCMTRKPGA

SEQ ID NO: 18451-18452 - skipped (2 entries)

SEQ ID NO: 18453 - protein, 848 aa, Artificial Sequence
  Synthetic Polypeptide
MALPVTALLLPLALLLHAARPSYVLTQPPSVSVAPGQTARITCGGNNIGSKSVHWYQQPPGQAPVVVVYDDSDRPSGIPERFSGSNSGNTATLTISRVEAGDEAVYYCQVWDSSSDHVVFGGGTKLTVLLEDLKNVFPPEVAVFEPSEAEISHTQKATLVCLATGFYPDHVELSWWVNGKEVHSGVCTDPQPLKEQPALNDSRYCLSSRLRVSATFWQNPRNHFRCQVQFYGLSENDEWTQDRAKPVTQIVSAEAWGRADCGFTSESYQQGVLSATILYEILLGKATLYAVLVSALVLMAMVKRKDSRGRAKRSGSGATNFSLLKQAGDVEENPGPTSMDWIWRILFLVGAATGAHSFEQLQLQESGPGLVKPSETLSLTCTVSGGSISSGSYFWGWIRQPPGKGLEWIGSIYYSGITYYNPGLKSRVTISVDTSKNQFSLKLSSVTAADTAVYYCARHDGAVAGLFDYWGQGTLVTVSSATRIQNPDPAVYQLRDSKSSDKSVCLFTDFDSQTNVSQSKDSDVYITDKCVLDMRSMDFKSNSAVAWSNKSDFACANAFNNSIIPEDTFFPSPESSCDVKLVEKSFETDTNLNFQNLSVIGFRILLLKVAGFNLLMTLRLWSSRAKRSGSGVKQTLNFDLLKLAGDVESNPGPSRGGIHTMATYEVLCEVARKLGTDDREVVLFLLNVFIPQPTLAQLIGALRALKEEGRLTFPLLAECLFRAGRRDLLRDLLHLDPRFLERHLAGTMSYFSPYQLTVLHVDGELCARDIRSLIFLSKDTIGSRSTPQTFLHWVYCMENLDLLGPTDVDALMSMLRSLSRVDLQRQVQTLMGLHLSGPSHSQHYRHTP

SEQ ID NO: 18454-18456 - skipped (3 entries)

SEQ ID NO: 18457 - protein, 902 aa, Artificial Sequence
  Synthetic Polypeptide
MALPVTALLLPLALLLHAARPLEQKLISEEDLGSGDRPDPAVYQLRDSKSSDKSVCLFTDFDSQTNVSQSKDSDVYITDKCVLDMRSMDFKSNSAVAWSNKSDFACANAFNNSIIPEDTFFPSPESSCDVKLVEKSFETDTNLNFQNLSVIGFRILLLKVAGFNLLMTLRLWSSSSRAKRSGSGVKQTLNFDLLKLAGDVESNPGPTSMALPVTALLLPLALLLHAARPSYVLTQPPSVSVAPGQTARITCGGNNIGSKSVHWYQQPPGQAPVVVVYDDSDRPSGIPERFSGSNSGNTATLTISRVEAGDEAVYYCQVWDSSSDHVVFGGGTKLTVLGGGGSGGGGSGGGGSQLQLQESGPGLVKPSETLSLTCTVSGGSISSGSYFWGWIRQPPGKGLEWIGSIYYSGITYYNPGLKSRVTISVDTSKNQFSLKLSSVTAADTAVYYCARHDGAVAGLFDYWGQGTLVTVSSATRGKPIPNPLLGLDSTGSGEDLKNVFPPEVAVFEPSEAEISHTQKATLVCLATGFYPDHVELSWWVNGKEVHSGVCTDPQPLKEQPALNDSRYCLSSRLRVSATFWQNPRNHFRCQVQFYGLSENDEWTQDRAKPVTQIVSAEAWGRADCGFTSESYQQGVLSATILYEILLGKATLYAVLVSALVLMAMVKRKDSRGRAKRSGSGATNFSLLKQAGDVEENPGPSRGHMTEYKPTVRLATRDDVPRAVRTLAAAFADYPATRHTVDPDRHIERVTELQELFLTRVGLDIGKVWVADDGAAVAVWTTPESVEAGAVFAEIGPRMAELSGSRLAAQQQMEGLLAPHRPKEPAWFLATVGVSPDHQGKGLGSAVVLPGVEAAERAGVPAFLETSAPRNLPFYERLGFTVTADVEVPEGPRTWCMTRKPGA

SEQ ID NO: 18458 - protein, 856 aa, Artificial Sequence
  Synthetic Polypeptide
MALPVTALLLPLALLLHAARPSYVLTQPPSVSVAPGQTARITCGGNNIGSKSVHWYQQPPGQAPVVVVYDDSDRPSGIPERFSGSNSGNTATLTISRVEAGDEAVYYCQVWDSSSDHVVFGGGTKLTVLLEDLKNVFPPEVAVFEPSEAEISHTQKATLVCLATGFYPDHVELSWWVNGKEVHSGVSTDPQPLKEQPALNDSRYCLSSRLRVSATFWQNPRNHFRCQVQFYGLSENDEWTQDRAKPVTQIVSAEAWGRADCGFTSESYQQGVLSATILYEILLGKATLYAVLVSALVLMAMVKRKDSRGRAKRSGSGATNFSLLKQAGDVEENPGPTSMDWIWRILFLVGAATGAHSFEQLQLQESGPGLVKPSETLSLTCTVSGGSISSGSYFWGWIRQPPGKGLEWIGSIYYSGITYYNPGLKSRVTISVDTSKNQFSLKLSSVTAADTAVYYCARHDGAVAGLFDYWGQGTLVTVSSATRIQNPDPAVYQLRDSKSSDKSVCLFTDFDSQTNVSQSKDSDVYITDKTVLDMRSMDFKSNSAVAWSNKSDFACANAFNNSIIPEDTFFPSPESSCDVKLVEKSFETDTNLNFQNLSVIGFRILLLKVAGFNLLMTLRLWSSRAKRSGSGVKQTLNFDLLKLAGDVESNPGPSRGHMTEYKPTVRLATRDDVPRAVRTLAAAFADYPATRHTVDPDRHIERVTELQELFLTRVGLDIGKVWVADDGAAVAVWTTPESVEAGAVFAEIGPRMAELSGSRLAAQQQMEGLLAPHRPKEPAWFLATVGVSPDHQGKGLGSAVVLPGVEAAERAGVPAFLETSAPRNLPFYERLGFTVTADVEVPEGPRTWCMTRKPGA

SEQ ID NO: 18459-18466 - skipped (8 entries)

SEQ ID NO: 18467 - protein, 890 aa, Artificial Sequence
  Synthetic Polypeptide
MALPVTALLLPLALLLHAARPSYVLTQPPSVSVAPGQTARITCGGNNIGSKSVHWYQQPPGQAPVVVVYDDSDRPSGIPERFSGSNSGNTATLTISRVEAGDEAVYYCQVWDSSSDHVVFGGGTKLTVLLEGKPIPNPLLGLDSTGSGEDLKNVFPPEVAVFEPSEAEISHTQKATLVCLATGFYPDHVELSWWVNGKEVHSGVSTDPQPLKEQPALNDSRYCLSSRLRVSATFWQNPRNHFRCQVQFYGLSENDEWTQDRAKPVTQIVSAEAWGRADCGSQSFGLLDPKLCYLLDGILFIYGVILTALFLRVKFSRSADAPAYQQGQNQLYNELNLGRREEYDVLDKRRGRDPEMGGKPQRRKNPQEGLYNELQKDKMAEAYSEIGMKGERRRGKGHDGLYQGLSTATKDTYDALHMQALPPRRAKRSGSGATNFSLLKQAGDVEENPGPTSMDWIWRILFLVGAATGAHSFEQLQLQESGPGLVKPSETLSLTCTVSGGSISSGSYFWGWIRQPPGKGLEWIGSIYYSGITYYNPGLKSRVTISVDTSKNQFSLKLSSVTAADTAVYYCARHDGAVAGLFDYWGQGTLVTVSSATREQKLISEEDGSGIQNPDPAVYQLRDSKSSDKSVCLFTDFDSQTNVSQSKDSDVYITDKTVLDMRSMDFKSNSAVAWSNKSDFACANAFNNSIIPEDTFFPSPESSCGTQSFGLLDPKLCYLLDGILFIYGVILTALFLRSKRSRLLHSDYMNMTPRRPGPTRKHYQPYAPPRDFAAYRSRVKFSRSADAPAYQQGQNQLYNELNLGRREEYDVLDKRRGRDPEMGGKPQRRKNPQEGLYNELQKDKMAEAYSEIGMKGERRRGKGHDGLYQGLSTATKDTYDALHMQALPPR

SEQ ID NO: 18468-18471 - skipped (4 entries)

SEQ ID NO: 18472 - protein, 649 aa, Artificial Sequence
  Synthetic Polypeptide
MALPVTALLLPLALLLHAARPSYVLTQPPSVSVAPGQTARITCGGNNIGSKSVHWYQQPPGQAPVVVVYDDSDRPSGIPERFSGSNSGNTATLTISRVEAGDEAVYYCQVWDSSSDHVVFGGGTKLTVLLEGQPKANPTVTLFPPSSEELQANKATLVCLISDFYPGAVTVAWKADGSPVKAGVETTKPSKQSNNKYAASSYLSLTPEQWKSHRSYSCQVTHEGSTVEKTVAPTECSPIKTDVITMDPKDNCSKDANDTLLLQLTNTSAYYMYLLLLLKSVVYFAIITCCLLRRTAFCCNGEKSRAKRSGSGATNFSLLKQAGDVEENPGPTSMDWIWRILFLVGAATGAHSFEQLQLQESGPGLVKPSETLSLTCTVSGGSISSGSYFWGWIRQPPGKGLEWIGSIYYSGITYYNPGLKSRVTISVDTSKNQFSLKLSSVTAADTAVYYCARHDGAVAGLFDYWGQGTLVTVSSATRASTKGPSVFPLAPSSKSTSGGTAALGCLVKDYFPEPVTVSWNSGALTSGVHTFPAVLQSSGLYSLSSVVTVPSSSLGTQTYICNVNHKPSNTKVDKRVEPKSCEVKTDSTDHVKPKETENTKQPSKSCHKPKAIVHTEKVNMMSLTVLGLRMLFAKTVAVNFLLTAKLFFL

SEQ ID NO: 18473-18476 - skipped (4 entries)

SEQ ID NO: 18477 - protein, 428 aa, Artificial Sequence
  Synthetic Polypeptide
MALPVTALLLPLALLLHAARPSYVLTQPPSVSVAPGQTARITCGGNNIGSKSVHWYQQPPGQAPVVVVYDDSDRPSGIPERFSGSNSGNTATLTISRVEAGDEAVYYCQVWDSSSDHVVFGGGTKLTVLGGGGSGGGGSGGGGSQLQLQESGPGLVKPSETLSLTCTVSGGSISSGSYFWGWIRQPPGKGLEWIGSIYYSGITYYNPGLKSRVTISVDTSKNQFSLKLSSVTAADTAVYYCARHDGAVAGLFDYWGQGTLVTVSSATRQSIKGNHLVKVYDYQEDGSVLLTCDAEAKNITWFKDGKMIGFLTEDKKKWNLGSNAKDPRGMYQCKGSQNKSKPLQVYYRMCQNCIELNAATISGFLFAEIVSIFVLAVGVYFIAGQDGVRQSRASDKQTLLPNDQLYQPLKDREDDQYSHLQGNQLRRN

SEQ ID NO: 18478 - skipped

SEQ ID NO: 18479 - protein, 453 aa, Artificial Sequence
  Synthetic Polypeptide
MALPVTALLLPLALLLHAARPQLQLQESGPGLVKPSETLSLTCTVSGGSISSGSYFWGWIRQPPGKGLEWIGSIYYSGITYYNPGLKSRVTISVDTSKNQFSLKLSSVTAADTAVYYCARHDGAVAGLFDYWGQGTLVTVSSAGGGGSGGGGSGGGGSSYVLTQPPSVSVAPGQTARITCGGNNIGSKSVHWYQQPPGQAPVVVVYDDSDRPSGIPERFSGSNSGNTATLTISRVEAGDEAVYYCQVWDSSSDHVVFGGGTKLTVLTRDGNEEMGGITQTPYKVSISGTTVILTCPQYPGSEILWQHNDKNIGGDEDDKNIGSDEDHLSLKEFSELEQSGYYVCYPRGSKPEDANFYLYLRARVCENCMEMDVMSVATIVIVDICITGGLLLLVYYWSKNRKAKAKPVTRGAGAGGRQRGQNKERPPPVPNPDYEPIRKGQRDLYSGLNQRRI

SEQ ID NO: 18480 - skipped

SEQ ID NO: 18481 - protein, 428 aa, Artificial Sequence
  Synthetic Polypeptide
MALPVTALLLPLALLLHAARPQLQLQESGPGLVKPSETLSLTCTVSGGSISSGSYFWGWIRQPPGKGLEWIGSIYYSGITYYNPGLKSRVTISVDTSKNQFSLKLSSVTAADTAVYYCARHDGAVAGLFDYWGQGTLVTVSSAGGGGSGGGGSGGGGSSYVLTQPPSVSVAPGQTARITCGGNNIGSKSVHWYQQPPGQAPVVVVYDDSDRPSGIPERFSGSNSGNTATLTISRVEAGDEAVYYCQVWDSSSDHVVFGGGTKLTVLTRQSIKGNHLVKVYDYQEDGSVLLTCDAEAKNITWFKDGKMIGFLTEDKKKWNLGSNAKDPRGMYQCKGSQNKSKPLQVYYRMCQNCIELNAATISGFLFAEIVSIFVLAVGVYFIAGQDGVRQSRASDKQTLLPNDQLYQPLKDREDDQYSHLQGNQLRRN

SEQ ID NO: 18482-18490 - skipped (9 entries)

SEQ ID NO: 18491 - protein, 327 aa, Artificial Sequence; identical to SEQ ID NO: 18146
  Synthetic Polypeptide

SEQ ID NO: 18492-18495 - skipped (4 entries)

SEQ ID NO: 18496 - protein, 699 aa, Artificial Sequence
  Synthetic Polypeptide
MALPVTALLLPLALLLHAARPSYVLTQPPSVSVAPGQTARITCGGNNIGSKSVHWYQQPPGQAPVVVVYDDSDRPSGIPERFSGSNSGNTATLTISRVEAGDEAVYYCQVWDSSSDHVVFGGGTKLTVLGGGGSGGGGSGGGGSQLQLQESGPGLVKPSETLSLTCTVSGGSISSGSYFWGWIRQPPGKGLEWIGSIYYSGITYYNPGLKSRVTISVDTSKNQFSLKLSSVTAADTAVYYCARHDGAVAGLFDYWGQGTLVTVSSATRGSGGGGSGGGGSGDGNEEMGGITQTPYKVSISGTTVILTCPQYPGSEILWQHNDKNIGGDEDDKNIGSDEDHLSLKEFSELEQSGYYVCYPRGSKPEDANFYLYLRARVCENCMEMDVMSVATIVIVDICITGGLLLLVYYWSKNRKAKAKPVTRGAGAGGRQRGQNKERPPPVPNPDYEPIRKGQRDLYSGLNQRRIRAKRSGSGVKQTLNFDLLKLAGDVESNPGPSRGHMTEYKPTVRLATRDDVPRAVRTLAAAFADYPATRHTVDPDRHIERVTELQELFLTRVGLDIGKVWVADDGAAVAVWTTPESVEAGAVFAEIGPRMAELSGSRLAAQQQMEGLLAPHRPKEPAWFLATVGVSPDHQGKGLGSAVVLPGVEAAERAGVPAFLETSAPRNLPFYERLGFTVTADVEVPEGPRTWCMTRKPGA

SEQ ID NO: 18497-18499 - skipped (3 entries)

SEQ ID NO: 18500 - protein, 758 aa, Artificial Sequence
  Synthetic Polypeptide
MALPVTALLLPLALLLHAARPEVQLVESGGGLVQPGGSLRLSCAASGFSFSDFWMSWVRQAPGKGLEWVATISQAGSEKDYVDSVKGRFTISRDNAKKSLYLQMNSLRAEDTAVYYCASGVYSFDYRGQGTLVTVSSGTGGGGSGGGGSGGGGSEFSYVLTQPPSVSVAPGQTARITCGGNNIGSKSVHWYQQPPGQAPVVVVYDDSDRPSGIPERFSGSNSGNTATLTISRVEAGDEAVYYCQVWDSSSDHVVFGGGTKLTVLLEDLKNVFPPEVAVFEPSEAEISHTQKATLVCLATGFYPDHVELSWWVNGKEVHSGVCTDPQPLKEQPALNDSRYCLSSRLRVSATFWQNPRNHFRCQVQFYGLSENDEWTQDRAKPVTQIVSAEAWGRADCGFTSESYQQGVLSATILYEILLGKATLYAVLVSALVLMAMVKRKDSRGRAKRSGSGATNFSLLKQAGDVEENPGPTSMDWIWRILFLVGAATGAHSFEQLQLQESGPGLVKPSETLSLTCTVSGGSISSGSYFWGWIRQPPGKGLEWIGSIYYSGITYYNPGLKSRVTISVDTSKNQFSLKLSSVTAADTAVYYCARHDGAVAGLFDYWGQGTLVTVSSATRIQNPDPAVYQLRDSKSSDKSVCLFTDFDSQTNVSQSKDSDVYITDKCVLDMRSMDFKSNSAVAWSNKSDFACANAFNNSIIPEDTFFPSPESSCDVKLVEKSFETDTNLNFQNLSVIGFRILLLKVAGFNLLMTLRLWSS

SEQ ID NO: 18501-18504 - skipped (4 entries)

SEQ ID NO: 18505 - protein, 899 aa, Artificial Sequence
  Synthetic Polypeptide
MALPVTALLLPLALLLHAARPEVQLVESGGGLVQPGGSLRLSCAASGFSFSDFWMSWVRQAPGKGLEWVATISQAGSEKDYVDSVKGRFTISRDNAKKSLYLQMNSLRAEDTAVYYCASGVYSFDYRGQGTLVTVSSGTGGGGSGGGGSGGGGSEFSYVLTQPPSVSVAPGQTARITCGGNNIGSKSVHWYQQPPGQAPVVVVYDDSDRPSGIPERFSGSNSGNTATLTISRVEAGDEAVYYCQVWDSSSDHVVFGGGTKLTVLLEIQNPDPAVYQLRDSKSSDKSVCLFTDFDSQTNVSQSKDSDVYITDKCVLDMRSMDFKSNSAVAWSNKSDFACANAFNNSIIPEDTFFPSPESSCDVKLVEKSFETDTNLNFQNLSVIGFRILLLKVAGFNLLMTLRLWSSRAKRSGSGVKQTLNFDLLKLAGDVESNPGPTSMDWIWRILFLVGAATGAHSGPQLQLQESGPGLVKPSETLSLTCTVSGDSISSGDYYWGWIRQPPGKGLEWIGHIYYSGVTYYNPSLKSRVTISVDTSRNQFSLKLSSVTAADTAVYYCTREDSSNWRSRGQGTLVTVSSGSGGGGSGGGGSGGGGSFEQLQLQESGPGLVKPSETLSLTCTVSGGSISSGSYFWGWIRQPPGKGLEWIGSIYYSGITYYNPGLKSRVTISVDTSKNQFSLKLSSVTAADTAVYYCARHDGAVAGLFDYWGQGTLVTVSSATREDLKNVFPPEVAVFEPSEAEISHTQKATLVCLATGFYPDHVELSWWVNGKEVHSGVCTDPQPLKEQPALNDSRYCLSSRLRVSATFWQNPRNHFRCQVQFYGLSENDEWTQDRAKPVTQIVSAEAWGRADCGFTSESYQQGVLSATILYEILLGKATLYAVLVSALVLMAMVKRKDSRG

SEQ ID NO: 18506-18512 - skipped (7 entries)

SEQ ID NO: 18513 - protein, 727 aa, Artificial Sequence
  Synthetic Polypeptide
MALPVTALLLPLALLLHAARPSYVLTQPPSVSVAPGQTARITCGGNNIGSKSVHWYQQPPGQAPVVVVYDDSDRPSGIPERFSGSNSGNTATLTISRVEAGDEAVYYCQVWDSSSDHVVFGGGTKLTVLGGGGSGGGGSGGGGSQLQLQESGPGLVKPSETLSLTCTVSGGSISSGSYFWGWIRQPPGKGLEWIGSIYYSGITYYNPTLKSRVTISVDTSKNQFSLKLSSVTAADTAVYYCARHDGAVAGLFDYWGQGTLVTVSSATREQKLISEEDLAKPTTTPAPRPPTPAPTIASQPLSLRPEACRPAAGGAVHTRGLDFACDIYIWAPLAGTCGVLLLSLVITLYCKRGRKKLLYIFKQPFMRPVQTTQEEDGCSCRFPEEEEGGCELRVKFSRSADAPAYQQGQNQLYNELNLGRREEYDVLDKRRGRDPEMGGKPRRKNPQEGLYNELQKDKMAEAYSEIGMKGERRRGKGHDGLYQGLSTATKDTYDALHMQALPPRSSGSGEGRGSLLTCGDVEENPGPHMTEYKPTVRLATRDDVPRAVRTLAAAFADYPATRHTVDPDRHIERVTELQELFLTRVGLDIGKVWVADDGAAVAVWTTPESVEAGAVFAEIGPRMAELSGSRLAAQQQMEGLLAPHRPKEPAWFLATVGVSPDHQGKGLGSAVVLPGVEAAERAGVPAFLETSAPRNLPFYERLGFTVTADVEVPEGPRTWCMTRKPGA

SEQ ID NO: 18514-18516 - skipped (3 entries)

SEQ ID NO: 18517 - protein, 504 aa, Artificial Sequence
  Synthetic Polypeptide
MALPVTALLLPLALLLHAARPQLQLQESGPGLVKPSETLSLTCTVSGGSISSGSYFWGWIRQPPGKGLEWIGSIYYSGITYYNPTLKSRVTISVDTSKNQFSLKLSSVTAADTAVYYCARHDGAVAGLFDYWGQGTLVTVSSAGGGGSGGGGSGGGGSSYVLTQPPSVSVAPGQTARITCGGNNIGSKSVHWYQQPPGQAPVVVVYDDSDRPSGIPERFSGSNSGNTATLTISRVEAGDEAVYYCQVWDSSSDHVVFGGGTKLTVLTREQKLISEEDLAKPTTTPAPRPPTPAPTIASQPLSLRPEACRPAAGGAVHTRGLDFACDIYIWAPLAGTCGVLLLSLVITLYCKRGRKKLLYIFKQPFMRPVQTTQEEDGCSCRFPEEEEGGCELRVKFSRSADAPAYQQGQNQLYNELNLGRREEYDVLDKRRGRDPEMGGKPRRKNPQEGLYNELQKDKMAEAYSEIGMKGERRRGKGHDGLYQGLSTATKDTYDALHMQALPPR

SEQ ID NO: 18518-18520 - skipped (3 entries)

SEQ ID NO: 18521 - protein, 623 aa, Artificial Sequence
  Synthetic Polypeptide
MALPVTALLLPLALLLHAARPSYVLTQPPSVSVAPGQTARITCGGNNIGSKSVHWYQQPPGQAPVVVVYDDSDRPSGIPERFSGSNSGNTATLTISRVEAGDEAVYYCQVWDSSSDHVVFGGGTKLTVLLEDLKNVFPPEVAVFEPSEAEISHTQKATLVCLATGFYPDHVELSWWVNGKEVHSGVCTDPQPLKEQPALNDSRYCLSSRLRVSATFWQNPRNHFRCQVQFYGLSENDEWTQDRAKPVTQIVSAEAWGRADCGFTSESYQQGVLSATILYEILLGKATLYAVLVSALVLMAMVKRKDSRGRAKRSGSGATNFSLLKQAGDVEENPGPTSMDWIWRILFLVGAATGAHSFEQLQLQESGPGLVKPSETLSLTCTVSGGSISSGSYFWGWIRQPPGKGLEWIGSIYYSGITYYNPTLKSRVTISVDTSKNQFSLKLSSVTAADTAVYYCARHDGAVAGLFDYWGQGTLVTVSSATRIQNPDPAVYQLRDSKSSDKSVCLFTDFDSQTNVSQSKDSDVYITDKCVLDMRSMDFKSNSAVAWSNKSDFACANAFNNSIIPEDTFFPSPESSCDVKLVEKSFETDTNLNFQNLSVIGFRILLLKVAGFNLLMTLRLWSS

SEQ ID NO: 18522 - protein, 848 aa, Artificial Sequence
  Synthetic Polypeptide
MALPVTALLLPLALLLHAARPSYVLTQPPSVSVAPGQTARITCGGNNIGSKSVHWYQQPPGQAPVVVVYDDSDRPSGIPERFSGSNSGNTATLTISRVEAGDEAVYYCQVWDSSSDHVVFGGGTKLTVLLEDLKNVFPPEVAVFEPSEAEISHTQKATLVCLATGFYPDHVELSWWVNGKEVHSGVCTDPQPLKEQPALNDSRYCLSSRLRVSATFWQNPRNHFRCQVQFYGLSENDEWTQDRAKPVTQIVSAEAWGRADCGFTSESYQQGVLSATILYEILLGKATLYAVLVSALVLMAMVKRKDSRGRAKRSGSGATNFSLLKQAGDVEENPGPTSMDWIWRILFLVGAATGAHSFEQLQLQESGPGLVKPSETLSLTCTVSGGSISSGSYFWGWIRQPPGKGLEWIGSIYYSGITYYNPTLKSRVTISVDTSKNQFSLKLSSVTAADTAVYYCARHDGAVAGLFDYWGQGTLVTVSSATRIQNPDPAVYQLRDSKSSDKSVCLFTDFDSQTNVSQSKDSDVYITDKCVLDMRSMDFKSNSAVAWSNKSDFACANAFNNSIIPEDTFFPSPESSCDVKLVEKSFETDTNLNFQNLSVIGFRILLLKVAGFNLLMTLRLWSSRAKRSGSGVKQTLNFDLLKLAGDVESNPGPSRGGIHTMATYEVLCEVARKLGTDDREVVLFLLNVFIPQPTLAQLIGALRALKEEGRLTFPLLAECLFRAGRRDLLRDLLHLDPRFLERHLAGTMSYFSPYQLTVLHVDGELCARDIRSLIFLSKDTIGSRSTPQTFLHWVYCMENLDLLGPTDVDALMSMLRSLSRVDLQRQVQTLMGLHLSGPSHSQHYRHTP

SEQ ID NO: 18523-18533 - skipped (11 entries)

SEQ ID NO: 18534 - protein, 819 aa, Artificial Sequence
  Synthetic Polypeptide
MALPVTALLLPLALLLHAARPSYVLTQPPSVSVAPGQTARITCGGNNIGSKSVHWYQQPPGQAPVVVVYDDSDRPSGIPERFSGSNSGNTATLTISRVEAGDEAVYYCQVWDSSSDHVVFGGGTKLTVLLEDLKNVFPPEVAVFEPSEAEISHTQKATLVCLATGFYPDHVELSWWVNGKEVHSGVSTDPQPLKEQPALNDSRYCLSSRLRVSATFWQNPRNHFRCQVQFYGLSENDEWTQDRAKPVTQIVSAEAWGRADCGSQSFGLLDPKLCYLLDGILFIYGVILTALFLRVKFSRSADAPAYQQGQNQLYNELNLGRREEYDVLDKRRGRDPEMGGKPQRRKNPQEGLYNELQKDKMAEAYSEIGMKGERRRGKGHDGLYQGLSTATKDTYDALHMQALPPRRAKRSGSGATNFSLLKQAGDVEENPGPTSMDWIWRILFLVGAATGAHSFEQLQLQESGPGLVKPSETLSLTCTVSGGSISSGSYFWGWIRQPPGKGLEWIGSIYYSGITYYNPTLKSRVTISVDTSKNQFSLKLSSVTAADTAVYYCARHDGAVAGLFDYWGQGTLVTVSSATRIQNPDPAVYQLRDSKSSDKSVCLFTDFDSQTNVSQSKDSDVYITDKTVLDMRSMDFKSNSAVAWSNKSDFACANAFNNSIIPEDTFFPSPESSCGTQSFGLLDPKLCYLLDGILFIYGVILTALFLRVKFSRSADAPAYQQGQNQLYNELNLGRREEYDVLDKRRGRDPEMGGKPQRRKNPQEGLYNELQKDKMAEAYSEIGMKGERRRGKGHDGLYQGLSTATKDTYDALHMQALPPR

SEQ ID NO: 18535-18537 - skipped (3 entries)

SEQ ID NO: 18538 - protein, 892 aa, Artificial Sequence
  Synthetic Polypeptide
MALPVTALLLPLALLLHAARPSYVLTQPPSVSVAPGQTARITCGGNNIGSKSVHWYQQPPGQAPVVVVYDDSDRPSGIPERFSGSNSGNTATLTISRVEAGDEAVYYCQVWDSSSDHVVFGGGTKLTVLLEGKPIPNPLLGLDSTGSGEDLKNVFPPEVAVFEPSEAEISHTQKATLVCLATGFYPDHVELSWWVNGKEVHSGVSTDPQPLKEQPALNDSRYCLSSRLRVSATFWQNPRNHFRCQVQFYGLSENDEWTQDRAKPVTQIVSAEAWGRADCGSQSFGLLDPKLCYLLDGILFIYGVILTALFLRVKFSRSADAPAYQQGQNQLYNELNLGRREEYDVLDKRRGRDPEMGGKPQRRKNPQEGLYNELQKDKMAEAYSEIGMKGERRRGKGHDGLYQGLSTATKDTYDALHMQALPPRRAKRSGSGATNFSLLKQAGDVEENPGPTSMDWIWRILFLVGAATGAHSFEQLQLQESGPGLVKPSETLSLTCTVSGGSISSGSYFWGWIRQPPGKGLEWIGSIYYSGITYYNPTLKSRVTISVDTSKNQFSLKLSSVTAADTAVYYCARHDGAVAGLFDYWGQGTLVTVSSATREQKLISEEDLGSGIQNPDPAVYQLRDSKSSDKSVCLFTDFDSQTNVSQSKDSDVYITDKTVLDMRSMDFKSNSAVAWSNKSDFACANAFNNSIIPEDTFFPSPESSCGTQSFGLLDPKLCYLLDGILFIYGVILTALFLKRGRKKLLYIFKQPFMRPVQTTQEEDGCSCRFPEEEEGGCELRVKFSRSADAPAYQQGQNQLYNELNLGRREEYDVLDKRRGRDPEMGGKPQRRKNPQEGLYNELQKDKMAEAYSEIGMKGERRRGKGHDGLYQGLSTATKDTYDALHMQALPPR

SEQ ID NO: 18539-18548 - skipped (10 entries)

SEQ ID NO: 18549 - protein, 418 aa, Artificial Sequence
  Synthetic Polypeptide
MALPVTALLLPLALLLHAARPQLQLQESGPGLVKPSETLSLTCTVSGGSISSGSYFWGWIRQPPGKGLEWIGSIYYSGITYYNPTLKSRVTISVDTSKNQFSLKLSSVTAADTAVYYCARHDGAVAGLFDYWGQGTLVTVSSAGGGGSGGGGSGGGGSSYVLTQPPSVSVAPGQTARITCGGNNIGSKSVHWYQQPPGQAPVVVVYDDSDRPSGIPERFSGSNSGNTATLTISRVEAGDEAVYYCQVWDSSSDHVVFGGGTKLTVLTRFKIPIEELEDRVFVNCNTSITWVEGTVGTLLSDITRLDLGKRILDPRGIYRCNGTDIYKDKESTVQVHYRMCQSCVELDPATVAGIIVTDVIATLLLALGVFCFAGHETGRLSGAADTQALLRNDQVYQPLRDRDDAQYSHLGGNWARNK

SEQ ID NO: 18550 - protein, 428 aa, Artificial Sequence
  Synthetic Polypeptide
MALPVTALLLPLALLLHAARPQLQLQESGPGLVKPSETLSLTCTVSGGSISSGSYFWGWIRQPPGKGLEWIGSIYYSGITYYNPTLKSRVTISVDTSKNQFSLKLSSVTAADTAVYYCARHDGAVAGLFDYWGQGTLVTVSSAGGGGSGGGGSGGGGSSYVLTQPPSVSVAPGQTARITCGGNNIGSKSVHWYQQPPGQAPVVVVYDDSDRPSGIPERFSGSNSGNTATLTISRVEAGDEAVYYCQVWDSSSDHVVFGGGTKLTVLTRQSIKGNHLVKVYDYQEDGSVLLTCDAEAKNITWFKDGKMIGFLTEDKKKWNLGSNAKDPRGMYQCKGSQNKSKPLQVYYRMCQNCIELNAATISGFLFAEIVSIFVLAVGVYFIAGQDGVRQSRASDKQTLLPNDQLYQPLKDREDDQYSHLQGNQLRRN

SEQ ID NO: 18551-18559 - skipped (9 entries)

SEQ ID NO: 18560 - protein, 327 aa, Artificial Sequence; identical to SEQ ID NO: 18146
  Synthetic Polypeptide

SEQ ID NO: 18561-18565 - skipped (5 entries)

SEQ ID NO: 18566 - protein, 664 aa, Artificial Sequence
  Synthetic Polypeptide
MALPVTALLLPLALLLHAARPSYVLTQPPSVSVAPGQTARITCGGNNIGSKSVHWYQQPPGQAPVVVVYDDSDRPSGIPERFSGSNSGNTATLTISRVEAGDEAVYYCQVWDSSSDHVVFGGGTKLTVLGGGGSGGGGSGGGGSQLQLQESGPGLVKPSETLSLTCTVSGGSISSGSYFWGWIRQPPGKGLEWIGSIYYSGITYYNPTLKSRVTISVDTSKNQFSLKLSSVTAADTAVYYCARHDGAVAGLFDYWGQGTLVTVSSATRGSGGGGSGGGGSGFKIPIEELEDRVFVNCNTSITWVEGTVGTLLSDITRLDLGKRILDPRGIYRCNGTDIYKDKESTVQVHYRMCQSCVELDPATVAGIIVTDVIATLLLALGVFCFAGHETGRLSGAADTQALLRNDQVYQPLRDRDDAQYSHLGGNWARNKRAKRSGSGVKQTLNFDLLKLAGDVESNPGPSRGHMTEYKPTVRLATRDDVPRAVRTLAAAFADYPATRHTVDPDRHIERVTELQELFLTRVGLDIGKVWVADDGAAVAVWTTPESVEAGAVFAEIGPRMAELSGSRLAAQQQMEGLLAPHRPKEPAWFLATVGVSPDHQGKGLGSAVVLPGVEAAERAGVPAFLETSAPRNLPFYERLGFTVTADVEVPEGPRTWCMTRKPGA

SEQ ID NO: 18567 - skipped

SEQ ID NO: 18568 - protein, 657 aa, Artificial Sequence
  Synthetic Polypeptide
MALPVTALLLPLALLLHAARPSYVLTQPPSVSVAPGQTARITCGGNNIGSKSVHWYQQPPGQAPVVVVYDDSDRPSGIPERFSGSNSGNTATLTISRVEAGDEAVYYCQVWDSSSDHVVFGGGTKLTVLGGGGSGGGGSGGGGSQLQLQESGPGLVKPSETLSLTCTVSGGSISSGSYFWGWIRQPPGKGLEWIGSIYYSGITYYNPTLKSRVTISVDTSKNQFSLKLSSVTAADTAVYYCARHDGAVAGLFDYWGQGTLVTVSSATRGSGGGGSGGGGSGQSFGLLDPKLCYLLDGILFIYGVILTALFLRVKFSRSADAPAYQQGQNQLYNELNLGRREEYDVLDKRRGRDPEMGGKPQRRKNPQEGLYNELQKDKMAEAYSEIGMKGERRRGKGHDGLYQGLSTATKDTYDALHMQALPPRRAKRSGSGVKQTLNFDLLKLAGDVESNPGPSRGHMTEYKPTVRLATRDDVPRAVRTLAAAFADYPATRHTVDPDRHIERVTELQELFLTRVGLDIGKVWVADDGAAVAVWTTPESVEAGAVFAEIGPRMAELSGSRLAAQQQMEGLLAPHRPKEPAWFLATVGVSPDHQGKGLGSAVVLPGVEAAERAGVPAFLETSAPRNLPFYERLGFTVTADVEVPEGPRTWCMTRKPGA

SEQ ID NO: 18569-18581 - skipped (13 entries)

SEQ ID NO: 18582 - protein, 727 aa, Artificial Sequence
  Synthetic Polypeptide
MALPVTALLLPLALLLHAARPSYVLTQPPSVSVAPGQTARITCGGKNIGSKSVHWYQQPPGQAPVVVVYDDSDRPSGIPERFSGSNSGNTATLTISRVEAGDEAVYYCQVWDSSSDHVVFGGGTKLTVLGGGGSGGGGSGGGGSQLQLQESGPGLVKPSETLSLTCTVSGGSISSGSYFWGWIRQPPGKGLEWIGSIYYSGITYYNPSLKSRVTISVDTSKNQFSLKLSSVTAADTAVYYCARHDGAVAGLFDYWGQGTLVTVSSATREQKLISEEDLAKPTTTPAPRPPTPAPTIASQPLSLRPEACRPAAGGAVHTRGLDFACDIYIWAPLAGTCGVLLLSLVITLYCKRGRKKLLYIFKQPFMRPVQTTQEEDGCSCRFPEEEEGGCELRVKFSRSADAPAYQQGQNQLYNELNLGRREEYDVLDKRRGRDPEMGGKPRRKNPQEGLYNELQKDKMAEAYSEIGMKGERRRGKGHDGLYQGLSTATKDTYDALHMQALPPRSSGSGEGRGSLLTCGDVEENPGPHMTEYKPTVRLATRDDVPRAVRTLAAAFADYPATRHTVDPDRHIERVTELQELFLTRVGLDIGKVWVADDGAAVAVWTTPESVEAGAVFAEIGPRMAELSGSRLAAQQQMEGLLAPHRPKEPAWFLATVGVSPDHQGKGLGSAVVLPGVEAAERAGVPAFLETSAPRNLPFYERLGFTVTADVEVPEGPRTWCMTRKPGA

SEQ ID NO: 18583 - protein, 721 aa, Artificial Sequence
  Synthetic Polypeptide
MALPVTALLLPLALLLHAARPSYVLTQPPSVSVAPGQTARITCGGKNIGSKSVHWYQQPPGQAPVVVVYDDSDRPSGIPERFSGSNSGNTATLTISRVEAGDEAVYYCQVWDSSSDHVVFGGGTKLTVLGGGGSGGGGSGGGGSQLQLQESGPGLVKPSETLSLTCTVSGGSISSGSYFWGWIRQPPGKGLEWIGSIYYSGITYYNPSLKSRVTISVDTSKNQFSLKLSSVTAADTAVYYCARHDGAVAGLFDYWGQGTLVTVSSATREQKLISEEDLKIEVMYPPPYLDNEKSNGTIIHVKGKHLCPSPLFPGPSKPFWVLVVVGGVLACYSLLVTVAFIIFWVRSKRSRLLHSDYMNMTPRRPGPTRKHYQPYAPPRDFAAYRSRVKFSRSADAPAYQQGQNQLYNELNLGRREEYDVLDKRRGRDPEMGGKPRRKNPQEGLYNELQKDKMAEAYSEIGMKGERRRGKGHDGLYQGLSTATKDTYDALHMQALPPRSSGSGEGRGSLLTCGDVEENPGPHMTEYKPTVRLATRDDVPRAVRTLAAAFADYPATRHTVDPDRHIERVTELQELFLTRVGLDIGKVWVADDGAAVAVWTTPESVEAGAVFAEIGPRMAELSGSRLAAQQQMEGLLAPHRPKEPAWFLATVGVSPDHQGKGLGSAVVLPGVEAAERAGVPAFLETSAPRNLPFYERLGFTVTADVEVPEGPRTWCMTRKPGA

SEQ ID NO: 18584 - protein, 498 aa, Artificial Sequence
  Synthetic Polypeptide
MALPVTALLLPLALLLHAARPSYVLTQPPSVSVAPGQTARITCGGKNIGSKSVHWYQQPPGQAPVVVVYDDSDRPSGIPERFSGSNSGNTATLTISRVEAGDEAVYYCQVWDSSSDHVVFGGGTKLTVLGGGGSGGGGSGGGGSQLQLQESGPGLVKPSETLSLTCTVSGGSISSGSYFWGWIRQPPGKGLEWIGSIYYSGITYYNPSLKSRVTISVDTSKNQFSLKLSSVTAADTAVYYCARHDGAVAGLFDYWGQGTLVTVSSATREQKLISEEDLKIEVMYPPPYLDNEKSNGTIIHVKGKHLCPSPLFPGPSKPFWVLVVVGGVLACYSLLVTVAFIIFWVRSKRSRLLHSDYMNMTPRRPGPTRKHYQPYAPPRDFAAYRSRVKFSRSADAPAYQQGQNQLYNELNLGRREEYDVLDKRRGRDPEMGGKPRRKNPQEGLYNELQKDKMAEAYSEIGMKGERRRGKGHDGLYQGLSTATKDTYDALHMQALPPR

SEQ ID NO: 18585 - protein, 504 aa, Artificial Sequence
  Synthetic Polypeptide
MALPVTALLLPLALLLHAARPSYVLTQPPSVSVAPGQTARITCGGKNIGSKSVHWYQQPPGQAPVVVVYDDSDRPSGIPERFSGSNSGNTATLTISRVEAGDEAVYYCQVWDSSSDHVVFGGGTKLTVLGGGGSGGGGSGGGGSQLQLQESGPGLVKPSETLSLTCTVSGGSISSGSYFWGWIRQPPGKGLEWIGSIYYSGITYYNPSLKSRVTISVDTSKNQFSLKLSSVTAADTAVYYCARHDGAVAGLFDYWGQGTLVTVSSATREQKLISEEDLAKPTTTPAPRPPTPAPTIASQPLSLRPEACRPAAGGAVHTRGLDFACDIYIWAPLAGTCGVLLLSLVITLYCKRGRKKLLYIFKQPFMRPVQTTQEEDGCSCRFPEEEEGGCELRVKFSRSADAPAYQQGQNQLYNELNLGRREEYDVLDKRRGRDPEMGGKPRRKNPQEGLYNELQKDKMAEAYSEIGMKGERRRGKGHDGLYQGLSTATKDTYDALHMQALPPR

SEQ ID NO: 18586 - protein, 504 aa, Artificial Sequence
  Synthetic Polypeptide
MALPVTALLLPLALLLHAARPQLQLQESGPGLVKPSETLSLTCTVSGGSISSGSYFWGWIRQPPGKGLEWIGSIYYSGITYYNPSLKSRVTISVDTSKNQFSLKLSSVTAADTAVYYCARHDGAVAGLFDYWGQGTLVTVSSAGGGGSGGGGSGGGGSSYVLTQPPSVSVAPGQTARITCGGKNIGSKSVHWYQQPPGQAPVVVVYDDSDRPSGIPERFSGSNSGNTATLTISRVEAGDEAVYYCQVWDSSSDHVVFGGGTKLTVLTREQKLISEEDLAKPTTTPAPRPPTPAPTIASQPLSLRPEACRPAAGGAVHTRGLDFACDIYIWAPLAGTCGVLLLSLVITLYCKRGRKKLLYIFKQPFMRPVQTTQEEDGCSCRFPEEEEGGCELRVKFSRSADAPAYQQGQNQLYNELNLGRREEYDVLDKRRGRDPEMGGKPRRKNPQEGLYNELQKDKMAEAYSEIGMKGERRRGKGHDGLYQGLSTATKDTYDALHMQALPPR

SEQ ID NO: 18587 - protein, 917 aa, Artificial Sequence
  Synthetic Polypeptide
MALPVTALLLPLALLLHAARPSYVLTQPPSVSVAPGQTARITCGGKNIGSKSVHWYQQPPGQAPVVVVYDDSDRPSGIPERFSGSNSGNTATLTISRVEAGDEAVYYCQVWDSSSDHVVFGGGTKLTVLGGGGSGGGGSGGGGSQLQLQESGPGLVKPSETLSLTCTVSGGSISSGSYFWGWIRQPPGKGLEWIGSIYYSGITYYNPSLKSRVTISVDTSKNQFSLKLSSVTAADTAVYYCARHDGAVAGLFDYWGQGTLVTVSSATREQKLISEEDLAKPTTTPAPRPPTPAPTIASQPLSLRPEACRPAAGGAVHTRGLDFACDIYIWAPLAGTCGVLLLSLVITLYCGRARVKFSRSADAPAYQQGQNQLYNELNLGRREEYDVLDKRRGRDPEMGGKPRRKNPQEGLYNELQKDKMAEAYSEIGMKGERRRGKGHDGLYQGLSTATKDTYDALHMQALPPRSRGSGATNFSLLKQAGDVEENPGPGIHMATYEVLCEVARKLGTDDREVVLFLLNVFIPQPTLAQLIGALRALKEEGRLTFPLLAECLFRAGRRDLLRDLLHLDPRFLERHLAGTMSYFSPYQLTVLHVDGELCARDIRSLIFLSKDTIGSRSTPQTFLHWVYCMENLDLLGPTDVDALMSMLRSLSRVDLQRQVQTLMGLHLSGPSHSQHYRHTPLETDFYDYKDDDDKTSGSGEGRGSLLTCGDVEENPGPHMTEYKPTVRLATRDDVPRAVRTLAAAFADYPATRHTVDPDRHIERVTELQELFLTRVGLDIGKVWVADDGAAVAVWTTPESVEAGAVFAEIGPRMAELSGSRLAAQQQMEGLLAPHRPKEPAWFLATVGVSPDHQGKGLGSAVVLPGVEAAERAGVPAFLETSAPRNLPFYERLGFTVTADVEVPEGPRTWCMTRKPGA

SEQ ID NO: 18588 - protein, 857 aa, Artificial Sequence
  Synthetic Polypeptide
MALPVTALLLPLALLLHAARPSYVLTQPPSVSVAPGQTARITCGGKNIGSKSVHWYQQPPGQAPVVVVYDDSDRPSGIPERFSGSNSGNTATLTISRVEAGDEAVYYCQVWDSSSDHVVFGGGTKLTVLLEIQNPDPAVYQLRDSKSSDKSVCLFTDFDSQTNVSQSKDSDVYITDKCVLDMRSMDFKSNSAVAWSNKSDFACANAFNNSIIPEDTFFPSSDVPCDVKLVEKSFETDTNLNFQNLSVIGFRILLLKVAGFNLLMTLRLWSSRAKRSGSGVKQTLNFDLLKLAGDVESNPGPTSMDWIWRILFLVGAATGAHSFEQLQLQESGPGLVKPSETLSLTCTVSGGSISSGSYFWGWIRQPPGKGLEWIGSIYYSGITYYNPSLKSRVTISVDTSKNQFSLKLSSVTAADTAVYYCARHDGAVAGLFDYWGQGTLVTVSSATREDLKNVFPPEVAVFEPSKAEIAHTQKATLVCLATGFYPDHVELSWWVNGKEVHSGVCTDPQPLKEQPALNDSRYCLSSRLRVSATFWQNPRNHFRCQVQFYGLSENDEWTQDRAKPVTQIVSAEAWGRADCGITSASYHQGVLSATILYEILLGKATLYAVLVSALVLMAMVKRKDSRGRAKRSGSGATNFSLLKQAGDVEENPGPSRGHMTEYKPTVRLATRDDVPRAVRTLAAAFADYPATRHTVDPDRHIERVTELQELFLTRVGLDIGKVWVADDGAAVAVWTTPESVEAGAVFAEIGPRMAELSGSRLAAQQQMEGLLAPHRPKEPAWFLATVGVSPDHQGKGLGSAVVLPGVEAAERAGVPAFLETSAPRNLPFYERLGFTVTADVEVPEGPRTWCMTRKPGA

SEQ ID NO: 18589 - protein, 856 aa, Artificial Sequence
  Synthetic Polypeptide
MALPVTALLLPLALLLHAARPSYVLTQPPSVSVAPGQTARITCGGKNIGSKSVHWYQQPPGQAPVVVVYDDSDRPSGIPERFSGSNSGNTATLTISRVEAGDEAVYYCQVWDSSSDHVVFGGGTKLTVLLEDLKNVFPPEVAVFEPSKAEIAHTQKATLVCLATGFYPDHVELSWWVNGKEVHSGVCTDPQPLKEQPALNDSRYCLSSRLRVSATFWQNPRNHFRCQVQFYGLSENDEWTQDRAKPVTQIVSAEAWGRADCGITSASYHQGVLSATILYEILLGKATLYAVLVSALVLMAMVKRKDSRGRAKRSGSGATNFSLLKQAGDVEENPGPTSMDWIWRILFLVGAATGAHSFEQLQLQESGPGLVKPSETLSLTCTVSGGSISSGSYFWGWIRQPPGKGLEWIGSIYYSGITYYNPSLKSRVTISVDTSKNQFSLKLSSVTAADTAVYYCARHDGAVAGLFDYWGQGTLVTVSSATRIQNPDPAVYQLRDSKSSDKSVCLFTDFDSQTNVSQSKDSDVYITDKCVLDMRSMDFKSNSAVAWSNKSDFACANAFNNSIIPEDTFFPSSDVPCDVKLVEKSFETDTNLNFQNLSVIGFRILLLKVAGFNLLMTLRLWSSRAKRSGSGVKQTLNFDLLKLAGDVESNPGPSRGHMTEYKPTVRLATRDDVPRAVRTLAAAFADYPATRHTVDPDRHIERVTELQELFLTRVGLDIGKVWVADDGAAVAVWTTPESVEAGAVFAEIGPRMAELSGSRLAAQQQMEGLLAPHRPKEPAWFLATVGVSPDHQGKGLGSAVVLPGVEAAERAGVPAFLETSAPRNLPFYERLGFTVTADVEVPEGPRTWCMTRKPGA

SEQ ID NO: 18590 - protein, 623 aa, Artificial Sequence
  Synthetic Polypeptide
MALPVTALLLPLALLLHAARPSYVLTQPPSVSVAPGQTARITCGGKNIGSKSVHWYQQPPGQAPVVVVYDDSDRPSGIPERFSGSNSGNTATLTISRVEAGDEAVYYCQVWDSSSDHVVFGGGTKLTVLLEDLKNVFPPEVAVFEPSEAEISHTQKATLVCLATGFYPDHVELSWWVNGKEVHSGVCTDPQPLKEQPALNDSRYCLSSRLRVSATFWQNPRNHFRCQVQFYGLSENDEWTQDRAKPVTQIVSAEAWGRADCGFTSESYQQGVLSATILYEILLGKATLYAVLVSALVLMAMVKRKDSRGRAKRSGSGATNFSLLKQAGDVEENPGPTSMDWIWRILFLVGAATGAHSFEQLQLQESGPGLVKPSETLSLTCTVSGGSISSGSYFWGWIRQPPGKGLEWIGSIYYSGITYYNPSLKSRVTISVDTSKNQFSLKLSSVTAADTAVYYCARHDGAVAGLFDYWGQGTLVTVSSATRIQNPDPAVYQLRDSKSSDKSVCLFTDFDSQTNVSQSKDSDVYITDKCVLDMRSMDFKSNSAVAWSNKSDFACANAFNNSIIPEDTFFPSPESSCDVKLVEKSFETDTNLNFQNLSVIGFRILLLKVAGFNLLMTLRLWSS

SEQ ID NO: 18591 - protein, 848 aa, Artificial Sequence
  Synthetic Polypeptide
MALPVTALLLPLALLLHAARPSYVLTQPPSVSVAPGQTARITCGGKNIGSKSVHWYQQPPGQAPVVVVYDDSDRPSGIPERFSGSNSGNTATLTISRVEAGDEAVYYCQVWDSSSDHVVFGGGTKLTVLLEDLKNVFPPEVAVFEPSEAEISHTQKATLVCLATGFYPDHVELSWWVNGKEVHSGVCTDPQPLKEQPALNDSRYCLSSRLRVSATFWQNPRNHFRCQVQFYGLSENDEWTQDRAKPVTQIVSAEAWGRADCGFTSESYQQGVLSATILYEILLGKATLYAVLVSALVLMAMVKRKDSRGRAKRSGSGATNFSLLKQAGDVEENPGPTSMDWIWRILFLVGAATGAHSFEQLQLQESGPGLVKPSETLSLTCTVSGGSISSGSYFWGWIRQPPGKGLEWIGSIYYSGITYYNPSLKSRVTISVDTSKNQFSLKLSSVTAADTAVYYCARHDGAVAGLFDYWGQGTLVTVSSATRIQNPDPAVYQLRDSKSSDKSVCLFTDFDSQTNVSQSKDSDVYITDKCVLDMRSMDFKSNSAVAWSNKSDFACANAFNNSIIPEDTFFPSPESSCDVKLVEKSFETDTNLNFQNLSVIGFRILLLKVAGFNLLMTLRLWSSRAKRSGSGVKQTLNFDLLKLAGDVESNPGPSRGGIHTMATYEVLCEVARKLGTDDREVVLFLLNVFIPQPTLAQLIGALRALKEEGRLTFPLLAECLFRAGRRDLLRDLLHLDPRFLERHLAGTMSYFSPYQLTVLHVDGELCARDIRSLIFLSKDTIGSRSTPQTFLHWVYCMENLDLLGPTDVDALMSMLRSLSRVDLQRQVQTLMGLHLSGPSHSQHYRHTP

SEQ ID NO: 18592 - protein, 627 aa, Artificial Sequence
  Synthetic Polypeptide
MALPVTALLLPLALLLHAARPSYVLTQPPSVSVAPGQTARITCGGKNIGSKSVHWYQQPPGQAPVVVVYDDSDRPSGIPERFSGSNSGNTATLTISRVEAGDEAVYYCQVWDSSSDHVVFGGGTKLTVLLEIQNPDPAVYQLRDSKSSDKSVCLFTDFDSQTNVSQSKDSDVYITDKCVLDMRSMDFKSNSAVAWSNKSDFACANAFNNSIIPEDTFFPSPESSCDVKLVEKSFETDTNLNFQNLSVIGFRILLLKVAGFNLLMTLRLWSSRAKRSGSGVKQTLNFDLLKLAGDVESNPGPTSMDWIWRILFLVGAATGAHSFEQLQLQESGPGLVKPSETLSLTCTVSGGSISSGSYFWGWIRQPPGKGLEWIGSIYYSGITYYNPSLKSRVTISVDTSKNQFSLKLSSVTAADTAVYYCARHDGAVAGLFDYWGQGTLVTVSSATREDLKNVFPPEVAVFEPSEAEISHTQKATLVCLATGFYPDHVELSWWVNGKEVHSGVCTDPQPLKEQPALNDSRYCLSSRLRVSATFWQNPRNHFRCQVQFYGLSENDEWTQDRAKPVTQIVSAEAWGRADCGFTSESYQQGVLSATILYEILLGKATLYAVLVSALVLMAMVKRKDSRG

SEQ ID NO: 18593 - protein, 849 aa, Artificial Sequence
  Synthetic Polypeptide
MALPVTALLLPLALLLHAARPSYVLTQPPSVSVAPGQTARITCGGKNIGSKSVHWYQQPPGQAPVVVVYDDSDRPSGIPERFSGSNSGNTATLTISRVEAGDEAVYYCQVWDSSSDHVVFGGGTKLTVLLEIQNPDPAVYQLRDSKSSDKSVCLFTDFDSQTNVSQSKDSDVYITDKCVLDMRSMDFKSNSAVAWSNKSDFACANAFNNSIIPEDTFFPSPESSCDVKLVEKSFETDTNLNFQNLSVIGFRILLLKVAGFNLLMTLRLWSSRAKRSGSGVKQTLNFDLLKLAGDVESNPGPTSMDWIWRILFLVGAATGAHSFEQLQLQESGPGLVKPSETLSLTCTVSGGSISSGSYFWGWIRQPPGKGLEWIGSIYYSGITYYNPSLKSRVTISVDTSKNQFSLKLSSVTAADTAVYYCARHDGAVAGLFDYWGQGTLVTVSSATREDLKNVFPPEVAVFEPSEAEISHTQKATLVCLATGFYPDHVELSWWVNGKEVHSGVCTDPQPLKEQPALNDSRYCLSSRLRVSATFWQNPRNHFRCQVQFYGLSENDEWTQDRAKPVTQIVSAEAWGRADCGFTSESYQQGVLSATILYEILLGKATLYAVLVSALVLMAMVKRKDSRGRAKRSGSGATNFSLLKQAGDVEENPGPSRGGIHTMATYEVLCEVARKLGTDDREVVLFLLNVFIPQPTLAQLIGALRALKEEGRLTFPLLAECLFRAGRRDLLRDLLHLDPRFLERHLAGTMSYFSPYQLTVLHVDGELCARDIRSLIFLSKDTIGSRSTPQTFLHWVYCMENLDLLGPTDVDALMSMLRSLSRVDLQRQVQTLMGLHLSGPSHSQHYRHTP

SEQ ID NO: 18594 - protein, 901 aa, Artificial Sequence
  Synthetic Polypeptide
MALPVTALLLPLALLLHAARPLEGKPIPNPLLGLDSTGSGEDLKNVFPPEVAVFEPSKAEIAHTQKATLVCLATGFYPDHVELSWWVNGKEVHSGVCTDPQPLKEQPALNDSRYCLSSRLRVSATFWQNPRNHFRCQVQFYGLSENDEWTQDRAKPVTQIVSAEAWGRADCGITSASYHQGVLSATILYEILLGKATLYAVLVSALVLMAMVKRKDSRGRAKRSGSGATNFSLLKQAGDVEENPGPTSMALPVTALLLPLALLLHAARPSYVLTQPPSVSVAPGQTARITCGGKNIGSKSVHWYQQPPGQAPVVVVYDDSDRPSGIPERFSGSNSGNTATLTISRVEAGDEAVYYCQVWDSSSDHVVFGGGTKLTVLGGGGSGGGGSGGGGSQLQLQESGPGLVKPSETLSLTCTVSGGSISSGSYFWGWIRQPPGKGLEWIGSIYYSGITYYNPSLKSRVTISVDTSKNQFSLKLSSVTAADTAVYYCARHDGAVAGLFDYWGQGTLVTVSSATREQKLISEEDGSGIQNPDPAVYQLRDSKSSDKSVCLFTDFDSQTNVSQSKDSDVYITDKCVLDMRSMDFKSNSAVAWSNKSDFACANAFNNSIIPEDTFFPSSDVPCDVKLVEKSFETDTNLNFQNLSVIGFRILLLKVAGFNLLMTLRLWSSRAKRSGSGVKQTLNFDLLKLAGDVESNPGPSRGHMTEYKPTVRLATRDDVPRAVRTLAAAFADYPATRHTVDPDRHIERVTELQELFLTRVGLDIGKVWVADDGAAVAVWTTPESVEAGAVFAEIGPRMAELSGSRLAAQQQMEGLLAPHRPKEPAWFLATVGVSPDHQGKGLGSAVVLPGVEAAERAGVPAFLETSAPRNLPFYERLGFTVTADVEVPEGPRTWCMTRKPGA

SEQ ID NO: 18595 - protein, 902 aa, Artificial Sequence
  Synthetic Polypeptide
MALPVTALLLPLALLLHAARPLEQKLISEEDLGSGDRPDPAVYQLRDSKSSDKSVCLFTDFDSQTNVSQSKDSDVYITDKCVLDMRSMDFKSNSAVAWSNKSDFACANAFNNSIIPEDTFFPSPESSCDVKLVEKSFETDTNLNFQNLSVIGFRILLLKVAGFNLLMTLRLWSSSSRAKRSGSGVKQTLNFDLLKLAGDVESNPGPTSMALPVTALLLPLALLLHAARPSYVLTQPPSVSVAPGQTARITCGGKNIGSKSVHWYQQPPGQAPVVVVYDDSDRPSGIPERFSGSNSGNTATLTISRVEAGDEAVYYCQVWDSSSDHVVFGGGTKLTVLGGGGSGGGGSGGGGSQLQLQESGPGLVKPSETLSLTCTVSGGSISSGSYFWGWIRQPPGKGLEWIGSIYYSGITYYNPSLKSRVTISVDTSKNQFSLKLSSVTAADTAVYYCARHDGAVAGLFDYWGQGTLVTVSSATRGKPIPNPLLGLDSTGSGEDLKNVFPPEVAVFEPSEAEISHTQKATLVCLATGFYPDHVELSWWVNGKEVHSGVCTDPQPLKEQPALNDSRYCLSSRLRVSATFWQNPRNHFRCQVQFYGLSENDEWTQDRAKPVTQIVSAEAWGRADCGFTSESYQQGVLSATILYEILLGKATLYAVLVSALVLMAMVKRKDSRGRAKRSGSGATNFSLLKQAGDVEENPGPSRGHMTEYKPTVRLATRDDVPRAVRTLAAAFADYPATRHTVDPDRHIERVTELQELFLTRVGLDIGKVWVADDGAAVAVWTTPESVEAGAVFAEIGPRMAELSGSRLAAQQQMEGLLAPHRPKEPAWFLATVGVSPDHQGKGLGSAVVLPGVEAAERAGVPAFLETSAPRNLPFYERLGFTVTADVEVPEGPRTWCMTRKPGA

SEQ ID NO: 18596 - protein, 856 aa, Artificial Sequence
  Synthetic Polypeptide
MALPVTALLLPLALLLHAARPSYVLTQPPSVSVAPGQTARITCGGKNIGSKSVHWYQQPPGQAPVVVVYDDSDRPSGIPERFSGSNSGNTATLTISRVEAGDEAVYYCQVWDSSSDHVVFGGGTKLTVLLEDLKNVFPPEVAVFEPSEAEISHTQKATLVCLATGFYPDHVELSWWVNGKEVHSGVSTDPQPLKEQPALNDSRYCLSSRLRVSATFWQNPRNHFRCQVQFYGLSENDEWTQDRAKPVTQIVSAEAWGRADCGFTSESYQQGVLSATILYEILLGKATLYAVLVSALVLMAMVKRKDSRGRAKRSGSGATNFSLLKQAGDVEENPGPTSMDWIWRILFLVGAATGAHSFEQLQLQESGPGLVKPSETLSLTCTVSGGSISSGSYFWGWIRQPPGKGLEWIGSIYYSGITYYNPSLKSRVTISVDTSKNQFSLKLSSVTAADTAVYYCARHDGAVAGLFDYWGQGTLVTVSSATRIQNPDPAVYQLRDSKSSDKSVCLFTDFDSQTNVSQSKDSDVYITDKTVLDMRSMDFKSNSAVAWSNKSDFACANAFNNSIIPEDTFFPSPESSCDVKLVEKSFETDTNLNFQNLSVIGFRILLLKVAGFNLLMTLRLWSSRAKRSGSGVKQTLNFDLLKLAGDVESNPGPSRGHMTEYKPTVRLATRDDVPRAVRTLAAAFADYPATRHTVDPDRHIERVTELQELFLTRVGLDIGKVWVADDGAAVAVWTTPESVEAGAVFAEIGPRMAELSGSRLAAQQQMEGLLAPHRPKEPAWFLATVGVSPDHQGKGLGSAVVLPGVEAAERAGVPAFLETSAPRNLPFYERLGFTVTADVEVPEGPRTWCMTRKPGA

SEQ ID NO: 18597 - protein, 938 aa, Artificial Sequence
  Synthetic Polypeptide
MALPVTALLLPLALLLHAARPSYVLTQPPSVSVAPGQTARITCGGKNIGSKSVHWYQQPPGQAPVVVVYDDSDRPSGIPERFSGSNSGNTATLTISRVEAGDEAVYYCQVWDSSSDHVVFGGGTKLTVLLEDLKNVFPPEVAVFEPSEAEISHTQKATLVCLATGFYPDHVELSWWVNGKEVHSGVSTDPQPLKEQPALNDSRYCLSSRLRVSATFWQNPRNHFRCQVQFYGLSENDEWTQDRAKPVTQIVSAEAWGRADCGFTSESYQQGVLSATILYEILLGKATLYAVLVSALVLMAMVKRKDSRGRAKRSGSGATNFSLLKQAGDVEENPGPTSMDWIWRILFLVGAATGAHSFEQLQLQESGPGLVKPSETLSLTCTVSGGSISSGSYFWGWIRQPPGKGLEWIGSIYYSGITYYNPSLKSRVTISVDTSKNQFSLKLSSVTAADTAVYYCARHDGAVAGLFDYWGQGTLVTVSSATREQKLISEEDGSGTPFPSLAPPIMLLVDGKQQMVVVCLVLDVAPPGLDSPIWFSAGNGSALDAFTYGPSPATDGTWTNLAHLSLPSEELASWEPLVCHTGPGAEGHSRSTQPMHLSGEASTARTCPQEPLRGTPGGALWLGVLRLLLFKLLLFDLLLTCSCLCDPAGPLPSPATTTRLRALGSHRLHPATETGGREATSSPRPQPRDRRWGDTPPGRKPGSPVRAKRSGSGVKQTLNFDLLKLAGDVESNPGPSRGHMTEYKPTVRLATRDDVPRAVRTLAAAFADYPATRHTVDPDRHIERVTELQELFLTRVGLDIGKVWVADDGAAVAVWTTPESVEAGAVFAEIGPRMAELSGSRLAAQQQMEGLLAPHRPKEPAWFLATVGVSPDHQGKGLGSAVVLPGVEAAERAGVPAFLETSAPRNLPFYERLGFTVTADVEVPEGPRTWCMTRKPGA

SEQ ID NO: 18598 - protein, 956 aa, Artificial Sequence
  Synthetic Polypeptide
MALPVTALLLPLALLLHAARPLEDLKNVFPPEVAVFEPSEAEISHTQKATLVCLATGFYPDHVELSWWVNGKEVHSGVSTDPQPLKEQPALNDSRYCLSSRLRVSATFWQNPRNHFRCQVQFYGLSENDEWTQDRAKPVTQIVSAEAWGRADCGFTSESYQQGVLSATILYEILLGKATLYAVLVSALVLMAMVKRKDSRGRAKRSGSGATNFSLLKQAGDVEENPGPTSMALPVTALLLPLALLLHAARPSYVLTQPPSVSVAPGQTARITCGGKNIGSKSVHWYQQPPGQAPVVVVYDDSDRPSGIPERFSGSNSGNTATLTISRVEAGDEAVYYCQVWDSSSDHVVFGGGTKLTVLGGGGSGGGGSGGGGSQLQLQESGPGLVKPSETLSLTCTVSGGSISSGSYFWGWIRQPPGKGLEWIGSIYYSGITYYNPSLKSRVTISVDTSKNQFSLKLSSVTAADTAVYYCARHDGAVAGLFDYWGQGTLVTVSSATREQKLISEEDLGSGTPFPSLAPPIMLLVDGKQQMVVVCLVLDVAPPGLDSPIWFSAGNGSALDAFTYGPSPATDGTWTNLAHLSLPSEELASWEPLVCHTGPGAEGHSRSTQPMHLSGEASTARTCPQEPLRGTPGGALWLGVLRLLLFKLLLFDLLLTCSCLCDPAGPLPSPATTTRLRALGSHRLHPATETGGREATSSPRPQPRDRRWGDTPPGRKPGSPVRAKRSGSGVKQTLNFDLLKLAGDVESNPGPSRSRGHMTEYKPTVRLATRDDVPRAVRTLAAAFADYPATRHTVDPDRHIERVTELQELFLTRVGLDIGKVWVADDGAAVAVWTTPESVEAGAVFAEIGPRMAELSGSRLAAQQQMEGLLAPHRPKEPAWFLATVGVSPDHQGKGLGSAVVLPGVEAAERAGVPAFLETSAPRNLPFYERLGFTVTADVEVPEGPRTWCMTRKPGA

SEQ ID NO: 18599 - protein, 893 aa, Artificial Sequence
  Synthetic Polypeptide
MALPVTALLLPLALLLHAARPSYVLTQPPSVSVAPGQTARITCGGKNIGSKSVHWYQQPPGQAPVVVVYDDSDRPSGIPERFSGSNSGNTATLTISRVEAGDEAVYYCQVWDSSSDHVVFGGGTKLTVLLEGKPIPNPLLGLDSTGSGDKQLDADVSPKPTIFLPSIAETKLQKAGTYLCLLEKFFPDVIKIHWQEKKSNTILGSQEGNTMKTNDTYMKFSWLTVPEKSLDKEHRCIVRHENNKNGVDQEIIFPPIKTDVITMDPKDNCSKDANDTLLLQLTNTSAYYMYLLLLLKSVVYFAIITCCLLRRTAFCCNGEKSRAKRSGSGATNFSLLKQAGDVEENPGPTSMDWIWRILFLVGAATGAHSFEQLQLQESGPGLVKPSETLSLTCTVSGGSISSGSYFWGWIRQPPGKGLEWIGSIYYSGITYYNPSLKSRVTISVDTSKNQFSLKLSSVTAADTAVYYCARHDGAVAGLFDYWGQGTLVTVSSATREQKLISEEDGSGSQPHTKPSVFVMKNGTNVACLVKEFYPKDIRINLVSSKKITEFDPAIVISPSGKYNAVKLGKYEDSNSVTCSVQHDNKTVHSTDFEVKTDSTDHVKPKETENTKQPSKSCHKPKAIVHTEKVNMMSLTVLGLRMLFAKTVAVNFLLTAKLFFLRAKRSGSGVKQTLNFDLLKLAGDVESNPGPSRGHMTEYKPTVRLATRDDVPRAVRTLAAAFADYPATRHTVDPDRHIERVTELQELFLTRVGLDIGKVWVADDGAAVAVWTTPESVEAGAVFAEIGPRMAELSGSRLAAQQQMEGLLAPHRPKEPAWFLATVGVSPDHQGKGLGSAVVLPGVEAAERAGVPAFLETSAPRNLPFYERLGFTVTADVEVPEGPRTWCMTRKPGA

SEQ ID NO: 18600 - protein, 631 aa, Artificial Sequence
  Synthetic Polypeptide
MALPVTALLLPLALLLHAARPSYVLTQPPSVSVAPGQTARITCGGKNIGSKSVHWYQQPPGQAPVVVVYDDSDRPSGIPERFSGSNSGNTATLTISRVEAGDEAVYYCQVWDSSSDHVVFGGGTKLTVLLESQPHTKPSVFVMKNGTNVACLVKEFYPKDIRINLVSSKKITEFDPAIVISPSGKYNAVKLGKYEDSNSVTCSVQHDNKTVHSTDFEVKTDSTDHVKPKETENTKQPSKSCHKPKAIVHTEKVNMMSLTVLGLRMLFAKTVAVNFLLTAKLFFLRAKRSGSGATNFSLLKQAGDVEENPGPTSMDWIWRILFLVGAATGAHSFEQLQLQESGPGLVKPSETLSLTCTVSGGSISSGSYFWGWIRQPPGKGLEWIGSIYYSGITYYNPSLKSRVTISVDTSKNQFSLKLSSVTAADTAVYYCARHDGAVAGLFDYWGQGTLVTVSSATRDKQLDADVSPKPTIFLPSIAETKLQKAGTYLCLLEKFFPDVIKIHWQEKKSNTILGSQEGNTMKTNDTYMKFSWLTVPEKSLDKEHRCIVRHENNKNGVDQEIIFPPIKTDVITMDPKDNCSKDANDTLLLQLTNTSAYYMYLLLLLKSVVYFAIITCCLLRRTAFCCNGEKS

SEQ ID NO: 18601 - protein, 908 aa, Artificial Sequence
  Synthetic Polypeptide
MALPVTALLLPLALLLHAARPLEGKPIPNPLLGLDSTGSGDKQLDADVSPKPTIFLPSIAETKLQKAGTYLCLLEKFFPDVIKIHWQEKKSNTILGSQEGNTMKTNDTYMKFSWLTVPEKSLDKEHRCIVRHENNKNGVDQEIIFPPIKTDVITMDPKDNCSKDANDTLLLQLTNTSAYYMYLLLLLKSVVYFAIITCCLLRRTAFCCNGEKSRAKRSGSGATNFSLLKQAGDVEENPGPTSMALPVTALLLPLALLLHAARPSYVLTQPPSVSVAPGQTARITCGGKNIGSKSVHWYQQPPGQAPVVVVYDDSDRPSGIPERFSGSNSGNTATLTISRVEAGDEAVYYCQVWDSSSDHVVFGGGTKLTVLGGGGSGGGGSGGGGSQLQLQESGPGLVKPSETLSLTCTVSGGSISSGSYFWGWIRQPPGKGLEWIGSIYYSGITYYNPSLKSRVTISVDTSKNQFSLKLSSVTAADTAVYYCARHDGAVAGLFDYWGQGTLVTVSSATREQKLISEEDGSGSQPHTKPSVFVMKNGTNVACLVKEFYPKDIRINLVSSKKITEFDPAIVISPSGKYNAVKLGKYEDSNSVTCSVQHDNKTVHSTDFEVKTDSTDHVKPKETENTKQPSKSCHKPKAIVHTEKVNMMSLTVLGLRMLFAKTVAVNFLLTAKLFFLRAKRSGSGVKQTLNFDLLKLAGDVESNPGPSRGHMTEYKPTVRLATRDDVPRAVRTLAAAFADYPATRHTVDPDRHIERVTELQELFLTRVGLDIGKVWVADDGAAVAVWTTPESVEAGAVFAEIGPRMAELSGSRLAAQQQMEGLLAPHRPKEPAWFLATVGVSPDHQGKGLGSAVVLPGVEAAERAGVPAFLETSAPRNLPFYERLGFTVTADVEVPEGPRTWCMTRKPGA

SEQ ID NO: 18602 - protein, 1033 aa, Artificial Sequence
  Synthetic Polypeptide
MALPVTALLLPLALLLHAARPSYVLTQPPSVSVAPGQTARITCGGKNIGSKSVHWYQQPPGQAPVVVVYDDSDRPSGIPERFSGSNSGNTATLTISRVEAGDEAVYYCQVWDSSSDHVVFGGGTKLTVLGQPKANPTVTLFPPSSEELQANKATLVCLISDFYPGAVTVAWKADGSPVKAGVETTKPSKQSNNKYAASSYLSLTPEQWKSHRSYSCQVTHEGSTVEKTVAPTECSGSQSFGLLDPKLCYLLDGILFIYGVILTALFLRVKFSRSADAPAYQQGQNQLYNELNLGRREEYDVLDKRRGRDPEMGGKPQRRKNPQEGLYNELQKDKMAEAYSEIGMKGERRRGKGHDGLYQGLSTATKDTYDALHMQALPPRRAKRSGSGATNFSLLKQAGDVEENPGPTSMDWIWRILFLVGAATGAHSFEQLQLQESGPGLVKPSETLSLTCTVSGGSISSGSYFWGWIRQPPGKGLEWIGSIYYSGITYYNPSLKSRVTISVDTSKNQFSLKLSSVTAADTAVYYCARHDGAVAGLFDYWGQGTLVTVSSAASTKGPSVFPLAPSSKSTSGGTAALGCLVKDYFPEPVTVSWNSGALTSGVHTFPAVLQSSGLYSLSSVVTVPSSSLGTQTYICNVNHKPSNTKVDKRVEPKSCGTQSFGLLDPKLCYLLDGILFIYGVILTALFLRVKFSRSADAPAYQQGQNQLYNELNLGRREEYDVLDKRRGRDPEMGGKPQRRKNPQEGLYNELQKDKMAEAYSEIGMKGERRRGKGHDGLYQGLSTATKDTYDALHMQALPPRRAKRSGSGVKQTLNFDLLKLAGDVESNPGPSRGHMTEYKPTVRLATRDDVPRAVRTLAAAFADYPATRHTVDPDRHIERVTELQELFLTRVGLDIGKVWVADDGAAVAVWTTPESVEAGAVFAEIGPRMAELSGSRLAAQQQMEGLLAPHRPKEPAWFLATVGVSPDHQGKGLGSAVVLPGVEAAERAGVPAFLETSAPRNLPFYERLGFTVTADVEVPEGPRTWCMTRKPGA

SEQ ID NO: 18603 - protein, 819 aa, Artificial Sequence
  Synthetic Polypeptide
MALPVTALLLPLALLLHAARPSYVLTQPPSVSVAPGQTARITCGGKNIGSKSVHWYQQPPGQAPVVVVYDDSDRPSGIPERFSGSNSGNTATLTISRVEAGDEAVYYCQVWDSSSDHVVFGGGTKLTVLLEDLKNVFPPEVAVFEPSEAEISHTQKATLVCLATGFYPDHVELSWWVNGKEVHSGVSTDPQPLKEQPALNDSRYCLSSRLRVSATFWQNPRNHFRCQVQFYGLSENDEWTQDRAKPVTQIVSAEAWGRADCGSQSFGLLDPKLCYLLDGILFIYGVILTALFLRVKFSRSADAPAYQQGQNQLYNELNLGRREEYDVLDKRRGRDPEMGGKPQRRKNPQEGLYNELQKDKMAEAYSEIGMKGERRRGKGHDGLYQGLSTATKDTYDALHMQALPPRRAKRSGSGATNFSLLKQAGDVEENPGPTSMDWIWRILFLVGAATGAHSFEQLQLQESGPGLVKPSETLSLTCTVSGGSISSGSYFWGWIRQPPGKGLEWIGSIYYSGITYYNPSLKSRVTISVDTSKNQFSLKLSSVTAADTAVYYCARHDGAVAGLFDYWGQGTLVTVSSATRIQNPDPAVYQLRDSKSSDKSVCLFTDFDSQTNVSQSKDSDVYITDKTVLDMRSMDFKSNSAVAWSNKSDFACANAFNNSIIPEDTFFPSPESSCGTQSFGLLDPKLCYLLDGILFIYGVILTALFLRVKFSRSADAPAYQQGQNQLYNELNLGRREEYDVLDKRRGRDPEMGGKPQRRKNPQEGLYNELQKDKMAEAYSEIGMKGERRRGKGHDGLYQGLSTATKDTYDALHMQALPPR

SEQ ID NO: 18604 - protein, 819 aa, Artificial Sequence
  Synthetic Polypeptide
MALPVTALLLPLALLLHAARPSYVLTQPPSVSVAPGQTARITCGGKNIGSKSVHWYQQPPGQAPVVVVYDDSDRPSGIPERFSGSNSGNTATLTISRVEAGDEAVYYCQVWDSSSDHVVFGGGTKLTVLLEDLKNVFPPEVAVFEPSKAEIAHTQKATLVCLATGFYPDHVELSWWVNGKEVHSGVCTDPQPLKEQPALNDSRYCLSSRLRVSATFWQNPRNHFRCQVQFYGLSENDEWTQDRAKPVTQIVSAEAWGRADCGSQSFGLLDPKLCYLLDGILFIYGVILTALFLRVKFSRSADAPAYQQGQNQLYNELNLGRREEYDVLDKRRGRDPEMGGKPQRRKNPQEGLYNELQKDKMAEAYSEIGMKGERRRGKGHDGLYQGLSTATKDTYDALHMQALPPRRAKRSGSGATNFSLLKQAGDVEENPGPTSMDWIWRILFLVGAATGAHSFEQLQLQESGPGLVKPSETLSLTCTVSGGSISSGSYFWGWIRQPPGKGLEWIGSIYYSGITYYNPSLKSRVTISVDTSKNQFSLKLSSVTAADTAVYYCARHDGAVAGLFDYWGQGTLVTVSSATRIQNPDPAVYQLRDSKSSDKSVCLFTDFDSQTNVSQSKDSDVYITDKCVLDMRSMDFKSNSAVAWSNKSDFACANAFNNSIIPEDTFFPSSDVPCGTQSFGLLDPKLCYLLDGILFIYGVILTALFLRVKFSRSADAPAYQQGQNQLYNELNLGRREEYDVLDKRRGRDPEMGGKPQRRKNPQEGLYNELQKDKMAEAYSEIGMKGERRRGKGHDGLYQGLSTATKDTYDALHMQALPPR

SEQ ID NO: 18605 - protein, 890 aa, Artificial Sequence
  Synthetic Polypeptide
MALPVTALLLPLALLLHAARPSYVLTQPPSVSVAPGQTARITCGGKNIGSKSVHWYQQPPGQAPVVVVYDDSDRPSGIPERFSGSNSGNTATLTISRVEAGDEAVYYCQVWDSSSDHVVFGGGTKLTVLLEGKPIPNPLLGLDSTGSGEDLKNVFPPEVAVFEPSEAEISHTQKATLVCLATGFYPDHVELSWWVNGKEVHSGVSTDPQPLKEQPALNDSRYCLSSRLRVSATFWQNPRNHFRCQVQFYGLSENDEWTQDRAKPVTQIVSAEAWGRADCGSQSFGLLDPKLCYLLDGILFIYGVILTALFLRVKFSRSADAPAYQQGQNQLYNELNLGRREEYDVLDKRRGRDPEMGGKPQRRKNPQEGLYNELQKDKMAEAYSEIGMKGERRRGKGHDGLYQGLSTATKDTYDALHMQALPPRRAKRSGSGATNFSLLKQAGDVEENPGPTSMDWIWRILFLVGAATGAHSFEQLQLQESGPGLVKPSETLSLTCTVSGGSISSGSYFWGWIRQPPGKGLEWIGSIYYSGITYYNPSLKSRVTISVDTSKNQFSLKLSSVTAADTAVYYCARHDGAVAGLFDYWGQGTLVTVSSATREQKLISEEDGSGIQNPDPAVYQLRDSKSSDKSVCLFTDFDSQTNVSQSKDSDVYITDKTVLDMRSMDFKSNSAVAWSNKSDFACANAFNNSIIPEDTFFPSPESSCGTQSFGLLDPKLCYLLDGILFIYGVILTALFLRSKRSRLLHSDYMNMTPRRPGPTRKHYQPYAPPRDFAAYRSRVKFSRSADAPAYQQGQNQLYNELNLGRREEYDVLDKRRGRDPEMGGKPQRRKNPQEGLYNELQKDKMAEAYSEIGMKGERRRGKGHDGLYQGLSTATKDTYDALHMQALPPR

SEQ ID NO: 18606 - protein, 931 aa, Artificial Sequence
  Synthetic Polypeptide
MALPVTALLLPLALLLHAARPSYVLTQPPSVSVAPGQTARITCGGKNIGSKSVHWYQQPPGQAPVVVVYDDSDRPSGIPERFSGSNSGNTATLTISRVEAGDEAVYYCQVWDSSSDHVVFGGGTKLTVLLEGKPIPNPLLGLDSTGSGEDLKNVFPPEVAVFEPSEAEISHTQKATLVCLATGFYPDHVELSWWVNGKEVHSGVSTDPQPLKEQPALNDSRYCLSSRLRVSATFWQNPRNHFRCQVQFYGLSENDEWTQDRAKPVTQIVSAEAWGRADCGSQSFGLLDPKLCYLLDGILFIYGVILTALFLRSKRSRLLHSDYMNMTPRRPGPTRKHYQPYAPPRDFAAYRSRVKFSRSADAPAYQQGQNQLYNELNLGRREEYDVLDKRRGRDPEMGGKPQRRKNPQEGLYNELQKDKMAEAYSEIGMKGERRRGKGHDGLYQGLSTATKDTYDALHMQALPPRRAKRSGSGATNFSLLKQAGDVEENPGPTSMDWIWRILFLVGAATGAHSFEQLQLQESGPGLVKPSETLSLTCTVSGGSISSGSYFWGWIRQPPGKGLEWIGSIYYSGITYYNPSLKSRVTISVDTSKNQFSLKLSSVTAADTAVYYCARHDGAVAGLFDYWGQGTLVTVSSATREQKLISEEDGSGIQNPDPAVYQLRDSKSSDKSVCLFTDFDSQTNVSQSKDSDVYITDKTVLDMRSMDFKSNSAVAWSNKSDFACANAFNNSIIPEDTFFPSPESSCGTQSFGLLDPKLCYLLDGILFIYGVILTALFLRSKRSRLLHSDYMNMTPRRPGPTRKHYQPYAPPRDFAAYRSRVKFSRSADAPAYQQGQNQLYNELNLGRREEYDVLDKRRGRDPEMGGKPQRRKNPQEGLYNELQKDKMAEAYSEIGMKGERRRGKGHDGLYQGLSTATKDTYDALHMQALPPR

SEQ ID NO: 18607 - protein, 892 aa, Artificial Sequence
  Synthetic Polypeptide
MALPVTALLLPLALLLHAARPSYVLTQPPSVSVAPGQTARITCGGKNIGSKSVHWYQQPPGQAPVVVVYDDSDRPSGIPERFSGSNSGNTATLTISRVEAGDEAVYYCQVWDSSSDHVVFGGGTKLTVLLEGKPIPNPLLGLDSTGSGEDLKNVFPPEVAVFEPSEAEISHTQKATLVCLATGFYPDHVELSWWVNGKEVHSGVSTDPQPLKEQPALNDSRYCLSSRLRVSATFWQNPRNHFRCQVQFYGLSENDEWTQDRAKPVTQIVSAEAWGRADCGSQSFGLLDPKLCYLLDGILFIYGVILTALFLRVKFSRSADAPAYQQGQNQLYNELNLGRREEYDVLDKRRGRDPEMGGKPQRRKNPQEGLYNELQKDKMAEAYSEIGMKGERRRGKGHDGLYQGLSTATKDTYDALHMQALPPRRAKRSGSGATNFSLLKQAGDVEENPGPTSMDWIWRILFLVGAATGAHSFEQLQLQESGPGLVKPSETLSLTCTVSGGSISSGSYFWGWIRQPPGKGLEWIGSIYYSGITYYNPSLKSRVTISVDTSKNQFSLKLSSVTAADTAVYYCARHDGAVAGLFDYWGQGTLVTVSSATREQKLISEEDLGSGIQNPDPAVYQLRDSKSSDKSVCLFTDFDSQTNVSQSKDSDVYITDKTVLDMRSMDFKSNSAVAWSNKSDFACANAFNNSIIPEDTFFPSPESSCGTQSFGLLDPKLCYLLDGILFIYGVILTALFLKRGRKKLLYIFKQPFMRPVQTTQEEDGCSCRFPEEEEGGCELRVKFSRSADAPAYQQGQNQLYNELNLGRREEYDVLDKRRGRDPEMGGKPQRRKNPQEGLYNELQKDKMAEAYSEIGMKGERRRGKGHDGLYQGLSTATKDTYDALHMQALPPR

SEQ ID NO: 18608 - protein, 934 aa, Artificial Sequence
  Synthetic Polypeptide
MALPVTALLLPLALLLHAARPSYVLTQPPSVSVAPGQTARITCGGKNIGSKSVHWYQQPPGQAPVVVVYDDSDRPSGIPERFSGSNSGNTATLTISRVEAGDEAVYYCQVWDSSSDHVVFGGGTKLTVLLEGKPIPNPLLGLDSTGSGEDLKNVFPPEVAVFEPSEAEISHTQKATLVCLATGFYPDHVELSWWVNGKEVHSGVSTDPQPLKEQPALNDSRYCLSSRLRVSATFWQNPRNHFRCQVQFYGLSENDEWTQDRAKPVTQIVSAEAWGRADCGSQSFGLLDPKLCYLLDGILFIYGVILTALFLKRGRKKLLYIFKQPFMRPVQTTQEEDGCSCRFPEEEEGGCELRVKFSRSADAPAYQQGQNQLYNELNLGRREEYDVLDKRRGRDPEMGGKPQRRKNPQEGLYNELQKDKMAEAYSEIGMKGERRRGKGHDGLYQGLSTATKDTYDALHMQALPPRRAKRSGSGATNFSLLKQAGDVEENPGPTSMDWIWRILFLVGAATGAHSFEQLQLQESGPGLVKPSETLSLTCTVSGGSISSGSYFWGWIRQPPGKGLEWIGSIYYSGITYYNPSLKSRVTISVDTSKNQFSLKLSSVTAADTAVYYCARHDGAVAGLFDYWGQGTLVTVSSATREQKLISEEDLGSGIQNPDPAVYQLRDSKSSDKSVCLFTDFDSQTNVSQSKDSDVYITDKTVLDMRSMDFKSNSAVAWSNKSDFACANAFNNSIIPEDTFFPSPESSCGTQSFGLLDPKLCYLLDGILFIYGVILTALFLKRGRKKLLYIFKQPFMRPVQTTQEEDGCSCRFPEEEEGGCELRVKFSRSADAPAYQQGQNQLYNELNLGRREEYDVLDKRRGRDPEMGGKPQRRKNPQEGLYNELQKDKMAEAYSEIGMKGERRRGKGHDGLYQGLSTATKDTYDALHMQALPPR

SEQ ID NO: 18609 - protein, 824 aa, Artificial Sequence
  Synthetic Polypeptide
MALPVTALLLPLALLLHAARPSYVLTQPPSVSVAPGQTARITCGGKNIGSKSVHWYQQPPGQAPVVVVYDDSDRPSGIPERFSGSNSGNTATLTISRVEAGDEAVYYCQVWDSSSDHVVFGGGTKLTVLLEQSFGLLDPKLCYLLDGILFIYGVILTALFLRVKFSRSADAPAYQQGQNQLYNELNLGRREEYDVLDKRRGRDPEMGGKPQRRKNPQEGLYNELQKDKMAEAYSEIGMKGERRRGKGHDGLYQGLSTATKDTYDALHMQALPPRRAKRSGSGATNFSLLKQAGDVEENPGPTSMDWIWRILFLVGAATGAHSFEQLQLQESGPGLVKPSETLSLTCTVSGGSISSGSYFWGWIRQPPGKGLEWIGSIYYSGITYYNPSLKSRVTISVDTSKNQFSLKLSSVTAADTAVYYCARHDGAVAGLFDYWGQGTLVTVSSATRQSFGLLDPKLCYLLDGILFIYGVILTALFLRVKFSRSADAPAYQQGQNQLYNELNLGRREEYDVLDKRRGRDPEMGGKPQRRKNPQEGLYNELQKDKMAEAYSEIGMKGERRRGKGHDGLYQGLSTATKDTYDALHMQALPPRRAKRSGSGVKQTLNFDLLKLAGDVESNPGPSRGHMTEYKPTVRLATRDDVPRAVRTLAAAFADYPATRHTVDPDRHIERVTELQELFLTRVGLDIGKVWVADDGAAVAVWTTPESVEAGAVFAEIGPRMAELSGSRLAAQQQMEGLLAPHRPKEPAWFLATVGVSPDHQGKGLGSAVVLPGVEAAERAGVPAFLETSAPRNLPFYERLGFTVTADVEVPEGPRTWCMTRKPGA

SEQ ID NO: 18610 - protein, 649 aa, Artificial Sequence
  Synthetic Polypeptide
MALPVTALLLPLALLLHAARPSYVLTQPPSVSVAPGQTARITCGGKNIGSKSVHWYQQPPGQAPVVVVYDDSDRPSGIPERFSGSNSGNTATLTISRVEAGDEAVYYCQVWDSSSDHVVFGGGTKLTVLLEGQPKANPTVTLFPPSSEELQANKATLVCLISDFYPGAVTVAWKADGSPVKAGVETTKPSKQSNNKYAASSYLSLTPEQWKSHRSYSCQVTHEGSTVEKTVAPTECSPIKTDVITMDPKDNCSKDANDTLLLQLTNTSAYYMYLLLLLKSVVYFAIITCCLLRRTAFCCNGEKSRAKRSGSGATNFSLLKQAGDVEENPGPTSMDWIWRILFLVGAATGAHSFEQLQLQESGPGLVKPSETLSLTCTVSGGSISSGSYFWGWIRQPPGKGLEWIGSIYYSGITYYNPSLKSRVTISVDTSKNQFSLKLSSVTAADTAVYYCARHDGAVAGLFDYWGQGTLVTVSSATRASTKGPSVFPLAPSSKSTSGGTAALGCLVKDYFPEPVTVSWNSGALTSGVHTFPAVLQSSGLYSLSSVVTVPSSSLGTQTYICNVNHKPSNTKVDKRVEPKSCEVKTDSTDHVKPKETENTKQPSKSCHKPKAIVHTEKVNMMSLTVLGLRMLFAKTVAVNFLLTAKLFFL

SEQ ID NO: 18611 - protein, 627 aa, Artificial Sequence
  Synthetic Polypeptide
MALPVTALLLPLALLLHAARPSYVLTQPPSVSVAPGQTARITCGGKNIGSKSVHWYQQPPGQAPVVVVYDDSDRPSGIPERFSGSNSGNTATLTISRVEAGDEAVYYCQVWDSSSDHVVFGGGTKLTVLLEGQPKANPTVTLFPPSSEELQANKATLVCLISDFYPGAVTVAWKADGSPVKAGVETTKPSKQSNNKYAASSYLSLTPEQWKSHRSYSCQVTHEGSTVEKTVAPTECSGRADCGITSASYHQGVLSATILYEILLGKATLYAVLVSALVLMAMVKRKDSRGRAKRSGSGATNFSLLKQAGDVEENPGPTSMDWIWRILFLVGAATGAHSFEQLQLQESGPGLVKPSETLSLTCTVSGGSISSGSYFWGWIRQPPGKGLEWIGSIYYSGITYYNPSLKSRVTISVDTSKNQFSLKLSSVTAADTAVYYCARHDGAVAGLFDYWGQGTLVTVSSATRASTKGPSVFPLAPSSKSTSGGTAALGCLVKDYFPEPVTVSWNSGALTSGVHTFPAVLQSSGLYSLSSVVTVPSSSLGTQTYICNVNHKPSNTKVDKRVEPKSCIPEDTFFPSSDVPCDVKLVEKSFETDTNLNFQNLSVIGFRILLLKVAGFNLLMTLRLWSS

SEQ ID NO: 18612 - protein, 627 aa, Artificial Sequence
  Synthetic Polypeptide
MALPVTALLLPLALLLHAARPSYVLTQPPSVSVAPGQTARITCGGKNIGSKSVHWYQQPPGQAPVVVVYDDSDRPSGIPERFSGSNSGNTATLTISRVEAGDEAVYYCQVWDSSSDHVVFGGGTKLTVLLEGQPKANPTVTLFPPSSEELQANKATLVCLISDFYPGAVTVAWKADGSPVKAGVETTKPSKQSNNKYAASSYLSLTPEQWKSHRSYSCQVTHEGSTVEKTVAPTECSGRADCGFTSESYQQGVLSATILYEILLGKATLYAVLVSALVLMAMVKRKDSRGRAKRSGSGATNFSLLKQAGDVEENPGPTSMDWIWRILFLVGAATGAHSFEQLQLQESGPGLVKPSETLSLTCTVSGGSISSGSYFWGWIRQPPGKGLEWIGSIYYSGITYYNPSLKSRVTISVDTSKNQFSLKLSSVTAADTAVYYCARHDGAVAGLFDYWGQGTLVTVSSATRASTKGPSVFPLAPSSKSTSGGTAALGCLVKDYFPEPVTVSWNSGALTSGVHTFPAVLQSSGLYSLSSVVTVPSSSLGTQTYICNVNHKPSNTKVDKRVEPKSCIPEDTFFPSPESSCDVKLVEKSFETDTNLNFQNLSVIGFRILLLKVAGFNLLMTLRLWSS

SEQ ID NO: 18613 - protein, 453 aa, Artificial Sequence
  Synthetic Polypeptide
MALPVTALLLPLALLLHAARPSYVLTQPPSVSVAPGQTARITCGGKNIGSKSVHWYQQPPGQAPVVVVYDDSDRPSGIPERFSGSNSGNTATLTISRVEAGDEAVYYCQVWDSSSDHVVFGGGTKLTVLGGGGSGGGGSGGGGSQLQLQESGPGLVKPSETLSLTCTVSGGSISSGSYFWGWIRQPPGKGLEWIGSIYYSGITYYNPSLKSRVTISVDTSKNQFSLKLSSVTAADTAVYYCARHDGAVAGLFDYWGQGTLVTVSSATRDGNEEMGGITQTPYKVSISGTTVILTCPQYPGSEILWQHNDKNIGGDEDDKNIGSDEDHLSLKEFSELEQSGYYVCYPRGSKPEDANFYLYLRARVCENCMEMDVMSVATIVIVDICITGGLLLLVYYWSKNRKAKAKPVTRGAGAGGRQRGQNKERPPPVPNPDYEPIRKGQRDLYSGLNQRRI

SEQ ID NO: 18614 - protein, 418 aa, Artificial Sequence
  Synthetic Polypeptide
MALPVTALLLPLALLLHAARPSYVLTQPPSVSVAPGQTARITCGGKNIGSKSVHWYQQPPGQAPVVVVYDDSDRPSGIPERFSGSNSGNTATLTISRVEAGDEAVYYCQVWDSSSDHVVFGGGTKLTVLGGGGSGGGGSGGGGSQLQLQESGPGLVKPSETLSLTCTVSGGSISSGSYFWGWIRQPPGKGLEWIGSIYYSGITYYNPSLKSRVTISVDTSKNQFSLKLSSVTAADTAVYYCARHDGAVAGLFDYWGQGTLVTVSSATRFKIPIEELEDRVFVNCNTSITWVEGTVGTLLSDITRLDLGKRILDPRGIYRCNGTDIYKDKESTVQVHYRMCQSCVELDPATVAGIIVTDVIATLLLALGVFCFAGHETGRLSGAADTQALLRNDQVYQPLRDRDDAQYSHLGGNWARNK

SEQ ID NO: 18615 - protein, 428 aa, Artificial Sequence
  Synthetic Polypeptide
MALPVTALLLPLALLLHAARPSYVLTQPPSVSVAPGQTARITCGGKNIGSKSVHWYQQPPGQAPVVVVYDDSDRPSGIPERFSGSNSGNTATLTISRVEAGDEAVYYCQVWDSSSDHVVFGGGTKLTVLGGGGSGGGGSGGGGSQLQLQESGPGLVKPSETLSLTCTVSGGSISSGSYFWGWIRQPPGKGLEWIGSIYYSGITYYNPSLKSRVTISVDTSKNQFSLKLSSVTAADTAVYYCARHDGAVAGLFDYWGQGTLVTVSSATRQSIKGNHLVKVYDYQEDGSVLLTCDAEAKNITWFKDGKMIGFLTEDKKKWNLGSNAKDPRGMYQCKGSQNKSKPLQVYYRMCQNCIELNAATISGFLFAEIVSIFVLAVGVYFIAGQDGVRQSRASDKQTLLPNDQLYQPLKDREDDQYSHLQGNQLRRN

SEQ ID NO: 18616 - protein, 411 aa, Artificial Sequence
  Synthetic Polypeptide
MALPVTALLLPLALLLHAARPSYVLTQPPSVSVAPGQTARITCGGKNIGSKSVHWYQQPPGQAPVVVVYDDSDRPSGIPERFSGSNSGNTATLTISRVEAGDEAVYYCQVWDSSSDHVVFGGGTKLTVLGGGGSGGGGSGGGGSQLQLQESGPGLVKPSETLSLTCTVSGGSISSGSYFWGWIRQPPGKGLEWIGSIYYSGITYYNPSLKSRVTISVDTSKNQFSLKLSSVTAADTAVYYCARHDGAVAGLFDYWGQGTLVTVSSATRQSFGLLDPKLCYLLDGILFIYGVILTALFLRVKFSRSADAPAYQQGQNQLYNELNLGRREEYDVLDKRRGRDPEMGGKPQRRKNPQEGLYNELQKDKMAEAYSEIGMKGERRRGKGHDGLYQGLSTATKDTYDALHMQALPPR

SEQ ID NO: 18617 - protein, 453 aa, Artificial Sequence
  Synthetic Polypeptide
MALPVTALLLPLALLLHAARPQLQLQESGPGLVKPSETLSLTCTVSGGSISSGSYFWGWIRQPPGKGLEWIGSIYYSGITYYNPSLKSRVTISVDTSKNQFSLKLSSVTAADTAVYYCARHDGAVAGLFDYWGQGTLVTVSSAGGGGSGGGGSGGGGSSYVLTQPPSVSVAPGQTARITCGGKNIGSKSVHWYQQPPGQAPVVVVYDDSDRPSGIPERFSGSNSGNTATLTISRVEAGDEAVYYCQVWDSSSDHVVFGGGTKLTVLTRDGNEEMGGITQTPYKVSISGTTVILTCPQYPGSEILWQHNDKNIGGDEDDKNIGSDEDHLSLKEFSELEQSGYYVCYPRGSKPEDANFYLYLRARVCENCMEMDVMSVATIVIVDICITGGLLLLVYYWSKNRKAKAKPVTRGAGAGGRQRGQNKERPPPVPNPDYEPIRKGQRDLYSGLNQRRI

SEQ ID NO: 18618 - protein, 418 aa, Artificial Sequence
  Synthetic Polypeptide
MALPVTALLLPLALLLHAARPQLQLQESGPGLVKPSETLSLTCTVSGGSISSGSYFWGWIRQPPGKGLEWIGSIYYSGITYYNPSLKSRVTISVDTSKNQFSLKLSSVTAADTAVYYCARHDGAVAGLFDYWGQGTLVTVSSAGGGGSGGGGSGGGGSSYVLTQPPSVSVAPGQTARITCGGKNIGSKSVHWYQQPPGQAPVVVVYDDSDRPSGIPERFSGSNSGNTATLTISRVEAGDEAVYYCQVWDSSSDHVVFGGGTKLTVLTRFKIPIEELEDRVFVNCNTSITWVEGTVGTLLSDITRLDLGKRILDPRGIYRCNGTDIYKDKESTVQVHYRMCQSCVELDPATVAGIIVTDVIATLLLALGVFCFAGHETGRLSGAADTQALLRNDQVYQPLRDRDDAQYSHLGGNWARNK

SEQ ID NO: 18619 - protein, 428 aa, Artificial Sequence
  Synthetic Polypeptide
MALPVTALLLPLALLLHAARPQLQLQESGPGLVKPSETLSLTCTVSGGSISSGSYFWGWIRQPPGKGLEWIGSIYYSGITYYNPSLKSRVTISVDTSKNQFSLKLSSVTAADTAVYYCARHDGAVAGLFDYWGQGTLVTVSSAGGGGSGGGGSGGGGSSYVLTQPPSVSVAPGQTARITCGGKNIGSKSVHWYQQPPGQAPVVVVYDDSDRPSGIPERFSGSNSGNTATLTISRVEAGDEAVYYCQVWDSSSDHVVFGGGTKLTVLTRQSIKGNHLVKVYDYQEDGSVLLTCDAEAKNITWFKDGKMIGFLTEDKKKWNLGSNAKDPRGMYQCKGSQNKSKPLQVYYRMCQNCIELNAATISGFLFAEIVSIFVLAVGVYFIAGQDGVRQSRASDKQTLLPNDQLYQPLKDREDDQYSHLQGNQLRRN

SEQ ID NO: 18620 - protein, 411 aa, Artificial Sequence
  Synthetic Polypeptide
MALPVTALLLPLALLLHAARPQLQLQESGPGLVKPSETLSLTCTVSGGSISSGSYFWGWIRQPPGKGLEWIGSIYYSGITYYNPSLKSRVTISVDTSKNQFSLKLSSVTAADTAVYYCARHDGAVAGLFDYWGQGTLVTVSSAGGGGSGGGGSGGGGSSYVLTQPPSVSVAPGQTARITCGGKNIGSKSVHWYQQPPGQAPVVVVYDDSDRPSGIPERFSGSNSGNTATLTISRVEAGDEAVYYCQVWDSSSDHVVFGGGTKLTVLTRQSFGLLDPKLCYLLDGILFIYGVILTALFLRVKFSRSADAPAYQQGQNQLYNELNLGRREEYDVLDKRRGRDPEMGGKPQRRKNPQEGLYNELQKDKMAEAYSEIGMKGERRRGKGHDGLYQGLSTATKDTYDALHMQALPPR

SEQ ID NO: 18621 - protein, 644 aa, Artificial Sequence
  Synthetic Polypeptide
MALPVTALLLPLALLLHAARPSYVLTQPPSVSVAPGQTARITCGGKNIGSKSVHWYQQPPGQAPVVVVYDDSDRPSGIPERFSGSNSGNTATLTISRVEAGDEAVYYCQVWDSSSDHVVFGGGTKLTVLGGGGSGGGGSGGGGSQLQLQESGPGLVKPSETLSLTCTVSGGSISSGSYFWGWIRQPPGKGLEWIGSIYYSGITYYNPSLKSRVTISVDTSKNQFSLKLSSVTAADTAVYYCARHDGAVAGLFDYWGQGTLVTVSSATRGSGIQNPDPAVYQLRDSKSSDKSVCLFTDFDSQTNVSQSKDSDVYITDKTVLDMRSMDFKSNSAVAWSNKSDFACANAFNNSIIPEDTFFPSPESSCDVKLVEKSFETDTNLNFQNLSVIGFRILLLKVAGFNLLMTLRLWSSRAKRSGSGVKQTLNFDLLKLAGDVESNPGPSRGHMTEYKPTVRLATRDDVPRAVRTLAAAFADYPATRHTVDPDRHIERVTELQELFLTRVGLDIGKVWVADDGAAVAVWTTPESVEAGAVFAEIGPRMAELSGSRLAAQQQMEGLLAPHRPKEPAWFLATVGVSPDHQGKGLGSAVVLPGVEAAERAGVPAFLETSAPRNLPFYERLGFTVTADVEVPEGPRTWCMTRKPGA

SEQ ID NO: 18622 - protein, 676 aa, Artificial Sequence
  Synthetic Polypeptide
MALPVTALLLPLALLLHAARPSYVLTQPPSVSVAPGQTARITCGGKNIGSKSVHWYQQPPGQAPVVVVYDDSDRPSGIPERFSGSNSGNTATLTISRVEAGDEAVYYCQVWDSSSDHVVFGGGTKLTVLGGGGSGGGGSGGGGSQLQLQESGPGLVKPSETLSLTCTVSGGSISSGSYFWGWIRQPPGKGLEWIGSIYYSGITYYNPSLKSRVTISVDTSKNQFSLKLSSVTAADTAVYYCARHDGAVAGLFDYWGQGTLVTVSSALEDLKNVFPPEVAVFEPSEAEISHTQKATLVCLATGFYPDHVELSWWVNGKEVHSGVSTDPQPLKEQPALNDSRYCLSSRLRVSATFWQNPRNHFRCQVQFYGLSENDEWTQDRAKPVTQIVSAEAWGRADCGFTSESYQQGVLSATILYEILLGKATLYAVLVSALVLMAMVKRKDSRGRAKRSGSGATNFSLLKQAGDVEENPGPTRGHMTEYKPTVRLATRDDVPRAVRTLAAAFADYPATRHTVDPDRHIERVTELQELFLTRVGLDIGKVWVADDGAAVAVWTTPESVEAGAVFAEIGPRMAELSGSRLAAQQQMEGLLAPHRPKEPAWFLATVGVSPDHQGKGLGSAVVLPGVEAAERAGVPAFLETSAPRNLPFYERLGFTVTADVEVPEGPRTWCMTRKPGA

SEQ ID NO: 18623 - protein, 726 aa, Artificial Sequence
  Synthetic Polypeptide
MALPVTALLLPLALLLHAARPSYVLTQPPSVSVAPGQTARITCGGKNIGSKSVHWYQQPPGQAPVVVVYDDSDRPSGIPERFSGSNSGNTATLTISRVEAGDEAVYYCQVWDSSSDHVVFGGGTKLTVLGGGGSGGGGSGGGGSQLQLQESGPGLVKPSETLSLTCTVSGGSISSGSYFWGWIRQPPGKGLEWIGSIYYSGITYYNPSLKSRVTISVDTSKNQFSLKLSSVTAADTAVYYCARHDGAVAGLFDYWGQGTLVTVSSATREQKLISEEDLGSGTPFPSLAPPIMLLVDGKQQMVVVCLVLDVAPPGLDSPIWFSAGNGSALDAFTYGPSPATDGTWTNLAHLSLPSEELASWEPLVCHTGPGAEGHSRSTQPMHLSGEASTARTCPQEPLRGTPGGALWLGVLRLLLFKLLLFDLLLTCSCLCDPAGPLPSPATTTRLRALGSHRLHPATETGGREATSSPRPQPRDRRWGDTPPGRKPGSPVRAKRSGSGVKQTLNFDLLKLAGDVESNPGPSRSRGHMTEYKPTVRLATRDDVPRAVRTLAAAFADYPATRHTVDPDRHIERVTELQELFLTRVGLDIGKVWVADDGAAVAVWTTPESVEAGAVFAEIGPRMAELSGSRLAAQQQMEGLLAPHRPKEPAWFLATVGVSPDHQGKGLGSAVVLPGVEAAERAGVPAFLETSAPRNLPFYERLGFTVTADVEVPEGPRTWCMTRKPGA

SEQ ID NO: 18624 - protein, 539 aa, Artificial Sequence
  Synthetic Polypeptide
MALPVTALLLPLALLLHAARPSYVLTQPPSVSVAPGQTARITCGGKNIGSKSVHWYQQPPGQAPVVVVYDDSDRPSGIPERFSGSNSGNTATLTISRVEAGDEAVYYCQVWDSSSDHVVFGGGTKLTVLLEDLKNVFPPEVAVFEPSEAEISHTQKATLVCLATGFYPDHVELSWWVNGKEVHSGVSTDPQPLKEQPALNDSRYCLSSRLRVSATFWQNPRNHFRCQVQFYGLSENDEWTQDRAKPVTQIVSAEAWGRADCGFTSESYQQGVLSATILYEILLGKATLYAVLVSALVLMAMVKRKDSRGRAKRSGSGATNFSLLKQAGDVEENPGPTRGHMTEYKPTVRLATRDDVPRAVRTLAAAFADYPATRHTVDPDRHIERVTELQELFLTRVGLDIGKVWVADDGAAVAVWTTPESVEAGAVFAEIGPRMAELSGSRLAAQQQMEGLLAPHRPKEPAWFLATVGVSPDHQGKGLGSAVVLPGVEAAERAGVPAFLETSAPRNLPFYERLGFTVTADVEVPEGPRTWCMTRKPGA

SEQ ID NO: 18625 - protein, 309 aa, Artificial Sequence
  Synthetic Polypeptide
MALPVTALLLPLALLLHAARPSYVLTQPPSVSVAPGQTARITCGGKNIGSKSVHWYQQPPGQAPVVVVYDDSDRPSGIPERFSGSNSGNTATLTISRVEAGDEAVYYCQVWDSSSDHVVFGGGTKLTVLLEDLKNVFPPEVAVFEPSEAEISHTQKATLVCLATGFYPDHVELSWWVNGKEVHSGVSTDPQPLKEQPALNDSRYCLSSRLRVSATFWQNPRNHFRCQVQFYGLSENDEWTQDRAKPVTQIVSAEAWGRADCGFTSESYQQGVLSATILYEILLGKATLYAVLVSALVLMAMVKRKDSRG

SEQ ID NO: 18626 - protein, 451 aa, Artificial Sequence
  Synthetic Polypeptide
MDWIWRILFLVGAATGAHSFEQLQLQESGPGLVKPSETLSLTCTVSGGSISSGSYFWGWIRQPPGKGLEWIGSIYYSGITYYNPSLKSRVTISVDTSKNQFSLKLSSVTAADTAVYYCARHDGAVAGLFDYWGQGTLVTVSSATRIQNPDPAVYQLRDSKSSDKSVCLFTDFDSQTNVSQSKDSDVYITDKTVLDMRSMDFKSNSAVAWSNKSDFACANAFNNSIIPEDTFFPSPESSCDVKLVEKSFETDTNLNFQNLSVIGFRILLLKVAGFNLLMTLRLWSSRAKRSGSGVKQTLNFDLLKLAGDVESNPGPSRGHMAKPLSQEESTLIERATATINSIPISEDYSVASAALSSDGRIFTGVNVYHFTGGPCAELVVLGTAAAAAAGNLTCIVAIGNENRGILSPCGRCRQVLLDLHPGIKAIVKDSDGQPTAVGIRELLPSGYVWEG

SEQ ID NO: 18627 - protein, 285 aa, Artificial Sequence
  Synthetic Polypeptide
MDWIWRILFLVGAATGAHSFEQLQLQESGPGLVKPSETLSLTCTVSGGSISSGSYFWGWIRQPPGKGLEWIGSIYYSGITYYNPSLKSRVTISVDTSKNQFSLKLSSVTAADTAVYYCARHDGAVAGLFDYWGQGTLVTVSSATRIQNPDPAVYQLRDSKSSDKSVCLFTDFDSQTNVSQSKDSDVYITDKTVLDMRSMDFKSNSAVAWSNKSDFACANAFNNSIIPEDTFFPSPESSCDVKLVEKSFETDTNLNFQNLSVIGFRILLLKVAGFNLLMTLRLWSS

SEQ ID NO: 18628 - protein, 557 aa, Artificial Sequence
  Synthetic Polypeptide
MALPVTALLLPLALLLHAARPSYVLTQPPSVSVAPGQTARITCGGKNIGSKSVHWYQQPPGQAPVVVVYDDSDRPSGIPERFSGSNSGNTATLTISRVEAGDEAVYYCQVWDSSSDHVVFGGGTKLTVLLEGKPIPNPLLGLDSTGSGEDLKNVFPPEVAVFEPSEAEISHTQKATLVCLATGFYPDHVELSWWVNGKEVHSGVCTDPQPLKEQPALNDSRYCLSSRLRVSATFWQNPRNHFRCQVQFYGLSENDEWTQDRAKPVTQIVSAEAWGRADCGFTSESYQQGVLSATILYEILLGKATLYAVLVSALVLMAMVKRKDSRGRAKRSGSGATNFSLLKQAGDVEENPGPTRGHMTEYKPTVRLATRDDVPRAVRTLAAAFADYPATRHTVDPDRHIERVTELQELFLTRVGLDIGKVWVADDGAAVAVWTTPESVEAGAVFAEIGPRMAELSGSRLAAQQQMEGLLAPHRPKEPAWFLATVGVSPDHQGKGLGSAVVLPGVEAAERAGVPAFLETSAPRNLPFYERLGFTVTADVEVPEGPRTWCMTRKPGA

SEQ ID NO: 18629 - protein, 327 aa, Artificial Sequence
  Synthetic Polypeptide
MALPVTALLLPLALLLHAARPSYVLTQPPSVSVAPGQTARITCGGKNIGSKSVHWYQQPPGQAPVVVVYDDSDRPSGIPERFSGSNSGNTATLTISRVEAGDEAVYYCQVWDSSSDHVVFGGGTKLTVLLEGKPIPNPLLGLDSTGSGEDLKNVFPPEVAVFEPSEAEISHTQKATLVCLATGFYPDHVELSWWVNGKEVHSGVCTDPQPLKEQPALNDSRYCLSSRLRVSATFWQNPRNHFRCQVQFYGLSENDEWTQDRAKPVTQIVSAEAWGRADCGFTSESYQQGVLSATILYEILLGKATLYAVLVSALVLMAMVKRKDSRG

SEQ ID NO: 18630 - protein, 463 aa, Artificial Sequence
  Synthetic Polypeptide
MDWIWRILFLVGAATGAHSFEQLQLQESGPGLVKPSETLSLTCTVSGGSISSGSYFWGWIRQPPGKGLEWIGSIYYSGITYYNPSLKSRVTISVDTSKNQFSLKLSSVTAADTAVYYCARHDGAVAGLFDYWGQGTLVTVSSATREQKLISEEDGSGIQNPDPAVYQLRDSKSSDKSVCLFTDFDSQTNVSQSKDSDVYITDKCVLDMRSMDFKSNSAVAWSNKSDFACANAFNNSIIPEDTFFPSPESSCDVKLVEKSFETDTNLNFQNLSVIGFRILLLKVAGFNLLMTLRLWSSRAKRSGSGVKQTLNFDLLKLAGDVESNPGPSRGHMAKPLSQEESTLIERATATINSIPISEDYSVASAALSSDGRIFTGVNVYHFTGGPCAELVVLGTAAAAAAGNLTCIVAIGNENRGILSPCGRCRQVLLDLHPGIKAIVKDSDGQPTAVGIRELLPSGYVWEG

SEQ ID NO: 18631 - protein, 297 aa, Artificial Sequence
  Synthetic Polypeptide
MDWIWRILFLVGAATGAHSFEQLQLQESGPGLVKPSETLSLTCTVSGGSISSGSYFWGWIRQPPGKGLEWIGSIYYSGITYYNPSLKSRVTISVDTSKNQFSLKLSSVTAADTAVYYCARHDGAVAGLFDYWGQGTLVTVSSATREQKLISEEDGSGIQNPDPAVYQLRDSKSSDKSVCLFTDFDSQTNVSQSKDSDVYITDKCVLDMRSMDFKSNSAVAWSNKSDFACANAFNNSIIPEDTFFPSPESSCDVKLVEKSFETDTNLNFQNLSVIGFRILLLKVAGFNLLMTLRLWSS

SEQ ID NO: 18632 - protein, 644 aa, Artificial Sequence
  Synthetic Polypeptide
MALPVTALLLPLALLLHAARPSYVLTQPPSVSVAPGQTARITCGGKNIGSKSVHWYQQPPGQAPVVVVYDDSDRPSGIPERFSGSNSGNTATLTISRVEAGDEAVYYCQVWDSSSDHVVFGGGTKLTVLGGGGSGGGGSGGGGSQLQLQESGPGLVKPSETLSLTCTVSGGSISSGSYFWGWIRQPPGKGLEWIGSIYYSGITYYNPSLKSRVTISVDTSKNQFSLKLSSVTAADTAVYYCARHDGAVAGLFDYWGQGTLVTVSSATRGSGIQNPDPAVYQLRDSKSSDKSVCLFTDFDSQTNVSQSKDSDVYITDKTVLDMRSMDFKSNSAVAWSNKSDFACANAFNNSIIPEDTFFPSSDVPCDVKLVEKSFETDTNLNFQNLSVIGFRILLLKVAGFNLLMTLRLWSSRAKRSGSGVKQTLNFDLLKLAGDVESNPGPSRGHMTEYKPTVRLATRDDVPRAVRTLAAAFADYPATRHTVDPDRHIERVTELQELFLTRVGLDIGKVWVADDGAAVAVWTTPESVEAGAVFAEIGPRMAELSGSRLAAQQQMEGLLAPHRPKEPAWFLATVGVSPDHQGKGLGSAVVLPGVEAAERAGVPAFLETSAPRNLPFYERLGFTVTADVEVPEGPRTWCMTRKPGA

SEQ ID NO: 18633 - protein, 676 aa, Artificial Sequence
  Synthetic Polypeptide
MALPVTALLLPLALLLHAARPSYVLTQPPSVSVAPGQTARITCGGKNIGSKSVHWYQQPPGQAPVVVVYDDSDRPSGIPERFSGSNSGNTATLTISRVEAGDEAVYYCQVWDSSSDHVVFGGGTKLTVLGGGGSGGGGSGGGGSQLQLQESGPGLVKPSETLSLTCTVSGGSISSGSYFWGWIRQPPGKGLEWIGSIYYSGITYYNPSLKSRVTISVDTSKNQFSLKLSSVTAADTAVYYCARHDGAVAGLFDYWGQGTLVTVSSALEDLKNVFPPEVAVFEPSKAEIAHTQKATLVCLATGFYPDHVELSWWVNGKEVHSGVSTDPQPLKEQPALNDSRYCLSSRLRVSATFWQNPRNHFRCQVQFYGLSENDEWTQDRAKPVTQIVSAEAWGRADCGITSASYHQGVLSATILYEILLGKATLYAVLVSALVLMAMVKRKDSRGRAKRSGSGATNFSLLKQAGDVEENPGPTRGHMTEYKPTVRLATRDDVPRAVRTLAAAFADYPATRHTVDPDRHIERVTELQELFLTRVGLDIGKVWVADDGAAVAVWTTPESVEAGAVFAEIGPRMAELSGSRLAAQQQMEGLLAPHRPKEPAWFLATVGVSPDHQGKGLGSAVVLPGVEAAERAGVPAFLETSAPRNLPFYERLGFTVTADVEVPEGPRTWCMTRKPGA

SEQ ID NO: 18634 - protein, 699 aa, Artificial Sequence
  Synthetic Polypeptide
MALPVTALLLPLALLLHAARPSYVLTQPPSVSVAPGQTARITCGGKNIGSKSVHWYQQPPGQAPVVVVYDDSDRPSGIPERFSGSNSGNTATLTISRVEAGDEAVYYCQVWDSSSDHVVFGGGTKLTVLGGGGSGGGGSGGGGSQLQLQESGPGLVKPSETLSLTCTVSGGSISSGSYFWGWIRQPPGKGLEWIGSIYYSGITYYNPSLKSRVTISVDTSKNQFSLKLSSVTAADTAVYYCARHDGAVAGLFDYWGQGTLVTVSSATRGSGGGGSGGGGSGDGNEEMGGITQTPYKVSISGTTVILTCPQYPGSEILWQHNDKNIGGDEDDKNIGSDEDHLSLKEFSELEQSGYYVCYPRGSKPEDANFYLYLRARVCENCMEMDVMSVATIVIVDICITGGLLLLVYYWSKNRKAKAKPVTRGAGAGGRQRGQNKERPPPVPNPDYEPIRKGQRDLYSGLNQRRIRAKRSGSGVKQTLNFDLLKLAGDVESNPGPSRGHMTEYKPTVRLATRDDVPRAVRTLAAAFADYPATRHTVDPDRHIERVTELQELFLTRVGLDIGKVWVADDGAAVAVWTTPESVEAGAVFAEIGPRMAELSGSRLAAQQQMEGLLAPHRPKEPAWFLATVGVSPDHQGKGLGSAVVLPGVEAAERAGVPAFLETSAPRNLPFYERLGFTVTADVEVPEGPRTWCMTRKPGA

SEQ ID NO: 18635 - protein, 664 aa, Artificial Sequence
  Synthetic Polypeptide
MALPVTALLLPLALLLHAARPSYVLTQPPSVSVAPGQTARITCGGKNIGSKSVHWYQQPPGQAPVVVVYDDSDRPSGIPERFSGSNSGNTATLTISRVEAGDEAVYYCQVWDSSSDHVVFGGGTKLTVLGGGGSGGGGSGGGGSQLQLQESGPGLVKPSETLSLTCTVSGGSISSGSYFWGWIRQPPGKGLEWIGSIYYSGITYYNPSLKSRVTISVDTSKNQFSLKLSSVTAADTAVYYCARHDGAVAGLFDYWGQGTLVTVSSATRGSGGGGSGGGGSGFKIPIEELEDRVFVNCNTSITWVEGTVGTLLSDITRLDLGKRILDPRGIYRCNGTDIYKDKESTVQVHYRMCQSCVELDPATVAGIIVTDVIATLLLALGVFCFAGHETGRLSGAADTQALLRNDQVYQPLRDRDDAQYSHLGGNWARNKRAKRSGSGVKQTLNFDLLKLAGDVESNPGPSRGHMTEYKPTVRLATRDDVPRAVRTLAAAFADYPATRHTVDPDRHIERVTELQELFLTRVGLDIGKVWVADDGAAVAVWTTPESVEAGAVFAEIGPRMAELSGSRLAAQQQMEGLLAPHRPKEPAWFLATVGVSPDHQGKGLGSAVVLPGVEAAERAGVPAFLETSAPRNLPFYERLGFTVTADVEVPEGPRTWCMTRKPGA

SEQ ID NO: 18636 - protein, 674 aa, Artificial Sequence
  Synthetic Polypeptide
MALPVTALLLPLALLLHAARPSYVLTQPPSVSVAPGQTARITCGGKNIGSKSVHWYQQPPGQAPVVVVYDDSDRPSGIPERFSGSNSGNTATLTISRVEAGDEAVYYCQVWDSSSDHVVFGGGTKLTVLGGGGSGGGGSGGGGSQLQLQESGPGLVKPSETLSLTCTVSGGSISSGSYFWGWIRQPPGKGLEWIGSIYYSGITYYNPSLKSRVTISVDTSKNQFSLKLSSVTAADTAVYYCARHDGAVAGLFDYWGQGTLVTVSSATRGSGGGGSGGGGSGQSIKGNHLVKVYDYQEDGSVLLTCDAEAKNITWFKDGKMIGFLTEDKKKWNLGSNAKDPRGMYQCKGSQNKSKPLQVYYRMCQNCIELNAATISGFLFAEIVSIFVLAVGVYFIAGQDGVRQSRASDKQTLLPNDQLYQPLKDREDDQYSHLQGNQLRRNRAKRSGSGVKQTLNFDLLKLAGDVESNPGPSRGHMTEYKPTVRLATRDDVPRAVRTLAAAFADYPATRHTVDPDRHIERVTELQELFLTRVGLDIGKVWVADDGAAVAVWTTPESVEAGAVFAEIGPRMAELSGSRLAAQQQMEGLLAPHRPKEPAWFLATVGVSPDHQGKGLGSAVVLPGVEAAERAGVPAFLETSAPRNLPFYERLGFTVTADVEVPEGPRTWCMTRKPGA

SEQ ID NO: 18637 - protein, 657 aa, Artificial Sequence
  Synthetic Polypeptide
MALPVTALLLPLALLLHAARPSYVLTQPPSVSVAPGQTARITCGGKNIGSKSVHWYQQPPGQAPVVVVYDDSDRPSGIPERFSGSNSGNTATLTISRVEAGDEAVYYCQVWDSSSDHVVFGGGTKLTVLGGGGSGGGGSGGGGSQLQLQESGPGLVKPSETLSLTCTVSGGSISSGSYFWGWIRQPPGKGLEWIGSIYYSGITYYNPSLKSRVTISVDTSKNQFSLKLSSVTAADTAVYYCARHDGAVAGLFDYWGQGTLVTVSSATRGSGGGGSGGGGSGQSFGLLDPKLCYLLDGILFIYGVILTALFLRVKFSRSADAPAYQQGQNQLYNELNLGRREEYDVLDKRRGRDPEMGGKPQRRKNPQEGLYNELQKDKMAEAYSEIGMKGERRRGKGHDGLYQGLSTATKDTYDALHMQALPPRRAKRSGSGVKQTLNFDLLKLAGDVESNPGPSRGHMTEYKPTVRLATRDDVPRAVRTLAAAFADYPATRHTVDPDRHIERVTELQELFLTRVGLDIGKVWVADDGAAVAVWTTPESVEAGAVFAEIGPRMAELSGSRLAAQQQMEGLLAPHRPKEPAWFLATVGVSPDHQGKGLGSAVVLPGVEAAERAGVPAFLETSAPRNLPFYERLGFTVTADVEVPEGPRTWCMTRKPGA

SEQ ID NO: 18638 - protein, 758 aa, Artificial Sequence
  Synthetic Polypeptide
MALPVTALLLPLALLLHAARPEVQLVESGGGLVQPGGSLRLSCAASGFSFSDFWMSWVRQAPGKGLEWVATISQAGSEKDYVDSVKGRFTISRDNAKKSLYLQMNSLRAEDTAVYYCASGVYSFDYRGQGTLVTVSSGTGGGGSGGGGSGGGGSEFSYVLTQPPSVSVAPGQTARITCGGKNIGSKSVHWYQQPPGQAPVVVVYDDSDRPSGIPERFSGSNSGNTATLTISRVEAGDEAVYYCQVWDSSSDHVVFGGGTKLTVLLEDLKNVFPPEVAVFEPSEAEISHTQKATLVCLATGFYPDHVELSWWVNGKEVHSGVCTDPQPLKEQPALNDSRYCLSSRLRVSATFWQNPRNHFRCQVQFYGLSENDEWTQDRAKPVTQIVSAEAWGRADCGFTSESYQQGVLSATILYEILLGKATLYAVLVSALVLMAMVKRKDSRGRAKRSGSGATNFSLLKQAGDVEENPGPTSMDWIWRILFLVGAATGAHSFEQLQLQESGPGLVKPSETLSLTCTVSGGSISSGSYFWGWIRQPPGKGLEWIGSIYYSGITYYNPSLKSRVTISVDTSKNQFSLKLSSVTAADTAVYYCARHDGAVAGLFDYWGQGTLVTVSSATRIQNPDPAVYQLRDSKSSDKSVCLFTDFDSQTNVSQSKDSDVYITDKCVLDMRSMDFKSNSAVAWSNKSDFACANAFNNSIIPEDTFFPSPESSCDVKLVEKSFETDTNLNFQNLSVIGFRILLLKVAGFNLLMTLRLWSS

SEQ ID NO: 18639 - protein, 762 aa, Artificial Sequence
  Synthetic Polypeptide
MALPVTALLLPLALLLHAARPEVQLVESGGGLVQPGGSLRLSCAASGFSFSDFWMSWVRQAPGKGLEWVATISQAGSEKDYVDSVKGRFTISRDNAKKSLYLQMNSLRAEDTAVYYCASGVYSFDYRGQGTLVTVSSGTGGGGSGGGGSGGGGSEFSYVLTQPPSVSVAPGQTARITCGGKNIGSKSVHWYQQPPGQAPVVVVYDDSDRPSGIPERFSGSNSGNTATLTISRVEAGDEAVYYCQVWDSSSDHVVFGGGTKLTVLLEIQNPDPAVYQLRDSKSSDKSVCLFTDFDSQTNVSQSKDSDVYITDKCVLDMRSMDFKSNSAVAWSNKSDFACANAFNNSIIPEDTFFPSPESSCDVKLVEKSFETDTNLNFQNLSVIGFRILLLKVAGFNLLMTLRLWSSRAKRSGSGVKQTLNFDLLKLAGDVESNPGPTSMDWIWRILFLVGAATGAHSFEQLQLQESGPGLVKPSETLSLTCTVSGGSISSGSYFWGWIRQPPGKGLEWIGSIYYSGITYYNPSLKSRVTISVDTSKNQFSLKLSSVTAADTAVYYCARHDGAVAGLFDYWGQGTLVTVSSATREDLKNVFPPEVAVFEPSEAEISHTQKATLVCLATGFYPDHVELSWWVNGKEVHSGVCTDPQPLKEQPALNDSRYCLSSRLRVSATFWQNPRNHFRCQVQFYGLSENDEWTQDRAKPVTQIVSAEAWGRADCGFTSESYQQGVLSATILYEILLGKATLYAVLVSALVLMAMVKRKDSRG

SEQ ID NO: 18640 - protein, 954 aa, Artificial Sequence
  Synthetic Polypeptide
MALPVTALLLPLALLLHAARPEVQLVESGGGLVQPGGSLRLSCAASGFSFSDFWMSWVRQAPGKGLEWVATISQAGSEKDYVDSVKGRFTISRDNAKKSLYLQMNSLRAEDTAVYYCASGVYSFDYRGQGTLVTVSSGTGGGGSGGGGSGGGGSEFSYVLTQPPSVSVAPGQTARITCGGKNIGSKSVHWYQQPPGQAPVVVVYDDSDRPSGIPERFSGSNSGNTATLTISRVEAGDEAVYYCQVWDSSSDHVVFGGGTKLTVLLEDLKNVFPPEVAVFEPSEAEISHTQKATLVCLATGFYPDHVELSWWVNGKEVHSGVSTDPQPLKEQPALNDSRYCLSSRLRVSATFWQNPRNHFRCQVQFYGLSENDEWTQDRAKPVTQIVSAEAWGRADCGSQSFGLLDPKLCYLLDGILFIYGVILTALFLRVKFSRSADAPAYQQGQNQLYNELNLGRREEYDVLDKRRGRDPEMGGKPQRRKNPQEGLYNELQKDKMAEAYSEIGMKGERRRGKGHDGLYQGLSTATKDTYDALHMQALPPRRAKRSGSGATNFSLLKQAGDVEENPGPTSMDWIWRILFLVGAATGAHSFEQLQLQESGPGLVKPSETLSLTCTVSGGSISSGSYFWGWIRQPPGKGLEWIGSIYYSGITYYNPSLKSRVTISVDTSKNQFSLKLSSVTAADTAVYYCARHDGAVAGLFDYWGQGTLVTVSSATRIQNPDPAVYQLRDSKSSDKSVCLFTDFDSQTNVSQSKDSDVYITDKTVLDMRSMDFKSNSAVAWSNKSDFACANAFNNSIIPEDTFFPSPESSCGTQSFGLLDPKLCYLLDGILFIYGVILTALFLRVKFSRSADAPAYQQGQNQLYNELNLGRREEYDVLDKRRGRDPEMGGKPQRRKNPQEGLYNELQKDKMAEAYSEIGMKGERRRGKGHDGLYQGLSTATKDTYDALHMQALPPR

SEQ ID NO: 18641 - protein, 784 aa, Artificial Sequence
  Synthetic Polypeptide
MALPVTALLLPLALLLHAARPEVQLVESGGGLVQPGGSLRLSCAASGFSFSDFWMSWVRQAPGKGLEWVATISQAGSEKDYVDSVKGRFTISRDNAKKSLYLQMNSLRAEDTAVYYCASGVYSFDYRGQGTLVTVSSGTGGGGSGGGGSGGGGSEFSYVLTQPPSVSVAPGQTARITCGGKNIGSKSVHWYQQPPGQAPVVVVYDDSDRPSGIPERFSGSNSGNTATLTISRVEAGDEAVYYCQVWDSSSDHVVFGGGTKLTVLLEGQPKANPTVTLFPPSSEELQANKATLVCLISDFYPGAVTVAWKADGSPVKAGVETTKPSKQSNNKYAASSYLSLTPEQWKSHRSYSCQVTHEGSTVEKTVAPTECSPIKTDVITMDPKDNCSKDANDTLLLQLTNTSAYYMYLLLLLKSVVYFAIITCCLLRRTAFCCNGEKSRAKRSGSGATNFSLLKQAGDVEENPGPTSMDWIWRILFLVGAATGAHSFEQLQLQESGPGLVKPSETLSLTCTVSGGSISSGSYFWGWIRQPPGKGLEWIGSIYYSGITYYNPSLKSRVTISVDTSKNQFSLKLSSVTAADTAVYYCARHDGAVAGLFDYWGQGTLVTVSSATRASTKGPSVFPLAPSSKSTSGGTAALGCLVKDYFPEPVTVSWNSGALTSGVHTFPAVLQSSGLYSLSSVVTVPSSSLGTQTYICNVNHKPSNTKVDKRVEPKSCEVKTDSTDHVKPKETENTKQPSKSCHKPKAIVHTEKVNMMSLTVLGLRMLFAKTVAVNFLLTAKLFFL

SEQ ID NO: 18642 - protein, 765 aa, Artificial Sequence
  Synthetic Polypeptide
MALPVTALLLPLALLLHAARPEVQLVESGGGLVQPGGSLRLSCAASGFSFSDFWMSWVRQAPGKGLEWVATISQAGSEKDYVDSVKGRFTISRDNAKKSLYLQMNSLRAEDTAVYYCASGVYSFDYRGQGTLVTVSSGTGGGGSGGGGSGGGGSEFSYVLTQPPSVSVAPGQTARITCGGKNIGSKSVHWYQQPPGQAPVVVVYDDSDRPSGIPERFSGSNSGNTATLTISRVEAGDEAVYYCQVWDSSSDHVVFGGGTKLTVLLEGQPKANPTVTLFPPSSEELQANKATLVCLISDFYPGAVTVAWKADGSPVKAGVETTKPSKQSNNKYAASSYLSLTPEQWKSHRSYSCQVTHEGSTVEKTVAPTECSGRADCGFTSESYQQGVLSATILYEILLGKATLYAVLVSALVLMAMVKRKDSRGRAKRSGSGVKQTLNFDLLKLAGDVESNPGPTSMDWIWRILFLVGAATGAHSFEQLQLQESGPGLVKPSETLSLTCTVSGGSISSGSYFWGWIRQPPGKGLEWIGSIYYSGITYYNPSLKSRVTISVDTSKNQFSLKLSSVTAADTAVYYCARHDGAVAGLFDYWGQGTLVTVSSATRASTKGPSVFPLAPSSKSTSGGTAALGCLVKDYFPEPVTVSWNSGALTSGVHTFPAVLQSSGLYSLSSVVTVPSSSLGTQTYICNVNHKPSNTKVDKRVEPKSCIPEDTFFPSPESSCDVKLVEKSFETDTNLNFQNLSVIGFRILLLKVAGFNLLMTLRLWSS

SEQ ID NO: 18643 - protein, 899 aa, Artificial Sequence
  Synthetic Polypeptide
MALPVTALLLPLALLLHAARPEVQLVESGGGLVQPGGSLRLSCAASGFSFSDFWMSWVRQAPGKGLEWVATISQAGSEKDYVDSVKGRFTISRDNAKKSLYLQMNSLRAEDTAVYYCASGVYSFDYRGQGTLVTVSSGTGGGGSGGGGSGGGGSEFSYVLTQPPSVSVAPGQTARITCGGKNIGSKSVHWYQQPPGQAPVVVVYDDSDRPSGIPERFSGSNSGNTATLTISRVEAGDEAVYYCQVWDSSSDHVVFGGGTKLTVLLEIQNPDPAVYQLRDSKSSDKSVCLFTDFDSQTNVSQSKDSDVYITDKCVLDMRSMDFKSNSAVAWSNKSDFACANAFNNSIIPEDTFFPSPESSCDVKLVEKSFETDTNLNFQNLSVIGFRILLLKVAGFNLLMTLRLWSSRAKRSGSGVKQTLNFDLLKLAGDVESNPGPTSMDWIWRILFLVGAATGAHSGPQLQLQESGPGLVKPSETLSLTCTVSGDSISSGDYYWGWIRQPPGKGLEWIGHIYYSGVTYYNPSLKSRVTISVDTSRNQFSLKLSSVTAADTAVYYCTREDSSNWRSRGQGTLVTVSSGSGGGGSGGGGSGGGGSFEQLQLQESGPGLVKPSETLSLTCTVSGGSISSGSYFWGWIRQPPGKGLEWIGSIYYSGITYYNPSLKSRVTISVDTSKNQFSLKLSSVTAADTAVYYCARHDGAVAGLFDYWGQGTLVTVSSATREDLKNVFPPEVAVFEPSEAEISHTQKATLVCLATGFYPDHVELSWWVNGKEVHSGVCTDPQPLKEQPALNDSRYCLSSRLRVSATFWQNPRNHFRCQVQFYGLSENDEWTQDRAKPVTQIVSAEAWGRADCGFTSESYQQGVLSATILYEILLGKATLYAVLVSALVLMAMVKRKDSRG

SEQ ID NO: 18644 - protein, 1091 aa, Artificial Sequence
  Synthetic Polypeptide
MALPVTALLLPLALLLHAARPEVQLVESGGGLVQPGGSLRLSCAASGFSFSDFWMSWVRQAPGKGLEWVATISQAGSEKDYVDSVKGRFTISRDNAKKSLYLQMNSLRAEDTAVYYCASGVYSFDYRGQGTLVTVSSGTGGGGSGGGGSGGGGSEFSYVLTQPPSVSVAPGQTARITCGGKNIGSKSVHWYQQPPGQAPVVVVYDDSDRPSGIPERFSGSNSGNTATLTISRVEAGDEAVYYCQVWDSSSDHVVFGGGTKLTVLLEDLKNVFPPEVAVFEPSEAEISHTQKATLVCLATGFYPDHVELSWWVNGKEVHSGVSTDPQPLKEQPALNDSRYCLSSRLRVSATFWQNPRNHFRCQVQFYGLSENDEWTQDRAKPVTQIVSAEAWGRADCGSQSFGLLDPKLCYLLDGILFIYGVILTALFLRVKFSRSADAPAYQQGQNQLYNELNLGRREEYDVLDKRRGRDPEMGGKPQRRKNPQEGLYNELQKDKMAEAYSEIGMKGERRRGKGHDGLYQGLSTATKDTYDALHMQALPPRRAKRSGSGATNFSLLKQAGDVEENPGPTSMDWIWRILFLVGAATGAHSGPQLQLQESGPGLVKPSETLSLTCTVSGDSISSGDYYWGWIRQPPGKGLEWIGHIYYSGVTYYNPSLKSRVTISVDTSRNQFSLKLSSVTAADTAVYYCTREDSSNWRSRGQGTLVTVSSGSGGGGSGGGGSGGGGSFEQLQLQESGPGLVKPSETLSLTCTVSGGSISSGSYFWGWIRQPPGKGLEWIGSIYYSGITYYNPSLKSRVTISVDTSKNQFSLKLSSVTAADTAVYYCARHDGAVAGLFDYWGQGTLVTVSSATRIQNPDPAVYQLRDSKSSDKSVCLFTDFDSQTNVSQSKDSDVYITDKTVLDMRSMDFKSNSAVAWSNKSDFACANAFNNSIIPEDTFFPSPESSCGTQSFGLLDPKLCYLLDGILFIYGVILTALFLRVKFSRSADAPAYQQGQNQLYNELNLGRREEYDVLDKRRGRDPEMGGKPQRRKNPQEGLYNELQKDKMAEAYSEIGMKGERRRGKGHDGLYQGLSTATKDTYDALHMQALPPR

SEQ ID NO: 18645 - protein, 921 aa, Artificial Sequence
  Synthetic Polypeptide
MALPVTALLLPLALLLHAARPEVQLVESGGGLVQPGGSLRLSCAASGFSFSDFWMSWVRQAPGKGLEWVATISQAGSEKDYVDSVKGRFTISRDNAKKSLYLQMNSLRAEDTAVYYCASGVYSFDYRGQGTLVTVSSGTGGGGSGGGGSGGGGSEFSYVLTQPPSVSVAPGQTARITCGGKNIGSKSVHWYQQPPGQAPVVVVYDDSDRPSGIPERFSGSNSGNTATLTISRVEAGDEAVYYCQVWDSSSDHVVFGGGTKLTVLLEGQPKANPTVTLFPPSSEELQANKATLVCLISDFYPGAVTVAWKADGSPVKAGVETTKPSKQSNNKYAASSYLSLTPEQWKSHRSYSCQVTHEGSTVEKTVAPTECSPIKTDVITMDPKDNCSKDANDTLLLQLTNTSAYYMYLLLLLKSVVYFAIITCCLLRRTAFCCNGEKSRAKRSGSGATNFSLLKQAGDVEENPGPTSMDWIWRILFLVGAATGAHSGPQLQLQESGPGLVKPSETLSLTCTVSGDSISSGDYYWGWIRQPPGKGLEWIGHIYYSGVTYYNPSLKSRVTISVDTSRNQFSLKLSSVTAADTAVYYCTREDSSNWRSRGQGTLVTVSSGSGGGGSGGGGSGGGGSFEQLQLQESGPGLVKPSETLSLTCTVSGGSISSGSYFWGWIRQPPGKGLEWIGSIYYSGITYYNPSLKSRVTISVDTSKNQFSLKLSSVTAADTAVYYCARHDGAVAGLFDYWGQGTLVTVSSATRASTKGPSVFPLAPSSKSTSGGTAALGCLVKDYFPEPVTVSWNSGALTSGVHTFPAVLQSSGLYSLSSVVTVPSSSLGTQTYICNVNHKPSNTKVDKRVEPKSCEVKTDSTDHVKPKETENTKQPSKSCHKPKAIVHTEKVNMMSLTVLGLRMLFAKTVAVNFLLTAKLFFL

SEQ ID NO: 18646 - protein, 902 aa, Artificial Sequence
  Synthetic Polypeptide
MALPVTALLLPLALLLHAARPEVQLVESGGGLVQPGGSLRLSCAASGFSFSDFWMSWVRQAPGKGLEWVATISQAGSEKDYVDSVKGRFTISRDNAKKSLYLQMNSLRAEDTAVYYCASGVYSFDYRGQGTLVTVSSGTGGGGSGGGGSGGGGSEFSYVLTQPPSVSVAPGQTARITCGGKNIGSKSVHWYQQPPGQAPVVVVYDDSDRPSGIPERFSGSNSGNTATLTISRVEAGDEAVYYCQVWDSSSDHVVFGGGTKLTVLLEGQPKANPTVTLFPPSSEELQANKATLVCLISDFYPGAVTVAWKADGSPVKAGVETTKPSKQSNNKYAASSYLSLTPEQWKSHRSYSCQVTHEGSTVEKTVAPTECSGRADCGFTSESYQQGVLSATILYEILLGKATLYAVLVSALVLMAMVKRKDSRGRAKRSGSGVKQTLNFDLLKLAGDVESNPGPTSMDWIWRILFLVGAATGAHSGPQLQLQESGPGLVKPSETLSLTCTVSGDSISSGDYYWGWIRQPPGKGLEWIGHIYYSGVTYYNPSLKSRVTISVDTSRNQFSLKLSSVTAADTAVYYCTREDSSNWRSRGQGTLVTVSSGSGGGGSGGGGSGGGGSFEQLQLQESGPGLVKPSETLSLTCTVSGGSISSGSYFWGWIRQPPGKGLEWIGSIYYSGITYYNPSLKSRVTISVDTSKNQFSLKLSSVTAADTAVYYCARHDGAVAGLFDYWGQGTLVTVSSATRASTKGPSVFPLAPSSKSTSGGTAALGCLVKDYFPEPVTVSWNSGALTSGVHTFPAVLQSSGLYSLSSVVTVPSSSLGTQTYICNVNHKPSNTKVDKRVEPKSCIPEDTFFPSPESSCDVKLVEKSFETDTNLNFQNLSVIGFRILLLKVAGFNLLMTLRLWSS

SEQ ID NO: 18647 - protein, 759 aa, Artificial Sequence
  Synthetic Polypeptide
MALPVTALLLPLALLLHAARPEVQVLESGGGLVQPGGSLRLSCAASGFTFSNFAMSWVRQAPGKGLEWVSTISGSAGTTDYADSVKGRFTISRDNSKKTLYLQMNSLRVEDTAVYYCADGRGPFFDYRGQGTLVTVSSGTGGGGSGGGGSGGGGSEFSYVLTQPPSVSVAPGQTARITCGGKNIGSKSVHWYQQPPGQAPVVVVYDDSDRPSGIPERFSGSNSGNTATLTISRVEAGDEAVYYCQVWDSSSDHVVFGGGTKLTVLLEDLKNVFPPEVAVFEPSEAEISHTQKATLVCLATGFYPDHVELSWWVNGKEVHSGVCTDPQPLKEQPALNDSRYCLSSRLRVSATFWQNPRNHFRCQVQFYGLSENDEWTQDRAKPVTQIVSAEAWGRADCGFTSESYQQGVLSATILYEILLGKATLYAVLVSALVLMAMVKRKDSRGRAKRSGSGATNFSLLKQAGDVEENPGPTSMDWIWRILFLVGAATGAHSFEQLQLQESGPGLVKPSETLSLTCTVSGGSISSGSYFWGWIRQPPGKGLEWIGSIYYSGITYYNPSLKSRVTISVDTSKNQFSLKLSSVTAADTAVYYCARHDGAVAGLFDYWGQGTLVTVSSATRIQNPDPAVYQLRDSKSSDKSVCLFTDFDSQTNVSQSKDSDVYITDKCVLDMRSMDFKSNSAVAWSNKSDFACANAFNNSIIPEDTFFPSPESSCDVKLVEKSFETDTNLNFQNLSVIGFRILLLKVAGFNLLMTLRLWSS

SEQ ID NO: 18648 - protein, 760 aa, Artificial Sequence
  Synthetic Polypeptide
MALPVTALLLPLALLLHAARPSYVLTQPPSVSVAPGQTARITCGGKNIGSKSVHWYQQPPGQAPVVVVYDDSDRPSGIPERFSGSNSGNTATLTISRVEAGDEAVYYCQVWDSSSDHVVFGGGTKLTVLLEDLKNVFPPEVAVFEPSEAEISHTQKATLVCLATGFYPDHVELSWWVNGKEVHSGVCTDPQPLKEQPALNDSRYCLSSRLRVSATFWQNPRNHFRCQVQFYGLSENDEWTQDRAKPVTQIVSAEAWGRADCGFTSESYQQGVLSATILYEILLGKATLYAVLVSALVLMAMVKRKDSRGRAKRSGSGATNFSLLKQAGDVEENPGPTSMDWIWRILFLVGAATGAHSGPEVQLVESGGGLVQAGGSLRLSCAASGRTFSMGWFRQAPGKEREFVAAITYSGGSPYYADSVKGRFTISRDNAKNTVYLQMNSLKPEDTAVYYCAANPTYGSDWNAENWGQGTQVTVSSGSGGGGSGGGGSGGGGSFEQLQLQESGPGLVKPSETLSLTCTVSGGSISSGSYFWGWIRQPPGKGLEWIGSIYYSGITYYNPSLKSRVTISVDTSKNQFSLKLSSVTAADTAVYYCARHDGAVAGLFDYWGQGTLVTVSSATRIQNPDPAVYQLRDSKSSDKSVCLFTDFDSQTNVSQSKDSDVYITDKCVLDMRSMDFKSNSAVAWSNKSDFACANAFNNSIIPEDTFFPSPESSCDVKLVEKSFETDTNLNFQNLSVIGFRILLLKVAGFNLLMTLRLWSS

SEQ ID NO: 18649 - protein, 887 aa, Artificial Sequence
  Synthetic Polypeptide
MALPVTALLLPLALLLHAARPSYVLTQPPSVSVAPGQTARITCGGKNIGSKSVHWYQQPPGQAPVVVVYDDSDRPSGIPERFSGSNSGNTATLTISRVEAGDEAVYYCQVWDSSSDHVVFGGGTKLTVLLEDLKNVFPPEVAVFEPSEAEISHTQKATLVCLATGFYPDHVELSWWVNGKEVHSGVCTDPQPLKEQPALNDSRYCLSSRLRVSATFWQNPRNHFRCQVQFYGLSENDEWTQDRAKPVTQIVSAEAWGRADCGFTSESYQQGVLSATILYEILLGKATLYAVLVSALVLMAMVKRKDSRGRAKRSGSGATNFSLLKQAGDVEENPGPTSMDWIWRILFLVGAATGAHSQLQLQESGPGLVKPSETLSLTCTVSGGSISSGDYYWGWIRQPPGKGLEWIGSISYSGSTYYNPSLKSRVTISVDTSRNQFSLKLSSVTAADTAVYYCTREDSSNWRSRGQGTLVTVSSSGGGGSGGGGSEVQLVESGGGLVQAGGSLRLSCAASGRTFSMGWFRQAPGKEREFVAAITYSGGSPYYADSVKGRFTISRDNAKNTVYLQMNSLKPEDTAVYYCAANPTYGSDWNAENWGQGTQVTVSSGSGGGGSGGGGSGGGGSFEQLQLQESGPGLVKPSETLSLTCTVSGGSISSGSYFWGWIRQPPGKGLEWIGSIYYSGITYYNPSLKSRVTISVDTSKNQFSLKLSSVTAADTAVYYCARHDGAVAGLFDYWGQGTLVTVSSATRIQNPDPAVYQLRDSKSSDKSVCLFTDFDSQTNVSQSKDSDVYITDKCVLDMRSMDFKSNSAVAWSNKSDFACANAFNNSIIPEDTFFPSPESSCDVKLVEKSFETDTNLNFQNLSVIGFRILLLKVAGFNLLMTLRLWSS

SEQ ID NO: 18650 - protein, 896 aa, Artificial Sequence
  Synthetic Polypeptide
MALPVTALLLPLALLLHAARPEVQVLESGGGLVQPGGSLRLSCAASGFTFSNFAMSWVRQAPGKGLEWVSTISGSAGTTDYADSVKGRFTISRDNSKKTLYLQMNSLRVEDTAVYYCADGRGPFFDYRGQGTLVTVSSGTGGGGSGGGGSGGGGSEFSYVLTQPPSVSVAPGQTARITCGGKNIGSKSVHWYQQPPGQAPVVVVYDDSDRPSGIPERFSGSNSGNTATLTISRVEAGDEAVYYCQVWDSSSDHVVFGGGTKLTVLLEDLKNVFPPEVAVFEPSEAEISHTQKATLVCLATGFYPDHVELSWWVNGKEVHSGVCTDPQPLKEQPALNDSRYCLSSRLRVSATFWQNPRNHFRCQVQFYGLSENDEWTQDRAKPVTQIVSAEAWGRADCGFTSESYQQGVLSATILYEILLGKATLYAVLVSALVLMAMVKRKDSRGRAKRSGSGATNFSLLKQAGDVEENPGPTSMDWIWRILFLVGAATGAHSGPEVQLVESGGGLVQAGGSLRLSCAASGRTFSMGWFRQAPGKEREFVAAITYSGGSPYYASSVRGRFTISRDNAKNTVYLQMNSLKPEDTAVYYCAANPTYGSDWNAENWGQGTQVTVSSGSGGGGSGGGGSGGGGSFEQLQLQESGPGLVKPSETLSLTCTVSGGSISSGSYFWGWIRQPPGKGLEWIGSIYYSGITYYNPSLKSRVTISVDTSKNQFSLKLSSVTAADTAVYYCARHDGAVAGLFDYWGQGTLVTVSSATRIQNPDPAVYQLRDSKSSDKSVCLFTDFDSQTNVSQSKDSDVYITDKCVLDMRSMDFKSNSAVAWSNKSDFACANAFNNSIIPEDTFFPSPESSCDVKLVEKSFETDTNLNFQNLSVIGFRILLLKVAGFNLLMTLRLWSS

SEQ ID NO: 18651 - protein, 727 aa, Artificial Sequence
  Synthetic Polypeptide
MALPVTALLLPLALLLHAARPSYVLTQPPSVSVAPGQTARITCGGNNLGSKSVHWYQQPPGQAPVVVVYDDSDRPSGIPERFSGSNSGNTATLTISRVEAGDEAVYYCQVWDSSSDHVVFGGGTKLTVLGGGGSGGGGSGGGGSQLQLQESGPGLVKPSETLSLTCTVSGGSISSGSYFWGWIRQPPGKGLEWIGSIYYSGITYYNPSLKSRVTISVDTSKNQFSLKLSSVTAADTAVYYCARHDGAVAGLFDYWGQGTLVTVSSATREQKLISEEDLAKPTTTPAPRPPTPAPTIASQPLSLRPEACRPAAGGAVHTRGLDFACDIYIWAPLAGTCGVLLLSLVITLYCKRGRKKLLYIFKQPFMRPVQTTQEEDGCSCRFPEEEEGGCELRVKFSRSADAPAYQQGQNQLYNELNLGRREEYDVLDKRRGRDPEMGGKPRRKNPQEGLYNELQKDKMAEAYSEIGMKGERRRGKGHDGLYQGLSTATKDTYDALHMQALPPRSSGSGEGRGSLLTCGDVEENPGPHMTEYKPTVRLATRDDVPRAVRTLAAAFADYPATRHTVDPDRHIERVTELQELFLTRVGLDIGKVWVADDGAAVAVWTTPESVEAGAVFAEIGPRMAELSGSRLAAQQQMEGLLAPHRPKEPAWFLATVGVSPDHQGKGLGSAVVLPGVEAAERAGVPAFLETSAPRNLPFYERLGFTVTADVEVPEGPRTWCMTRKPGA

SEQ ID NO: 18652 - protein, 721 aa, Artificial Sequence
  Synthetic Polypeptide
MALPVTALLLPLALLLHAARPSYVLTQPPSVSVAPGQTARITCGGNNLGSKSVHWYQQPPGQAPVVVVYDDSDRPSGIPERFSGSNSGNTATLTISRVEAGDEAVYYCQVWDSSSDHVVFGGGTKLTVLGGGGSGGGGSGGGGSQLQLQESGPGLVKPSETLSLTCTVSGGSISSGSYFWGWIRQPPGKGLEWIGSIYYSGITYYNPSLKSRVTISVDTSKNQFSLKLSSVTAADTAVYYCARHDGAVAGLFDYWGQGTLVTVSSATREQKLISEEDLKIEVMYPPPYLDNEKSNGTIIHVKGKHLCPSPLFPGPSKPFWVLVVVGGVLACYSLLVTVAFIIFWVRSKRSRLLHSDYMNMTPRRPGPTRKHYQPYAPPRDFAAYRSRVKFSRSADAPAYQQGQNQLYNELNLGRREEYDVLDKRRGRDPEMGGKPRRKNPQEGLYNELQKDKMAEAYSEIGMKGERRRGKGHDGLYQGLSTATKDTYDALHMQALPPRSSGSGEGRGSLLTCGDVEENPGPHMTEYKPTVRLATRDDVPRAVRTLAAAFADYPATRHTVDPDRHIERVTELQELFLTRVGLDIGKVWVADDGAAVAVWTTPESVEAGAVFAEIGPRMAELSGSRLAAQQQMEGLLAPHRPKEPAWFLATVGVSPDHQGKGLGSAVVLPGVEAAERAGVPAFLETSAPRNLPFYERLGFTVTADVEVPEGPRTWCMTRKPGA

SEQ ID NO: 18653 - protein, 498 aa, Artificial Sequence
  Synthetic Polypeptide
MALPVTALLLPLALLLHAARPSYVLTQPPSVSVAPGQTARITCGGNNLGSKSVHWYQQPPGQAPVVVVYDDSDRPSGIPERFSGSNSGNTATLTISRVEAGDEAVYYCQVWDSSSDHVVFGGGTKLTVLGGGGSGGGGSGGGGSQLQLQESGPGLVKPSETLSLTCTVSGGSISSGSYFWGWIRQPPGKGLEWIGSIYYSGITYYNPSLKSRVTISVDTSKNQFSLKLSSVTAADTAVYYCARHDGAVAGLFDYWGQGTLVTVSSATREQKLISEEDLKIEVMYPPPYLDNEKSNGTIIHVKGKHLCPSPLFPGPSKPFWVLVVVGGVLACYSLLVTVAFIIFWVRSKRSRLLHSDYMNMTPRRPGPTRKHYQPYAPPRDFAAYRSRVKFSRSADAPAYQQGQNQLYNELNLGRREEYDVLDKRRGRDPEMGGKPRRKNPQEGLYNELQKDKMAEAYSEIGMKGERRRGKGHDGLYQGLSTATKDTYDALHMQALPPR

SEQ ID NO: 18654 - protein, 504 aa, Artificial Sequence
  Synthetic Polypeptide
MALPVTALLLPLALLLHAARPSYVLTQPPSVSVAPGQTARITCGGNNLGSKSVHWYQQPPGQAPVVVVYDDSDRPSGIPERFSGSNSGNTATLTISRVEAGDEAVYYCQVWDSSSDHVVFGGGTKLTVLGGGGSGGGGSGGGGSQLQLQESGPGLVKPSETLSLTCTVSGGSISSGSYFWGWIRQPPGKGLEWIGSIYYSGITYYNPSLKSRVTISVDTSKNQFSLKLSSVTAADTAVYYCARHDGAVAGLFDYWGQGTLVTVSSATREQKLISEEDLAKPTTTPAPRPPTPAPTIASQPLSLRPEACRPAAGGAVHTRGLDFACDIYIWAPLAGTCGVLLLSLVITLYCKRGRKKLLYIFKQPFMRPVQTTQEEDGCSCRFPEEEEGGCELRVKFSRSADAPAYQQGQNQLYNELNLGRREEYDVLDKRRGRDPEMGGKPRRKNPQEGLYNELQKDKMAEAYSEIGMKGERRRGKGHDGLYQGLSTATKDTYDALHMQALPPR

SEQ ID NO: 18655 - protein, 504 aa, Artificial Sequence
  Synthetic Polypeptide
MALPVTALLLPLALLLHAARPQLQLQESGPGLVKPSETLSLTCTVSGGSISSGSYFWGWIRQPPGKGLEWIGSIYYSGITYYNPSLKSRVTISVDTSKNQFSLKLSSVTAADTAVYYCARHDGAVAGLFDYWGQGTLVTVSSAGGGGSGGGGSGGGGSSYVLTQPPSVSVAPGQTARITCGGNNLGSKSVHWYQQPPGQAPVVVVYDDSDRPSGIPERFSGSNSGNTATLTISRVEAGDEAVYYCQVWDSSSDHVVFGGGTKLTVLTREQKLISEEDLAKPTTTPAPRPPTPAPTIASQPLSLRPEACRPAAGGAVHTRGLDFACDIYIWAPLAGTCGVLLLSLVITLYCKRGRKKLLYIFKQPFMRPVQTTQEEDGCSCRFPEEEEGGCELRVKFSRSADAPAYQQGQNQLYNELNLGRREEYDVLDKRRGRDPEMGGKPRRKNPQEGLYNELQKDKMAEAYSEIGMKGERRRGKGHDGLYQGLSTATKDTYDALHMQALPPR

SEQ ID NO: 18656 - protein, 917 aa, Artificial Sequence
  Synthetic Polypeptide
MALPVTALLLPLALLLHAARPSYVLTQPPSVSVAPGQTARITCGGNNLGSKSVHWYQQPPGQAPVVVVYDDSDRPSGIPERFSGSNSGNTATLTISRVEAGDEAVYYCQVWDSSSDHVVFGGGTKLTVLGGGGSGGGGSGGGGSQLQLQESGPGLVKPSETLSLTCTVSGGSISSGSYFWGWIRQPPGKGLEWIGSIYYSGITYYNPSLKSRVTISVDTSKNQFSLKLSSVTAADTAVYYCARHDGAVAGLFDYWGQGTLVTVSSATREQKLISEEDLAKPTTTPAPRPPTPAPTIASQPLSLRPEACRPAAGGAVHTRGLDFACDIYIWAPLAGTCGVLLLSLVITLYCGRARVKFSRSADAPAYQQGQNQLYNELNLGRREEYDVLDKRRGRDPEMGGKPRRKNPQEGLYNELQKDKMAEAYSEIGMKGERRRGKGHDGLYQGLSTATKDTYDALHMQALPPRSRGSGATNFSLLKQAGDVEENPGPGIHMATYEVLCEVARKLGTDDREVVLFLLNVFIPQPTLAQLIGALRALKEEGRLTFPLLAECLFRAGRRDLLRDLLHLDPRFLERHLAGTMSYFSPYQLTVLHVDGELCARDIRSLIFLSKDTIGSRSTPQTFLHWVYCMENLDLLGPTDVDALMSMLRSLSRVDLQRQVQTLMGLHLSGPSHSQHYRHTPLETDFYDYKDDDDKTSGSGEGRGSLLTCGDVEENPGPHMTEYKPTVRLATRDDVPRAVRTLAAAFADYPATRHTVDPDRHIERVTELQELFLTRVGLDIGKVWVADDGAAVAVWTTPESVEAGAVFAEIGPRMAELSGSRLAAQQQMEGLLAPHRPKEPAWFLATVGVSPDHQGKGLGSAVVLPGVEAAERAGVPAFLETSAPRNLPFYERLGFTVTADVEVPEGPRTWCMTRKPGA

SEQ ID NO: 18657 - protein, 857 aa, Artificial Sequence
  Synthetic Polypeptide
MALPVTALLLPLALLLHAARPSYVLTQPPSVSVAPGQTARITCGGNNLGSKSVHWYQQPPGQAPVVVVYDDSDRPSGIPERFSGSNSGNTATLTISRVEAGDEAVYYCQVWDSSSDHVVFGGGTKLTVLLEIQNPDPAVYQLRDSKSSDKSVCLFTDFDSQTNVSQSKDSDVYITDKCVLDMRSMDFKSNSAVAWSNKSDFACANAFNNSIIPEDTFFPSSDVPCDVKLVEKSFETDTNLNFQNLSVIGFRILLLKVAGFNLLMTLRLWSSRAKRSGSGVKQTLNFDLLKLAGDVESNPGPTSMDWIWRILFLVGAATGAHSFEQLQLQESGPGLVKPSETLSLTCTVSGGSISSGSYFWGWIRQPPGKGLEWIGSIYYSGITYYNPSLKSRVTISVDTSKNQFSLKLSSVTAADTAVYYCARHDGAVAGLFDYWGQGTLVTVSSATREDLKNVFPPEVAVFEPSKAEIAHTQKATLVCLATGFYPDHVELSWWVNGKEVHSGVCTDPQPLKEQPALNDSRYCLSSRLRVSATFWQNPRNHFRCQVQFYGLSENDEWTQDRAKPVTQIVSAEAWGRADCGITSASYHQGVLSATILYEILLGKATLYAVLVSALVLMAMVKRKDSRGRAKRSGSGATNFSLLKQAGDVEENPGPSRGHMTEYKPTVRLATRDDVPRAVRTLAAAFADYPATRHTVDPDRHIERVTELQELFLTRVGLDIGKVWVADDGAAVAVWTTPESVEAGAVFAEIGPRMAELSGSRLAAQQQMEGLLAPHRPKEPAWFLATVGVSPDHQGKGLGSAVVLPGVEAAERAGVPAFLETSAPRNLPFYERLGFTVTADVEVPEGPRTWCMTRKPGA

SEQ ID NO: 18658 - protein, 856 aa, Artificial Sequence
  Synthetic Polypeptide
MALPVTALLLPLALLLHAARPSYVLTQPPSVSVAPGQTARITCGGNNLGSKSVHWYQQPPGQAPVVVVYDDSDRPSGIPERFSGSNSGNTATLTISRVEAGDEAVYYCQVWDSSSDHVVFGGGTKLTVLLEDLKNVFPPEVAVFEPSKAEIAHTQKATLVCLATGFYPDHVELSWWVNGKEVHSGVCTDPQPLKEQPALNDSRYCLSSRLRVSATFWQNPRNHFRCQVQFYGLSENDEWTQDRAKPVTQIVSAEAWGRADCGITSASYHQGVLSATILYEILLGKATLYAVLVSALVLMAMVKRKDSRGRAKRSGSGATNFSLLKQAGDVEENPGPTSMDWIWRILFLVGAATGAHSFEQLQLQESGPGLVKPSETLSLTCTVSGGSISSGSYFWGWIRQPPGKGLEWIGSIYYSGITYYNPSLKSRVTISVDTSKNQFSLKLSSVTAADTAVYYCARHDGAVAGLFDYWGQGTLVTVSSATRIQNPDPAVYQLRDSKSSDKSVCLFTDFDSQTNVSQSKDSDVYITDKCVLDMRSMDFKSNSAVAWSNKSDFACANAFNNSIIPEDTFFPSSDVPCDVKLVEKSFETDTNLNFQNLSVIGFRILLLKVAGFNLLMTLRLWSSRAKRSGSGVKQTLNFDLLKLAGDVESNPGPSRGHMTEYKPTVRLATRDDVPRAVRTLAAAFADYPATRHTVDPDRHIERVTELQELFLTRVGLDIGKVWVADDGAAVAVWTTPESVEAGAVFAEIGPRMAELSGSRLAAQQQMEGLLAPHRPKEPAWFLATVGVSPDHQGKGLGSAVVLPGVEAAERAGVPAFLETSAPRNLPFYERLGFTVTADVEVPEGPRTWCMTRKPGA

SEQ ID NO: 18659 - protein, 623 aa, Artificial Sequence
  Synthetic Polypeptide
MALPVTALLLPLALLLHAARPSYVLTQPPSVSVAPGQTARITCGGNNLGSKSVHWYQQPPGQAPVVVVYDDSDRPSGIPERFSGSNSGNTATLTISRVEAGDEAVYYCQVWDSSSDHVVFGGGTKLTVLLEDLKNVFPPEVAVFEPSEAEISHTQKATLVCLATGFYPDHVELSWWVNGKEVHSGVCTDPQPLKEQPALNDSRYCLSSRLRVSATFWQNPRNHFRCQVQFYGLSENDEWTQDRAKPVTQIVSAEAWGRADCGFTSESYQQGVLSATILYEILLGKATLYAVLVSALVLMAMVKRKDSRGRAKRSGSGATNFSLLKQAGDVEENPGPTSMDWIWRILFLVGAATGAHSFEQLQLQESGPGLVKPSETLSLTCTVSGGSISSGSYFWGWIRQPPGKGLEWIGSIYYSGITYYNPSLKSRVTISVDTSKNQFSLKLSSVTAADTAVYYCARHDGAVAGLFDYWGQGTLVTVSSATRIQNPDPAVYQLRDSKSSDKSVCLFTDFDSQTNVSQSKDSDVYITDKCVLDMRSMDFKSNSAVAWSNKSDFACANAFNNSIIPEDTFFPSPESSCDVKLVEKSFETDTNLNFQNLSVIGFRILLLKVAGFNLLMTLRLWSS

SEQ ID NO: 18660 - protein, 848 aa, Artificial Sequence
  Synthetic Polypeptide
MALPVTALLLPLALLLHAARPSYVLTQPPSVSVAPGQTARITCGGNNLGSKSVHWYQQPPGQAPVVVVYDDSDRPSGIPERFSGSNSGNTATLTISRVEAGDEAVYYCQVWDSSSDHVVFGGGTKLTVLLEDLKNVFPPEVAVFEPSEAEISHTQKATLVCLATGFYPDHVELSWWVNGKEVHSGVCTDPQPLKEQPALNDSRYCLSSRLRVSATFWQNPRNHFRCQVQFYGLSENDEWTQDRAKPVTQIVSAEAWGRADCGFTSESYQQGVLSATILYEILLGKATLYAVLVSALVLMAMVKRKDSRGRAKRSGSGATNFSLLKQAGDVEENPGPTSMDWIWRILFLVGAATGAHSFEQLQLQESGPGLVKPSETLSLTCTVSGGSISSGSYFWGWIRQPPGKGLEWIGSIYYSGITYYNPSLKSRVTISVDTSKNQFSLKLSSVTAADTAVYYCARHDGAVAGLFDYWGQGTLVTVSSATRIQNPDPAVYQLRDSKSSDKSVCLFTDFDSQTNVSQSKDSDVYITDKCVLDMRSMDFKSNSAVAWSNKSDFACANAFNNSIIPEDTFFPSPESSCDVKLVEKSFETDTNLNFQNLSVIGFRILLLKVAGFNLLMTLRLWSSRAKRSGSGVKQTLNFDLLKLAGDVESNPGPSRGGIHTMATYEVLCEVARKLGTDDREVVLFLLNVFIPQPTLAQLIGALRALKEEGRLTFPLLAECLFRAGRRDLLRDLLHLDPRFLERHLAGTMSYFSPYQLTVLHVDGELCARDIRSLIFLSKDTIGSRSTPQTFLHWVYCMENLDLLGPTDVDALMSMLRSLSRVDLQRQVQTLMGLHLSGPSHSQHYRHTP

SEQ ID NO: 18661 - protein, 627 aa, Artificial Sequence
  Synthetic Polypeptide
MALPVTALLLPLALLLHAARPSYVLTQPPSVSVAPGQTARITCGGNNLGSKSVHWYQQPPGQAPVVVVYDDSDRPSGIPERFSGSNSGNTATLTISRVEAGDEAVYYCQVWDSSSDHVVFGGGTKLTVLLEIQNPDPAVYQLRDSKSSDKSVCLFTDFDSQTNVSQSKDSDVYITDKCVLDMRSMDFKSNSAVAWSNKSDFACANAFNNSIIPEDTFFPSPESSCDVKLVEKSFETDTNLNFQNLSVIGFRILLLKVAGFNLLMTLRLWSSRAKRSGSGVKQTLNFDLLKLAGDVESNPGPTSMDWIWRILFLVGAATGAHSFEQLQLQESGPGLVKPSETLSLTCTVSGGSISSGSYFWGWIRQPPGKGLEWIGSIYYSGITYYNPSLKSRVTISVDTSKNQFSLKLSSVTAADTAVYYCARHDGAVAGLFDYWGQGTLVTVSSATREDLKNVFPPEVAVFEPSEAEISHTQKATLVCLATGFYPDHVELSWWVNGKEVHSGVCTDPQPLKEQPALNDSRYCLSSRLRVSATFWQNPRNHFRCQVQFYGLSENDEWTQDRAKPVTQIVSAEAWGRADCGFTSESYQQGVLSATILYEILLGKATLYAVLVSALVLMAMVKRKDSRG

SEQ ID NO: 18662 - protein, 849 aa, Artificial Sequence
  Synthetic Polypeptide
MALPVTALLLPLALLLHAARPSYVLTQPPSVSVAPGQTARITCGGNNLGSKSVHWYQQPPGQAPVVVVYDDSDRPSGIPERFSGSNSGNTATLTISRVEAGDEAVYYCQVWDSSSDHVVFGGGTKLTVLLEIQNPDPAVYQLRDSKSSDKSVCLFTDFDSQTNVSQSKDSDVYITDKCVLDMRSMDFKSNSAVAWSNKSDFACANAFNNSIIPEDTFFPSPESSCDVKLVEKSFETDTNLNFQNLSVIGFRILLLKVAGFNLLMTLRLWSSRAKRSGSGVKQTLNFDLLKLAGDVESNPGPTSMDWIWRILFLVGAATGAHSFEQLQLQESGPGLVKPSETLSLTCTVSGGSISSGSYFWGWIRQPPGKGLEWIGSIYYSGITYYNPSLKSRVTISVDTSKNQFSLKLSSVTAADTAVYYCARHDGAVAGLFDYWGQGTLVTVSSATREDLKNVFPPEVAVFEPSEAEISHTQKATLVCLATGFYPDHVELSWWVNGKEVHSGVCTDPQPLKEQPALNDSRYCLSSRLRVSATFWQNPRNHFRCQVQFYGLSENDEWTQDRAKPVTQIVSAEAWGRADCGFTSESYQQGVLSATILYEILLGKATLYAVLVSALVLMAMVKRKDSRGRAKRSGSGATNFSLLKQAGDVEENPGPSRGGIHTMATYEVLCEVARKLGTDDREVVLFLLNVFIPQPTLAQLIGALRALKEEGRLTFPLLAECLFRAGRRDLLRDLLHLDPRFLERHLAGTMSYFSPYQLTVLHVDGELCARDIRSLIFLSKDTIGSRSTPQTFLHWVYCMENLDLLGPTDVDALMSMLRSLSRVDLQRQVQTLMGLHLSGPSHSQHYRHTP

SEQ ID NO: 18663 - protein, 901 aa, Artificial Sequence
  Synthetic Polypeptide
MALPVTALLLPLALLLHAARPLEGKPIPNPLLGLDSTGSGEDLKNVFPPEVAVFEPSKAEIAHTQKATLVCLATGFYPDHVELSWWVNGKEVHSGVCTDPQPLKEQPALNDSRYCLSSRLRVSATFWQNPRNHFRCQVQFYGLSENDEWTQDRAKPVTQIVSAEAWGRADCGITSASYHQGVLSATILYEILLGKATLYAVLVSALVLMAMVKRKDSRGRAKRSGSGATNFSLLKQAGDVEENPGPTSMALPVTALLLPLALLLHAARPSYVLTQPPSVSVAPGQTARITCGGNNLGSKSVHWYQQPPGQAPVVVVYDDSDRPSGIPERFSGSNSGNTATLTISRVEAGDEAVYYCQVWDSSSDHVVFGGGTKLTVLGGGGSGGGGSGGGGSQLQLQESGPGLVKPSETLSLTCTVSGGSISSGSYFWGWIRQPPGKGLEWIGSIYYSGITYYNPSLKSRVTISVDTSKNQFSLKLSSVTAADTAVYYCARHDGAVAGLFDYWGQGTLVTVSSATREQKLISEEDGSGIQNPDPAVYQLRDSKSSDKSVCLFTDFDSQTNVSQSKDSDVYITDKCVLDMRSMDFKSNSAVAWSNKSDFACANAFNNSIIPEDTFFPSSDVPCDVKLVEKSFETDTNLNFQNLSVIGFRILLLKVAGFNLLMTLRLWSSRAKRSGSGVKQTLNFDLLKLAGDVESNPGPSRGHMTEYKPTVRLATRDDVPRAVRTLAAAFADYPATRHTVDPDRHIERVTELQELFLTRVGLDIGKVWVADDGAAVAVWTTPESVEAGAVFAEIGPRMAELSGSRLAAQQQMEGLLAPHRPKEPAWFLATVGVSPDHQGKGLGSAVVLPGVEAAERAGVPAFLETSAPRNLPFYERLGFTVTADVEVPEGPRTWCMTRKPGA

SEQ ID NO: 18664 - protein, 902 aa, Artificial Sequence
  Synthetic Polypeptide
MALPVTALLLPLALLLHAARPLEQKLISEEDLGSGDRPDPAVYQLRDSKSSDKSVCLFTDFDSQTNVSQSKDSDVYITDKCVLDMRSMDFKSNSAVAWSNKSDFACANAFNNSIIPEDTFFPSPESSCDVKLVEKSFETDTNLNFQNLSVIGFRILLLKVAGFNLLMTLRLWSSSSRAKRSGSGVKQTLNFDLLKLAGDVESNPGPTSMALPVTALLLPLALLLHAARPSYVLTQPPSVSVAPGQTARITCGGNNLGSKSVHWYQQPPGQAPVVVVYDDSDRPSGIPERFSGSNSGNTATLTISRVEAGDEAVYYCQVWDSSSDHVVFGGGTKLTVLGGGGSGGGGSGGGGSQLQLQESGPGLVKPSETLSLTCTVSGGSISSGSYFWGWIRQPPGKGLEWIGSIYYSGITYYNPSLKSRVTISVDTSKNQFSLKLSSVTAADTAVYYCARHDGAVAGLFDYWGQGTLVTVSSATRGKPIPNPLLGLDSTGSGEDLKNVFPPEVAVFEPSEAEISHTQKATLVCLATGFYPDHVELSWWVNGKEVHSGVCTDPQPLKEQPALNDSRYCLSSRLRVSATFWQNPRNHFRCQVQFYGLSENDEWTQDRAKPVTQIVSAEAWGRADCGFTSESYQQGVLSATILYEILLGKATLYAVLVSALVLMAMVKRKDSRGRAKRSGSGATNFSLLKQAGDVEENPGPSRGHMTEYKPTVRLATRDDVPRAVRTLAAAFADYPATRHTVDPDRHIERVTELQELFLTRVGLDIGKVWVADDGAAVAVWTTPESVEAGAVFAEIGPRMAELSGSRLAAQQQMEGLLAPHRPKEPAWFLATVGVSPDHQGKGLGSAVVLPGVEAAERAGVPAFLETSAPRNLPFYERLGFTVTADVEVPEGPRTWCMTRKPGA

SEQ ID NO: 18665 - protein, 856 aa, Artificial Sequence
  Synthetic Polypeptide
MALPVTALLLPLALLLHAARPSYVLTQPPSVSVAPGQTARITCGGNNLGSKSVHWYQQPPGQAPVVVVYDDSDRPSGIPERFSGSNSGNTATLTISRVEAGDEAVYYCQVWDSSSDHVVFGGGTKLTVLLEDLKNVFPPEVAVFEPSEAEISHTQKATLVCLATGFYPDHVELSWWVNGKEVHSGVSTDPQPLKEQPALNDSRYCLSSRLRVSATFWQNPRNHFRCQVQFYGLSENDEWTQDRAKPVTQIVSAEAWGRADCGFTSESYQQGVLSATILYEILLGKATLYAVLVSALVLMAMVKRKDSRGRAKRSGSGATNFSLLKQAGDVEENPGPTSMDWIWRILFLVGAATGAHSFEQLQLQESGPGLVKPSETLSLTCTVSGGSISSGSYFWGWIRQPPGKGLEWIGSIYYSGITYYNPSLKSRVTISVDTSKNQFSLKLSSVTAADTAVYYCARHDGAVAGLFDYWGQGTLVTVSSATRIQNPDPAVYQLRDSKSSDKSVCLFTDFDSQTNVSQSKDSDVYITDKTVLDMRSMDFKSNSAVAWSNKSDFACANAFNNSIIPEDTFFPSPESSCDVKLVEKSFETDTNLNFQNLSVIGFRILLLKVAGFNLLMTLRLWSSRAKRSGSGVKQTLNFDLLKLAGDVESNPGPSRGHMTEYKPTVRLATRDDVPRAVRTLAAAFADYPATRHTVDPDRHIERVTELQELFLTRVGLDIGKVWVADDGAAVAVWTTPESVEAGAVFAEIGPRMAELSGSRLAAQQQMEGLLAPHRPKEPAWFLATVGVSPDHQGKGLGSAVVLPGVEAAERAGVPAFLETSAPRNLPFYERLGFTVTADVEVPEGPRTWCMTRKPGA

SEQ ID NO: 18666 - protein, 938 aa, Artificial Sequence
  Synthetic Polypeptide
MALPVTALLLPLALLLHAARPSYVLTQPPSVSVAPGQTARITCGGNNLGSKSVHWYQQPPGQAPVVVVYDDSDRPSGIPERFSGSNSGNTATLTISRVEAGDEAVYYCQVWDSSSDHVVFGGGTKLTVLLEDLKNVFPPEVAVFEPSEAEISHTQKATLVCLATGFYPDHVELSWWVNGKEVHSGVSTDPQPLKEQPALNDSRYCLSSRLRVSATFWQNPRNHFRCQVQFYGLSENDEWTQDRAKPVTQIVSAEAWGRADCGFTSESYQQGVLSATILYEILLGKATLYAVLVSALVLMAMVKRKDSRGRAKRSGSGATNFSLLKQAGDVEENPGPTSMDWIWRILFLVGAATGAHSFEQLQLQESGPGLVKPSETLSLTCTVSGGSISSGSYFWGWIRQPPGKGLEWIGSIYYSGITYYNPSLKSRVTISVDTSKNQFSLKLSSVTAADTAVYYCARHDGAVAGLFDYWGQGTLVTVSSATREQKLISEEDGSGTPFPSLAPPIMLLVDGKQQMVVVCLVLDVAPPGLDSPIWFSAGNGSALDAFTYGPSPATDGTWTNLAHLSLPSEELASWEPLVCHTGPGAEGHSRSTQPMHLSGEASTARTCPQEPLRGTPGGALWLGVLRLLLFKLLLFDLLLTCSCLCDPAGPLPSPATTTRLRALGSHRLHPATETGGREATSSPRPQPRDRRWGDTPPGRKPGSPVRAKRSGSGVKQTLNFDLLKLAGDVESNPGPSRGHMTEYKPTVRLATRDDVPRAVRTLAAAFADYPATRHTVDPDRHIERVTELQELFLTRVGLDIGKVWVADDGAAVAVWTTPESVEAGAVFAEIGPRMAELSGSRLAAQQQMEGLLAPHRPKEPAWFLATVGVSPDHQGKGLGSAVVLPGVEAAERAGVPAFLETSAPRNLPFYERLGFTVTADVEVPEGPRTWCMTRKPGA

SEQ ID NO: 18667 - protein, 956 aa, Artificial Sequence
  Synthetic Polypeptide
MALPVTALLLPLALLLHAARPLEDLKNVFPPEVAVFEPSEAEISHTQKATLVCLATGFYPDHVELSWWVNGKEVHSGVSTDPQPLKEQPALNDSRYCLSSRLRVSATFWQNPRNHFRCQVQFYGLSENDEWTQDRAKPVTQIVSAEAWGRADCGFTSESYQQGVLSATILYEILLGKATLYAVLVSALVLMAMVKRKDSRGRAKRSGSGATNFSLLKQAGDVEENPGPTSMALPVTALLLPLALLLHAARPSYVLTQPPSVSVAPGQTARITCGGNNLGSKSVHWYQQPPGQAPVVVVYDDSDRPSGIPERFSGSNSGNTATLTISRVEAGDEAVYYCQVWDSSSDHVVFGGGTKLTVLGGGGSGGGGSGGGGSQLQLQESGPGLVKPSETLSLTCTVSGGSISSGSYFWGWIRQPPGKGLEWIGSIYYSGITYYNPSLKSRVTISVDTSKNQFSLKLSSVTAADTAVYYCARHDGAVAGLFDYWGQGTLVTVSSATREQKLISEEDLGSGTPFPSLAPPIMLLVDGKQQMVVVCLVLDVAPPGLDSPIWFSAGNGSALDAFTYGPSPATDGTWTNLAHLSLPSEELASWEPLVCHTGPGAEGHSRSTQPMHLSGEASTARTCPQEPLRGTPGGALWLGVLRLLLFKLLLFDLLLTCSCLCDPAGPLPSPATTTRLRALGSHRLHPATETGGREATSSPRPQPRDRRWGDTPPGRKPGSPVRAKRSGSGVKQTLNFDLLKLAGDVESNPGPSRSRGHMTEYKPTVRLATRDDVPRAVRTLAAAFADYPATRHTVDPDRHIERVTELQELFLTRVGLDIGKVWVADDGAAVAVWTTPESVEAGAVFAEIGPRMAELSGSRLAAQQQMEGLLAPHRPKEPAWFLATVGVSPDHQGKGLGSAVVLPGVEAAERAGVPAFLETSAPRNLPFYERLGFTVTADVEVPEGPRTWCMTRKPGA

SEQ ID NO: 18668 - protein, 893 aa, Artificial Sequence
  Synthetic Polypeptide
MALPVTALLLPLALLLHAARPSYVLTQPPSVSVAPGQTARITCGGNNLGSKSVHWYQQPPGQAPVVVVYDDSDRPSGIPERFSGSNSGNTATLTISRVEAGDEAVYYCQVWDSSSDHVVFGGGTKLTVLLEGKPIPNPLLGLDSTGSGDKQLDADVSPKPTIFLPSIAETKLQKAGTYLCLLEKFFPDVIKIHWQEKKSNTILGSQEGNTMKTNDTYMKFSWLTVPEKSLDKEHRCIVRHENNKNGVDQEIIFPPIKTDVITMDPKDNCSKDANDTLLLQLTNTSAYYMYLLLLLKSVVYFAIITCCLLRRTAFCCNGEKSRAKRSGSGATNFSLLKQAGDVEENPGPTSMDWIWRILFLVGAATGAHSFEQLQLQESGPGLVKPSETLSLTCTVSGGSISSGSYFWGWIRQPPGKGLEWIGSIYYSGITYYNPSLKSRVTISVDTSKNQFSLKLSSVTAADTAVYYCARHDGAVAGLFDYWGQGTLVTVSSATREQKLISEEDGSGSQPHTKPSVFVMKNGTNVACLVKEFYPKDIRINLVSSKKITEFDPAIVISPSGKYNAVKLGKYEDSNSVTCSVQHDNKTVHSTDFEVKTDSTDHVKPKETENTKQPSKSCHKPKAIVHTEKVNMMSLTVLGLRMLFAKTVAVNFLLTAKLFFLRAKRSGSGVKQTLNFDLLKLAGDVESNPGPSRGHMTEYKPTVRLATRDDVPRAVRTLAAAFADYPATRHTVDPDRHIERVTELQELFLTRVGLDIGKVWVADDGAAVAVWTTPESVEAGAVFAEIGPRMAELSGSRLAAQQQMEGLLAPHRPKEPAWFLATVGVSPDHQGKGLGSAVVLPGVEAAERAGVPAFLETSAPRNLPFYERLGFTVTADVEVPEGPRTWCMTRKPGA

SEQ ID NO: 18669 - protein, 631 aa, Artificial Sequence
  Synthetic Polypeptide
MALPVTALLLPLALLLHAARPSYVLTQPPSVSVAPGQTARITCGGNNLGSKSVHWYQQPPGQAPVVVVYDDSDRPSGIPERFSGSNSGNTATLTISRVEAGDEAVYYCQVWDSSSDHVVFGGGTKLTVLLESQPHTKPSVFVMKNGTNVACLVKEFYPKDIRINLVSSKKITEFDPAIVISPSGKYNAVKLGKYEDSNSVTCSVQHDNKTVHSTDFEVKTDSTDHVKPKETENTKQPSKSCHKPKAIVHTEKVNMMSLTVLGLRMLFAKTVAVNFLLTAKLFFLRAKRSGSGATNFSLLKQAGDVEENPGPTSMDWIWRILFLVGAATGAHSFEQLQLQESGPGLVKPSETLSLTCTVSGGSISSGSYFWGWIRQPPGKGLEWIGSIYYSGITYYNPSLKSRVTISVDTSKNQFSLKLSSVTAADTAVYYCARHDGAVAGLFDYWGQGTLVTVSSATRDKQLDADVSPKPTIFLPSIAETKLQKAGTYLCLLEKFFPDVIKIHWQEKKSNTILGSQEGNTMKTNDTYMKFSWLTVPEKSLDKEHRCIVRHENNKNGVDQEIIFPPIKTDVITMDPKDNCSKDANDTLLLQLTNTSAYYMYLLLLLKSVVYFAIITCCLLRRTAFCCNGEKS

SEQ ID NO: 18670 - protein, 908 aa, Artificial Sequence
  Synthetic Polypeptide
MALPVTALLLPLALLLHAARPLEGKPIPNPLLGLDSTGSGDKQLDADVSPKPTIFLPSIAETKLQKAGTYLCLLEKFFPDVIKIHWQEKKSNTILGSQEGNTMKTNDTYMKFSWLTVPEKSLDKEHRCIVRHENNKNGVDQEIIFPPIKTDVITMDPKDNCSKDANDTLLLQLTNTSAYYMYLLLLLKSVVYFAIITCCLLRRTAFCCNGEKSRAKRSGSGATNFSLLKQAGDVEENPGPTSMALPVTALLLPLALLLHAARPSYVLTQPPSVSVAPGQTARITCGGNNLGSKSVHWYQQPPGQAPVVVVYDDSDRPSGIPERFSGSNSGNTATLTISRVEAGDEAVYYCQVWDSSSDHVVFGGGTKLTVLGGGGSGGGGSGGGGSQLQLQESGPGLVKPSETLSLTCTVSGGSISSGSYFWGWIRQPPGKGLEWIGSIYYSGITYYNPSLKSRVTISVDTSKNQFSLKLSSVTAADTAVYYCARHDGAVAGLFDYWGQGTLVTVSSATREQKLISEEDGSGSQPHTKPSVFVMKNGTNVACLVKEFYPKDIRINLVSSKKITEFDPAIVISPSGKYNAVKLGKYEDSNSVTCSVQHDNKTVHSTDFEVKTDSTDHVKPKETENTKQPSKSCHKPKAIVHTEKVNMMSLTVLGLRMLFAKTVAVNFLLTAKLFFLRAKRSGSGVKQTLNFDLLKLAGDVESNPGPSRGHMTEYKPTVRLATRDDVPRAVRTLAAAFADYPATRHTVDPDRHIERVTELQELFLTRVGLDIGKVWVADDGAAVAVWTTPESVEAGAVFAEIGPRMAELSGSRLAAQQQMEGLLAPHRPKEPAWFLATVGVSPDHQGKGLGSAVVLPGVEAAERAGVPAFLETSAPRNLPFYERLGFTVTADVEVPEGPRTWCMTRKPGA

SEQ ID NO: 18671 - protein, 1033 aa, Artificial Sequence
  Synthetic Polypeptide
MALPVTALLLPLALLLHAARPSYVLTQPPSVSVAPGQTARITCGGNNLGSKSVHWYQQPPGQAPVVVVYDDSDRPSGIPERFSGSNSGNTATLTISRVEAGDEAVYYCQVWDSSSDHVVFGGGTKLTVLGQPKANPTVTLFPPSSEELQANKATLVCLISDFYPGAVTVAWKADGSPVKAGVETTKPSKQSNNKYAASSYLSLTPEQWKSHRSYSCQVTHEGSTVEKTVAPTECSGSQSFGLLDPKLCYLLDGILFIYGVILTALFLRVKFSRSADAPAYQQGQNQLYNELNLGRREEYDVLDKRRGRDPEMGGKPQRRKNPQEGLYNELQKDKMAEAYSEIGMKGERRRGKGHDGLYQGLSTATKDTYDALHMQALPPRRAKRSGSGATNFSLLKQAGDVEENPGPTSMDWIWRILFLVGAATGAHSFEQLQLQESGPGLVKPSETLSLTCTVSGGSISSGSYFWGWIRQPPGKGLEWIGSIYYSGITYYNPSLKSRVTISVDTSKNQFSLKLSSVTAADTAVYYCARHDGAVAGLFDYWGQGTLVTVSSAASTKGPSVFPLAPSSKSTSGGTAALGCLVKDYFPEPVTVSWNSGALTSGVHTFPAVLQSSGLYSLSSVVTVPSSSLGTQTYICNVNHKPSNTKVDKRVEPKSCGTQSFGLLDPKLCYLLDGILFIYGVILTALFLRVKFSRSADAPAYQQGQNQLYNELNLGRREEYDVLDKRRGRDPEMGGKPQRRKNPQEGLYNELQKDKMAEAYSEIGMKGERRRGKGHDGLYQGLSTATKDTYDALHMQALPPRRAKRSGSGVKQTLNFDLLKLAGDVESNPGPSRGHMTEYKPTVRLATRDDVPRAVRTLAAAFADYPATRHTVDPDRHIERVTELQELFLTRVGLDIGKVWVADDGAAVAVWTTPESVEAGAVFAEIGPRMAELSGSRLAAQQQMEGLLAPHRPKEPAWFLATVGVSPDHQGKGLGSAVVLPGVEAAERAGVPAFLETSAPRNLPFYERLGFTVTADVEVPEGPRTWCMTRKPGA

SEQ ID NO: 18672 - protein, 819 aa, Artificial Sequence
  Synthetic Polypeptide
MALPVTALLLPLALLLHAARPSYVLTQPPSVSVAPGQTARITCGGNNLGSKSVHWYQQPPGQAPVVVVYDDSDRPSGIPERFSGSNSGNTATLTISRVEAGDEAVYYCQVWDSSSDHVVFGGGTKLTVLLEDLKNVFPPEVAVFEPSEAEISHTQKATLVCLATGFYPDHVELSWWVNGKEVHSGVSTDPQPLKEQPALNDSRYCLSSRLRVSATFWQNPRNHFRCQVQFYGLSENDEWTQDRAKPVTQIVSAEAWGRADCGSQSFGLLDPKLCYLLDGILFIYGVILTALFLRVKFSRSADAPAYQQGQNQLYNELNLGRREEYDVLDKRRGRDPEMGGKPQRRKNPQEGLYNELQKDKMAEAYSEIGMKGERRRGKGHDGLYQGLSTATKDTYDALHMQALPPRRAKRSGSGATNFSLLKQAGDVEENPGPTSMDWIWRILFLVGAATGAHSFEQLQLQESGPGLVKPSETLSLTCTVSGGSISSGSYFWGWIRQPPGKGLEWIGSIYYSGITYYNPSLKSRVTISVDTSKNQFSLKLSSVTAADTAVYYCARHDGAVAGLFDYWGQGTLVTVSSATRIQNPDPAVYQLRDSKSSDKSVCLFTDFDSQTNVSQSKDSDVYITDKTVLDMRSMDFKSNSAVAWSNKSDFACANAFNNSIIPEDTFFPSPESSCGTQSFGLLDPKLCYLLDGILFIYGVILTALFLRVKFSRSADAPAYQQGQNQLYNELNLGRREEYDVLDKRRGRDPEMGGKPQRRKNPQEGLYNELQKDKMAEAYSEIGMKGERRRGKGHDGLYQGLSTATKDTYDALHMQALPPR

SEQ ID NO: 18673 - protein, 819 aa, Artificial Sequence
  Synthetic Polypeptide
MALPVTALLLPLALLLHAARPSYVLTQPPSVSVAPGQTARITCGGNNLGSKSVHWYQQPPGQAPVVVVYDDSDRPSGIPERFSGSNSGNTATLTISRVEAGDEAVYYCQVWDSSSDHVVFGGGTKLTVLLEDLKNVFPPEVAVFEPSKAEIAHTQKATLVCLATGFYPDHVELSWWVNGKEVHSGVCTDPQPLKEQPALNDSRYCLSSRLRVSATFWQNPRNHFRCQVQFYGLSENDEWTQDRAKPVTQIVSAEAWGRADCGSQSFGLLDPKLCYLLDGILFIYGVILTALFLRVKFSRSADAPAYQQGQNQLYNELNLGRREEYDVLDKRRGRDPEMGGKPQRRKNPQEGLYNELQKDKMAEAYSEIGMKGERRRGKGHDGLYQGLSTATKDTYDALHMQALPPRRAKRSGSGATNFSLLKQAGDVEENPGPTSMDWIWRILFLVGAATGAHSFEQLQLQESGPGLVKPSETLSLTCTVSGGSISSGSYFWGWIRQPPGKGLEWIGSIYYSGITYYNPSLKSRVTISVDTSKNQFSLKLSSVTAADTAVYYCARHDGAVAGLFDYWGQGTLVTVSSATRIQNPDPAVYQLRDSKSSDKSVCLFTDFDSQTNVSQSKDSDVYITDKCVLDMRSMDFKSNSAVAWSNKSDFACANAFNNSIIPEDTFFPSSDVPCGTQSFGLLDPKLCYLLDGILFIYGVILTALFLRVKFSRSADAPAYQQGQNQLYNELNLGRREEYDVLDKRRGRDPEMGGKPQRRKNPQEGLYNELQKDKMAEAYSEIGMKGERRRGKGHDGLYQGLSTATKDTYDALHMQALPPR

SEQ ID NO: 18674 - protein, 890 aa, Artificial Sequence
  Synthetic Polypeptide
MALPVTALLLPLALLLHAARPSYVLTQPPSVSVAPGQTARITCGGNNLGSKSVHWYQQPPGQAPVVVVYDDSDRPSGIPERFSGSNSGNTATLTISRVEAGDEAVYYCQVWDSSSDHVVFGGGTKLTVLLEGKPIPNPLLGLDSTGSGEDLKNVFPPEVAVFEPSEAEISHTQKATLVCLATGFYPDHVELSWWVNGKEVHSGVSTDPQPLKEQPALNDSRYCLSSRLRVSATFWQNPRNHFRCQVQFYGLSENDEWTQDRAKPVTQIVSAEAWGRADCGSQSFGLLDPKLCYLLDGILFIYGVILTALFLRVKFSRSADAPAYQQGQNQLYNELNLGRREEYDVLDKRRGRDPEMGGKPQRRKNPQEGLYNELQKDKMAEAYSEIGMKGERRRGKGHDGLYQGLSTATKDTYDALHMQALPPRRAKRSGSGATNFSLLKQAGDVEENPGPTSMDWIWRILFLVGAATGAHSFEQLQLQESGPGLVKPSETLSLTCTVSGGSISSGSYFWGWIRQPPGKGLEWIGSIYYSGITYYNPSLKSRVTISVDTSKNQFSLKLSSVTAADTAVYYCARHDGAVAGLFDYWGQGTLVTVSSATREQKLISEEDGSGIQNPDPAVYQLRDSKSSDKSVCLFTDFDSQTNVSQSKDSDVYITDKTVLDMRSMDFKSNSAVAWSNKSDFACANAFNNSIIPEDTFFPSPESSCGTQSFGLLDPKLCYLLDGILFIYGVILTALFLRSKRSRLLHSDYMNMTPRRPGPTRKHYQPYAPPRDFAAYRSRVKFSRSADAPAYQQGQNQLYNELNLGRREEYDVLDKRRGRDPEMGGKPQRRKNPQEGLYNELQKDKMAEAYSEIGMKGERRRGKGHDGLYQGLSTATKDTYDALHMQALPPR

SEQ ID NO: 18675 - protein, 931 aa, Artificial Sequence
  Synthetic Polypeptide
MALPVTALLLPLALLLHAARPSYVLTQPPSVSVAPGQTARITCGGNNLGSKSVHWYQQPPGQAPVVVVYDDSDRPSGIPERFSGSNSGNTATLTISRVEAGDEAVYYCQVWDSSSDHVVFGGGTKLTVLLEGKPIPNPLLGLDSTGSGEDLKNVFPPEVAVFEPSEAEISHTQKATLVCLATGFYPDHVELSWWVNGKEVHSGVSTDPQPLKEQPALNDSRYCLSSRLRVSATFWQNPRNHFRCQVQFYGLSENDEWTQDRAKPVTQIVSAEAWGRADCGSQSFGLLDPKLCYLLDGILFIYGVILTALFLRSKRSRLLHSDYMNMTPRRPGPTRKHYQPYAPPRDFAAYRSRVKFSRSADAPAYQQGQNQLYNELNLGRREEYDVLDKRRGRDPEMGGKPQRRKNPQEGLYNELQKDKMAEAYSEIGMKGERRRGKGHDGLYQGLSTATKDTYDALHMQALPPRRAKRSGSGATNFSLLKQAGDVEENPGPTSMDWIWRILFLVGAATGAHSFEQLQLQESGPGLVKPSETLSLTCTVSGGSISSGSYFWGWIRQPPGKGLEWIGSIYYSGITYYNPSLKSRVTISVDTSKNQFSLKLSSVTAADTAVYYCARHDGAVAGLFDYWGQGTLVTVSSATREQKLISEEDGSGIQNPDPAVYQLRDSKSSDKSVCLFTDFDSQTNVSQSKDSDVYITDKTVLDMRSMDFKSNSAVAWSNKSDFACANAFNNSIIPEDTFFPSPESSCGTQSFGLLDPKLCYLLDGILFIYGVILTALFLRSKRSRLLHSDYMNMTPRRPGPTRKHYQPYAPPRDFAAYRSRVKFSRSADAPAYQQGQNQLYNELNLGRREEYDVLDKRRGRDPEMGGKPQRRKNPQEGLYNELQKDKMAEAYSEIGMKGERRRGKGHDGLYQGLSTATKDTYDALHMQALPPR

SEQ ID NO: 18676 - protein, 892 aa, Artificial Sequence
  Synthetic Polypeptide
MALPVTALLLPLALLLHAARPSYVLTQPPSVSVAPGQTARITCGGNNLGSKSVHWYQQPPGQAPVVVVYDDSDRPSGIPERFSGSNSGNTATLTISRVEAGDEAVYYCQVWDSSSDHVVFGGGTKLTVLLEGKPIPNPLLGLDSTGSGEDLKNVFPPEVAVFEPSEAEISHTQKATLVCLATGFYPDHVELSWWVNGKEVHSGVSTDPQPLKEQPALNDSRYCLSSRLRVSATFWQNPRNHFRCQVQFYGLSENDEWTQDRAKPVTQIVSAEAWGRADCGSQSFGLLDPKLCYLLDGILFIYGVILTALFLRVKFSRSADAPAYQQGQNQLYNELNLGRREEYDVLDKRRGRDPEMGGKPQRRKNPQEGLYNELQKDKMAEAYSEIGMKGERRRGKGHDGLYQGLSTATKDTYDALHMQALPPRRAKRSGSGATNFSLLKQAGDVEENPGPTSMDWIWRILFLVGAATGAHSFEQLQLQESGPGLVKPSETLSLTCTVSGGSISSGSYFWGWIRQPPGKGLEWIGSIYYSGITYYNPSLKSRVTISVDTSKNQFSLKLSSVTAADTAVYYCARHDGAVAGLFDYWGQGTLVTVSSATREQKLISEEDLGSGIQNPDPAVYQLRDSKSSDKSVCLFTDFDSQTNVSQSKDSDVYITDKTVLDMRSMDFKSNSAVAWSNKSDFACANAFNNSIIPEDTFFPSPESSCGTQSFGLLDPKLCYLLDGILFIYGVILTALFLKRGRKKLLYIFKQPFMRPVQTTQEEDGCSCRFPEEEEGGCELRVKFSRSADAPAYQQGQNQLYNELNLGRREEYDVLDKRRGRDPEMGGKPQRRKNPQEGLYNELQKDKMAEAYSEIGMKGERRRGKGHDGLYQGLSTATKDTYDALHMQALPPR

SEQ ID NO: 18677 - protein, 934 aa, Artificial Sequence
  Synthetic Polypeptide
MALPVTALLLPLALLLHAARPSYVLTQPPSVSVAPGQTARITCGGNNLGSKSVHWYQQPPGQAPVVVVYDDSDRPSGIPERFSGSNSGNTATLTISRVEAGDEAVYYCQVWDSSSDHVVFGGGTKLTVLLEGKPIPNPLLGLDSTGSGEDLKNVFPPEVAVFEPSEAEISHTQKATLVCLATGFYPDHVELSWWVNGKEVHSGVSTDPQPLKEQPALNDSRYCLSSRLRVSATFWQNPRNHFRCQVQFYGLSENDEWTQDRAKPVTQIVSAEAWGRADCGSQSFGLLDPKLCYLLDGILFIYGVILTALFLKRGRKKLLYIFKQPFMRPVQTTQEEDGCSCRFPEEEEGGCELRVKFSRSADAPAYQQGQNQLYNELNLGRREEYDVLDKRRGRDPEMGGKPQRRKNPQEGLYNELQKDKMAEAYSEIGMKGERRRGKGHDGLYQGLSTATKDTYDALHMQALPPRRAKRSGSGATNFSLLKQAGDVEENPGPTSMDWIWRILFLVGAATGAHSFEQLQLQESGPGLVKPSETLSLTCTVSGGSISSGSYFWGWIRQPPGKGLEWIGSIYYSGITYYNPSLKSRVTISVDTSKNQFSLKLSSVTAADTAVYYCARHDGAVAGLFDYWGQGTLVTVSSATREQKLISEEDLGSGIQNPDPAVYQLRDSKSSDKSVCLFTDFDSQTNVSQSKDSDVYITDKTVLDMRSMDFKSNSAVAWSNKSDFACANAFNNSIIPEDTFFPSPESSCGTQSFGLLDPKLCYLLDGILFIYGVILTALFLKRGRKKLLYIFKQPFMRPVQTTQEEDGCSCRFPEEEEGGCELRVKFSRSADAPAYQQGQNQLYNELNLGRREEYDVLDKRRGRDPEMGGKPQRRKNPQEGLYNELQKDKMAEAYSEIGMKGERRRGKGHDGLYQGLSTATKDTYDALHMQALPPR

SEQ ID NO: 18678 - protein, 824 aa, Artificial Sequence
  Synthetic Polypeptide
MALPVTALLLPLALLLHAARPSYVLTQPPSVSVAPGQTARITCGGNNLGSKSVHWYQQPPGQAPVVVVYDDSDRPSGIPERFSGSNSGNTATLTISRVEAGDEAVYYCQVWDSSSDHVVFGGGTKLTVLLEQSFGLLDPKLCYLLDGILFIYGVILTALFLRVKFSRSADAPAYQQGQNQLYNELNLGRREEYDVLDKRRGRDPEMGGKPQRRKNPQEGLYNELQKDKMAEAYSEIGMKGERRRGKGHDGLYQGLSTATKDTYDALHMQALPPRRAKRSGSGATNFSLLKQAGDVEENPGPTSMDWIWRILFLVGAATGAHSFEQLQLQESGPGLVKPSETLSLTCTVSGGSISSGSYFWGWIRQPPGKGLEWIGSIYYSGITYYNPSLKSRVTISVDTSKNQFSLKLSSVTAADTAVYYCARHDGAVAGLFDYWGQGTLVTVSSATRQSFGLLDPKLCYLLDGILFIYGVILTALFLRVKFSRSADAPAYQQGQNQLYNELNLGRREEYDVLDKRRGRDPEMGGKPQRRKNPQEGLYNELQKDKMAEAYSEIGMKGERRRGKGHDGLYQGLSTATKDTYDALHMQALPPRRAKRSGSGVKQTLNFDLLKLAGDVESNPGPSRGHMTEYKPTVRLATRDDVPRAVRTLAAAFADYPATRHTVDPDRHIERVTELQELFLTRVGLDIGKVWVADDGAAVAVWTTPESVEAGAVFAEIGPRMAELSGSRLAAQQQMEGLLAPHRPKEPAWFLATVGVSPDHQGKGLGSAVVLPGVEAAERAGVPAFLETSAPRNLPFYERLGFTVTADVEVPEGPRTWCMTRKPGA

SEQ ID NO: 18679 - protein, 649 aa, Artificial Sequence
  Synthetic Polypeptide
MALPVTALLLPLALLLHAARPSYVLTQPPSVSVAPGQTARITCGGNNLGSKSVHWYQQPPGQAPVVVVYDDSDRPSGIPERFSGSNSGNTATLTISRVEAGDEAVYYCQVWDSSSDHVVFGGGTKLTVLLEGQPKANPTVTLFPPSSEELQANKATLVCLISDFYPGAVTVAWKADGSPVKAGVETTKPSKQSNNKYAASSYLSLTPEQWKSHRSYSCQVTHEGSTVEKTVAPTECSPIKTDVITMDPKDNCSKDANDTLLLQLTNTSAYYMYLLLLLKSVVYFAIITCCLLRRTAFCCNGEKSRAKRSGSGATNFSLLKQAGDVEENPGPTSMDWIWRILFLVGAATGAHSFEQLQLQESGPGLVKPSETLSLTCTVSGGSISSGSYFWGWIRQPPGKGLEWIGSIYYSGITYYNPSLKSRVTISVDTSKNQFSLKLSSVTAADTAVYYCARHDGAVAGLFDYWGQGTLVTVSSATRASTKGPSVFPLAPSSKSTSGGTAALGCLVKDYFPEPVTVSWNSGALTSGVHTFPAVLQSSGLYSLSSVVTVPSSSLGTQTYICNVNHKPSNTKVDKRVEPKSCEVKTDSTDHVKPKETENTKQPSKSCHKPKAIVHTEKVNMMSLTVLGLRMLFAKTVAVNFLLTAKLFFL

SEQ ID NO: 18680 - protein, 627 aa, Artificial Sequence
  Synthetic Polypeptide
MALPVTALLLPLALLLHAARPSYVLTQPPSVSVAPGQTARITCGGNNLGSKSVHWYQQPPGQAPVVVVYDDSDRPSGIPERFSGSNSGNTATLTISRVEAGDEAVYYCQVWDSSSDHVVFGGGTKLTVLLEGQPKANPTVTLFPPSSEELQANKATLVCLISDFYPGAVTVAWKADGSPVKAGVETTKPSKQSNNKYAASSYLSLTPEQWKSHRSYSCQVTHEGSTVEKTVAPTECSGRADCGITSASYHQGVLSATILYEILLGKATLYAVLVSALVLMAMVKRKDSRGRAKRSGSGATNFSLLKQAGDVEENPGPTSMDWIWRILFLVGAATGAHSFEQLQLQESGPGLVKPSETLSLTCTVSGGSISSGSYFWGWIRQPPGKGLEWIGSIYYSGITYYNPSLKSRVTISVDTSKNQFSLKLSSVTAADTAVYYCARHDGAVAGLFDYWGQGTLVTVSSATRASTKGPSVFPLAPSSKSTSGGTAALGCLVKDYFPEPVTVSWNSGALTSGVHTFPAVLQSSGLYSLSSVVTVPSSSLGTQTYICNVNHKPSNTKVDKRVEPKSCIPEDTFFPSSDVPCDVKLVEKSFETDTNLNFQNLSVIGFRILLLKVAGFNLLMTLRLWSS

SEQ ID NO: 18681 - protein, 627 aa, Artificial Sequence
  Synthetic Polypeptide
MALPVTALLLPLALLLHAARPSYVLTQPPSVSVAPGQTARITCGGNNLGSKSVHWYQQPPGQAPVVVVYDDSDRPSGIPERFSGSNSGNTATLTISRVEAGDEAVYYCQVWDSSSDHVVFGGGTKLTVLLEGQPKANPTVTLFPPSSEELQANKATLVCLISDFYPGAVTVAWKADGSPVKAGVETTKPSKQSNNKYAASSYLSLTPEQWKSHRSYSCQVTHEGSTVEKTVAPTECSGRADCGFTSESYQQGVLSATILYEILLGKATLYAVLVSALVLMAMVKRKDSRGRAKRSGSGATNFSLLKQAGDVEENPGPTSMDWIWRILFLVGAATGAHSFEQLQLQESGPGLVKPSETLSLTCTVSGGSISSGSYFWGWIRQPPGKGLEWIGSIYYSGITYYNPSLKSRVTISVDTSKNQFSLKLSSVTAADTAVYYCARHDGAVAGLFDYWGQGTLVTVSSATRASTKGPSVFPLAPSSKSTSGGTAALGCLVKDYFPEPVTVSWNSGALTSGVHTFPAVLQSSGLYSLSSVVTVPSSSLGTQTYICNVNHKPSNTKVDKRVEPKSCIPEDTFFPSPESSCDVKLVEKSFETDTNLNFQNLSVIGFRILLLKVAGFNLLMTLRLWSS

SEQ ID NO: 18682 - protein, 453 aa, Artificial Sequence
  Synthetic Polypeptide
MALPVTALLLPLALLLHAARPSYVLTQPPSVSVAPGQTARITCGGNNLGSKSVHWYQQPPGQAPVVVVYDDSDRPSGIPERFSGSNSGNTATLTISRVEAGDEAVYYCQVWDSSSDHVVFGGGTKLTVLGGGGSGGGGSGGGGSQLQLQESGPGLVKPSETLSLTCTVSGGSISSGSYFWGWIRQPPGKGLEWIGSIYYSGITYYNPSLKSRVTISVDTSKNQFSLKLSSVTAADTAVYYCARHDGAVAGLFDYWGQGTLVTVSSATRDGNEEMGGITQTPYKVSISGTTVILTCPQYPGSEILWQHNDKNIGGDEDDKNIGSDEDHLSLKEFSELEQSGYYVCYPRGSKPEDANFYLYLRARVCENCMEMDVMSVATIVIVDICITGGLLLLVYYWSKNRKAKAKPVTRGAGAGGRQRGQNKERPPPVPNPDYEPIRKGQRDLYSGLNQRRI

SEQ ID NO: 18683 - protein, 418 aa, Artificial Sequence
  Synthetic Polypeptide
MALPVTALLLPLALLLHAARPSYVLTQPPSVSVAPGQTARITCGGNNLGSKSVHWYQQPPGQAPVVVVYDDSDRPSGIPERFSGSNSGNTATLTISRVEAGDEAVYYCQVWDSSSDHVVFGGGTKLTVLGGGGSGGGGSGGGGSQLQLQESGPGLVKPSETLSLTCTVSGGSISSGSYFWGWIRQPPGKGLEWIGSIYYSGITYYNPSLKSRVTISVDTSKNQFSLKLSSVTAADTAVYYCARHDGAVAGLFDYWGQGTLVTVSSATRFKIPIEELEDRVFVNCNTSITWVEGTVGTLLSDITRLDLGKRILDPRGIYRCNGTDIYKDKESTVQVHYRMCQSCVELDPATVAGIIVTDVIATLLLALGVFCFAGHETGRLSGAADTQALLRNDQVYQPLRDRDDAQYSHLGGNWARNK

SEQ ID NO: 18684 - protein, 428 aa, Artificial Sequence
  Synthetic Polypeptide
MALPVTALLLPLALLLHAARPSYVLTQPPSVSVAPGQTARITCGGNNLGSKSVHWYQQPPGQAPVVVVYDDSDRPSGIPERFSGSNSGNTATLTISRVEAGDEAVYYCQVWDSSSDHVVFGGGTKLTVLGGGGSGGGGSGGGGSQLQLQESGPGLVKPSETLSLTCTVSGGSISSGSYFWGWIRQPPGKGLEWIGSIYYSGITYYNPSLKSRVTISVDTSKNQFSLKLSSVTAADTAVYYCARHDGAVAGLFDYWGQGTLVTVSSATRQSIKGNHLVKVYDYQEDGSVLLTCDAEAKNITWFKDGKMIGFLTEDKKKWNLGSNAKDPRGMYQCKGSQNKSKPLQVYYRMCQNCIELNAATISGFLFAEIVSIFVLAVGVYFIAGQDGVRQSRASDKQTLLPNDQLYQPLKDREDDQYSHLQGNQLRRN

SEQ ID NO: 18685 - protein, 411 aa, Artificial Sequence
  Synthetic Polypeptide
MALPVTALLLPLALLLHAARPSYVLTQPPSVSVAPGQTARITCGGNNLGSKSVHWYQQPPGQAPVVVVYDDSDRPSGIPERFSGSNSGNTATLTISRVEAGDEAVYYCQVWDSSSDHVVFGGGTKLTVLGGGGSGGGGSGGGGSQLQLQESGPGLVKPSETLSLTCTVSGGSISSGSYFWGWIRQPPGKGLEWIGSIYYSGITYYNPSLKSRVTISVDTSKNQFSLKLSSVTAADTAVYYCARHDGAVAGLFDYWGQGTLVTVSSATRQSFGLLDPKLCYLLDGILFIYGVILTALFLRVKFSRSADAPAYQQGQNQLYNELNLGRREEYDVLDKRRGRDPEMGGKPQRRKNPQEGLYNELQKDKMAEAYSEIGMKGERRRGKGHDGLYQGLSTATKDTYDALHMQALPPR

SEQ ID NO: 18686 - protein, 453 aa, Artificial Sequence
  Synthetic Polypeptide
MALPVTALLLPLALLLHAARPQLQLQESGPGLVKPSETLSLTCTVSGGSISSGSYFWGWIRQPPGKGLEWIGSIYYSGITYYNPSLKSRVTISVDTSKNQFSLKLSSVTAADTAVYYCARHDGAVAGLFDYWGQGTLVTVSSAGGGGSGGGGSGGGGSSYVLTQPPSVSVAPGQTARITCGGNNLGSKSVHWYQQPPGQAPVVVVYDDSDRPSGIPERFSGSNSGNTATLTISRVEAGDEAVYYCQVWDSSSDHVVFGGGTKLTVLTRDGNEEMGGITQTPYKVSISGTTVILTCPQYPGSEILWQHNDKNIGGDEDDKNIGSDEDHLSLKEFSELEQSGYYVCYPRGSKPEDANFYLYLRARVCENCMEMDVMSVATIVIVDICITGGLLLLVYYWSKNRKAKAKPVTRGAGAGGRQRGQNKERPPPVPNPDYEPIRKGQRDLYSGLNQRRI

SEQ ID NO: 18687 - protein, 418 aa, Artificial Sequence
  Synthetic Polypeptide
MALPVTALLLPLALLLHAARPQLQLQESGPGLVKPSETLSLTCTVSGGSISSGSYFWGWIRQPPGKGLEWIGSIYYSGITYYNPSLKSRVTISVDTSKNQFSLKLSSVTAADTAVYYCARHDGAVAGLFDYWGQGTLVTVSSAGGGGSGGGGSGGGGSSYVLTQPPSVSVAPGQTARITCGGNNLGSKSVHWYQQPPGQAPVVVVYDDSDRPSGIPERFSGSNSGNTATLTISRVEAGDEAVYYCQVWDSSSDHVVFGGGTKLTVLTRFKIPIEELEDRVFVNCNTSITWVEGTVGTLLSDITRLDLGKRILDPRGIYRCNGTDIYKDKESTVQVHYRMCQSCVELDPATVAGIIVTDVIATLLLALGVFCFAGHETGRLSGAADTQALLRNDQVYQPLRDRDDAQYSHLGGNWARNK

SEQ ID NO: 18688 - protein, 428 aa, Artificial Sequence
  Synthetic Polypeptide
MALPVTALLLPLALLLHAARPQLQLQESGPGLVKPSETLSLTCTVSGGSISSGSYFWGWIRQPPGKGLEWIGSIYYSGITYYNPSLKSRVTISVDTSKNQFSLKLSSVTAADTAVYYCARHDGAVAGLFDYWGQGTLVTVSSAGGGGSGGGGSGGGGSSYVLTQPPSVSVAPGQTARITCGGNNLGSKSVHWYQQPPGQAPVVVVYDDSDRPSGIPERFSGSNSGNTATLTISRVEAGDEAVYYCQVWDSSSDHVVFGGGTKLTVLTRQSIKGNHLVKVYDYQEDGSVLLTCDAEAKNITWFKDGKMIGFLTEDKKKWNLGSNAKDPRGMYQCKGSQNKSKPLQVYYRMCQNCIELNAATISGFLFAEIVSIFVLAVGVYFIAGQDGVRQSRASDKQTLLPNDQLYQPLKDREDDQYSHLQGNQLRRN

SEQ ID NO: 18689 - protein, 411 aa, Artificial Sequence
  Synthetic Polypeptide
MALPVTALLLPLALLLHAARPQLQLQESGPGLVKPSETLSLTCTVSGGSISSGSYFWGWIRQPPGKGLEWIGSIYYSGITYYNPSLKSRVTISVDTSKNQFSLKLSSVTAADTAVYYCARHDGAVAGLFDYWGQGTLVTVSSAGGGGSGGGGSGGGGSSYVLTQPPSVSVAPGQTARITCGGNNLGSKSVHWYQQPPGQAPVVVVYDDSDRPSGIPERFSGSNSGNTATLTISRVEAGDEAVYYCQVWDSSSDHVVFGGGTKLTVLTRQSFGLLDPKLCYLLDGILFIYGVILTALFLRVKFSRSADAPAYQQGQNQLYNELNLGRREEYDVLDKRRGRDPEMGGKPQRRKNPQEGLYNELQKDKMAEAYSEIGMKGERRRGKGHDGLYQGLSTATKDTYDALHMQALPPR

SEQ ID NO: 18690 - protein, 644 aa, Artificial Sequence
  Synthetic Polypeptide
MALPVTALLLPLALLLHAARPSYVLTQPPSVSVAPGQTARITCGGNNLGSKSVHWYQQPPGQAPVVVVYDDSDRPSGIPERFSGSNSGNTATLTISRVEAGDEAVYYCQVWDSSSDHVVFGGGTKLTVLGGGGSGGGGSGGGGSQLQLQESGPGLVKPSETLSLTCTVSGGSISSGSYFWGWIRQPPGKGLEWIGSIYYSGITYYNPSLKSRVTISVDTSKNQFSLKLSSVTAADTAVYYCARHDGAVAGLFDYWGQGTLVTVSSATRGSGIQNPDPAVYQLRDSKSSDKSVCLFTDFDSQTNVSQSKDSDVYITDKTVLDMRSMDFKSNSAVAWSNKSDFACANAFNNSIIPEDTFFPSPESSCDVKLVEKSFETDTNLNFQNLSVIGFRILLLKVAGFNLLMTLRLWSSRAKRSGSGVKQTLNFDLLKLAGDVESNPGPSRGHMTEYKPTVRLATRDDVPRAVRTLAAAFADYPATRHTVDPDRHIERVTELQELFLTRVGLDIGKVWVADDGAAVAVWTTPESVEAGAVFAEIGPRMAELSGSRLAAQQQMEGLLAPHRPKEPAWFLATVGVSPDHQGKGLGSAVVLPGVEAAERAGVPAFLETSAPRNLPFYERLGFTVTADVEVPEGPRTWCMTRKPGA

SEQ ID NO: 18691 - protein, 676 aa, Artificial Sequence
  Synthetic Polypeptide
MALPVTALLLPLALLLHAARPSYVLTQPPSVSVAPGQTARITCGGNNLGSKSVHWYQQPPGQAPVVVVYDDSDRPSGIPERFSGSNSGNTATLTISRVEAGDEAVYYCQVWDSSSDHVVFGGGTKLTVLGGGGSGGGGSGGGGSQLQLQESGPGLVKPSETLSLTCTVSGGSISSGSYFWGWIRQPPGKGLEWIGSIYYSGITYYNPSLKSRVTISVDTSKNQFSLKLSSVTAADTAVYYCARHDGAVAGLFDYWGQGTLVTVSSALEDLKNVFPPEVAVFEPSEAEISHTQKATLVCLATGFYPDHVELSWWVNGKEVHSGVSTDPQPLKEQPALNDSRYCLSSRLRVSATFWQNPRNHFRCQVQFYGLSENDEWTQDRAKPVTQIVSAEAWGRADCGFTSESYQQGVLSATILYEILLGKATLYAVLVSALVLMAMVKRKDSRGRAKRSGSGATNFSLLKQAGDVEENPGPTRGHMTEYKPTVRLATRDDVPRAVRTLAAAFADYPATRHTVDPDRHIERVTELQELFLTRVGLDIGKVWVADDGAAVAVWTTPESVEAGAVFAEIGPRMAELSGSRLAAQQQMEGLLAPHRPKEPAWFLATVGVSPDHQGKGLGSAVVLPGVEAAERAGVPAFLETSAPRNLPFYERLGFTVTADVEVPEGPRTWCMTRKPGA

SEQ ID NO: 18692 - protein, 726 aa, Artificial Sequence
  Synthetic Polypeptide
MALPVTALLLPLALLLHAARPSYVLTQPPSVSVAPGQTARITCGGNNLGSKSVHWYQQPPGQAPVVVVYDDSDRPSGIPERFSGSNSGNTATLTISRVEAGDEAVYYCQVWDSSSDHVVFGGGTKLTVLGGGGSGGGGSGGGGSQLQLQESGPGLVKPSETLSLTCTVSGGSISSGSYFWGWIRQPPGKGLEWIGSIYYSGITYYNPSLKSRVTISVDTSKNQFSLKLSSVTAADTAVYYCARHDGAVAGLFDYWGQGTLVTVSSATREQKLISEEDLGSGTPFPSLAPPIMLLVDGKQQMVVVCLVLDVAPPGLDSPIWFSAGNGSALDAFTYGPSPATDGTWTNLAHLSLPSEELASWEPLVCHTGPGAEGHSRSTQPMHLSGEASTARTCPQEPLRGTPGGALWLGVLRLLLFKLLLFDLLLTCSCLCDPAGPLPSPATTTRLRALGSHRLHPATETGGREATSSPRPQPRDRRWGDTPPGRKPGSPVRAKRSGSGVKQTLNFDLLKLAGDVESNPGPSRSRGHMTEYKPTVRLATRDDVPRAVRTLAAAFADYPATRHTVDPDRHIERVTELQELFLTRVGLDIGKVWVADDGAAVAVWTTPESVEAGAVFAEIGPRMAELSGSRLAAQQQMEGLLAPHRPKEPAWFLATVGVSPDHQGKGLGSAVVLPGVEAAERAGVPAFLETSAPRNLPFYERLGFTVTADVEVPEGPRTWCMTRKPGA

SEQ ID NO: 18693 - protein, 539 aa, Artificial Sequence
  Synthetic Polypeptide
MALPVTALLLPLALLLHAARPSYVLTQPPSVSVAPGQTARITCGGNNLGSKSVHWYQQPPGQAPVVVVYDDSDRPSGIPERFSGSNSGNTATLTISRVEAGDEAVYYCQVWDSSSDHVVFGGGTKLTVLLEDLKNVFPPEVAVFEPSEAEISHTQKATLVCLATGFYPDHVELSWWVNGKEVHSGVSTDPQPLKEQPALNDSRYCLSSRLRVSATFWQNPRNHFRCQVQFYGLSENDEWTQDRAKPVTQIVSAEAWGRADCGFTSESYQQGVLSATILYEILLGKATLYAVLVSALVLMAMVKRKDSRGRAKRSGSGATNFSLLKQAGDVEENPGPTRGHMTEYKPTVRLATRDDVPRAVRTLAAAFADYPATRHTVDPDRHIERVTELQELFLTRVGLDIGKVWVADDGAAVAVWTTPESVEAGAVFAEIGPRMAELSGSRLAAQQQMEGLLAPHRPKEPAWFLATVGVSPDHQGKGLGSAVVLPGVEAAERAGVPAFLETSAPRNLPFYERLGFTVTADVEVPEGPRTWCMTRKPGA

SEQ ID NO: 18694 - protein, 309 aa, Artificial Sequence
  Synthetic Polypeptide
MALPVTALLLPLALLLHAARPSYVLTQPPSVSVAPGQTARITCGGNNLGSKSVHWYQQPPGQAPVVVVYDDSDRPSGIPERFSGSNSGNTATLTISRVEAGDEAVYYCQVWDSSSDHVVFGGGTKLTVLLEDLKNVFPPEVAVFEPSEAEISHTQKATLVCLATGFYPDHVELSWWVNGKEVHSGVSTDPQPLKEQPALNDSRYCLSSRLRVSATFWQNPRNHFRCQVQFYGLSENDEWTQDRAKPVTQIVSAEAWGRADCGFTSESYQQGVLSATILYEILLGKATLYAVLVSALVLMAMVKRKDSRG

SEQ ID NO: 18695 - protein, 451 aa, Artificial Sequence; identical to SEQ ID NO: 18626
  Synthetic Polypeptide

SEQ ID NO: 18696 - protein, 285 aa, Artificial Sequence; identical to SEQ ID NO: 18627
  Synthetic Polypeptide

SEQ ID NO: 18697 - protein, 557 aa, Artificial Sequence
  Synthetic Polypeptide
MALPVTALLLPLALLLHAARPSYVLTQPPSVSVAPGQTARITCGGNNLGSKSVHWYQQPPGQAPVVVVYDDSDRPSGIPERFSGSNSGNTATLTISRVEAGDEAVYYCQVWDSSSDHVVFGGGTKLTVLLEGKPIPNPLLGLDSTGSGEDLKNVFPPEVAVFEPSEAEISHTQKATLVCLATGFYPDHVELSWWVNGKEVHSGVCTDPQPLKEQPALNDSRYCLSSRLRVSATFWQNPRNHFRCQVQFYGLSENDEWTQDRAKPVTQIVSAEAWGRADCGFTSESYQQGVLSATILYEILLGKATLYAVLVSALVLMAMVKRKDSRGRAKRSGSGATNFSLLKQAGDVEENPGPTRGHMTEYKPTVRLATRDDVPRAVRTLAAAFADYPATRHTVDPDRHIERVTELQELFLTRVGLDIGKVWVADDGAAVAVWTTPESVEAGAVFAEIGPRMAELSGSRLAAQQQMEGLLAPHRPKEPAWFLATVGVSPDHQGKGLGSAVVLPGVEAAERAGVPAFLETSAPRNLPFYERLGFTVTADVEVPEGPRTWCMTRKPGA

SEQ ID NO: 18698 - protein, 327 aa, Artificial Sequence
  Synthetic Polypeptide
MALPVTALLLPLALLLHAARPSYVLTQPPSVSVAPGQTARITCGGNNLGSKSVHWYQQPPGQAPVVVVYDDSDRPSGIPERFSGSNSGNTATLTISRVEAGDEAVYYCQVWDSSSDHVVFGGGTKLTVLLEGKPIPNPLLGLDSTGSGEDLKNVFPPEVAVFEPSEAEISHTQKATLVCLATGFYPDHVELSWWVNGKEVHSGVCTDPQPLKEQPALNDSRYCLSSRLRVSATFWQNPRNHFRCQVQFYGLSENDEWTQDRAKPVTQIVSAEAWGRADCGFTSESYQQGVLSATILYEILLGKATLYAVLVSALVLMAMVKRKDSRG

SEQ ID NO: 18699 - protein, 463 aa, Artificial Sequence; identical to SEQ ID NO: 18630
  Synthetic Polypeptide

SEQ ID NO: 18700 - protein, 297 aa, Artificial Sequence; identical to SEQ ID NO: 18631
  Synthetic Polypeptide

SEQ ID NO: 18701 - protein, 644 aa, Artificial Sequence
  Synthetic Polypeptide
MALPVTALLLPLALLLHAARPSYVLTQPPSVSVAPGQTARITCGGNNLGSKSVHWYQQPPGQAPVVVVYDDSDRPSGIPERFSGSNSGNTATLTISRVEAGDEAVYYCQVWDSSSDHVVFGGGTKLTVLGGGGSGGGGSGGGGSQLQLQESGPGLVKPSETLSLTCTVSGGSISSGSYFWGWIRQPPGKGLEWIGSIYYSGITYYNPSLKSRVTISVDTSKNQFSLKLSSVTAADTAVYYCARHDGAVAGLFDYWGQGTLVTVSSATRGSGIQNPDPAVYQLRDSKSSDKSVCLFTDFDSQTNVSQSKDSDVYITDKTVLDMRSMDFKSNSAVAWSNKSDFACANAFNNSIIPEDTFFPSSDVPCDVKLVEKSFETDTNLNFQNLSVIGFRILLLKVAGFNLLMTLRLWSSRAKRSGSGVKQTLNFDLLKLAGDVESNPGPSRGHMTEYKPTVRLATRDDVPRAVRTLAAAFADYPATRHTVDPDRHIERVTELQELFLTRVGLDIGKVWVADDGAAVAVWTTPESVEAGAVFAEIGPRMAELSGSRLAAQQQMEGLLAPHRPKEPAWFLATVGVSPDHQGKGLGSAVVLPGVEAAERAGVPAFLETSAPRNLPFYERLGFTVTADVEVPEGPRTWCMTRKPGA

SEQ ID NO: 18702 - protein, 676 aa, Artificial Sequence
  Synthetic Polypeptide
MALPVTALLLPLALLLHAARPSYVLTQPPSVSVAPGQTARITCGGNNLGSKSVHWYQQPPGQAPVVVVYDDSDRPSGIPERFSGSNSGNTATLTISRVEAGDEAVYYCQVWDSSSDHVVFGGGTKLTVLGGGGSGGGGSGGGGSQLQLQESGPGLVKPSETLSLTCTVSGGSISSGSYFWGWIRQPPGKGLEWIGSIYYSGITYYNPSLKSRVTISVDTSKNQFSLKLSSVTAADTAVYYCARHDGAVAGLFDYWGQGTLVTVSSALEDLKNVFPPEVAVFEPSKAEIAHTQKATLVCLATGFYPDHVELSWWVNGKEVHSGVSTDPQPLKEQPALNDSRYCLSSRLRVSATFWQNPRNHFRCQVQFYGLSENDEWTQDRAKPVTQIVSAEAWGRADCGITSASYHQGVLSATILYEILLGKATLYAVLVSALVLMAMVKRKDSRGRAKRSGSGATNFSLLKQAGDVEENPGPTRGHMTEYKPTVRLATRDDVPRAVRTLAAAFADYPATRHTVDPDRHIERVTELQELFLTRVGLDIGKVWVADDGAAVAVWTTPESVEAGAVFAEIGPRMAELSGSRLAAQQQMEGLLAPHRPKEPAWFLATVGVSPDHQGKGLGSAVVLPGVEAAERAGVPAFLETSAPRNLPFYERLGFTVTADVEVPEGPRTWCMTRKPGA

SEQ ID NO: 18703 - protein, 699 aa, Artificial Sequence
  Synthetic Polypeptide
MALPVTALLLPLALLLHAARPSYVLTQPPSVSVAPGQTARITCGGNNLGSKSVHWYQQPPGQAPVVVVYDDSDRPSGIPERFSGSNSGNTATLTISRVEAGDEAVYYCQVWDSSSDHVVFGGGTKLTVLGGGGSGGGGSGGGGSQLQLQESGPGLVKPSETLSLTCTVSGGSISSGSYFWGWIRQPPGKGLEWIGSIYYSGITYYNPSLKSRVTISVDTSKNQFSLKLSSVTAADTAVYYCARHDGAVAGLFDYWGQGTLVTVSSATRGSGGGGSGGGGSGDGNEEMGGITQTPYKVSISGTTVILTCPQYPGSEILWQHNDKNIGGDEDDKNIGSDEDHLSLKEFSELEQSGYYVCYPRGSKPEDANFYLYLRARVCENCMEMDVMSVATIVIVDICITGGLLLLVYYWSKNRKAKAKPVTRGAGAGGRQRGQNKERPPPVPNPDYEPIRKGQRDLYSGLNQRRIRAKRSGSGVKQTLNFDLLKLAGDVESNPGPSRGHMTEYKPTVRLATRDDVPRAVRTLAAAFADYPATRHTVDPDRHIERVTELQELFLTRVGLDIGKVWVADDGAAVAVWTTPESVEAGAVFAEIGPRMAELSGSRLAAQQQMEGLLAPHRPKEPAWFLATVGVSPDHQGKGLGSAVVLPGVEAAERAGVPAFLETSAPRNLPFYERLGFTVTADVEVPEGPRTWCMTRKPGA

SEQ ID NO: 18704 - protein, 664 aa, Artificial Sequence
  Synthetic Polypeptide
MALPVTALLLPLALLLHAARPSYVLTQPPSVSVAPGQTARITCGGNNLGSKSVHWYQQPPGQAPVVVVYDDSDRPSGIPERFSGSNSGNTATLTISRVEAGDEAVYYCQVWDSSSDHVVFGGGTKLTVLGGGGSGGGGSGGGGSQLQLQESGPGLVKPSETLSLTCTVSGGSISSGSYFWGWIRQPPGKGLEWIGSIYYSGITYYNPSLKSRVTISVDTSKNQFSLKLSSVTAADTAVYYCARHDGAVAGLFDYWGQGTLVTVSSATRGSGGGGSGGGGSGFKIPIEELEDRVFVNCNTSITWVEGTVGTLLSDITRLDLGKRILDPRGIYRCNGTDIYKDKESTVQVHYRMCQSCVELDPATVAGIIVTDVIATLLLALGVFCFAGHETGRLSGAADTQALLRNDQVYQPLRDRDDAQYSHLGGNWARNKRAKRSGSGVKQTLNFDLLKLAGDVESNPGPSRGHMTEYKPTVRLATRDDVPRAVRTLAAAFADYPATRHTVDPDRHIERVTELQELFLTRVGLDIGKVWVADDGAAVAVWTTPESVEAGAVFAEIGPRMAELSGSRLAAQQQMEGLLAPHRPKEPAWFLATVGVSPDHQGKGLGSAVVLPGVEAAERAGVPAFLETSAPRNLPFYERLGFTVTADVEVPEGPRTWCMTRKPGA

SEQ ID NO: 18705 - protein, 674 aa, Artificial Sequence
  Synthetic Polypeptide
MALPVTALLLPLALLLHAARPSYVLTQPPSVSVAPGQTARITCGGNNLGSKSVHWYQQPPGQAPVVVVYDDSDRPSGIPERFSGSNSGNTATLTISRVEAGDEAVYYCQVWDSSSDHVVFGGGTKLTVLGGGGSGGGGSGGGGSQLQLQESGPGLVKPSETLSLTCTVSGGSISSGSYFWGWIRQPPGKGLEWIGSIYYSGITYYNPSLKSRVTISVDTSKNQFSLKLSSVTAADTAVYYCARHDGAVAGLFDYWGQGTLVTVSSATRGSGGGGSGGGGSGQSIKGNHLVKVYDYQEDGSVLLTCDAEAKNITWFKDGKMIGFLTEDKKKWNLGSNAKDPRGMYQCKGSQNKSKPLQVYYRMCQNCIELNAATISGFLFAEIVSIFVLAVGVYFIAGQDGVRQSRASDKQTLLPNDQLYQPLKDREDDQYSHLQGNQLRRNRAKRSGSGVKQTLNFDLLKLAGDVESNPGPSRGHMTEYKPTVRLATRDDVPRAVRTLAAAFADYPATRHTVDPDRHIERVTELQELFLTRVGLDIGKVWVADDGAAVAVWTTPESVEAGAVFAEIGPRMAELSGSRLAAQQQMEGLLAPHRPKEPAWFLATVGVSPDHQGKGLGSAVVLPGVEAAERAGVPAFLETSAPRNLPFYERLGFTVTADVEVPEGPRTWCMTRKPGA

SEQ ID NO: 18706 - protein, 657 aa, Artificial Sequence
  Synthetic Polypeptide
MALPVTALLLPLALLLHAARPSYVLTQPPSVSVAPGQTARITCGGNNLGSKSVHWYQQPPGQAPVVVVYDDSDRPSGIPERFSGSNSGNTATLTISRVEAGDEAVYYCQVWDSSSDHVVFGGGTKLTVLGGGGSGGGGSGGGGSQLQLQESGPGLVKPSETLSLTCTVSGGSISSGSYFWGWIRQPPGKGLEWIGSIYYSGITYYNPSLKSRVTISVDTSKNQFSLKLSSVTAADTAVYYCARHDGAVAGLFDYWGQGTLVTVSSATRGSGGGGSGGGGSGQSFGLLDPKLCYLLDGILFIYGVILTALFLRVKFSRSADAPAYQQGQNQLYNELNLGRREEYDVLDKRRGRDPEMGGKPQRRKNPQEGLYNELQKDKMAEAYSEIGMKGERRRGKGHDGLYQGLSTATKDTYDALHMQALPPRRAKRSGSGVKQTLNFDLLKLAGDVESNPGPSRGHMTEYKPTVRLATRDDVPRAVRTLAAAFADYPATRHTVDPDRHIERVTELQELFLTRVGLDIGKVWVADDGAAVAVWTTPESVEAGAVFAEIGPRMAELSGSRLAAQQQMEGLLAPHRPKEPAWFLATVGVSPDHQGKGLGSAVVLPGVEAAERAGVPAFLETSAPRNLPFYERLGFTVTADVEVPEGPRTWCMTRKPGA

SEQ ID NO: 18707 - protein, 758 aa, Artificial Sequence
  Synthetic Polypeptide
MALPVTALLLPLALLLHAARPEVQLVESGGGLVQPGGSLRLSCAASGFSFSDFWMSWVRQAPGKGLEWVATISQAGSEKDYVDSVKGRFTISRDNAKKSLYLQMNSLRAEDTAVYYCASGVYSFDYRGQGTLVTVSSGTGGGGSGGGGSGGGGSEFSYVLTQPPSVSVAPGQTARITCGGNNLGSKSVHWYQQPPGQAPVVVVYDDSDRPSGIPERFSGSNSGNTATLTISRVEAGDEAVYYCQVWDSSSDHVVFGGGTKLTVLLEDLKNVFPPEVAVFEPSEAEISHTQKATLVCLATGFYPDHVELSWWVNGKEVHSGVCTDPQPLKEQPALNDSRYCLSSRLRVSATFWQNPRNHFRCQVQFYGLSENDEWTQDRAKPVTQIVSAEAWGRADCGFTSESYQQGVLSATILYEILLGKATLYAVLVSALVLMAMVKRKDSRGRAKRSGSGATNFSLLKQAGDVEENPGPTSMDWIWRILFLVGAATGAHSFEQLQLQESGPGLVKPSETLSLTCTVSGGSISSGSYFWGWIRQPPGKGLEWIGSIYYSGITYYNPSLKSRVTISVDTSKNQFSLKLSSVTAADTAVYYCARHDGAVAGLFDYWGQGTLVTVSSATRIQNPDPAVYQLRDSKSSDKSVCLFTDFDSQTNVSQSKDSDVYITDKCVLDMRSMDFKSNSAVAWSNKSDFACANAFNNSIIPEDTFFPSPESSCDVKLVEKSFETDTNLNFQNLSVIGFRILLLKVAGFNLLMTLRLWSS

SEQ ID NO: 18708 - protein, 762 aa, Artificial Sequence
  Synthetic Polypeptide
MALPVTALLLPLALLLHAARPEVQLVESGGGLVQPGGSLRLSCAASGFSFSDFWMSWVRQAPGKGLEWVATISQAGSEKDYVDSVKGRFTISRDNAKKSLYLQMNSLRAEDTAVYYCASGVYSFDYRGQGTLVTVSSGTGGGGSGGGGSGGGGSEFSYVLTQPPSVSVAPGQTARITCGGNNLGSKSVHWYQQPPGQAPVVVVYDDSDRPSGIPERFSGSNSGNTATLTISRVEAGDEAVYYCQVWDSSSDHVVFGGGTKLTVLLEIQNPDPAVYQLRDSKSSDKSVCLFTDFDSQTNVSQSKDSDVYITDKCVLDMRSMDFKSNSAVAWSNKSDFACANAFNNSIIPEDTFFPSPESSCDVKLVEKSFETDTNLNFQNLSVIGFRILLLKVAGFNLLMTLRLWSSRAKRSGSGVKQTLNFDLLKLAGDVESNPGPTSMDWIWRILFLVGAATGAHSFEQLQLQESGPGLVKPSETLSLTCTVSGGSISSGSYFWGWIRQPPGKGLEWIGSIYYSGITYYNPSLKSRVTISVDTSKNQFSLKLSSVTAADTAVYYCARHDGAVAGLFDYWGQGTLVTVSSATREDLKNVFPPEVAVFEPSEAEISHTQKATLVCLATGFYPDHVELSWWVNGKEVHSGVCTDPQPLKEQPALNDSRYCLSSRLRVSATFWQNPRNHFRCQVQFYGLSENDEWTQDRAKPVTQIVSAEAWGRADCGFTSESYQQGVLSATILYEILLGKATLYAVLVSALVLMAMVKRKDSRG

SEQ ID NO: 18709 - protein, 954 aa, Artificial Sequence
  Synthetic Polypeptide
MALPVTALLLPLALLLHAARPEVQLVESGGGLVQPGGSLRLSCAASGFSFSDFWMSWVRQAPGKGLEWVATISQAGSEKDYVDSVKGRFTISRDNAKKSLYLQMNSLRAEDTAVYYCASGVYSFDYRGQGTLVTVSSGTGGGGSGGGGSGGGGSEFSYVLTQPPSVSVAPGQTARITCGGNNLGSKSVHWYQQPPGQAPVVVVYDDSDRPSGIPERFSGSNSGNTATLTISRVEAGDEAVYYCQVWDSSSDHVVFGGGTKLTVLLEDLKNVFPPEVAVFEPSEAEISHTQKATLVCLATGFYPDHVELSWWVNGKEVHSGVSTDPQPLKEQPALNDSRYCLSSRLRVSATFWQNPRNHFRCQVQFYGLSENDEWTQDRAKPVTQIVSAEAWGRADCGSQSFGLLDPKLCYLLDGILFIYGVILTALFLRVKFSRSADAPAYQQGQNQLYNELNLGRREEYDVLDKRRGRDPEMGGKPQRRKNPQEGLYNELQKDKMAEAYSEIGMKGERRRGKGHDGLYQGLSTATKDTYDALHMQALPPRRAKRSGSGATNFSLLKQAGDVEENPGPTSMDWIWRILFLVGAATGAHSFEQLQLQESGPGLVKPSETLSLTCTVSGGSISSGSYFWGWIRQPPGKGLEWIGSIYYSGITYYNPSLKSRVTISVDTSKNQFSLKLSSVTAADTAVYYCARHDGAVAGLFDYWGQGTLVTVSSATRIQNPDPAVYQLRDSKSSDKSVCLFTDFDSQTNVSQSKDSDVYITDKTVLDMRSMDFKSNSAVAWSNKSDFACANAFNNSIIPEDTFFPSPESSCGTQSFGLLDPKLCYLLDGILFIYGVILTALFLRVKFSRSADAPAYQQGQNQLYNELNLGRREEYDVLDKRRGRDPEMGGKPQRRKNPQEGLYNELQKDKMAEAYSEIGMKGERRRGKGHDGLYQGLSTATKDTYDALHMQALPPR

SEQ ID NO: 18710 - protein, 784 aa, Artificial Sequence
  Synthetic Polypeptide
MALPVTALLLPLALLLHAARPEVQLVESGGGLVQPGGSLRLSCAASGFSFSDFWMSWVRQAPGKGLEWVATISQAGSEKDYVDSVKGRFTISRDNAKKSLYLQMNSLRAEDTAVYYCASGVYSFDYRGQGTLVTVSSGTGGGGSGGGGSGGGGSEFSYVLTQPPSVSVAPGQTARITCGGNNLGSKSVHWYQQPPGQAPVVVVYDDSDRPSGIPERFSGSNSGNTATLTISRVEAGDEAVYYCQVWDSSSDHVVFGGGTKLTVLLEGQPKANPTVTLFPPSSEELQANKATLVCLISDFYPGAVTVAWKADGSPVKAGVETTKPSKQSNNKYAASSYLSLTPEQWKSHRSYSCQVTHEGSTVEKTVAPTECSPIKTDVITMDPKDNCSKDANDTLLLQLTNTSAYYMYLLLLLKSVVYFAIITCCLLRRTAFCCNGEKSRAKRSGSGATNFSLLKQAGDVEENPGPTSMDWIWRILFLVGAATGAHSFEQLQLQESGPGLVKPSETLSLTCTVSGGSISSGSYFWGWIRQPPGKGLEWIGSIYYSGITYYNPSLKSRVTISVDTSKNQFSLKLSSVTAADTAVYYCARHDGAVAGLFDYWGQGTLVTVSSATRASTKGPSVFPLAPSSKSTSGGTAALGCLVKDYFPEPVTVSWNSGALTSGVHTFPAVLQSSGLYSLSSVVTVPSSSLGTQTYICNVNHKPSNTKVDKRVEPKSCEVKTDSTDHVKPKETENTKQPSKSCHKPKAIVHTEKVNMMSLTVLGLRMLFAKTVAVNFLLTAKLFFL

SEQ ID NO: 18711 - protein, 765 aa, Artificial Sequence
  Synthetic Polypeptide
MALPVTALLLPLALLLHAARPEVQLVESGGGLVQPGGSLRLSCAASGFSFSDFWMSWVRQAPGKGLEWVATISQAGSEKDYVDSVKGRFTISRDNAKKSLYLQMNSLRAEDTAVYYCASGVYSFDYRGQGTLVTVSSGTGGGGSGGGGSGGGGSEFSYVLTQPPSVSVAPGQTARITCGGNNLGSKSVHWYQQPPGQAPVVVVYDDSDRPSGIPERFSGSNSGNTATLTISRVEAGDEAVYYCQVWDSSSDHVVFGGGTKLTVLLEGQPKANPTVTLFPPSSEELQANKATLVCLISDFYPGAVTVAWKADGSPVKAGVETTKPSKQSNNKYAASSYLSLTPEQWKSHRSYSCQVTHEGSTVEKTVAPTECSGRADCGFTSESYQQGVLSATILYEILLGKATLYAVLVSALVLMAMVKRKDSRGRAKRSGSGVKQTLNFDLLKLAGDVESNPGPTSMDWIWRILFLVGAATGAHSFEQLQLQESGPGLVKPSETLSLTCTVSGGSISSGSYFWGWIRQPPGKGLEWIGSIYYSGITYYNPSLKSRVTISVDTSKNQFSLKLSSVTAADTAVYYCARHDGAVAGLFDYWGQGTLVTVSSATRASTKGPSVFPLAPSSKSTSGGTAALGCLVKDYFPEPVTVSWNSGALTSGVHTFPAVLQSSGLYSLSSVVTVPSSSLGTQTYICNVNHKPSNTKVDKRVEPKSCIPEDTFFPSPESSCDVKLVEKSFETDTNLNFQNLSVIGFRILLLKVAGFNLLMTLRLWSS

SEQ ID NO: 18712 - protein, 899 aa, Artificial Sequence
  Synthetic Polypeptide
MALPVTALLLPLALLLHAARPEVQLVESGGGLVQPGGSLRLSCAASGFSFSDFWMSWVRQAPGKGLEWVATISQAGSEKDYVDSVKGRFTISRDNAKKSLYLQMNSLRAEDTAVYYCASGVYSFDYRGQGTLVTVSSGTGGGGSGGGGSGGGGSEFSYVLTQPPSVSVAPGQTARITCGGNNLGSKSVHWYQQPPGQAPVVVVYDDSDRPSGIPERFSGSNSGNTATLTISRVEAGDEAVYYCQVWDSSSDHVVFGGGTKLTVLLEIQNPDPAVYQLRDSKSSDKSVCLFTDFDSQTNVSQSKDSDVYITDKCVLDMRSMDFKSNSAVAWSNKSDFACANAFNNSIIPEDTFFPSPESSCDVKLVEKSFETDTNLNFQNLSVIGFRILLLKVAGFNLLMTLRLWSSRAKRSGSGVKQTLNFDLLKLAGDVESNPGPTSMDWIWRILFLVGAATGAHSGPQLQLQESGPGLVKPSETLSLTCTVSGDSISSGDYYWGWIRQPPGKGLEWIGHIYYSGVTYYNPSLKSRVTISVDTSRNQFSLKLSSVTAADTAVYYCTREDSSNWRSRGQGTLVTVSSGSGGGGSGGGGSGGGGSFEQLQLQESGPGLVKPSETLSLTCTVSGGSISSGSYFWGWIRQPPGKGLEWIGSIYYSGITYYNPSLKSRVTISVDTSKNQFSLKLSSVTAADTAVYYCARHDGAVAGLFDYWGQGTLVTVSSATREDLKNVFPPEVAVFEPSEAEISHTQKATLVCLATGFYPDHVELSWWVNGKEVHSGVCTDPQPLKEQPALNDSRYCLSSRLRVSATFWQNPRNHFRCQVQFYGLSENDEWTQDRAKPVTQIVSAEAWGRADCGFTSESYQQGVLSATILYEILLGKATLYAVLVSALVLMAMVKRKDSRG

SEQ ID NO: 18713 - protein, 1091 aa, Artificial Sequence
  Synthetic Polypeptide
MALPVTALLLPLALLLHAARPEVQLVESGGGLVQPGGSLRLSCAASGFSFSDFWMSWVRQAPGKGLEWVATISQAGSEKDYVDSVKGRFTISRDNAKKSLYLQMNSLRAEDTAVYYCASGVYSFDYRGQGTLVTVSSGTGGGGSGGGGSGGGGSEFSYVLTQPPSVSVAPGQTARITCGGNNLGSKSVHWYQQPPGQAPVVVVYDDSDRPSGIPERFSGSNSGNTATLTISRVEAGDEAVYYCQVWDSSSDHVVFGGGTKLTVLLEDLKNVFPPEVAVFEPSEAEISHTQKATLVCLATGFYPDHVELSWWVNGKEVHSGVSTDPQPLKEQPALNDSRYCLSSRLRVSATFWQNPRNHFRCQVQFYGLSENDEWTQDRAKPVTQIVSAEAWGRADCGSQSFGLLDPKLCYLLDGILFIYGVILTALFLRVKFSRSADAPAYQQGQNQLYNELNLGRREEYDVLDKRRGRDPEMGGKPQRRKNPQEGLYNELQKDKMAEAYSEIGMKGERRRGKGHDGLYQGLSTATKDTYDALHMQALPPRRAKRSGSGATNFSLLKQAGDVEENPGPTSMDWIWRILFLVGAATGAHSGPQLQLQESGPGLVKPSETLSLTCTVSGDSISSGDYYWGWIRQPPGKGLEWIGHIYYSGVTYYNPSLKSRVTISVDTSRNQFSLKLSSVTAADTAVYYCTREDSSNWRSRGQGTLVTVSSGSGGGGSGGGGSGGGGSFEQLQLQESGPGLVKPSETLSLTCTVSGGSISSGSYFWGWIRQPPGKGLEWIGSIYYSGITYYNPSLKSRVTISVDTSKNQFSLKLSSVTAADTAVYYCARHDGAVAGLFDYWGQGTLVTVSSATRIQNPDPAVYQLRDSKSSDKSVCLFTDFDSQTNVSQSKDSDVYITDKTVLDMRSMDFKSNSAVAWSNKSDFACANAFNNSIIPEDTFFPSPESSCGTQSFGLLDPKLCYLLDGILFIYGVILTALFLRVKFSRSADAPAYQQGQNQLYNELNLGRREEYDVLDKRRGRDPEMGGKPQRRKNPQEGLYNELQKDKMAEAYSEIGMKGERRRGKGHDGLYQGLSTATKDTYDALHMQALPPR

SEQ ID NO: 18714 - protein, 921 aa, Artificial Sequence
  Synthetic Polypeptide
MALPVTALLLPLALLLHAARPEVQLVESGGGLVQPGGSLRLSCAASGFSFSDFWMSWVRQAPGKGLEWVATISQAGSEKDYVDSVKGRFTISRDNAKKSLYLQMNSLRAEDTAVYYCASGVYSFDYRGQGTLVTVSSGTGGGGSGGGGSGGGGSEFSYVLTQPPSVSVAPGQTARITCGGNNLGSKSVHWYQQPPGQAPVVVVYDDSDRPSGIPERFSGSNSGNTATLTISRVEAGDEAVYYCQVWDSSSDHVVFGGGTKLTVLLEGQPKANPTVTLFPPSSEELQANKATLVCLISDFYPGAVTVAWKADGSPVKAGVETTKPSKQSNNKYAASSYLSLTPEQWKSHRSYSCQVTHEGSTVEKTVAPTECSPIKTDVITMDPKDNCSKDANDTLLLQLTNTSAYYMYLLLLLKSVVYFAIITCCLLRRTAFCCNGEKSRAKRSGSGATNFSLLKQAGDVEENPGPTSMDWIWRILFLVGAATGAHSGPQLQLQESGPGLVKPSETLSLTCTVSGDSISSGDYYWGWIRQPPGKGLEWIGHIYYSGVTYYNPSLKSRVTISVDTSRNQFSLKLSSVTAADTAVYYCTREDSSNWRSRGQGTLVTVSSGSGGGGSGGGGSGGGGSFEQLQLQESGPGLVKPSETLSLTCTVSGGSISSGSYFWGWIRQPPGKGLEWIGSIYYSGITYYNPSLKSRVTISVDTSKNQFSLKLSSVTAADTAVYYCARHDGAVAGLFDYWGQGTLVTVSSATRASTKGPSVFPLAPSSKSTSGGTAALGCLVKDYFPEPVTVSWNSGALTSGVHTFPAVLQSSGLYSLSSVVTVPSSSLGTQTYICNVNHKPSNTKVDKRVEPKSCEVKTDSTDHVKPKETENTKQPSKSCHKPKAIVHTEKVNMMSLTVLGLRMLFAKTVAVNFLLTAKLFFL

SEQ ID NO: 18715 - protein, 902 aa, Artificial Sequence
  Synthetic Polypeptide
MALPVTALLLPLALLLHAARPEVQLVESGGGLVQPGGSLRLSCAASGFSFSDFWMSWVRQAPGKGLEWVATISQAGSEKDYVDSVKGRFTISRDNAKKSLYLQMNSLRAEDTAVYYCASGVYSFDYRGQGTLVTVSSGTGGGGSGGGGSGGGGSEFSYVLTQPPSVSVAPGQTARITCGGNNLGSKSVHWYQQPPGQAPVVVVYDDSDRPSGIPERFSGSNSGNTATLTISRVEAGDEAVYYCQVWDSSSDHVVFGGGTKLTVLLEGQPKANPTVTLFPPSSEELQANKATLVCLISDFYPGAVTVAWKADGSPVKAGVETTKPSKQSNNKYAASSYLSLTPEQWKSHRSYSCQVTHEGSTVEKTVAPTECSGRADCGFTSESYQQGVLSATILYEILLGKATLYAVLVSALVLMAMVKRKDSRGRAKRSGSGVKQTLNFDLLKLAGDVESNPGPTSMDWIWRILFLVGAATGAHSGPQLQLQESGPGLVKPSETLSLTCTVSGDSISSGDYYWGWIRQPPGKGLEWIGHIYYSGVTYYNPSLKSRVTISVDTSRNQFSLKLSSVTAADTAVYYCTREDSSNWRSRGQGTLVTVSSGSGGGGSGGGGSGGGGSFEQLQLQESGPGLVKPSETLSLTCTVSGGSISSGSYFWGWIRQPPGKGLEWIGSIYYSGITYYNPSLKSRVTISVDTSKNQFSLKLSSVTAADTAVYYCARHDGAVAGLFDYWGQGTLVTVSSATRASTKGPSVFPLAPSSKSTSGGTAALGCLVKDYFPEPVTVSWNSGALTSGVHTFPAVLQSSGLYSLSSVVTVPSSSLGTQTYICNVNHKPSNTKVDKRVEPKSCIPEDTFFPSPESSCDVKLVEKSFETDTNLNFQNLSVIGFRILLLKVAGFNLLMTLRLWSS

SEQ ID NO: 18716 - protein, 759 aa, Artificial Sequence
  Synthetic Polypeptide
MALPVTALLLPLALLLHAARPEVQVLESGGGLVQPGGSLRLSCAASGFTFSNFAMSWVRQAPGKGLEWVSTISGSAGTTDYADSVKGRFTISRDNSKKTLYLQMNSLRVEDTAVYYCADGRGPFFDYRGQGTLVTVSSGTGGGGSGGGGSGGGGSEFSYVLTQPPSVSVAPGQTARITCGGNNLGSKSVHWYQQPPGQAPVVVVYDDSDRPSGIPERFSGSNSGNTATLTISRVEAGDEAVYYCQVWDSSSDHVVFGGGTKLTVLLEDLKNVFPPEVAVFEPSEAEISHTQKATLVCLATGFYPDHVELSWWVNGKEVHSGVCTDPQPLKEQPALNDSRYCLSSRLRVSATFWQNPRNHFRCQVQFYGLSENDEWTQDRAKPVTQIVSAEAWGRADCGFTSESYQQGVLSATILYEILLGKATLYAVLVSALVLMAMVKRKDSRGRAKRSGSGATNFSLLKQAGDVEENPGPTSMDWIWRILFLVGAATGAHSFEQLQLQESGPGLVKPSETLSLTCTVSGGSISSGSYFWGWIRQPPGKGLEWIGSIYYSGITYYNPSLKSRVTISVDTSKNQFSLKLSSVTAADTAVYYCARHDGAVAGLFDYWGQGTLVTVSSATRIQNPDPAVYQLRDSKSSDKSVCLFTDFDSQTNVSQSKDSDVYITDKCVLDMRSMDFKSNSAVAWSNKSDFACANAFNNSIIPEDTFFPSPESSCDVKLVEKSFETDTNLNFQNLSVIGFRILLLKVAGFNLLMTLRLWSS

SEQ ID NO: 18717 - protein, 760 aa, Artificial Sequence
  Synthetic Polypeptide
MALPVTALLLPLALLLHAARPSYVLTQPPSVSVAPGQTARITCGGNNLGSKSVHWYQQPPGQAPVVVVYDDSDRPSGIPERFSGSNSGNTATLTISRVEAGDEAVYYCQVWDSSSDHVVFGGGTKLTVLLEDLKNVFPPEVAVFEPSEAEISHTQKATLVCLATGFYPDHVELSWWVNGKEVHSGVCTDPQPLKEQPALNDSRYCLSSRLRVSATFWQNPRNHFRCQVQFYGLSENDEWTQDRAKPVTQIVSAEAWGRADCGFTSESYQQGVLSATILYEILLGKATLYAVLVSALVLMAMVKRKDSRGRAKRSGSGATNFSLLKQAGDVEENPGPTSMDWIWRILFLVGAATGAHSGPEVQLVESGGGLVQAGGSLRLSCAASGRTFSMGWFRQAPGKEREFVAAITYSGGSPYYADSVKGRFTISRDNAKNTVYLQMNSLKPEDTAVYYCAANPTYGSDWNAENWGQGTQVTVSSGSGGGGSGGGGSGGGGSFEQLQLQESGPGLVKPSETLSLTCTVSGGSISSGSYFWGWIRQPPGKGLEWIGSIYYSGITYYNPSLKSRVTISVDTSKNQFSLKLSSVTAADTAVYYCARHDGAVAGLFDYWGQGTLVTVSSATRIQNPDPAVYQLRDSKSSDKSVCLFTDFDSQTNVSQSKDSDVYITDKCVLDMRSMDFKSNSAVAWSNKSDFACANAFNNSIIPEDTFFPSPESSCDVKLVEKSFETDTNLNFQNLSVIGFRILLLKVAGFNLLMTLRLWSS

SEQ ID NO: 18718 - protein, 887 aa, Artificial Sequence
  Synthetic Polypeptide
MALPVTALLLPLALLLHAARPSYVLTQPPSVSVAPGQTARITCGGNNLGSKSVHWYQQPPGQAPVVVVYDDSDRPSGIPERFSGSNSGNTATLTISRVEAGDEAVYYCQVWDSSSDHVVFGGGTKLTVLLEDLKNVFPPEVAVFEPSEAEISHTQKATLVCLATGFYPDHVELSWWVNGKEVHSGVCTDPQPLKEQPALNDSRYCLSSRLRVSATFWQNPRNHFRCQVQFYGLSENDEWTQDRAKPVTQIVSAEAWGRADCGFTSESYQQGVLSATILYEILLGKATLYAVLVSALVLMAMVKRKDSRGRAKRSGSGATNFSLLKQAGDVEENPGPTSMDWIWRILFLVGAATGAHSQLQLQESGPGLVKPSETLSLTCTVSGGSISSGDYYWGWIRQPPGKGLEWIGSISYSGSTYYNPSLKSRVTISVDTSRNQFSLKLSSVTAADTAVYYCTREDSSNWRSRGQGTLVTVSSSGGGGSGGGGSEVQLVESGGGLVQAGGSLRLSCAASGRTFSMGWFRQAPGKEREFVAAITYSGGSPYYADSVKGRFTISRDNAKNTVYLQMNSLKPEDTAVYYCAANPTYGSDWNAENWGQGTQVTVSSGSGGGGSGGGGSGGGGSFEQLQLQESGPGLVKPSETLSLTCTVSGGSISSGSYFWGWIRQPPGKGLEWIGSIYYSGITYYNPSLKSRVTISVDTSKNQFSLKLSSVTAADTAVYYCARHDGAVAGLFDYWGQGTLVTVSSATRIQNPDPAVYQLRDSKSSDKSVCLFTDFDSQTNVSQSKDSDVYITDKCVLDMRSMDFKSNSAVAWSNKSDFACANAFNNSIIPEDTFFPSPESSCDVKLVEKSFETDTNLNFQNLSVIGFRILLLKVAGFNLLMTLRLWSS

SEQ ID NO: 18719 - protein, 896 aa, Artificial Sequence
  Synthetic Polypeptide
MALPVTALLLPLALLLHAARPEVQVLESGGGLVQPGGSLRLSCAASGFTFSNFAMSWVRQAPGKGLEWVSTISGSAGTTDYADSVKGRFTISRDNSKKTLYLQMNSLRVEDTAVYYCADGRGPFFDYRGQGTLVTVSSGTGGGGSGGGGSGGGGSEFSYVLTQPPSVSVAPGQTARITCGGNNLGSKSVHWYQQPPGQAPVVVVYDDSDRPSGIPERFSGSNSGNTATLTISRVEAGDEAVYYCQVWDSSSDHVVFGGGTKLTVLLEDLKNVFPPEVAVFEPSEAEISHTQKATLVCLATGFYPDHVELSWWVNGKEVHSGVCTDPQPLKEQPALNDSRYCLSSRLRVSATFWQNPRNHFRCQVQFYGLSENDEWTQDRAKPVTQIVSAEAWGRADCGFTSESYQQGVLSATILYEILLGKATLYAVLVSALVLMAMVKRKDSRGRAKRSGSGATNFSLLKQAGDVEENPGPTSMDWIWRILFLVGAATGAHSGPEVQLVESGGGLVQAGGSLRLSCAASGRTFSMGWFRQAPGKEREFVAAITYSGGSPYYASSVRGRFTISRDNAKNTVYLQMNSLKPEDTAVYYCAANPTYGSDWNAENWGQGTQVTVSSGSGGGGSGGGGSGGGGSFEQLQLQESGPGLVKPSETLSLTCTVSGGSISSGSYFWGWIRQPPGKGLEWIGSIYYSGITYYNPSLKSRVTISVDTSKNQFSLKLSSVTAADTAVYYCARHDGAVAGLFDYWGQGTLVTVSSATRIQNPDPAVYQLRDSKSSDKSVCLFTDFDSQTNVSQSKDSDVYITDKCVLDMRSMDFKSNSAVAWSNKSDFACANAFNNSIIPEDTFFPSPESSCDVKLVEKSFETDTNLNFQNLSVIGFRILLLKVAGFNLLMTLRLWSS

SEQ ID NO: 18720 - protein, 727 aa, Artificial Sequence
  Synthetic Polypeptide
MALPVTALLLPLALLLHAARPSYVLTQPPSVSVAPGQTARITCGGNNIGGKSVHWYQQPPGQAPVVVVYDDSDRPSGIPERFSGSNSGNTATLTISRVEAGDEAVYYCQVWDSSSDHVVFGGGTKLTVLGGGGSGGGGSGGGGSQLQLQESGPGLVKPSETLSLTCTVSGGSISSGSYFWGWIRQPPGKGLEWIGSIYYSGITYYNPSLKSRVTISVDTSKNQFSLKLSSVTAADTAVYYCARHDGAVAGLFDYWGQGTLVTVSSATREQKLISEEDLAKPTTTPAPRPPTPAPTIASQPLSLRPEACRPAAGGAVHTRGLDFACDIYIWAPLAGTCGVLLLSLVITLYCKRGRKKLLYIFKQPFMRPVQTTQEEDGCSCRFPEEEEGGCELRVKFSRSADAPAYQQGQNQLYNELNLGRREEYDVLDKRRGRDPEMGGKPRRKNPQEGLYNELQKDKMAEAYSEIGMKGERRRGKGHDGLYQGLSTATKDTYDALHMQALPPRSSGSGEGRGSLLTCGDVEENPGPHMTEYKPTVRLATRDDVPRAVRTLAAAFADYPATRHTVDPDRHIERVTELQELFLTRVGLDIGKVWVADDGAAVAVWTTPESVEAGAVFAEIGPRMAELSGSRLAAQQQMEGLLAPHRPKEPAWFLATVGVSPDHQGKGLGSAVVLPGVEAAERAGVPAFLETSAPRNLPFYERLGFTVTADVEVPEGPRTWCMTRKPGA

SEQ ID NO: 18721 - protein, 721 aa, Artificial Sequence
  Synthetic Polypeptide
MALPVTALLLPLALLLHAARPSYVLTQPPSVSVAPGQTARITCGGNNIGGKSVHWYQQPPGQAPVVVVYDDSDRPSGIPERFSGSNSGNTATLTISRVEAGDEAVYYCQVWDSSSDHVVFGGGTKLTVLGGGGSGGGGSGGGGSQLQLQESGPGLVKPSETLSLTCTVSGGSISSGSYFWGWIRQPPGKGLEWIGSIYYSGITYYNPSLKSRVTISVDTSKNQFSLKLSSVTAADTAVYYCARHDGAVAGLFDYWGQGTLVTVSSATREQKLISEEDLKIEVMYPPPYLDNEKSNGTIIHVKGKHLCPSPLFPGPSKPFWVLVVVGGVLACYSLLVTVAFIIFWVRSKRSRLLHSDYMNMTPRRPGPTRKHYQPYAPPRDFAAYRSRVKFSRSADAPAYQQGQNQLYNELNLGRREEYDVLDKRRGRDPEMGGKPRRKNPQEGLYNELQKDKMAEAYSEIGMKGERRRGKGHDGLYQGLSTATKDTYDALHMQALPPRSSGSGEGRGSLLTCGDVEENPGPHMTEYKPTVRLATRDDVPRAVRTLAAAFADYPATRHTVDPDRHIERVTELQELFLTRVGLDIGKVWVADDGAAVAVWTTPESVEAGAVFAEIGPRMAELSGSRLAAQQQMEGLLAPHRPKEPAWFLATVGVSPDHQGKGLGSAVVLPGVEAAERAGVPAFLETSAPRNLPFYERLGFTVTADVEVPEGPRTWCMTRKPGA

SEQ ID NO: 18722 - protein, 498 aa, Artificial Sequence
  Synthetic Polypeptide
MALPVTALLLPLALLLHAARPSYVLTQPPSVSVAPGQTARITCGGNNIGGKSVHWYQQPPGQAPVVVVYDDSDRPSGIPERFSGSNSGNTATLTISRVEAGDEAVYYCQVWDSSSDHVVFGGGTKLTVLGGGGSGGGGSGGGGSQLQLQESGPGLVKPSETLSLTCTVSGGSISSGSYFWGWIRQPPGKGLEWIGSIYYSGITYYNPSLKSRVTISVDTSKNQFSLKLSSVTAADTAVYYCARHDGAVAGLFDYWGQGTLVTVSSATREQKLISEEDLKIEVMYPPPYLDNEKSNGTIIHVKGKHLCPSPLFPGPSKPFWVLVVVGGVLACYSLLVTVAFIIFWVRSKRSRLLHSDYMNMTPRRPGPTRKHYQPYAPPRDFAAYRSRVKFSRSADAPAYQQGQNQLYNELNLGRREEYDVLDKRRGRDPEMGGKPRRKNPQEGLYNELQKDKMAEAYSEIGMKGERRRGKGHDGLYQGLSTATKDTYDALHMQALPPR

SEQ ID NO: 18723 - protein, 504 aa, Artificial Sequence
  Synthetic Polypeptide
MALPVTALLLPLALLLHAARPSYVLTQPPSVSVAPGQTARITCGGNNIGGKSVHWYQQPPGQAPVVVVYDDSDRPSGIPERFSGSNSGNTATLTISRVEAGDEAVYYCQVWDSSSDHVVFGGGTKLTVLGGGGSGGGGSGGGGSQLQLQESGPGLVKPSETLSLTCTVSGGSISSGSYFWGWIRQPPGKGLEWIGSIYYSGITYYNPSLKSRVTISVDTSKNQFSLKLSSVTAADTAVYYCARHDGAVAGLFDYWGQGTLVTVSSATREQKLISEEDLAKPTTTPAPRPPTPAPTIASQPLSLRPEACRPAAGGAVHTRGLDFACDIYIWAPLAGTCGVLLLSLVITLYCKRGRKKLLYIFKQPFMRPVQTTQEEDGCSCRFPEEEEGGCELRVKFSRSADAPAYQQGQNQLYNELNLGRREEYDVLDKRRGRDPEMGGKPRRKNPQEGLYNELQKDKMAEAYSEIGMKGERRRGKGHDGLYQGLSTATKDTYDALHMQALPPR

SEQ ID NO: 18724 - protein, 504 aa, Artificial Sequence
  Synthetic Polypeptide
MALPVTALLLPLALLLHAARPQLQLQESGPGLVKPSETLSLTCTVSGGSISSGSYFWGWIRQPPGKGLEWIGSIYYSGITYYNPSLKSRVTISVDTSKNQFSLKLSSVTAADTAVYYCARHDGAVAGLFDYWGQGTLVTVSSAGGGGSGGGGSGGGGSSYVLTQPPSVSVAPGQTARITCGGNNIGGKSVHWYQQPPGQAPVVVVYDDSDRPSGIPERFSGSNSGNTATLTISRVEAGDEAVYYCQVWDSSSDHVVFGGGTKLTVLTREQKLISEEDLAKPTTTPAPRPPTPAPTIASQPLSLRPEACRPAAGGAVHTRGLDFACDIYIWAPLAGTCGVLLLSLVITLYCKRGRKKLLYIFKQPFMRPVQTTQEEDGCSCRFPEEEEGGCELRVKFSRSADAPAYQQGQNQLYNELNLGRREEYDVLDKRRGRDPEMGGKPRRKNPQEGLYNELQKDKMAEAYSEIGMKGERRRGKGHDGLYQGLSTATKDTYDALHMQALPPR

SEQ ID NO: 18725 - protein, 917 aa, Artificial Sequence
  Synthetic Polypeptide
MALPVTALLLPLALLLHAARPSYVLTQPPSVSVAPGQTARITCGGNNIGGKSVHWYQQPPGQAPVVVVYDDSDRPSGIPERFSGSNSGNTATLTISRVEAGDEAVYYCQVWDSSSDHVVFGGGTKLTVLGGGGSGGGGSGGGGSQLQLQESGPGLVKPSETLSLTCTVSGGSISSGSYFWGWIRQPPGKGLEWIGSIYYSGITYYNPSLKSRVTISVDTSKNQFSLKLSSVTAADTAVYYCARHDGAVAGLFDYWGQGTLVTVSSATREQKLISEEDLAKPTTTPAPRPPTPAPTIASQPLSLRPEACRPAAGGAVHTRGLDFACDIYIWAPLAGTCGVLLLSLVITLYCGRARVKFSRSADAPAYQQGQNQLYNELNLGRREEYDVLDKRRGRDPEMGGKPRRKNPQEGLYNELQKDKMAEAYSEIGMKGERRRGKGHDGLYQGLSTATKDTYDALHMQALPPRSRGSGATNFSLLKQAGDVEENPGPGIHMATYEVLCEVARKLGTDDREVVLFLLNVFIPQPTLAQLIGALRALKEEGRLTFPLLAECLFRAGRRDLLRDLLHLDPRFLERHLAGTMSYFSPYQLTVLHVDGELCARDIRSLIFLSKDTIGSRSTPQTFLHWVYCMENLDLLGPTDVDALMSMLRSLSRVDLQRQVQTLMGLHLSGPSHSQHYRHTPLETDFYDYKDDDDKTSGSGEGRGSLLTCGDVEENPGPHMTEYKPTVRLATRDDVPRAVRTLAAAFADYPATRHTVDPDRHIERVTELQELFLTRVGLDIGKVWVADDGAAVAVWTTPESVEAGAVFAEIGPRMAELSGSRLAAQQQMEGLLAPHRPKEPAWFLATVGVSPDHQGKGLGSAVVLPGVEAAERAGVPAFLETSAPRNLPFYERLGFTVTADVEVPEGPRTWCMTRKPGA

SEQ ID NO: 18726 - protein, 857 aa, Artificial Sequence
  Synthetic Polypeptide
MALPVTALLLPLALLLHAARPSYVLTQPPSVSVAPGQTARITCGGNNIGGKSVHWYQQPPGQAPVVVVYDDSDRPSGIPERFSGSNSGNTATLTISRVEAGDEAVYYCQVWDSSSDHVVFGGGTKLTVLLEIQNPDPAVYQLRDSKSSDKSVCLFTDFDSQTNVSQSKDSDVYITDKCVLDMRSMDFKSNSAVAWSNKSDFACANAFNNSIIPEDTFFPSSDVPCDVKLVEKSFETDTNLNFQNLSVIGFRILLLKVAGFNLLMTLRLWSSRAKRSGSGVKQTLNFDLLKLAGDVESNPGPTSMDWIWRILFLVGAATGAHSFEQLQLQESGPGLVKPSETLSLTCTVSGGSISSGSYFWGWIRQPPGKGLEWIGSIYYSGITYYNPSLKSRVTISVDTSKNQFSLKLSSVTAADTAVYYCARHDGAVAGLFDYWGQGTLVTVSSATREDLKNVFPPEVAVFEPSKAEIAHTQKATLVCLATGFYPDHVELSWWVNGKEVHSGVCTDPQPLKEQPALNDSRYCLSSRLRVSATFWQNPRNHFRCQVQFYGLSENDEWTQDRAKPVTQIVSAEAWGRADCGITSASYHQGVLSATILYEILLGKATLYAVLVSALVLMAMVKRKDSRGRAKRSGSGATNFSLLKQAGDVEENPGPSRGHMTEYKPTVRLATRDDVPRAVRTLAAAFADYPATRHTVDPDRHIERVTELQELFLTRVGLDIGKVWVADDGAAVAVWTTPESVEAGAVFAEIGPRMAELSGSRLAAQQQMEGLLAPHRPKEPAWFLATVGVSPDHQGKGLGSAVVLPGVEAAERAGVPAFLETSAPRNLPFYERLGFTVTADVEVPEGPRTWCMTRKPGA

SEQ ID NO: 18727 - protein, 856 aa, Artificial Sequence
  Synthetic Polypeptide
MALPVTALLLPLALLLHAARPSYVLTQPPSVSVAPGQTARITCGGNNIGGKSVHWYQQPPGQAPVVVVYDDSDRPSGIPERFSGSNSGNTATLTISRVEAGDEAVYYCQVWDSSSDHVVFGGGTKLTVLLEDLKNVFPPEVAVFEPSKAEIAHTQKATLVCLATGFYPDHVELSWWVNGKEVHSGVCTDPQPLKEQPALNDSRYCLSSRLRVSATFWQNPRNHFRCQVQFYGLSENDEWTQDRAKPVTQIVSAEAWGRADCGITSASYHQGVLSATILYEILLGKATLYAVLVSALVLMAMVKRKDSRGRAKRSGSGATNFSLLKQAGDVEENPGPTSMDWIWRILFLVGAATGAHSFEQLQLQESGPGLVKPSETLSLTCTVSGGSISSGSYFWGWIRQPPGKGLEWIGSIYYSGITYYNPSLKSRVTISVDTSKNQFSLKLSSVTAADTAVYYCARHDGAVAGLFDYWGQGTLVTVSSATRIQNPDPAVYQLRDSKSSDKSVCLFTDFDSQTNVSQSKDSDVYITDKCVLDMRSMDFKSNSAVAWSNKSDFACANAFNNSIIPEDTFFPSSDVPCDVKLVEKSFETDTNLNFQNLSVIGFRILLLKVAGFNLLMTLRLWSSRAKRSGSGVKQTLNFDLLKLAGDVESNPGPSRGHMTEYKPTVRLATRDDVPRAVRTLAAAFADYPATRHTVDPDRHIERVTELQELFLTRVGLDIGKVWVADDGAAVAVWTTPESVEAGAVFAEIGPRMAELSGSRLAAQQQMEGLLAPHRPKEPAWFLATVGVSPDHQGKGLGSAVVLPGVEAAERAGVPAFLETSAPRNLPFYERLGFTVTADVEVPEGPRTWCMTRKPGA

SEQ ID NO: 18728 - protein, 623 aa, Artificial Sequence
  Synthetic Polypeptide
MALPVTALLLPLALLLHAARPSYVLTQPPSVSVAPGQTARITCGGNNIGGKSVHWYQQPPGQAPVVVVYDDSDRPSGIPERFSGSNSGNTATLTISRVEAGDEAVYYCQVWDSSSDHVVFGGGTKLTVLLEDLKNVFPPEVAVFEPSEAEISHTQKATLVCLATGFYPDHVELSWWVNGKEVHSGVCTDPQPLKEQPALNDSRYCLSSRLRVSATFWQNPRNHFRCQVQFYGLSENDEWTQDRAKPVTQIVSAEAWGRADCGFTSESYQQGVLSATILYEILLGKATLYAVLVSALVLMAMVKRKDSRGRAKRSGSGATNFSLLKQAGDVEENPGPTSMDWIWRILFLVGAATGAHSFEQLQLQESGPGLVKPSETLSLTCTVSGGSISSGSYFWGWIRQPPGKGLEWIGSIYYSGITYYNPSLKSRVTISVDTSKNQFSLKLSSVTAADTAVYYCARHDGAVAGLFDYWGQGTLVTVSSATRIQNPDPAVYQLRDSKSSDKSVCLFTDFDSQTNVSQSKDSDVYITDKCVLDMRSMDFKSNSAVAWSNKSDFACANAFNNSIIPEDTFFPSPESSCDVKLVEKSFETDTNLNFQNLSVIGFRILLLKVAGFNLLMTLRLWSS

SEQ ID NO: 18729 - protein, 848 aa, Artificial Sequence
  Synthetic Polypeptide
MALPVTALLLPLALLLHAARPSYVLTQPPSVSVAPGQTARITCGGNNIGGKSVHWYQQPPGQAPVVVVYDDSDRPSGIPERFSGSNSGNTATLTISRVEAGDEAVYYCQVWDSSSDHVVFGGGTKLTVLLEDLKNVFPPEVAVFEPSEAEISHTQKATLVCLATGFYPDHVELSWWVNGKEVHSGVCTDPQPLKEQPALNDSRYCLSSRLRVSATFWQNPRNHFRCQVQFYGLSENDEWTQDRAKPVTQIVSAEAWGRADCGFTSESYQQGVLSATILYEILLGKATLYAVLVSALVLMAMVKRKDSRGRAKRSGSGATNFSLLKQAGDVEENPGPTSMDWIWRILFLVGAATGAHSFEQLQLQESGPGLVKPSETLSLTCTVSGGSISSGSYFWGWIRQPPGKGLEWIGSIYYSGITYYNPSLKSRVTISVDTSKNQFSLKLSSVTAADTAVYYCARHDGAVAGLFDYWGQGTLVTVSSATRIQNPDPAVYQLRDSKSSDKSVCLFTDFDSQTNVSQSKDSDVYITDKCVLDMRSMDFKSNSAVAWSNKSDFACANAFNNSIIPEDTFFPSPESSCDVKLVEKSFETDTNLNFQNLSVIGFRILLLKVAGFNLLMTLRLWSSRAKRSGSGVKQTLNFDLLKLAGDVESNPGPSRGGIHTMATYEVLCEVARKLGTDDREVVLFLLNVFIPQPTLAQLIGALRALKEEGRLTFPLLAECLFRAGRRDLLRDLLHLDPRFLERHLAGTMSYFSPYQLTVLHVDGELCARDIRSLIFLSKDTIGSRSTPQTFLHWVYCMENLDLLGPTDVDALMSMLRSLSRVDLQRQVQTLMGLHLSGPSHSQHYRHTP

SEQ ID NO: 18730 - protein, 627 aa, Artificial Sequence
  Synthetic Polypeptide
MALPVTALLLPLALLLHAARPSYVLTQPPSVSVAPGQTARITCGGNNIGGKSVHWYQQPPGQAPVVVVYDDSDRPSGIPERFSGSNSGNTATLTISRVEAGDEAVYYCQVWDSSSDHVVFGGGTKLTVLLEIQNPDPAVYQLRDSKSSDKSVCLFTDFDSQTNVSQSKDSDVYITDKCVLDMRSMDFKSNSAVAWSNKSDFACANAFNNSIIPEDTFFPSPESSCDVKLVEKSFETDTNLNFQNLSVIGFRILLLKVAGFNLLMTLRLWSSRAKRSGSGVKQTLNFDLLKLAGDVESNPGPTSMDWIWRILFLVGAATGAHSFEQLQLQESGPGLVKPSETLSLTCTVSGGSISSGSYFWGWIRQPPGKGLEWIGSIYYSGITYYNPSLKSRVTISVDTSKNQFSLKLSSVTAADTAVYYCARHDGAVAGLFDYWGQGTLVTVSSATREDLKNVFPPEVAVFEPSEAEISHTQKATLVCLATGFYPDHVELSWWVNGKEVHSGVCTDPQPLKEQPALNDSRYCLSSRLRVSATFWQNPRNHFRCQVQFYGLSENDEWTQDRAKPVTQIVSAEAWGRADCGFTSESYQQGVLSATILYEILLGKATLYAVLVSALVLMAMVKRKDSRG

SEQ ID NO: 18731 - protein, 849 aa, Artificial Sequence
  Synthetic Polypeptide
MALPVTALLLPLALLLHAARPSYVLTQPPSVSVAPGQTARITCGGNNIGGKSVHWYQQPPGQAPVVVVYDDSDRPSGIPERFSGSNSGNTATLTISRVEAGDEAVYYCQVWDSSSDHVVFGGGTKLTVLLEIQNPDPAVYQLRDSKSSDKSVCLFTDFDSQTNVSQSKDSDVYITDKCVLDMRSMDFKSNSAVAWSNKSDFACANAFNNSIIPEDTFFPSPESSCDVKLVEKSFETDTNLNFQNLSVIGFRILLLKVAGFNLLMTLRLWSSRAKRSGSGVKQTLNFDLLKLAGDVESNPGPTSMDWIWRILFLVGAATGAHSFEQLQLQESGPGLVKPSETLSLTCTVSGGSISSGSYFWGWIRQPPGKGLEWIGSIYYSGITYYNPSLKSRVTISVDTSKNQFSLKLSSVTAADTAVYYCARHDGAVAGLFDYWGQGTLVTVSSATREDLKNVFPPEVAVFEPSEAEISHTQKATLVCLATGFYPDHVELSWWVNGKEVHSGVCTDPQPLKEQPALNDSRYCLSSRLRVSATFWQNPRNHFRCQVQFYGLSENDEWTQDRAKPVTQIVSAEAWGRADCGFTSESYQQGVLSATILYEILLGKATLYAVLVSALVLMAMVKRKDSRGRAKRSGSGATNFSLLKQAGDVEENPGPSRGGIHTMATYEVLCEVARKLGTDDREVVLFLLNVFIPQPTLAQLIGALRALKEEGRLTFPLLAECLFRAGRRDLLRDLLHLDPRFLERHLAGTMSYFSPYQLTVLHVDGELCARDIRSLIFLSKDTIGSRSTPQTFLHWVYCMENLDLLGPTDVDALMSMLRSLSRVDLQRQVQTLMGLHLSGPSHSQHYRHTP

SEQ ID NO: 18732 - protein, 901 aa, Artificial Sequence
  Synthetic Polypeptide
MALPVTALLLPLALLLHAARPLEGKPIPNPLLGLDSTGSGEDLKNVFPPEVAVFEPSKAEIAHTQKATLVCLATGFYPDHVELSWWVNGKEVHSGVCTDPQPLKEQPALNDSRYCLSSRLRVSATFWQNPRNHFRCQVQFYGLSENDEWTQDRAKPVTQIVSAEAWGRADCGITSASYHQGVLSATILYEILLGKATLYAVLVSALVLMAMVKRKDSRGRAKRSGSGATNFSLLKQAGDVEENPGPTSMALPVTALLLPLALLLHAARPSYVLTQPPSVSVAPGQTARITCGGNNIGGKSVHWYQQPPGQAPVVVVYDDSDRPSGIPERFSGSNSGNTATLTISRVEAGDEAVYYCQVWDSSSDHVVFGGGTKLTVLGGGGSGGGGSGGGGSQLQLQESGPGLVKPSETLSLTCTVSGGSISSGSYFWGWIRQPPGKGLEWIGSIYYSGITYYNPSLKSRVTISVDTSKNQFSLKLSSVTAADTAVYYCARHDGAVAGLFDYWGQGTLVTVSSATREQKLISEEDGSGIQNPDPAVYQLRDSKSSDKSVCLFTDFDSQTNVSQSKDSDVYITDKCVLDMRSMDFKSNSAVAWSNKSDFACANAFNNSIIPEDTFFPSSDVPCDVKLVEKSFETDTNLNFQNLSVIGFRILLLKVAGFNLLMTLRLWSSRAKRSGSGVKQTLNFDLLKLAGDVESNPGPSRGHMTEYKPTVRLATRDDVPRAVRTLAAAFADYPATRHTVDPDRHIERVTELQELFLTRVGLDIGKVWVADDGAAVAVWTTPESVEAGAVFAEIGPRMAELSGSRLAAQQQMEGLLAPHRPKEPAWFLATVGVSPDHQGKGLGSAVVLPGVEAAERAGVPAFLETSAPRNLPFYERLGFTVTADVEVPEGPRTWCMTRKPGA

SEQ ID NO: 18733 - protein, 902 aa, Artificial Sequence
  Synthetic Polypeptide
MALPVTALLLPLALLLHAARPLEQKLISEEDLGSGDRPDPAVYQLRDSKSSDKSVCLFTDFDSQTNVSQSKDSDVYITDKCVLDMRSMDFKSNSAVAWSNKSDFACANAFNNSIIPEDTFFPSPESSCDVKLVEKSFETDTNLNFQNLSVIGFRILLLKVAGFNLLMTLRLWSSSSRAKRSGSGVKQTLNFDLLKLAGDVESNPGPTSMALPVTALLLPLALLLHAARPSYVLTQPPSVSVAPGQTARITCGGNNIGGKSVHWYQQPPGQAPVVVVYDDSDRPSGIPERFSGSNSGNTATLTISRVEAGDEAVYYCQVWDSSSDHVVFGGGTKLTVLGGGGSGGGGSGGGGSQLQLQESGPGLVKPSETLSLTCTVSGGSISSGSYFWGWIRQPPGKGLEWIGSIYYSGITYYNPSLKSRVTISVDTSKNQFSLKLSSVTAADTAVYYCARHDGAVAGLFDYWGQGTLVTVSSATRGKPIPNPLLGLDSTGSGEDLKNVFPPEVAVFEPSEAEISHTQKATLVCLATGFYPDHVELSWWVNGKEVHSGVCTDPQPLKEQPALNDSRYCLSSRLRVSATFWQNPRNHFRCQVQFYGLSENDEWTQDRAKPVTQIVSAEAWGRADCGFTSESYQQGVLSATILYEILLGKATLYAVLVSALVLMAMVKRKDSRGRAKRSGSGATNFSLLKQAGDVEENPGPSRGHMTEYKPTVRLATRDDVPRAVRTLAAAFADYPATRHTVDPDRHIERVTELQELFLTRVGLDIGKVWVADDGAAVAVWTTPESVEAGAVFAEIGPRMAELSGSRLAAQQQMEGLLAPHRPKEPAWFLATVGVSPDHQGKGLGSAVVLPGVEAAERAGVPAFLETSAPRNLPFYERLGFTVTADVEVPEGPRTWCMTRKPGA

SEQ ID NO: 18734 - protein, 856 aa, Artificial Sequence
  Synthetic Polypeptide
MALPVTALLLPLALLLHAARPSYVLTQPPSVSVAPGQTARITCGGNNIGGKSVHWYQQPPGQAPVVVVYDDSDRPSGIPERFSGSNSGNTATLTISRVEAGDEAVYYCQVWDSSSDHVVFGGGTKLTVLLEDLKNVFPPEVAVFEPSEAEISHTQKATLVCLATGFYPDHVELSWWVNGKEVHSGVSTDPQPLKEQPALNDSRYCLSSRLRVSATFWQNPRNHFRCQVQFYGLSENDEWTQDRAKPVTQIVSAEAWGRADCGFTSESYQQGVLSATILYEILLGKATLYAVLVSALVLMAMVKRKDSRGRAKRSGSGATNFSLLKQAGDVEENPGPTSMDWIWRILFLVGAATGAHSFEQLQLQESGPGLVKPSETLSLTCTVSGGSISSGSYFWGWIRQPPGKGLEWIGSIYYSGITYYNPSLKSRVTISVDTSKNQFSLKLSSVTAADTAVYYCARHDGAVAGLFDYWGQGTLVTVSSATRIQNPDPAVYQLRDSKSSDKSVCLFTDFDSQTNVSQSKDSDVYITDKTVLDMRSMDFKSNSAVAWSNKSDFACANAFNNSIIPEDTFFPSPESSCDVKLVEKSFETDTNLNFQNLSVIGFRILLLKVAGFNLLMTLRLWSSRAKRSGSGVKQTLNFDLLKLAGDVESNPGPSRGHMTEYKPTVRLATRDDVPRAVRTLAAAFADYPATRHTVDPDRHIERVTELQELFLTRVGLDIGKVWVADDGAAVAVWTTPESVEAGAVFAEIGPRMAELSGSRLAAQQQMEGLLAPHRPKEPAWFLATVGVSPDHQGKGLGSAVVLPGVEAAERAGVPAFLETSAPRNLPFYERLGFTVTADVEVPEGPRTWCMTRKPGA

SEQ ID NO: 18735 - protein, 938 aa, Artificial Sequence
  Synthetic Polypeptide
MALPVTALLLPLALLLHAARPSYVLTQPPSVSVAPGQTARITCGGNNIGGKSVHWYQQPPGQAPVVVVYDDSDRPSGIPERFSGSNSGNTATLTISRVEAGDEAVYYCQVWDSSSDHVVFGGGTKLTVLLEDLKNVFPPEVAVFEPSEAEISHTQKATLVCLATGFYPDHVELSWWVNGKEVHSGVSTDPQPLKEQPALNDSRYCLSSRLRVSATFWQNPRNHFRCQVQFYGLSENDEWTQDRAKPVTQIVSAEAWGRADCGFTSESYQQGVLSATILYEILLGKATLYAVLVSALVLMAMVKRKDSRGRAKRSGSGATNFSLLKQAGDVEENPGPTSMDWIWRILFLVGAATGAHSFEQLQLQESGPGLVKPSETLSLTCTVSGGSISSGSYFWGWIRQPPGKGLEWIGSIYYSGITYYNPSLKSRVTISVDTSKNQFSLKLSSVTAADTAVYYCARHDGAVAGLFDYWGQGTLVTVSSATREQKLISEEDGSGTPFPSLAPPIMLLVDGKQQMVVVCLVLDVAPPGLDSPIWFSAGNGSALDAFTYGPSPATDGTWTNLAHLSLPSEELASWEPLVCHTGPGAEGHSRSTQPMHLSGEASTARTCPQEPLRGTPGGALWLGVLRLLLFKLLLFDLLLTCSCLCDPAGPLPSPATTTRLRALGSHRLHPATETGGREATSSPRPQPRDRRWGDTPPGRKPGSPVRAKRSGSGVKQTLNFDLLKLAGDVESNPGPSRGHMTEYKPTVRLATRDDVPRAVRTLAAAFADYPATRHTVDPDRHIERVTELQELFLTRVGLDIGKVWVADDGAAVAVWTTPESVEAGAVFAEIGPRMAELSGSRLAAQQQMEGLLAPHRPKEPAWFLATVGVSPDHQGKGLGSAVVLPGVEAAERAGVPAFLETSAPRNLPFYERLGFTVTADVEVPEGPRTWCMTRKPGA

SEQ ID NO: 18736 - protein, 956 aa, Artificial Sequence
  Synthetic Polypeptide
MALPVTALLLPLALLLHAARPLEDLKNVFPPEVAVFEPSEAEISHTQKATLVCLATGFYPDHVELSWWVNGKEVHSGVSTDPQPLKEQPALNDSRYCLSSRLRVSATFWQNPRNHFRCQVQFYGLSENDEWTQDRAKPVTQIVSAEAWGRADCGFTSESYQQGVLSATILYEILLGKATLYAVLVSALVLMAMVKRKDSRGRAKRSGSGATNFSLLKQAGDVEENPGPTSMALPVTALLLPLALLLHAARPSYVLTQPPSVSVAPGQTARITCGGNNIGGKSVHWYQQPPGQAPVVVVYDDSDRPSGIPERFSGSNSGNTATLTISRVEAGDEAVYYCQVWDSSSDHVVFGGGTKLTVLGGGGSGGGGSGGGGSQLQLQESGPGLVKPSETLSLTCTVSGGSISSGSYFWGWIRQPPGKGLEWIGSIYYSGITYYNPSLKSRVTISVDTSKNQFSLKLSSVTAADTAVYYCARHDGAVAGLFDYWGQGTLVTVSSATREQKLISEEDLGSGTPFPSLAPPIMLLVDGKQQMVVVCLVLDVAPPGLDSPIWFSAGNGSALDAFTYGPSPATDGTWTNLAHLSLPSEELASWEPLVCHTGPGAEGHSRSTQPMHLSGEASTARTCPQEPLRGTPGGALWLGVLRLLLFKLLLFDLLLTCSCLCDPAGPLPSPATTTRLRALGSHRLHPATETGGREATSSPRPQPRDRRWGDTPPGRKPGSPVRAKRSGSGVKQTLNFDLLKLAGDVESNPGPSRSRGHMTEYKPTVRLATRDDVPRAVRTLAAAFADYPATRHTVDPDRHIERVTELQELFLTRVGLDIGKVWVADDGAAVAVWTTPESVEAGAVFAEIGPRMAELSGSRLAAQQQMEGLLAPHRPKEPAWFLATVGVSPDHQGKGLGSAVVLPGVEAAERAGVPAFLETSAPRNLPFYERLGFTVTADVEVPEGPRTWCMTRKPGA

SEQ ID NO: 18737 - protein, 893 aa, Artificial Sequence
  Synthetic Polypeptide
MALPVTALLLPLALLLHAARPSYVLTQPPSVSVAPGQTARITCGGNNIGGKSVHWYQQPPGQAPVVVVYDDSDRPSGIPERFSGSNSGNTATLTISRVEAGDEAVYYCQVWDSSSDHVVFGGGTKLTVLLEGKPIPNPLLGLDSTGSGDKQLDADVSPKPTIFLPSIAETKLQKAGTYLCLLEKFFPDVIKIHWQEKKSNTILGSQEGNTMKTNDTYMKFSWLTVPEKSLDKEHRCIVRHENNKNGVDQEIIFPPIKTDVITMDPKDNCSKDANDTLLLQLTNTSAYYMYLLLLLKSVVYFAIITCCLLRRTAFCCNGEKSRAKRSGSGATNFSLLKQAGDVEENPGPTSMDWIWRILFLVGAATGAHSFEQLQLQESGPGLVKPSETLSLTCTVSGGSISSGSYFWGWIRQPPGKGLEWIGSIYYSGITYYNPSLKSRVTISVDTSKNQFSLKLSSVTAADTAVYYCARHDGAVAGLFDYWGQGTLVTVSSATREQKLISEEDGSGSQPHTKPSVFVMKNGTNVACLVKEFYPKDIRINLVSSKKITEFDPAIVISPSGKYNAVKLGKYEDSNSVTCSVQHDNKTVHSTDFEVKTDSTDHVKPKETENTKQPSKSCHKPKAIVHTEKVNMMSLTVLGLRMLFAKTVAVNFLLTAKLFFLRAKRSGSGVKQTLNFDLLKLAGDVESNPGPSRGHMTEYKPTVRLATRDDVPRAVRTLAAAFADYPATRHTVDPDRHIERVTELQELFLTRVGLDIGKVWVADDGAAVAVWTTPESVEAGAVFAEIGPRMAELSGSRLAAQQQMEGLLAPHRPKEPAWFLATVGVSPDHQGKGLGSAVVLPGVEAAERAGVPAFLETSAPRNLPFYERLGFTVTADVEVPEGPRTWCMTRKPGA

SEQ ID NO: 18738 - protein, 631 aa, Artificial Sequence
  Synthetic Polypeptide
MALPVTALLLPLALLLHAARPSYVLTQPPSVSVAPGQTARITCGGNNIGGKSVHWYQQPPGQAPVVVVYDDSDRPSGIPERFSGSNSGNTATLTISRVEAGDEAVYYCQVWDSSSDHVVFGGGTKLTVLLESQPHTKPSVFVMKNGTNVACLVKEFYPKDIRINLVSSKKITEFDPAIVISPSGKYNAVKLGKYEDSNSVTCSVQHDNKTVHSTDFEVKTDSTDHVKPKETENTKQPSKSCHKPKAIVHTEKVNMMSLTVLGLRMLFAKTVAVNFLLTAKLFFLRAKRSGSGATNFSLLKQAGDVEENPGPTSMDWIWRILFLVGAATGAHSFEQLQLQESGPGLVKPSETLSLTCTVSGGSISSGSYFWGWIRQPPGKGLEWIGSIYYSGITYYNPSLKSRVTISVDTSKNQFSLKLSSVTAADTAVYYCARHDGAVAGLFDYWGQGTLVTVSSATRDKQLDADVSPKPTIFLPSIAETKLQKAGTYLCLLEKFFPDVIKIHWQEKKSNTILGSQEGNTMKTNDTYMKFSWLTVPEKSLDKEHRCIVRHENNKNGVDQEIIFPPIKTDVITMDPKDNCSKDANDTLLLQLTNTSAYYMYLLLLLKSVVYFAIITCCLLRRTAFCCNGEKS

SEQ ID NO: 18739 - protein, 908 aa, Artificial Sequence
  Synthetic Polypeptide
MALPVTALLLPLALLLHAARPLEGKPIPNPLLGLDSTGSGDKQLDADVSPKPTIFLPSIAETKLQKAGTYLCLLEKFFPDVIKIHWQEKKSNTILGSQEGNTMKTNDTYMKFSWLTVPEKSLDKEHRCIVRHENNKNGVDQEIIFPPIKTDVITMDPKDNCSKDANDTLLLQLTNTSAYYMYLLLLLKSVVYFAIITCCLLRRTAFCCNGEKSRAKRSGSGATNFSLLKQAGDVEENPGPTSMALPVTALLLPLALLLHAARPSYVLTQPPSVSVAPGQTARITCGGNNIGGKSVHWYQQPPGQAPVVVVYDDSDRPSGIPERFSGSNSGNTATLTISRVEAGDEAVYYCQVWDSSSDHVVFGGGTKLTVLGGGGSGGGGSGGGGSQLQLQESGPGLVKPSETLSLTCTVSGGSISSGSYFWGWIRQPPGKGLEWIGSIYYSGITYYNPSLKSRVTISVDTSKNQFSLKLSSVTAADTAVYYCARHDGAVAGLFDYWGQGTLVTVSSATREQKLISEEDGSGSQPHTKPSVFVMKNGTNVACLVKEFYPKDIRINLVSSKKITEFDPAIVISPSGKYNAVKLGKYEDSNSVTCSVQHDNKTVHSTDFEVKTDSTDHVKPKETENTKQPSKSCHKPKAIVHTEKVNMMSLTVLGLRMLFAKTVAVNFLLTAKLFFLRAKRSGSGVKQTLNFDLLKLAGDVESNPGPSRGHMTEYKPTVRLATRDDVPRAVRTLAAAFADYPATRHTVDPDRHIERVTELQELFLTRVGLDIGKVWVADDGAAVAVWTTPESVEAGAVFAEIGPRMAELSGSRLAAQQQMEGLLAPHRPKEPAWFLATVGVSPDHQGKGLGSAVVLPGVEAAERAGVPAFLETSAPRNLPFYERLGFTVTADVEVPEGPRTWCMTRKPGA

SEQ ID NO: 18740 - protein, 1033 aa, Artificial Sequence
  Synthetic Polypeptide
MALPVTALLLPLALLLHAARPSYVLTQPPSVSVAPGQTARITCGGNNIGGKSVHWYQQPPGQAPVVVVYDDSDRPSGIPERFSGSNSGNTATLTISRVEAGDEAVYYCQVWDSSSDHVVFGGGTKLTVLGQPKANPTVTLFPPSSEELQANKATLVCLISDFYPGAVTVAWKADGSPVKAGVETTKPSKQSNNKYAASSYLSLTPEQWKSHRSYSCQVTHEGSTVEKTVAPTECSGSQSFGLLDPKLCYLLDGILFIYGVILTALFLRVKFSRSADAPAYQQGQNQLYNELNLGRREEYDVLDKRRGRDPEMGGKPQRRKNPQEGLYNELQKDKMAEAYSEIGMKGERRRGKGHDGLYQGLSTATKDTYDALHMQALPPRRAKRSGSGATNFSLLKQAGDVEENPGPTSMDWIWRILFLVGAATGAHSFEQLQLQESGPGLVKPSETLSLTCTVSGGSISSGSYFWGWIRQPPGKGLEWIGSIYYSGITYYNPSLKSRVTISVDTSKNQFSLKLSSVTAADTAVYYCARHDGAVAGLFDYWGQGTLVTVSSAASTKGPSVFPLAPSSKSTSGGTAALGCLVKDYFPEPVTVSWNSGALTSGVHTFPAVLQSSGLYSLSSVVTVPSSSLGTQTYICNVNHKPSNTKVDKRVEPKSCGTQSFGLLDPKLCYLLDGILFIYGVILTALFLRVKFSRSADAPAYQQGQNQLYNELNLGRREEYDVLDKRRGRDPEMGGKPQRRKNPQEGLYNELQKDKMAEAYSEIGMKGERRRGKGHDGLYQGLSTATKDTYDALHMQALPPRRAKRSGSGVKQTLNFDLLKLAGDVESNPGPSRGHMTEYKPTVRLATRDDVPRAVRTLAAAFADYPATRHTVDPDRHIERVTELQELFLTRVGLDIGKVWVADDGAAVAVWTTPESVEAGAVFAEIGPRMAELSGSRLAAQQQMEGLLAPHRPKEPAWFLATVGVSPDHQGKGLGSAVVLPGVEAAERAGVPAFLETSAPRNLPFYERLGFTVTADVEVPEGPRTWCMTRKPGA

SEQ ID NO: 18741 - protein, 819 aa, Artificial Sequence
  Synthetic Polypeptide
MALPVTALLLPLALLLHAARPSYVLTQPPSVSVAPGQTARITCGGNNIGGKSVHWYQQPPGQAPVVVVYDDSDRPSGIPERFSGSNSGNTATLTISRVEAGDEAVYYCQVWDSSSDHVVFGGGTKLTVLLEDLKNVFPPEVAVFEPSEAEISHTQKATLVCLATGFYPDHVELSWWVNGKEVHSGVSTDPQPLKEQPALNDSRYCLSSRLRVSATFWQNPRNHFRCQVQFYGLSENDEWTQDRAKPVTQIVSAEAWGRADCGSQSFGLLDPKLCYLLDGILFIYGVILTALFLRVKFSRSADAPAYQQGQNQLYNELNLGRREEYDVLDKRRGRDPEMGGKPQRRKNPQEGLYNELQKDKMAEAYSEIGMKGERRRGKGHDGLYQGLSTATKDTYDALHMQALPPRRAKRSGSGATNFSLLKQAGDVEENPGPTSMDWIWRILFLVGAATGAHSFEQLQLQESGPGLVKPSETLSLTCTVSGGSISSGSYFWGWIRQPPGKGLEWIGSIYYSGITYYNPSLKSRVTISVDTSKNQFSLKLSSVTAADTAVYYCARHDGAVAGLFDYWGQGTLVTVSSATRIQNPDPAVYQLRDSKSSDKSVCLFTDFDSQTNVSQSKDSDVYITDKTVLDMRSMDFKSNSAVAWSNKSDFACANAFNNSIIPEDTFFPSPESSCGTQSFGLLDPKLCYLLDGILFIYGVILTALFLRVKFSRSADAPAYQQGQNQLYNELNLGRREEYDVLDKRRGRDPEMGGKPQRRKNPQEGLYNELQKDKMAEAYSEIGMKGERRRGKGHDGLYQGLSTATKDTYDALHMQALPPR

SEQ ID NO: 18742 - protein, 819 aa, Artificial Sequence
  Synthetic Polypeptide
MALPVTALLLPLALLLHAARPSYVLTQPPSVSVAPGQTARITCGGNNIGGKSVHWYQQPPGQAPVVVVYDDSDRPSGIPERFSGSNSGNTATLTISRVEAGDEAVYYCQVWDSSSDHVVFGGGTKLTVLLEDLKNVFPPEVAVFEPSKAEIAHTQKATLVCLATGFYPDHVELSWWVNGKEVHSGVCTDPQPLKEQPALNDSRYCLSSRLRVSATFWQNPRNHFRCQVQFYGLSENDEWTQDRAKPVTQIVSAEAWGRADCGSQSFGLLDPKLCYLLDGILFIYGVILTALFLRVKFSRSADAPAYQQGQNQLYNELNLGRREEYDVLDKRRGRDPEMGGKPQRRKNPQEGLYNELQKDKMAEAYSEIGMKGERRRGKGHDGLYQGLSTATKDTYDALHMQALPPRRAKRSGSGATNFSLLKQAGDVEENPGPTSMDWIWRILFLVGAATGAHSFEQLQLQESGPGLVKPSETLSLTCTVSGGSISSGSYFWGWIRQPPGKGLEWIGSIYYSGITYYNPSLKSRVTISVDTSKNQFSLKLSSVTAADTAVYYCARHDGAVAGLFDYWGQGTLVTVSSATRIQNPDPAVYQLRDSKSSDKSVCLFTDFDSQTNVSQSKDSDVYITDKCVLDMRSMDFKSNSAVAWSNKSDFACANAFNNSIIPEDTFFPSSDVPCGTQSFGLLDPKLCYLLDGILFIYGVILTALFLRVKFSRSADAPAYQQGQNQLYNELNLGRREEYDVLDKRRGRDPEMGGKPQRRKNPQEGLYNELQKDKMAEAYSEIGMKGERRRGKGHDGLYQGLSTATKDTYDALHMQALPPR

SEQ ID NO: 18743 - protein, 890 aa, Artificial Sequence
  Synthetic Polypeptide
MALPVTALLLPLALLLHAARPSYVLTQPPSVSVAPGQTARITCGGNNIGGKSVHWYQQPPGQAPVVVVYDDSDRPSGIPERFSGSNSGNTATLTISRVEAGDEAVYYCQVWDSSSDHVVFGGGTKLTVLLEGKPIPNPLLGLDSTGSGEDLKNVFPPEVAVFEPSEAEISHTQKATLVCLATGFYPDHVELSWWVNGKEVHSGVSTDPQPLKEQPALNDSRYCLSSRLRVSATFWQNPRNHFRCQVQFYGLSENDEWTQDRAKPVTQIVSAEAWGRADCGSQSFGLLDPKLCYLLDGILFIYGVILTALFLRVKFSRSADAPAYQQGQNQLYNELNLGRREEYDVLDKRRGRDPEMGGKPQRRKNPQEGLYNELQKDKMAEAYSEIGMKGERRRGKGHDGLYQGLSTATKDTYDALHMQALPPRRAKRSGSGATNFSLLKQAGDVEENPGPTSMDWIWRILFLVGAATGAHSFEQLQLQESGPGLVKPSETLSLTCTVSGGSISSGSYFWGWIRQPPGKGLEWIGSIYYSGITYYNPSLKSRVTISVDTSKNQFSLKLSSVTAADTAVYYCARHDGAVAGLFDYWGQGTLVTVSSATREQKLISEEDGSGIQNPDPAVYQLRDSKSSDKSVCLFTDFDSQTNVSQSKDSDVYITDKTVLDMRSMDFKSNSAVAWSNKSDFACANAFNNSIIPEDTFFPSPESSCGTQSFGLLDPKLCYLLDGILFIYGVILTALFLRSKRSRLLHSDYMNMTPRRPGPTRKHYQPYAPPRDFAAYRSRVKFSRSADAPAYQQGQNQLYNELNLGRREEYDVLDKRRGRDPEMGGKPQRRKNPQEGLYNELQKDKMAEAYSEIGMKGERRRGKGHDGLYQGLSTATKDTYDALHMQALPPR

SEQ ID NO: 18744 - protein, 931 aa, Artificial Sequence
  Synthetic Polypeptide
MALPVTALLLPLALLLHAARPSYVLTQPPSVSVAPGQTARITCGGNNIGGKSVHWYQQPPGQAPVVVVYDDSDRPSGIPERFSGSNSGNTATLTISRVEAGDEAVYYCQVWDSSSDHVVFGGGTKLTVLLEGKPIPNPLLGLDSTGSGEDLKNVFPPEVAVFEPSEAEISHTQKATLVCLATGFYPDHVELSWWVNGKEVHSGVSTDPQPLKEQPALNDSRYCLSSRLRVSATFWQNPRNHFRCQVQFYGLSENDEWTQDRAKPVTQIVSAEAWGRADCGSQSFGLLDPKLCYLLDGILFIYGVILTALFLRSKRSRLLHSDYMNMTPRRPGPTRKHYQPYAPPRDFAAYRSRVKFSRSADAPAYQQGQNQLYNELNLGRREEYDVLDKRRGRDPEMGGKPQRRKNPQEGLYNELQKDKMAEAYSEIGMKGERRRGKGHDGLYQGLSTATKDTYDALHMQALPPRRAKRSGSGATNFSLLKQAGDVEENPGPTSMDWIWRILFLVGAATGAHSFEQLQLQESGPGLVKPSETLSLTCTVSGGSISSGSYFWGWIRQPPGKGLEWIGSIYYSGITYYNPSLKSRVTISVDTSKNQFSLKLSSVTAADTAVYYCARHDGAVAGLFDYWGQGTLVTVSSATREQKLISEEDGSGIQNPDPAVYQLRDSKSSDKSVCLFTDFDSQTNVSQSKDSDVYITDKTVLDMRSMDFKSNSAVAWSNKSDFACANAFNNSIIPEDTFFPSPESSCGTQSFGLLDPKLCYLLDGILFIYGVILTALFLRSKRSRLLHSDYMNMTPRRPGPTRKHYQPYAPPRDFAAYRSRVKFSRSADAPAYQQGQNQLYNELNLGRREEYDVLDKRRGRDPEMGGKPQRRKNPQEGLYNELQKDKMAEAYSEIGMKGERRRGKGHDGLYQGLSTATKDTYDALHMQALPPR

SEQ ID NO: 18745 - protein, 892 aa, Artificial Sequence
  Synthetic Polypeptide
MALPVTALLLPLALLLHAARPSYVLTQPPSVSVAPGQTARITCGGNNIGGKSVHWYQQPPGQAPVVVVYDDSDRPSGIPERFSGSNSGNTATLTISRVEAGDEAVYYCQVWDSSSDHVVFGGGTKLTVLLEGKPIPNPLLGLDSTGSGEDLKNVFPPEVAVFEPSEAEISHTQKATLVCLATGFYPDHVELSWWVNGKEVHSGVSTDPQPLKEQPALNDSRYCLSSRLRVSATFWQNPRNHFRCQVQFYGLSENDEWTQDRAKPVTQIVSAEAWGRADCGSQSFGLLDPKLCYLLDGILFIYGVILTALFLRVKFSRSADAPAYQQGQNQLYNELNLGRREEYDVLDKRRGRDPEMGGKPQRRKNPQEGLYNELQKDKMAEAYSEIGMKGERRRGKGHDGLYQGLSTATKDTYDALHMQALPPRRAKRSGSGATNFSLLKQAGDVEENPGPTSMDWIWRILFLVGAATGAHSFEQLQLQESGPGLVKPSETLSLTCTVSGGSISSGSYFWGWIRQPPGKGLEWIGSIYYSGITYYNPSLKSRVTISVDTSKNQFSLKLSSVTAADTAVYYCARHDGAVAGLFDYWGQGTLVTVSSATREQKLISEEDLGSGIQNPDPAVYQLRDSKSSDKSVCLFTDFDSQTNVSQSKDSDVYITDKTVLDMRSMDFKSNSAVAWSNKSDFACANAFNNSIIPEDTFFPSPESSCGTQSFGLLDPKLCYLLDGILFIYGVILTALFLKRGRKKLLYIFKQPFMRPVQTTQEEDGCSCRFPEEEEGGCELRVKFSRSADAPAYQQGQNQLYNELNLGRREEYDVLDKRRGRDPEMGGKPQRRKNPQEGLYNELQKDKMAEAYSEIGMKGERRRGKGHDGLYQGLSTATKDTYDALHMQALPPR

SEQ ID NO: 18746 - protein, 934 aa, Artificial Sequence
  Synthetic Polypeptide
MALPVTALLLPLALLLHAARPSYVLTQPPSVSVAPGQTARITCGGNNIGGKSVHWYQQPPGQAPVVVVYDDSDRPSGIPERFSGSNSGNTATLTISRVEAGDEAVYYCQVWDSSSDHVVFGGGTKLTVLLEGKPIPNPLLGLDSTGSGEDLKNVFPPEVAVFEPSEAEISHTQKATLVCLATGFYPDHVELSWWVNGKEVHSGVSTDPQPLKEQPALNDSRYCLSSRLRVSATFWQNPRNHFRCQVQFYGLSENDEWTQDRAKPVTQIVSAEAWGRADCGSQSFGLLDPKLCYLLDGILFIYGVILTALFLKRGRKKLLYIFKQPFMRPVQTTQEEDGCSCRFPEEEEGGCELRVKFSRSADAPAYQQGQNQLYNELNLGRREEYDVLDKRRGRDPEMGGKPQRRKNPQEGLYNELQKDKMAEAYSEIGMKGERRRGKGHDGLYQGLSTATKDTYDALHMQALPPRRAKRSGSGATNFSLLKQAGDVEENPGPTSMDWIWRILFLVGAATGAHSFEQLQLQESGPGLVKPSETLSLTCTVSGGSISSGSYFWGWIRQPPGKGLEWIGSIYYSGITYYNPSLKSRVTISVDTSKNQFSLKLSSVTAADTAVYYCARHDGAVAGLFDYWGQGTLVTVSSATREQKLISEEDLGSGIQNPDPAVYQLRDSKSSDKSVCLFTDFDSQTNVSQSKDSDVYITDKTVLDMRSMDFKSNSAVAWSNKSDFACANAFNNSIIPEDTFFPSPESSCGTQSFGLLDPKLCYLLDGILFIYGVILTALFLKRGRKKLLYIFKQPFMRPVQTTQEEDGCSCRFPEEEEGGCELRVKFSRSADAPAYQQGQNQLYNELNLGRREEYDVLDKRRGRDPEMGGKPQRRKNPQEGLYNELQKDKMAEAYSEIGMKGERRRGKGHDGLYQGLSTATKDTYDALHMQALPPR

SEQ ID NO: 18747 - protein, 824 aa, Artificial Sequence
  Synthetic Polypeptide
MALPVTALLLPLALLLHAARPSYVLTQPPSVSVAPGQTARITCGGNNIGGKSVHWYQQPPGQAPVVVVYDDSDRPSGIPERFSGSNSGNTATLTISRVEAGDEAVYYCQVWDSSSDHVVFGGGTKLTVLLEQSFGLLDPKLCYLLDGILFIYGVILTALFLRVKFSRSADAPAYQQGQNQLYNELNLGRREEYDVLDKRRGRDPEMGGKPQRRKNPQEGLYNELQKDKMAEAYSEIGMKGERRRGKGHDGLYQGLSTATKDTYDALHMQALPPRRAKRSGSGATNFSLLKQAGDVEENPGPTSMDWIWRILFLVGAATGAHSFEQLQLQESGPGLVKPSETLSLTCTVSGGSISSGSYFWGWIRQPPGKGLEWIGSIYYSGITYYNPSLKSRVTISVDTSKNQFSLKLSSVTAADTAVYYCARHDGAVAGLFDYWGQGTLVTVSSATRQSFGLLDPKLCYLLDGILFIYGVILTALFLRVKFSRSADAPAYQQGQNQLYNELNLGRREEYDVLDKRRGRDPEMGGKPQRRKNPQEGLYNELQKDKMAEAYSEIGMKGERRRGKGHDGLYQGLSTATKDTYDALHMQALPPRRAKRSGSGVKQTLNFDLLKLAGDVESNPGPSRGHMTEYKPTVRLATRDDVPRAVRTLAAAFADYPATRHTVDPDRHIERVTELQELFLTRVGLDIGKVWVADDGAAVAVWTTPESVEAGAVFAEIGPRMAELSGSRLAAQQQMEGLLAPHRPKEPAWFLATVGVSPDHQGKGLGSAVVLPGVEAAERAGVPAFLETSAPRNLPFYERLGFTVTADVEVPEGPRTWCMTRKPGA

SEQ ID NO: 18748 - protein, 649 aa, Artificial Sequence
  Synthetic Polypeptide
MALPVTALLLPLALLLHAARPSYVLTQPPSVSVAPGQTARITCGGNNIGGKSVHWYQQPPGQAPVVVVYDDSDRPSGIPERFSGSNSGNTATLTISRVEAGDEAVYYCQVWDSSSDHVVFGGGTKLTVLLEGQPKANPTVTLFPPSSEELQANKATLVCLISDFYPGAVTVAWKADGSPVKAGVETTKPSKQSNNKYAASSYLSLTPEQWKSHRSYSCQVTHEGSTVEKTVAPTECSPIKTDVITMDPKDNCSKDANDTLLLQLTNTSAYYMYLLLLLKSVVYFAIITCCLLRRTAFCCNGEKSRAKRSGSGATNFSLLKQAGDVEENPGPTSMDWIWRILFLVGAATGAHSFEQLQLQESGPGLVKPSETLSLTCTVSGGSISSGSYFWGWIRQPPGKGLEWIGSIYYSGITYYNPSLKSRVTISVDTSKNQFSLKLSSVTAADTAVYYCARHDGAVAGLFDYWGQGTLVTVSSATRASTKGPSVFPLAPSSKSTSGGTAALGCLVKDYFPEPVTVSWNSGALTSGVHTFPAVLQSSGLYSLSSVVTVPSSSLGTQTYICNVNHKPSNTKVDKRVEPKSCEVKTDSTDHVKPKETENTKQPSKSCHKPKAIVHTEKVNMMSLTVLGLRMLFAKTVAVNFLLTAKLFFL

SEQ ID NO: 18749 - protein, 627 aa, Artificial Sequence
  Synthetic Polypeptide
MALPVTALLLPLALLLHAARPSYVLTQPPSVSVAPGQTARITCGGNNIGGKSVHWYQQPPGQAPVVVVYDDSDRPSGIPERFSGSNSGNTATLTISRVEAGDEAVYYCQVWDSSSDHVVFGGGTKLTVLLEGQPKANPTVTLFPPSSEELQANKATLVCLISDFYPGAVTVAWKADGSPVKAGVETTKPSKQSNNKYAASSYLSLTPEQWKSHRSYSCQVTHEGSTVEKTVAPTECSGRADCGITSASYHQGVLSATILYEILLGKATLYAVLVSALVLMAMVKRKDSRGRAKRSGSGATNFSLLKQAGDVEENPGPTSMDWIWRILFLVGAATGAHSFEQLQLQESGPGLVKPSETLSLTCTVSGGSISSGSYFWGWIRQPPGKGLEWIGSIYYSGITYYNPSLKSRVTISVDTSKNQFSLKLSSVTAADTAVYYCARHDGAVAGLFDYWGQGTLVTVSSATRASTKGPSVFPLAPSSKSTSGGTAALGCLVKDYFPEPVTVSWNSGALTSGVHTFPAVLQSSGLYSLSSVVTVPSSSLGTQTYICNVNHKPSNTKVDKRVEPKSCIPEDTFFPSSDVPCDVKLVEKSFETDTNLNFQNLSVIGFRILLLKVAGFNLLMTLRLWSS

SEQ ID NO: 18750 - protein, 627 aa, Artificial Sequence
  Synthetic Polypeptide
MALPVTALLLPLALLLHAARPSYVLTQPPSVSVAPGQTARITCGGNNIGGKSVHWYQQPPGQAPVVVVYDDSDRPSGIPERFSGSNSGNTATLTISRVEAGDEAVYYCQVWDSSSDHVVFGGGTKLTVLLEGQPKANPTVTLFPPSSEELQANKATLVCLISDFYPGAVTVAWKADGSPVKAGVETTKPSKQSNNKYAASSYLSLTPEQWKSHRSYSCQVTHEGSTVEKTVAPTECSGRADCGFTSESYQQGVLSATILYEILLGKATLYAVLVSALVLMAMVKRKDSRGRAKRSGSGATNFSLLKQAGDVEENPGPTSMDWIWRILFLVGAATGAHSFEQLQLQESGPGLVKPSETLSLTCTVSGGSISSGSYFWGWIRQPPGKGLEWIGSIYYSGITYYNPSLKSRVTISVDTSKNQFSLKLSSVTAADTAVYYCARHDGAVAGLFDYWGQGTLVTVSSATRASTKGPSVFPLAPSSKSTSGGTAALGCLVKDYFPEPVTVSWNSGALTSGVHTFPAVLQSSGLYSLSSVVTVPSSSLGTQTYICNVNHKPSNTKVDKRVEPKSCIPEDTFFPSPESSCDVKLVEKSFETDTNLNFQNLSVIGFRILLLKVAGFNLLMTLRLWSS

SEQ ID NO: 18751 - protein, 453 aa, Artificial Sequence
  Synthetic Polypeptide
MALPVTALLLPLALLLHAARPSYVLTQPPSVSVAPGQTARITCGGNNIGGKSVHWYQQPPGQAPVVVVYDDSDRPSGIPERFSGSNSGNTATLTISRVEAGDEAVYYCQVWDSSSDHVVFGGGTKLTVLGGGGSGGGGSGGGGSQLQLQESGPGLVKPSETLSLTCTVSGGSISSGSYFWGWIRQPPGKGLEWIGSIYYSGITYYNPSLKSRVTISVDTSKNQFSLKLSSVTAADTAVYYCARHDGAVAGLFDYWGQGTLVTVSSATRDGNEEMGGITQTPYKVSISGTTVILTCPQYPGSEILWQHNDKNIGGDEDDKNIGSDEDHLSLKEFSELEQSGYYVCYPRGSKPEDANFYLYLRARVCENCMEMDVMSVATIVIVDICITGGLLLLVYYWSKNRKAKAKPVTRGAGAGGRQRGQNKERPPPVPNPDYEPIRKGQRDLYSGLNQRRI

SEQ ID NO: 18752 - protein, 418 aa, Artificial Sequence
  Synthetic Polypeptide
MALPVTALLLPLALLLHAARPSYVLTQPPSVSVAPGQTARITCGGNNIGGKSVHWYQQPPGQAPVVVVYDDSDRPSGIPERFSGSNSGNTATLTISRVEAGDEAVYYCQVWDSSSDHVVFGGGTKLTVLGGGGSGGGGSGGGGSQLQLQESGPGLVKPSETLSLTCTVSGGSISSGSYFWGWIRQPPGKGLEWIGSIYYSGITYYNPSLKSRVTISVDTSKNQFSLKLSSVTAADTAVYYCARHDGAVAGLFDYWGQGTLVTVSSATRFKIPIEELEDRVFVNCNTSITWVEGTVGTLLSDITRLDLGKRILDPRGIYRCNGTDIYKDKESTVQVHYRMCQSCVELDPATVAGIIVTDVIATLLLALGVFCFAGHETGRLSGAADTQALLRNDQVYQPLRDRDDAQYSHLGGNWARNK

SEQ ID NO: 18753 - protein, 428 aa, Artificial Sequence
  Synthetic Polypeptide
MALPVTALLLPLALLLHAARPSYVLTQPPSVSVAPGQTARITCGGNNIGGKSVHWYQQPPGQAPVVVVYDDSDRPSGIPERFSGSNSGNTATLTISRVEAGDEAVYYCQVWDSSSDHVVFGGGTKLTVLGGGGSGGGGSGGGGSQLQLQESGPGLVKPSETLSLTCTVSGGSISSGSYFWGWIRQPPGKGLEWIGSIYYSGITYYNPSLKSRVTISVDTSKNQFSLKLSSVTAADTAVYYCARHDGAVAGLFDYWGQGTLVTVSSATRQSIKGNHLVKVYDYQEDGSVLLTCDAEAKNITWFKDGKMIGFLTEDKKKWNLGSNAKDPRGMYQCKGSQNKSKPLQVYYRMCQNCIELNAATISGFLFAEIVSIFVLAVGVYFIAGQDGVRQSRASDKQTLLPNDQLYQPLKDREDDQYSHLQGNQLRRN

SEQ ID NO: 18754 - protein, 411 aa, Artificial Sequence
  Synthetic Polypeptide
MALPVTALLLPLALLLHAARPSYVLTQPPSVSVAPGQTARITCGGNNIGGKSVHWYQQPPGQAPVVVVYDDSDRPSGIPERFSGSNSGNTATLTISRVEAGDEAVYYCQVWDSSSDHVVFGGGTKLTVLGGGGSGGGGSGGGGSQLQLQESGPGLVKPSETLSLTCTVSGGSISSGSYFWGWIRQPPGKGLEWIGSIYYSGITYYNPSLKSRVTISVDTSKNQFSLKLSSVTAADTAVYYCARHDGAVAGLFDYWGQGTLVTVSSATRQSFGLLDPKLCYLLDGILFIYGVILTALFLRVKFSRSADAPAYQQGQNQLYNELNLGRREEYDVLDKRRGRDPEMGGKPQRRKNPQEGLYNELQKDKMAEAYSEIGMKGERRRGKGHDGLYQGLSTATKDTYDALHMQALPPR

SEQ ID NO: 18755 - protein, 453 aa, Artificial Sequence
  Synthetic Polypeptide
MALPVTALLLPLALLLHAARPQLQLQESGPGLVKPSETLSLTCTVSGGSISSGSYFWGWIRQPPGKGLEWIGSIYYSGITYYNPSLKSRVTISVDTSKNQFSLKLSSVTAADTAVYYCARHDGAVAGLFDYWGQGTLVTVSSAGGGGSGGGGSGGGGSSYVLTQPPSVSVAPGQTARITCGGNNIGGKSVHWYQQPPGQAPVVVVYDDSDRPSGIPERFSGSNSGNTATLTISRVEAGDEAVYYCQVWDSSSDHVVFGGGTKLTVLTRDGNEEMGGITQTPYKVSISGTTVILTCPQYPGSEILWQHNDKNIGGDEDDKNIGSDEDHLSLKEFSELEQSGYYVCYPRGSKPEDANFYLYLRARVCENCMEMDVMSVATIVIVDICITGGLLLLVYYWSKNRKAKAKPVTRGAGAGGRQRGQNKERPPPVPNPDYEPIRKGQRDLYSGLNQRRI

SEQ ID NO: 18756 - protein, 418 aa, Artificial Sequence
  Synthetic Polypeptide
MALPVTALLLPLALLLHAARPQLQLQESGPGLVKPSETLSLTCTVSGGSISSGSYFWGWIRQPPGKGLEWIGSIYYSGITYYNPSLKSRVTISVDTSKNQFSLKLSSVTAADTAVYYCARHDGAVAGLFDYWGQGTLVTVSSAGGGGSGGGGSGGGGSSYVLTQPPSVSVAPGQTARITCGGNNIGGKSVHWYQQPPGQAPVVVVYDDSDRPSGIPERFSGSNSGNTATLTISRVEAGDEAVYYCQVWDSSSDHVVFGGGTKLTVLTRFKIPIEELEDRVFVNCNTSITWVEGTVGTLLSDITRLDLGKRILDPRGIYRCNGTDIYKDKESTVQVHYRMCQSCVELDPATVAGIIVTDVIATLLLALGVFCFAGHETGRLSGAADTQALLRNDQVYQPLRDRDDAQYSHLGGNWARNK

SEQ ID NO: 18757 - protein, 428 aa, Artificial Sequence
  Synthetic Polypeptide
MALPVTALLLPLALLLHAARPQLQLQESGPGLVKPSETLSLTCTVSGGSISSGSYFWGWIRQPPGKGLEWIGSIYYSGITYYNPSLKSRVTISVDTSKNQFSLKLSSVTAADTAVYYCARHDGAVAGLFDYWGQGTLVTVSSAGGGGSGGGGSGGGGSSYVLTQPPSVSVAPGQTARITCGGNNIGGKSVHWYQQPPGQAPVVVVYDDSDRPSGIPERFSGSNSGNTATLTISRVEAGDEAVYYCQVWDSSSDHVVFGGGTKLTVLTRQSIKGNHLVKVYDYQEDGSVLLTCDAEAKNITWFKDGKMIGFLTEDKKKWNLGSNAKDPRGMYQCKGSQNKSKPLQVYYRMCQNCIELNAATISGFLFAEIVSIFVLAVGVYFIAGQDGVRQSRASDKQTLLPNDQLYQPLKDREDDQYSHLQGNQLRRN

SEQ ID NO: 18758 - protein, 411 aa, Artificial Sequence
  Synthetic Polypeptide
MALPVTALLLPLALLLHAARPQLQLQESGPGLVKPSETLSLTCTVSGGSISSGSYFWGWIRQPPGKGLEWIGSIYYSGITYYNPSLKSRVTISVDTSKNQFSLKLSSVTAADTAVYYCARHDGAVAGLFDYWGQGTLVTVSSAGGGGSGGGGSGGGGSSYVLTQPPSVSVAPGQTARITCGGNNIGGKSVHWYQQPPGQAPVVVVYDDSDRPSGIPERFSGSNSGNTATLTISRVEAGDEAVYYCQVWDSSSDHVVFGGGTKLTVLTRQSFGLLDPKLCYLLDGILFIYGVILTALFLRVKFSRSADAPAYQQGQNQLYNELNLGRREEYDVLDKRRGRDPEMGGKPQRRKNPQEGLYNELQKDKMAEAYSEIGMKGERRRGKGHDGLYQGLSTATKDTYDALHMQALPPR

SEQ ID NO: 18759 - protein, 644 aa, Artificial Sequence
  Synthetic Polypeptide
MALPVTALLLPLALLLHAARPSYVLTQPPSVSVAPGQTARITCGGNNIGGKSVHWYQQPPGQAPVVVVYDDSDRPSGIPERFSGSNSGNTATLTISRVEAGDEAVYYCQVWDSSSDHVVFGGGTKLTVLGGGGSGGGGSGGGGSQLQLQESGPGLVKPSETLSLTCTVSGGSISSGSYFWGWIRQPPGKGLEWIGSIYYSGITYYNPSLKSRVTISVDTSKNQFSLKLSSVTAADTAVYYCARHDGAVAGLFDYWGQGTLVTVSSATRGSGIQNPDPAVYQLRDSKSSDKSVCLFTDFDSQTNVSQSKDSDVYITDKTVLDMRSMDFKSNSAVAWSNKSDFACANAFNNSIIPEDTFFPSPESSCDVKLVEKSFETDTNLNFQNLSVIGFRILLLKVAGFNLLMTLRLWSSRAKRSGSGVKQTLNFDLLKLAGDVESNPGPSRGHMTEYKPTVRLATRDDVPRAVRTLAAAFADYPATRHTVDPDRHIERVTELQELFLTRVGLDIGKVWVADDGAAVAVWTTPESVEAGAVFAEIGPRMAELSGSRLAAQQQMEGLLAPHRPKEPAWFLATVGVSPDHQGKGLGSAVVLPGVEAAERAGVPAFLETSAPRNLPFYERLGFTVTADVEVPEGPRTWCMTRKPGA

SEQ ID NO: 18760 - protein, 676 aa, Artificial Sequence
  Synthetic Polypeptide
MALPVTALLLPLALLLHAARPSYVLTQPPSVSVAPGQTARITCGGNNIGGKSVHWYQQPPGQAPVVVVYDDSDRPSGIPERFSGSNSGNTATLTISRVEAGDEAVYYCQVWDSSSDHVVFGGGTKLTVLGGGGSGGGGSGGGGSQLQLQESGPGLVKPSETLSLTCTVSGGSISSGSYFWGWIRQPPGKGLEWIGSIYYSGITYYNPSLKSRVTISVDTSKNQFSLKLSSVTAADTAVYYCARHDGAVAGLFDYWGQGTLVTVSSALEDLKNVFPPEVAVFEPSEAEISHTQKATLVCLATGFYPDHVELSWWVNGKEVHSGVSTDPQPLKEQPALNDSRYCLSSRLRVSATFWQNPRNHFRCQVQFYGLSENDEWTQDRAKPVTQIVSAEAWGRADCGFTSESYQQGVLSATILYEILLGKATLYAVLVSALVLMAMVKRKDSRGRAKRSGSGATNFSLLKQAGDVEENPGPTRGHMTEYKPTVRLATRDDVPRAVRTLAAAFADYPATRHTVDPDRHIERVTELQELFLTRVGLDIGKVWVADDGAAVAVWTTPESVEAGAVFAEIGPRMAELSGSRLAAQQQMEGLLAPHRPKEPAWFLATVGVSPDHQGKGLGSAVVLPGVEAAERAGVPAFLETSAPRNLPFYERLGFTVTADVEVPEGPRTWCMTRKPGA

SEQ ID NO: 18761 - protein, 726 aa, Artificial Sequence
  Synthetic Polypeptide
MALPVTALLLPLALLLHAARPSYVLTQPPSVSVAPGQTARITCGGNNIGGKSVHWYQQPPGQAPVVVVYDDSDRPSGIPERFSGSNSGNTATLTISRVEAGDEAVYYCQVWDSSSDHVVFGGGTKLTVLGGGGSGGGGSGGGGSQLQLQESGPGLVKPSETLSLTCTVSGGSISSGSYFWGWIRQPPGKGLEWIGSIYYSGITYYNPSLKSRVTISVDTSKNQFSLKLSSVTAADTAVYYCARHDGAVAGLFDYWGQGTLVTVSSATREQKLISEEDLGSGTPFPSLAPPIMLLVDGKQQMVVVCLVLDVAPPGLDSPIWFSAGNGSALDAFTYGPSPATDGTWTNLAHLSLPSEELASWEPLVCHTGPGAEGHSRSTQPMHLSGEASTARTCPQEPLRGTPGGALWLGVLRLLLFKLLLFDLLLTCSCLCDPAGPLPSPATTTRLRALGSHRLHPATETGGREATSSPRPQPRDRRWGDTPPGRKPGSPVRAKRSGSGVKQTLNFDLLKLAGDVESNPGPSRSRGHMTEYKPTVRLATRDDVPRAVRTLAAAFADYPATRHTVDPDRHIERVTELQELFLTRVGLDIGKVWVADDGAAVAVWTTPESVEAGAVFAEIGPRMAELSGSRLAAQQQMEGLLAPHRPKEPAWFLATVGVSPDHQGKGLGSAVVLPGVEAAERAGVPAFLETSAPRNLPFYERLGFTVTADVEVPEGPRTWCMTRKPGA

SEQ ID NO: 18762 - protein, 539 aa, Artificial Sequence
  Synthetic Polypeptide
MALPVTALLLPLALLLHAARPSYVLTQPPSVSVAPGQTARITCGGNNIGGKSVHWYQQPPGQAPVVVVYDDSDRPSGIPERFSGSNSGNTATLTISRVEAGDEAVYYCQVWDSSSDHVVFGGGTKLTVLLEDLKNVFPPEVAVFEPSEAEISHTQKATLVCLATGFYPDHVELSWWVNGKEVHSGVSTDPQPLKEQPALNDSRYCLSSRLRVSATFWQNPRNHFRCQVQFYGLSENDEWTQDRAKPVTQIVSAEAWGRADCGFTSESYQQGVLSATILYEILLGKATLYAVLVSALVLMAMVKRKDSRGRAKRSGSGATNFSLLKQAGDVEENPGPTRGHMTEYKPTVRLATRDDVPRAVRTLAAAFADYPATRHTVDPDRHIERVTELQELFLTRVGLDIGKVWVADDGAAVAVWTTPESVEAGAVFAEIGPRMAELSGSRLAAQQQMEGLLAPHRPKEPAWFLATVGVSPDHQGKGLGSAVVLPGVEAAERAGVPAFLETSAPRNLPFYERLGFTVTADVEVPEGPRTWCMTRKPGA

SEQ ID NO: 18763 - protein, 309 aa, Artificial Sequence
  Synthetic Polypeptide
MALPVTALLLPLALLLHAARPSYVLTQPPSVSVAPGQTARITCGGNNIGGKSVHWYQQPPGQAPVVVVYDDSDRPSGIPERFSGSNSGNTATLTISRVEAGDEAVYYCQVWDSSSDHVVFGGGTKLTVLLEDLKNVFPPEVAVFEPSEAEISHTQKATLVCLATGFYPDHVELSWWVNGKEVHSGVSTDPQPLKEQPALNDSRYCLSSRLRVSATFWQNPRNHFRCQVQFYGLSENDEWTQDRAKPVTQIVSAEAWGRADCGFTSESYQQGVLSATILYEILLGKATLYAVLVSALVLMAMVKRKDSRG

SEQ ID NO: 18764 - protein, 451 aa, Artificial Sequence; identical to SEQ ID NO: 18626
  Synthetic Polypeptide

SEQ ID NO: 18765 - protein, 285 aa, Artificial Sequence; identical to SEQ ID NO: 18627
  Synthetic Polypeptide

SEQ ID NO: 18766 - protein, 557 aa, Artificial Sequence
  Synthetic Polypeptide
MALPVTALLLPLALLLHAARPSYVLTQPPSVSVAPGQTARITCGGNNIGGKSVHWYQQPPGQAPVVVVYDDSDRPSGIPERFSGSNSGNTATLTISRVEAGDEAVYYCQVWDSSSDHVVFGGGTKLTVLLEGKPIPNPLLGLDSTGSGEDLKNVFPPEVAVFEPSEAEISHTQKATLVCLATGFYPDHVELSWWVNGKEVHSGVCTDPQPLKEQPALNDSRYCLSSRLRVSATFWQNPRNHFRCQVQFYGLSENDEWTQDRAKPVTQIVSAEAWGRADCGFTSESYQQGVLSATILYEILLGKATLYAVLVSALVLMAMVKRKDSRGRAKRSGSGATNFSLLKQAGDVEENPGPTRGHMTEYKPTVRLATRDDVPRAVRTLAAAFADYPATRHTVDPDRHIERVTELQELFLTRVGLDIGKVWVADDGAAVAVWTTPESVEAGAVFAEIGPRMAELSGSRLAAQQQMEGLLAPHRPKEPAWFLATVGVSPDHQGKGLGSAVVLPGVEAAERAGVPAFLETSAPRNLPFYERLGFTVTADVEVPEGPRTWCMTRKPGA

SEQ ID NO: 18767 - protein, 327 aa, Artificial Sequence
  Synthetic Polypeptide
MALPVTALLLPLALLLHAARPSYVLTQPPSVSVAPGQTARITCGGNNIGGKSVHWYQQPPGQAPVVVVYDDSDRPSGIPERFSGSNSGNTATLTISRVEAGDEAVYYCQVWDSSSDHVVFGGGTKLTVLLEGKPIPNPLLGLDSTGSGEDLKNVFPPEVAVFEPSEAEISHTQKATLVCLATGFYPDHVELSWWVNGKEVHSGVCTDPQPLKEQPALNDSRYCLSSRLRVSATFWQNPRNHFRCQVQFYGLSENDEWTQDRAKPVTQIVSAEAWGRADCGFTSESYQQGVLSATILYEILLGKATLYAVLVSALVLMAMVKRKDSRG

SEQ ID NO: 18768 - protein, 463 aa, Artificial Sequence; identical to SEQ ID NO: 18630
  Synthetic Polypeptide

SEQ ID NO: 18769 - protein, 297 aa, Artificial Sequence; identical to SEQ ID NO: 18631
  Synthetic Polypeptide

SEQ ID NO: 18770 - protein, 644 aa, Artificial Sequence
  Synthetic Polypeptide
MALPVTALLLPLALLLHAARPSYVLTQPPSVSVAPGQTARITCGGNNIGGKSVHWYQQPPGQAPVVVVYDDSDRPSGIPERFSGSNSGNTATLTISRVEAGDEAVYYCQVWDSSSDHVVFGGGTKLTVLGGGGSGGGGSGGGGSQLQLQESGPGLVKPSETLSLTCTVSGGSISSGSYFWGWIRQPPGKGLEWIGSIYYSGITYYNPSLKSRVTISVDTSKNQFSLKLSSVTAADTAVYYCARHDGAVAGLFDYWGQGTLVTVSSATRGSGIQNPDPAVYQLRDSKSSDKSVCLFTDFDSQTNVSQSKDSDVYITDKTVLDMRSMDFKSNSAVAWSNKSDFACANAFNNSIIPEDTFFPSSDVPCDVKLVEKSFETDTNLNFQNLSVIGFRILLLKVAGFNLLMTLRLWSSRAKRSGSGVKQTLNFDLLKLAGDVESNPGPSRGHMTEYKPTVRLATRDDVPRAVRTLAAAFADYPATRHTVDPDRHIERVTELQELFLTRVGLDIGKVWVADDGAAVAVWTTPESVEAGAVFAEIGPRMAELSGSRLAAQQQMEGLLAPHRPKEPAWFLATVGVSPDHQGKGLGSAVVLPGVEAAERAGVPAFLETSAPRNLPFYERLGFTVTADVEVPEGPRTWCMTRKPGA

SEQ ID NO: 18771 - protein, 676 aa, Artificial Sequence
  Synthetic Polypeptide
MALPVTALLLPLALLLHAARPSYVLTQPPSVSVAPGQTARITCGGNNIGGKSVHWYQQPPGQAPVVVVYDDSDRPSGIPERFSGSNSGNTATLTISRVEAGDEAVYYCQVWDSSSDHVVFGGGTKLTVLGGGGSGGGGSGGGGSQLQLQESGPGLVKPSETLSLTCTVSGGSISSGSYFWGWIRQPPGKGLEWIGSIYYSGITYYNPSLKSRVTISVDTSKNQFSLKLSSVTAADTAVYYCARHDGAVAGLFDYWGQGTLVTVSSALEDLKNVFPPEVAVFEPSKAEIAHTQKATLVCLATGFYPDHVELSWWVNGKEVHSGVSTDPQPLKEQPALNDSRYCLSSRLRVSATFWQNPRNHFRCQVQFYGLSENDEWTQDRAKPVTQIVSAEAWGRADCGITSASYHQGVLSATILYEILLGKATLYAVLVSALVLMAMVKRKDSRGRAKRSGSGATNFSLLKQAGDVEENPGPTRGHMTEYKPTVRLATRDDVPRAVRTLAAAFADYPATRHTVDPDRHIERVTELQELFLTRVGLDIGKVWVADDGAAVAVWTTPESVEAGAVFAEIGPRMAELSGSRLAAQQQMEGLLAPHRPKEPAWFLATVGVSPDHQGKGLGSAVVLPGVEAAERAGVPAFLETSAPRNLPFYERLGFTVTADVEVPEGPRTWCMTRKPGA

SEQ ID NO: 18772 - protein, 699 aa, Artificial Sequence
  Synthetic Polypeptide
MALPVTALLLPLALLLHAARPSYVLTQPPSVSVAPGQTARITCGGNNIGGKSVHWYQQPPGQAPVVVVYDDSDRPSGIPERFSGSNSGNTATLTISRVEAGDEAVYYCQVWDSSSDHVVFGGGTKLTVLGGGGSGGGGSGGGGSQLQLQESGPGLVKPSETLSLTCTVSGGSISSGSYFWGWIRQPPGKGLEWIGSIYYSGITYYNPSLKSRVTISVDTSKNQFSLKLSSVTAADTAVYYCARHDGAVAGLFDYWGQGTLVTVSSATRGSGGGGSGGGGSGDGNEEMGGITQTPYKVSISGTTVILTCPQYPGSEILWQHNDKNIGGDEDDKNIGSDEDHLSLKEFSELEQSGYYVCYPRGSKPEDANFYLYLRARVCENCMEMDVMSVATIVIVDICITGGLLLLVYYWSKNRKAKAKPVTRGAGAGGRQRGQNKERPPPVPNPDYEPIRKGQRDLYSGLNQRRIRAKRSGSGVKQTLNFDLLKLAGDVESNPGPSRGHMTEYKPTVRLATRDDVPRAVRTLAAAFADYPATRHTVDPDRHIERVTELQELFLTRVGLDIGKVWVADDGAAVAVWTTPESVEAGAVFAEIGPRMAELSGSRLAAQQQMEGLLAPHRPKEPAWFLATVGVSPDHQGKGLGSAVVLPGVEAAERAGVPAFLETSAPRNLPFYERLGFTVTADVEVPEGPRTWCMTRKPGA

SEQ ID NO: 18773 - protein, 664 aa, Artificial Sequence
  Synthetic Polypeptide
MALPVTALLLPLALLLHAARPSYVLTQPPSVSVAPGQTARITCGGNNIGGKSVHWYQQPPGQAPVVVVYDDSDRPSGIPERFSGSNSGNTATLTISRVEAGDEAVYYCQVWDSSSDHVVFGGGTKLTVLGGGGSGGGGSGGGGSQLQLQESGPGLVKPSETLSLTCTVSGGSISSGSYFWGWIRQPPGKGLEWIGSIYYSGITYYNPSLKSRVTISVDTSKNQFSLKLSSVTAADTAVYYCARHDGAVAGLFDYWGQGTLVTVSSATRGSGGGGSGGGGSGFKIPIEELEDRVFVNCNTSITWVEGTVGTLLSDITRLDLGKRILDPRGIYRCNGTDIYKDKESTVQVHYRMCQSCVELDPATVAGIIVTDVIATLLLALGVFCFAGHETGRLSGAADTQALLRNDQVYQPLRDRDDAQYSHLGGNWARNKRAKRSGSGVKQTLNFDLLKLAGDVESNPGPSRGHMTEYKPTVRLATRDDVPRAVRTLAAAFADYPATRHTVDPDRHIERVTELQELFLTRVGLDIGKVWVADDGAAVAVWTTPESVEAGAVFAEIGPRMAELSGSRLAAQQQMEGLLAPHRPKEPAWFLATVGVSPDHQGKGLGSAVVLPGVEAAERAGVPAFLETSAPRNLPFYERLGFTVTADVEVPEGPRTWCMTRKPGA

SEQ ID NO: 18774 - protein, 674 aa, Artificial Sequence
  Synthetic Polypeptide
MALPVTALLLPLALLLHAARPSYVLTQPPSVSVAPGQTARITCGGNNIGGKSVHWYQQPPGQAPVVVVYDDSDRPSGIPERFSGSNSGNTATLTISRVEAGDEAVYYCQVWDSSSDHVVFGGGTKLTVLGGGGSGGGGSGGGGSQLQLQESGPGLVKPSETLSLTCTVSGGSISSGSYFWGWIRQPPGKGLEWIGSIYYSGITYYNPSLKSRVTISVDTSKNQFSLKLSSVTAADTAVYYCARHDGAVAGLFDYWGQGTLVTVSSATRGSGGGGSGGGGSGQSIKGNHLVKVYDYQEDGSVLLTCDAEAKNITWFKDGKMIGFLTEDKKKWNLGSNAKDPRGMYQCKGSQNKSKPLQVYYRMCQNCIELNAATISGFLFAEIVSIFVLAVGVYFIAGQDGVRQSRASDKQTLLPNDQLYQPLKDREDDQYSHLQGNQLRRNRAKRSGSGVKQTLNFDLLKLAGDVESNPGPSRGHMTEYKPTVRLATRDDVPRAVRTLAAAFADYPATRHTVDPDRHIERVTELQELFLTRVGLDIGKVWVADDGAAVAVWTTPESVEAGAVFAEIGPRMAELSGSRLAAQQQMEGLLAPHRPKEPAWFLATVGVSPDHQGKGLGSAVVLPGVEAAERAGVPAFLETSAPRNLPFYERLGFTVTADVEVPEGPRTWCMTRKPGA

SEQ ID NO: 18775 - protein, 657 aa, Artificial Sequence
  Synthetic Polypeptide
MALPVTALLLPLALLLHAARPSYVLTQPPSVSVAPGQTARITCGGNNIGGKSVHWYQQPPGQAPVVVVYDDSDRPSGIPERFSGSNSGNTATLTISRVEAGDEAVYYCQVWDSSSDHVVFGGGTKLTVLGGGGSGGGGSGGGGSQLQLQESGPGLVKPSETLSLTCTVSGGSISSGSYFWGWIRQPPGKGLEWIGSIYYSGITYYNPSLKSRVTISVDTSKNQFSLKLSSVTAADTAVYYCARHDGAVAGLFDYWGQGTLVTVSSATRGSGGGGSGGGGSGQSFGLLDPKLCYLLDGILFIYGVILTALFLRVKFSRSADAPAYQQGQNQLYNELNLGRREEYDVLDKRRGRDPEMGGKPQRRKNPQEGLYNELQKDKMAEAYSEIGMKGERRRGKGHDGLYQGLSTATKDTYDALHMQALPPRRAKRSGSGVKQTLNFDLLKLAGDVESNPGPSRGHMTEYKPTVRLATRDDVPRAVRTLAAAFADYPATRHTVDPDRHIERVTELQELFLTRVGLDIGKVWVADDGAAVAVWTTPESVEAGAVFAEIGPRMAELSGSRLAAQQQMEGLLAPHRPKEPAWFLATVGVSPDHQGKGLGSAVVLPGVEAAERAGVPAFLETSAPRNLPFYERLGFTVTADVEVPEGPRTWCMTRKPGA

SEQ ID NO: 18776 - protein, 758 aa, Artificial Sequence
  Synthetic Polypeptide
MALPVTALLLPLALLLHAARPEVQLVESGGGLVQPGGSLRLSCAASGFSFSDFWMSWVRQAPGKGLEWVATISQAGSEKDYVDSVKGRFTISRDNAKKSLYLQMNSLRAEDTAVYYCASGVYSFDYRGQGTLVTVSSGTGGGGSGGGGSGGGGSEFSYVLTQPPSVSVAPGQTARITCGGNNIGGKSVHWYQQPPGQAPVVVVYDDSDRPSGIPERFSGSNSGNTATLTISRVEAGDEAVYYCQVWDSSSDHVVFGGGTKLTVLLEDLKNVFPPEVAVFEPSEAEISHTQKATLVCLATGFYPDHVELSWWVNGKEVHSGVCTDPQPLKEQPALNDSRYCLSSRLRVSATFWQNPRNHFRCQVQFYGLSENDEWTQDRAKPVTQIVSAEAWGRADCGFTSESYQQGVLSATILYEILLGKATLYAVLVSALVLMAMVKRKDSRGRAKRSGSGATNFSLLKQAGDVEENPGPTSMDWIWRILFLVGAATGAHSFEQLQLQESGPGLVKPSETLSLTCTVSGGSISSGSYFWGWIRQPPGKGLEWIGSIYYSGITYYNPSLKSRVTISVDTSKNQFSLKLSSVTAADTAVYYCARHDGAVAGLFDYWGQGTLVTVSSATRIQNPDPAVYQLRDSKSSDKSVCLFTDFDSQTNVSQSKDSDVYITDKCVLDMRSMDFKSNSAVAWSNKSDFACANAFNNSIIPEDTFFPSPESSCDVKLVEKSFETDTNLNFQNLSVIGFRILLLKVAGFNLLMTLRLWSS

SEQ ID NO: 18777 - protein, 762 aa, Artificial Sequence
  Synthetic Polypeptide
MALPVTALLLPLALLLHAARPEVQLVESGGGLVQPGGSLRLSCAASGFSFSDFWMSWVRQAPGKGLEWVATISQAGSEKDYVDSVKGRFTISRDNAKKSLYLQMNSLRAEDTAVYYCASGVYSFDYRGQGTLVTVSSGTGGGGSGGGGSGGGGSEFSYVLTQPPSVSVAPGQTARITCGGNNIGGKSVHWYQQPPGQAPVVVVYDDSDRPSGIPERFSGSNSGNTATLTISRVEAGDEAVYYCQVWDSSSDHVVFGGGTKLTVLLEIQNPDPAVYQLRDSKSSDKSVCLFTDFDSQTNVSQSKDSDVYITDKCVLDMRSMDFKSNSAVAWSNKSDFACANAFNNSIIPEDTFFPSPESSCDVKLVEKSFETDTNLNFQNLSVIGFRILLLKVAGFNLLMTLRLWSSRAKRSGSGVKQTLNFDLLKLAGDVESNPGPTSMDWIWRILFLVGAATGAHSFEQLQLQESGPGLVKPSETLSLTCTVSGGSISSGSYFWGWIRQPPGKGLEWIGSIYYSGITYYNPSLKSRVTISVDTSKNQFSLKLSSVTAADTAVYYCARHDGAVAGLFDYWGQGTLVTVSSATREDLKNVFPPEVAVFEPSEAEISHTQKATLVCLATGFYPDHVELSWWVNGKEVHSGVCTDPQPLKEQPALNDSRYCLSSRLRVSATFWQNPRNHFRCQVQFYGLSENDEWTQDRAKPVTQIVSAEAWGRADCGFTSESYQQGVLSATILYEILLGKATLYAVLVSALVLMAMVKRKDSRG

SEQ ID NO: 18778 - protein, 954 aa, Artificial Sequence
  Synthetic Polypeptide
MALPVTALLLPLALLLHAARPEVQLVESGGGLVQPGGSLRLSCAASGFSFSDFWMSWVRQAPGKGLEWVATISQAGSEKDYVDSVKGRFTISRDNAKKSLYLQMNSLRAEDTAVYYCASGVYSFDYRGQGTLVTVSSGTGGGGSGGGGSGGGGSEFSYVLTQPPSVSVAPGQTARITCGGNNIGGKSVHWYQQPPGQAPVVVVYDDSDRPSGIPERFSGSNSGNTATLTISRVEAGDEAVYYCQVWDSSSDHVVFGGGTKLTVLLEDLKNVFPPEVAVFEPSEAEISHTQKATLVCLATGFYPDHVELSWWVNGKEVHSGVSTDPQPLKEQPALNDSRYCLSSRLRVSATFWQNPRNHFRCQVQFYGLSENDEWTQDRAKPVTQIVSAEAWGRADCGSQSFGLLDPKLCYLLDGILFIYGVILTALFLRVKFSRSADAPAYQQGQNQLYNELNLGRREEYDVLDKRRGRDPEMGGKPQRRKNPQEGLYNELQKDKMAEAYSEIGMKGERRRGKGHDGLYQGLSTATKDTYDALHMQALPPRRAKRSGSGATNFSLLKQAGDVEENPGPTSMDWIWRILFLVGAATGAHSFEQLQLQESGPGLVKPSETLSLTCTVSGGSISSGSYFWGWIRQPPGKGLEWIGSIYYSGITYYNPSLKSRVTISVDTSKNQFSLKLSSVTAADTAVYYCARHDGAVAGLFDYWGQGTLVTVSSATRIQNPDPAVYQLRDSKSSDKSVCLFTDFDSQTNVSQSKDSDVYITDKTVLDMRSMDFKSNSAVAWSNKSDFACANAFNNSIIPEDTFFPSPESSCGTQSFGLLDPKLCYLLDGILFIYGVILTALFLRVKFSRSADAPAYQQGQNQLYNELNLGRREEYDVLDKRRGRDPEMGGKPQRRKNPQEGLYNELQKDKMAEAYSEIGMKGERRRGKGHDGLYQGLSTATKDTYDALHMQALPPR

SEQ ID NO: 18779 - protein, 784 aa, Artificial Sequence
  Synthetic Polypeptide
MALPVTALLLPLALLLHAARPEVQLVESGGGLVQPGGSLRLSCAASGFSFSDFWMSWVRQAPGKGLEWVATISQAGSEKDYVDSVKGRFTISRDNAKKSLYLQMNSLRAEDTAVYYCASGVYSFDYRGQGTLVTVSSGTGGGGSGGGGSGGGGSEFSYVLTQPPSVSVAPGQTARITCGGNNIGGKSVHWYQQPPGQAPVVVVYDDSDRPSGIPERFSGSNSGNTATLTISRVEAGDEAVYYCQVWDSSSDHVVFGGGTKLTVLLEGQPKANPTVTLFPPSSEELQANKATLVCLISDFYPGAVTVAWKADGSPVKAGVETTKPSKQSNNKYAASSYLSLTPEQWKSHRSYSCQVTHEGSTVEKTVAPTECSPIKTDVITMDPKDNCSKDANDTLLLQLTNTSAYYMYLLLLLKSVVYFAIITCCLLRRTAFCCNGEKSRAKRSGSGATNFSLLKQAGDVEENPGPTSMDWIWRILFLVGAATGAHSFEQLQLQESGPGLVKPSETLSLTCTVSGGSISSGSYFWGWIRQPPGKGLEWIGSIYYSGITYYNPSLKSRVTISVDTSKNQFSLKLSSVTAADTAVYYCARHDGAVAGLFDYWGQGTLVTVSSATRASTKGPSVFPLAPSSKSTSGGTAALGCLVKDYFPEPVTVSWNSGALTSGVHTFPAVLQSSGLYSLSSVVTVPSSSLGTQTYICNVNHKPSNTKVDKRVEPKSCEVKTDSTDHVKPKETENTKQPSKSCHKPKAIVHTEKVNMMSLTVLGLRMLFAKTVAVNFLLTAKLFFL

SEQ ID NO: 18780 - protein, 765 aa, Artificial Sequence
  Synthetic Polypeptide
MALPVTALLLPLALLLHAARPEVQLVESGGGLVQPGGSLRLSCAASGFSFSDFWMSWVRQAPGKGLEWVATISQAGSEKDYVDSVKGRFTISRDNAKKSLYLQMNSLRAEDTAVYYCASGVYSFDYRGQGTLVTVSSGTGGGGSGGGGSGGGGSEFSYVLTQPPSVSVAPGQTARITCGGNNIGGKSVHWYQQPPGQAPVVVVYDDSDRPSGIPERFSGSNSGNTATLTISRVEAGDEAVYYCQVWDSSSDHVVFGGGTKLTVLLEGQPKANPTVTLFPPSSEELQANKATLVCLISDFYPGAVTVAWKADGSPVKAGVETTKPSKQSNNKYAASSYLSLTPEQWKSHRSYSCQVTHEGSTVEKTVAPTECSGRADCGFTSESYQQGVLSATILYEILLGKATLYAVLVSALVLMAMVKRKDSRGRAKRSGSGVKQTLNFDLLKLAGDVESNPGPTSMDWIWRILFLVGAATGAHSFEQLQLQESGPGLVKPSETLSLTCTVSGGSISSGSYFWGWIRQPPGKGLEWIGSIYYSGITYYNPSLKSRVTISVDTSKNQFSLKLSSVTAADTAVYYCARHDGAVAGLFDYWGQGTLVTVSSATRASTKGPSVFPLAPSSKSTSGGTAALGCLVKDYFPEPVTVSWNSGALTSGVHTFPAVLQSSGLYSLSSVVTVPSSSLGTQTYICNVNHKPSNTKVDKRVEPKSCIPEDTFFPSPESSCDVKLVEKSFETDTNLNFQNLSVIGFRILLLKVAGFNLLMTLRLWSS

SEQ ID NO: 18781 - protein, 899 aa, Artificial Sequence
  Synthetic Polypeptide
MALPVTALLLPLALLLHAARPEVQLVESGGGLVQPGGSLRLSCAASGFSFSDFWMSWVRQAPGKGLEWVATISQAGSEKDYVDSVKGRFTISRDNAKKSLYLQMNSLRAEDTAVYYCASGVYSFDYRGQGTLVTVSSGTGGGGSGGGGSGGGGSEFSYVLTQPPSVSVAPGQTARITCGGNNIGGKSVHWYQQPPGQAPVVVVYDDSDRPSGIPERFSGSNSGNTATLTISRVEAGDEAVYYCQVWDSSSDHVVFGGGTKLTVLLEIQNPDPAVYQLRDSKSSDKSVCLFTDFDSQTNVSQSKDSDVYITDKCVLDMRSMDFKSNSAVAWSNKSDFACANAFNNSIIPEDTFFPSPESSCDVKLVEKSFETDTNLNFQNLSVIGFRILLLKVAGFNLLMTLRLWSSRAKRSGSGVKQTLNFDLLKLAGDVESNPGPTSMDWIWRILFLVGAATGAHSGPQLQLQESGPGLVKPSETLSLTCTVSGDSISSGDYYWGWIRQPPGKGLEWIGHIYYSGVTYYNPSLKSRVTISVDTSRNQFSLKLSSVTAADTAVYYCTREDSSNWRSRGQGTLVTVSSGSGGGGSGGGGSGGGGSFEQLQLQESGPGLVKPSETLSLTCTVSGGSISSGSYFWGWIRQPPGKGLEWIGSIYYSGITYYNPSLKSRVTISVDTSKNQFSLKLSSVTAADTAVYYCARHDGAVAGLFDYWGQGTLVTVSSATREDLKNVFPPEVAVFEPSEAEISHTQKATLVCLATGFYPDHVELSWWVNGKEVHSGVCTDPQPLKEQPALNDSRYCLSSRLRVSATFWQNPRNHFRCQVQFYGLSENDEWTQDRAKPVTQIVSAEAWGRADCGFTSESYQQGVLSATILYEILLGKATLYAVLVSALVLMAMVKRKDSRG

SEQ ID NO: 18782 - protein, 1091 aa, Artificial Sequence
  Synthetic Polypeptide
MALPVTALLLPLALLLHAARPEVQLVESGGGLVQPGGSLRLSCAASGFSFSDFWMSWVRQAPGKGLEWVATISQAGSEKDYVDSVKGRFTISRDNAKKSLYLQMNSLRAEDTAVYYCASGVYSFDYRGQGTLVTVSSGTGGGGSGGGGSGGGGSEFSYVLTQPPSVSVAPGQTARITCGGNNIGGKSVHWYQQPPGQAPVVVVYDDSDRPSGIPERFSGSNSGNTATLTISRVEAGDEAVYYCQVWDSSSDHVVFGGGTKLTVLLEDLKNVFPPEVAVFEPSEAEISHTQKATLVCLATGFYPDHVELSWWVNGKEVHSGVSTDPQPLKEQPALNDSRYCLSSRLRVSATFWQNPRNHFRCQVQFYGLSENDEWTQDRAKPVTQIVSAEAWGRADCGSQSFGLLDPKLCYLLDGILFIYGVILTALFLRVKFSRSADAPAYQQGQNQLYNELNLGRREEYDVLDKRRGRDPEMGGKPQRRKNPQEGLYNELQKDKMAEAYSEIGMKGERRRGKGHDGLYQGLSTATKDTYDALHMQALPPRRAKRSGSGATNFSLLKQAGDVEENPGPTSMDWIWRILFLVGAATGAHSGPQLQLQESGPGLVKPSETLSLTCTVSGDSISSGDYYWGWIRQPPGKGLEWIGHIYYSGVTYYNPSLKSRVTISVDTSRNQFSLKLSSVTAADTAVYYCTREDSSNWRSRGQGTLVTVSSGSGGGGSGGGGSGGGGSFEQLQLQESGPGLVKPSETLSLTCTVSGGSISSGSYFWGWIRQPPGKGLEWIGSIYYSGITYYNPSLKSRVTISVDTSKNQFSLKLSSVTAADTAVYYCARHDGAVAGLFDYWGQGTLVTVSSATRIQNPDPAVYQLRDSKSSDKSVCLFTDFDSQTNVSQSKDSDVYITDKTVLDMRSMDFKSNSAVAWSNKSDFACANAFNNSIIPEDTFFPSPESSCGTQSFGLLDPKLCYLLDGILFIYGVILTALFLRVKFSRSADAPAYQQGQNQLYNELNLGRREEYDVLDKRRGRDPEMGGKPQRRKNPQEGLYNELQKDKMAEAYSEIGMKGERRRGKGHDGLYQGLSTATKDTYDALHMQALPPR

SEQ ID NO: 18783 - protein, 921 aa, Artificial Sequence
  Synthetic Polypeptide
MALPVTALLLPLALLLHAARPEVQLVESGGGLVQPGGSLRLSCAASGFSFSDFWMSWVRQAPGKGLEWVATISQAGSEKDYVDSVKGRFTISRDNAKKSLYLQMNSLRAEDTAVYYCASGVYSFDYRGQGTLVTVSSGTGGGGSGGGGSGGGGSEFSYVLTQPPSVSVAPGQTARITCGGNNIGGKSVHWYQQPPGQAPVVVVYDDSDRPSGIPERFSGSNSGNTATLTISRVEAGDEAVYYCQVWDSSSDHVVFGGGTKLTVLLEGQPKANPTVTLFPPSSEELQANKATLVCLISDFYPGAVTVAWKADGSPVKAGVETTKPSKQSNNKYAASSYLSLTPEQWKSHRSYSCQVTHEGSTVEKTVAPTECSPIKTDVITMDPKDNCSKDANDTLLLQLTNTSAYYMYLLLLLKSVVYFAIITCCLLRRTAFCCNGEKSRAKRSGSGATNFSLLKQAGDVEENPGPTSMDWIWRILFLVGAATGAHSGPQLQLQESGPGLVKPSETLSLTCTVSGDSISSGDYYWGWIRQPPGKGLEWIGHIYYSGVTYYNPSLKSRVTISVDTSRNQFSLKLSSVTAADTAVYYCTREDSSNWRSRGQGTLVTVSSGSGGGGSGGGGSGGGGSFEQLQLQESGPGLVKPSETLSLTCTVSGGSISSGSYFWGWIRQPPGKGLEWIGSIYYSGITYYNPSLKSRVTISVDTSKNQFSLKLSSVTAADTAVYYCARHDGAVAGLFDYWGQGTLVTVSSATRASTKGPSVFPLAPSSKSTSGGTAALGCLVKDYFPEPVTVSWNSGALTSGVHTFPAVLQSSGLYSLSSVVTVPSSSLGTQTYICNVNHKPSNTKVDKRVEPKSCEVKTDSTDHVKPKETENTKQPSKSCHKPKAIVHTEKVNMMSLTVLGLRMLFAKTVAVNFLLTAKLFFL

SEQ ID NO: 18784 - protein, 902 aa, Artificial Sequence
  Synthetic Polypeptide
MALPVTALLLPLALLLHAARPEVQLVESGGGLVQPGGSLRLSCAASGFSFSDFWMSWVRQAPGKGLEWVATISQAGSEKDYVDSVKGRFTISRDNAKKSLYLQMNSLRAEDTAVYYCASGVYSFDYRGQGTLVTVSSGTGGGGSGGGGSGGGGSEFSYVLTQPPSVSVAPGQTARITCGGNNIGGKSVHWYQQPPGQAPVVVVYDDSDRPSGIPERFSGSNSGNTATLTISRVEAGDEAVYYCQVWDSSSDHVVFGGGTKLTVLLEGQPKANPTVTLFPPSSEELQANKATLVCLISDFYPGAVTVAWKADGSPVKAGVETTKPSKQSNNKYAASSYLSLTPEQWKSHRSYSCQVTHEGSTVEKTVAPTECSGRADCGFTSESYQQGVLSATILYEILLGKATLYAVLVSALVLMAMVKRKDSRGRAKRSGSGVKQTLNFDLLKLAGDVESNPGPTSMDWIWRILFLVGAATGAHSGPQLQLQESGPGLVKPSETLSLTCTVSGDSISSGDYYWGWIRQPPGKGLEWIGHIYYSGVTYYNPSLKSRVTISVDTSRNQFSLKLSSVTAADTAVYYCTREDSSNWRSRGQGTLVTVSSGSGGGGSGGGGSGGGGSFEQLQLQESGPGLVKPSETLSLTCTVSGGSISSGSYFWGWIRQPPGKGLEWIGSIYYSGITYYNPSLKSRVTISVDTSKNQFSLKLSSVTAADTAVYYCARHDGAVAGLFDYWGQGTLVTVSSATRASTKGPSVFPLAPSSKSTSGGTAALGCLVKDYFPEPVTVSWNSGALTSGVHTFPAVLQSSGLYSLSSVVTVPSSSLGTQTYICNVNHKPSNTKVDKRVEPKSCIPEDTFFPSPESSCDVKLVEKSFETDTNLNFQNLSVIGFRILLLKVAGFNLLMTLRLWSS

SEQ ID NO: 18785 - protein, 759 aa, Artificial Sequence
  Synthetic Polypeptide
MALPVTALLLPLALLLHAARPEVQVLESGGGLVQPGGSLRLSCAASGFTFSNFAMSWVRQAPGKGLEWVSTISGSAGTTDYADSVKGRFTISRDNSKKTLYLQMNSLRVEDTAVYYCADGRGPFFDYRGQGTLVTVSSGTGGGGSGGGGSGGGGSEFSYVLTQPPSVSVAPGQTARITCGGNNIGGKSVHWYQQPPGQAPVVVVYDDSDRPSGIPERFSGSNSGNTATLTISRVEAGDEAVYYCQVWDSSSDHVVFGGGTKLTVLLEDLKNVFPPEVAVFEPSEAEISHTQKATLVCLATGFYPDHVELSWWVNGKEVHSGVCTDPQPLKEQPALNDSRYCLSSRLRVSATFWQNPRNHFRCQVQFYGLSENDEWTQDRAKPVTQIVSAEAWGRADCGFTSESYQQGVLSATILYEILLGKATLYAVLVSALVLMAMVKRKDSRGRAKRSGSGATNFSLLKQAGDVEENPGPTSMDWIWRILFLVGAATGAHSFEQLQLQESGPGLVKPSETLSLTCTVSGGSISSGSYFWGWIRQPPGKGLEWIGSIYYSGITYYNPSLKSRVTISVDTSKNQFSLKLSSVTAADTAVYYCARHDGAVAGLFDYWGQGTLVTVSSATRIQNPDPAVYQLRDSKSSDKSVCLFTDFDSQTNVSQSKDSDVYITDKCVLDMRSMDFKSNSAVAWSNKSDFACANAFNNSIIPEDTFFPSPESSCDVKLVEKSFETDTNLNFQNLSVIGFRILLLKVAGFNLLMTLRLWSS

SEQ ID NO: 18786 - protein, 760 aa, Artificial Sequence
  Synthetic Polypeptide
MALPVTALLLPLALLLHAARPSYVLTQPPSVSVAPGQTARITCGGNNIGGKSVHWYQQPPGQAPVVVVYDDSDRPSGIPERFSGSNSGNTATLTISRVEAGDEAVYYCQVWDSSSDHVVFGGGTKLTVLLEDLKNVFPPEVAVFEPSEAEISHTQKATLVCLATGFYPDHVELSWWVNGKEVHSGVCTDPQPLKEQPALNDSRYCLSSRLRVSATFWQNPRNHFRCQVQFYGLSENDEWTQDRAKPVTQIVSAEAWGRADCGFTSESYQQGVLSATILYEILLGKATLYAVLVSALVLMAMVKRKDSRGRAKRSGSGATNFSLLKQAGDVEENPGPTSMDWIWRILFLVGAATGAHSGPEVQLVESGGGLVQAGGSLRLSCAASGRTFSMGWFRQAPGKEREFVAAITYSGGSPYYADSVKGRFTISRDNAKNTVYLQMNSLKPEDTAVYYCAANPTYGSDWNAENWGQGTQVTVSSGSGGGGSGGGGSGGGGSFEQLQLQESGPGLVKPSETLSLTCTVSGGSISSGSYFWGWIRQPPGKGLEWIGSIYYSGITYYNPSLKSRVTISVDTSKNQFSLKLSSVTAADTAVYYCARHDGAVAGLFDYWGQGTLVTVSSATRIQNPDPAVYQLRDSKSSDKSVCLFTDFDSQTNVSQSKDSDVYITDKCVLDMRSMDFKSNSAVAWSNKSDFACANAFNNSIIPEDTFFPSPESSCDVKLVEKSFETDTNLNFQNLSVIGFRILLLKVAGFNLLMTLRLWSS

SEQ ID NO: 18787 - protein, 887 aa, Artificial Sequence
  Synthetic Polypeptide
MALPVTALLLPLALLLHAARPSYVLTQPPSVSVAPGQTARITCGGNNIGGKSVHWYQQPPGQAPVVVVYDDSDRPSGIPERFSGSNSGNTATLTISRVEAGDEAVYYCQVWDSSSDHVVFGGGTKLTVLLEDLKNVFPPEVAVFEPSEAEISHTQKATLVCLATGFYPDHVELSWWVNGKEVHSGVCTDPQPLKEQPALNDSRYCLSSRLRVSATFWQNPRNHFRCQVQFYGLSENDEWTQDRAKPVTQIVSAEAWGRADCGFTSESYQQGVLSATILYEILLGKATLYAVLVSALVLMAMVKRKDSRGRAKRSGSGATNFSLLKQAGDVEENPGPTSMDWIWRILFLVGAATGAHSQLQLQESGPGLVKPSETLSLTCTVSGGSISSGDYYWGWIRQPPGKGLEWIGSISYSGSTYYNPSLKSRVTISVDTSRNQFSLKLSSVTAADTAVYYCTREDSSNWRSRGQGTLVTVSSSGGGGSGGGGSEVQLVESGGGLVQAGGSLRLSCAASGRTFSMGWFRQAPGKEREFVAAITYSGGSPYYADSVKGRFTISRDNAKNTVYLQMNSLKPEDTAVYYCAANPTYGSDWNAENWGQGTQVTVSSGSGGGGSGGGGSGGGGSFEQLQLQESGPGLVKPSETLSLTCTVSGGSISSGSYFWGWIRQPPGKGLEWIGSIYYSGITYYNPSLKSRVTISVDTSKNQFSLKLSSVTAADTAVYYCARHDGAVAGLFDYWGQGTLVTVSSATRIQNPDPAVYQLRDSKSSDKSVCLFTDFDSQTNVSQSKDSDVYITDKCVLDMRSMDFKSNSAVAWSNKSDFACANAFNNSIIPEDTFFPSPESSCDVKLVEKSFETDTNLNFQNLSVIGFRILLLKVAGFNLLMTLRLWSS

SEQ ID NO: 18788 - protein, 896 aa, Artificial Sequence
  Synthetic Polypeptide
MALPVTALLLPLALLLHAARPEVQVLESGGGLVQPGGSLRLSCAASGFTFSNFAMSWVRQAPGKGLEWVSTISGSAGTTDYADSVKGRFTISRDNSKKTLYLQMNSLRVEDTAVYYCADGRGPFFDYRGQGTLVTVSSGTGGGGSGGGGSGGGGSEFSYVLTQPPSVSVAPGQTARITCGGNNIGGKSVHWYQQPPGQAPVVVVYDDSDRPSGIPERFSGSNSGNTATLTISRVEAGDEAVYYCQVWDSSSDHVVFGGGTKLTVLLEDLKNVFPPEVAVFEPSEAEISHTQKATLVCLATGFYPDHVELSWWVNGKEVHSGVCTDPQPLKEQPALNDSRYCLSSRLRVSATFWQNPRNHFRCQVQFYGLSENDEWTQDRAKPVTQIVSAEAWGRADCGFTSESYQQGVLSATILYEILLGKATLYAVLVSALVLMAMVKRKDSRGRAKRSGSGATNFSLLKQAGDVEENPGPTSMDWIWRILFLVGAATGAHSGPEVQLVESGGGLVQAGGSLRLSCAASGRTFSMGWFRQAPGKEREFVAAITYSGGSPYYASSVRGRFTISRDNAKNTVYLQMNSLKPEDTAVYYCAANPTYGSDWNAENWGQGTQVTVSSGSGGGGSGGGGSGGGGSFEQLQLQESGPGLVKPSETLSLTCTVSGGSISSGSYFWGWIRQPPGKGLEWIGSIYYSGITYYNPSLKSRVTISVDTSKNQFSLKLSSVTAADTAVYYCARHDGAVAGLFDYWGQGTLVTVSSATRIQNPDPAVYQLRDSKSSDKSVCLFTDFDSQTNVSQSKDSDVYITDKCVLDMRSMDFKSNSAVAWSNKSDFACANAFNNSIIPEDTFFPSPESSCDVKLVEKSFETDTNLNFQNLSVIGFRILLLKVAGFNLLMTLRLWSS

SEQ ID NO: 18789 - protein, 727 aa, Artificial Sequence
  Synthetic Polypeptide
MALPVTALLLPLALLLHAARPSYVLTQPPSVSVAPGQTARITCGGNNIGSKTVHWYQQPPGQAPVVVVYDDSDRPSGIPERFSGSNSGNTATLTISRVEAGDEAVYYCQVWDSSSDHVVFGGGTKLTVLGGGGSGGGGSGGGGSQLQLQESGPGLVKPSETLSLTCTVSGGSISSGSYFWGWIRQPPGKGLEWIGSIYYSGITYYNPSLKSRVTISVDTSKNQFSLKLSSVTAADTAVYYCARHDGAVAGLFDYWGQGTLVTVSSATREQKLISEEDLAKPTTTPAPRPPTPAPTIASQPLSLRPEACRPAAGGAVHTRGLDFACDIYIWAPLAGTCGVLLLSLVITLYCKRGRKKLLYIFKQPFMRPVQTTQEEDGCSCRFPEEEEGGCELRVKFSRSADAPAYQQGQNQLYNELNLGRREEYDVLDKRRGRDPEMGGKPRRKNPQEGLYNELQKDKMAEAYSEIGMKGERRRGKGHDGLYQGLSTATKDTYDALHMQALPPRSSGSGEGRGSLLTCGDVEENPGPHMTEYKPTVRLATRDDVPRAVRTLAAAFADYPATRHTVDPDRHIERVTELQELFLTRVGLDIGKVWVADDGAAVAVWTTPESVEAGAVFAEIGPRMAELSGSRLAAQQQMEGLLAPHRPKEPAWFLATVGVSPDHQGKGLGSAVVLPGVEAAERAGVPAFLETSAPRNLPFYERLGFTVTADVEVPEGPRTWCMTRKPGA

SEQ ID NO: 18790 - protein, 721 aa, Artificial Sequence
  Synthetic Polypeptide
MALPVTALLLPLALLLHAARPSYVLTQPPSVSVAPGQTARITCGGNNIGSKTVHWYQQPPGQAPVVVVYDDSDRPSGIPERFSGSNSGNTATLTISRVEAGDEAVYYCQVWDSSSDHVVFGGGTKLTVLGGGGSGGGGSGGGGSQLQLQESGPGLVKPSETLSLTCTVSGGSISSGSYFWGWIRQPPGKGLEWIGSIYYSGITYYNPSLKSRVTISVDTSKNQFSLKLSSVTAADTAVYYCARHDGAVAGLFDYWGQGTLVTVSSATREQKLISEEDLKIEVMYPPPYLDNEKSNGTIIHVKGKHLCPSPLFPGPSKPFWVLVVVGGVLACYSLLVTVAFIIFWVRSKRSRLLHSDYMNMTPRRPGPTRKHYQPYAPPRDFAAYRSRVKFSRSADAPAYQQGQNQLYNELNLGRREEYDVLDKRRGRDPEMGGKPRRKNPQEGLYNELQKDKMAEAYSEIGMKGERRRGKGHDGLYQGLSTATKDTYDALHMQALPPRSSGSGEGRGSLLTCGDVEENPGPHMTEYKPTVRLATRDDVPRAVRTLAAAFADYPATRHTVDPDRHIERVTELQELFLTRVGLDIGKVWVADDGAAVAVWTTPESVEAGAVFAEIGPRMAELSGSRLAAQQQMEGLLAPHRPKEPAWFLATVGVSPDHQGKGLGSAVVLPGVEAAERAGVPAFLETSAPRNLPFYERLGFTVTADVEVPEGPRTWCMTRKPGA

SEQ ID NO: 18791 - protein, 498 aa, Artificial Sequence
  Synthetic Polypeptide
MALPVTALLLPLALLLHAARPSYVLTQPPSVSVAPGQTARITCGGNNIGSKTVHWYQQPPGQAPVVVVYDDSDRPSGIPERFSGSNSGNTATLTISRVEAGDEAVYYCQVWDSSSDHVVFGGGTKLTVLGGGGSGGGGSGGGGSQLQLQESGPGLVKPSETLSLTCTVSGGSISSGSYFWGWIRQPPGKGLEWIGSIYYSGITYYNPSLKSRVTISVDTSKNQFSLKLSSVTAADTAVYYCARHDGAVAGLFDYWGQGTLVTVSSATREQKLISEEDLKIEVMYPPPYLDNEKSNGTIIHVKGKHLCPSPLFPGPSKPFWVLVVVGGVLACYSLLVTVAFIIFWVRSKRSRLLHSDYMNMTPRRPGPTRKHYQPYAPPRDFAAYRSRVKFSRSADAPAYQQGQNQLYNELNLGRREEYDVLDKRRGRDPEMGGKPRRKNPQEGLYNELQKDKMAEAYSEIGMKGERRRGKGHDGLYQGLSTATKDTYDALHMQALPPR

SEQ ID NO: 18792 - protein, 504 aa, Artificial Sequence
  Synthetic Polypeptide
MALPVTALLLPLALLLHAARPSYVLTQPPSVSVAPGQTARITCGGNNIGSKTVHWYQQPPGQAPVVVVYDDSDRPSGIPERFSGSNSGNTATLTISRVEAGDEAVYYCQVWDSSSDHVVFGGGTKLTVLGGGGSGGGGSGGGGSQLQLQESGPGLVKPSETLSLTCTVSGGSISSGSYFWGWIRQPPGKGLEWIGSIYYSGITYYNPSLKSRVTISVDTSKNQFSLKLSSVTAADTAVYYCARHDGAVAGLFDYWGQGTLVTVSSATREQKLISEEDLAKPTTTPAPRPPTPAPTIASQPLSLRPEACRPAAGGAVHTRGLDFACDIYIWAPLAGTCGVLLLSLVITLYCKRGRKKLLYIFKQPFMRPVQTTQEEDGCSCRFPEEEEGGCELRVKFSRSADAPAYQQGQNQLYNELNLGRREEYDVLDKRRGRDPEMGGKPRRKNPQEGLYNELQKDKMAEAYSEIGMKGERRRGKGHDGLYQGLSTATKDTYDALHMQALPPR

SEQ ID NO: 18793 - protein, 504 aa, Artificial Sequence
  Synthetic Polypeptide
MALPVTALLLPLALLLHAARPQLQLQESGPGLVKPSETLSLTCTVSGGSISSGSYFWGWIRQPPGKGLEWIGSIYYSGITYYNPSLKSRVTISVDTSKNQFSLKLSSVTAADTAVYYCARHDGAVAGLFDYWGQGTLVTVSSAGGGGSGGGGSGGGGSSYVLTQPPSVSVAPGQTARITCGGNNIGSKTVHWYQQPPGQAPVVVVYDDSDRPSGIPERFSGSNSGNTATLTISRVEAGDEAVYYCQVWDSSSDHVVFGGGTKLTVLTREQKLISEEDLAKPTTTPAPRPPTPAPTIASQPLSLRPEACRPAAGGAVHTRGLDFACDIYIWAPLAGTCGVLLLSLVITLYCKRGRKKLLYIFKQPFMRPVQTTQEEDGCSCRFPEEEEGGCELRVKFSRSADAPAYQQGQNQLYNELNLGRREEYDVLDKRRGRDPEMGGKPRRKNPQEGLYNELQKDKMAEAYSEIGMKGERRRGKGHDGLYQGLSTATKDTYDALHMQALPPR

SEQ ID NO: 18794 - protein, 917 aa, Artificial Sequence
  Synthetic Polypeptide
MALPVTALLLPLALLLHAARPSYVLTQPPSVSVAPGQTARITCGGNNIGSKTVHWYQQPPGQAPVVVVYDDSDRPSGIPERFSGSNSGNTATLTISRVEAGDEAVYYCQVWDSSSDHVVFGGGTKLTVLGGGGSGGGGSGGGGSQLQLQESGPGLVKPSETLSLTCTVSGGSISSGSYFWGWIRQPPGKGLEWIGSIYYSGITYYNPSLKSRVTISVDTSKNQFSLKLSSVTAADTAVYYCARHDGAVAGLFDYWGQGTLVTVSSATREQKLISEEDLAKPTTTPAPRPPTPAPTIASQPLSLRPEACRPAAGGAVHTRGLDFACDIYIWAPLAGTCGVLLLSLVITLYCGRARVKFSRSADAPAYQQGQNQLYNELNLGRREEYDVLDKRRGRDPEMGGKPRRKNPQEGLYNELQKDKMAEAYSEIGMKGERRRGKGHDGLYQGLSTATKDTYDALHMQALPPRSRGSGATNFSLLKQAGDVEENPGPGIHMATYEVLCEVARKLGTDDREVVLFLLNVFIPQPTLAQLIGALRALKEEGRLTFPLLAECLFRAGRRDLLRDLLHLDPRFLERHLAGTMSYFSPYQLTVLHVDGELCARDIRSLIFLSKDTIGSRSTPQTFLHWVYCMENLDLLGPTDVDALMSMLRSLSRVDLQRQVQTLMGLHLSGPSHSQHYRHTPLETDFYDYKDDDDKTSGSGEGRGSLLTCGDVEENPGPHMTEYKPTVRLATRDDVPRAVRTLAAAFADYPATRHTVDPDRHIERVTELQELFLTRVGLDIGKVWVADDGAAVAVWTTPESVEAGAVFAEIGPRMAELSGSRLAAQQQMEGLLAPHRPKEPAWFLATVGVSPDHQGKGLGSAVVLPGVEAAERAGVPAFLETSAPRNLPFYERLGFTVTADVEVPEGPRTWCMTRKPGA

SEQ ID NO: 18795 - protein, 857 aa, Artificial Sequence
  Synthetic Polypeptide
MALPVTALLLPLALLLHAARPSYVLTQPPSVSVAPGQTARITCGGNNIGSKTVHWYQQPPGQAPVVVVYDDSDRPSGIPERFSGSNSGNTATLTISRVEAGDEAVYYCQVWDSSSDHVVFGGGTKLTVLLEIQNPDPAVYQLRDSKSSDKSVCLFTDFDSQTNVSQSKDSDVYITDKCVLDMRSMDFKSNSAVAWSNKSDFACANAFNNSIIPEDTFFPSSDVPCDVKLVEKSFETDTNLNFQNLSVIGFRILLLKVAGFNLLMTLRLWSSRAKRSGSGVKQTLNFDLLKLAGDVESNPGPTSMDWIWRILFLVGAATGAHSFEQLQLQESGPGLVKPSETLSLTCTVSGGSISSGSYFWGWIRQPPGKGLEWIGSIYYSGITYYNPSLKSRVTISVDTSKNQFSLKLSSVTAADTAVYYCARHDGAVAGLFDYWGQGTLVTVSSATREDLKNVFPPEVAVFEPSKAEIAHTQKATLVCLATGFYPDHVELSWWVNGKEVHSGVCTDPQPLKEQPALNDSRYCLSSRLRVSATFWQNPRNHFRCQVQFYGLSENDEWTQDRAKPVTQIVSAEAWGRADCGITSASYHQGVLSATILYEILLGKATLYAVLVSALVLMAMVKRKDSRGRAKRSGSGATNFSLLKQAGDVEENPGPSRGHMTEYKPTVRLATRDDVPRAVRTLAAAFADYPATRHTVDPDRHIERVTELQELFLTRVGLDIGKVWVADDGAAVAVWTTPESVEAGAVFAEIGPRMAELSGSRLAAQQQMEGLLAPHRPKEPAWFLATVGVSPDHQGKGLGSAVVLPGVEAAERAGVPAFLETSAPRNLPFYERLGFTVTADVEVPEGPRTWCMTRKPGA

SEQ ID NO: 18796 - protein, 856 aa, Artificial Sequence
  Synthetic Polypeptide
MALPVTALLLPLALLLHAARPSYVLTQPPSVSVAPGQTARITCGGNNIGSKTVHWYQQPPGQAPVVVVYDDSDRPSGIPERFSGSNSGNTATLTISRVEAGDEAVYYCQVWDSSSDHVVFGGGTKLTVLLEDLKNVFPPEVAVFEPSKAEIAHTQKATLVCLATGFYPDHVELSWWVNGKEVHSGVCTDPQPLKEQPALNDSRYCLSSRLRVSATFWQNPRNHFRCQVQFYGLSENDEWTQDRAKPVTQIVSAEAWGRADCGITSASYHQGVLSATILYEILLGKATLYAVLVSALVLMAMVKRKDSRGRAKRSGSGATNFSLLKQAGDVEENPGPTSMDWIWRILFLVGAATGAHSFEQLQLQESGPGLVKPSETLSLTCTVSGGSISSGSYFWGWIRQPPGKGLEWIGSIYYSGITYYNPSLKSRVTISVDTSKNQFSLKLSSVTAADTAVYYCARHDGAVAGLFDYWGQGTLVTVSSATRIQNPDPAVYQLRDSKSSDKSVCLFTDFDSQTNVSQSKDSDVYITDKCVLDMRSMDFKSNSAVAWSNKSDFACANAFNNSIIPEDTFFPSSDVPCDVKLVEKSFETDTNLNFQNLSVIGFRILLLKVAGFNLLMTLRLWSSRAKRSGSGVKQTLNFDLLKLAGDVESNPGPSRGHMTEYKPTVRLATRDDVPRAVRTLAAAFADYPATRHTVDPDRHIERVTELQELFLTRVGLDIGKVWVADDGAAVAVWTTPESVEAGAVFAEIGPRMAELSGSRLAAQQQMEGLLAPHRPKEPAWFLATVGVSPDHQGKGLGSAVVLPGVEAAERAGVPAFLETSAPRNLPFYERLGFTVTADVEVPEGPRTWCMTRKPGA

SEQ ID NO: 18797 - protein, 623 aa, Artificial Sequence
  Synthetic Polypeptide
MALPVTALLLPLALLLHAARPSYVLTQPPSVSVAPGQTARITCGGNNIGSKTVHWYQQPPGQAPVVVVYDDSDRPSGIPERFSGSNSGNTATLTISRVEAGDEAVYYCQVWDSSSDHVVFGGGTKLTVLLEDLKNVFPPEVAVFEPSEAEISHTQKATLVCLATGFYPDHVELSWWVNGKEVHSGVCTDPQPLKEQPALNDSRYCLSSRLRVSATFWQNPRNHFRCQVQFYGLSENDEWTQDRAKPVTQIVSAEAWGRADCGFTSESYQQGVLSATILYEILLGKATLYAVLVSALVLMAMVKRKDSRGRAKRSGSGATNFSLLKQAGDVEENPGPTSMDWIWRILFLVGAATGAHSFEQLQLQESGPGLVKPSETLSLTCTVSGGSISSGSYFWGWIRQPPGKGLEWIGSIYYSGITYYNPSLKSRVTISVDTSKNQFSLKLSSVTAADTAVYYCARHDGAVAGLFDYWGQGTLVTVSSATRIQNPDPAVYQLRDSKSSDKSVCLFTDFDSQTNVSQSKDSDVYITDKCVLDMRSMDFKSNSAVAWSNKSDFACANAFNNSIIPEDTFFPSPESSCDVKLVEKSFETDTNLNFQNLSVIGFRILLLKVAGFNLLMTLRLWSS

SEQ ID NO: 18798 - protein, 848 aa, Artificial Sequence
  Synthetic Polypeptide
MALPVTALLLPLALLLHAARPSYVLTQPPSVSVAPGQTARITCGGNNIGSKTVHWYQQPPGQAPVVVVYDDSDRPSGIPERFSGSNSGNTATLTISRVEAGDEAVYYCQVWDSSSDHVVFGGGTKLTVLLEDLKNVFPPEVAVFEPSEAEISHTQKATLVCLATGFYPDHVELSWWVNGKEVHSGVCTDPQPLKEQPALNDSRYCLSSRLRVSATFWQNPRNHFRCQVQFYGLSENDEWTQDRAKPVTQIVSAEAWGRADCGFTSESYQQGVLSATILYEILLGKATLYAVLVSALVLMAMVKRKDSRGRAKRSGSGATNFSLLKQAGDVEENPGPTSMDWIWRILFLVGAATGAHSFEQLQLQESGPGLVKPSETLSLTCTVSGGSISSGSYFWGWIRQPPGKGLEWIGSIYYSGITYYNPSLKSRVTISVDTSKNQFSLKLSSVTAADTAVYYCARHDGAVAGLFDYWGQGTLVTVSSATRIQNPDPAVYQLRDSKSSDKSVCLFTDFDSQTNVSQSKDSDVYITDKCVLDMRSMDFKSNSAVAWSNKSDFACANAFNNSIIPEDTFFPSPESSCDVKLVEKSFETDTNLNFQNLSVIGFRILLLKVAGFNLLMTLRLWSSRAKRSGSGVKQTLNFDLLKLAGDVESNPGPSRGGIHTMATYEVLCEVARKLGTDDREVVLFLLNVFIPQPTLAQLIGALRALKEEGRLTFPLLAECLFRAGRRDLLRDLLHLDPRFLERHLAGTMSYFSPYQLTVLHVDGELCARDIRSLIFLSKDTIGSRSTPQTFLHWVYCMENLDLLGPTDVDALMSMLRSLSRVDLQRQVQTLMGLHLSGPSHSQHYRHTP

SEQ ID NO: 18799 - protein, 627 aa, Artificial Sequence
  Synthetic Polypeptide
MALPVTALLLPLALLLHAARPSYVLTQPPSVSVAPGQTARITCGGNNIGSKTVHWYQQPPGQAPVVVVYDDSDRPSGIPERFSGSNSGNTATLTISRVEAGDEAVYYCQVWDSSSDHVVFGGGTKLTVLLEIQNPDPAVYQLRDSKSSDKSVCLFTDFDSQTNVSQSKDSDVYITDKCVLDMRSMDFKSNSAVAWSNKSDFACANAFNNSIIPEDTFFPSPESSCDVKLVEKSFETDTNLNFQNLSVIGFRILLLKVAGFNLLMTLRLWSSRAKRSGSGVKQTLNFDLLKLAGDVESNPGPTSMDWIWRILFLVGAATGAHSFEQLQLQESGPGLVKPSETLSLTCTVSGGSISSGSYFWGWIRQPPGKGLEWIGSIYYSGITYYNPSLKSRVTISVDTSKNQFSLKLSSVTAADTAVYYCARHDGAVAGLFDYWGQGTLVTVSSATREDLKNVFPPEVAVFEPSEAEISHTQKATLVCLATGFYPDHVELSWWVNGKEVHSGVCTDPQPLKEQPALNDSRYCLSSRLRVSATFWQNPRNHFRCQVQFYGLSENDEWTQDRAKPVTQIVSAEAWGRADCGFTSESYQQGVLSATILYEILLGKATLYAVLVSALVLMAMVKRKDSRG

SEQ ID NO: 18800 - protein, 849 aa, Artificial Sequence
  Synthetic Polypeptide
MALPVTALLLPLALLLHAARPSYVLTQPPSVSVAPGQTARITCGGNNIGSKTVHWYQQPPGQAPVVVVYDDSDRPSGIPERFSGSNSGNTATLTISRVEAGDEAVYYCQVWDSSSDHVVFGGGTKLTVLLEIQNPDPAVYQLRDSKSSDKSVCLFTDFDSQTNVSQSKDSDVYITDKCVLDMRSMDFKSNSAVAWSNKSDFACANAFNNSIIPEDTFFPSPESSCDVKLVEKSFETDTNLNFQNLSVIGFRILLLKVAGFNLLMTLRLWSSRAKRSGSGVKQTLNFDLLKLAGDVESNPGPTSMDWIWRILFLVGAATGAHSFEQLQLQESGPGLVKPSETLSLTCTVSGGSISSGSYFWGWIRQPPGKGLEWIGSIYYSGITYYNPSLKSRVTISVDTSKNQFSLKLSSVTAADTAVYYCARHDGAVAGLFDYWGQGTLVTVSSATREDLKNVFPPEVAVFEPSEAEISHTQKATLVCLATGFYPDHVELSWWVNGKEVHSGVCTDPQPLKEQPALNDSRYCLSSRLRVSATFWQNPRNHFRCQVQFYGLSENDEWTQDRAKPVTQIVSAEAWGRADCGFTSESYQQGVLSATILYEILLGKATLYAVLVSALVLMAMVKRKDSRGRAKRSGSGATNFSLLKQAGDVEENPGPSRGGIHTMATYEVLCEVARKLGTDDREVVLFLLNVFIPQPTLAQLIGALRALKEEGRLTFPLLAECLFRAGRRDLLRDLLHLDPRFLERHLAGTMSYFSPYQLTVLHVDGELCARDIRSLIFLSKDTIGSRSTPQTFLHWVYCMENLDLLGPTDVDALMSMLRSLSRVDLQRQVQTLMGLHLSGPSHSQHYRHTP

SEQ ID NO: 18801 - protein, 901 aa, Artificial Sequence
  Synthetic Polypeptide
MALPVTALLLPLALLLHAARPLEGKPIPNPLLGLDSTGSGEDLKNVFPPEVAVFEPSKAEIAHTQKATLVCLATGFYPDHVELSWWVNGKEVHSGVCTDPQPLKEQPALNDSRYCLSSRLRVSATFWQNPRNHFRCQVQFYGLSENDEWTQDRAKPVTQIVSAEAWGRADCGITSASYHQGVLSATILYEILLGKATLYAVLVSALVLMAMVKRKDSRGRAKRSGSGATNFSLLKQAGDVEENPGPTSMALPVTALLLPLALLLHAARPSYVLTQPPSVSVAPGQTARITCGGNNIGSKTVHWYQQPPGQAPVVVVYDDSDRPSGIPERFSGSNSGNTATLTISRVEAGDEAVYYCQVWDSSSDHVVFGGGTKLTVLGGGGSGGGGSGGGGSQLQLQESGPGLVKPSETLSLTCTVSGGSISSGSYFWGWIRQPPGKGLEWIGSIYYSGITYYNPSLKSRVTISVDTSKNQFSLKLSSVTAADTAVYYCARHDGAVAGLFDYWGQGTLVTVSSATREQKLISEEDGSGIQNPDPAVYQLRDSKSSDKSVCLFTDFDSQTNVSQSKDSDVYITDKCVLDMRSMDFKSNSAVAWSNKSDFACANAFNNSIIPEDTFFPSSDVPCDVKLVEKSFETDTNLNFQNLSVIGFRILLLKVAGFNLLMTLRLWSSRAKRSGSGVKQTLNFDLLKLAGDVESNPGPSRGHMTEYKPTVRLATRDDVPRAVRTLAAAFADYPATRHTVDPDRHIERVTELQELFLTRVGLDIGKVWVADDGAAVAVWTTPESVEAGAVFAEIGPRMAELSGSRLAAQQQMEGLLAPHRPKEPAWFLATVGVSPDHQGKGLGSAVVLPGVEAAERAGVPAFLETSAPRNLPFYERLGFTVTADVEVPEGPRTWCMTRKPGA

SEQ ID NO: 18802 - protein, 902 aa, Artificial Sequence
  Synthetic Polypeptide
MALPVTALLLPLALLLHAARPLEQKLISEEDLGSGDRPDPAVYQLRDSKSSDKSVCLFTDFDSQTNVSQSKDSDVYITDKCVLDMRSMDFKSNSAVAWSNKSDFACANAFNNSIIPEDTFFPSPESSCDVKLVEKSFETDTNLNFQNLSVIGFRILLLKVAGFNLLMTLRLWSSSSRAKRSGSGVKQTLNFDLLKLAGDVESNPGPTSMALPVTALLLPLALLLHAARPSYVLTQPPSVSVAPGQTARITCGGNNIGSKTVHWYQQPPGQAPVVVVYDDSDRPSGIPERFSGSNSGNTATLTISRVEAGDEAVYYCQVWDSSSDHVVFGGGTKLTVLGGGGSGGGGSGGGGSQLQLQESGPGLVKPSETLSLTCTVSGGSISSGSYFWGWIRQPPGKGLEWIGSIYYSGITYYNPSLKSRVTISVDTSKNQFSLKLSSVTAADTAVYYCARHDGAVAGLFDYWGQGTLVTVSSATRGKPIPNPLLGLDSTGSGEDLKNVFPPEVAVFEPSEAEISHTQKATLVCLATGFYPDHVELSWWVNGKEVHSGVCTDPQPLKEQPALNDSRYCLSSRLRVSATFWQNPRNHFRCQVQFYGLSENDEWTQDRAKPVTQIVSAEAWGRADCGFTSESYQQGVLSATILYEILLGKATLYAVLVSALVLMAMVKRKDSRGRAKRSGSGATNFSLLKQAGDVEENPGPSRGHMTEYKPTVRLATRDDVPRAVRTLAAAFADYPATRHTVDPDRHIERVTELQELFLTRVGLDIGKVWVADDGAAVAVWTTPESVEAGAVFAEIGPRMAELSGSRLAAQQQMEGLLAPHRPKEPAWFLATVGVSPDHQGKGLGSAVVLPGVEAAERAGVPAFLETSAPRNLPFYERLGFTVTADVEVPEGPRTWCMTRKPGA

SEQ ID NO: 18803 - protein, 856 aa, Artificial Sequence
  Synthetic Polypeptide
MALPVTALLLPLALLLHAARPSYVLTQPPSVSVAPGQTARITCGGNNIGSKTVHWYQQPPGQAPVVVVYDDSDRPSGIPERFSGSNSGNTATLTISRVEAGDEAVYYCQVWDSSSDHVVFGGGTKLTVLLEDLKNVFPPEVAVFEPSEAEISHTQKATLVCLATGFYPDHVELSWWVNGKEVHSGVSTDPQPLKEQPALNDSRYCLSSRLRVSATFWQNPRNHFRCQVQFYGLSENDEWTQDRAKPVTQIVSAEAWGRADCGFTSESYQQGVLSATILYEILLGKATLYAVLVSALVLMAMVKRKDSRGRAKRSGSGATNFSLLKQAGDVEENPGPTSMDWIWRILFLVGAATGAHSFEQLQLQESGPGLVKPSETLSLTCTVSGGSISSGSYFWGWIRQPPGKGLEWIGSIYYSGITYYNPSLKSRVTISVDTSKNQFSLKLSSVTAADTAVYYCARHDGAVAGLFDYWGQGTLVTVSSATRIQNPDPAVYQLRDSKSSDKSVCLFTDFDSQTNVSQSKDSDVYITDKTVLDMRSMDFKSNSAVAWSNKSDFACANAFNNSIIPEDTFFPSPESSCDVKLVEKSFETDTNLNFQNLSVIGFRILLLKVAGFNLLMTLRLWSSRAKRSGSGVKQTLNFDLLKLAGDVESNPGPSRGHMTEYKPTVRLATRDDVPRAVRTLAAAFADYPATRHTVDPDRHIERVTELQELFLTRVGLDIGKVWVADDGAAVAVWTTPESVEAGAVFAEIGPRMAELSGSRLAAQQQMEGLLAPHRPKEPAWFLATVGVSPDHQGKGLGSAVVLPGVEAAERAGVPAFLETSAPRNLPFYERLGFTVTADVEVPEGPRTWCMTRKPGA

SEQ ID NO: 18804 - protein, 938 aa, Artificial Sequence
  Synthetic Polypeptide
MALPVTALLLPLALLLHAARPSYVLTQPPSVSVAPGQTARITCGGNNIGSKTVHWYQQPPGQAPVVVVYDDSDRPSGIPERFSGSNSGNTATLTISRVEAGDEAVYYCQVWDSSSDHVVFGGGTKLTVLLEDLKNVFPPEVAVFEPSEAEISHTQKATLVCLATGFYPDHVELSWWVNGKEVHSGVSTDPQPLKEQPALNDSRYCLSSRLRVSATFWQNPRNHFRCQVQFYGLSENDEWTQDRAKPVTQIVSAEAWGRADCGFTSESYQQGVLSATILYEILLGKATLYAVLVSALVLMAMVKRKDSRGRAKRSGSGATNFSLLKQAGDVEENPGPTSMDWIWRILFLVGAATGAHSFEQLQLQESGPGLVKPSETLSLTCTVSGGSISSGSYFWGWIRQPPGKGLEWIGSIYYSGITYYNPSLKSRVTISVDTSKNQFSLKLSSVTAADTAVYYCARHDGAVAGLFDYWGQGTLVTVSSATREQKLISEEDGSGTPFPSLAPPIMLLVDGKQQMVVVCLVLDVAPPGLDSPIWFSAGNGSALDAFTYGPSPATDGTWTNLAHLSLPSEELASWEPLVCHTGPGAEGHSRSTQPMHLSGEASTARTCPQEPLRGTPGGALWLGVLRLLLFKLLLFDLLLTCSCLCDPAGPLPSPATTTRLRALGSHRLHPATETGGREATSSPRPQPRDRRWGDTPPGRKPGSPVRAKRSGSGVKQTLNFDLLKLAGDVESNPGPSRGHMTEYKPTVRLATRDDVPRAVRTLAAAFADYPATRHTVDPDRHIERVTELQELFLTRVGLDIGKVWVADDGAAVAVWTTPESVEAGAVFAEIGPRMAELSGSRLAAQQQMEGLLAPHRPKEPAWFLATVGVSPDHQGKGLGSAVVLPGVEAAERAGVPAFLETSAPRNLPFYERLGFTVTADVEVPEGPRTWCMTRKPGA

SEQ ID NO: 18805 - protein, 956 aa, Artificial Sequence
  Synthetic Polypeptide
MALPVTALLLPLALLLHAARPLEDLKNVFPPEVAVFEPSEAEISHTQKATLVCLATGFYPDHVELSWWVNGKEVHSGVSTDPQPLKEQPALNDSRYCLSSRLRVSATFWQNPRNHFRCQVQFYGLSENDEWTQDRAKPVTQIVSAEAWGRADCGFTSESYQQGVLSATILYEILLGKATLYAVLVSALVLMAMVKRKDSRGRAKRSGSGATNFSLLKQAGDVEENPGPTSMALPVTALLLPLALLLHAARPSYVLTQPPSVSVAPGQTARITCGGNNIGSKTVHWYQQPPGQAPVVVVYDDSDRPSGIPERFSGSNSGNTATLTISRVEAGDEAVYYCQVWDSSSDHVVFGGGTKLTVLGGGGSGGGGSGGGGSQLQLQESGPGLVKPSETLSLTCTVSGGSISSGSYFWGWIRQPPGKGLEWIGSIYYSGITYYNPSLKSRVTISVDTSKNQFSLKLSSVTAADTAVYYCARHDGAVAGLFDYWGQGTLVTVSSATREQKLISEEDLGSGTPFPSLAPPIMLLVDGKQQMVVVCLVLDVAPPGLDSPIWFSAGNGSALDAFTYGPSPATDGTWTNLAHLSLPSEELASWEPLVCHTGPGAEGHSRSTQPMHLSGEASTARTCPQEPLRGTPGGALWLGVLRLLLFKLLLFDLLLTCSCLCDPAGPLPSPATTTRLRALGSHRLHPATETGGREATSSPRPQPRDRRWGDTPPGRKPGSPVRAKRSGSGVKQTLNFDLLKLAGDVESNPGPSRSRGHMTEYKPTVRLATRDDVPRAVRTLAAAFADYPATRHTVDPDRHIERVTELQELFLTRVGLDIGKVWVADDGAAVAVWTTPESVEAGAVFAEIGPRMAELSGSRLAAQQQMEGLLAPHRPKEPAWFLATVGVSPDHQGKGLGSAVVLPGVEAAERAGVPAFLETSAPRNLPFYERLGFTVTADVEVPEGPRTWCMTRKPGA

SEQ ID NO: 18806 - protein, 893 aa, Artificial Sequence
  Synthetic Polypeptide
MALPVTALLLPLALLLHAARPSYVLTQPPSVSVAPGQTARITCGGNNIGSKTVHWYQQPPGQAPVVVVYDDSDRPSGIPERFSGSNSGNTATLTISRVEAGDEAVYYCQVWDSSSDHVVFGGGTKLTVLLEGKPIPNPLLGLDSTGSGDKQLDADVSPKPTIFLPSIAETKLQKAGTYLCLLEKFFPDVIKIHWQEKKSNTILGSQEGNTMKTNDTYMKFSWLTVPEKSLDKEHRCIVRHENNKNGVDQEIIFPPIKTDVITMDPKDNCSKDANDTLLLQLTNTSAYYMYLLLLLKSVVYFAIITCCLLRRTAFCCNGEKSRAKRSGSGATNFSLLKQAGDVEENPGPTSMDWIWRILFLVGAATGAHSFEQLQLQESGPGLVKPSETLSLTCTVSGGSISSGSYFWGWIRQPPGKGLEWIGSIYYSGITYYNPSLKSRVTISVDTSKNQFSLKLSSVTAADTAVYYCARHDGAVAGLFDYWGQGTLVTVSSATREQKLISEEDGSGSQPHTKPSVFVMKNGTNVACLVKEFYPKDIRINLVSSKKITEFDPAIVISPSGKYNAVKLGKYEDSNSVTCSVQHDNKTVHSTDFEVKTDSTDHVKPKETENTKQPSKSCHKPKAIVHTEKVNMMSLTVLGLRMLFAKTVAVNFLLTAKLFFLRAKRSGSGVKQTLNFDLLKLAGDVESNPGPSRGHMTEYKPTVRLATRDDVPRAVRTLAAAFADYPATRHTVDPDRHIERVTELQELFLTRVGLDIGKVWVADDGAAVAVWTTPESVEAGAVFAEIGPRMAELSGSRLAAQQQMEGLLAPHRPKEPAWFLATVGVSPDHQGKGLGSAVVLPGVEAAERAGVPAFLETSAPRNLPFYERLGFTVTADVEVPEGPRTWCMTRKPGA

SEQ ID NO: 18807 - protein, 631 aa, Artificial Sequence
  Synthetic Polypeptide
MALPVTALLLPLALLLHAARPSYVLTQPPSVSVAPGQTARITCGGNNIGSKTVHWYQQPPGQAPVVVVYDDSDRPSGIPERFSGSNSGNTATLTISRVEAGDEAVYYCQVWDSSSDHVVFGGGTKLTVLLESQPHTKPSVFVMKNGTNVACLVKEFYPKDIRINLVSSKKITEFDPAIVISPSGKYNAVKLGKYEDSNSVTCSVQHDNKTVHSTDFEVKTDSTDHVKPKETENTKQPSKSCHKPKAIVHTEKVNMMSLTVLGLRMLFAKTVAVNFLLTAKLFFLRAKRSGSGATNFSLLKQAGDVEENPGPTSMDWIWRILFLVGAATGAHSFEQLQLQESGPGLVKPSETLSLTCTVSGGSISSGSYFWGWIRQPPGKGLEWIGSIYYSGITYYNPSLKSRVTISVDTSKNQFSLKLSSVTAADTAVYYCARHDGAVAGLFDYWGQGTLVTVSSATRDKQLDADVSPKPTIFLPSIAETKLQKAGTYLCLLEKFFPDVIKIHWQEKKSNTILGSQEGNTMKTNDTYMKFSWLTVPEKSLDKEHRCIVRHENNKNGVDQEIIFPPIKTDVITMDPKDNCSKDANDTLLLQLTNTSAYYMYLLLLLKSVVYFAIITCCLLRRTAFCCNGEKS

SEQ ID NO: 18808 - protein, 908 aa, Artificial Sequence
  Synthetic Polypeptide
MALPVTALLLPLALLLHAARPLEGKPIPNPLLGLDSTGSGDKQLDADVSPKPTIFLPSIAETKLQKAGTYLCLLEKFFPDVIKIHWQEKKSNTILGSQEGNTMKTNDTYMKFSWLTVPEKSLDKEHRCIVRHENNKNGVDQEIIFPPIKTDVITMDPKDNCSKDANDTLLLQLTNTSAYYMYLLLLLKSVVYFAIITCCLLRRTAFCCNGEKSRAKRSGSGATNFSLLKQAGDVEENPGPTSMALPVTALLLPLALLLHAARPSYVLTQPPSVSVAPGQTARITCGGNNIGSKTVHWYQQPPGQAPVVVVYDDSDRPSGIPERFSGSNSGNTATLTISRVEAGDEAVYYCQVWDSSSDHVVFGGGTKLTVLGGGGSGGGGSGGGGSQLQLQESGPGLVKPSETLSLTCTVSGGSISSGSYFWGWIRQPPGKGLEWIGSIYYSGITYYNPSLKSRVTISVDTSKNQFSLKLSSVTAADTAVYYCARHDGAVAGLFDYWGQGTLVTVSSATREQKLISEEDGSGSQPHTKPSVFVMKNGTNVACLVKEFYPKDIRINLVSSKKITEFDPAIVISPSGKYNAVKLGKYEDSNSVTCSVQHDNKTVHSTDFEVKTDSTDHVKPKETENTKQPSKSCHKPKAIVHTEKVNMMSLTVLGLRMLFAKTVAVNFLLTAKLFFLRAKRSGSGVKQTLNFDLLKLAGDVESNPGPSRGHMTEYKPTVRLATRDDVPRAVRTLAAAFADYPATRHTVDPDRHIERVTELQELFLTRVGLDIGKVWVADDGAAVAVWTTPESVEAGAVFAEIGPRMAELSGSRLAAQQQMEGLLAPHRPKEPAWFLATVGVSPDHQGKGLGSAVVLPGVEAAERAGVPAFLETSAPRNLPFYERLGFTVTADVEVPEGPRTWCMTRKPGA

SEQ ID NO: 18809 - protein, 1033 aa, Artificial Sequence
  Synthetic Polypeptide
MALPVTALLLPLALLLHAARPSYVLTQPPSVSVAPGQTARITCGGNNIGSKTVHWYQQPPGQAPVVVVYDDSDRPSGIPERFSGSNSGNTATLTISRVEAGDEAVYYCQVWDSSSDHVVFGGGTKLTVLGQPKANPTVTLFPPSSEELQANKATLVCLISDFYPGAVTVAWKADGSPVKAGVETTKPSKQSNNKYAASSYLSLTPEQWKSHRSYSCQVTHEGSTVEKTVAPTECSGSQSFGLLDPKLCYLLDGILFIYGVILTALFLRVKFSRSADAPAYQQGQNQLYNELNLGRREEYDVLDKRRGRDPEMGGKPQRRKNPQEGLYNELQKDKMAEAYSEIGMKGERRRGKGHDGLYQGLSTATKDTYDALHMQALPPRRAKRSGSGATNFSLLKQAGDVEENPGPTSMDWIWRILFLVGAATGAHSFEQLQLQESGPGLVKPSETLSLTCTVSGGSISSGSYFWGWIRQPPGKGLEWIGSIYYSGITYYNPSLKSRVTISVDTSKNQFSLKLSSVTAADTAVYYCARHDGAVAGLFDYWGQGTLVTVSSAASTKGPSVFPLAPSSKSTSGGTAALGCLVKDYFPEPVTVSWNSGALTSGVHTFPAVLQSSGLYSLSSVVTVPSSSLGTQTYICNVNHKPSNTKVDKRVEPKSCGTQSFGLLDPKLCYLLDGILFIYGVILTALFLRVKFSRSADAPAYQQGQNQLYNELNLGRREEYDVLDKRRGRDPEMGGKPQRRKNPQEGLYNELQKDKMAEAYSEIGMKGERRRGKGHDGLYQGLSTATKDTYDALHMQALPPRRAKRSGSGVKQTLNFDLLKLAGDVESNPGPSRGHMTEYKPTVRLATRDDVPRAVRTLAAAFADYPATRHTVDPDRHIERVTELQELFLTRVGLDIGKVWVADDGAAVAVWTTPESVEAGAVFAEIGPRMAELSGSRLAAQQQMEGLLAPHRPKEPAWFLATVGVSPDHQGKGLGSAVVLPGVEAAERAGVPAFLETSAPRNLPFYERLGFTVTADVEVPEGPRTWCMTRKPGA

SEQ ID NO: 18810 - protein, 819 aa, Artificial Sequence
  Synthetic Polypeptide
MALPVTALLLPLALLLHAARPSYVLTQPPSVSVAPGQTARITCGGNNIGSKTVHWYQQPPGQAPVVVVYDDSDRPSGIPERFSGSNSGNTATLTISRVEAGDEAVYYCQVWDSSSDHVVFGGGTKLTVLLEDLKNVFPPEVAVFEPSEAEISHTQKATLVCLATGFYPDHVELSWWVNGKEVHSGVSTDPQPLKEQPALNDSRYCLSSRLRVSATFWQNPRNHFRCQVQFYGLSENDEWTQDRAKPVTQIVSAEAWGRADCGSQSFGLLDPKLCYLLDGILFIYGVILTALFLRVKFSRSADAPAYQQGQNQLYNELNLGRREEYDVLDKRRGRDPEMGGKPQRRKNPQEGLYNELQKDKMAEAYSEIGMKGERRRGKGHDGLYQGLSTATKDTYDALHMQALPPRRAKRSGSGATNFSLLKQAGDVEENPGPTSMDWIWRILFLVGAATGAHSFEQLQLQESGPGLVKPSETLSLTCTVSGGSISSGSYFWGWIRQPPGKGLEWIGSIYYSGITYYNPSLKSRVTISVDTSKNQFSLKLSSVTAADTAVYYCARHDGAVAGLFDYWGQGTLVTVSSATRIQNPDPAVYQLRDSKSSDKSVCLFTDFDSQTNVSQSKDSDVYITDKTVLDMRSMDFKSNSAVAWSNKSDFACANAFNNSIIPEDTFFPSPESSCGTQSFGLLDPKLCYLLDGILFIYGVILTALFLRVKFSRSADAPAYQQGQNQLYNELNLGRREEYDVLDKRRGRDPEMGGKPQRRKNPQEGLYNELQKDKMAEAYSEIGMKGERRRGKGHDGLYQGLSTATKDTYDALHMQALPPR

SEQ ID NO: 18811 - protein, 819 aa, Artificial Sequence
  Synthetic Polypeptide
MALPVTALLLPLALLLHAARPSYVLTQPPSVSVAPGQTARITCGGNNIGSKTVHWYQQPPGQAPVVVVYDDSDRPSGIPERFSGSNSGNTATLTISRVEAGDEAVYYCQVWDSSSDHVVFGGGTKLTVLLEDLKNVFPPEVAVFEPSKAEIAHTQKATLVCLATGFYPDHVELSWWVNGKEVHSGVCTDPQPLKEQPALNDSRYCLSSRLRVSATFWQNPRNHFRCQVQFYGLSENDEWTQDRAKPVTQIVSAEAWGRADCGSQSFGLLDPKLCYLLDGILFIYGVILTALFLRVKFSRSADAPAYQQGQNQLYNELNLGRREEYDVLDKRRGRDPEMGGKPQRRKNPQEGLYNELQKDKMAEAYSEIGMKGERRRGKGHDGLYQGLSTATKDTYDALHMQALPPRRAKRSGSGATNFSLLKQAGDVEENPGPTSMDWIWRILFLVGAATGAHSFEQLQLQESGPGLVKPSETLSLTCTVSGGSISSGSYFWGWIRQPPGKGLEWIGSIYYSGITYYNPSLKSRVTISVDTSKNQFSLKLSSVTAADTAVYYCARHDGAVAGLFDYWGQGTLVTVSSATRIQNPDPAVYQLRDSKSSDKSVCLFTDFDSQTNVSQSKDSDVYITDKCVLDMRSMDFKSNSAVAWSNKSDFACANAFNNSIIPEDTFFPSSDVPCGTQSFGLLDPKLCYLLDGILFIYGVILTALFLRVKFSRSADAPAYQQGQNQLYNELNLGRREEYDVLDKRRGRDPEMGGKPQRRKNPQEGLYNELQKDKMAEAYSEIGMKGERRRGKGHDGLYQGLSTATKDTYDALHMQALPPR

SEQ ID NO: 18812 - protein, 890 aa, Artificial Sequence
  Synthetic Polypeptide
MALPVTALLLPLALLLHAARPSYVLTQPPSVSVAPGQTARITCGGNNIGSKTVHWYQQPPGQAPVVVVYDDSDRPSGIPERFSGSNSGNTATLTISRVEAGDEAVYYCQVWDSSSDHVVFGGGTKLTVLLEGKPIPNPLLGLDSTGSGEDLKNVFPPEVAVFEPSEAEISHTQKATLVCLATGFYPDHVELSWWVNGKEVHSGVSTDPQPLKEQPALNDSRYCLSSRLRVSATFWQNPRNHFRCQVQFYGLSENDEWTQDRAKPVTQIVSAEAWGRADCGSQSFGLLDPKLCYLLDGILFIYGVILTALFLRVKFSRSADAPAYQQGQNQLYNELNLGRREEYDVLDKRRGRDPEMGGKPQRRKNPQEGLYNELQKDKMAEAYSEIGMKGERRRGKGHDGLYQGLSTATKDTYDALHMQALPPRRAKRSGSGATNFSLLKQAGDVEENPGPTSMDWIWRILFLVGAATGAHSFEQLQLQESGPGLVKPSETLSLTCTVSGGSISSGSYFWGWIRQPPGKGLEWIGSIYYSGITYYNPSLKSRVTISVDTSKNQFSLKLSSVTAADTAVYYCARHDGAVAGLFDYWGQGTLVTVSSATREQKLISEEDGSGIQNPDPAVYQLRDSKSSDKSVCLFTDFDSQTNVSQSKDSDVYITDKTVLDMRSMDFKSNSAVAWSNKSDFACANAFNNSIIPEDTFFPSPESSCGTQSFGLLDPKLCYLLDGILFIYGVILTALFLRSKRSRLLHSDYMNMTPRRPGPTRKHYQPYAPPRDFAAYRSRVKFSRSADAPAYQQGQNQLYNELNLGRREEYDVLDKRRGRDPEMGGKPQRRKNPQEGLYNELQKDKMAEAYSEIGMKGERRRGKGHDGLYQGLSTATKDTYDALHMQALPPR

SEQ ID NO: 18813 - protein, 931 aa, Artificial Sequence
  Synthetic Polypeptide
MALPVTALLLPLALLLHAARPSYVLTQPPSVSVAPGQTARITCGGNNIGSKTVHWYQQPPGQAPVVVVYDDSDRPSGIPERFSGSNSGNTATLTISRVEAGDEAVYYCQVWDSSSDHVVFGGGTKLTVLLEGKPIPNPLLGLDSTGSGEDLKNVFPPEVAVFEPSEAEISHTQKATLVCLATGFYPDHVELSWWVNGKEVHSGVSTDPQPLKEQPALNDSRYCLSSRLRVSATFWQNPRNHFRCQVQFYGLSENDEWTQDRAKPVTQIVSAEAWGRADCGSQSFGLLDPKLCYLLDGILFIYGVILTALFLRSKRSRLLHSDYMNMTPRRPGPTRKHYQPYAPPRDFAAYRSRVKFSRSADAPAYQQGQNQLYNELNLGRREEYDVLDKRRGRDPEMGGKPQRRKNPQEGLYNELQKDKMAEAYSEIGMKGERRRGKGHDGLYQGLSTATKDTYDALHMQALPPRRAKRSGSGATNFSLLKQAGDVEENPGPTSMDWIWRILFLVGAATGAHSFEQLQLQESGPGLVKPSETLSLTCTVSGGSISSGSYFWGWIRQPPGKGLEWIGSIYYSGITYYNPSLKSRVTISVDTSKNQFSLKLSSVTAADTAVYYCARHDGAVAGLFDYWGQGTLVTVSSATREQKLISEEDGSGIQNPDPAVYQLRDSKSSDKSVCLFTDFDSQTNVSQSKDSDVYITDKTVLDMRSMDFKSNSAVAWSNKSDFACANAFNNSIIPEDTFFPSPESSCGTQSFGLLDPKLCYLLDGILFIYGVILTALFLRSKRSRLLHSDYMNMTPRRPGPTRKHYQPYAPPRDFAAYRSRVKFSRSADAPAYQQGQNQLYNELNLGRREEYDVLDKRRGRDPEMGGKPQRRKNPQEGLYNELQKDKMAEAYSEIGMKGERRRGKGHDGLYQGLSTATKDTYDALHMQALPPR

SEQ ID NO: 18814 - protein, 892 aa, Artificial Sequence
  Synthetic Polypeptide
MALPVTALLLPLALLLHAARPSYVLTQPPSVSVAPGQTARITCGGNNIGSKTVHWYQQPPGQAPVVVVYDDSDRPSGIPERFSGSNSGNTATLTISRVEAGDEAVYYCQVWDSSSDHVVFGGGTKLTVLLEGKPIPNPLLGLDSTGSGEDLKNVFPPEVAVFEPSEAEISHTQKATLVCLATGFYPDHVELSWWVNGKEVHSGVSTDPQPLKEQPALNDSRYCLSSRLRVSATFWQNPRNHFRCQVQFYGLSENDEWTQDRAKPVTQIVSAEAWGRADCGSQSFGLLDPKLCYLLDGILFIYGVILTALFLRVKFSRSADAPAYQQGQNQLYNELNLGRREEYDVLDKRRGRDPEMGGKPQRRKNPQEGLYNELQKDKMAEAYSEIGMKGERRRGKGHDGLYQGLSTATKDTYDALHMQALPPRRAKRSGSGATNFSLLKQAGDVEENPGPTSMDWIWRILFLVGAATGAHSFEQLQLQESGPGLVKPSETLSLTCTVSGGSISSGSYFWGWIRQPPGKGLEWIGSIYYSGITYYNPSLKSRVTISVDTSKNQFSLKLSSVTAADTAVYYCARHDGAVAGLFDYWGQGTLVTVSSATREQKLISEEDLGSGIQNPDPAVYQLRDSKSSDKSVCLFTDFDSQTNVSQSKDSDVYITDKTVLDMRSMDFKSNSAVAWSNKSDFACANAFNNSIIPEDTFFPSPESSCGTQSFGLLDPKLCYLLDGILFIYGVILTALFLKRGRKKLLYIFKQPFMRPVQTTQEEDGCSCRFPEEEEGGCELRVKFSRSADAPAYQQGQNQLYNELNLGRREEYDVLDKRRGRDPEMGGKPQRRKNPQEGLYNELQKDKMAEAYSEIGMKGERRRGKGHDGLYQGLSTATKDTYDALHMQALPPR

SEQ ID NO: 18815 - protein, 934 aa, Artificial Sequence
  Synthetic Polypeptide
MALPVTALLLPLALLLHAARPSYVLTQPPSVSVAPGQTARITCGGNNIGSKTVHWYQQPPGQAPVVVVYDDSDRPSGIPERFSGSNSGNTATLTISRVEAGDEAVYYCQVWDSSSDHVVFGGGTKLTVLLEGKPIPNPLLGLDSTGSGEDLKNVFPPEVAVFEPSEAEISHTQKATLVCLATGFYPDHVELSWWVNGKEVHSGVSTDPQPLKEQPALNDSRYCLSSRLRVSATFWQNPRNHFRCQVQFYGLSENDEWTQDRAKPVTQIVSAEAWGRADCGSQSFGLLDPKLCYLLDGILFIYGVILTALFLKRGRKKLLYIFKQPFMRPVQTTQEEDGCSCRFPEEEEGGCELRVKFSRSADAPAYQQGQNQLYNELNLGRREEYDVLDKRRGRDPEMGGKPQRRKNPQEGLYNELQKDKMAEAYSEIGMKGERRRGKGHDGLYQGLSTATKDTYDALHMQALPPRRAKRSGSGATNFSLLKQAGDVEENPGPTSMDWIWRILFLVGAATGAHSFEQLQLQESGPGLVKPSETLSLTCTVSGGSISSGSYFWGWIRQPPGKGLEWIGSIYYSGITYYNPSLKSRVTISVDTSKNQFSLKLSSVTAADTAVYYCARHDGAVAGLFDYWGQGTLVTVSSATREQKLISEEDLGSGIQNPDPAVYQLRDSKSSDKSVCLFTDFDSQTNVSQSKDSDVYITDKTVLDMRSMDFKSNSAVAWSNKSDFACANAFNNSIIPEDTFFPSPESSCGTQSFGLLDPKLCYLLDGILFIYGVILTALFLKRGRKKLLYIFKQPFMRPVQTTQEEDGCSCRFPEEEEGGCELRVKFSRSADAPAYQQGQNQLYNELNLGRREEYDVLDKRRGRDPEMGGKPQRRKNPQEGLYNELQKDKMAEAYSEIGMKGERRRGKGHDGLYQGLSTATKDTYDALHMQALPPR

SEQ ID NO: 18816 - protein, 824 aa, Artificial Sequence
  Synthetic Polypeptide
MALPVTALLLPLALLLHAARPSYVLTQPPSVSVAPGQTARITCGGNNIGSKTVHWYQQPPGQAPVVVVYDDSDRPSGIPERFSGSNSGNTATLTISRVEAGDEAVYYCQVWDSSSDHVVFGGGTKLTVLLEQSFGLLDPKLCYLLDGILFIYGVILTALFLRVKFSRSADAPAYQQGQNQLYNELNLGRREEYDVLDKRRGRDPEMGGKPQRRKNPQEGLYNELQKDKMAEAYSEIGMKGERRRGKGHDGLYQGLSTATKDTYDALHMQALPPRRAKRSGSGATNFSLLKQAGDVEENPGPTSMDWIWRILFLVGAATGAHSFEQLQLQESGPGLVKPSETLSLTCTVSGGSISSGSYFWGWIRQPPGKGLEWIGSIYYSGITYYNPSLKSRVTISVDTSKNQFSLKLSSVTAADTAVYYCARHDGAVAGLFDYWGQGTLVTVSSATRQSFGLLDPKLCYLLDGILFIYGVILTALFLRVKFSRSADAPAYQQGQNQLYNELNLGRREEYDVLDKRRGRDPEMGGKPQRRKNPQEGLYNELQKDKMAEAYSEIGMKGERRRGKGHDGLYQGLSTATKDTYDALHMQALPPRRAKRSGSGVKQTLNFDLLKLAGDVESNPGPSRGHMTEYKPTVRLATRDDVPRAVRTLAAAFADYPATRHTVDPDRHIERVTELQELFLTRVGLDIGKVWVADDGAAVAVWTTPESVEAGAVFAEIGPRMAELSGSRLAAQQQMEGLLAPHRPKEPAWFLATVGVSPDHQGKGLGSAVVLPGVEAAERAGVPAFLETSAPRNLPFYERLGFTVTADVEVPEGPRTWCMTRKPGA

SEQ ID NO: 18817 - protein, 649 aa, Artificial Sequence
  Synthetic Polypeptide
MALPVTALLLPLALLLHAARPSYVLTQPPSVSVAPGQTARITCGGNNIGSKTVHWYQQPPGQAPVVVVYDDSDRPSGIPERFSGSNSGNTATLTISRVEAGDEAVYYCQVWDSSSDHVVFGGGTKLTVLLEGQPKANPTVTLFPPSSEELQANKATLVCLISDFYPGAVTVAWKADGSPVKAGVETTKPSKQSNNKYAASSYLSLTPEQWKSHRSYSCQVTHEGSTVEKTVAPTECSPIKTDVITMDPKDNCSKDANDTLLLQLTNTSAYYMYLLLLLKSVVYFAIITCCLLRRTAFCCNGEKSRAKRSGSGATNFSLLKQAGDVEENPGPTSMDWIWRILFLVGAATGAHSFEQLQLQESGPGLVKPSETLSLTCTVSGGSISSGSYFWGWIRQPPGKGLEWIGSIYYSGITYYNPSLKSRVTISVDTSKNQFSLKLSSVTAADTAVYYCARHDGAVAGLFDYWGQGTLVTVSSATRASTKGPSVFPLAPSSKSTSGGTAALGCLVKDYFPEPVTVSWNSGALTSGVHTFPAVLQSSGLYSLSSVVTVPSSSLGTQTYICNVNHKPSNTKVDKRVEPKSCEVKTDSTDHVKPKETENTKQPSKSCHKPKAIVHTEKVNMMSLTVLGLRMLFAKTVAVNFLLTAKLFFL

SEQ ID NO: 18818 - protein, 627 aa, Artificial Sequence
  Synthetic Polypeptide
MALPVTALLLPLALLLHAARPSYVLTQPPSVSVAPGQTARITCGGNNIGSKTVHWYQQPPGQAPVVVVYDDSDRPSGIPERFSGSNSGNTATLTISRVEAGDEAVYYCQVWDSSSDHVVFGGGTKLTVLLEGQPKANPTVTLFPPSSEELQANKATLVCLISDFYPGAVTVAWKADGSPVKAGVETTKPSKQSNNKYAASSYLSLTPEQWKSHRSYSCQVTHEGSTVEKTVAPTECSGRADCGITSASYHQGVLSATILYEILLGKATLYAVLVSALVLMAMVKRKDSRGRAKRSGSGATNFSLLKQAGDVEENPGPTSMDWIWRILFLVGAATGAHSFEQLQLQESGPGLVKPSETLSLTCTVSGGSISSGSYFWGWIRQPPGKGLEWIGSIYYSGITYYNPSLKSRVTISVDTSKNQFSLKLSSVTAADTAVYYCARHDGAVAGLFDYWGQGTLVTVSSATRASTKGPSVFPLAPSSKSTSGGTAALGCLVKDYFPEPVTVSWNSGALTSGVHTFPAVLQSSGLYSLSSVVTVPSSSLGTQTYICNVNHKPSNTKVDKRVEPKSCIPEDTFFPSSDVPCDVKLVEKSFETDTNLNFQNLSVIGFRILLLKVAGFNLLMTLRLWSS

SEQ ID NO: 18819 - protein, 627 aa, Artificial Sequence
  Synthetic Polypeptide
MALPVTALLLPLALLLHAARPSYVLTQPPSVSVAPGQTARITCGGNNIGSKTVHWYQQPPGQAPVVVVYDDSDRPSGIPERFSGSNSGNTATLTISRVEAGDEAVYYCQVWDSSSDHVVFGGGTKLTVLLEGQPKANPTVTLFPPSSEELQANKATLVCLISDFYPGAVTVAWKADGSPVKAGVETTKPSKQSNNKYAASSYLSLTPEQWKSHRSYSCQVTHEGSTVEKTVAPTECSGRADCGFTSESYQQGVLSATILYEILLGKATLYAVLVSALVLMAMVKRKDSRGRAKRSGSGATNFSLLKQAGDVEENPGPTSMDWIWRILFLVGAATGAHSFEQLQLQESGPGLVKPSETLSLTCTVSGGSISSGSYFWGWIRQPPGKGLEWIGSIYYSGITYYNPSLKSRVTISVDTSKNQFSLKLSSVTAADTAVYYCARHDGAVAGLFDYWGQGTLVTVSSATRASTKGPSVFPLAPSSKSTSGGTAALGCLVKDYFPEPVTVSWNSGALTSGVHTFPAVLQSSGLYSLSSVVTVPSSSLGTQTYICNVNHKPSNTKVDKRVEPKSCIPEDTFFPSPESSCDVKLVEKSFETDTNLNFQNLSVIGFRILLLKVAGFNLLMTLRLWSS

SEQ ID NO: 18820 - protein, 453 aa, Artificial Sequence
  Synthetic Polypeptide
MALPVTALLLPLALLLHAARPSYVLTQPPSVSVAPGQTARITCGGNNIGSKTVHWYQQPPGQAPVVVVYDDSDRPSGIPERFSGSNSGNTATLTISRVEAGDEAVYYCQVWDSSSDHVVFGGGTKLTVLGGGGSGGGGSGGGGSQLQLQESGPGLVKPSETLSLTCTVSGGSISSGSYFWGWIRQPPGKGLEWIGSIYYSGITYYNPSLKSRVTISVDTSKNQFSLKLSSVTAADTAVYYCARHDGAVAGLFDYWGQGTLVTVSSATRDGNEEMGGITQTPYKVSISGTTVILTCPQYPGSEILWQHNDKNIGGDEDDKNIGSDEDHLSLKEFSELEQSGYYVCYPRGSKPEDANFYLYLRARVCENCMEMDVMSVATIVIVDICITGGLLLLVYYWSKNRKAKAKPVTRGAGAGGRQRGQNKERPPPVPNPDYEPIRKGQRDLYSGLNQRRI

SEQ ID NO: 18821 - protein, 418 aa, Artificial Sequence
  Synthetic Polypeptide
MALPVTALLLPLALLLHAARPSYVLTQPPSVSVAPGQTARITCGGNNIGSKTVHWYQQPPGQAPVVVVYDDSDRPSGIPERFSGSNSGNTATLTISRVEAGDEAVYYCQVWDSSSDHVVFGGGTKLTVLGGGGSGGGGSGGGGSQLQLQESGPGLVKPSETLSLTCTVSGGSISSGSYFWGWIRQPPGKGLEWIGSIYYSGITYYNPSLKSRVTISVDTSKNQFSLKLSSVTAADTAVYYCARHDGAVAGLFDYWGQGTLVTVSSATRFKIPIEELEDRVFVNCNTSITWVEGTVGTLLSDITRLDLGKRILDPRGIYRCNGTDIYKDKESTVQVHYRMCQSCVELDPATVAGIIVTDVIATLLLALGVFCFAGHETGRLSGAADTQALLRNDQVYQPLRDRDDAQYSHLGGNWARNK

SEQ ID NO: 18822 - protein, 428 aa, Artificial Sequence
  Synthetic Polypeptide
MALPVTALLLPLALLLHAARPSYVLTQPPSVSVAPGQTARITCGGNNIGSKTVHWYQQPPGQAPVVVVYDDSDRPSGIPERFSGSNSGNTATLTISRVEAGDEAVYYCQVWDSSSDHVVFGGGTKLTVLGGGGSGGGGSGGGGSQLQLQESGPGLVKPSETLSLTCTVSGGSISSGSYFWGWIRQPPGKGLEWIGSIYYSGITYYNPSLKSRVTISVDTSKNQFSLKLSSVTAADTAVYYCARHDGAVAGLFDYWGQGTLVTVSSATRQSIKGNHLVKVYDYQEDGSVLLTCDAEAKNITWFKDGKMIGFLTEDKKKWNLGSNAKDPRGMYQCKGSQNKSKPLQVYYRMCQNCIELNAATISGFLFAEIVSIFVLAVGVYFIAGQDGVRQSRASDKQTLLPNDQLYQPLKDREDDQYSHLQGNQLRRN

SEQ ID NO: 18823 - protein, 411 aa, Artificial Sequence
  Synthetic Polypeptide
MALPVTALLLPLALLLHAARPSYVLTQPPSVSVAPGQTARITCGGNNIGSKTVHWYQQPPGQAPVVVVYDDSDRPSGIPERFSGSNSGNTATLTISRVEAGDEAVYYCQVWDSSSDHVVFGGGTKLTVLGGGGSGGGGSGGGGSQLQLQESGPGLVKPSETLSLTCTVSGGSISSGSYFWGWIRQPPGKGLEWIGSIYYSGITYYNPSLKSRVTISVDTSKNQFSLKLSSVTAADTAVYYCARHDGAVAGLFDYWGQGTLVTVSSATRQSFGLLDPKLCYLLDGILFIYGVILTALFLRVKFSRSADAPAYQQGQNQLYNELNLGRREEYDVLDKRRGRDPEMGGKPQRRKNPQEGLYNELQKDKMAEAYSEIGMKGERRRGKGHDGLYQGLSTATKDTYDALHMQALPPR

SEQ ID NO: 18824 - protein, 453 aa, Artificial Sequence
  Synthetic Polypeptide
MALPVTALLLPLALLLHAARPQLQLQESGPGLVKPSETLSLTCTVSGGSISSGSYFWGWIRQPPGKGLEWIGSIYYSGITYYNPSLKSRVTISVDTSKNQFSLKLSSVTAADTAVYYCARHDGAVAGLFDYWGQGTLVTVSSAGGGGSGGGGSGGGGSSYVLTQPPSVSVAPGQTARITCGGNNIGSKTVHWYQQPPGQAPVVVVYDDSDRPSGIPERFSGSNSGNTATLTISRVEAGDEAVYYCQVWDSSSDHVVFGGGTKLTVLTRDGNEEMGGITQTPYKVSISGTTVILTCPQYPGSEILWQHNDKNIGGDEDDKNIGSDEDHLSLKEFSELEQSGYYVCYPRGSKPEDANFYLYLRARVCENCMEMDVMSVATIVIVDICITGGLLLLVYYWSKNRKAKAKPVTRGAGAGGRQRGQNKERPPPVPNPDYEPIRKGQRDLYSGLNQRRI

SEQ ID NO: 18825 - protein, 418 aa, Artificial Sequence
  Synthetic Polypeptide
MALPVTALLLPLALLLHAARPQLQLQESGPGLVKPSETLSLTCTVSGGSISSGSYFWGWIRQPPGKGLEWIGSIYYSGITYYNPSLKSRVTISVDTSKNQFSLKLSSVTAADTAVYYCARHDGAVAGLFDYWGQGTLVTVSSAGGGGSGGGGSGGGGSSYVLTQPPSVSVAPGQTARITCGGNNIGSKTVHWYQQPPGQAPVVVVYDDSDRPSGIPERFSGSNSGNTATLTISRVEAGDEAVYYCQVWDSSSDHVVFGGGTKLTVLTRFKIPIEELEDRVFVNCNTSITWVEGTVGTLLSDITRLDLGKRILDPRGIYRCNGTDIYKDKESTVQVHYRMCQSCVELDPATVAGIIVTDVIATLLLALGVFCFAGHETGRLSGAADTQALLRNDQVYQPLRDRDDAQYSHLGGNWARNK

SEQ ID NO: 18826 - protein, 428 aa, Artificial Sequence
  Synthetic Polypeptide
MALPVTALLLPLALLLHAARPQLQLQESGPGLVKPSETLSLTCTVSGGSISSGSYFWGWIRQPPGKGLEWIGSIYYSGITYYNPSLKSRVTISVDTSKNQFSLKLSSVTAADTAVYYCARHDGAVAGLFDYWGQGTLVTVSSAGGGGSGGGGSGGGGSSYVLTQPPSVSVAPGQTARITCGGNNIGSKTVHWYQQPPGQAPVVVVYDDSDRPSGIPERFSGSNSGNTATLTISRVEAGDEAVYYCQVWDSSSDHVVFGGGTKLTVLTRQSIKGNHLVKVYDYQEDGSVLLTCDAEAKNITWFKDGKMIGFLTEDKKKWNLGSNAKDPRGMYQCKGSQNKSKPLQVYYRMCQNCIELNAATISGFLFAEIVSIFVLAVGVYFIAGQDGVRQSRASDKQTLLPNDQLYQPLKDREDDQYSHLQGNQLRRN

SEQ ID NO: 18827 - protein, 411 aa, Artificial Sequence
  Synthetic Polypeptide
MALPVTALLLPLALLLHAARPQLQLQESGPGLVKPSETLSLTCTVSGGSISSGSYFWGWIRQPPGKGLEWIGSIYYSGITYYNPSLKSRVTISVDTSKNQFSLKLSSVTAADTAVYYCARHDGAVAGLFDYWGQGTLVTVSSAGGGGSGGGGSGGGGSSYVLTQPPSVSVAPGQTARITCGGNNIGSKTVHWYQQPPGQAPVVVVYDDSDRPSGIPERFSGSNSGNTATLTISRVEAGDEAVYYCQVWDSSSDHVVFGGGTKLTVLTRQSFGLLDPKLCYLLDGILFIYGVILTALFLRVKFSRSADAPAYQQGQNQLYNELNLGRREEYDVLDKRRGRDPEMGGKPQRRKNPQEGLYNELQKDKMAEAYSEIGMKGERRRGKGHDGLYQGLSTATKDTYDALHMQALPPR

SEQ ID NO: 18828 - protein, 644 aa, Artificial Sequence
  Synthetic Polypeptide
MALPVTALLLPLALLLHAARPSYVLTQPPSVSVAPGQTARITCGGNNIGSKTVHWYQQPPGQAPVVVVYDDSDRPSGIPERFSGSNSGNTATLTISRVEAGDEAVYYCQVWDSSSDHVVFGGGTKLTVLGGGGSGGGGSGGGGSQLQLQESGPGLVKPSETLSLTCTVSGGSISSGSYFWGWIRQPPGKGLEWIGSIYYSGITYYNPSLKSRVTISVDTSKNQFSLKLSSVTAADTAVYYCARHDGAVAGLFDYWGQGTLVTVSSATRGSGIQNPDPAVYQLRDSKSSDKSVCLFTDFDSQTNVSQSKDSDVYITDKTVLDMRSMDFKSNSAVAWSNKSDFACANAFNNSIIPEDTFFPSPESSCDVKLVEKSFETDTNLNFQNLSVIGFRILLLKVAGFNLLMTLRLWSSRAKRSGSGVKQTLNFDLLKLAGDVESNPGPSRGHMTEYKPTVRLATRDDVPRAVRTLAAAFADYPATRHTVDPDRHIERVTELQELFLTRVGLDIGKVWVADDGAAVAVWTTPESVEAGAVFAEIGPRMAELSGSRLAAQQQMEGLLAPHRPKEPAWFLATVGVSPDHQGKGLGSAVVLPGVEAAERAGVPAFLETSAPRNLPFYERLGFTVTADVEVPEGPRTWCMTRKPGA

SEQ ID NO: 18829 - protein, 676 aa, Artificial Sequence
  Synthetic Polypeptide
MALPVTALLLPLALLLHAARPSYVLTQPPSVSVAPGQTARITCGGNNIGSKTVHWYQQPPGQAPVVVVYDDSDRPSGIPERFSGSNSGNTATLTISRVEAGDEAVYYCQVWDSSSDHVVFGGGTKLTVLGGGGSGGGGSGGGGSQLQLQESGPGLVKPSETLSLTCTVSGGSISSGSYFWGWIRQPPGKGLEWIGSIYYSGITYYNPSLKSRVTISVDTSKNQFSLKLSSVTAADTAVYYCARHDGAVAGLFDYWGQGTLVTVSSALEDLKNVFPPEVAVFEPSEAEISHTQKATLVCLATGFYPDHVELSWWVNGKEVHSGVSTDPQPLKEQPALNDSRYCLSSRLRVSATFWQNPRNHFRCQVQFYGLSENDEWTQDRAKPVTQIVSAEAWGRADCGFTSESYQQGVLSATILYEILLGKATLYAVLVSALVLMAMVKRKDSRGRAKRSGSGATNFSLLKQAGDVEENPGPTRGHMTEYKPTVRLATRDDVPRAVRTLAAAFADYPATRHTVDPDRHIERVTELQELFLTRVGLDIGKVWVADDGAAVAVWTTPESVEAGAVFAEIGPRMAELSGSRLAAQQQMEGLLAPHRPKEPAWFLATVGVSPDHQGKGLGSAVVLPGVEAAERAGVPAFLETSAPRNLPFYERLGFTVTADVEVPEGPRTWCMTRKPGA

SEQ ID NO: 18830 - protein, 726 aa, Artificial Sequence
  Synthetic Polypeptide
MALPVTALLLPLALLLHAARPSYVLTQPPSVSVAPGQTARITCGGNNIGSKTVHWYQQPPGQAPVVVVYDDSDRPSGIPERFSGSNSGNTATLTISRVEAGDEAVYYCQVWDSSSDHVVFGGGTKLTVLGGGGSGGGGSGGGGSQLQLQESGPGLVKPSETLSLTCTVSGGSISSGSYFWGWIRQPPGKGLEWIGSIYYSGITYYNPSLKSRVTISVDTSKNQFSLKLSSVTAADTAVYYCARHDGAVAGLFDYWGQGTLVTVSSATREQKLISEEDLGSGTPFPSLAPPIMLLVDGKQQMVVVCLVLDVAPPGLDSPIWFSAGNGSALDAFTYGPSPATDGTWTNLAHLSLPSEELASWEPLVCHTGPGAEGHSRSTQPMHLSGEASTARTCPQEPLRGTPGGALWLGVLRLLLFKLLLFDLLLTCSCLCDPAGPLPSPATTTRLRALGSHRLHPATETGGREATSSPRPQPRDRRWGDTPPGRKPGSPVRAKRSGSGVKQTLNFDLLKLAGDVESNPGPSRSRGHMTEYKPTVRLATRDDVPRAVRTLAAAFADYPATRHTVDPDRHIERVTELQELFLTRVGLDIGKVWVADDGAAVAVWTTPESVEAGAVFAEIGPRMAELSGSRLAAQQQMEGLLAPHRPKEPAWFLATVGVSPDHQGKGLGSAVVLPGVEAAERAGVPAFLETSAPRNLPFYERLGFTVTADVEVPEGPRTWCMTRKPGA

SEQ ID NO: 18831 - protein, 539 aa, Artificial Sequence
  Synthetic Polypeptide
MALPVTALLLPLALLLHAARPSYVLTQPPSVSVAPGQTARITCGGNNIGSKTVHWYQQPPGQAPVVVVYDDSDRPSGIPERFSGSNSGNTATLTISRVEAGDEAVYYCQVWDSSSDHVVFGGGTKLTVLLEDLKNVFPPEVAVFEPSEAEISHTQKATLVCLATGFYPDHVELSWWVNGKEVHSGVSTDPQPLKEQPALNDSRYCLSSRLRVSATFWQNPRNHFRCQVQFYGLSENDEWTQDRAKPVTQIVSAEAWGRADCGFTSESYQQGVLSATILYEILLGKATLYAVLVSALVLMAMVKRKDSRGRAKRSGSGATNFSLLKQAGDVEENPGPTRGHMTEYKPTVRLATRDDVPRAVRTLAAAFADYPATRHTVDPDRHIERVTELQELFLTRVGLDIGKVWVADDGAAVAVWTTPESVEAGAVFAEIGPRMAELSGSRLAAQQQMEGLLAPHRPKEPAWFLATVGVSPDHQGKGLGSAVVLPGVEAAERAGVPAFLETSAPRNLPFYERLGFTVTADVEVPEGPRTWCMTRKPGA

SEQ ID NO: 18832 - protein, 309 aa, Artificial Sequence
  Synthetic Polypeptide
MALPVTALLLPLALLLHAARPSYVLTQPPSVSVAPGQTARITCGGNNIGSKTVHWYQQPPGQAPVVVVYDDSDRPSGIPERFSGSNSGNTATLTISRVEAGDEAVYYCQVWDSSSDHVVFGGGTKLTVLLEDLKNVFPPEVAVFEPSEAEISHTQKATLVCLATGFYPDHVELSWWVNGKEVHSGVSTDPQPLKEQPALNDSRYCLSSRLRVSATFWQNPRNHFRCQVQFYGLSENDEWTQDRAKPVTQIVSAEAWGRADCGFTSESYQQGVLSATILYEILLGKATLYAVLVSALVLMAMVKRKDSRG

SEQ ID NO: 18833 - protein, 451 aa, Artificial Sequence; identical to SEQ ID NO: 18626
  Synthetic Polypeptide

SEQ ID NO: 18834 - protein, 285 aa, Artificial Sequence; identical to SEQ ID NO: 18627
  Synthetic Polypeptide

SEQ ID NO: 18835 - protein, 557 aa, Artificial Sequence
  Synthetic Polypeptide
MALPVTALLLPLALLLHAARPSYVLTQPPSVSVAPGQTARITCGGNNIGSKTVHWYQQPPGQAPVVVVYDDSDRPSGIPERFSGSNSGNTATLTISRVEAGDEAVYYCQVWDSSSDHVVFGGGTKLTVLLEGKPIPNPLLGLDSTGSGEDLKNVFPPEVAVFEPSEAEISHTQKATLVCLATGFYPDHVELSWWVNGKEVHSGVCTDPQPLKEQPALNDSRYCLSSRLRVSATFWQNPRNHFRCQVQFYGLSENDEWTQDRAKPVTQIVSAEAWGRADCGFTSESYQQGVLSATILYEILLGKATLYAVLVSALVLMAMVKRKDSRGRAKRSGSGATNFSLLKQAGDVEENPGPTRGHMTEYKPTVRLATRDDVPRAVRTLAAAFADYPATRHTVDPDRHIERVTELQELFLTRVGLDIGKVWVADDGAAVAVWTTPESVEAGAVFAEIGPRMAELSGSRLAAQQQMEGLLAPHRPKEPAWFLATVGVSPDHQGKGLGSAVVLPGVEAAERAGVPAFLETSAPRNLPFYERLGFTVTADVEVPEGPRTWCMTRKPGA

SEQ ID NO: 18836 - protein, 327 aa, Artificial Sequence
  Synthetic Polypeptide
MALPVTALLLPLALLLHAARPSYVLTQPPSVSVAPGQTARITCGGNNIGSKTVHWYQQPPGQAPVVVVYDDSDRPSGIPERFSGSNSGNTATLTISRVEAGDEAVYYCQVWDSSSDHVVFGGGTKLTVLLEGKPIPNPLLGLDSTGSGEDLKNVFPPEVAVFEPSEAEISHTQKATLVCLATGFYPDHVELSWWVNGKEVHSGVCTDPQPLKEQPALNDSRYCLSSRLRVSATFWQNPRNHFRCQVQFYGLSENDEWTQDRAKPVTQIVSAEAWGRADCGFTSESYQQGVLSATILYEILLGKATLYAVLVSALVLMAMVKRKDSRG

SEQ ID NO: 18837 - protein, 463 aa, Artificial Sequence; identical to SEQ ID NO: 18630
  Synthetic Polypeptide

SEQ ID NO: 18838 - protein, 297 aa, Artificial Sequence; identical to SEQ ID NO: 18631
  Synthetic Polypeptide

SEQ ID NO: 18839 - protein, 644 aa, Artificial Sequence
  Synthetic Polypeptide
MALPVTALLLPLALLLHAARPSYVLTQPPSVSVAPGQTARITCGGNNIGSKTVHWYQQPPGQAPVVVVYDDSDRPSGIPERFSGSNSGNTATLTISRVEAGDEAVYYCQVWDSSSDHVVFGGGTKLTVLGGGGSGGGGSGGGGSQLQLQESGPGLVKPSETLSLTCTVSGGSISSGSYFWGWIRQPPGKGLEWIGSIYYSGITYYNPSLKSRVTISVDTSKNQFSLKLSSVTAADTAVYYCARHDGAVAGLFDYWGQGTLVTVSSATRGSGIQNPDPAVYQLRDSKSSDKSVCLFTDFDSQTNVSQSKDSDVYITDKTVLDMRSMDFKSNSAVAWSNKSDFACANAFNNSIIPEDTFFPSSDVPCDVKLVEKSFETDTNLNFQNLSVIGFRILLLKVAGFNLLMTLRLWSSRAKRSGSGVKQTLNFDLLKLAGDVESNPGPSRGHMTEYKPTVRLATRDDVPRAVRTLAAAFADYPATRHTVDPDRHIERVTELQELFLTRVGLDIGKVWVADDGAAVAVWTTPESVEAGAVFAEIGPRMAELSGSRLAAQQQMEGLLAPHRPKEPAWFLATVGVSPDHQGKGLGSAVVLPGVEAAERAGVPAFLETSAPRNLPFYERLGFTVTADVEVPEGPRTWCMTRKPGA

SEQ ID NO: 18840 - protein, 676 aa, Artificial Sequence
  Synthetic Polypeptide
MALPVTALLLPLALLLHAARPSYVLTQPPSVSVAPGQTARITCGGNNIGSKTVHWYQQPPGQAPVVVVYDDSDRPSGIPERFSGSNSGNTATLTISRVEAGDEAVYYCQVWDSSSDHVVFGGGTKLTVLGGGGSGGGGSGGGGSQLQLQESGPGLVKPSETLSLTCTVSGGSISSGSYFWGWIRQPPGKGLEWIGSIYYSGITYYNPSLKSRVTISVDTSKNQFSLKLSSVTAADTAVYYCARHDGAVAGLFDYWGQGTLVTVSSALEDLKNVFPPEVAVFEPSKAEIAHTQKATLVCLATGFYPDHVELSWWVNGKEVHSGVSTDPQPLKEQPALNDSRYCLSSRLRVSATFWQNPRNHFRCQVQFYGLSENDEWTQDRAKPVTQIVSAEAWGRADCGITSASYHQGVLSATILYEILLGKATLYAVLVSALVLMAMVKRKDSRGRAKRSGSGATNFSLLKQAGDVEENPGPTRGHMTEYKPTVRLATRDDVPRAVRTLAAAFADYPATRHTVDPDRHIERVTELQELFLTRVGLDIGKVWVADDGAAVAVWTTPESVEAGAVFAEIGPRMAELSGSRLAAQQQMEGLLAPHRPKEPAWFLATVGVSPDHQGKGLGSAVVLPGVEAAERAGVPAFLETSAPRNLPFYERLGFTVTADVEVPEGPRTWCMTRKPGA

SEQ ID NO: 18841 - protein, 699 aa, Artificial Sequence
  Synthetic Polypeptide
MALPVTALLLPLALLLHAARPSYVLTQPPSVSVAPGQTARITCGGNNIGSKTVHWYQQPPGQAPVVVVYDDSDRPSGIPERFSGSNSGNTATLTISRVEAGDEAVYYCQVWDSSSDHVVFGGGTKLTVLGGGGSGGGGSGGGGSQLQLQESGPGLVKPSETLSLTCTVSGGSISSGSYFWGWIRQPPGKGLEWIGSIYYSGITYYNPSLKSRVTISVDTSKNQFSLKLSSVTAADTAVYYCARHDGAVAGLFDYWGQGTLVTVSSATRGSGGGGSGGGGSGDGNEEMGGITQTPYKVSISGTTVILTCPQYPGSEILWQHNDKNIGGDEDDKNIGSDEDHLSLKEFSELEQSGYYVCYPRGSKPEDANFYLYLRARVCENCMEMDVMSVATIVIVDICITGGLLLLVYYWSKNRKAKAKPVTRGAGAGGRQRGQNKERPPPVPNPDYEPIRKGQRDLYSGLNQRRIRAKRSGSGVKQTLNFDLLKLAGDVESNPGPSRGHMTEYKPTVRLATRDDVPRAVRTLAAAFADYPATRHTVDPDRHIERVTELQELFLTRVGLDIGKVWVADDGAAVAVWTTPESVEAGAVFAEIGPRMAELSGSRLAAQQQMEGLLAPHRPKEPAWFLATVGVSPDHQGKGLGSAVVLPGVEAAERAGVPAFLETSAPRNLPFYERLGFTVTADVEVPEGPRTWCMTRKPGA

SEQ ID NO: 18842 - protein, 664 aa, Artificial Sequence
  Synthetic Polypeptide
MALPVTALLLPLALLLHAARPSYVLTQPPSVSVAPGQTARITCGGNNIGSKTVHWYQQPPGQAPVVVVYDDSDRPSGIPERFSGSNSGNTATLTISRVEAGDEAVYYCQVWDSSSDHVVFGGGTKLTVLGGGGSGGGGSGGGGSQLQLQESGPGLVKPSETLSLTCTVSGGSISSGSYFWGWIRQPPGKGLEWIGSIYYSGITYYNPSLKSRVTISVDTSKNQFSLKLSSVTAADTAVYYCARHDGAVAGLFDYWGQGTLVTVSSATRGSGGGGSGGGGSGFKIPIEELEDRVFVNCNTSITWVEGTVGTLLSDITRLDLGKRILDPRGIYRCNGTDIYKDKESTVQVHYRMCQSCVELDPATVAGIIVTDVIATLLLALGVFCFAGHETGRLSGAADTQALLRNDQVYQPLRDRDDAQYSHLGGNWARNKRAKRSGSGVKQTLNFDLLKLAGDVESNPGPSRGHMTEYKPTVRLATRDDVPRAVRTLAAAFADYPATRHTVDPDRHIERVTELQELFLTRVGLDIGKVWVADDGAAVAVWTTPESVEAGAVFAEIGPRMAELSGSRLAAQQQMEGLLAPHRPKEPAWFLATVGVSPDHQGKGLGSAVVLPGVEAAERAGVPAFLETSAPRNLPFYERLGFTVTADVEVPEGPRTWCMTRKPGA

SEQ ID NO: 18843 - protein, 674 aa, Artificial Sequence
  Synthetic Polypeptide
MALPVTALLLPLALLLHAARPSYVLTQPPSVSVAPGQTARITCGGNNIGSKTVHWYQQPPGQAPVVVVYDDSDRPSGIPERFSGSNSGNTATLTISRVEAGDEAVYYCQVWDSSSDHVVFGGGTKLTVLGGGGSGGGGSGGGGSQLQLQESGPGLVKPSETLSLTCTVSGGSISSGSYFWGWIRQPPGKGLEWIGSIYYSGITYYNPSLKSRVTISVDTSKNQFSLKLSSVTAADTAVYYCARHDGAVAGLFDYWGQGTLVTVSSATRGSGGGGSGGGGSGQSIKGNHLVKVYDYQEDGSVLLTCDAEAKNITWFKDGKMIGFLTEDKKKWNLGSNAKDPRGMYQCKGSQNKSKPLQVYYRMCQNCIELNAATISGFLFAEIVSIFVLAVGVYFIAGQDGVRQSRASDKQTLLPNDQLYQPLKDREDDQYSHLQGNQLRRNRAKRSGSGVKQTLNFDLLKLAGDVESNPGPSRGHMTEYKPTVRLATRDDVPRAVRTLAAAFADYPATRHTVDPDRHIERVTELQELFLTRVGLDIGKVWVADDGAAVAVWTTPESVEAGAVFAEIGPRMAELSGSRLAAQQQMEGLLAPHRPKEPAWFLATVGVSPDHQGKGLGSAVVLPGVEAAERAGVPAFLETSAPRNLPFYERLGFTVTADVEVPEGPRTWCMTRKPGA

SEQ ID NO: 18844 - protein, 657 aa, Artificial Sequence
  Synthetic Polypeptide
MALPVTALLLPLALLLHAARPSYVLTQPPSVSVAPGQTARITCGGNNIGSKTVHWYQQPPGQAPVVVVYDDSDRPSGIPERFSGSNSGNTATLTISRVEAGDEAVYYCQVWDSSSDHVVFGGGTKLTVLGGGGSGGGGSGGGGSQLQLQESGPGLVKPSETLSLTCTVSGGSISSGSYFWGWIRQPPGKGLEWIGSIYYSGITYYNPSLKSRVTISVDTSKNQFSLKLSSVTAADTAVYYCARHDGAVAGLFDYWGQGTLVTVSSATRGSGGGGSGGGGSGQSFGLLDPKLCYLLDGILFIYGVILTALFLRVKFSRSADAPAYQQGQNQLYNELNLGRREEYDVLDKRRGRDPEMGGKPQRRKNPQEGLYNELQKDKMAEAYSEIGMKGERRRGKGHDGLYQGLSTATKDTYDALHMQALPPRRAKRSGSGVKQTLNFDLLKLAGDVESNPGPSRGHMTEYKPTVRLATRDDVPRAVRTLAAAFADYPATRHTVDPDRHIERVTELQELFLTRVGLDIGKVWVADDGAAVAVWTTPESVEAGAVFAEIGPRMAELSGSRLAAQQQMEGLLAPHRPKEPAWFLATVGVSPDHQGKGLGSAVVLPGVEAAERAGVPAFLETSAPRNLPFYERLGFTVTADVEVPEGPRTWCMTRKPGA

SEQ ID NO: 18845 - protein, 758 aa, Artificial Sequence
  Synthetic Polypeptide
MALPVTALLLPLALLLHAARPEVQLVESGGGLVQPGGSLRLSCAASGFSFSDFWMSWVRQAPGKGLEWVATISQAGSEKDYVDSVKGRFTISRDNAKKSLYLQMNSLRAEDTAVYYCASGVYSFDYRGQGTLVTVSSGTGGGGSGGGGSGGGGSEFSYVLTQPPSVSVAPGQTARITCGGNNIGSKTVHWYQQPPGQAPVVVVYDDSDRPSGIPERFSGSNSGNTATLTISRVEAGDEAVYYCQVWDSSSDHVVFGGGTKLTVLLEDLKNVFPPEVAVFEPSEAEISHTQKATLVCLATGFYPDHVELSWWVNGKEVHSGVCTDPQPLKEQPALNDSRYCLSSRLRVSATFWQNPRNHFRCQVQFYGLSENDEWTQDRAKPVTQIVSAEAWGRADCGFTSESYQQGVLSATILYEILLGKATLYAVLVSALVLMAMVKRKDSRGRAKRSGSGATNFSLLKQAGDVEENPGPTSMDWIWRILFLVGAATGAHSFEQLQLQESGPGLVKPSETLSLTCTVSGGSISSGSYFWGWIRQPPGKGLEWIGSIYYSGITYYNPSLKSRVTISVDTSKNQFSLKLSSVTAADTAVYYCARHDGAVAGLFDYWGQGTLVTVSSATRIQNPDPAVYQLRDSKSSDKSVCLFTDFDSQTNVSQSKDSDVYITDKCVLDMRSMDFKSNSAVAWSNKSDFACANAFNNSIIPEDTFFPSPESSCDVKLVEKSFETDTNLNFQNLSVIGFRILLLKVAGFNLLMTLRLWSS

SEQ ID NO: 18846 - protein, 762 aa, Artificial Sequence
  Synthetic Polypeptide
MALPVTALLLPLALLLHAARPEVQLVESGGGLVQPGGSLRLSCAASGFSFSDFWMSWVRQAPGKGLEWVATISQAGSEKDYVDSVKGRFTISRDNAKKSLYLQMNSLRAEDTAVYYCASGVYSFDYRGQGTLVTVSSGTGGGGSGGGGSGGGGSEFSYVLTQPPSVSVAPGQTARITCGGNNIGSKTVHWYQQPPGQAPVVVVYDDSDRPSGIPERFSGSNSGNTATLTISRVEAGDEAVYYCQVWDSSSDHVVFGGGTKLTVLLEIQNPDPAVYQLRDSKSSDKSVCLFTDFDSQTNVSQSKDSDVYITDKCVLDMRSMDFKSNSAVAWSNKSDFACANAFNNSIIPEDTFFPSPESSCDVKLVEKSFETDTNLNFQNLSVIGFRILLLKVAGFNLLMTLRLWSSRAKRSGSGVKQTLNFDLLKLAGDVESNPGPTSMDWIWRILFLVGAATGAHSFEQLQLQESGPGLVKPSETLSLTCTVSGGSISSGSYFWGWIRQPPGKGLEWIGSIYYSGITYYNPSLKSRVTISVDTSKNQFSLKLSSVTAADTAVYYCARHDGAVAGLFDYWGQGTLVTVSSATREDLKNVFPPEVAVFEPSEAEISHTQKATLVCLATGFYPDHVELSWWVNGKEVHSGVCTDPQPLKEQPALNDSRYCLSSRLRVSATFWQNPRNHFRCQVQFYGLSENDEWTQDRAKPVTQIVSAEAWGRADCGFTSESYQQGVLSATILYEILLGKATLYAVLVSALVLMAMVKRKDSRG

SEQ ID NO: 18847 - protein, 954 aa, Artificial Sequence
  Synthetic Polypeptide
MALPVTALLLPLALLLHAARPEVQLVESGGGLVQPGGSLRLSCAASGFSFSDFWMSWVRQAPGKGLEWVATISQAGSEKDYVDSVKGRFTISRDNAKKSLYLQMNSLRAEDTAVYYCASGVYSFDYRGQGTLVTVSSGTGGGGSGGGGSGGGGSEFSYVLTQPPSVSVAPGQTARITCGGNNIGSKTVHWYQQPPGQAPVVVVYDDSDRPSGIPERFSGSNSGNTATLTISRVEAGDEAVYYCQVWDSSSDHVVFGGGTKLTVLLEDLKNVFPPEVAVFEPSEAEISHTQKATLVCLATGFYPDHVELSWWVNGKEVHSGVSTDPQPLKEQPALNDSRYCLSSRLRVSATFWQNPRNHFRCQVQFYGLSENDEWTQDRAKPVTQIVSAEAWGRADCGSQSFGLLDPKLCYLLDGILFIYGVILTALFLRVKFSRSADAPAYQQGQNQLYNELNLGRREEYDVLDKRRGRDPEMGGKPQRRKNPQEGLYNELQKDKMAEAYSEIGMKGERRRGKGHDGLYQGLSTATKDTYDALHMQALPPRRAKRSGSGATNFSLLKQAGDVEENPGPTSMDWIWRILFLVGAATGAHSFEQLQLQESGPGLVKPSETLSLTCTVSGGSISSGSYFWGWIRQPPGKGLEWIGSIYYSGITYYNPSLKSRVTISVDTSKNQFSLKLSSVTAADTAVYYCARHDGAVAGLFDYWGQGTLVTVSSATRIQNPDPAVYQLRDSKSSDKSVCLFTDFDSQTNVSQSKDSDVYITDKTVLDMRSMDFKSNSAVAWSNKSDFACANAFNNSIIPEDTFFPSPESSCGTQSFGLLDPKLCYLLDGILFIYGVILTALFLRVKFSRSADAPAYQQGQNQLYNELNLGRREEYDVLDKRRGRDPEMGGKPQRRKNPQEGLYNELQKDKMAEAYSEIGMKGERRRGKGHDGLYQGLSTATKDTYDALHMQALPPR

SEQ ID NO: 18848 - protein, 784 aa, Artificial Sequence
  Synthetic Polypeptide
MALPVTALLLPLALLLHAARPEVQLVESGGGLVQPGGSLRLSCAASGFSFSDFWMSWVRQAPGKGLEWVATISQAGSEKDYVDSVKGRFTISRDNAKKSLYLQMNSLRAEDTAVYYCASGVYSFDYRGQGTLVTVSSGTGGGGSGGGGSGGGGSEFSYVLTQPPSVSVAPGQTARITCGGNNIGSKTVHWYQQPPGQAPVVVVYDDSDRPSGIPERFSGSNSGNTATLTISRVEAGDEAVYYCQVWDSSSDHVVFGGGTKLTVLLEGQPKANPTVTLFPPSSEELQANKATLVCLISDFYPGAVTVAWKADGSPVKAGVETTKPSKQSNNKYAASSYLSLTPEQWKSHRSYSCQVTHEGSTVEKTVAPTECSPIKTDVITMDPKDNCSKDANDTLLLQLTNTSAYYMYLLLLLKSVVYFAIITCCLLRRTAFCCNGEKSRAKRSGSGATNFSLLKQAGDVEENPGPTSMDWIWRILFLVGAATGAHSFEQLQLQESGPGLVKPSETLSLTCTVSGGSISSGSYFWGWIRQPPGKGLEWIGSIYYSGITYYNPSLKSRVTISVDTSKNQFSLKLSSVTAADTAVYYCARHDGAVAGLFDYWGQGTLVTVSSATRASTKGPSVFPLAPSSKSTSGGTAALGCLVKDYFPEPVTVSWNSGALTSGVHTFPAVLQSSGLYSLSSVVTVPSSSLGTQTYICNVNHKPSNTKVDKRVEPKSCEVKTDSTDHVKPKETENTKQPSKSCHKPKAIVHTEKVNMMSLTVLGLRMLFAKTVAVNFLLTAKLFFL

SEQ ID NO: 18849 - protein, 765 aa, Artificial Sequence
  Synthetic Polypeptide
MALPVTALLLPLALLLHAARPEVQLVESGGGLVQPGGSLRLSCAASGFSFSDFWMSWVRQAPGKGLEWVATISQAGSEKDYVDSVKGRFTISRDNAKKSLYLQMNSLRAEDTAVYYCASGVYSFDYRGQGTLVTVSSGTGGGGSGGGGSGGGGSEFSYVLTQPPSVSVAPGQTARITCGGNNIGSKTVHWYQQPPGQAPVVVVYDDSDRPSGIPERFSGSNSGNTATLTISRVEAGDEAVYYCQVWDSSSDHVVFGGGTKLTVLLEGQPKANPTVTLFPPSSEELQANKATLVCLISDFYPGAVTVAWKADGSPVKAGVETTKPSKQSNNKYAASSYLSLTPEQWKSHRSYSCQVTHEGSTVEKTVAPTECSGRADCGFTSESYQQGVLSATILYEILLGKATLYAVLVSALVLMAMVKRKDSRGRAKRSGSGVKQTLNFDLLKLAGDVESNPGPTSMDWIWRILFLVGAATGAHSFEQLQLQESGPGLVKPSETLSLTCTVSGGSISSGSYFWGWIRQPPGKGLEWIGSIYYSGITYYNPSLKSRVTISVDTSKNQFSLKLSSVTAADTAVYYCARHDGAVAGLFDYWGQGTLVTVSSATRASTKGPSVFPLAPSSKSTSGGTAALGCLVKDYFPEPVTVSWNSGALTSGVHTFPAVLQSSGLYSLSSVVTVPSSSLGTQTYICNVNHKPSNTKVDKRVEPKSCIPEDTFFPSPESSCDVKLVEKSFETDTNLNFQNLSVIGFRILLLKVAGFNLLMTLRLWSS

SEQ ID NO: 18850 - protein, 899 aa, Artificial Sequence
  Synthetic Polypeptide
MALPVTALLLPLALLLHAARPEVQLVESGGGLVQPGGSLRLSCAASGFSFSDFWMSWVRQAPGKGLEWVATISQAGSEKDYVDSVKGRFTISRDNAKKSLYLQMNSLRAEDTAVYYCASGVYSFDYRGQGTLVTVSSGTGGGGSGGGGSGGGGSEFSYVLTQPPSVSVAPGQTARITCGGNNIGSKTVHWYQQPPGQAPVVVVYDDSDRPSGIPERFSGSNSGNTATLTISRVEAGDEAVYYCQVWDSSSDHVVFGGGTKLTVLLEIQNPDPAVYQLRDSKSSDKSVCLFTDFDSQTNVSQSKDSDVYITDKCVLDMRSMDFKSNSAVAWSNKSDFACANAFNNSIIPEDTFFPSPESSCDVKLVEKSFETDTNLNFQNLSVIGFRILLLKVAGFNLLMTLRLWSSRAKRSGSGVKQTLNFDLLKLAGDVESNPGPTSMDWIWRILFLVGAATGAHSGPQLQLQESGPGLVKPSETLSLTCTVSGDSISSGDYYWGWIRQPPGKGLEWIGHIYYSGVTYYNPSLKSRVTISVDTSRNQFSLKLSSVTAADTAVYYCTREDSSNWRSRGQGTLVTVSSGSGGGGSGGGGSGGGGSFEQLQLQESGPGLVKPSETLSLTCTVSGGSISSGSYFWGWIRQPPGKGLEWIGSIYYSGITYYNPSLKSRVTISVDTSKNQFSLKLSSVTAADTAVYYCARHDGAVAGLFDYWGQGTLVTVSSATREDLKNVFPPEVAVFEPSEAEISHTQKATLVCLATGFYPDHVELSWWVNGKEVHSGVCTDPQPLKEQPALNDSRYCLSSRLRVSATFWQNPRNHFRCQVQFYGLSENDEWTQDRAKPVTQIVSAEAWGRADCGFTSESYQQGVLSATILYEILLGKATLYAVLVSALVLMAMVKRKDSRG

SEQ ID NO: 18851 - protein, 1091 aa, Artificial Sequence
  Synthetic Polypeptide
MALPVTALLLPLALLLHAARPEVQLVESGGGLVQPGGSLRLSCAASGFSFSDFWMSWVRQAPGKGLEWVATISQAGSEKDYVDSVKGRFTISRDNAKKSLYLQMNSLRAEDTAVYYCASGVYSFDYRGQGTLVTVSSGTGGGGSGGGGSGGGGSEFSYVLTQPPSVSVAPGQTARITCGGNNIGSKTVHWYQQPPGQAPVVVVYDDSDRPSGIPERFSGSNSGNTATLTISRVEAGDEAVYYCQVWDSSSDHVVFGGGTKLTVLLEDLKNVFPPEVAVFEPSEAEISHTQKATLVCLATGFYPDHVELSWWVNGKEVHSGVSTDPQPLKEQPALNDSRYCLSSRLRVSATFWQNPRNHFRCQVQFYGLSENDEWTQDRAKPVTQIVSAEAWGRADCGSQSFGLLDPKLCYLLDGILFIYGVILTALFLRVKFSRSADAPAYQQGQNQLYNELNLGRREEYDVLDKRRGRDPEMGGKPQRRKNPQEGLYNELQKDKMAEAYSEIGMKGERRRGKGHDGLYQGLSTATKDTYDALHMQALPPRRAKRSGSGATNFSLLKQAGDVEENPGPTSMDWIWRILFLVGAATGAHSGPQLQLQESGPGLVKPSETLSLTCTVSGDSISSGDYYWGWIRQPPGKGLEWIGHIYYSGVTYYNPSLKSRVTISVDTSRNQFSLKLSSVTAADTAVYYCTREDSSNWRSRGQGTLVTVSSGSGGGGSGGGGSGGGGSFEQLQLQESGPGLVKPSETLSLTCTVSGGSISSGSYFWGWIRQPPGKGLEWIGSIYYSGITYYNPSLKSRVTISVDTSKNQFSLKLSSVTAADTAVYYCARHDGAVAGLFDYWGQGTLVTVSSATRIQNPDPAVYQLRDSKSSDKSVCLFTDFDSQTNVSQSKDSDVYITDKTVLDMRSMDFKSNSAVAWSNKSDFACANAFNNSIIPEDTFFPSPESSCGTQSFGLLDPKLCYLLDGILFIYGVILTALFLRVKFSRSADAPAYQQGQNQLYNELNLGRREEYDVLDKRRGRDPEMGGKPQRRKNPQEGLYNELQKDKMAEAYSEIGMKGERRRGKGHDGLYQGLSTATKDTYDALHMQALPPR

SEQ ID NO: 18852 - protein, 921 aa, Artificial Sequence
  Synthetic Polypeptide
MALPVTALLLPLALLLHAARPEVQLVESGGGLVQPGGSLRLSCAASGFSFSDFWMSWVRQAPGKGLEWVATISQAGSEKDYVDSVKGRFTISRDNAKKSLYLQMNSLRAEDTAVYYCASGVYSFDYRGQGTLVTVSSGTGGGGSGGGGSGGGGSEFSYVLTQPPSVSVAPGQTARITCGGNNIGSKTVHWYQQPPGQAPVVVVYDDSDRPSGIPERFSGSNSGNTATLTISRVEAGDEAVYYCQVWDSSSDHVVFGGGTKLTVLLEGQPKANPTVTLFPPSSEELQANKATLVCLISDFYPGAVTVAWKADGSPVKAGVETTKPSKQSNNKYAASSYLSLTPEQWKSHRSYSCQVTHEGSTVEKTVAPTECSPIKTDVITMDPKDNCSKDANDTLLLQLTNTSAYYMYLLLLLKSVVYFAIITCCLLRRTAFCCNGEKSRAKRSGSGATNFSLLKQAGDVEENPGPTSMDWIWRILFLVGAATGAHSGPQLQLQESGPGLVKPSETLSLTCTVSGDSISSGDYYWGWIRQPPGKGLEWIGHIYYSGVTYYNPSLKSRVTISVDTSRNQFSLKLSSVTAADTAVYYCTREDSSNWRSRGQGTLVTVSSGSGGGGSGGGGSGGGGSFEQLQLQESGPGLVKPSETLSLTCTVSGGSISSGSYFWGWIRQPPGKGLEWIGSIYYSGITYYNPSLKSRVTISVDTSKNQFSLKLSSVTAADTAVYYCARHDGAVAGLFDYWGQGTLVTVSSATRASTKGPSVFPLAPSSKSTSGGTAALGCLVKDYFPEPVTVSWNSGALTSGVHTFPAVLQSSGLYSLSSVVTVPSSSLGTQTYICNVNHKPSNTKVDKRVEPKSCEVKTDSTDHVKPKETENTKQPSKSCHKPKAIVHTEKVNMMSLTVLGLRMLFAKTVAVNFLLTAKLFFL

SEQ ID NO: 18853 - protein, 902 aa, Artificial Sequence
  Synthetic Polypeptide
MALPVTALLLPLALLLHAARPEVQLVESGGGLVQPGGSLRLSCAASGFSFSDFWMSWVRQAPGKGLEWVATISQAGSEKDYVDSVKGRFTISRDNAKKSLYLQMNSLRAEDTAVYYCASGVYSFDYRGQGTLVTVSSGTGGGGSGGGGSGGGGSEFSYVLTQPPSVSVAPGQTARITCGGNNIGSKTVHWYQQPPGQAPVVVVYDDSDRPSGIPERFSGSNSGNTATLTISRVEAGDEAVYYCQVWDSSSDHVVFGGGTKLTVLLEGQPKANPTVTLFPPSSEELQANKATLVCLISDFYPGAVTVAWKADGSPVKAGVETTKPSKQSNNKYAASSYLSLTPEQWKSHRSYSCQVTHEGSTVEKTVAPTECSGRADCGFTSESYQQGVLSATILYEILLGKATLYAVLVSALVLMAMVKRKDSRGRAKRSGSGVKQTLNFDLLKLAGDVESNPGPTSMDWIWRILFLVGAATGAHSGPQLQLQESGPGLVKPSETLSLTCTVSGDSISSGDYYWGWIRQPPGKGLEWIGHIYYSGVTYYNPSLKSRVTISVDTSRNQFSLKLSSVTAADTAVYYCTREDSSNWRSRGQGTLVTVSSGSGGGGSGGGGSGGGGSFEQLQLQESGPGLVKPSETLSLTCTVSGGSISSGSYFWGWIRQPPGKGLEWIGSIYYSGITYYNPSLKSRVTISVDTSKNQFSLKLSSVTAADTAVYYCARHDGAVAGLFDYWGQGTLVTVSSATRASTKGPSVFPLAPSSKSTSGGTAALGCLVKDYFPEPVTVSWNSGALTSGVHTFPAVLQSSGLYSLSSVVTVPSSSLGTQTYICNVNHKPSNTKVDKRVEPKSCIPEDTFFPSPESSCDVKLVEKSFETDTNLNFQNLSVIGFRILLLKVAGFNLLMTLRLWSS

SEQ ID NO: 18854 - protein, 759 aa, Artificial Sequence
  Synthetic Polypeptide
MALPVTALLLPLALLLHAARPEVQVLESGGGLVQPGGSLRLSCAASGFTFSNFAMSWVRQAPGKGLEWVSTISGSAGTTDYADSVKGRFTISRDNSKKTLYLQMNSLRVEDTAVYYCADGRGPFFDYRGQGTLVTVSSGTGGGGSGGGGSGGGGSEFSYVLTQPPSVSVAPGQTARITCGGNNIGSKTVHWYQQPPGQAPVVVVYDDSDRPSGIPERFSGSNSGNTATLTISRVEAGDEAVYYCQVWDSSSDHVVFGGGTKLTVLLEDLKNVFPPEVAVFEPSEAEISHTQKATLVCLATGFYPDHVELSWWVNGKEVHSGVCTDPQPLKEQPALNDSRYCLSSRLRVSATFWQNPRNHFRCQVQFYGLSENDEWTQDRAKPVTQIVSAEAWGRADCGFTSESYQQGVLSATILYEILLGKATLYAVLVSALVLMAMVKRKDSRGRAKRSGSGATNFSLLKQAGDVEENPGPTSMDWIWRILFLVGAATGAHSFEQLQLQESGPGLVKPSETLSLTCTVSGGSISSGSYFWGWIRQPPGKGLEWIGSIYYSGITYYNPSLKSRVTISVDTSKNQFSLKLSSVTAADTAVYYCARHDGAVAGLFDYWGQGTLVTVSSATRIQNPDPAVYQLRDSKSSDKSVCLFTDFDSQTNVSQSKDSDVYITDKCVLDMRSMDFKSNSAVAWSNKSDFACANAFNNSIIPEDTFFPSPESSCDVKLVEKSFETDTNLNFQNLSVIGFRILLLKVAGFNLLMTLRLWSS

SEQ ID NO: 18855 - protein, 760 aa, Artificial Sequence
  Synthetic Polypeptide
MALPVTALLLPLALLLHAARPSYVLTQPPSVSVAPGQTARITCGGNNIGSKTVHWYQQPPGQAPVVVVYDDSDRPSGIPERFSGSNSGNTATLTISRVEAGDEAVYYCQVWDSSSDHVVFGGGTKLTVLLEDLKNVFPPEVAVFEPSEAEISHTQKATLVCLATGFYPDHVELSWWVNGKEVHSGVCTDPQPLKEQPALNDSRYCLSSRLRVSATFWQNPRNHFRCQVQFYGLSENDEWTQDRAKPVTQIVSAEAWGRADCGFTSESYQQGVLSATILYEILLGKATLYAVLVSALVLMAMVKRKDSRGRAKRSGSGATNFSLLKQAGDVEENPGPTSMDWIWRILFLVGAATGAHSGPEVQLVESGGGLVQAGGSLRLSCAASGRTFSMGWFRQAPGKEREFVAAITYSGGSPYYADSVKGRFTISRDNAKNTVYLQMNSLKPEDTAVYYCAANPTYGSDWNAENWGQGTQVTVSSGSGGGGSGGGGSGGGGSFEQLQLQESGPGLVKPSETLSLTCTVSGGSISSGSYFWGWIRQPPGKGLEWIGSIYYSGITYYNPSLKSRVTISVDTSKNQFSLKLSSVTAADTAVYYCARHDGAVAGLFDYWGQGTLVTVSSATRIQNPDPAVYQLRDSKSSDKSVCLFTDFDSQTNVSQSKDSDVYITDKCVLDMRSMDFKSNSAVAWSNKSDFACANAFNNSIIPEDTFFPSPESSCDVKLVEKSFETDTNLNFQNLSVIGFRILLLKVAGFNLLMTLRLWSS

SEQ ID NO: 18856 - protein, 887 aa, Artificial Sequence
  Synthetic Polypeptide
MALPVTALLLPLALLLHAARPSYVLTQPPSVSVAPGQTARITCGGNNIGSKTVHWYQQPPGQAPVVVVYDDSDRPSGIPERFSGSNSGNTATLTISRVEAGDEAVYYCQVWDSSSDHVVFGGGTKLTVLLEDLKNVFPPEVAVFEPSEAEISHTQKATLVCLATGFYPDHVELSWWVNGKEVHSGVCTDPQPLKEQPALNDSRYCLSSRLRVSATFWQNPRNHFRCQVQFYGLSENDEWTQDRAKPVTQIVSAEAWGRADCGFTSESYQQGVLSATILYEILLGKATLYAVLVSALVLMAMVKRKDSRGRAKRSGSGATNFSLLKQAGDVEENPGPTSMDWIWRILFLVGAATGAHSQLQLQESGPGLVKPSETLSLTCTVSGGSISSGDYYWGWIRQPPGKGLEWIGSISYSGSTYYNPSLKSRVTISVDTSRNQFSLKLSSVTAADTAVYYCTREDSSNWRSRGQGTLVTVSSSGGGGSGGGGSEVQLVESGGGLVQAGGSLRLSCAASGRTFSMGWFRQAPGKEREFVAAITYSGGSPYYADSVKGRFTISRDNAKNTVYLQMNSLKPEDTAVYYCAANPTYGSDWNAENWGQGTQVTVSSGSGGGGSGGGGSGGGGSFEQLQLQESGPGLVKPSETLSLTCTVSGGSISSGSYFWGWIRQPPGKGLEWIGSIYYSGITYYNPSLKSRVTISVDTSKNQFSLKLSSVTAADTAVYYCARHDGAVAGLFDYWGQGTLVTVSSATRIQNPDPAVYQLRDSKSSDKSVCLFTDFDSQTNVSQSKDSDVYITDKCVLDMRSMDFKSNSAVAWSNKSDFACANAFNNSIIPEDTFFPSPESSCDVKLVEKSFETDTNLNFQNLSVIGFRILLLKVAGFNLLMTLRLWSS

SEQ ID NO: 18857 - protein, 896 aa, Artificial Sequence
  Synthetic Polypeptide
MALPVTALLLPLALLLHAARPEVQVLESGGGLVQPGGSLRLSCAASGFTFSNFAMSWVRQAPGKGLEWVSTISGSAGTTDYADSVKGRFTISRDNSKKTLYLQMNSLRVEDTAVYYCADGRGPFFDYRGQGTLVTVSSGTGGGGSGGGGSGGGGSEFSYVLTQPPSVSVAPGQTARITCGGNNIGSKTVHWYQQPPGQAPVVVVYDDSDRPSGIPERFSGSNSGNTATLTISRVEAGDEAVYYCQVWDSSSDHVVFGGGTKLTVLLEDLKNVFPPEVAVFEPSEAEISHTQKATLVCLATGFYPDHVELSWWVNGKEVHSGVCTDPQPLKEQPALNDSRYCLSSRLRVSATFWQNPRNHFRCQVQFYGLSENDEWTQDRAKPVTQIVSAEAWGRADCGFTSESYQQGVLSATILYEILLGKATLYAVLVSALVLMAMVKRKDSRGRAKRSGSGATNFSLLKQAGDVEENPGPTSMDWIWRILFLVGAATGAHSGPEVQLVESGGGLVQAGGSLRLSCAASGRTFSMGWFRQAPGKEREFVAAITYSGGSPYYASSVRGRFTISRDNAKNTVYLQMNSLKPEDTAVYYCAANPTYGSDWNAENWGQGTQVTVSSGSGGGGSGGGGSGGGGSFEQLQLQESGPGLVKPSETLSLTCTVSGGSISSGSYFWGWIRQPPGKGLEWIGSIYYSGITYYNPSLKSRVTISVDTSKNQFSLKLSSVTAADTAVYYCARHDGAVAGLFDYWGQGTLVTVSSATRIQNPDPAVYQLRDSKSSDKSVCLFTDFDSQTNVSQSKDSDVYITDKCVLDMRSMDFKSNSAVAWSNKSDFACANAFNNSIIPEDTFFPSPESSCDVKLVEKSFETDTNLNFQNLSVIGFRILLLKVAGFNLLMTLRLWSS

SEQ ID NO: 18858 - protein, 727 aa, Artificial Sequence
  Synthetic Polypeptide
MALPVTALLLPLALLLHAARPSYVLTQPPSVSVAPGQTARITCGGKNIGSKSVHWYQQPPGQAPVVVVYDDSDRPSGIPERFSGSNSGNTATLTISRVEAGDEAVYYCQVWDSSSDHVVFGGGTKLTVLGGGGSGGGGSGGGGSQLQLQESGPGLVKPSETLSLTCTVSGGSISSSSYFWGWIRQPPGKGLEWIGSIYYSGITYYNPSLKSRVTISVDTSKNQFSLKLSSVTAADTAVYYCARHDGAVAGLFDYWGQGTLVTVSSATREQKLISEEDLAKPTTTPAPRPPTPAPTIASQPLSLRPEACRPAAGGAVHTRGLDFACDIYIWAPLAGTCGVLLLSLVITLYCKRGRKKLLYIFKQPFMRPVQTTQEEDGCSCRFPEEEEGGCELRVKFSRSADAPAYQQGQNQLYNELNLGRREEYDVLDKRRGRDPEMGGKPRRKNPQEGLYNELQKDKMAEAYSEIGMKGERRRGKGHDGLYQGLSTATKDTYDALHMQALPPRSSGSGEGRGSLLTCGDVEENPGPHMTEYKPTVRLATRDDVPRAVRTLAAAFADYPATRHTVDPDRHIERVTELQELFLTRVGLDIGKVWVADDGAAVAVWTTPESVEAGAVFAEIGPRMAELSGSRLAAQQQMEGLLAPHRPKEPAWFLATVGVSPDHQGKGLGSAVVLPGVEAAERAGVPAFLETSAPRNLPFYERLGFTVTADVEVPEGPRTWCMTRKPGA

SEQ ID NO: 18859 - protein, 721 aa, Artificial Sequence
  Synthetic Polypeptide
MALPVTALLLPLALLLHAARPSYVLTQPPSVSVAPGQTARITCGGKNIGSKSVHWYQQPPGQAPVVVVYDDSDRPSGIPERFSGSNSGNTATLTISRVEAGDEAVYYCQVWDSSSDHVVFGGGTKLTVLGGGGSGGGGSGGGGSQLQLQESGPGLVKPSETLSLTCTVSGGSISSSSYFWGWIRQPPGKGLEWIGSIYYSGITYYNPSLKSRVTISVDTSKNQFSLKLSSVTAADTAVYYCARHDGAVAGLFDYWGQGTLVTVSSATREQKLISEEDLKIEVMYPPPYLDNEKSNGTIIHVKGKHLCPSPLFPGPSKPFWVLVVVGGVLACYSLLVTVAFIIFWVRSKRSRLLHSDYMNMTPRRPGPTRKHYQPYAPPRDFAAYRSRVKFSRSADAPAYQQGQNQLYNELNLGRREEYDVLDKRRGRDPEMGGKPRRKNPQEGLYNELQKDKMAEAYSEIGMKGERRRGKGHDGLYQGLSTATKDTYDALHMQALPPRSSGSGEGRGSLLTCGDVEENPGPHMTEYKPTVRLATRDDVPRAVRTLAAAFADYPATRHTVDPDRHIERVTELQELFLTRVGLDIGKVWVADDGAAVAVWTTPESVEAGAVFAEIGPRMAELSGSRLAAQQQMEGLLAPHRPKEPAWFLATVGVSPDHQGKGLGSAVVLPGVEAAERAGVPAFLETSAPRNLPFYERLGFTVTADVEVPEGPRTWCMTRKPGA

SEQ ID NO: 18860 - protein, 498 aa, Artificial Sequence
  Synthetic Polypeptide
MALPVTALLLPLALLLHAARPSYVLTQPPSVSVAPGQTARITCGGKNIGSKSVHWYQQPPGQAPVVVVYDDSDRPSGIPERFSGSNSGNTATLTISRVEAGDEAVYYCQVWDSSSDHVVFGGGTKLTVLGGGGSGGGGSGGGGSQLQLQESGPGLVKPSETLSLTCTVSGGSISSSSYFWGWIRQPPGKGLEWIGSIYYSGITYYNPSLKSRVTISVDTSKNQFSLKLSSVTAADTAVYYCARHDGAVAGLFDYWGQGTLVTVSSATREQKLISEEDLKIEVMYPPPYLDNEKSNGTIIHVKGKHLCPSPLFPGPSKPFWVLVVVGGVLACYSLLVTVAFIIFWVRSKRSRLLHSDYMNMTPRRPGPTRKHYQPYAPPRDFAAYRSRVKFSRSADAPAYQQGQNQLYNELNLGRREEYDVLDKRRGRDPEMGGKPRRKNPQEGLYNELQKDKMAEAYSEIGMKGERRRGKGHDGLYQGLSTATKDTYDALHMQALPPR

SEQ ID NO: 18861 - protein, 504 aa, Artificial Sequence
  Synthetic Polypeptide
MALPVTALLLPLALLLHAARPSYVLTQPPSVSVAPGQTARITCGGKNIGSKSVHWYQQPPGQAPVVVVYDDSDRPSGIPERFSGSNSGNTATLTISRVEAGDEAVYYCQVWDSSSDHVVFGGGTKLTVLGGGGSGGGGSGGGGSQLQLQESGPGLVKPSETLSLTCTVSGGSISSSSYFWGWIRQPPGKGLEWIGSIYYSGITYYNPSLKSRVTISVDTSKNQFSLKLSSVTAADTAVYYCARHDGAVAGLFDYWGQGTLVTVSSATREQKLISEEDLAKPTTTPAPRPPTPAPTIASQPLSLRPEACRPAAGGAVHTRGLDFACDIYIWAPLAGTCGVLLLSLVITLYCKRGRKKLLYIFKQPFMRPVQTTQEEDGCSCRFPEEEEGGCELRVKFSRSADAPAYQQGQNQLYNELNLGRREEYDVLDKRRGRDPEMGGKPRRKNPQEGLYNELQKDKMAEAYSEIGMKGERRRGKGHDGLYQGLSTATKDTYDALHMQALPPR

SEQ ID NO: 18862 - protein, 504 aa, Artificial Sequence
  Synthetic Polypeptide
MALPVTALLLPLALLLHAARPQLQLQESGPGLVKPSETLSLTCTVSGGSISSSSYFWGWIRQPPGKGLEWIGSIYYSGITYYNPSLKSRVTISVDTSKNQFSLKLSSVTAADTAVYYCARHDGAVAGLFDYWGQGTLVTVSSAGGGGSGGGGSGGGGSSYVLTQPPSVSVAPGQTARITCGGKNIGSKSVHWYQQPPGQAPVVVVYDDSDRPSGIPERFSGSNSGNTATLTISRVEAGDEAVYYCQVWDSSSDHVVFGGGTKLTVLTREQKLISEEDLAKPTTTPAPRPPTPAPTIASQPLSLRPEACRPAAGGAVHTRGLDFACDIYIWAPLAGTCGVLLLSLVITLYCKRGRKKLLYIFKQPFMRPVQTTQEEDGCSCRFPEEEEGGCELRVKFSRSADAPAYQQGQNQLYNELNLGRREEYDVLDKRRGRDPEMGGKPRRKNPQEGLYNELQKDKMAEAYSEIGMKGERRRGKGHDGLYQGLSTATKDTYDALHMQALPPR

SEQ ID NO: 18863 - protein, 917 aa, Artificial Sequence
  Synthetic Polypeptide
MALPVTALLLPLALLLHAARPSYVLTQPPSVSVAPGQTARITCGGKNIGSKSVHWYQQPPGQAPVVVVYDDSDRPSGIPERFSGSNSGNTATLTISRVEAGDEAVYYCQVWDSSSDHVVFGGGTKLTVLGGGGSGGGGSGGGGSQLQLQESGPGLVKPSETLSLTCTVSGGSISSSSYFWGWIRQPPGKGLEWIGSIYYSGITYYNPSLKSRVTISVDTSKNQFSLKLSSVTAADTAVYYCARHDGAVAGLFDYWGQGTLVTVSSATREQKLISEEDLAKPTTTPAPRPPTPAPTIASQPLSLRPEACRPAAGGAVHTRGLDFACDIYIWAPLAGTCGVLLLSLVITLYCGRARVKFSRSADAPAYQQGQNQLYNELNLGRREEYDVLDKRRGRDPEMGGKPRRKNPQEGLYNELQKDKMAEAYSEIGMKGERRRGKGHDGLYQGLSTATKDTYDALHMQALPPRSRGSGATNFSLLKQAGDVEENPGPGIHMATYEVLCEVARKLGTDDREVVLFLLNVFIPQPTLAQLIGALRALKEEGRLTFPLLAECLFRAGRRDLLRDLLHLDPRFLERHLAGTMSYFSPYQLTVLHVDGELCARDIRSLIFLSKDTIGSRSTPQTFLHWVYCMENLDLLGPTDVDALMSMLRSLSRVDLQRQVQTLMGLHLSGPSHSQHYRHTPLETDFYDYKDDDDKTSGSGEGRGSLLTCGDVEENPGPHMTEYKPTVRLATRDDVPRAVRTLAAAFADYPATRHTVDPDRHIERVTELQELFLTRVGLDIGKVWVADDGAAVAVWTTPESVEAGAVFAEIGPRMAELSGSRLAAQQQMEGLLAPHRPKEPAWFLATVGVSPDHQGKGLGSAVVLPGVEAAERAGVPAFLETSAPRNLPFYERLGFTVTADVEVPEGPRTWCMTRKPGA

SEQ ID NO: 18864 - protein, 857 aa, Artificial Sequence
  Synthetic Polypeptide
MALPVTALLLPLALLLHAARPSYVLTQPPSVSVAPGQTARITCGGKNIGSKSVHWYQQPPGQAPVVVVYDDSDRPSGIPERFSGSNSGNTATLTISRVEAGDEAVYYCQVWDSSSDHVVFGGGTKLTVLLEIQNPDPAVYQLRDSKSSDKSVCLFTDFDSQTNVSQSKDSDVYITDKCVLDMRSMDFKSNSAVAWSNKSDFACANAFNNSIIPEDTFFPSSDVPCDVKLVEKSFETDTNLNFQNLSVIGFRILLLKVAGFNLLMTLRLWSSRAKRSGSGVKQTLNFDLLKLAGDVESNPGPTSMDWIWRILFLVGAATGAHSFEQLQLQESGPGLVKPSETLSLTCTVSGGSISSSSYFWGWIRQPPGKGLEWIGSIYYSGITYYNPSLKSRVTISVDTSKNQFSLKLSSVTAADTAVYYCARHDGAVAGLFDYWGQGTLVTVSSATREDLKNVFPPEVAVFEPSKAEIAHTQKATLVCLATGFYPDHVELSWWVNGKEVHSGVCTDPQPLKEQPALNDSRYCLSSRLRVSATFWQNPRNHFRCQVQFYGLSENDEWTQDRAKPVTQIVSAEAWGRADCGITSASYHQGVLSATILYEILLGKATLYAVLVSALVLMAMVKRKDSRGRAKRSGSGATNFSLLKQAGDVEENPGPSRGHMTEYKPTVRLATRDDVPRAVRTLAAAFADYPATRHTVDPDRHIERVTELQELFLTRVGLDIGKVWVADDGAAVAVWTTPESVEAGAVFAEIGPRMAELSGSRLAAQQQMEGLLAPHRPKEPAWFLATVGVSPDHQGKGLGSAVVLPGVEAAERAGVPAFLETSAPRNLPFYERLGFTVTADVEVPEGPRTWCMTRKPGA

SEQ ID NO: 18865 - protein, 856 aa, Artificial Sequence
  Synthetic Polypeptide
MALPVTALLLPLALLLHAARPSYVLTQPPSVSVAPGQTARITCGGKNIGSKSVHWYQQPPGQAPVVVVYDDSDRPSGIPERFSGSNSGNTATLTISRVEAGDEAVYYCQVWDSSSDHVVFGGGTKLTVLLEDLKNVFPPEVAVFEPSKAEIAHTQKATLVCLATGFYPDHVELSWWVNGKEVHSGVCTDPQPLKEQPALNDSRYCLSSRLRVSATFWQNPRNHFRCQVQFYGLSENDEWTQDRAKPVTQIVSAEAWGRADCGITSASYHQGVLSATILYEILLGKATLYAVLVSALVLMAMVKRKDSRGRAKRSGSGATNFSLLKQAGDVEENPGPTSMDWIWRILFLVGAATGAHSFEQLQLQESGPGLVKPSETLSLTCTVSGGSISSSSYFWGWIRQPPGKGLEWIGSIYYSGITYYNPSLKSRVTISVDTSKNQFSLKLSSVTAADTAVYYCARHDGAVAGLFDYWGQGTLVTVSSATRIQNPDPAVYQLRDSKSSDKSVCLFTDFDSQTNVSQSKDSDVYITDKCVLDMRSMDFKSNSAVAWSNKSDFACANAFNNSIIPEDTFFPSSDVPCDVKLVEKSFETDTNLNFQNLSVIGFRILLLKVAGFNLLMTLRLWSSRAKRSGSGVKQTLNFDLLKLAGDVESNPGPSRGHMTEYKPTVRLATRDDVPRAVRTLAAAFADYPATRHTVDPDRHIERVTELQELFLTRVGLDIGKVWVADDGAAVAVWTTPESVEAGAVFAEIGPRMAELSGSRLAAQQQMEGLLAPHRPKEPAWFLATVGVSPDHQGKGLGSAVVLPGVEAAERAGVPAFLETSAPRNLPFYERLGFTVTADVEVPEGPRTWCMTRKPGA

SEQ ID NO: 18866 - protein, 623 aa, Artificial Sequence
  Synthetic Polypeptide
MALPVTALLLPLALLLHAARPSYVLTQPPSVSVAPGQTARITCGGKNIGSKSVHWYQQPPGQAPVVVVYDDSDRPSGIPERFSGSNSGNTATLTISRVEAGDEAVYYCQVWDSSSDHVVFGGGTKLTVLLEDLKNVFPPEVAVFEPSEAEISHTQKATLVCLATGFYPDHVELSWWVNGKEVHSGVCTDPQPLKEQPALNDSRYCLSSRLRVSATFWQNPRNHFRCQVQFYGLSENDEWTQDRAKPVTQIVSAEAWGRADCGFTSESYQQGVLSATILYEILLGKATLYAVLVSALVLMAMVKRKDSRGRAKRSGSGATNFSLLKQAGDVEENPGPTSMDWIWRILFLVGAATGAHSFEQLQLQESGPGLVKPSETLSLTCTVSGGSISSSSYFWGWIRQPPGKGLEWIGSIYYSGITYYNPSLKSRVTISVDTSKNQFSLKLSSVTAADTAVYYCARHDGAVAGLFDYWGQGTLVTVSSATRIQNPDPAVYQLRDSKSSDKSVCLFTDFDSQTNVSQSKDSDVYITDKCVLDMRSMDFKSNSAVAWSNKSDFACANAFNNSIIPEDTFFPSPESSCDVKLVEKSFETDTNLNFQNLSVIGFRILLLKVAGFNLLMTLRLWSS

SEQ ID NO: 18867 - protein, 848 aa, Artificial Sequence
  Synthetic Polypeptide
MALPVTALLLPLALLLHAARPSYVLTQPPSVSVAPGQTARITCGGKNIGSKSVHWYQQPPGQAPVVVVYDDSDRPSGIPERFSGSNSGNTATLTISRVEAGDEAVYYCQVWDSSSDHVVFGGGTKLTVLLEDLKNVFPPEVAVFEPSEAEISHTQKATLVCLATGFYPDHVELSWWVNGKEVHSGVCTDPQPLKEQPALNDSRYCLSSRLRVSATFWQNPRNHFRCQVQFYGLSENDEWTQDRAKPVTQIVSAEAWGRADCGFTSESYQQGVLSATILYEILLGKATLYAVLVSALVLMAMVKRKDSRGRAKRSGSGATNFSLLKQAGDVEENPGPTSMDWIWRILFLVGAATGAHSFEQLQLQESGPGLVKPSETLSLTCTVSGGSISSSSYFWGWIRQPPGKGLEWIGSIYYSGITYYNPSLKSRVTISVDTSKNQFSLKLSSVTAADTAVYYCARHDGAVAGLFDYWGQGTLVTVSSATRIQNPDPAVYQLRDSKSSDKSVCLFTDFDSQTNVSQSKDSDVYITDKCVLDMRSMDFKSNSAVAWSNKSDFACANAFNNSIIPEDTFFPSPESSCDVKLVEKSFETDTNLNFQNLSVIGFRILLLKVAGFNLLMTLRLWSSRAKRSGSGVKQTLNFDLLKLAGDVESNPGPSRGGIHTMATYEVLCEVARKLGTDDREVVLFLLNVFIPQPTLAQLIGALRALKEEGRLTFPLLAECLFRAGRRDLLRDLLHLDPRFLERHLAGTMSYFSPYQLTVLHVDGELCARDIRSLIFLSKDTIGSRSTPQTFLHWVYCMENLDLLGPTDVDALMSMLRSLSRVDLQRQVQTLMGLHLSGPSHSQHYRHTP

SEQ ID NO: 18868 - protein, 627 aa, Artificial Sequence
  Synthetic Polypeptide
MALPVTALLLPLALLLHAARPSYVLTQPPSVSVAPGQTARITCGGKNIGSKSVHWYQQPPGQAPVVVVYDDSDRPSGIPERFSGSNSGNTATLTISRVEAGDEAVYYCQVWDSSSDHVVFGGGTKLTVLLEIQNPDPAVYQLRDSKSSDKSVCLFTDFDSQTNVSQSKDSDVYITDKCVLDMRSMDFKSNSAVAWSNKSDFACANAFNNSIIPEDTFFPSPESSCDVKLVEKSFETDTNLNFQNLSVIGFRILLLKVAGFNLLMTLRLWSSRAKRSGSGVKQTLNFDLLKLAGDVESNPGPTSMDWIWRILFLVGAATGAHSFEQLQLQESGPGLVKPSETLSLTCTVSGGSISSSSYFWGWIRQPPGKGLEWIGSIYYSGITYYNPSLKSRVTISVDTSKNQFSLKLSSVTAADTAVYYCARHDGAVAGLFDYWGQGTLVTVSSATREDLKNVFPPEVAVFEPSEAEISHTQKATLVCLATGFYPDHVELSWWVNGKEVHSGVCTDPQPLKEQPALNDSRYCLSSRLRVSATFWQNPRNHFRCQVQFYGLSENDEWTQDRAKPVTQIVSAEAWGRADCGFTSESYQQGVLSATILYEILLGKATLYAVLVSALVLMAMVKRKDSRG

SEQ ID NO: 18869 - protein, 849 aa, Artificial Sequence
  Synthetic Polypeptide
MALPVTALLLPLALLLHAARPSYVLTQPPSVSVAPGQTARITCGGKNIGSKSVHWYQQPPGQAPVVVVYDDSDRPSGIPERFSGSNSGNTATLTISRVEAGDEAVYYCQVWDSSSDHVVFGGGTKLTVLLEIQNPDPAVYQLRDSKSSDKSVCLFTDFDSQTNVSQSKDSDVYITDKCVLDMRSMDFKSNSAVAWSNKSDFACANAFNNSIIPEDTFFPSPESSCDVKLVEKSFETDTNLNFQNLSVIGFRILLLKVAGFNLLMTLRLWSSRAKRSGSGVKQTLNFDLLKLAGDVESNPGPTSMDWIWRILFLVGAATGAHSFEQLQLQESGPGLVKPSETLSLTCTVSGGSISSSSYFWGWIRQPPGKGLEWIGSIYYSGITYYNPSLKSRVTISVDTSKNQFSLKLSSVTAADTAVYYCARHDGAVAGLFDYWGQGTLVTVSSATREDLKNVFPPEVAVFEPSEAEISHTQKATLVCLATGFYPDHVELSWWVNGKEVHSGVCTDPQPLKEQPALNDSRYCLSSRLRVSATFWQNPRNHFRCQVQFYGLSENDEWTQDRAKPVTQIVSAEAWGRADCGFTSESYQQGVLSATILYEILLGKATLYAVLVSALVLMAMVKRKDSRGRAKRSGSGATNFSLLKQAGDVEENPGPSRGGIHTMATYEVLCEVARKLGTDDREVVLFLLNVFIPQPTLAQLIGALRALKEEGRLTFPLLAECLFRAGRRDLLRDLLHLDPRFLERHLAGTMSYFSPYQLTVLHVDGELCARDIRSLIFLSKDTIGSRSTPQTFLHWVYCMENLDLLGPTDVDALMSMLRSLSRVDLQRQVQTLMGLHLSGPSHSQHYRHTP

SEQ ID NO: 18870 - protein, 901 aa, Artificial Sequence
  Synthetic Polypeptide
MALPVTALLLPLALLLHAARPLEGKPIPNPLLGLDSTGSGEDLKNVFPPEVAVFEPSKAEIAHTQKATLVCLATGFYPDHVELSWWVNGKEVHSGVCTDPQPLKEQPALNDSRYCLSSRLRVSATFWQNPRNHFRCQVQFYGLSENDEWTQDRAKPVTQIVSAEAWGRADCGITSASYHQGVLSATILYEILLGKATLYAVLVSALVLMAMVKRKDSRGRAKRSGSGATNFSLLKQAGDVEENPGPTSMALPVTALLLPLALLLHAARPSYVLTQPPSVSVAPGQTARITCGGKNIGSKSVHWYQQPPGQAPVVVVYDDSDRPSGIPERFSGSNSGNTATLTISRVEAGDEAVYYCQVWDSSSDHVVFGGGTKLTVLGGGGSGGGGSGGGGSQLQLQESGPGLVKPSETLSLTCTVSGGSISSSSYFWGWIRQPPGKGLEWIGSIYYSGITYYNPSLKSRVTISVDTSKNQFSLKLSSVTAADTAVYYCARHDGAVAGLFDYWGQGTLVTVSSATREQKLISEEDGSGIQNPDPAVYQLRDSKSSDKSVCLFTDFDSQTNVSQSKDSDVYITDKCVLDMRSMDFKSNSAVAWSNKSDFACANAFNNSIIPEDTFFPSSDVPCDVKLVEKSFETDTNLNFQNLSVIGFRILLLKVAGFNLLMTLRLWSSRAKRSGSGVKQTLNFDLLKLAGDVESNPGPSRGHMTEYKPTVRLATRDDVPRAVRTLAAAFADYPATRHTVDPDRHIERVTELQELFLTRVGLDIGKVWVADDGAAVAVWTTPESVEAGAVFAEIGPRMAELSGSRLAAQQQMEGLLAPHRPKEPAWFLATVGVSPDHQGKGLGSAVVLPGVEAAERAGVPAFLETSAPRNLPFYERLGFTVTADVEVPEGPRTWCMTRKPGA

SEQ ID NO: 18871 - protein, 902 aa, Artificial Sequence
  Synthetic Polypeptide
MALPVTALLLPLALLLHAARPLEQKLISEEDLGSGDRPDPAVYQLRDSKSSDKSVCLFTDFDSQTNVSQSKDSDVYITDKCVLDMRSMDFKSNSAVAWSNKSDFACANAFNNSIIPEDTFFPSPESSCDVKLVEKSFETDTNLNFQNLSVIGFRILLLKVAGFNLLMTLRLWSSSSRAKRSGSGVKQTLNFDLLKLAGDVESNPGPTSMALPVTALLLPLALLLHAARPSYVLTQPPSVSVAPGQTARITCGGKNIGSKSVHWYQQPPGQAPVVVVYDDSDRPSGIPERFSGSNSGNTATLTISRVEAGDEAVYYCQVWDSSSDHVVFGGGTKLTVLGGGGSGGGGSGGGGSQLQLQESGPGLVKPSETLSLTCTVSGGSISSSSYFWGWIRQPPGKGLEWIGSIYYSGITYYNPSLKSRVTISVDTSKNQFSLKLSSVTAADTAVYYCARHDGAVAGLFDYWGQGTLVTVSSATRGKPIPNPLLGLDSTGSGEDLKNVFPPEVAVFEPSEAEISHTQKATLVCLATGFYPDHVELSWWVNGKEVHSGVCTDPQPLKEQPALNDSRYCLSSRLRVSATFWQNPRNHFRCQVQFYGLSENDEWTQDRAKPVTQIVSAEAWGRADCGFTSESYQQGVLSATILYEILLGKATLYAVLVSALVLMAMVKRKDSRGRAKRSGSGATNFSLLKQAGDVEENPGPSRGHMTEYKPTVRLATRDDVPRAVRTLAAAFADYPATRHTVDPDRHIERVTELQELFLTRVGLDIGKVWVADDGAAVAVWTTPESVEAGAVFAEIGPRMAELSGSRLAAQQQMEGLLAPHRPKEPAWFLATVGVSPDHQGKGLGSAVVLPGVEAAERAGVPAFLETSAPRNLPFYERLGFTVTADVEVPEGPRTWCMTRKPGA

SEQ ID NO: 18872 - protein, 856 aa, Artificial Sequence
  Synthetic Polypeptide
MALPVTALLLPLALLLHAARPSYVLTQPPSVSVAPGQTARITCGGKNIGSKSVHWYQQPPGQAPVVVVYDDSDRPSGIPERFSGSNSGNTATLTISRVEAGDEAVYYCQVWDSSSDHVVFGGGTKLTVLLEDLKNVFPPEVAVFEPSEAEISHTQKATLVCLATGFYPDHVELSWWVNGKEVHSGVSTDPQPLKEQPALNDSRYCLSSRLRVSATFWQNPRNHFRCQVQFYGLSENDEWTQDRAKPVTQIVSAEAWGRADCGFTSESYQQGVLSATILYEILLGKATLYAVLVSALVLMAMVKRKDSRGRAKRSGSGATNFSLLKQAGDVEENPGPTSMDWIWRILFLVGAATGAHSFEQLQLQESGPGLVKPSETLSLTCTVSGGSISSSSYFWGWIRQPPGKGLEWIGSIYYSGITYYNPSLKSRVTISVDTSKNQFSLKLSSVTAADTAVYYCARHDGAVAGLFDYWGQGTLVTVSSATRIQNPDPAVYQLRDSKSSDKSVCLFTDFDSQTNVSQSKDSDVYITDKTVLDMRSMDFKSNSAVAWSNKSDFACANAFNNSIIPEDTFFPSPESSCDVKLVEKSFETDTNLNFQNLSVIGFRILLLKVAGFNLLMTLRLWSSRAKRSGSGVKQTLNFDLLKLAGDVESNPGPSRGHMTEYKPTVRLATRDDVPRAVRTLAAAFADYPATRHTVDPDRHIERVTELQELFLTRVGLDIGKVWVADDGAAVAVWTTPESVEAGAVFAEIGPRMAELSGSRLAAQQQMEGLLAPHRPKEPAWFLATVGVSPDHQGKGLGSAVVLPGVEAAERAGVPAFLETSAPRNLPFYERLGFTVTADVEVPEGPRTWCMTRKPGA

SEQ ID NO: 18873 - protein, 938 aa, Artificial Sequence
  Synthetic Polypeptide
MALPVTALLLPLALLLHAARPSYVLTQPPSVSVAPGQTARITCGGKNIGSKSVHWYQQPPGQAPVVVVYDDSDRPSGIPERFSGSNSGNTATLTISRVEAGDEAVYYCQVWDSSSDHVVFGGGTKLTVLLEDLKNVFPPEVAVFEPSEAEISHTQKATLVCLATGFYPDHVELSWWVNGKEVHSGVSTDPQPLKEQPALNDSRYCLSSRLRVSATFWQNPRNHFRCQVQFYGLSENDEWTQDRAKPVTQIVSAEAWGRADCGFTSESYQQGVLSATILYEILLGKATLYAVLVSALVLMAMVKRKDSRGRAKRSGSGATNFSLLKQAGDVEENPGPTSMDWIWRILFLVGAATGAHSFEQLQLQESGPGLVKPSETLSLTCTVSGGSISSSSYFWGWIRQPPGKGLEWIGSIYYSGITYYNPSLKSRVTISVDTSKNQFSLKLSSVTAADTAVYYCARHDGAVAGLFDYWGQGTLVTVSSATREQKLISEEDGSGTPFPSLAPPIMLLVDGKQQMVVVCLVLDVAPPGLDSPIWFSAGNGSALDAFTYGPSPATDGTWTNLAHLSLPSEELASWEPLVCHTGPGAEGHSRSTQPMHLSGEASTARTCPQEPLRGTPGGALWLGVLRLLLFKLLLFDLLLTCSCLCDPAGPLPSPATTTRLRALGSHRLHPATETGGREATSSPRPQPRDRRWGDTPPGRKPGSPVRAKRSGSGVKQTLNFDLLKLAGDVESNPGPSRGHMTEYKPTVRLATRDDVPRAVRTLAAAFADYPATRHTVDPDRHIERVTELQELFLTRVGLDIGKVWVADDGAAVAVWTTPESVEAGAVFAEIGPRMAELSGSRLAAQQQMEGLLAPHRPKEPAWFLATVGVSPDHQGKGLGSAVVLPGVEAAERAGVPAFLETSAPRNLPFYERLGFTVTADVEVPEGPRTWCMTRKPGA

SEQ ID NO: 18874 - protein, 956 aa, Artificial Sequence
  Synthetic Polypeptide
MALPVTALLLPLALLLHAARPLEDLKNVFPPEVAVFEPSEAEISHTQKATLVCLATGFYPDHVELSWWVNGKEVHSGVSTDPQPLKEQPALNDSRYCLSSRLRVSATFWQNPRNHFRCQVQFYGLSENDEWTQDRAKPVTQIVSAEAWGRADCGFTSESYQQGVLSATILYEILLGKATLYAVLVSALVLMAMVKRKDSRGRAKRSGSGATNFSLLKQAGDVEENPGPTSMALPVTALLLPLALLLHAARPSYVLTQPPSVSVAPGQTARITCGGKNIGSKSVHWYQQPPGQAPVVVVYDDSDRPSGIPERFSGSNSGNTATLTISRVEAGDEAVYYCQVWDSSSDHVVFGGGTKLTVLGGGGSGGGGSGGGGSQLQLQESGPGLVKPSETLSLTCTVSGGSISSSSYFWGWIRQPPGKGLEWIGSIYYSGITYYNPSLKSRVTISVDTSKNQFSLKLSSVTAADTAVYYCARHDGAVAGLFDYWGQGTLVTVSSATREQKLISEEDLGSGTPFPSLAPPIMLLVDGKQQMVVVCLVLDVAPPGLDSPIWFSAGNGSALDAFTYGPSPATDGTWTNLAHLSLPSEELASWEPLVCHTGPGAEGHSRSTQPMHLSGEASTARTCPQEPLRGTPGGALWLGVLRLLLFKLLLFDLLLTCSCLCDPAGPLPSPATTTRLRALGSHRLHPATETGGREATSSPRPQPRDRRWGDTPPGRKPGSPVRAKRSGSGVKQTLNFDLLKLAGDVESNPGPSRSRGHMTEYKPTVRLATRDDVPRAVRTLAAAFADYPATRHTVDPDRHIERVTELQELFLTRVGLDIGKVWVADDGAAVAVWTTPESVEAGAVFAEIGPRMAELSGSRLAAQQQMEGLLAPHRPKEPAWFLATVGVSPDHQGKGLGSAVVLPGVEAAERAGVPAFLETSAPRNLPFYERLGFTVTADVEVPEGPRTWCMTRKPGA

SEQ ID NO: 18875 - protein, 893 aa, Artificial Sequence
  Synthetic Polypeptide
MALPVTALLLPLALLLHAARPSYVLTQPPSVSVAPGQTARITCGGKNIGSKSVHWYQQPPGQAPVVVVYDDSDRPSGIPERFSGSNSGNTATLTISRVEAGDEAVYYCQVWDSSSDHVVFGGGTKLTVLLEGKPIPNPLLGLDSTGSGDKQLDADVSPKPTIFLPSIAETKLQKAGTYLCLLEKFFPDVIKIHWQEKKSNTILGSQEGNTMKTNDTYMKFSWLTVPEKSLDKEHRCIVRHENNKNGVDQEIIFPPIKTDVITMDPKDNCSKDANDTLLLQLTNTSAYYMYLLLLLKSVVYFAIITCCLLRRTAFCCNGEKSRAKRSGSGATNFSLLKQAGDVEENPGPTSMDWIWRILFLVGAATGAHSFEQLQLQESGPGLVKPSETLSLTCTVSGGSISSSSYFWGWIRQPPGKGLEWIGSIYYSGITYYNPSLKSRVTISVDTSKNQFSLKLSSVTAADTAVYYCARHDGAVAGLFDYWGQGTLVTVSSATREQKLISEEDGSGSQPHTKPSVFVMKNGTNVACLVKEFYPKDIRINLVSSKKITEFDPAIVISPSGKYNAVKLGKYEDSNSVTCSVQHDNKTVHSTDFEVKTDSTDHVKPKETENTKQPSKSCHKPKAIVHTEKVNMMSLTVLGLRMLFAKTVAVNFLLTAKLFFLRAKRSGSGVKQTLNFDLLKLAGDVESNPGPSRGHMTEYKPTVRLATRDDVPRAVRTLAAAFADYPATRHTVDPDRHIERVTELQELFLTRVGLDIGKVWVADDGAAVAVWTTPESVEAGAVFAEIGPRMAELSGSRLAAQQQMEGLLAPHRPKEPAWFLATVGVSPDHQGKGLGSAVVLPGVEAAERAGVPAFLETSAPRNLPFYERLGFTVTADVEVPEGPRTWCMTRKPGA

SEQ ID NO: 18876 - protein, 631 aa, Artificial Sequence
  Synthetic Polypeptide
MALPVTALLLPLALLLHAARPSYVLTQPPSVSVAPGQTARITCGGKNIGSKSVHWYQQPPGQAPVVVVYDDSDRPSGIPERFSGSNSGNTATLTISRVEAGDEAVYYCQVWDSSSDHVVFGGGTKLTVLLESQPHTKPSVFVMKNGTNVACLVKEFYPKDIRINLVSSKKITEFDPAIVISPSGKYNAVKLGKYEDSNSVTCSVQHDNKTVHSTDFEVKTDSTDHVKPKETENTKQPSKSCHKPKAIVHTEKVNMMSLTVLGLRMLFAKTVAVNFLLTAKLFFLRAKRSGSGATNFSLLKQAGDVEENPGPTSMDWIWRILFLVGAATGAHSFEQLQLQESGPGLVKPSETLSLTCTVSGGSISSSSYFWGWIRQPPGKGLEWIGSIYYSGITYYNPSLKSRVTISVDTSKNQFSLKLSSVTAADTAVYYCARHDGAVAGLFDYWGQGTLVTVSSATRDKQLDADVSPKPTIFLPSIAETKLQKAGTYLCLLEKFFPDVIKIHWQEKKSNTILGSQEGNTMKTNDTYMKFSWLTVPEKSLDKEHRCIVRHENNKNGVDQEIIFPPIKTDVITMDPKDNCSKDANDTLLLQLTNTSAYYMYLLLLLKSVVYFAIITCCLLRRTAFCCNGEKS

SEQ ID NO: 18877 - protein, 908 aa, Artificial Sequence
  Synthetic Polypeptide
MALPVTALLLPLALLLHAARPLEGKPIPNPLLGLDSTGSGDKQLDADVSPKPTIFLPSIAETKLQKAGTYLCLLEKFFPDVIKIHWQEKKSNTILGSQEGNTMKTNDTYMKFSWLTVPEKSLDKEHRCIVRHENNKNGVDQEIIFPPIKTDVITMDPKDNCSKDANDTLLLQLTNTSAYYMYLLLLLKSVVYFAIITCCLLRRTAFCCNGEKSRAKRSGSGATNFSLLKQAGDVEENPGPTSMALPVTALLLPLALLLHAARPSYVLTQPPSVSVAPGQTARITCGGKNIGSKSVHWYQQPPGQAPVVVVYDDSDRPSGIPERFSGSNSGNTATLTISRVEAGDEAVYYCQVWDSSSDHVVFGGGTKLTVLGGGGSGGGGSGGGGSQLQLQESGPGLVKPSETLSLTCTVSGGSISSSSYFWGWIRQPPGKGLEWIGSIYYSGITYYNPSLKSRVTISVDTSKNQFSLKLSSVTAADTAVYYCARHDGAVAGLFDYWGQGTLVTVSSATREQKLISEEDGSGSQPHTKPSVFVMKNGTNVACLVKEFYPKDIRINLVSSKKITEFDPAIVISPSGKYNAVKLGKYEDSNSVTCSVQHDNKTVHSTDFEVKTDSTDHVKPKETENTKQPSKSCHKPKAIVHTEKVNMMSLTVLGLRMLFAKTVAVNFLLTAKLFFLRAKRSGSGVKQTLNFDLLKLAGDVESNPGPSRGHMTEYKPTVRLATRDDVPRAVRTLAAAFADYPATRHTVDPDRHIERVTELQELFLTRVGLDIGKVWVADDGAAVAVWTTPESVEAGAVFAEIGPRMAELSGSRLAAQQQMEGLLAPHRPKEPAWFLATVGVSPDHQGKGLGSAVVLPGVEAAERAGVPAFLETSAPRNLPFYERLGFTVTADVEVPEGPRTWCMTRKPGA

SEQ ID NO: 18878 - protein, 1033 aa, Artificial Sequence
  Synthetic Polypeptide
MALPVTALLLPLALLLHAARPSYVLTQPPSVSVAPGQTARITCGGKNIGSKSVHWYQQPPGQAPVVVVYDDSDRPSGIPERFSGSNSGNTATLTISRVEAGDEAVYYCQVWDSSSDHVVFGGGTKLTVLGQPKANPTVTLFPPSSEELQANKATLVCLISDFYPGAVTVAWKADGSPVKAGVETTKPSKQSNNKYAASSYLSLTPEQWKSHRSYSCQVTHEGSTVEKTVAPTECSGSQSFGLLDPKLCYLLDGILFIYGVILTALFLRVKFSRSADAPAYQQGQNQLYNELNLGRREEYDVLDKRRGRDPEMGGKPQRRKNPQEGLYNELQKDKMAEAYSEIGMKGERRRGKGHDGLYQGLSTATKDTYDALHMQALPPRRAKRSGSGATNFSLLKQAGDVEENPGPTSMDWIWRILFLVGAATGAHSFEQLQLQESGPGLVKPSETLSLTCTVSGGSISSSSYFWGWIRQPPGKGLEWIGSIYYSGITYYNPSLKSRVTISVDTSKNQFSLKLSSVTAADTAVYYCARHDGAVAGLFDYWGQGTLVTVSSAASTKGPSVFPLAPSSKSTSGGTAALGCLVKDYFPEPVTVSWNSGALTSGVHTFPAVLQSSGLYSLSSVVTVPSSSLGTQTYICNVNHKPSNTKVDKRVEPKSCGTQSFGLLDPKLCYLLDGILFIYGVILTALFLRVKFSRSADAPAYQQGQNQLYNELNLGRREEYDVLDKRRGRDPEMGGKPQRRKNPQEGLYNELQKDKMAEAYSEIGMKGERRRGKGHDGLYQGLSTATKDTYDALHMQALPPRRAKRSGSGVKQTLNFDLLKLAGDVESNPGPSRGHMTEYKPTVRLATRDDVPRAVRTLAAAFADYPATRHTVDPDRHIERVTELQELFLTRVGLDIGKVWVADDGAAVAVWTTPESVEAGAVFAEIGPRMAELSGSRLAAQQQMEGLLAPHRPKEPAWFLATVGVSPDHQGKGLGSAVVLPGVEAAERAGVPAFLETSAPRNLPFYERLGFTVTADVEVPEGPRTWCMTRKPGA

SEQ ID NO: 18879 - protein, 819 aa, Artificial Sequence
  Synthetic Polypeptide
MALPVTALLLPLALLLHAARPSYVLTQPPSVSVAPGQTARITCGGKNIGSKSVHWYQQPPGQAPVVVVYDDSDRPSGIPERFSGSNSGNTATLTISRVEAGDEAVYYCQVWDSSSDHVVFGGGTKLTVLLEDLKNVFPPEVAVFEPSEAEISHTQKATLVCLATGFYPDHVELSWWVNGKEVHSGVSTDPQPLKEQPALNDSRYCLSSRLRVSATFWQNPRNHFRCQVQFYGLSENDEWTQDRAKPVTQIVSAEAWGRADCGSQSFGLLDPKLCYLLDGILFIYGVILTALFLRVKFSRSADAPAYQQGQNQLYNELNLGRREEYDVLDKRRGRDPEMGGKPQRRKNPQEGLYNELQKDKMAEAYSEIGMKGERRRGKGHDGLYQGLSTATKDTYDALHMQALPPRRAKRSGSGATNFSLLKQAGDVEENPGPTSMDWIWRILFLVGAATGAHSFEQLQLQESGPGLVKPSETLSLTCTVSGGSISSSSYFWGWIRQPPGKGLEWIGSIYYSGITYYNPSLKSRVTISVDTSKNQFSLKLSSVTAADTAVYYCARHDGAVAGLFDYWGQGTLVTVSSATRIQNPDPAVYQLRDSKSSDKSVCLFTDFDSQTNVSQSKDSDVYITDKTVLDMRSMDFKSNSAVAWSNKSDFACANAFNNSIIPEDTFFPSPESSCGTQSFGLLDPKLCYLLDGILFIYGVILTALFLRVKFSRSADAPAYQQGQNQLYNELNLGRREEYDVLDKRRGRDPEMGGKPQRRKNPQEGLYNELQKDKMAEAYSEIGMKGERRRGKGHDGLYQGLSTATKDTYDALHMQALPPR

SEQ ID NO: 18880 - protein, 819 aa, Artificial Sequence
  Synthetic Polypeptide
MALPVTALLLPLALLLHAARPSYVLTQPPSVSVAPGQTARITCGGKNIGSKSVHWYQQPPGQAPVVVVYDDSDRPSGIPERFSGSNSGNTATLTISRVEAGDEAVYYCQVWDSSSDHVVFGGGTKLTVLLEDLKNVFPPEVAVFEPSKAEIAHTQKATLVCLATGFYPDHVELSWWVNGKEVHSGVCTDPQPLKEQPALNDSRYCLSSRLRVSATFWQNPRNHFRCQVQFYGLSENDEWTQDRAKPVTQIVSAEAWGRADCGSQSFGLLDPKLCYLLDGILFIYGVILTALFLRVKFSRSADAPAYQQGQNQLYNELNLGRREEYDVLDKRRGRDPEMGGKPQRRKNPQEGLYNELQKDKMAEAYSEIGMKGERRRGKGHDGLYQGLSTATKDTYDALHMQALPPRRAKRSGSGATNFSLLKQAGDVEENPGPTSMDWIWRILFLVGAATGAHSFEQLQLQESGPGLVKPSETLSLTCTVSGGSISSSSYFWGWIRQPPGKGLEWIGSIYYSGITYYNPSLKSRVTISVDTSKNQFSLKLSSVTAADTAVYYCARHDGAVAGLFDYWGQGTLVTVSSATRIQNPDPAVYQLRDSKSSDKSVCLFTDFDSQTNVSQSKDSDVYITDKCVLDMRSMDFKSNSAVAWSNKSDFACANAFNNSIIPEDTFFPSSDVPCGTQSFGLLDPKLCYLLDGILFIYGVILTALFLRVKFSRSADAPAYQQGQNQLYNELNLGRREEYDVLDKRRGRDPEMGGKPQRRKNPQEGLYNELQKDKMAEAYSEIGMKGERRRGKGHDGLYQGLSTATKDTYDALHMQALPPR

SEQ ID NO: 18881 - protein, 890 aa, Artificial Sequence
  Synthetic Polypeptide
MALPVTALLLPLALLLHAARPSYVLTQPPSVSVAPGQTARITCGGKNIGSKSVHWYQQPPGQAPVVVVYDDSDRPSGIPERFSGSNSGNTATLTISRVEAGDEAVYYCQVWDSSSDHVVFGGGTKLTVLLEGKPIPNPLLGLDSTGSGEDLKNVFPPEVAVFEPSEAEISHTQKATLVCLATGFYPDHVELSWWVNGKEVHSGVSTDPQPLKEQPALNDSRYCLSSRLRVSATFWQNPRNHFRCQVQFYGLSENDEWTQDRAKPVTQIVSAEAWGRADCGSQSFGLLDPKLCYLLDGILFIYGVILTALFLRVKFSRSADAPAYQQGQNQLYNELNLGRREEYDVLDKRRGRDPEMGGKPQRRKNPQEGLYNELQKDKMAEAYSEIGMKGERRRGKGHDGLYQGLSTATKDTYDALHMQALPPRRAKRSGSGATNFSLLKQAGDVEENPGPTSMDWIWRILFLVGAATGAHSFEQLQLQESGPGLVKPSETLSLTCTVSGGSISSSSYFWGWIRQPPGKGLEWIGSIYYSGITYYNPSLKSRVTISVDTSKNQFSLKLSSVTAADTAVYYCARHDGAVAGLFDYWGQGTLVTVSSATREQKLISEEDGSGIQNPDPAVYQLRDSKSSDKSVCLFTDFDSQTNVSQSKDSDVYITDKTVLDMRSMDFKSNSAVAWSNKSDFACANAFNNSIIPEDTFFPSPESSCGTQSFGLLDPKLCYLLDGILFIYGVILTALFLRSKRSRLLHSDYMNMTPRRPGPTRKHYQPYAPPRDFAAYRSRVKFSRSADAPAYQQGQNQLYNELNLGRREEYDVLDKRRGRDPEMGGKPQRRKNPQEGLYNELQKDKMAEAYSEIGMKGERRRGKGHDGLYQGLSTATKDTYDALHMQALPPR

SEQ ID NO: 18882 - protein, 931 aa, Artificial Sequence
  Synthetic Polypeptide
MALPVTALLLPLALLLHAARPSYVLTQPPSVSVAPGQTARITCGGKNIGSKSVHWYQQPPGQAPVVVVYDDSDRPSGIPERFSGSNSGNTATLTISRVEAGDEAVYYCQVWDSSSDHVVFGGGTKLTVLLEGKPIPNPLLGLDSTGSGEDLKNVFPPEVAVFEPSEAEISHTQKATLVCLATGFYPDHVELSWWVNGKEVHSGVSTDPQPLKEQPALNDSRYCLSSRLRVSATFWQNPRNHFRCQVQFYGLSENDEWTQDRAKPVTQIVSAEAWGRADCGSQSFGLLDPKLCYLLDGILFIYGVILTALFLRSKRSRLLHSDYMNMTPRRPGPTRKHYQPYAPPRDFAAYRSRVKFSRSADAPAYQQGQNQLYNELNLGRREEYDVLDKRRGRDPEMGGKPQRRKNPQEGLYNELQKDKMAEAYSEIGMKGERRRGKGHDGLYQGLSTATKDTYDALHMQALPPRRAKRSGSGATNFSLLKQAGDVEENPGPTSMDWIWRILFLVGAATGAHSFEQLQLQESGPGLVKPSETLSLTCTVSGGSISSSSYFWGWIRQPPGKGLEWIGSIYYSGITYYNPSLKSRVTISVDTSKNQFSLKLSSVTAADTAVYYCARHDGAVAGLFDYWGQGTLVTVSSATREQKLISEEDGSGIQNPDPAVYQLRDSKSSDKSVCLFTDFDSQTNVSQSKDSDVYITDKTVLDMRSMDFKSNSAVAWSNKSDFACANAFNNSIIPEDTFFPSPESSCGTQSFGLLDPKLCYLLDGILFIYGVILTALFLRSKRSRLLHSDYMNMTPRRPGPTRKHYQPYAPPRDFAAYRSRVKFSRSADAPAYQQGQNQLYNELNLGRREEYDVLDKRRGRDPEMGGKPQRRKNPQEGLYNELQKDKMAEAYSEIGMKGERRRGKGHDGLYQGLSTATKDTYDALHMQALPPR

SEQ ID NO: 18883 - protein, 892 aa, Artificial Sequence
  Synthetic Polypeptide
MALPVTALLLPLALLLHAARPSYVLTQPPSVSVAPGQTARITCGGKNIGSKSVHWYQQPPGQAPVVVVYDDSDRPSGIPERFSGSNSGNTATLTISRVEAGDEAVYYCQVWDSSSDHVVFGGGTKLTVLLEGKPIPNPLLGLDSTGSGEDLKNVFPPEVAVFEPSEAEISHTQKATLVCLATGFYPDHVELSWWVNGKEVHSGVSTDPQPLKEQPALNDSRYCLSSRLRVSATFWQNPRNHFRCQVQFYGLSENDEWTQDRAKPVTQIVSAEAWGRADCGSQSFGLLDPKLCYLLDGILFIYGVILTALFLRVKFSRSADAPAYQQGQNQLYNELNLGRREEYDVLDKRRGRDPEMGGKPQRRKNPQEGLYNELQKDKMAEAYSEIGMKGERRRGKGHDGLYQGLSTATKDTYDALHMQALPPRRAKRSGSGATNFSLLKQAGDVEENPGPTSMDWIWRILFLVGAATGAHSFEQLQLQESGPGLVKPSETLSLTCTVSGGSISSSSYFWGWIRQPPGKGLEWIGSIYYSGITYYNPSLKSRVTISVDTSKNQFSLKLSSVTAADTAVYYCARHDGAVAGLFDYWGQGTLVTVSSATREQKLISEEDLGSGIQNPDPAVYQLRDSKSSDKSVCLFTDFDSQTNVSQSKDSDVYITDKTVLDMRSMDFKSNSAVAWSNKSDFACANAFNNSIIPEDTFFPSPESSCGTQSFGLLDPKLCYLLDGILFIYGVILTALFLKRGRKKLLYIFKQPFMRPVQTTQEEDGCSCRFPEEEEGGCELRVKFSRSADAPAYQQGQNQLYNELNLGRREEYDVLDKRRGRDPEMGGKPQRRKNPQEGLYNELQKDKMAEAYSEIGMKGERRRGKGHDGLYQGLSTATKDTYDALHMQALPPR

SEQ ID NO: 18884 - protein, 934 aa, Artificial Sequence
  Synthetic Polypeptide
MALPVTALLLPLALLLHAARPSYVLTQPPSVSVAPGQTARITCGGKNIGSKSVHWYQQPPGQAPVVVVYDDSDRPSGIPERFSGSNSGNTATLTISRVEAGDEAVYYCQVWDSSSDHVVFGGGTKLTVLLEGKPIPNPLLGLDSTGSGEDLKNVFPPEVAVFEPSEAEISHTQKATLVCLATGFYPDHVELSWWVNGKEVHSGVSTDPQPLKEQPALNDSRYCLSSRLRVSATFWQNPRNHFRCQVQFYGLSENDEWTQDRAKPVTQIVSAEAWGRADCGSQSFGLLDPKLCYLLDGILFIYGVILTALFLKRGRKKLLYIFKQPFMRPVQTTQEEDGCSCRFPEEEEGGCELRVKFSRSADAPAYQQGQNQLYNELNLGRREEYDVLDKRRGRDPEMGGKPQRRKNPQEGLYNELQKDKMAEAYSEIGMKGERRRGKGHDGLYQGLSTATKDTYDALHMQALPPRRAKRSGSGATNFSLLKQAGDVEENPGPTSMDWIWRILFLVGAATGAHSFEQLQLQESGPGLVKPSETLSLTCTVSGGSISSSSYFWGWIRQPPGKGLEWIGSIYYSGITYYNPSLKSRVTISVDTSKNQFSLKLSSVTAADTAVYYCARHDGAVAGLFDYWGQGTLVTVSSATREQKLISEEDLGSGIQNPDPAVYQLRDSKSSDKSVCLFTDFDSQTNVSQSKDSDVYITDKTVLDMRSMDFKSNSAVAWSNKSDFACANAFNNSIIPEDTFFPSPESSCGTQSFGLLDPKLCYLLDGILFIYGVILTALFLKRGRKKLLYIFKQPFMRPVQTTQEEDGCSCRFPEEEEGGCELRVKFSRSADAPAYQQGQNQLYNELNLGRREEYDVLDKRRGRDPEMGGKPQRRKNPQEGLYNELQKDKMAEAYSEIGMKGERRRGKGHDGLYQGLSTATKDTYDALHMQALPPR

SEQ ID NO: 18885 - protein, 824 aa, Artificial Sequence
  Synthetic Polypeptide
MALPVTALLLPLALLLHAARPSYVLTQPPSVSVAPGQTARITCGGKNIGSKSVHWYQQPPGQAPVVVVYDDSDRPSGIPERFSGSNSGNTATLTISRVEAGDEAVYYCQVWDSSSDHVVFGGGTKLTVLLEQSFGLLDPKLCYLLDGILFIYGVILTALFLRVKFSRSADAPAYQQGQNQLYNELNLGRREEYDVLDKRRGRDPEMGGKPQRRKNPQEGLYNELQKDKMAEAYSEIGMKGERRRGKGHDGLYQGLSTATKDTYDALHMQALPPRRAKRSGSGATNFSLLKQAGDVEENPGPTSMDWIWRILFLVGAATGAHSFEQLQLQESGPGLVKPSETLSLTCTVSGGSISSSSYFWGWIRQPPGKGLEWIGSIYYSGITYYNPSLKSRVTISVDTSKNQFSLKLSSVTAADTAVYYCARHDGAVAGLFDYWGQGTLVTVSSATRQSFGLLDPKLCYLLDGILFIYGVILTALFLRVKFSRSADAPAYQQGQNQLYNELNLGRREEYDVLDKRRGRDPEMGGKPQRRKNPQEGLYNELQKDKMAEAYSEIGMKGERRRGKGHDGLYQGLSTATKDTYDALHMQALPPRRAKRSGSGVKQTLNFDLLKLAGDVESNPGPSRGHMTEYKPTVRLATRDDVPRAVRTLAAAFADYPATRHTVDPDRHIERVTELQELFLTRVGLDIGKVWVADDGAAVAVWTTPESVEAGAVFAEIGPRMAELSGSRLAAQQQMEGLLAPHRPKEPAWFLATVGVSPDHQGKGLGSAVVLPGVEAAERAGVPAFLETSAPRNLPFYERLGFTVTADVEVPEGPRTWCMTRKPGA

SEQ ID NO: 18886 - protein, 649 aa, Artificial Sequence
  Synthetic Polypeptide
MALPVTALLLPLALLLHAARPSYVLTQPPSVSVAPGQTARITCGGKNIGSKSVHWYQQPPGQAPVVVVYDDSDRPSGIPERFSGSNSGNTATLTISRVEAGDEAVYYCQVWDSSSDHVVFGGGTKLTVLLEGQPKANPTVTLFPPSSEELQANKATLVCLISDFYPGAVTVAWKADGSPVKAGVETTKPSKQSNNKYAASSYLSLTPEQWKSHRSYSCQVTHEGSTVEKTVAPTECSPIKTDVITMDPKDNCSKDANDTLLLQLTNTSAYYMYLLLLLKSVVYFAIITCCLLRRTAFCCNGEKSRAKRSGSGATNFSLLKQAGDVEENPGPTSMDWIWRILFLVGAATGAHSFEQLQLQESGPGLVKPSETLSLTCTVSGGSISSSSYFWGWIRQPPGKGLEWIGSIYYSGITYYNPSLKSRVTISVDTSKNQFSLKLSSVTAADTAVYYCARHDGAVAGLFDYWGQGTLVTVSSATRASTKGPSVFPLAPSSKSTSGGTAALGCLVKDYFPEPVTVSWNSGALTSGVHTFPAVLQSSGLYSLSSVVTVPSSSLGTQTYICNVNHKPSNTKVDKRVEPKSCEVKTDSTDHVKPKETENTKQPSKSCHKPKAIVHTEKVNMMSLTVLGLRMLFAKTVAVNFLLTAKLFFL

SEQ ID NO: 18887 - protein, 627 aa, Artificial Sequence
  Synthetic Polypeptide
MALPVTALLLPLALLLHAARPSYVLTQPPSVSVAPGQTARITCGGKNIGSKSVHWYQQPPGQAPVVVVYDDSDRPSGIPERFSGSNSGNTATLTISRVEAGDEAVYYCQVWDSSSDHVVFGGGTKLTVLLEGQPKANPTVTLFPPSSEELQANKATLVCLISDFYPGAVTVAWKADGSPVKAGVETTKPSKQSNNKYAASSYLSLTPEQWKSHRSYSCQVTHEGSTVEKTVAPTECSGRADCGITSASYHQGVLSATILYEILLGKATLYAVLVSALVLMAMVKRKDSRGRAKRSGSGATNFSLLKQAGDVEENPGPTSMDWIWRILFLVGAATGAHSFEQLQLQESGPGLVKPSETLSLTCTVSGGSISSSSYFWGWIRQPPGKGLEWIGSIYYSGITYYNPSLKSRVTISVDTSKNQFSLKLSSVTAADTAVYYCARHDGAVAGLFDYWGQGTLVTVSSATRASTKGPSVFPLAPSSKSTSGGTAALGCLVKDYFPEPVTVSWNSGALTSGVHTFPAVLQSSGLYSLSSVVTVPSSSLGTQTYICNVNHKPSNTKVDKRVEPKSCIPEDTFFPSSDVPCDVKLVEKSFETDTNLNFQNLSVIGFRILLLKVAGFNLLMTLRLWSS

SEQ ID NO: 18888 - protein, 627 aa, Artificial Sequence
  Synthetic Polypeptide
MALPVTALLLPLALLLHAARPSYVLTQPPSVSVAPGQTARITCGGKNIGSKSVHWYQQPPGQAPVVVVYDDSDRPSGIPERFSGSNSGNTATLTISRVEAGDEAVYYCQVWDSSSDHVVFGGGTKLTVLLEGQPKANPTVTLFPPSSEELQANKATLVCLISDFYPGAVTVAWKADGSPVKAGVETTKPSKQSNNKYAASSYLSLTPEQWKSHRSYSCQVTHEGSTVEKTVAPTECSGRADCGFTSESYQQGVLSATILYEILLGKATLYAVLVSALVLMAMVKRKDSRGRAKRSGSGATNFSLLKQAGDVEENPGPTSMDWIWRILFLVGAATGAHSFEQLQLQESGPGLVKPSETLSLTCTVSGGSISSSSYFWGWIRQPPGKGLEWIGSIYYSGITYYNPSLKSRVTISVDTSKNQFSLKLSSVTAADTAVYYCARHDGAVAGLFDYWGQGTLVTVSSATRASTKGPSVFPLAPSSKSTSGGTAALGCLVKDYFPEPVTVSWNSGALTSGVHTFPAVLQSSGLYSLSSVVTVPSSSLGTQTYICNVNHKPSNTKVDKRVEPKSCIPEDTFFPSPESSCDVKLVEKSFETDTNLNFQNLSVIGFRILLLKVAGFNLLMTLRLWSS

SEQ ID NO: 18889 - protein, 453 aa, Artificial Sequence
  Synthetic Polypeptide
MALPVTALLLPLALLLHAARPSYVLTQPPSVSVAPGQTARITCGGKNIGSKSVHWYQQPPGQAPVVVVYDDSDRPSGIPERFSGSNSGNTATLTISRVEAGDEAVYYCQVWDSSSDHVVFGGGTKLTVLGGGGSGGGGSGGGGSQLQLQESGPGLVKPSETLSLTCTVSGGSISSSSYFWGWIRQPPGKGLEWIGSIYYSGITYYNPSLKSRVTISVDTSKNQFSLKLSSVTAADTAVYYCARHDGAVAGLFDYWGQGTLVTVSSATRDGNEEMGGITQTPYKVSISGTTVILTCPQYPGSEILWQHNDKNIGGDEDDKNIGSDEDHLSLKEFSELEQSGYYVCYPRGSKPEDANFYLYLRARVCENCMEMDVMSVATIVIVDICITGGLLLLVYYWSKNRKAKAKPVTRGAGAGGRQRGQNKERPPPVPNPDYEPIRKGQRDLYSGLNQRRI

SEQ ID NO: 18890 - protein, 418 aa, Artificial Sequence
  Synthetic Polypeptide
MALPVTALLLPLALLLHAARPSYVLTQPPSVSVAPGQTARITCGGKNIGSKSVHWYQQPPGQAPVVVVYDDSDRPSGIPERFSGSNSGNTATLTISRVEAGDEAVYYCQVWDSSSDHVVFGGGTKLTVLGGGGSGGGGSGGGGSQLQLQESGPGLVKPSETLSLTCTVSGGSISSSSYFWGWIRQPPGKGLEWIGSIYYSGITYYNPSLKSRVTISVDTSKNQFSLKLSSVTAADTAVYYCARHDGAVAGLFDYWGQGTLVTVSSATRFKIPIEELEDRVFVNCNTSITWVEGTVGTLLSDITRLDLGKRILDPRGIYRCNGTDIYKDKESTVQVHYRMCQSCVELDPATVAGIIVTDVIATLLLALGVFCFAGHETGRLSGAADTQALLRNDQVYQPLRDRDDAQYSHLGGNWARNK

SEQ ID NO: 18891 - protein, 428 aa, Artificial Sequence
  Synthetic Polypeptide
MALPVTALLLPLALLLHAARPSYVLTQPPSVSVAPGQTARITCGGKNIGSKSVHWYQQPPGQAPVVVVYDDSDRPSGIPERFSGSNSGNTATLTISRVEAGDEAVYYCQVWDSSSDHVVFGGGTKLTVLGGGGSGGGGSGGGGSQLQLQESGPGLVKPSETLSLTCTVSGGSISSSSYFWGWIRQPPGKGLEWIGSIYYSGITYYNPSLKSRVTISVDTSKNQFSLKLSSVTAADTAVYYCARHDGAVAGLFDYWGQGTLVTVSSATRQSIKGNHLVKVYDYQEDGSVLLTCDAEAKNITWFKDGKMIGFLTEDKKKWNLGSNAKDPRGMYQCKGSQNKSKPLQVYYRMCQNCIELNAATISGFLFAEIVSIFVLAVGVYFIAGQDGVRQSRASDKQTLLPNDQLYQPLKDREDDQYSHLQGNQLRRN

SEQ ID NO: 18892 - protein, 411 aa, Artificial Sequence
  Synthetic Polypeptide
MALPVTALLLPLALLLHAARPSYVLTQPPSVSVAPGQTARITCGGKNIGSKSVHWYQQPPGQAPVVVVYDDSDRPSGIPERFSGSNSGNTATLTISRVEAGDEAVYYCQVWDSSSDHVVFGGGTKLTVLGGGGSGGGGSGGGGSQLQLQESGPGLVKPSETLSLTCTVSGGSISSSSYFWGWIRQPPGKGLEWIGSIYYSGITYYNPSLKSRVTISVDTSKNQFSLKLSSVTAADTAVYYCARHDGAVAGLFDYWGQGTLVTVSSATRQSFGLLDPKLCYLLDGILFIYGVILTALFLRVKFSRSADAPAYQQGQNQLYNELNLGRREEYDVLDKRRGRDPEMGGKPQRRKNPQEGLYNELQKDKMAEAYSEIGMKGERRRGKGHDGLYQGLSTATKDTYDALHMQALPPR

SEQ ID NO: 18893 - protein, 453 aa, Artificial Sequence
  Synthetic Polypeptide
MALPVTALLLPLALLLHAARPQLQLQESGPGLVKPSETLSLTCTVSGGSISSSSYFWGWIRQPPGKGLEWIGSIYYSGITYYNPSLKSRVTISVDTSKNQFSLKLSSVTAADTAVYYCARHDGAVAGLFDYWGQGTLVTVSSAGGGGSGGGGSGGGGSSYVLTQPPSVSVAPGQTARITCGGKNIGSKSVHWYQQPPGQAPVVVVYDDSDRPSGIPERFSGSNSGNTATLTISRVEAGDEAVYYCQVWDSSSDHVVFGGGTKLTVLTRDGNEEMGGITQTPYKVSISGTTVILTCPQYPGSEILWQHNDKNIGGDEDDKNIGSDEDHLSLKEFSELEQSGYYVCYPRGSKPEDANFYLYLRARVCENCMEMDVMSVATIVIVDICITGGLLLLVYYWSKNRKAKAKPVTRGAGAGGRQRGQNKERPPPVPNPDYEPIRKGQRDLYSGLNQRRI

SEQ ID NO: 18894 - protein, 418 aa, Artificial Sequence
  Synthetic Polypeptide
MALPVTALLLPLALLLHAARPQLQLQESGPGLVKPSETLSLTCTVSGGSISSSSYFWGWIRQPPGKGLEWIGSIYYSGITYYNPSLKSRVTISVDTSKNQFSLKLSSVTAADTAVYYCARHDGAVAGLFDYWGQGTLVTVSSAGGGGSGGGGSGGGGSSYVLTQPPSVSVAPGQTARITCGGKNIGSKSVHWYQQPPGQAPVVVVYDDSDRPSGIPERFSGSNSGNTATLTISRVEAGDEAVYYCQVWDSSSDHVVFGGGTKLTVLTRFKIPIEELEDRVFVNCNTSITWVEGTVGTLLSDITRLDLGKRILDPRGIYRCNGTDIYKDKESTVQVHYRMCQSCVELDPATVAGIIVTDVIATLLLALGVFCFAGHETGRLSGAADTQALLRNDQVYQPLRDRDDAQYSHLGGNWARNK

SEQ ID NO: 18895 - protein, 428 aa, Artificial Sequence
  Synthetic Polypeptide
MALPVTALLLPLALLLHAARPQLQLQESGPGLVKPSETLSLTCTVSGGSISSSSYFWGWIRQPPGKGLEWIGSIYYSGITYYNPSLKSRVTISVDTSKNQFSLKLSSVTAADTAVYYCARHDGAVAGLFDYWGQGTLVTVSSAGGGGSGGGGSGGGGSSYVLTQPPSVSVAPGQTARITCGGKNIGSKSVHWYQQPPGQAPVVVVYDDSDRPSGIPERFSGSNSGNTATLTISRVEAGDEAVYYCQVWDSSSDHVVFGGGTKLTVLTRQSIKGNHLVKVYDYQEDGSVLLTCDAEAKNITWFKDGKMIGFLTEDKKKWNLGSNAKDPRGMYQCKGSQNKSKPLQVYYRMCQNCIELNAATISGFLFAEIVSIFVLAVGVYFIAGQDGVRQSRASDKQTLLPNDQLYQPLKDREDDQYSHLQGNQLRRN

SEQ ID NO: 18896 - protein, 411 aa, Artificial Sequence
  Synthetic Polypeptide
MALPVTALLLPLALLLHAARPQLQLQESGPGLVKPSETLSLTCTVSGGSISSSSYFWGWIRQPPGKGLEWIGSIYYSGITYYNPSLKSRVTISVDTSKNQFSLKLSSVTAADTAVYYCARHDGAVAGLFDYWGQGTLVTVSSAGGGGSGGGGSGGGGSSYVLTQPPSVSVAPGQTARITCGGKNIGSKSVHWYQQPPGQAPVVVVYDDSDRPSGIPERFSGSNSGNTATLTISRVEAGDEAVYYCQVWDSSSDHVVFGGGTKLTVLTRQSFGLLDPKLCYLLDGILFIYGVILTALFLRVKFSRSADAPAYQQGQNQLYNELNLGRREEYDVLDKRRGRDPEMGGKPQRRKNPQEGLYNELQKDKMAEAYSEIGMKGERRRGKGHDGLYQGLSTATKDTYDALHMQALPPR

SEQ ID NO: 18897 - protein, 644 aa, Artificial Sequence
  Synthetic Polypeptide
MALPVTALLLPLALLLHAARPSYVLTQPPSVSVAPGQTARITCGGKNIGSKSVHWYQQPPGQAPVVVVYDDSDRPSGIPERFSGSNSGNTATLTISRVEAGDEAVYYCQVWDSSSDHVVFGGGTKLTVLGGGGSGGGGSGGGGSQLQLQESGPGLVKPSETLSLTCTVSGGSISSSSYFWGWIRQPPGKGLEWIGSIYYSGITYYNPSLKSRVTISVDTSKNQFSLKLSSVTAADTAVYYCARHDGAVAGLFDYWGQGTLVTVSSATRGSGIQNPDPAVYQLRDSKSSDKSVCLFTDFDSQTNVSQSKDSDVYITDKTVLDMRSMDFKSNSAVAWSNKSDFACANAFNNSIIPEDTFFPSPESSCDVKLVEKSFETDTNLNFQNLSVIGFRILLLKVAGFNLLMTLRLWSSRAKRSGSGVKQTLNFDLLKLAGDVESNPGPSRGHMTEYKPTVRLATRDDVPRAVRTLAAAFADYPATRHTVDPDRHIERVTELQELFLTRVGLDIGKVWVADDGAAVAVWTTPESVEAGAVFAEIGPRMAELSGSRLAAQQQMEGLLAPHRPKEPAWFLATVGVSPDHQGKGLGSAVVLPGVEAAERAGVPAFLETSAPRNLPFYERLGFTVTADVEVPEGPRTWCMTRKPGA

SEQ ID NO: 18898 - protein, 676 aa, Artificial Sequence
  Synthetic Polypeptide
MALPVTALLLPLALLLHAARPSYVLTQPPSVSVAPGQTARITCGGKNIGSKSVHWYQQPPGQAPVVVVYDDSDRPSGIPERFSGSNSGNTATLTISRVEAGDEAVYYCQVWDSSSDHVVFGGGTKLTVLGGGGSGGGGSGGGGSQLQLQESGPGLVKPSETLSLTCTVSGGSISSSSYFWGWIRQPPGKGLEWIGSIYYSGITYYNPSLKSRVTISVDTSKNQFSLKLSSVTAADTAVYYCARHDGAVAGLFDYWGQGTLVTVSSALEDLKNVFPPEVAVFEPSEAEISHTQKATLVCLATGFYPDHVELSWWVNGKEVHSGVSTDPQPLKEQPALNDSRYCLSSRLRVSATFWQNPRNHFRCQVQFYGLSENDEWTQDRAKPVTQIVSAEAWGRADCGFTSESYQQGVLSATILYEILLGKATLYAVLVSALVLMAMVKRKDSRGRAKRSGSGATNFSLLKQAGDVEENPGPTRGHMTEYKPTVRLATRDDVPRAVRTLAAAFADYPATRHTVDPDRHIERVTELQELFLTRVGLDIGKVWVADDGAAVAVWTTPESVEAGAVFAEIGPRMAELSGSRLAAQQQMEGLLAPHRPKEPAWFLATVGVSPDHQGKGLGSAVVLPGVEAAERAGVPAFLETSAPRNLPFYERLGFTVTADVEVPEGPRTWCMTRKPGA

SEQ ID NO: 18899 - protein, 726 aa, Artificial Sequence
  Synthetic Polypeptide
MALPVTALLLPLALLLHAARPSYVLTQPPSVSVAPGQTARITCGGKNIGSKSVHWYQQPPGQAPVVVVYDDSDRPSGIPERFSGSNSGNTATLTISRVEAGDEAVYYCQVWDSSSDHVVFGGGTKLTVLGGGGSGGGGSGGGGSQLQLQESGPGLVKPSETLSLTCTVSGGSISSSSYFWGWIRQPPGKGLEWIGSIYYSGITYYNPSLKSRVTISVDTSKNQFSLKLSSVTAADTAVYYCARHDGAVAGLFDYWGQGTLVTVSSATREQKLISEEDLGSGTPFPSLAPPIMLLVDGKQQMVVVCLVLDVAPPGLDSPIWFSAGNGSALDAFTYGPSPATDGTWTNLAHLSLPSEELASWEPLVCHTGPGAEGHSRSTQPMHLSGEASTARTCPQEPLRGTPGGALWLGVLRLLLFKLLLFDLLLTCSCLCDPAGPLPSPATTTRLRALGSHRLHPATETGGREATSSPRPQPRDRRWGDTPPGRKPGSPVRAKRSGSGVKQTLNFDLLKLAGDVESNPGPSRSRGHMTEYKPTVRLATRDDVPRAVRTLAAAFADYPATRHTVDPDRHIERVTELQELFLTRVGLDIGKVWVADDGAAVAVWTTPESVEAGAVFAEIGPRMAELSGSRLAAQQQMEGLLAPHRPKEPAWFLATVGVSPDHQGKGLGSAVVLPGVEAAERAGVPAFLETSAPRNLPFYERLGFTVTADVEVPEGPRTWCMTRKPGA

SEQ ID NO: 18900 - protein, 539 aa, Artificial Sequence; identical to SEQ ID NO: 18624
  Synthetic Polypeptide

SEQ ID NO: 18901 - protein, 309 aa, Artificial Sequence; identical to SEQ ID NO: 18625
  Synthetic Polypeptide

SEQ ID NO: 18902 - protein, 451 aa, Artificial Sequence; identical to SEQ ID NO: 18143
  Synthetic Polypeptide

SEQ ID NO: 18903 - protein, 285 aa, Artificial Sequence; identical to SEQ ID NO: 18144
  Synthetic Polypeptide

SEQ ID NO: 18904 - protein, 557 aa, Artificial Sequence; identical to SEQ ID NO: 18628
  Synthetic Polypeptide

SEQ ID NO: 18905 - protein, 327 aa, Artificial Sequence; identical to SEQ ID NO: 18629
  Synthetic Polypeptide

SEQ ID NO: 18906 - protein, 463 aa, Artificial Sequence; identical to SEQ ID NO: 18147
  Synthetic Polypeptide

SEQ ID NO: 18907 - protein, 297 aa, Artificial Sequence; identical to SEQ ID NO: 18148
  Synthetic Polypeptide

SEQ ID NO: 18908 - protein, 644 aa, Artificial Sequence
  Synthetic Polypeptide
MALPVTALLLPLALLLHAARPSYVLTQPPSVSVAPGQTARITCGGKNIGSKSVHWYQQPPGQAPVVVVYDDSDRPSGIPERFSGSNSGNTATLTISRVEAGDEAVYYCQVWDSSSDHVVFGGGTKLTVLGGGGSGGGGSGGGGSQLQLQESGPGLVKPSETLSLTCTVSGGSISSSSYFWGWIRQPPGKGLEWIGSIYYSGITYYNPSLKSRVTISVDTSKNQFSLKLSSVTAADTAVYYCARHDGAVAGLFDYWGQGTLVTVSSATRGSGIQNPDPAVYQLRDSKSSDKSVCLFTDFDSQTNVSQSKDSDVYITDKTVLDMRSMDFKSNSAVAWSNKSDFACANAFNNSIIPEDTFFPSSDVPCDVKLVEKSFETDTNLNFQNLSVIGFRILLLKVAGFNLLMTLRLWSSRAKRSGSGVKQTLNFDLLKLAGDVESNPGPSRGHMTEYKPTVRLATRDDVPRAVRTLAAAFADYPATRHTVDPDRHIERVTELQELFLTRVGLDIGKVWVADDGAAVAVWTTPESVEAGAVFAEIGPRMAELSGSRLAAQQQMEGLLAPHRPKEPAWFLATVGVSPDHQGKGLGSAVVLPGVEAAERAGVPAFLETSAPRNLPFYERLGFTVTADVEVPEGPRTWCMTRKPGA

SEQ ID NO: 18909 - protein, 676 aa, Artificial Sequence
  Synthetic Polypeptide
MALPVTALLLPLALLLHAARPSYVLTQPPSVSVAPGQTARITCGGKNIGSKSVHWYQQPPGQAPVVVVYDDSDRPSGIPERFSGSNSGNTATLTISRVEAGDEAVYYCQVWDSSSDHVVFGGGTKLTVLGGGGSGGGGSGGGGSQLQLQESGPGLVKPSETLSLTCTVSGGSISSSSYFWGWIRQPPGKGLEWIGSIYYSGITYYNPSLKSRVTISVDTSKNQFSLKLSSVTAADTAVYYCARHDGAVAGLFDYWGQGTLVTVSSALEDLKNVFPPEVAVFEPSKAEIAHTQKATLVCLATGFYPDHVELSWWVNGKEVHSGVSTDPQPLKEQPALNDSRYCLSSRLRVSATFWQNPRNHFRCQVQFYGLSENDEWTQDRAKPVTQIVSAEAWGRADCGITSASYHQGVLSATILYEILLGKATLYAVLVSALVLMAMVKRKDSRGRAKRSGSGATNFSLLKQAGDVEENPGPTRGHMTEYKPTVRLATRDDVPRAVRTLAAAFADYPATRHTVDPDRHIERVTELQELFLTRVGLDIGKVWVADDGAAVAVWTTPESVEAGAVFAEIGPRMAELSGSRLAAQQQMEGLLAPHRPKEPAWFLATVGVSPDHQGKGLGSAVVLPGVEAAERAGVPAFLETSAPRNLPFYERLGFTVTADVEVPEGPRTWCMTRKPGA

SEQ ID NO: 18910 - protein, 699 aa, Artificial Sequence
  Synthetic Polypeptide
MALPVTALLLPLALLLHAARPSYVLTQPPSVSVAPGQTARITCGGKNIGSKSVHWYQQPPGQAPVVVVYDDSDRPSGIPERFSGSNSGNTATLTISRVEAGDEAVYYCQVWDSSSDHVVFGGGTKLTVLGGGGSGGGGSGGGGSQLQLQESGPGLVKPSETLSLTCTVSGGSISSSSYFWGWIRQPPGKGLEWIGSIYYSGITYYNPSLKSRVTISVDTSKNQFSLKLSSVTAADTAVYYCARHDGAVAGLFDYWGQGTLVTVSSATRGSGGGGSGGGGSGDGNEEMGGITQTPYKVSISGTTVILTCPQYPGSEILWQHNDKNIGGDEDDKNIGSDEDHLSLKEFSELEQSGYYVCYPRGSKPEDANFYLYLRARVCENCMEMDVMSVATIVIVDICITGGLLLLVYYWSKNRKAKAKPVTRGAGAGGRQRGQNKERPPPVPNPDYEPIRKGQRDLYSGLNQRRIRAKRSGSGVKQTLNFDLLKLAGDVESNPGPSRGHMTEYKPTVRLATRDDVPRAVRTLAAAFADYPATRHTVDPDRHIERVTELQELFLTRVGLDIGKVWVADDGAAVAVWTTPESVEAGAVFAEIGPRMAELSGSRLAAQQQMEGLLAPHRPKEPAWFLATVGVSPDHQGKGLGSAVVLPGVEAAERAGVPAFLETSAPRNLPFYERLGFTVTADVEVPEGPRTWCMTRKPGA

SEQ ID NO: 18911 - protein, 664 aa, Artificial Sequence
  Synthetic Polypeptide
MALPVTALLLPLALLLHAARPSYVLTQPPSVSVAPGQTARITCGGKNIGSKSVHWYQQPPGQAPVVVVYDDSDRPSGIPERFSGSNSGNTATLTISRVEAGDEAVYYCQVWDSSSDHVVFGGGTKLTVLGGGGSGGGGSGGGGSQLQLQESGPGLVKPSETLSLTCTVSGGSISSSSYFWGWIRQPPGKGLEWIGSIYYSGITYYNPSLKSRVTISVDTSKNQFSLKLSSVTAADTAVYYCARHDGAVAGLFDYWGQGTLVTVSSATRGSGGGGSGGGGSGFKIPIEELEDRVFVNCNTSITWVEGTVGTLLSDITRLDLGKRILDPRGIYRCNGTDIYKDKESTVQVHYRMCQSCVELDPATVAGIIVTDVIATLLLALGVFCFAGHETGRLSGAADTQALLRNDQVYQPLRDRDDAQYSHLGGNWARNKRAKRSGSGVKQTLNFDLLKLAGDVESNPGPSRGHMTEYKPTVRLATRDDVPRAVRTLAAAFADYPATRHTVDPDRHIERVTELQELFLTRVGLDIGKVWVADDGAAVAVWTTPESVEAGAVFAEIGPRMAELSGSRLAAQQQMEGLLAPHRPKEPAWFLATVGVSPDHQGKGLGSAVVLPGVEAAERAGVPAFLETSAPRNLPFYERLGFTVTADVEVPEGPRTWCMTRKPGA

SEQ ID NO: 18912 - protein, 674 aa, Artificial Sequence
  Synthetic Polypeptide
MALPVTALLLPLALLLHAARPSYVLTQPPSVSVAPGQTARITCGGKNIGSKSVHWYQQPPGQAPVVVVYDDSDRPSGIPERFSGSNSGNTATLTISRVEAGDEAVYYCQVWDSSSDHVVFGGGTKLTVLGGGGSGGGGSGGGGSQLQLQESGPGLVKPSETLSLTCTVSGGSISSSSYFWGWIRQPPGKGLEWIGSIYYSGITYYNPSLKSRVTISVDTSKNQFSLKLSSVTAADTAVYYCARHDGAVAGLFDYWGQGTLVTVSSATRGSGGGGSGGGGSGQSIKGNHLVKVYDYQEDGSVLLTCDAEAKNITWFKDGKMIGFLTEDKKKWNLGSNAKDPRGMYQCKGSQNKSKPLQVYYRMCQNCIELNAATISGFLFAEIVSIFVLAVGVYFIAGQDGVRQSRASDKQTLLPNDQLYQPLKDREDDQYSHLQGNQLRRNRAKRSGSGVKQTLNFDLLKLAGDVESNPGPSRGHMTEYKPTVRLATRDDVPRAVRTLAAAFADYPATRHTVDPDRHIERVTELQELFLTRVGLDIGKVWVADDGAAVAVWTTPESVEAGAVFAEIGPRMAELSGSRLAAQQQMEGLLAPHRPKEPAWFLATVGVSPDHQGKGLGSAVVLPGVEAAERAGVPAFLETSAPRNLPFYERLGFTVTADVEVPEGPRTWCMTRKPGA

SEQ ID NO: 18913 - protein, 657 aa, Artificial Sequence
  Synthetic Polypeptide
MALPVTALLLPLALLLHAARPSYVLTQPPSVSVAPGQTARITCGGKNIGSKSVHWYQQPPGQAPVVVVYDDSDRPSGIPERFSGSNSGNTATLTISRVEAGDEAVYYCQVWDSSSDHVVFGGGTKLTVLGGGGSGGGGSGGGGSQLQLQESGPGLVKPSETLSLTCTVSGGSISSSSYFWGWIRQPPGKGLEWIGSIYYSGITYYNPSLKSRVTISVDTSKNQFSLKLSSVTAADTAVYYCARHDGAVAGLFDYWGQGTLVTVSSATRGSGGGGSGGGGSGQSFGLLDPKLCYLLDGILFIYGVILTALFLRVKFSRSADAPAYQQGQNQLYNELNLGRREEYDVLDKRRGRDPEMGGKPQRRKNPQEGLYNELQKDKMAEAYSEIGMKGERRRGKGHDGLYQGLSTATKDTYDALHMQALPPRRAKRSGSGVKQTLNFDLLKLAGDVESNPGPSRGHMTEYKPTVRLATRDDVPRAVRTLAAAFADYPATRHTVDPDRHIERVTELQELFLTRVGLDIGKVWVADDGAAVAVWTTPESVEAGAVFAEIGPRMAELSGSRLAAQQQMEGLLAPHRPKEPAWFLATVGVSPDHQGKGLGSAVVLPGVEAAERAGVPAFLETSAPRNLPFYERLGFTVTADVEVPEGPRTWCMTRKPGA

SEQ ID NO: 18914 - protein, 758 aa, Artificial Sequence
  Synthetic Polypeptide
MALPVTALLLPLALLLHAARPEVQLVESGGGLVQPGGSLRLSCAASGFSFSDFWMSWVRQAPGKGLEWVATISQAGSEKDYVDSVKGRFTISRDNAKKSLYLQMNSLRAEDTAVYYCASGVYSFDYRGQGTLVTVSSGTGGGGSGGGGSGGGGSEFSYVLTQPPSVSVAPGQTARITCGGKNIGSKSVHWYQQPPGQAPVVVVYDDSDRPSGIPERFSGSNSGNTATLTISRVEAGDEAVYYCQVWDSSSDHVVFGGGTKLTVLLEDLKNVFPPEVAVFEPSEAEISHTQKATLVCLATGFYPDHVELSWWVNGKEVHSGVCTDPQPLKEQPALNDSRYCLSSRLRVSATFWQNPRNHFRCQVQFYGLSENDEWTQDRAKPVTQIVSAEAWGRADCGFTSESYQQGVLSATILYEILLGKATLYAVLVSALVLMAMVKRKDSRGRAKRSGSGATNFSLLKQAGDVEENPGPTSMDWIWRILFLVGAATGAHSFEQLQLQESGPGLVKPSETLSLTCTVSGGSISSSSYFWGWIRQPPGKGLEWIGSIYYSGITYYNPSLKSRVTISVDTSKNQFSLKLSSVTAADTAVYYCARHDGAVAGLFDYWGQGTLVTVSSATRIQNPDPAVYQLRDSKSSDKSVCLFTDFDSQTNVSQSKDSDVYITDKCVLDMRSMDFKSNSAVAWSNKSDFACANAFNNSIIPEDTFFPSPESSCDVKLVEKSFETDTNLNFQNLSVIGFRILLLKVAGFNLLMTLRLWSS

SEQ ID NO: 18915 - protein, 762 aa, Artificial Sequence
  Synthetic Polypeptide
MALPVTALLLPLALLLHAARPEVQLVESGGGLVQPGGSLRLSCAASGFSFSDFWMSWVRQAPGKGLEWVATISQAGSEKDYVDSVKGRFTISRDNAKKSLYLQMNSLRAEDTAVYYCASGVYSFDYRGQGTLVTVSSGTGGGGSGGGGSGGGGSEFSYVLTQPPSVSVAPGQTARITCGGKNIGSKSVHWYQQPPGQAPVVVVYDDSDRPSGIPERFSGSNSGNTATLTISRVEAGDEAVYYCQVWDSSSDHVVFGGGTKLTVLLEIQNPDPAVYQLRDSKSSDKSVCLFTDFDSQTNVSQSKDSDVYITDKCVLDMRSMDFKSNSAVAWSNKSDFACANAFNNSIIPEDTFFPSPESSCDVKLVEKSFETDTNLNFQNLSVIGFRILLLKVAGFNLLMTLRLWSSRAKRSGSGVKQTLNFDLLKLAGDVESNPGPTSMDWIWRILFLVGAATGAHSFEQLQLQESGPGLVKPSETLSLTCTVSGGSISSSSYFWGWIRQPPGKGLEWIGSIYYSGITYYNPSLKSRVTISVDTSKNQFSLKLSSVTAADTAVYYCARHDGAVAGLFDYWGQGTLVTVSSATREDLKNVFPPEVAVFEPSEAEISHTQKATLVCLATGFYPDHVELSWWVNGKEVHSGVCTDPQPLKEQPALNDSRYCLSSRLRVSATFWQNPRNHFRCQVQFYGLSENDEWTQDRAKPVTQIVSAEAWGRADCGFTSESYQQGVLSATILYEILLGKATLYAVLVSALVLMAMVKRKDSRG

SEQ ID NO: 18916 - protein, 954 aa, Artificial Sequence
  Synthetic Polypeptide
MALPVTALLLPLALLLHAARPEVQLVESGGGLVQPGGSLRLSCAASGFSFSDFWMSWVRQAPGKGLEWVATISQAGSEKDYVDSVKGRFTISRDNAKKSLYLQMNSLRAEDTAVYYCASGVYSFDYRGQGTLVTVSSGTGGGGSGGGGSGGGGSEFSYVLTQPPSVSVAPGQTARITCGGKNIGSKSVHWYQQPPGQAPVVVVYDDSDRPSGIPERFSGSNSGNTATLTISRVEAGDEAVYYCQVWDSSSDHVVFGGGTKLTVLLEDLKNVFPPEVAVFEPSEAEISHTQKATLVCLATGFYPDHVELSWWVNGKEVHSGVSTDPQPLKEQPALNDSRYCLSSRLRVSATFWQNPRNHFRCQVQFYGLSENDEWTQDRAKPVTQIVSAEAWGRADCGSQSFGLLDPKLCYLLDGILFIYGVILTALFLRVKFSRSADAPAYQQGQNQLYNELNLGRREEYDVLDKRRGRDPEMGGKPQRRKNPQEGLYNELQKDKMAEAYSEIGMKGERRRGKGHDGLYQGLSTATKDTYDALHMQALPPRRAKRSGSGATNFSLLKQAGDVEENPGPTSMDWIWRILFLVGAATGAHSFEQLQLQESGPGLVKPSETLSLTCTVSGGSISSSSYFWGWIRQPPGKGLEWIGSIYYSGITYYNPSLKSRVTISVDTSKNQFSLKLSSVTAADTAVYYCARHDGAVAGLFDYWGQGTLVTVSSATRIQNPDPAVYQLRDSKSSDKSVCLFTDFDSQTNVSQSKDSDVYITDKTVLDMRSMDFKSNSAVAWSNKSDFACANAFNNSIIPEDTFFPSPESSCGTQSFGLLDPKLCYLLDGILFIYGVILTALFLRVKFSRSADAPAYQQGQNQLYNELNLGRREEYDVLDKRRGRDPEMGGKPQRRKNPQEGLYNELQKDKMAEAYSEIGMKGERRRGKGHDGLYQGLSTATKDTYDALHMQALPPR

SEQ ID NO: 18917 - protein, 784 aa, Artificial Sequence
  Synthetic Polypeptide
MALPVTALLLPLALLLHAARPEVQLVESGGGLVQPGGSLRLSCAASGFSFSDFWMSWVRQAPGKGLEWVATISQAGSEKDYVDSVKGRFTISRDNAKKSLYLQMNSLRAEDTAVYYCASGVYSFDYRGQGTLVTVSSGTGGGGSGGGGSGGGGSEFSYVLTQPPSVSVAPGQTARITCGGKNIGSKSVHWYQQPPGQAPVVVVYDDSDRPSGIPERFSGSNSGNTATLTISRVEAGDEAVYYCQVWDSSSDHVVFGGGTKLTVLLEGQPKANPTVTLFPPSSEELQANKATLVCLISDFYPGAVTVAWKADGSPVKAGVETTKPSKQSNNKYAASSYLSLTPEQWKSHRSYSCQVTHEGSTVEKTVAPTECSPIKTDVITMDPKDNCSKDANDTLLLQLTNTSAYYMYLLLLLKSVVYFAIITCCLLRRTAFCCNGEKSRAKRSGSGATNFSLLKQAGDVEENPGPTSMDWIWRILFLVGAATGAHSFEQLQLQESGPGLVKPSETLSLTCTVSGGSISSSSYFWGWIRQPPGKGLEWIGSIYYSGITYYNPSLKSRVTISVDTSKNQFSLKLSSVTAADTAVYYCARHDGAVAGLFDYWGQGTLVTVSSATRASTKGPSVFPLAPSSKSTSGGTAALGCLVKDYFPEPVTVSWNSGALTSGVHTFPAVLQSSGLYSLSSVVTVPSSSLGTQTYICNVNHKPSNTKVDKRVEPKSCEVKTDSTDHVKPKETENTKQPSKSCHKPKAIVHTEKVNMMSLTVLGLRMLFAKTVAVNFLLTAKLFFL

SEQ ID NO: 18918 - protein, 765 aa, Artificial Sequence
  Synthetic Polypeptide
MALPVTALLLPLALLLHAARPEVQLVESGGGLVQPGGSLRLSCAASGFSFSDFWMSWVRQAPGKGLEWVATISQAGSEKDYVDSVKGRFTISRDNAKKSLYLQMNSLRAEDTAVYYCASGVYSFDYRGQGTLVTVSSGTGGGGSGGGGSGGGGSEFSYVLTQPPSVSVAPGQTARITCGGKNIGSKSVHWYQQPPGQAPVVVVYDDSDRPSGIPERFSGSNSGNTATLTISRVEAGDEAVYYCQVWDSSSDHVVFGGGTKLTVLLEGQPKANPTVTLFPPSSEELQANKATLVCLISDFYPGAVTVAWKADGSPVKAGVETTKPSKQSNNKYAASSYLSLTPEQWKSHRSYSCQVTHEGSTVEKTVAPTECSGRADCGFTSESYQQGVLSATILYEILLGKATLYAVLVSALVLMAMVKRKDSRGRAKRSGSGVKQTLNFDLLKLAGDVESNPGPTSMDWIWRILFLVGAATGAHSFEQLQLQESGPGLVKPSETLSLTCTVSGGSISSSSYFWGWIRQPPGKGLEWIGSIYYSGITYYNPSLKSRVTISVDTSKNQFSLKLSSVTAADTAVYYCARHDGAVAGLFDYWGQGTLVTVSSATRASTKGPSVFPLAPSSKSTSGGTAALGCLVKDYFPEPVTVSWNSGALTSGVHTFPAVLQSSGLYSLSSVVTVPSSSLGTQTYICNVNHKPSNTKVDKRVEPKSCIPEDTFFPSPESSCDVKLVEKSFETDTNLNFQNLSVIGFRILLLKVAGFNLLMTLRLWSS

SEQ ID NO: 18919 - protein, 899 aa, Artificial Sequence
  Synthetic Polypeptide
MALPVTALLLPLALLLHAARPEVQLVESGGGLVQPGGSLRLSCAASGFSFSDFWMSWVRQAPGKGLEWVATISQAGSEKDYVDSVKGRFTISRDNAKKSLYLQMNSLRAEDTAVYYCASGVYSFDYRGQGTLVTVSSGTGGGGSGGGGSGGGGSEFSYVLTQPPSVSVAPGQTARITCGGKNIGSKSVHWYQQPPGQAPVVVVYDDSDRPSGIPERFSGSNSGNTATLTISRVEAGDEAVYYCQVWDSSSDHVVFGGGTKLTVLLEIQNPDPAVYQLRDSKSSDKSVCLFTDFDSQTNVSQSKDSDVYITDKCVLDMRSMDFKSNSAVAWSNKSDFACANAFNNSIIPEDTFFPSPESSCDVKLVEKSFETDTNLNFQNLSVIGFRILLLKVAGFNLLMTLRLWSSRAKRSGSGVKQTLNFDLLKLAGDVESNPGPTSMDWIWRILFLVGAATGAHSGPQLQLQESGPGLVKPSETLSLTCTVSGDSISSGDYYWGWIRQPPGKGLEWIGHIYYSGVTYYNPSLKSRVTISVDTSRNQFSLKLSSVTAADTAVYYCTREDSSNWRSRGQGTLVTVSSGSGGGGSGGGGSGGGGSFEQLQLQESGPGLVKPSETLSLTCTVSGGSISSSSYFWGWIRQPPGKGLEWIGSIYYSGITYYNPSLKSRVTISVDTSKNQFSLKLSSVTAADTAVYYCARHDGAVAGLFDYWGQGTLVTVSSATREDLKNVFPPEVAVFEPSEAEISHTQKATLVCLATGFYPDHVELSWWVNGKEVHSGVCTDPQPLKEQPALNDSRYCLSSRLRVSATFWQNPRNHFRCQVQFYGLSENDEWTQDRAKPVTQIVSAEAWGRADCGFTSESYQQGVLSATILYEILLGKATLYAVLVSALVLMAMVKRKDSRG

SEQ ID NO: 18920 - protein, 1091 aa, Artificial Sequence
  Synthetic Polypeptide
MALPVTALLLPLALLLHAARPEVQLVESGGGLVQPGGSLRLSCAASGFSFSDFWMSWVRQAPGKGLEWVATISQAGSEKDYVDSVKGRFTISRDNAKKSLYLQMNSLRAEDTAVYYCASGVYSFDYRGQGTLVTVSSGTGGGGSGGGGSGGGGSEFSYVLTQPPSVSVAPGQTARITCGGKNIGSKSVHWYQQPPGQAPVVVVYDDSDRPSGIPERFSGSNSGNTATLTISRVEAGDEAVYYCQVWDSSSDHVVFGGGTKLTVLLEDLKNVFPPEVAVFEPSEAEISHTQKATLVCLATGFYPDHVELSWWVNGKEVHSGVSTDPQPLKEQPALNDSRYCLSSRLRVSATFWQNPRNHFRCQVQFYGLSENDEWTQDRAKPVTQIVSAEAWGRADCGSQSFGLLDPKLCYLLDGILFIYGVILTALFLRVKFSRSADAPAYQQGQNQLYNELNLGRREEYDVLDKRRGRDPEMGGKPQRRKNPQEGLYNELQKDKMAEAYSEIGMKGERRRGKGHDGLYQGLSTATKDTYDALHMQALPPRRAKRSGSGATNFSLLKQAGDVEENPGPTSMDWIWRILFLVGAATGAHSGPQLQLQESGPGLVKPSETLSLTCTVSGDSISSGDYYWGWIRQPPGKGLEWIGHIYYSGVTYYNPSLKSRVTISVDTSRNQFSLKLSSVTAADTAVYYCTREDSSNWRSRGQGTLVTVSSGSGGGGSGGGGSGGGGSFEQLQLQESGPGLVKPSETLSLTCTVSGGSISSSSYFWGWIRQPPGKGLEWIGSIYYSGITYYNPSLKSRVTISVDTSKNQFSLKLSSVTAADTAVYYCARHDGAVAGLFDYWGQGTLVTVSSATRIQNPDPAVYQLRDSKSSDKSVCLFTDFDSQTNVSQSKDSDVYITDKTVLDMRSMDFKSNSAVAWSNKSDFACANAFNNSIIPEDTFFPSPESSCGTQSFGLLDPKLCYLLDGILFIYGVILTALFLRVKFSRSADAPAYQQGQNQLYNELNLGRREEYDVLDKRRGRDPEMGGKPQRRKNPQEGLYNELQKDKMAEAYSEIGMKGERRRGKGHDGLYQGLSTATKDTYDALHMQALPPR

SEQ ID NO: 18921 - protein, 921 aa, Artificial Sequence
  Synthetic Polypeptide
MALPVTALLLPLALLLHAARPEVQLVESGGGLVQPGGSLRLSCAASGFSFSDFWMSWVRQAPGKGLEWVATISQAGSEKDYVDSVKGRFTISRDNAKKSLYLQMNSLRAEDTAVYYCASGVYSFDYRGQGTLVTVSSGTGGGGSGGGGSGGGGSEFSYVLTQPPSVSVAPGQTARITCGGKNIGSKSVHWYQQPPGQAPVVVVYDDSDRPSGIPERFSGSNSGNTATLTISRVEAGDEAVYYCQVWDSSSDHVVFGGGTKLTVLLEGQPKANPTVTLFPPSSEELQANKATLVCLISDFYPGAVTVAWKADGSPVKAGVETTKPSKQSNNKYAASSYLSLTPEQWKSHRSYSCQVTHEGSTVEKTVAPTECSPIKTDVITMDPKDNCSKDANDTLLLQLTNTSAYYMYLLLLLKSVVYFAIITCCLLRRTAFCCNGEKSRAKRSGSGATNFSLLKQAGDVEENPGPTSMDWIWRILFLVGAATGAHSGPQLQLQESGPGLVKPSETLSLTCTVSGDSISSGDYYWGWIRQPPGKGLEWIGHIYYSGVTYYNPSLKSRVTISVDTSRNQFSLKLSSVTAADTAVYYCTREDSSNWRSRGQGTLVTVSSGSGGGGSGGGGSGGGGSFEQLQLQESGPGLVKPSETLSLTCTVSGGSISSSSYFWGWIRQPPGKGLEWIGSIYYSGITYYNPSLKSRVTISVDTSKNQFSLKLSSVTAADTAVYYCARHDGAVAGLFDYWGQGTLVTVSSATRASTKGPSVFPLAPSSKSTSGGTAALGCLVKDYFPEPVTVSWNSGALTSGVHTFPAVLQSSGLYSLSSVVTVPSSSLGTQTYICNVNHKPSNTKVDKRVEPKSCEVKTDSTDHVKPKETENTKQPSKSCHKPKAIVHTEKVNMMSLTVLGLRMLFAKTVAVNFLLTAKLFFL

SEQ ID NO: 18922 - protein, 902 aa, Artificial Sequence
  Synthetic Polypeptide
MALPVTALLLPLALLLHAARPEVQLVESGGGLVQPGGSLRLSCAASGFSFSDFWMSWVRQAPGKGLEWVATISQAGSEKDYVDSVKGRFTISRDNAKKSLYLQMNSLRAEDTAVYYCASGVYSFDYRGQGTLVTVSSGTGGGGSGGGGSGGGGSEFSYVLTQPPSVSVAPGQTARITCGGKNIGSKSVHWYQQPPGQAPVVVVYDDSDRPSGIPERFSGSNSGNTATLTISRVEAGDEAVYYCQVWDSSSDHVVFGGGTKLTVLLEGQPKANPTVTLFPPSSEELQANKATLVCLISDFYPGAVTVAWKADGSPVKAGVETTKPSKQSNNKYAASSYLSLTPEQWKSHRSYSCQVTHEGSTVEKTVAPTECSGRADCGFTSESYQQGVLSATILYEILLGKATLYAVLVSALVLMAMVKRKDSRGRAKRSGSGVKQTLNFDLLKLAGDVESNPGPTSMDWIWRILFLVGAATGAHSGPQLQLQESGPGLVKPSETLSLTCTVSGDSISSGDYYWGWIRQPPGKGLEWIGHIYYSGVTYYNPSLKSRVTISVDTSRNQFSLKLSSVTAADTAVYYCTREDSSNWRSRGQGTLVTVSSGSGGGGSGGGGSGGGGSFEQLQLQESGPGLVKPSETLSLTCTVSGGSISSSSYFWGWIRQPPGKGLEWIGSIYYSGITYYNPSLKSRVTISVDTSKNQFSLKLSSVTAADTAVYYCARHDGAVAGLFDYWGQGTLVTVSSATRASTKGPSVFPLAPSSKSTSGGTAALGCLVKDYFPEPVTVSWNSGALTSGVHTFPAVLQSSGLYSLSSVVTVPSSSLGTQTYICNVNHKPSNTKVDKRVEPKSCIPEDTFFPSPESSCDVKLVEKSFETDTNLNFQNLSVIGFRILLLKVAGFNLLMTLRLWSS

SEQ ID NO: 18923 - protein, 759 aa, Artificial Sequence
  Synthetic Polypeptide
MALPVTALLLPLALLLHAARPEVQVLESGGGLVQPGGSLRLSCAASGFTFSNFAMSWVRQAPGKGLEWVSTISGSAGTTDYADSVKGRFTISRDNSKKTLYLQMNSLRVEDTAVYYCADGRGPFFDYRGQGTLVTVSSGTGGGGSGGGGSGGGGSEFSYVLTQPPSVSVAPGQTARITCGGKNIGSKSVHWYQQPPGQAPVVVVYDDSDRPSGIPERFSGSNSGNTATLTISRVEAGDEAVYYCQVWDSSSDHVVFGGGTKLTVLLEDLKNVFPPEVAVFEPSEAEISHTQKATLVCLATGFYPDHVELSWWVNGKEVHSGVCTDPQPLKEQPALNDSRYCLSSRLRVSATFWQNPRNHFRCQVQFYGLSENDEWTQDRAKPVTQIVSAEAWGRADCGFTSESYQQGVLSATILYEILLGKATLYAVLVSALVLMAMVKRKDSRGRAKRSGSGATNFSLLKQAGDVEENPGPTSMDWIWRILFLVGAATGAHSFEQLQLQESGPGLVKPSETLSLTCTVSGGSISSSSYFWGWIRQPPGKGLEWIGSIYYSGITYYNPSLKSRVTISVDTSKNQFSLKLSSVTAADTAVYYCARHDGAVAGLFDYWGQGTLVTVSSATRIQNPDPAVYQLRDSKSSDKSVCLFTDFDSQTNVSQSKDSDVYITDKCVLDMRSMDFKSNSAVAWSNKSDFACANAFNNSIIPEDTFFPSPESSCDVKLVEKSFETDTNLNFQNLSVIGFRILLLKVAGFNLLMTLRLWSS

SEQ ID NO: 18924 - protein, 760 aa, Artificial Sequence
  Synthetic Polypeptide
MALPVTALLLPLALLLHAARPSYVLTQPPSVSVAPGQTARITCGGKNIGSKSVHWYQQPPGQAPVVVVYDDSDRPSGIPERFSGSNSGNTATLTISRVEAGDEAVYYCQVWDSSSDHVVFGGGTKLTVLLEDLKNVFPPEVAVFEPSEAEISHTQKATLVCLATGFYPDHVELSWWVNGKEVHSGVCTDPQPLKEQPALNDSRYCLSSRLRVSATFWQNPRNHFRCQVQFYGLSENDEWTQDRAKPVTQIVSAEAWGRADCGFTSESYQQGVLSATILYEILLGKATLYAVLVSALVLMAMVKRKDSRGRAKRSGSGATNFSLLKQAGDVEENPGPTSMDWIWRILFLVGAATGAHSGPEVQLVESGGGLVQAGGSLRLSCAASGRTFSMGWFRQAPGKEREFVAAITYSGGSPYYADSVKGRFTISRDNAKNTVYLQMNSLKPEDTAVYYCAANPTYGSDWNAENWGQGTQVTVSSGSGGGGSGGGGSGGGGSFEQLQLQESGPGLVKPSETLSLTCTVSGGSISSSSYFWGWIRQPPGKGLEWIGSIYYSGITYYNPSLKSRVTISVDTSKNQFSLKLSSVTAADTAVYYCARHDGAVAGLFDYWGQGTLVTVSSATRIQNPDPAVYQLRDSKSSDKSVCLFTDFDSQTNVSQSKDSDVYITDKCVLDMRSMDFKSNSAVAWSNKSDFACANAFNNSIIPEDTFFPSPESSCDVKLVEKSFETDTNLNFQNLSVIGFRILLLKVAGFNLLMTLRLWSS

SEQ ID NO: 18925 - protein, 887 aa, Artificial Sequence
  Synthetic Polypeptide
MALPVTALLLPLALLLHAARPSYVLTQPPSVSVAPGQTARITCGGKNIGSKSVHWYQQPPGQAPVVVVYDDSDRPSGIPERFSGSNSGNTATLTISRVEAGDEAVYYCQVWDSSSDHVVFGGGTKLTVLLEDLKNVFPPEVAVFEPSEAEISHTQKATLVCLATGFYPDHVELSWWVNGKEVHSGVCTDPQPLKEQPALNDSRYCLSSRLRVSATFWQNPRNHFRCQVQFYGLSENDEWTQDRAKPVTQIVSAEAWGRADCGFTSESYQQGVLSATILYEILLGKATLYAVLVSALVLMAMVKRKDSRGRAKRSGSGATNFSLLKQAGDVEENPGPTSMDWIWRILFLVGAATGAHSQLQLQESGPGLVKPSETLSLTCTVSGGSISSGDYYWGWIRQPPGKGLEWIGSISYSGSTYYNPSLKSRVTISVDTSRNQFSLKLSSVTAADTAVYYCTREDSSNWRSRGQGTLVTVSSSGGGGSGGGGSEVQLVESGGGLVQAGGSLRLSCAASGRTFSMGWFRQAPGKEREFVAAITYSGGSPYYADSVKGRFTISRDNAKNTVYLQMNSLKPEDTAVYYCAANPTYGSDWNAENWGQGTQVTVSSGSGGGGSGGGGSGGGGSFEQLQLQESGPGLVKPSETLSLTCTVSGGSISSSSYFWGWIRQPPGKGLEWIGSIYYSGITYYNPSLKSRVTISVDTSKNQFSLKLSSVTAADTAVYYCARHDGAVAGLFDYWGQGTLVTVSSATRIQNPDPAVYQLRDSKSSDKSVCLFTDFDSQTNVSQSKDSDVYITDKCVLDMRSMDFKSNSAVAWSNKSDFACANAFNNSIIPEDTFFPSPESSCDVKLVEKSFETDTNLNFQNLSVIGFRILLLKVAGFNLLMTLRLWSS

SEQ ID NO: 18926 - protein, 896 aa, Artificial Sequence
  Synthetic Polypeptide
MALPVTALLLPLALLLHAARPEVQVLESGGGLVQPGGSLRLSCAASGFTFSNFAMSWVRQAPGKGLEWVSTISGSAGTTDYADSVKGRFTISRDNSKKTLYLQMNSLRVEDTAVYYCADGRGPFFDYRGQGTLVTVSSGTGGGGSGGGGSGGGGSEFSYVLTQPPSVSVAPGQTARITCGGKNIGSKSVHWYQQPPGQAPVVVVYDDSDRPSGIPERFSGSNSGNTATLTISRVEAGDEAVYYCQVWDSSSDHVVFGGGTKLTVLLEDLKNVFPPEVAVFEPSEAEISHTQKATLVCLATGFYPDHVELSWWVNGKEVHSGVCTDPQPLKEQPALNDSRYCLSSRLRVSATFWQNPRNHFRCQVQFYGLSENDEWTQDRAKPVTQIVSAEAWGRADCGFTSESYQQGVLSATILYEILLGKATLYAVLVSALVLMAMVKRKDSRGRAKRSGSGATNFSLLKQAGDVEENPGPTSMDWIWRILFLVGAATGAHSGPEVQLVESGGGLVQAGGSLRLSCAASGRTFSMGWFRQAPGKEREFVAAITYSGGSPYYASSVRGRFTISRDNAKNTVYLQMNSLKPEDTAVYYCAANPTYGSDWNAENWGQGTQVTVSSGSGGGGSGGGGSGGGGSFEQLQLQESGPGLVKPSETLSLTCTVSGGSISSSSYFWGWIRQPPGKGLEWIGSIYYSGITYYNPSLKSRVTISVDTSKNQFSLKLSSVTAADTAVYYCARHDGAVAGLFDYWGQGTLVTVSSATRIQNPDPAVYQLRDSKSSDKSVCLFTDFDSQTNVSQSKDSDVYITDKCVLDMRSMDFKSNSAVAWSNKSDFACANAFNNSIIPEDTFFPSPESSCDVKLVEKSFETDTNLNFQNLSVIGFRILLLKVAGFNLLMTLRLWSS

SEQ ID NO: 18927 - protein, 727 aa, Artificial Sequence
  Synthetic Polypeptide
MALPVTALLLPLALLLHAARPSYVLTQPPSVSVAPGQTARITCGGNNLGSKSVHWYQQPPGQAPVVVVYDDSDRPSGIPERFSGSNSGNTATLTISRVEAGDEAVYYCQVWDSSSDHVVFGGGTKLTVLGGGGSGGGGSGGGGSQLQLQESGPGLVKPSETLSLTCTVSGGSISSSSYFWGWIRQPPGKGLEWIGSIYYSGITYYNPSLKSRVTISVDTSKNQFSLKLSSVTAADTAVYYCARHDGAVAGLFDYWGQGTLVTVSSATREQKLISEEDLAKPTTTPAPRPPTPAPTIASQPLSLRPEACRPAAGGAVHTRGLDFACDIYIWAPLAGTCGVLLLSLVITLYCKRGRKKLLYIFKQPFMRPVQTTQEEDGCSCRFPEEEEGGCELRVKFSRSADAPAYQQGQNQLYNELNLGRREEYDVLDKRRGRDPEMGGKPRRKNPQEGLYNELQKDKMAEAYSEIGMKGERRRGKGHDGLYQGLSTATKDTYDALHMQALPPRSSGSGEGRGSLLTCGDVEENPGPHMTEYKPTVRLATRDDVPRAVRTLAAAFADYPATRHTVDPDRHIERVTELQELFLTRVGLDIGKVWVADDGAAVAVWTTPESVEAGAVFAEIGPRMAELSGSRLAAQQQMEGLLAPHRPKEPAWFLATVGVSPDHQGKGLGSAVVLPGVEAAERAGVPAFLETSAPRNLPFYERLGFTVTADVEVPEGPRTWCMTRKPGA

SEQ ID NO: 18928 - protein, 721 aa, Artificial Sequence
  Synthetic Polypeptide
MALPVTALLLPLALLLHAARPSYVLTQPPSVSVAPGQTARITCGGNNLGSKSVHWYQQPPGQAPVVVVYDDSDRPSGIPERFSGSNSGNTATLTISRVEAGDEAVYYCQVWDSSSDHVVFGGGTKLTVLGGGGSGGGGSGGGGSQLQLQESGPGLVKPSETLSLTCTVSGGSISSSSYFWGWIRQPPGKGLEWIGSIYYSGITYYNPSLKSRVTISVDTSKNQFSLKLSSVTAADTAVYYCARHDGAVAGLFDYWGQGTLVTVSSATREQKLISEEDLKIEVMYPPPYLDNEKSNGTIIHVKGKHLCPSPLFPGPSKPFWVLVVVGGVLACYSLLVTVAFIIFWVRSKRSRLLHSDYMNMTPRRPGPTRKHYQPYAPPRDFAAYRSRVKFSRSADAPAYQQGQNQLYNELNLGRREEYDVLDKRRGRDPEMGGKPRRKNPQEGLYNELQKDKMAEAYSEIGMKGERRRGKGHDGLYQGLSTATKDTYDALHMQALPPRSSGSGEGRGSLLTCGDVEENPGPHMTEYKPTVRLATRDDVPRAVRTLAAAFADYPATRHTVDPDRHIERVTELQELFLTRVGLDIGKVWVADDGAAVAVWTTPESVEAGAVFAEIGPRMAELSGSRLAAQQQMEGLLAPHRPKEPAWFLATVGVSPDHQGKGLGSAVVLPGVEAAERAGVPAFLETSAPRNLPFYERLGFTVTADVEVPEGPRTWCMTRKPGA

SEQ ID NO: 18929 - protein, 498 aa, Artificial Sequence
  Synthetic Polypeptide
MALPVTALLLPLALLLHAARPSYVLTQPPSVSVAPGQTARITCGGNNLGSKSVHWYQQPPGQAPVVVVYDDSDRPSGIPERFSGSNSGNTATLTISRVEAGDEAVYYCQVWDSSSDHVVFGGGTKLTVLGGGGSGGGGSGGGGSQLQLQESGPGLVKPSETLSLTCTVSGGSISSSSYFWGWIRQPPGKGLEWIGSIYYSGITYYNPSLKSRVTISVDTSKNQFSLKLSSVTAADTAVYYCARHDGAVAGLFDYWGQGTLVTVSSATREQKLISEEDLKIEVMYPPPYLDNEKSNGTIIHVKGKHLCPSPLFPGPSKPFWVLVVVGGVLACYSLLVTVAFIIFWVRSKRSRLLHSDYMNMTPRRPGPTRKHYQPYAPPRDFAAYRSRVKFSRSADAPAYQQGQNQLYNELNLGRREEYDVLDKRRGRDPEMGGKPRRKNPQEGLYNELQKDKMAEAYSEIGMKGERRRGKGHDGLYQGLSTATKDTYDALHMQALPPR

SEQ ID NO: 18930 - protein, 504 aa, Artificial Sequence
  Synthetic Polypeptide
MALPVTALLLPLALLLHAARPSYVLTQPPSVSVAPGQTARITCGGNNLGSKSVHWYQQPPGQAPVVVVYDDSDRPSGIPERFSGSNSGNTATLTISRVEAGDEAVYYCQVWDSSSDHVVFGGGTKLTVLGGGGSGGGGSGGGGSQLQLQESGPGLVKPSETLSLTCTVSGGSISSSSYFWGWIRQPPGKGLEWIGSIYYSGITYYNPSLKSRVTISVDTSKNQFSLKLSSVTAADTAVYYCARHDGAVAGLFDYWGQGTLVTVSSATREQKLISEEDLAKPTTTPAPRPPTPAPTIASQPLSLRPEACRPAAGGAVHTRGLDFACDIYIWAPLAGTCGVLLLSLVITLYCKRGRKKLLYIFKQPFMRPVQTTQEEDGCSCRFPEEEEGGCELRVKFSRSADAPAYQQGQNQLYNELNLGRREEYDVLDKRRGRDPEMGGKPRRKNPQEGLYNELQKDKMAEAYSEIGMKGERRRGKGHDGLYQGLSTATKDTYDALHMQALPPR

SEQ ID NO: 18931 - protein, 504 aa, Artificial Sequence
  Synthetic Polypeptide
MALPVTALLLPLALLLHAARPQLQLQESGPGLVKPSETLSLTCTVSGGSISSSSYFWGWIRQPPGKGLEWIGSIYYSGITYYNPSLKSRVTISVDTSKNQFSLKLSSVTAADTAVYYCARHDGAVAGLFDYWGQGTLVTVSSAGGGGSGGGGSGGGGSSYVLTQPPSVSVAPGQTARITCGGNNLGSKSVHWYQQPPGQAPVVVVYDDSDRPSGIPERFSGSNSGNTATLTISRVEAGDEAVYYCQVWDSSSDHVVFGGGTKLTVLTREQKLISEEDLAKPTTTPAPRPPTPAPTIASQPLSLRPEACRPAAGGAVHTRGLDFACDIYIWAPLAGTCGVLLLSLVITLYCKRGRKKLLYIFKQPFMRPVQTTQEEDGCSCRFPEEEEGGCELRVKFSRSADAPAYQQGQNQLYNELNLGRREEYDVLDKRRGRDPEMGGKPRRKNPQEGLYNELQKDKMAEAYSEIGMKGERRRGKGHDGLYQGLSTATKDTYDALHMQALPPR

SEQ ID NO: 18932 - protein, 917 aa, Artificial Sequence
  Synthetic Polypeptide
MALPVTALLLPLALLLHAARPSYVLTQPPSVSVAPGQTARITCGGNNLGSKSVHWYQQPPGQAPVVVVYDDSDRPSGIPERFSGSNSGNTATLTISRVEAGDEAVYYCQVWDSSSDHVVFGGGTKLTVLGGGGSGGGGSGGGGSQLQLQESGPGLVKPSETLSLTCTVSGGSISSSSYFWGWIRQPPGKGLEWIGSIYYSGITYYNPSLKSRVTISVDTSKNQFSLKLSSVTAADTAVYYCARHDGAVAGLFDYWGQGTLVTVSSATREQKLISEEDLAKPTTTPAPRPPTPAPTIASQPLSLRPEACRPAAGGAVHTRGLDFACDIYIWAPLAGTCGVLLLSLVITLYCGRARVKFSRSADAPAYQQGQNQLYNELNLGRREEYDVLDKRRGRDPEMGGKPRRKNPQEGLYNELQKDKMAEAYSEIGMKGERRRGKGHDGLYQGLSTATKDTYDALHMQALPPRSRGSGATNFSLLKQAGDVEENPGPGIHMATYEVLCEVARKLGTDDREVVLFLLNVFIPQPTLAQLIGALRALKEEGRLTFPLLAECLFRAGRRDLLRDLLHLDPRFLERHLAGTMSYFSPYQLTVLHVDGELCARDIRSLIFLSKDTIGSRSTPQTFLHWVYCMENLDLLGPTDVDALMSMLRSLSRVDLQRQVQTLMGLHLSGPSHSQHYRHTPLETDFYDYKDDDDKTSGSGEGRGSLLTCGDVEENPGPHMTEYKPTVRLATRDDVPRAVRTLAAAFADYPATRHTVDPDRHIERVTELQELFLTRVGLDIGKVWVADDGAAVAVWTTPESVEAGAVFAEIGPRMAELSGSRLAAQQQMEGLLAPHRPKEPAWFLATVGVSPDHQGKGLGSAVVLPGVEAAERAGVPAFLETSAPRNLPFYERLGFTVTADVEVPEGPRTWCMTRKPGA

SEQ ID NO: 18933 - protein, 857 aa, Artificial Sequence
  Synthetic Polypeptide
MALPVTALLLPLALLLHAARPSYVLTQPPSVSVAPGQTARITCGGNNLGSKSVHWYQQPPGQAPVVVVYDDSDRPSGIPERFSGSNSGNTATLTISRVEAGDEAVYYCQVWDSSSDHVVFGGGTKLTVLLEIQNPDPAVYQLRDSKSSDKSVCLFTDFDSQTNVSQSKDSDVYITDKCVLDMRSMDFKSNSAVAWSNKSDFACANAFNNSIIPEDTFFPSSDVPCDVKLVEKSFETDTNLNFQNLSVIGFRILLLKVAGFNLLMTLRLWSSRAKRSGSGVKQTLNFDLLKLAGDVESNPGPTSMDWIWRILFLVGAATGAHSFEQLQLQESGPGLVKPSETLSLTCTVSGGSISSSSYFWGWIRQPPGKGLEWIGSIYYSGITYYNPSLKSRVTISVDTSKNQFSLKLSSVTAADTAVYYCARHDGAVAGLFDYWGQGTLVTVSSATREDLKNVFPPEVAVFEPSKAEIAHTQKATLVCLATGFYPDHVELSWWVNGKEVHSGVCTDPQPLKEQPALNDSRYCLSSRLRVSATFWQNPRNHFRCQVQFYGLSENDEWTQDRAKPVTQIVSAEAWGRADCGITSASYHQGVLSATILYEILLGKATLYAVLVSALVLMAMVKRKDSRGRAKRSGSGATNFSLLKQAGDVEENPGPSRGHMTEYKPTVRLATRDDVPRAVRTLAAAFADYPATRHTVDPDRHIERVTELQELFLTRVGLDIGKVWVADDGAAVAVWTTPESVEAGAVFAEIGPRMAELSGSRLAAQQQMEGLLAPHRPKEPAWFLATVGVSPDHQGKGLGSAVVLPGVEAAERAGVPAFLETSAPRNLPFYERLGFTVTADVEVPEGPRTWCMTRKPGA

SEQ ID NO: 18934 - protein, 856 aa, Artificial Sequence
  Synthetic Polypeptide
MALPVTALLLPLALLLHAARPSYVLTQPPSVSVAPGQTARITCGGNNLGSKSVHWYQQPPGQAPVVVVYDDSDRPSGIPERFSGSNSGNTATLTISRVEAGDEAVYYCQVWDSSSDHVVFGGGTKLTVLLEDLKNVFPPEVAVFEPSKAEIAHTQKATLVCLATGFYPDHVELSWWVNGKEVHSGVCTDPQPLKEQPALNDSRYCLSSRLRVSATFWQNPRNHFRCQVQFYGLSENDEWTQDRAKPVTQIVSAEAWGRADCGITSASYHQGVLSATILYEILLGKATLYAVLVSALVLMAMVKRKDSRGRAKRSGSGATNFSLLKQAGDVEENPGPTSMDWIWRILFLVGAATGAHSFEQLQLQESGPGLVKPSETLSLTCTVSGGSISSSSYFWGWIRQPPGKGLEWIGSIYYSGITYYNPSLKSRVTISVDTSKNQFSLKLSSVTAADTAVYYCARHDGAVAGLFDYWGQGTLVTVSSATRIQNPDPAVYQLRDSKSSDKSVCLFTDFDSQTNVSQSKDSDVYITDKCVLDMRSMDFKSNSAVAWSNKSDFACANAFNNSIIPEDTFFPSSDVPCDVKLVEKSFETDTNLNFQNLSVIGFRILLLKVAGFNLLMTLRLWSSRAKRSGSGVKQTLNFDLLKLAGDVESNPGPSRGHMTEYKPTVRLATRDDVPRAVRTLAAAFADYPATRHTVDPDRHIERVTELQELFLTRVGLDIGKVWVADDGAAVAVWTTPESVEAGAVFAEIGPRMAELSGSRLAAQQQMEGLLAPHRPKEPAWFLATVGVSPDHQGKGLGSAVVLPGVEAAERAGVPAFLETSAPRNLPFYERLGFTVTADVEVPEGPRTWCMTRKPGA

SEQ ID NO: 18935 - protein, 623 aa, Artificial Sequence
  Synthetic Polypeptide
MALPVTALLLPLALLLHAARPSYVLTQPPSVSVAPGQTARITCGGNNLGSKSVHWYQQPPGQAPVVVVYDDSDRPSGIPERFSGSNSGNTATLTISRVEAGDEAVYYCQVWDSSSDHVVFGGGTKLTVLLEDLKNVFPPEVAVFEPSEAEISHTQKATLVCLATGFYPDHVELSWWVNGKEVHSGVCTDPQPLKEQPALNDSRYCLSSRLRVSATFWQNPRNHFRCQVQFYGLSENDEWTQDRAKPVTQIVSAEAWGRADCGFTSESYQQGVLSATILYEILLGKATLYAVLVSALVLMAMVKRKDSRGRAKRSGSGATNFSLLKQAGDVEENPGPTSMDWIWRILFLVGAATGAHSFEQLQLQESGPGLVKPSETLSLTCTVSGGSISSSSYFWGWIRQPPGKGLEWIGSIYYSGITYYNPSLKSRVTISVDTSKNQFSLKLSSVTAADTAVYYCARHDGAVAGLFDYWGQGTLVTVSSATRIQNPDPAVYQLRDSKSSDKSVCLFTDFDSQTNVSQSKDSDVYITDKCVLDMRSMDFKSNSAVAWSNKSDFACANAFNNSIIPEDTFFPSPESSCDVKLVEKSFETDTNLNFQNLSVIGFRILLLKVAGFNLLMTLRLWSS

SEQ ID NO: 18936 - protein, 848 aa, Artificial Sequence
  Synthetic Polypeptide
MALPVTALLLPLALLLHAARPSYVLTQPPSVSVAPGQTARITCGGNNLGSKSVHWYQQPPGQAPVVVVYDDSDRPSGIPERFSGSNSGNTATLTISRVEAGDEAVYYCQVWDSSSDHVVFGGGTKLTVLLEDLKNVFPPEVAVFEPSEAEISHTQKATLVCLATGFYPDHVELSWWVNGKEVHSGVCTDPQPLKEQPALNDSRYCLSSRLRVSATFWQNPRNHFRCQVQFYGLSENDEWTQDRAKPVTQIVSAEAWGRADCGFTSESYQQGVLSATILYEILLGKATLYAVLVSALVLMAMVKRKDSRGRAKRSGSGATNFSLLKQAGDVEENPGPTSMDWIWRILFLVGAATGAHSFEQLQLQESGPGLVKPSETLSLTCTVSGGSISSSSYFWGWIRQPPGKGLEWIGSIYYSGITYYNPSLKSRVTISVDTSKNQFSLKLSSVTAADTAVYYCARHDGAVAGLFDYWGQGTLVTVSSATRIQNPDPAVYQLRDSKSSDKSVCLFTDFDSQTNVSQSKDSDVYITDKCVLDMRSMDFKSNSAVAWSNKSDFACANAFNNSIIPEDTFFPSPESSCDVKLVEKSFETDTNLNFQNLSVIGFRILLLKVAGFNLLMTLRLWSSRAKRSGSGVKQTLNFDLLKLAGDVESNPGPSRGGIHTMATYEVLCEVARKLGTDDREVVLFLLNVFIPQPTLAQLIGALRALKEEGRLTFPLLAECLFRAGRRDLLRDLLHLDPRFLERHLAGTMSYFSPYQLTVLHVDGELCARDIRSLIFLSKDTIGSRSTPQTFLHWVYCMENLDLLGPTDVDALMSMLRSLSRVDLQRQVQTLMGLHLSGPSHSQHYRHTP

SEQ ID NO: 18937 - protein, 627 aa, Artificial Sequence
  Synthetic Polypeptide
MALPVTALLLPLALLLHAARPSYVLTQPPSVSVAPGQTARITCGGNNLGSKSVHWYQQPPGQAPVVVVYDDSDRPSGIPERFSGSNSGNTATLTISRVEAGDEAVYYCQVWDSSSDHVVFGGGTKLTVLLEIQNPDPAVYQLRDSKSSDKSVCLFTDFDSQTNVSQSKDSDVYITDKCVLDMRSMDFKSNSAVAWSNKSDFACANAFNNSIIPEDTFFPSPESSCDVKLVEKSFETDTNLNFQNLSVIGFRILLLKVAGFNLLMTLRLWSSRAKRSGSGVKQTLNFDLLKLAGDVESNPGPTSMDWIWRILFLVGAATGAHSFEQLQLQESGPGLVKPSETLSLTCTVSGGSISSSSYFWGWIRQPPGKGLEWIGSIYYSGITYYNPSLKSRVTISVDTSKNQFSLKLSSVTAADTAVYYCARHDGAVAGLFDYWGQGTLVTVSSATREDLKNVFPPEVAVFEPSEAEISHTQKATLVCLATGFYPDHVELSWWVNGKEVHSGVCTDPQPLKEQPALNDSRYCLSSRLRVSATFWQNPRNHFRCQVQFYGLSENDEWTQDRAKPVTQIVSAEAWGRADCGFTSESYQQGVLSATILYEILLGKATLYAVLVSALVLMAMVKRKDSRG

SEQ ID NO: 18938 - protein, 849 aa, Artificial Sequence
  Synthetic Polypeptide
MALPVTALLLPLALLLHAARPSYVLTQPPSVSVAPGQTARITCGGNNLGSKSVHWYQQPPGQAPVVVVYDDSDRPSGIPERFSGSNSGNTATLTISRVEAGDEAVYYCQVWDSSSDHVVFGGGTKLTVLLEIQNPDPAVYQLRDSKSSDKSVCLFTDFDSQTNVSQSKDSDVYITDKCVLDMRSMDFKSNSAVAWSNKSDFACANAFNNSIIPEDTFFPSPESSCDVKLVEKSFETDTNLNFQNLSVIGFRILLLKVAGFNLLMTLRLWSSRAKRSGSGVKQTLNFDLLKLAGDVESNPGPTSMDWIWRILFLVGAATGAHSFEQLQLQESGPGLVKPSETLSLTCTVSGGSISSSSYFWGWIRQPPGKGLEWIGSIYYSGITYYNPSLKSRVTISVDTSKNQFSLKLSSVTAADTAVYYCARHDGAVAGLFDYWGQGTLVTVSSATREDLKNVFPPEVAVFEPSEAEISHTQKATLVCLATGFYPDHVELSWWVNGKEVHSGVCTDPQPLKEQPALNDSRYCLSSRLRVSATFWQNPRNHFRCQVQFYGLSENDEWTQDRAKPVTQIVSAEAWGRADCGFTSESYQQGVLSATILYEILLGKATLYAVLVSALVLMAMVKRKDSRGRAKRSGSGATNFSLLKQAGDVEENPGPSRGGIHTMATYEVLCEVARKLGTDDREVVLFLLNVFIPQPTLAQLIGALRALKEEGRLTFPLLAECLFRAGRRDLLRDLLHLDPRFLERHLAGTMSYFSPYQLTVLHVDGELCARDIRSLIFLSKDTIGSRSTPQTFLHWVYCMENLDLLGPTDVDALMSMLRSLSRVDLQRQVQTLMGLHLSGPSHSQHYRHTP

SEQ ID NO: 18939 - protein, 901 aa, Artificial Sequence
  Synthetic Polypeptide
MALPVTALLLPLALLLHAARPLEGKPIPNPLLGLDSTGSGEDLKNVFPPEVAVFEPSKAEIAHTQKATLVCLATGFYPDHVELSWWVNGKEVHSGVCTDPQPLKEQPALNDSRYCLSSRLRVSATFWQNPRNHFRCQVQFYGLSENDEWTQDRAKPVTQIVSAEAWGRADCGITSASYHQGVLSATILYEILLGKATLYAVLVSALVLMAMVKRKDSRGRAKRSGSGATNFSLLKQAGDVEENPGPTSMALPVTALLLPLALLLHAARPSYVLTQPPSVSVAPGQTARITCGGNNLGSKSVHWYQQPPGQAPVVVVYDDSDRPSGIPERFSGSNSGNTATLTISRVEAGDEAVYYCQVWDSSSDHVVFGGGTKLTVLGGGGSGGGGSGGGGSQLQLQESGPGLVKPSETLSLTCTVSGGSISSSSYFWGWIRQPPGKGLEWIGSIYYSGITYYNPSLKSRVTISVDTSKNQFSLKLSSVTAADTAVYYCARHDGAVAGLFDYWGQGTLVTVSSATREQKLISEEDGSGIQNPDPAVYQLRDSKSSDKSVCLFTDFDSQTNVSQSKDSDVYITDKCVLDMRSMDFKSNSAVAWSNKSDFACANAFNNSIIPEDTFFPSSDVPCDVKLVEKSFETDTNLNFQNLSVIGFRILLLKVAGFNLLMTLRLWSSRAKRSGSGVKQTLNFDLLKLAGDVESNPGPSRGHMTEYKPTVRLATRDDVPRAVRTLAAAFADYPATRHTVDPDRHIERVTELQELFLTRVGLDIGKVWVADDGAAVAVWTTPESVEAGAVFAEIGPRMAELSGSRLAAQQQMEGLLAPHRPKEPAWFLATVGVSPDHQGKGLGSAVVLPGVEAAERAGVPAFLETSAPRNLPFYERLGFTVTADVEVPEGPRTWCMTRKPGA

SEQ ID NO: 18940 - protein, 902 aa, Artificial Sequence
  Synthetic Polypeptide
MALPVTALLLPLALLLHAARPLEQKLISEEDLGSGDRPDPAVYQLRDSKSSDKSVCLFTDFDSQTNVSQSKDSDVYITDKCVLDMRSMDFKSNSAVAWSNKSDFACANAFNNSIIPEDTFFPSPESSCDVKLVEKSFETDTNLNFQNLSVIGFRILLLKVAGFNLLMTLRLWSSSSRAKRSGSGVKQTLNFDLLKLAGDVESNPGPTSMALPVTALLLPLALLLHAARPSYVLTQPPSVSVAPGQTARITCGGNNLGSKSVHWYQQPPGQAPVVVVYDDSDRPSGIPERFSGSNSGNTATLTISRVEAGDEAVYYCQVWDSSSDHVVFGGGTKLTVLGGGGSGGGGSGGGGSQLQLQESGPGLVKPSETLSLTCTVSGGSISSSSYFWGWIRQPPGKGLEWIGSIYYSGITYYNPSLKSRVTISVDTSKNQFSLKLSSVTAADTAVYYCARHDGAVAGLFDYWGQGTLVTVSSATRGKPIPNPLLGLDSTGSGEDLKNVFPPEVAVFEPSEAEISHTQKATLVCLATGFYPDHVELSWWVNGKEVHSGVCTDPQPLKEQPALNDSRYCLSSRLRVSATFWQNPRNHFRCQVQFYGLSENDEWTQDRAKPVTQIVSAEAWGRADCGFTSESYQQGVLSATILYEILLGKATLYAVLVSALVLMAMVKRKDSRGRAKRSGSGATNFSLLKQAGDVEENPGPSRGHMTEYKPTVRLATRDDVPRAVRTLAAAFADYPATRHTVDPDRHIERVTELQELFLTRVGLDIGKVWVADDGAAVAVWTTPESVEAGAVFAEIGPRMAELSGSRLAAQQQMEGLLAPHRPKEPAWFLATVGVSPDHQGKGLGSAVVLPGVEAAERAGVPAFLETSAPRNLPFYERLGFTVTADVEVPEGPRTWCMTRKPGA

SEQ ID NO: 18941 - protein, 856 aa, Artificial Sequence
  Synthetic Polypeptide
MALPVTALLLPLALLLHAARPSYVLTQPPSVSVAPGQTARITCGGNNLGSKSVHWYQQPPGQAPVVVVYDDSDRPSGIPERFSGSNSGNTATLTISRVEAGDEAVYYCQVWDSSSDHVVFGGGTKLTVLLEDLKNVFPPEVAVFEPSEAEISHTQKATLVCLATGFYPDHVELSWWVNGKEVHSGVSTDPQPLKEQPALNDSRYCLSSRLRVSATFWQNPRNHFRCQVQFYGLSENDEWTQDRAKPVTQIVSAEAWGRADCGFTSESYQQGVLSATILYEILLGKATLYAVLVSALVLMAMVKRKDSRGRAKRSGSGATNFSLLKQAGDVEENPGPTSMDWIWRILFLVGAATGAHSFEQLQLQESGPGLVKPSETLSLTCTVSGGSISSSSYFWGWIRQPPGKGLEWIGSIYYSGITYYNPSLKSRVTISVDTSKNQFSLKLSSVTAADTAVYYCARHDGAVAGLFDYWGQGTLVTVSSATRIQNPDPAVYQLRDSKSSDKSVCLFTDFDSQTNVSQSKDSDVYITDKTVLDMRSMDFKSNSAVAWSNKSDFACANAFNNSIIPEDTFFPSPESSCDVKLVEKSFETDTNLNFQNLSVIGFRILLLKVAGFNLLMTLRLWSSRAKRSGSGVKQTLNFDLLKLAGDVESNPGPSRGHMTEYKPTVRLATRDDVPRAVRTLAAAFADYPATRHTVDPDRHIERVTELQELFLTRVGLDIGKVWVADDGAAVAVWTTPESVEAGAVFAEIGPRMAELSGSRLAAQQQMEGLLAPHRPKEPAWFLATVGVSPDHQGKGLGSAVVLPGVEAAERAGVPAFLETSAPRNLPFYERLGFTVTADVEVPEGPRTWCMTRKPGA

SEQ ID NO: 18942 - protein, 938 aa, Artificial Sequence
  Synthetic Polypeptide
MALPVTALLLPLALLLHAARPSYVLTQPPSVSVAPGQTARITCGGNNLGSKSVHWYQQPPGQAPVVVVYDDSDRPSGIPERFSGSNSGNTATLTISRVEAGDEAVYYCQVWDSSSDHVVFGGGTKLTVLLEDLKNVFPPEVAVFEPSEAEISHTQKATLVCLATGFYPDHVELSWWVNGKEVHSGVSTDPQPLKEQPALNDSRYCLSSRLRVSATFWQNPRNHFRCQVQFYGLSENDEWTQDRAKPVTQIVSAEAWGRADCGFTSESYQQGVLSATILYEILLGKATLYAVLVSALVLMAMVKRKDSRGRAKRSGSGATNFSLLKQAGDVEENPGPTSMDWIWRILFLVGAATGAHSFEQLQLQESGPGLVKPSETLSLTCTVSGGSISSSSYFWGWIRQPPGKGLEWIGSIYYSGITYYNPSLKSRVTISVDTSKNQFSLKLSSVTAADTAVYYCARHDGAVAGLFDYWGQGTLVTVSSATREQKLISEEDGSGTPFPSLAPPIMLLVDGKQQMVVVCLVLDVAPPGLDSPIWFSAGNGSALDAFTYGPSPATDGTWTNLAHLSLPSEELASWEPLVCHTGPGAEGHSRSTQPMHLSGEASTARTCPQEPLRGTPGGALWLGVLRLLLFKLLLFDLLLTCSCLCDPAGPLPSPATTTRLRALGSHRLHPATETGGREATSSPRPQPRDRRWGDTPPGRKPGSPVRAKRSGSGVKQTLNFDLLKLAGDVESNPGPSRGHMTEYKPTVRLATRDDVPRAVRTLAAAFADYPATRHTVDPDRHIERVTELQELFLTRVGLDIGKVWVADDGAAVAVWTTPESVEAGAVFAEIGPRMAELSGSRLAAQQQMEGLLAPHRPKEPAWFLATVGVSPDHQGKGLGSAVVLPGVEAAERAGVPAFLETSAPRNLPFYERLGFTVTADVEVPEGPRTWCMTRKPGA

SEQ ID NO: 18943 - protein, 956 aa, Artificial Sequence
  Synthetic Polypeptide
MALPVTALLLPLALLLHAARPLEDLKNVFPPEVAVFEPSEAEISHTQKATLVCLATGFYPDHVELSWWVNGKEVHSGVSTDPQPLKEQPALNDSRYCLSSRLRVSATFWQNPRNHFRCQVQFYGLSENDEWTQDRAKPVTQIVSAEAWGRADCGFTSESYQQGVLSATILYEILLGKATLYAVLVSALVLMAMVKRKDSRGRAKRSGSGATNFSLLKQAGDVEENPGPTSMALPVTALLLPLALLLHAARPSYVLTQPPSVSVAPGQTARITCGGNNLGSKSVHWYQQPPGQAPVVVVYDDSDRPSGIPERFSGSNSGNTATLTISRVEAGDEAVYYCQVWDSSSDHVVFGGGTKLTVLGGGGSGGGGSGGGGSQLQLQESGPGLVKPSETLSLTCTVSGGSISSSSYFWGWIRQPPGKGLEWIGSIYYSGITYYNPSLKSRVTISVDTSKNQFSLKLSSVTAADTAVYYCARHDGAVAGLFDYWGQGTLVTVSSATREQKLISEEDLGSGTPFPSLAPPIMLLVDGKQQMVVVCLVLDVAPPGLDSPIWFSAGNGSALDAFTYGPSPATDGTWTNLAHLSLPSEELASWEPLVCHTGPGAEGHSRSTQPMHLSGEASTARTCPQEPLRGTPGGALWLGVLRLLLFKLLLFDLLLTCSCLCDPAGPLPSPATTTRLRALGSHRLHPATETGGREATSSPRPQPRDRRWGDTPPGRKPGSPVRAKRSGSGVKQTLNFDLLKLAGDVESNPGPSRSRGHMTEYKPTVRLATRDDVPRAVRTLAAAFADYPATRHTVDPDRHIERVTELQELFLTRVGLDIGKVWVADDGAAVAVWTTPESVEAGAVFAEIGPRMAELSGSRLAAQQQMEGLLAPHRPKEPAWFLATVGVSPDHQGKGLGSAVVLPGVEAAERAGVPAFLETSAPRNLPFYERLGFTVTADVEVPEGPRTWCMTRKPGA

SEQ ID NO: 18944 - protein, 893 aa, Artificial Sequence
  Synthetic Polypeptide
MALPVTALLLPLALLLHAARPSYVLTQPPSVSVAPGQTARITCGGNNLGSKSVHWYQQPPGQAPVVVVYDDSDRPSGIPERFSGSNSGNTATLTISRVEAGDEAVYYCQVWDSSSDHVVFGGGTKLTVLLEGKPIPNPLLGLDSTGSGDKQLDADVSPKPTIFLPSIAETKLQKAGTYLCLLEKFFPDVIKIHWQEKKSNTILGSQEGNTMKTNDTYMKFSWLTVPEKSLDKEHRCIVRHENNKNGVDQEIIFPPIKTDVITMDPKDNCSKDANDTLLLQLTNTSAYYMYLLLLLKSVVYFAIITCCLLRRTAFCCNGEKSRAKRSGSGATNFSLLKQAGDVEENPGPTSMDWIWRILFLVGAATGAHSFEQLQLQESGPGLVKPSETLSLTCTVSGGSISSSSYFWGWIRQPPGKGLEWIGSIYYSGITYYNPSLKSRVTISVDTSKNQFSLKLSSVTAADTAVYYCARHDGAVAGLFDYWGQGTLVTVSSATREQKLISEEDGSGSQPHTKPSVFVMKNGTNVACLVKEFYPKDIRINLVSSKKITEFDPAIVISPSGKYNAVKLGKYEDSNSVTCSVQHDNKTVHSTDFEVKTDSTDHVKPKETENTKQPSKSCHKPKAIVHTEKVNMMSLTVLGLRMLFAKTVAVNFLLTAKLFFLRAKRSGSGVKQTLNFDLLKLAGDVESNPGPSRGHMTEYKPTVRLATRDDVPRAVRTLAAAFADYPATRHTVDPDRHIERVTELQELFLTRVGLDIGKVWVADDGAAVAVWTTPESVEAGAVFAEIGPRMAELSGSRLAAQQQMEGLLAPHRPKEPAWFLATVGVSPDHQGKGLGSAVVLPGVEAAERAGVPAFLETSAPRNLPFYERLGFTVTADVEVPEGPRTWCMTRKPGA

SEQ ID NO: 18945 - protein, 631 aa, Artificial Sequence
  Synthetic Polypeptide
MALPVTALLLPLALLLHAARPSYVLTQPPSVSVAPGQTARITCGGNNLGSKSVHWYQQPPGQAPVVVVYDDSDRPSGIPERFSGSNSGNTATLTISRVEAGDEAVYYCQVWDSSSDHVVFGGGTKLTVLLESQPHTKPSVFVMKNGTNVACLVKEFYPKDIRINLVSSKKITEFDPAIVISPSGKYNAVKLGKYEDSNSVTCSVQHDNKTVHSTDFEVKTDSTDHVKPKETENTKQPSKSCHKPKAIVHTEKVNMMSLTVLGLRMLFAKTVAVNFLLTAKLFFLRAKRSGSGATNFSLLKQAGDVEENPGPTSMDWIWRILFLVGAATGAHSFEQLQLQESGPGLVKPSETLSLTCTVSGGSISSSSYFWGWIRQPPGKGLEWIGSIYYSGITYYNPSLKSRVTISVDTSKNQFSLKLSSVTAADTAVYYCARHDGAVAGLFDYWGQGTLVTVSSATRDKQLDADVSPKPTIFLPSIAETKLQKAGTYLCLLEKFFPDVIKIHWQEKKSNTILGSQEGNTMKTNDTYMKFSWLTVPEKSLDKEHRCIVRHENNKNGVDQEIIFPPIKTDVITMDPKDNCSKDANDTLLLQLTNTSAYYMYLLLLLKSVVYFAIITCCLLRRTAFCCNGEKS

SEQ ID NO: 18946 - protein, 908 aa, Artificial Sequence
  Synthetic Polypeptide
MALPVTALLLPLALLLHAARPLEGKPIPNPLLGLDSTGSGDKQLDADVSPKPTIFLPSIAETKLQKAGTYLCLLEKFFPDVIKIHWQEKKSNTILGSQEGNTMKTNDTYMKFSWLTVPEKSLDKEHRCIVRHENNKNGVDQEIIFPPIKTDVITMDPKDNCSKDANDTLLLQLTNTSAYYMYLLLLLKSVVYFAIITCCLLRRTAFCCNGEKSRAKRSGSGATNFSLLKQAGDVEENPGPTSMALPVTALLLPLALLLHAARPSYVLTQPPSVSVAPGQTARITCGGNNLGSKSVHWYQQPPGQAPVVVVYDDSDRPSGIPERFSGSNSGNTATLTISRVEAGDEAVYYCQVWDSSSDHVVFGGGTKLTVLGGGGSGGGGSGGGGSQLQLQESGPGLVKPSETLSLTCTVSGGSISSSSYFWGWIRQPPGKGLEWIGSIYYSGITYYNPSLKSRVTISVDTSKNQFSLKLSSVTAADTAVYYCARHDGAVAGLFDYWGQGTLVTVSSATREQKLISEEDGSGSQPHTKPSVFVMKNGTNVACLVKEFYPKDIRINLVSSKKITEFDPAIVISPSGKYNAVKLGKYEDSNSVTCSVQHDNKTVHSTDFEVKTDSTDHVKPKETENTKQPSKSCHKPKAIVHTEKVNMMSLTVLGLRMLFAKTVAVNFLLTAKLFFLRAKRSGSGVKQTLNFDLLKLAGDVESNPGPSRGHMTEYKPTVRLATRDDVPRAVRTLAAAFADYPATRHTVDPDRHIERVTELQELFLTRVGLDIGKVWVADDGAAVAVWTTPESVEAGAVFAEIGPRMAELSGSRLAAQQQMEGLLAPHRPKEPAWFLATVGVSPDHQGKGLGSAVVLPGVEAAERAGVPAFLETSAPRNLPFYERLGFTVTADVEVPEGPRTWCMTRKPGA

SEQ ID NO: 18947 - protein, 1033 aa, Artificial Sequence
  Synthetic Polypeptide
MALPVTALLLPLALLLHAARPSYVLTQPPSVSVAPGQTARITCGGNNLGSKSVHWYQQPPGQAPVVVVYDDSDRPSGIPERFSGSNSGNTATLTISRVEAGDEAVYYCQVWDSSSDHVVFGGGTKLTVLGQPKANPTVTLFPPSSEELQANKATLVCLISDFYPGAVTVAWKADGSPVKAGVETTKPSKQSNNKYAASSYLSLTPEQWKSHRSYSCQVTHEGSTVEKTVAPTECSGSQSFGLLDPKLCYLLDGILFIYGVILTALFLRVKFSRSADAPAYQQGQNQLYNELNLGRREEYDVLDKRRGRDPEMGGKPQRRKNPQEGLYNELQKDKMAEAYSEIGMKGERRRGKGHDGLYQGLSTATKDTYDALHMQALPPRRAKRSGSGATNFSLLKQAGDVEENPGPTSMDWIWRILFLVGAATGAHSFEQLQLQESGPGLVKPSETLSLTCTVSGGSISSSSYFWGWIRQPPGKGLEWIGSIYYSGITYYNPSLKSRVTISVDTSKNQFSLKLSSVTAADTAVYYCARHDGAVAGLFDYWGQGTLVTVSSAASTKGPSVFPLAPSSKSTSGGTAALGCLVKDYFPEPVTVSWNSGALTSGVHTFPAVLQSSGLYSLSSVVTVPSSSLGTQTYICNVNHKPSNTKVDKRVEPKSCGTQSFGLLDPKLCYLLDGILFIYGVILTALFLRVKFSRSADAPAYQQGQNQLYNELNLGRREEYDVLDKRRGRDPEMGGKPQRRKNPQEGLYNELQKDKMAEAYSEIGMKGERRRGKGHDGLYQGLSTATKDTYDALHMQALPPRRAKRSGSGVKQTLNFDLLKLAGDVESNPGPSRGHMTEYKPTVRLATRDDVPRAVRTLAAAFADYPATRHTVDPDRHIERVTELQELFLTRVGLDIGKVWVADDGAAVAVWTTPESVEAGAVFAEIGPRMAELSGSRLAAQQQMEGLLAPHRPKEPAWFLATVGVSPDHQGKGLGSAVVLPGVEAAERAGVPAFLETSAPRNLPFYERLGFTVTADVEVPEGPRTWCMTRKPGA

SEQ ID NO: 18948 - protein, 819 aa, Artificial Sequence
  Synthetic Polypeptide
MALPVTALLLPLALLLHAARPSYVLTQPPSVSVAPGQTARITCGGNNLGSKSVHWYQQPPGQAPVVVVYDDSDRPSGIPERFSGSNSGNTATLTISRVEAGDEAVYYCQVWDSSSDHVVFGGGTKLTVLLEDLKNVFPPEVAVFEPSEAEISHTQKATLVCLATGFYPDHVELSWWVNGKEVHSGVSTDPQPLKEQPALNDSRYCLSSRLRVSATFWQNPRNHFRCQVQFYGLSENDEWTQDRAKPVTQIVSAEAWGRADCGSQSFGLLDPKLCYLLDGILFIYGVILTALFLRVKFSRSADAPAYQQGQNQLYNELNLGRREEYDVLDKRRGRDPEMGGKPQRRKNPQEGLYNELQKDKMAEAYSEIGMKGERRRGKGHDGLYQGLSTATKDTYDALHMQALPPRRAKRSGSGATNFSLLKQAGDVEENPGPTSMDWIWRILFLVGAATGAHSFEQLQLQESGPGLVKPSETLSLTCTVSGGSISSSSYFWGWIRQPPGKGLEWIGSIYYSGITYYNPSLKSRVTISVDTSKNQFSLKLSSVTAADTAVYYCARHDGAVAGLFDYWGQGTLVTVSSATRIQNPDPAVYQLRDSKSSDKSVCLFTDFDSQTNVSQSKDSDVYITDKTVLDMRSMDFKSNSAVAWSNKSDFACANAFNNSIIPEDTFFPSPESSCGTQSFGLLDPKLCYLLDGILFIYGVILTALFLRVKFSRSADAPAYQQGQNQLYNELNLGRREEYDVLDKRRGRDPEMGGKPQRRKNPQEGLYNELQKDKMAEAYSEIGMKGERRRGKGHDGLYQGLSTATKDTYDALHMQALPPR

SEQ ID NO: 18949 - protein, 819 aa, Artificial Sequence
  Synthetic Polypeptide
MALPVTALLLPLALLLHAARPSYVLTQPPSVSVAPGQTARITCGGNNLGSKSVHWYQQPPGQAPVVVVYDDSDRPSGIPERFSGSNSGNTATLTISRVEAGDEAVYYCQVWDSSSDHVVFGGGTKLTVLLEDLKNVFPPEVAVFEPSKAEIAHTQKATLVCLATGFYPDHVELSWWVNGKEVHSGVCTDPQPLKEQPALNDSRYCLSSRLRVSATFWQNPRNHFRCQVQFYGLSENDEWTQDRAKPVTQIVSAEAWGRADCGSQSFGLLDPKLCYLLDGILFIYGVILTALFLRVKFSRSADAPAYQQGQNQLYNELNLGRREEYDVLDKRRGRDPEMGGKPQRRKNPQEGLYNELQKDKMAEAYSEIGMKGERRRGKGHDGLYQGLSTATKDTYDALHMQALPPRRAKRSGSGATNFSLLKQAGDVEENPGPTSMDWIWRILFLVGAATGAHSFEQLQLQESGPGLVKPSETLSLTCTVSGGSISSSSYFWGWIRQPPGKGLEWIGSIYYSGITYYNPSLKSRVTISVDTSKNQFSLKLSSVTAADTAVYYCARHDGAVAGLFDYWGQGTLVTVSSATRIQNPDPAVYQLRDSKSSDKSVCLFTDFDSQTNVSQSKDSDVYITDKCVLDMRSMDFKSNSAVAWSNKSDFACANAFNNSIIPEDTFFPSSDVPCGTQSFGLLDPKLCYLLDGILFIYGVILTALFLRVKFSRSADAPAYQQGQNQLYNELNLGRREEYDVLDKRRGRDPEMGGKPQRRKNPQEGLYNELQKDKMAEAYSEIGMKGERRRGKGHDGLYQGLSTATKDTYDALHMQALPPR

SEQ ID NO: 18950 - protein, 890 aa, Artificial Sequence
  Synthetic Polypeptide
MALPVTALLLPLALLLHAARPSYVLTQPPSVSVAPGQTARITCGGNNLGSKSVHWYQQPPGQAPVVVVYDDSDRPSGIPERFSGSNSGNTATLTISRVEAGDEAVYYCQVWDSSSDHVVFGGGTKLTVLLEGKPIPNPLLGLDSTGSGEDLKNVFPPEVAVFEPSEAEISHTQKATLVCLATGFYPDHVELSWWVNGKEVHSGVSTDPQPLKEQPALNDSRYCLSSRLRVSATFWQNPRNHFRCQVQFYGLSENDEWTQDRAKPVTQIVSAEAWGRADCGSQSFGLLDPKLCYLLDGILFIYGVILTALFLRVKFSRSADAPAYQQGQNQLYNELNLGRREEYDVLDKRRGRDPEMGGKPQRRKNPQEGLYNELQKDKMAEAYSEIGMKGERRRGKGHDGLYQGLSTATKDTYDALHMQALPPRRAKRSGSGATNFSLLKQAGDVEENPGPTSMDWIWRILFLVGAATGAHSFEQLQLQESGPGLVKPSETLSLTCTVSGGSISSSSYFWGWIRQPPGKGLEWIGSIYYSGITYYNPSLKSRVTISVDTSKNQFSLKLSSVTAADTAVYYCARHDGAVAGLFDYWGQGTLVTVSSATREQKLISEEDGSGIQNPDPAVYQLRDSKSSDKSVCLFTDFDSQTNVSQSKDSDVYITDKTVLDMRSMDFKSNSAVAWSNKSDFACANAFNNSIIPEDTFFPSPESSCGTQSFGLLDPKLCYLLDGILFIYGVILTALFLRSKRSRLLHSDYMNMTPRRPGPTRKHYQPYAPPRDFAAYRSRVKFSRSADAPAYQQGQNQLYNELNLGRREEYDVLDKRRGRDPEMGGKPQRRKNPQEGLYNELQKDKMAEAYSEIGMKGERRRGKGHDGLYQGLSTATKDTYDALHMQALPPR

SEQ ID NO: 18951 - protein, 931 aa, Artificial Sequence
  Synthetic Polypeptide
MALPVTALLLPLALLLHAARPSYVLTQPPSVSVAPGQTARITCGGNNLGSKSVHWYQQPPGQAPVVVVYDDSDRPSGIPERFSGSNSGNTATLTISRVEAGDEAVYYCQVWDSSSDHVVFGGGTKLTVLLEGKPIPNPLLGLDSTGSGEDLKNVFPPEVAVFEPSEAEISHTQKATLVCLATGFYPDHVELSWWVNGKEVHSGVSTDPQPLKEQPALNDSRYCLSSRLRVSATFWQNPRNHFRCQVQFYGLSENDEWTQDRAKPVTQIVSAEAWGRADCGSQSFGLLDPKLCYLLDGILFIYGVILTALFLRSKRSRLLHSDYMNMTPRRPGPTRKHYQPYAPPRDFAAYRSRVKFSRSADAPAYQQGQNQLYNELNLGRREEYDVLDKRRGRDPEMGGKPQRRKNPQEGLYNELQKDKMAEAYSEIGMKGERRRGKGHDGLYQGLSTATKDTYDALHMQALPPRRAKRSGSGATNFSLLKQAGDVEENPGPTSMDWIWRILFLVGAATGAHSFEQLQLQESGPGLVKPSETLSLTCTVSGGSISSSSYFWGWIRQPPGKGLEWIGSIYYSGITYYNPSLKSRVTISVDTSKNQFSLKLSSVTAADTAVYYCARHDGAVAGLFDYWGQGTLVTVSSATREQKLISEEDGSGIQNPDPAVYQLRDSKSSDKSVCLFTDFDSQTNVSQSKDSDVYITDKTVLDMRSMDFKSNSAVAWSNKSDFACANAFNNSIIPEDTFFPSPESSCGTQSFGLLDPKLCYLLDGILFIYGVILTALFLRSKRSRLLHSDYMNMTPRRPGPTRKHYQPYAPPRDFAAYRSRVKFSRSADAPAYQQGQNQLYNELNLGRREEYDVLDKRRGRDPEMGGKPQRRKNPQEGLYNELQKDKMAEAYSEIGMKGERRRGKGHDGLYQGLSTATKDTYDALHMQALPPR

SEQ ID NO: 18952 - protein, 892 aa, Artificial Sequence
  Synthetic Polypeptide
MALPVTALLLPLALLLHAARPSYVLTQPPSVSVAPGQTARITCGGNNLGSKSVHWYQQPPGQAPVVVVYDDSDRPSGIPERFSGSNSGNTATLTISRVEAGDEAVYYCQVWDSSSDHVVFGGGTKLTVLLEGKPIPNPLLGLDSTGSGEDLKNVFPPEVAVFEPSEAEISHTQKATLVCLATGFYPDHVELSWWVNGKEVHSGVSTDPQPLKEQPALNDSRYCLSSRLRVSATFWQNPRNHFRCQVQFYGLSENDEWTQDRAKPVTQIVSAEAWGRADCGSQSFGLLDPKLCYLLDGILFIYGVILTALFLRVKFSRSADAPAYQQGQNQLYNELNLGRREEYDVLDKRRGRDPEMGGKPQRRKNPQEGLYNELQKDKMAEAYSEIGMKGERRRGKGHDGLYQGLSTATKDTYDALHMQALPPRRAKRSGSGATNFSLLKQAGDVEENPGPTSMDWIWRILFLVGAATGAHSFEQLQLQESGPGLVKPSETLSLTCTVSGGSISSSSYFWGWIRQPPGKGLEWIGSIYYSGITYYNPSLKSRVTISVDTSKNQFSLKLSSVTAADTAVYYCARHDGAVAGLFDYWGQGTLVTVSSATREQKLISEEDLGSGIQNPDPAVYQLRDSKSSDKSVCLFTDFDSQTNVSQSKDSDVYITDKTVLDMRSMDFKSNSAVAWSNKSDFACANAFNNSIIPEDTFFPSPESSCGTQSFGLLDPKLCYLLDGILFIYGVILTALFLKRGRKKLLYIFKQPFMRPVQTTQEEDGCSCRFPEEEEGGCELRVKFSRSADAPAYQQGQNQLYNELNLGRREEYDVLDKRRGRDPEMGGKPQRRKNPQEGLYNELQKDKMAEAYSEIGMKGERRRGKGHDGLYQGLSTATKDTYDALHMQALPPR

SEQ ID NO: 18953 - protein, 934 aa, Artificial Sequence
  Synthetic Polypeptide
MALPVTALLLPLALLLHAARPSYVLTQPPSVSVAPGQTARITCGGNNLGSKSVHWYQQPPGQAPVVVVYDDSDRPSGIPERFSGSNSGNTATLTISRVEAGDEAVYYCQVWDSSSDHVVFGGGTKLTVLLEGKPIPNPLLGLDSTGSGEDLKNVFPPEVAVFEPSEAEISHTQKATLVCLATGFYPDHVELSWWVNGKEVHSGVSTDPQPLKEQPALNDSRYCLSSRLRVSATFWQNPRNHFRCQVQFYGLSENDEWTQDRAKPVTQIVSAEAWGRADCGSQSFGLLDPKLCYLLDGILFIYGVILTALFLKRGRKKLLYIFKQPFMRPVQTTQEEDGCSCRFPEEEEGGCELRVKFSRSADAPAYQQGQNQLYNELNLGRREEYDVLDKRRGRDPEMGGKPQRRKNPQEGLYNELQKDKMAEAYSEIGMKGERRRGKGHDGLYQGLSTATKDTYDALHMQALPPRRAKRSGSGATNFSLLKQAGDVEENPGPTSMDWIWRILFLVGAATGAHSFEQLQLQESGPGLVKPSETLSLTCTVSGGSISSSSYFWGWIRQPPGKGLEWIGSIYYSGITYYNPSLKSRVTISVDTSKNQFSLKLSSVTAADTAVYYCARHDGAVAGLFDYWGQGTLVTVSSATREQKLISEEDLGSGIQNPDPAVYQLRDSKSSDKSVCLFTDFDSQTNVSQSKDSDVYITDKTVLDMRSMDFKSNSAVAWSNKSDFACANAFNNSIIPEDTFFPSPESSCGTQSFGLLDPKLCYLLDGILFIYGVILTALFLKRGRKKLLYIFKQPFMRPVQTTQEEDGCSCRFPEEEEGGCELRVKFSRSADAPAYQQGQNQLYNELNLGRREEYDVLDKRRGRDPEMGGKPQRRKNPQEGLYNELQKDKMAEAYSEIGMKGERRRGKGHDGLYQGLSTATKDTYDALHMQALPPR

SEQ ID NO: 18954 - protein, 824 aa, Artificial Sequence
  Synthetic Polypeptide
MALPVTALLLPLALLLHAARPSYVLTQPPSVSVAPGQTARITCGGNNLGSKSVHWYQQPPGQAPVVVVYDDSDRPSGIPERFSGSNSGNTATLTISRVEAGDEAVYYCQVWDSSSDHVVFGGGTKLTVLLEQSFGLLDPKLCYLLDGILFIYGVILTALFLRVKFSRSADAPAYQQGQNQLYNELNLGRREEYDVLDKRRGRDPEMGGKPQRRKNPQEGLYNELQKDKMAEAYSEIGMKGERRRGKGHDGLYQGLSTATKDTYDALHMQALPPRRAKRSGSGATNFSLLKQAGDVEENPGPTSMDWIWRILFLVGAATGAHSFEQLQLQESGPGLVKPSETLSLTCTVSGGSISSSSYFWGWIRQPPGKGLEWIGSIYYSGITYYNPSLKSRVTISVDTSKNQFSLKLSSVTAADTAVYYCARHDGAVAGLFDYWGQGTLVTVSSATRQSFGLLDPKLCYLLDGILFIYGVILTALFLRVKFSRSADAPAYQQGQNQLYNELNLGRREEYDVLDKRRGRDPEMGGKPQRRKNPQEGLYNELQKDKMAEAYSEIGMKGERRRGKGHDGLYQGLSTATKDTYDALHMQALPPRRAKRSGSGVKQTLNFDLLKLAGDVESNPGPSRGHMTEYKPTVRLATRDDVPRAVRTLAAAFADYPATRHTVDPDRHIERVTELQELFLTRVGLDIGKVWVADDGAAVAVWTTPESVEAGAVFAEIGPRMAELSGSRLAAQQQMEGLLAPHRPKEPAWFLATVGVSPDHQGKGLGSAVVLPGVEAAERAGVPAFLETSAPRNLPFYERLGFTVTADVEVPEGPRTWCMTRKPGA

SEQ ID NO: 18955 - protein, 649 aa, Artificial Sequence
  Synthetic Polypeptide
MALPVTALLLPLALLLHAARPSYVLTQPPSVSVAPGQTARITCGGNNLGSKSVHWYQQPPGQAPVVVVYDDSDRPSGIPERFSGSNSGNTATLTISRVEAGDEAVYYCQVWDSSSDHVVFGGGTKLTVLLEGQPKANPTVTLFPPSSEELQANKATLVCLISDFYPGAVTVAWKADGSPVKAGVETTKPSKQSNNKYAASSYLSLTPEQWKSHRSYSCQVTHEGSTVEKTVAPTECSPIKTDVITMDPKDNCSKDANDTLLLQLTNTSAYYMYLLLLLKSVVYFAIITCCLLRRTAFCCNGEKSRAKRSGSGATNFSLLKQAGDVEENPGPTSMDWIWRILFLVGAATGAHSFEQLQLQESGPGLVKPSETLSLTCTVSGGSISSSSYFWGWIRQPPGKGLEWIGSIYYSGITYYNPSLKSRVTISVDTSKNQFSLKLSSVTAADTAVYYCARHDGAVAGLFDYWGQGTLVTVSSATRASTKGPSVFPLAPSSKSTSGGTAALGCLVKDYFPEPVTVSWNSGALTSGVHTFPAVLQSSGLYSLSSVVTVPSSSLGTQTYICNVNHKPSNTKVDKRVEPKSCEVKTDSTDHVKPKETENTKQPSKSCHKPKAIVHTEKVNMMSLTVLGLRMLFAKTVAVNFLLTAKLFFL

SEQ ID NO: 18956 - protein, 627 aa, Artificial Sequence
  Synthetic Polypeptide
MALPVTALLLPLALLLHAARPSYVLTQPPSVSVAPGQTARITCGGNNLGSKSVHWYQQPPGQAPVVVVYDDSDRPSGIPERFSGSNSGNTATLTISRVEAGDEAVYYCQVWDSSSDHVVFGGGTKLTVLLEGQPKANPTVTLFPPSSEELQANKATLVCLISDFYPGAVTVAWKADGSPVKAGVETTKPSKQSNNKYAASSYLSLTPEQWKSHRSYSCQVTHEGSTVEKTVAPTECSGRADCGITSASYHQGVLSATILYEILLGKATLYAVLVSALVLMAMVKRKDSRGRAKRSGSGATNFSLLKQAGDVEENPGPTSMDWIWRILFLVGAATGAHSFEQLQLQESGPGLVKPSETLSLTCTVSGGSISSSSYFWGWIRQPPGKGLEWIGSIYYSGITYYNPSLKSRVTISVDTSKNQFSLKLSSVTAADTAVYYCARHDGAVAGLFDYWGQGTLVTVSSATRASTKGPSVFPLAPSSKSTSGGTAALGCLVKDYFPEPVTVSWNSGALTSGVHTFPAVLQSSGLYSLSSVVTVPSSSLGTQTYICNVNHKPSNTKVDKRVEPKSCIPEDTFFPSSDVPCDVKLVEKSFETDTNLNFQNLSVIGFRILLLKVAGFNLLMTLRLWSS

SEQ ID NO: 18957 - protein, 627 aa, Artificial Sequence
  Synthetic Polypeptide
MALPVTALLLPLALLLHAARPSYVLTQPPSVSVAPGQTARITCGGNNLGSKSVHWYQQPPGQAPVVVVYDDSDRPSGIPERFSGSNSGNTATLTISRVEAGDEAVYYCQVWDSSSDHVVFGGGTKLTVLLEGQPKANPTVTLFPPSSEELQANKATLVCLISDFYPGAVTVAWKADGSPVKAGVETTKPSKQSNNKYAASSYLSLTPEQWKSHRSYSCQVTHEGSTVEKTVAPTECSGRADCGFTSESYQQGVLSATILYEILLGKATLYAVLVSALVLMAMVKRKDSRGRAKRSGSGATNFSLLKQAGDVEENPGPTSMDWIWRILFLVGAATGAHSFEQLQLQESGPGLVKPSETLSLTCTVSGGSISSSSYFWGWIRQPPGKGLEWIGSIYYSGITYYNPSLKSRVTISVDTSKNQFSLKLSSVTAADTAVYYCARHDGAVAGLFDYWGQGTLVTVSSATRASTKGPSVFPLAPSSKSTSGGTAALGCLVKDYFPEPVTVSWNSGALTSGVHTFPAVLQSSGLYSLSSVVTVPSSSLGTQTYICNVNHKPSNTKVDKRVEPKSCIPEDTFFPSPESSCDVKLVEKSFETDTNLNFQNLSVIGFRILLLKVAGFNLLMTLRLWSS

SEQ ID NO: 18958 - protein, 453 aa, Artificial Sequence
  Synthetic Polypeptide
MALPVTALLLPLALLLHAARPSYVLTQPPSVSVAPGQTARITCGGNNLGSKSVHWYQQPPGQAPVVVVYDDSDRPSGIPERFSGSNSGNTATLTISRVEAGDEAVYYCQVWDSSSDHVVFGGGTKLTVLGGGGSGGGGSGGGGSQLQLQESGPGLVKPSETLSLTCTVSGGSISSSSYFWGWIRQPPGKGLEWIGSIYYSGITYYNPSLKSRVTISVDTSKNQFSLKLSSVTAADTAVYYCARHDGAVAGLFDYWGQGTLVTVSSATRDGNEEMGGITQTPYKVSISGTTVILTCPQYPGSEILWQHNDKNIGGDEDDKNIGSDEDHLSLKEFSELEQSGYYVCYPRGSKPEDANFYLYLRARVCENCMEMDVMSVATIVIVDICITGGLLLLVYYWSKNRKAKAKPVTRGAGAGGRQRGQNKERPPPVPNPDYEPIRKGQRDLYSGLNQRRI

SEQ ID NO: 18959 - protein, 418 aa, Artificial Sequence
  Synthetic Polypeptide
MALPVTALLLPLALLLHAARPSYVLTQPPSVSVAPGQTARITCGGNNLGSKSVHWYQQPPGQAPVVVVYDDSDRPSGIPERFSGSNSGNTATLTISRVEAGDEAVYYCQVWDSSSDHVVFGGGTKLTVLGGGGSGGGGSGGGGSQLQLQESGPGLVKPSETLSLTCTVSGGSISSSSYFWGWIRQPPGKGLEWIGSIYYSGITYYNPSLKSRVTISVDTSKNQFSLKLSSVTAADTAVYYCARHDGAVAGLFDYWGQGTLVTVSSATRFKIPIEELEDRVFVNCNTSITWVEGTVGTLLSDITRLDLGKRILDPRGIYRCNGTDIYKDKESTVQVHYRMCQSCVELDPATVAGIIVTDVIATLLLALGVFCFAGHETGRLSGAADTQALLRNDQVYQPLRDRDDAQYSHLGGNWARNK

SEQ ID NO: 18960 - protein, 428 aa, Artificial Sequence
  Synthetic Polypeptide
MALPVTALLLPLALLLHAARPSYVLTQPPSVSVAPGQTARITCGGNNLGSKSVHWYQQPPGQAPVVVVYDDSDRPSGIPERFSGSNSGNTATLTISRVEAGDEAVYYCQVWDSSSDHVVFGGGTKLTVLGGGGSGGGGSGGGGSQLQLQESGPGLVKPSETLSLTCTVSGGSISSSSYFWGWIRQPPGKGLEWIGSIYYSGITYYNPSLKSRVTISVDTSKNQFSLKLSSVTAADTAVYYCARHDGAVAGLFDYWGQGTLVTVSSATRQSIKGNHLVKVYDYQEDGSVLLTCDAEAKNITWFKDGKMIGFLTEDKKKWNLGSNAKDPRGMYQCKGSQNKSKPLQVYYRMCQNCIELNAATISGFLFAEIVSIFVLAVGVYFIAGQDGVRQSRASDKQTLLPNDQLYQPLKDREDDQYSHLQGNQLRRN

SEQ ID NO: 18961 - protein, 411 aa, Artificial Sequence
  Synthetic Polypeptide
MALPVTALLLPLALLLHAARPSYVLTQPPSVSVAPGQTARITCGGNNLGSKSVHWYQQPPGQAPVVVVYDDSDRPSGIPERFSGSNSGNTATLTISRVEAGDEAVYYCQVWDSSSDHVVFGGGTKLTVLGGGGSGGGGSGGGGSQLQLQESGPGLVKPSETLSLTCTVSGGSISSSSYFWGWIRQPPGKGLEWIGSIYYSGITYYNPSLKSRVTISVDTSKNQFSLKLSSVTAADTAVYYCARHDGAVAGLFDYWGQGTLVTVSSATRQSFGLLDPKLCYLLDGILFIYGVILTALFLRVKFSRSADAPAYQQGQNQLYNELNLGRREEYDVLDKRRGRDPEMGGKPQRRKNPQEGLYNELQKDKMAEAYSEIGMKGERRRGKGHDGLYQGLSTATKDTYDALHMQALPPR

SEQ ID NO: 18962 - protein, 453 aa, Artificial Sequence
  Synthetic Polypeptide
MALPVTALLLPLALLLHAARPQLQLQESGPGLVKPSETLSLTCTVSGGSISSSSYFWGWIRQPPGKGLEWIGSIYYSGITYYNPSLKSRVTISVDTSKNQFSLKLSSVTAADTAVYYCARHDGAVAGLFDYWGQGTLVTVSSAGGGGSGGGGSGGGGSSYVLTQPPSVSVAPGQTARITCGGNNLGSKSVHWYQQPPGQAPVVVVYDDSDRPSGIPERFSGSNSGNTATLTISRVEAGDEAVYYCQVWDSSSDHVVFGGGTKLTVLTRDGNEEMGGITQTPYKVSISGTTVILTCPQYPGSEILWQHNDKNIGGDEDDKNIGSDEDHLSLKEFSELEQSGYYVCYPRGSKPEDANFYLYLRARVCENCMEMDVMSVATIVIVDICITGGLLLLVYYWSKNRKAKAKPVTRGAGAGGRQRGQNKERPPPVPNPDYEPIRKGQRDLYSGLNQRRI

SEQ ID NO: 18963 - protein, 418 aa, Artificial Sequence
  Synthetic Polypeptide
MALPVTALLLPLALLLHAARPQLQLQESGPGLVKPSETLSLTCTVSGGSISSSSYFWGWIRQPPGKGLEWIGSIYYSGITYYNPSLKSRVTISVDTSKNQFSLKLSSVTAADTAVYYCARHDGAVAGLFDYWGQGTLVTVSSAGGGGSGGGGSGGGGSSYVLTQPPSVSVAPGQTARITCGGNNLGSKSVHWYQQPPGQAPVVVVYDDSDRPSGIPERFSGSNSGNTATLTISRVEAGDEAVYYCQVWDSSSDHVVFGGGTKLTVLTRFKIPIEELEDRVFVNCNTSITWVEGTVGTLLSDITRLDLGKRILDPRGIYRCNGTDIYKDKESTVQVHYRMCQSCVELDPATVAGIIVTDVIATLLLALGVFCFAGHETGRLSGAADTQALLRNDQVYQPLRDRDDAQYSHLGGNWARNK

SEQ ID NO: 18964 - protein, 428 aa, Artificial Sequence
  Synthetic Polypeptide
MALPVTALLLPLALLLHAARPQLQLQESGPGLVKPSETLSLTCTVSGGSISSSSYFWGWIRQPPGKGLEWIGSIYYSGITYYNPSLKSRVTISVDTSKNQFSLKLSSVTAADTAVYYCARHDGAVAGLFDYWGQGTLVTVSSAGGGGSGGGGSGGGGSSYVLTQPPSVSVAPGQTARITCGGNNLGSKSVHWYQQPPGQAPVVVVYDDSDRPSGIPERFSGSNSGNTATLTISRVEAGDEAVYYCQVWDSSSDHVVFGGGTKLTVLTRQSIKGNHLVKVYDYQEDGSVLLTCDAEAKNITWFKDGKMIGFLTEDKKKWNLGSNAKDPRGMYQCKGSQNKSKPLQVYYRMCQNCIELNAATISGFLFAEIVSIFVLAVGVYFIAGQDGVRQSRASDKQTLLPNDQLYQPLKDREDDQYSHLQGNQLRRN

SEQ ID NO: 18965 - protein, 411 aa, Artificial Sequence
  Synthetic Polypeptide
MALPVTALLLPLALLLHAARPQLQLQESGPGLVKPSETLSLTCTVSGGSISSSSYFWGWIRQPPGKGLEWIGSIYYSGITYYNPSLKSRVTISVDTSKNQFSLKLSSVTAADTAVYYCARHDGAVAGLFDYWGQGTLVTVSSAGGGGSGGGGSGGGGSSYVLTQPPSVSVAPGQTARITCGGNNLGSKSVHWYQQPPGQAPVVVVYDDSDRPSGIPERFSGSNSGNTATLTISRVEAGDEAVYYCQVWDSSSDHVVFGGGTKLTVLTRQSFGLLDPKLCYLLDGILFIYGVILTALFLRVKFSRSADAPAYQQGQNQLYNELNLGRREEYDVLDKRRGRDPEMGGKPQRRKNPQEGLYNELQKDKMAEAYSEIGMKGERRRGKGHDGLYQGLSTATKDTYDALHMQALPPR

SEQ ID NO: 18966 - protein, 644 aa, Artificial Sequence
  Synthetic Polypeptide
MALPVTALLLPLALLLHAARPSYVLTQPPSVSVAPGQTARITCGGNNLGSKSVHWYQQPPGQAPVVVVYDDSDRPSGIPERFSGSNSGNTATLTISRVEAGDEAVYYCQVWDSSSDHVVFGGGTKLTVLGGGGSGGGGSGGGGSQLQLQESGPGLVKPSETLSLTCTVSGGSISSSSYFWGWIRQPPGKGLEWIGSIYYSGITYYNPSLKSRVTISVDTSKNQFSLKLSSVTAADTAVYYCARHDGAVAGLFDYWGQGTLVTVSSATRGSGIQNPDPAVYQLRDSKSSDKSVCLFTDFDSQTNVSQSKDSDVYITDKTVLDMRSMDFKSNSAVAWSNKSDFACANAFNNSIIPEDTFFPSPESSCDVKLVEKSFETDTNLNFQNLSVIGFRILLLKVAGFNLLMTLRLWSSRAKRSGSGVKQTLNFDLLKLAGDVESNPGPSRGHMTEYKPTVRLATRDDVPRAVRTLAAAFADYPATRHTVDPDRHIERVTELQELFLTRVGLDIGKVWVADDGAAVAVWTTPESVEAGAVFAEIGPRMAELSGSRLAAQQQMEGLLAPHRPKEPAWFLATVGVSPDHQGKGLGSAVVLPGVEAAERAGVPAFLETSAPRNLPFYERLGFTVTADVEVPEGPRTWCMTRKPGA

SEQ ID NO: 18967 - protein, 676 aa, Artificial Sequence
  Synthetic Polypeptide
MALPVTALLLPLALLLHAARPSYVLTQPPSVSVAPGQTARITCGGNNLGSKSVHWYQQPPGQAPVVVVYDDSDRPSGIPERFSGSNSGNTATLTISRVEAGDEAVYYCQVWDSSSDHVVFGGGTKLTVLGGGGSGGGGSGGGGSQLQLQESGPGLVKPSETLSLTCTVSGGSISSSSYFWGWIRQPPGKGLEWIGSIYYSGITYYNPSLKSRVTISVDTSKNQFSLKLSSVTAADTAVYYCARHDGAVAGLFDYWGQGTLVTVSSALEDLKNVFPPEVAVFEPSEAEISHTQKATLVCLATGFYPDHVELSWWVNGKEVHSGVSTDPQPLKEQPALNDSRYCLSSRLRVSATFWQNPRNHFRCQVQFYGLSENDEWTQDRAKPVTQIVSAEAWGRADCGFTSESYQQGVLSATILYEILLGKATLYAVLVSALVLMAMVKRKDSRGRAKRSGSGATNFSLLKQAGDVEENPGPTRGHMTEYKPTVRLATRDDVPRAVRTLAAAFADYPATRHTVDPDRHIERVTELQELFLTRVGLDIGKVWVADDGAAVAVWTTPESVEAGAVFAEIGPRMAELSGSRLAAQQQMEGLLAPHRPKEPAWFLATVGVSPDHQGKGLGSAVVLPGVEAAERAGVPAFLETSAPRNLPFYERLGFTVTADVEVPEGPRTWCMTRKPGA

SEQ ID NO: 18968 - protein, 726 aa, Artificial Sequence
  Synthetic Polypeptide
MALPVTALLLPLALLLHAARPSYVLTQPPSVSVAPGQTARITCGGNNLGSKSVHWYQQPPGQAPVVVVYDDSDRPSGIPERFSGSNSGNTATLTISRVEAGDEAVYYCQVWDSSSDHVVFGGGTKLTVLGGGGSGGGGSGGGGSQLQLQESGPGLVKPSETLSLTCTVSGGSISSSSYFWGWIRQPPGKGLEWIGSIYYSGITYYNPSLKSRVTISVDTSKNQFSLKLSSVTAADTAVYYCARHDGAVAGLFDYWGQGTLVTVSSATREQKLISEEDLGSGTPFPSLAPPIMLLVDGKQQMVVVCLVLDVAPPGLDSPIWFSAGNGSALDAFTYGPSPATDGTWTNLAHLSLPSEELASWEPLVCHTGPGAEGHSRSTQPMHLSGEASTARTCPQEPLRGTPGGALWLGVLRLLLFKLLLFDLLLTCSCLCDPAGPLPSPATTTRLRALGSHRLHPATETGGREATSSPRPQPRDRRWGDTPPGRKPGSPVRAKRSGSGVKQTLNFDLLKLAGDVESNPGPSRSRGHMTEYKPTVRLATRDDVPRAVRTLAAAFADYPATRHTVDPDRHIERVTELQELFLTRVGLDIGKVWVADDGAAVAVWTTPESVEAGAVFAEIGPRMAELSGSRLAAQQQMEGLLAPHRPKEPAWFLATVGVSPDHQGKGLGSAVVLPGVEAAERAGVPAFLETSAPRNLPFYERLGFTVTADVEVPEGPRTWCMTRKPGA

SEQ ID NO: 18969 - protein, 539 aa, Artificial Sequence; identical to SEQ ID NO: 18693
  Synthetic Polypeptide

SEQ ID NO: 18970 - protein, 309 aa, Artificial Sequence; identical to SEQ ID NO: 18694
  Synthetic Polypeptide

SEQ ID NO: 18971 - protein, 451 aa, Artificial Sequence; identical to SEQ ID NO: 18143
  Synthetic Polypeptide

SEQ ID NO: 18972 - protein, 285 aa, Artificial Sequence; identical to SEQ ID NO: 18144
  Synthetic Polypeptide

SEQ ID NO: 18973 - protein, 557 aa, Artificial Sequence; identical to SEQ ID NO: 18697
  Synthetic Polypeptide

SEQ ID NO: 18974 - protein, 327 aa, Artificial Sequence; identical to SEQ ID NO: 18698
  Synthetic Polypeptide

SEQ ID NO: 18975 - protein, 463 aa, Artificial Sequence; identical to SEQ ID NO: 18147
  Synthetic Polypeptide

SEQ ID NO: 18976 - protein, 297 aa, Artificial Sequence; identical to SEQ ID NO: 18148
  Synthetic Polypeptide

SEQ ID NO: 18977 - protein, 644 aa, Artificial Sequence
  Synthetic Polypeptide
MALPVTALLLPLALLLHAARPSYVLTQPPSVSVAPGQTARITCGGNNLGSKSVHWYQQPPGQAPVVVVYDDSDRPSGIPERFSGSNSGNTATLTISRVEAGDEAVYYCQVWDSSSDHVVFGGGTKLTVLGGGGSGGGGSGGGGSQLQLQESGPGLVKPSETLSLTCTVSGGSISSSSYFWGWIRQPPGKGLEWIGSIYYSGITYYNPSLKSRVTISVDTSKNQFSLKLSSVTAADTAVYYCARHDGAVAGLFDYWGQGTLVTVSSATRGSGIQNPDPAVYQLRDSKSSDKSVCLFTDFDSQTNVSQSKDSDVYITDKTVLDMRSMDFKSNSAVAWSNKSDFACANAFNNSIIPEDTFFPSSDVPCDVKLVEKSFETDTNLNFQNLSVIGFRILLLKVAGFNLLMTLRLWSSRAKRSGSGVKQTLNFDLLKLAGDVESNPGPSRGHMTEYKPTVRLATRDDVPRAVRTLAAAFADYPATRHTVDPDRHIERVTELQELFLTRVGLDIGKVWVADDGAAVAVWTTPESVEAGAVFAEIGPRMAELSGSRLAAQQQMEGLLAPHRPKEPAWFLATVGVSPDHQGKGLGSAVVLPGVEAAERAGVPAFLETSAPRNLPFYERLGFTVTADVEVPEGPRTWCMTRKPGA

SEQ ID NO: 18978 - protein, 676 aa, Artificial Sequence
  Synthetic Polypeptide
MALPVTALLLPLALLLHAARPSYVLTQPPSVSVAPGQTARITCGGNNLGSKSVHWYQQPPGQAPVVVVYDDSDRPSGIPERFSGSNSGNTATLTISRVEAGDEAVYYCQVWDSSSDHVVFGGGTKLTVLGGGGSGGGGSGGGGSQLQLQESGPGLVKPSETLSLTCTVSGGSISSSSYFWGWIRQPPGKGLEWIGSIYYSGITYYNPSLKSRVTISVDTSKNQFSLKLSSVTAADTAVYYCARHDGAVAGLFDYWGQGTLVTVSSALEDLKNVFPPEVAVFEPSKAEIAHTQKATLVCLATGFYPDHVELSWWVNGKEVHSGVSTDPQPLKEQPALNDSRYCLSSRLRVSATFWQNPRNHFRCQVQFYGLSENDEWTQDRAKPVTQIVSAEAWGRADCGITSASYHQGVLSATILYEILLGKATLYAVLVSALVLMAMVKRKDSRGRAKRSGSGATNFSLLKQAGDVEENPGPTRGHMTEYKPTVRLATRDDVPRAVRTLAAAFADYPATRHTVDPDRHIERVTELQELFLTRVGLDIGKVWVADDGAAVAVWTTPESVEAGAVFAEIGPRMAELSGSRLAAQQQMEGLLAPHRPKEPAWFLATVGVSPDHQGKGLGSAVVLPGVEAAERAGVPAFLETSAPRNLPFYERLGFTVTADVEVPEGPRTWCMTRKPGA

SEQ ID NO: 18979 - protein, 699 aa, Artificial Sequence
  Synthetic Polypeptide
MALPVTALLLPLALLLHAARPSYVLTQPPSVSVAPGQTARITCGGNNLGSKSVHWYQQPPGQAPVVVVYDDSDRPSGIPERFSGSNSGNTATLTISRVEAGDEAVYYCQVWDSSSDHVVFGGGTKLTVLGGGGSGGGGSGGGGSQLQLQESGPGLVKPSETLSLTCTVSGGSISSSSYFWGWIRQPPGKGLEWIGSIYYSGITYYNPSLKSRVTISVDTSKNQFSLKLSSVTAADTAVYYCARHDGAVAGLFDYWGQGTLVTVSSATRGSGGGGSGGGGSGDGNEEMGGITQTPYKVSISGTTVILTCPQYPGSEILWQHNDKNIGGDEDDKNIGSDEDHLSLKEFSELEQSGYYVCYPRGSKPEDANFYLYLRARVCENCMEMDVMSVATIVIVDICITGGLLLLVYYWSKNRKAKAKPVTRGAGAGGRQRGQNKERPPPVPNPDYEPIRKGQRDLYSGLNQRRIRAKRSGSGVKQTLNFDLLKLAGDVESNPGPSRGHMTEYKPTVRLATRDDVPRAVRTLAAAFADYPATRHTVDPDRHIERVTELQELFLTRVGLDIGKVWVADDGAAVAVWTTPESVEAGAVFAEIGPRMAELSGSRLAAQQQMEGLLAPHRPKEPAWFLATVGVSPDHQGKGLGSAVVLPGVEAAERAGVPAFLETSAPRNLPFYERLGFTVTADVEVPEGPRTWCMTRKPGA

SEQ ID NO: 18980 - protein, 664 aa, Artificial Sequence
  Synthetic Polypeptide
MALPVTALLLPLALLLHAARPSYVLTQPPSVSVAPGQTARITCGGNNLGSKSVHWYQQPPGQAPVVVVYDDSDRPSGIPERFSGSNSGNTATLTISRVEAGDEAVYYCQVWDSSSDHVVFGGGTKLTVLGGGGSGGGGSGGGGSQLQLQESGPGLVKPSETLSLTCTVSGGSISSSSYFWGWIRQPPGKGLEWIGSIYYSGITYYNPSLKSRVTISVDTSKNQFSLKLSSVTAADTAVYYCARHDGAVAGLFDYWGQGTLVTVSSATRGSGGGGSGGGGSGFKIPIEELEDRVFVNCNTSITWVEGTVGTLLSDITRLDLGKRILDPRGIYRCNGTDIYKDKESTVQVHYRMCQSCVELDPATVAGIIVTDVIATLLLALGVFCFAGHETGRLSGAADTQALLRNDQVYQPLRDRDDAQYSHLGGNWARNKRAKRSGSGVKQTLNFDLLKLAGDVESNPGPSRGHMTEYKPTVRLATRDDVPRAVRTLAAAFADYPATRHTVDPDRHIERVTELQELFLTRVGLDIGKVWVADDGAAVAVWTTPESVEAGAVFAEIGPRMAELSGSRLAAQQQMEGLLAPHRPKEPAWFLATVGVSPDHQGKGLGSAVVLPGVEAAERAGVPAFLETSAPRNLPFYERLGFTVTADVEVPEGPRTWCMTRKPGA

SEQ ID NO: 18981 - protein, 674 aa, Artificial Sequence
  Synthetic Polypeptide
MALPVTALLLPLALLLHAARPSYVLTQPPSVSVAPGQTARITCGGNNLGSKSVHWYQQPPGQAPVVVVYDDSDRPSGIPERFSGSNSGNTATLTISRVEAGDEAVYYCQVWDSSSDHVVFGGGTKLTVLGGGGSGGGGSGGGGSQLQLQESGPGLVKPSETLSLTCTVSGGSISSSSYFWGWIRQPPGKGLEWIGSIYYSGITYYNPSLKSRVTISVDTSKNQFSLKLSSVTAADTAVYYCARHDGAVAGLFDYWGQGTLVTVSSATRGSGGGGSGGGGSGQSIKGNHLVKVYDYQEDGSVLLTCDAEAKNITWFKDGKMIGFLTEDKKKWNLGSNAKDPRGMYQCKGSQNKSKPLQVYYRMCQNCIELNAATISGFLFAEIVSIFVLAVGVYFIAGQDGVRQSRASDKQTLLPNDQLYQPLKDREDDQYSHLQGNQLRRNRAKRSGSGVKQTLNFDLLKLAGDVESNPGPSRGHMTEYKPTVRLATRDDVPRAVRTLAAAFADYPATRHTVDPDRHIERVTELQELFLTRVGLDIGKVWVADDGAAVAVWTTPESVEAGAVFAEIGPRMAELSGSRLAAQQQMEGLLAPHRPKEPAWFLATVGVSPDHQGKGLGSAVVLPGVEAAERAGVPAFLETSAPRNLPFYERLGFTVTADVEVPEGPRTWCMTRKPGA

SEQ ID NO: 18982 - protein, 657 aa, Artificial Sequence
  Synthetic Polypeptide
MALPVTALLLPLALLLHAARPSYVLTQPPSVSVAPGQTARITCGGNNLGSKSVHWYQQPPGQAPVVVVYDDSDRPSGIPERFSGSNSGNTATLTISRVEAGDEAVYYCQVWDSSSDHVVFGGGTKLTVLGGGGSGGGGSGGGGSQLQLQESGPGLVKPSETLSLTCTVSGGSISSSSYFWGWIRQPPGKGLEWIGSIYYSGITYYNPSLKSRVTISVDTSKNQFSLKLSSVTAADTAVYYCARHDGAVAGLFDYWGQGTLVTVSSATRGSGGGGSGGGGSGQSFGLLDPKLCYLLDGILFIYGVILTALFLRVKFSRSADAPAYQQGQNQLYNELNLGRREEYDVLDKRRGRDPEMGGKPQRRKNPQEGLYNELQKDKMAEAYSEIGMKGERRRGKGHDGLYQGLSTATKDTYDALHMQALPPRRAKRSGSGVKQTLNFDLLKLAGDVESNPGPSRGHMTEYKPTVRLATRDDVPRAVRTLAAAFADYPATRHTVDPDRHIERVTELQELFLTRVGLDIGKVWVADDGAAVAVWTTPESVEAGAVFAEIGPRMAELSGSRLAAQQQMEGLLAPHRPKEPAWFLATVGVSPDHQGKGLGSAVVLPGVEAAERAGVPAFLETSAPRNLPFYERLGFTVTADVEVPEGPRTWCMTRKPGA

SEQ ID NO: 18983 - protein, 758 aa, Artificial Sequence
  Synthetic Polypeptide
MALPVTALLLPLALLLHAARPEVQLVESGGGLVQPGGSLRLSCAASGFSFSDFWMSWVRQAPGKGLEWVATISQAGSEKDYVDSVKGRFTISRDNAKKSLYLQMNSLRAEDTAVYYCASGVYSFDYRGQGTLVTVSSGTGGGGSGGGGSGGGGSEFSYVLTQPPSVSVAPGQTARITCGGNNLGSKSVHWYQQPPGQAPVVVVYDDSDRPSGIPERFSGSNSGNTATLTISRVEAGDEAVYYCQVWDSSSDHVVFGGGTKLTVLLEDLKNVFPPEVAVFEPSEAEISHTQKATLVCLATGFYPDHVELSWWVNGKEVHSGVCTDPQPLKEQPALNDSRYCLSSRLRVSATFWQNPRNHFRCQVQFYGLSENDEWTQDRAKPVTQIVSAEAWGRADCGFTSESYQQGVLSATILYEILLGKATLYAVLVSALVLMAMVKRKDSRGRAKRSGSGATNFSLLKQAGDVEENPGPTSMDWIWRILFLVGAATGAHSFEQLQLQESGPGLVKPSETLSLTCTVSGGSISSSSYFWGWIRQPPGKGLEWIGSIYYSGITYYNPSLKSRVTISVDTSKNQFSLKLSSVTAADTAVYYCARHDGAVAGLFDYWGQGTLVTVSSATRIQNPDPAVYQLRDSKSSDKSVCLFTDFDSQTNVSQSKDSDVYITDKCVLDMRSMDFKSNSAVAWSNKSDFACANAFNNSIIPEDTFFPSPESSCDVKLVEKSFETDTNLNFQNLSVIGFRILLLKVAGFNLLMTLRLWSS

SEQ ID NO: 18984 - protein, 762 aa, Artificial Sequence
  Synthetic Polypeptide
MALPVTALLLPLALLLHAARPEVQLVESGGGLVQPGGSLRLSCAASGFSFSDFWMSWVRQAPGKGLEWVATISQAGSEKDYVDSVKGRFTISRDNAKKSLYLQMNSLRAEDTAVYYCASGVYSFDYRGQGTLVTVSSGTGGGGSGGGGSGGGGSEFSYVLTQPPSVSVAPGQTARITCGGNNLGSKSVHWYQQPPGQAPVVVVYDDSDRPSGIPERFSGSNSGNTATLTISRVEAGDEAVYYCQVWDSSSDHVVFGGGTKLTVLLEIQNPDPAVYQLRDSKSSDKSVCLFTDFDSQTNVSQSKDSDVYITDKCVLDMRSMDFKSNSAVAWSNKSDFACANAFNNSIIPEDTFFPSPESSCDVKLVEKSFETDTNLNFQNLSVIGFRILLLKVAGFNLLMTLRLWSSRAKRSGSGVKQTLNFDLLKLAGDVESNPGPTSMDWIWRILFLVGAATGAHSFEQLQLQESGPGLVKPSETLSLTCTVSGGSISSSSYFWGWIRQPPGKGLEWIGSIYYSGITYYNPSLKSRVTISVDTSKNQFSLKLSSVTAADTAVYYCARHDGAVAGLFDYWGQGTLVTVSSATREDLKNVFPPEVAVFEPSEAEISHTQKATLVCLATGFYPDHVELSWWVNGKEVHSGVCTDPQPLKEQPALNDSRYCLSSRLRVSATFWQNPRNHFRCQVQFYGLSENDEWTQDRAKPVTQIVSAEAWGRADCGFTSESYQQGVLSATILYEILLGKATLYAVLVSALVLMAMVKRKDSRG

SEQ ID NO: 18985 - protein, 954 aa, Artificial Sequence
  Synthetic Polypeptide
MALPVTALLLPLALLLHAARPEVQLVESGGGLVQPGGSLRLSCAASGFSFSDFWMSWVRQAPGKGLEWVATISQAGSEKDYVDSVKGRFTISRDNAKKSLYLQMNSLRAEDTAVYYCASGVYSFDYRGQGTLVTVSSGTGGGGSGGGGSGGGGSEFSYVLTQPPSVSVAPGQTARITCGGNNLGSKSVHWYQQPPGQAPVVVVYDDSDRPSGIPERFSGSNSGNTATLTISRVEAGDEAVYYCQVWDSSSDHVVFGGGTKLTVLLEDLKNVFPPEVAVFEPSEAEISHTQKATLVCLATGFYPDHVELSWWVNGKEVHSGVSTDPQPLKEQPALNDSRYCLSSRLRVSATFWQNPRNHFRCQVQFYGLSENDEWTQDRAKPVTQIVSAEAWGRADCGSQSFGLLDPKLCYLLDGILFIYGVILTALFLRVKFSRSADAPAYQQGQNQLYNELNLGRREEYDVLDKRRGRDPEMGGKPQRRKNPQEGLYNELQKDKMAEAYSEIGMKGERRRGKGHDGLYQGLSTATKDTYDALHMQALPPRRAKRSGSGATNFSLLKQAGDVEENPGPTSMDWIWRILFLVGAATGAHSFEQLQLQESGPGLVKPSETLSLTCTVSGGSISSSSYFWGWIRQPPGKGLEWIGSIYYSGITYYNPSLKSRVTISVDTSKNQFSLKLSSVTAADTAVYYCARHDGAVAGLFDYWGQGTLVTVSSATRIQNPDPAVYQLRDSKSSDKSVCLFTDFDSQTNVSQSKDSDVYITDKTVLDMRSMDFKSNSAVAWSNKSDFACANAFNNSIIPEDTFFPSPESSCGTQSFGLLDPKLCYLLDGILFIYGVILTALFLRVKFSRSADAPAYQQGQNQLYNELNLGRREEYDVLDKRRGRDPEMGGKPQRRKNPQEGLYNELQKDKMAEAYSEIGMKGERRRGKGHDGLYQGLSTATKDTYDALHMQALPPR

SEQ ID NO: 18986 - protein, 784 aa, Artificial Sequence
  Synthetic Polypeptide
MALPVTALLLPLALLLHAARPEVQLVESGGGLVQPGGSLRLSCAASGFSFSDFWMSWVRQAPGKGLEWVATISQAGSEKDYVDSVKGRFTISRDNAKKSLYLQMNSLRAEDTAVYYCASGVYSFDYRGQGTLVTVSSGTGGGGSGGGGSGGGGSEFSYVLTQPPSVSVAPGQTARITCGGNNLGSKSVHWYQQPPGQAPVVVVYDDSDRPSGIPERFSGSNSGNTATLTISRVEAGDEAVYYCQVWDSSSDHVVFGGGTKLTVLLEGQPKANPTVTLFPPSSEELQANKATLVCLISDFYPGAVTVAWKADGSPVKAGVETTKPSKQSNNKYAASSYLSLTPEQWKSHRSYSCQVTHEGSTVEKTVAPTECSPIKTDVITMDPKDNCSKDANDTLLLQLTNTSAYYMYLLLLLKSVVYFAIITCCLLRRTAFCCNGEKSRAKRSGSGATNFSLLKQAGDVEENPGPTSMDWIWRILFLVGAATGAHSFEQLQLQESGPGLVKPSETLSLTCTVSGGSISSSSYFWGWIRQPPGKGLEWIGSIYYSGITYYNPSLKSRVTISVDTSKNQFSLKLSSVTAADTAVYYCARHDGAVAGLFDYWGQGTLVTVSSATRASTKGPSVFPLAPSSKSTSGGTAALGCLVKDYFPEPVTVSWNSGALTSGVHTFPAVLQSSGLYSLSSVVTVPSSSLGTQTYICNVNHKPSNTKVDKRVEPKSCEVKTDSTDHVKPKETENTKQPSKSCHKPKAIVHTEKVNMMSLTVLGLRMLFAKTVAVNFLLTAKLFFL

SEQ ID NO: 18987 - protein, 765 aa, Artificial Sequence
  Synthetic Polypeptide
MALPVTALLLPLALLLHAARPEVQLVESGGGLVQPGGSLRLSCAASGFSFSDFWMSWVRQAPGKGLEWVATISQAGSEKDYVDSVKGRFTISRDNAKKSLYLQMNSLRAEDTAVYYCASGVYSFDYRGQGTLVTVSSGTGGGGSGGGGSGGGGSEFSYVLTQPPSVSVAPGQTARITCGGNNLGSKSVHWYQQPPGQAPVVVVYDDSDRPSGIPERFSGSNSGNTATLTISRVEAGDEAVYYCQVWDSSSDHVVFGGGTKLTVLLEGQPKANPTVTLFPPSSEELQANKATLVCLISDFYPGAVTVAWKADGSPVKAGVETTKPSKQSNNKYAASSYLSLTPEQWKSHRSYSCQVTHEGSTVEKTVAPTECSGRADCGFTSESYQQGVLSATILYEILLGKATLYAVLVSALVLMAMVKRKDSRGRAKRSGSGVKQTLNFDLLKLAGDVESNPGPTSMDWIWRILFLVGAATGAHSFEQLQLQESGPGLVKPSETLSLTCTVSGGSISSSSYFWGWIRQPPGKGLEWIGSIYYSGITYYNPSLKSRVTISVDTSKNQFSLKLSSVTAADTAVYYCARHDGAVAGLFDYWGQGTLVTVSSATRASTKGPSVFPLAPSSKSTSGGTAALGCLVKDYFPEPVTVSWNSGALTSGVHTFPAVLQSSGLYSLSSVVTVPSSSLGTQTYICNVNHKPSNTKVDKRVEPKSCIPEDTFFPSPESSCDVKLVEKSFETDTNLNFQNLSVIGFRILLLKVAGFNLLMTLRLWSS

SEQ ID NO: 18988 - protein, 899 aa, Artificial Sequence
  Synthetic Polypeptide
MALPVTALLLPLALLLHAARPEVQLVESGGGLVQPGGSLRLSCAASGFSFSDFWMSWVRQAPGKGLEWVATISQAGSEKDYVDSVKGRFTISRDNAKKSLYLQMNSLRAEDTAVYYCASGVYSFDYRGQGTLVTVSSGTGGGGSGGGGSGGGGSEFSYVLTQPPSVSVAPGQTARITCGGNNLGSKSVHWYQQPPGQAPVVVVYDDSDRPSGIPERFSGSNSGNTATLTISRVEAGDEAVYYCQVWDSSSDHVVFGGGTKLTVLLEIQNPDPAVYQLRDSKSSDKSVCLFTDFDSQTNVSQSKDSDVYITDKCVLDMRSMDFKSNSAVAWSNKSDFACANAFNNSIIPEDTFFPSPESSCDVKLVEKSFETDTNLNFQNLSVIGFRILLLKVAGFNLLMTLRLWSSRAKRSGSGVKQTLNFDLLKLAGDVESNPGPTSMDWIWRILFLVGAATGAHSGPQLQLQESGPGLVKPSETLSLTCTVSGDSISSGDYYWGWIRQPPGKGLEWIGHIYYSGVTYYNPSLKSRVTISVDTSRNQFSLKLSSVTAADTAVYYCTREDSSNWRSRGQGTLVTVSSGSGGGGSGGGGSGGGGSFEQLQLQESGPGLVKPSETLSLTCTVSGGSISSSSYFWGWIRQPPGKGLEWIGSIYYSGITYYNPSLKSRVTISVDTSKNQFSLKLSSVTAADTAVYYCARHDGAVAGLFDYWGQGTLVTVSSATREDLKNVFPPEVAVFEPSEAEISHTQKATLVCLATGFYPDHVELSWWVNGKEVHSGVCTDPQPLKEQPALNDSRYCLSSRLRVSATFWQNPRNHFRCQVQFYGLSENDEWTQDRAKPVTQIVSAEAWGRADCGFTSESYQQGVLSATILYEILLGKATLYAVLVSALVLMAMVKRKDSRG

SEQ ID NO: 18989 - protein, 1091 aa, Artificial Sequence
  Synthetic Polypeptide
MALPVTALLLPLALLLHAARPEVQLVESGGGLVQPGGSLRLSCAASGFSFSDFWMSWVRQAPGKGLEWVATISQAGSEKDYVDSVKGRFTISRDNAKKSLYLQMNSLRAEDTAVYYCASGVYSFDYRGQGTLVTVSSGTGGGGSGGGGSGGGGSEFSYVLTQPPSVSVAPGQTARITCGGNNLGSKSVHWYQQPPGQAPVVVVYDDSDRPSGIPERFSGSNSGNTATLTISRVEAGDEAVYYCQVWDSSSDHVVFGGGTKLTVLLEDLKNVFPPEVAVFEPSEAEISHTQKATLVCLATGFYPDHVELSWWVNGKEVHSGVSTDPQPLKEQPALNDSRYCLSSRLRVSATFWQNPRNHFRCQVQFYGLSENDEWTQDRAKPVTQIVSAEAWGRADCGSQSFGLLDPKLCYLLDGILFIYGVILTALFLRVKFSRSADAPAYQQGQNQLYNELNLGRREEYDVLDKRRGRDPEMGGKPQRRKNPQEGLYNELQKDKMAEAYSEIGMKGERRRGKGHDGLYQGLSTATKDTYDALHMQALPPRRAKRSGSGATNFSLLKQAGDVEENPGPTSMDWIWRILFLVGAATGAHSGPQLQLQESGPGLVKPSETLSLTCTVSGDSISSGDYYWGWIRQPPGKGLEWIGHIYYSGVTYYNPSLKSRVTISVDTSRNQFSLKLSSVTAADTAVYYCTREDSSNWRSRGQGTLVTVSSGSGGGGSGGGGSGGGGSFEQLQLQESGPGLVKPSETLSLTCTVSGGSISSSSYFWGWIRQPPGKGLEWIGSIYYSGITYYNPSLKSRVTISVDTSKNQFSLKLSSVTAADTAVYYCARHDGAVAGLFDYWGQGTLVTVSSATRIQNPDPAVYQLRDSKSSDKSVCLFTDFDSQTNVSQSKDSDVYITDKTVLDMRSMDFKSNSAVAWSNKSDFACANAFNNSIIPEDTFFPSPESSCGTQSFGLLDPKLCYLLDGILFIYGVILTALFLRVKFSRSADAPAYQQGQNQLYNELNLGRREEYDVLDKRRGRDPEMGGKPQRRKNPQEGLYNELQKDKMAEAYSEIGMKGERRRGKGHDGLYQGLSTATKDTYDALHMQALPPR

SEQ ID NO: 18990 - protein, 921 aa, Artificial Sequence
  Synthetic Polypeptide
MALPVTALLLPLALLLHAARPEVQLVESGGGLVQPGGSLRLSCAASGFSFSDFWMSWVRQAPGKGLEWVATISQAGSEKDYVDSVKGRFTISRDNAKKSLYLQMNSLRAEDTAVYYCASGVYSFDYRGQGTLVTVSSGTGGGGSGGGGSGGGGSEFSYVLTQPPSVSVAPGQTARITCGGNNLGSKSVHWYQQPPGQAPVVVVYDDSDRPSGIPERFSGSNSGNTATLTISRVEAGDEAVYYCQVWDSSSDHVVFGGGTKLTVLLEGQPKANPTVTLFPPSSEELQANKATLVCLISDFYPGAVTVAWKADGSPVKAGVETTKPSKQSNNKYAASSYLSLTPEQWKSHRSYSCQVTHEGSTVEKTVAPTECSPIKTDVITMDPKDNCSKDANDTLLLQLTNTSAYYMYLLLLLKSVVYFAIITCCLLRRTAFCCNGEKSRAKRSGSGATNFSLLKQAGDVEENPGPTSMDWIWRILFLVGAATGAHSGPQLQLQESGPGLVKPSETLSLTCTVSGDSISSGDYYWGWIRQPPGKGLEWIGHIYYSGVTYYNPSLKSRVTISVDTSRNQFSLKLSSVTAADTAVYYCTREDSSNWRSRGQGTLVTVSSGSGGGGSGGGGSGGGGSFEQLQLQESGPGLVKPSETLSLTCTVSGGSISSSSYFWGWIRQPPGKGLEWIGSIYYSGITYYNPSLKSRVTISVDTSKNQFSLKLSSVTAADTAVYYCARHDGAVAGLFDYWGQGTLVTVSSATRASTKGPSVFPLAPSSKSTSGGTAALGCLVKDYFPEPVTVSWNSGALTSGVHTFPAVLQSSGLYSLSSVVTVPSSSLGTQTYICNVNHKPSNTKVDKRVEPKSCEVKTDSTDHVKPKETENTKQPSKSCHKPKAIVHTEKVNMMSLTVLGLRMLFAKTVAVNFLLTAKLFFL

SEQ ID NO: 18991 - protein, 902 aa, Artificial Sequence
  Synthetic Polypeptide
MALPVTALLLPLALLLHAARPEVQLVESGGGLVQPGGSLRLSCAASGFSFSDFWMSWVRQAPGKGLEWVATISQAGSEKDYVDSVKGRFTISRDNAKKSLYLQMNSLRAEDTAVYYCASGVYSFDYRGQGTLVTVSSGTGGGGSGGGGSGGGGSEFSYVLTQPPSVSVAPGQTARITCGGNNLGSKSVHWYQQPPGQAPVVVVYDDSDRPSGIPERFSGSNSGNTATLTISRVEAGDEAVYYCQVWDSSSDHVVFGGGTKLTVLLEGQPKANPTVTLFPPSSEELQANKATLVCLISDFYPGAVTVAWKADGSPVKAGVETTKPSKQSNNKYAASSYLSLTPEQWKSHRSYSCQVTHEGSTVEKTVAPTECSGRADCGFTSESYQQGVLSATILYEILLGKATLYAVLVSALVLMAMVKRKDSRGRAKRSGSGVKQTLNFDLLKLAGDVESNPGPTSMDWIWRILFLVGAATGAHSGPQLQLQESGPGLVKPSETLSLTCTVSGDSISSGDYYWGWIRQPPGKGLEWIGHIYYSGVTYYNPSLKSRVTISVDTSRNQFSLKLSSVTAADTAVYYCTREDSSNWRSRGQGTLVTVSSGSGGGGSGGGGSGGGGSFEQLQLQESGPGLVKPSETLSLTCTVSGGSISSSSYFWGWIRQPPGKGLEWIGSIYYSGITYYNPSLKSRVTISVDTSKNQFSLKLSSVTAADTAVYYCARHDGAVAGLFDYWGQGTLVTVSSATRASTKGPSVFPLAPSSKSTSGGTAALGCLVKDYFPEPVTVSWNSGALTSGVHTFPAVLQSSGLYSLSSVVTVPSSSLGTQTYICNVNHKPSNTKVDKRVEPKSCIPEDTFFPSPESSCDVKLVEKSFETDTNLNFQNLSVIGFRILLLKVAGFNLLMTLRLWSS

SEQ ID NO: 18992 - protein, 759 aa, Artificial Sequence
  Synthetic Polypeptide
MALPVTALLLPLALLLHAARPEVQVLESGGGLVQPGGSLRLSCAASGFTFSNFAMSWVRQAPGKGLEWVSTISGSAGTTDYADSVKGRFTISRDNSKKTLYLQMNSLRVEDTAVYYCADGRGPFFDYRGQGTLVTVSSGTGGGGSGGGGSGGGGSEFSYVLTQPPSVSVAPGQTARITCGGNNLGSKSVHWYQQPPGQAPVVVVYDDSDRPSGIPERFSGSNSGNTATLTISRVEAGDEAVYYCQVWDSSSDHVVFGGGTKLTVLLEDLKNVFPPEVAVFEPSEAEISHTQKATLVCLATGFYPDHVELSWWVNGKEVHSGVCTDPQPLKEQPALNDSRYCLSSRLRVSATFWQNPRNHFRCQVQFYGLSENDEWTQDRAKPVTQIVSAEAWGRADCGFTSESYQQGVLSATILYEILLGKATLYAVLVSALVLMAMVKRKDSRGRAKRSGSGATNFSLLKQAGDVEENPGPTSMDWIWRILFLVGAATGAHSFEQLQLQESGPGLVKPSETLSLTCTVSGGSISSSSYFWGWIRQPPGKGLEWIGSIYYSGITYYNPSLKSRVTISVDTSKNQFSLKLSSVTAADTAVYYCARHDGAVAGLFDYWGQGTLVTVSSATRIQNPDPAVYQLRDSKSSDKSVCLFTDFDSQTNVSQSKDSDVYITDKCVLDMRSMDFKSNSAVAWSNKSDFACANAFNNSIIPEDTFFPSPESSCDVKLVEKSFETDTNLNFQNLSVIGFRILLLKVAGFNLLMTLRLWSS

SEQ ID NO: 18993 - protein, 760 aa, Artificial Sequence
  Synthetic Polypeptide
MALPVTALLLPLALLLHAARPSYVLTQPPSVSVAPGQTARITCGGNNLGSKSVHWYQQPPGQAPVVVVYDDSDRPSGIPERFSGSNSGNTATLTISRVEAGDEAVYYCQVWDSSSDHVVFGGGTKLTVLLEDLKNVFPPEVAVFEPSEAEISHTQKATLVCLATGFYPDHVELSWWVNGKEVHSGVCTDPQPLKEQPALNDSRYCLSSRLRVSATFWQNPRNHFRCQVQFYGLSENDEWTQDRAKPVTQIVSAEAWGRADCGFTSESYQQGVLSATILYEILLGKATLYAVLVSALVLMAMVKRKDSRGRAKRSGSGATNFSLLKQAGDVEENPGPTSMDWIWRILFLVGAATGAHSGPEVQLVESGGGLVQAGGSLRLSCAASGRTFSMGWFRQAPGKEREFVAAITYSGGSPYYADSVKGRFTISRDNAKNTVYLQMNSLKPEDTAVYYCAANPTYGSDWNAENWGQGTQVTVSSGSGGGGSGGGGSGGGGSFEQLQLQESGPGLVKPSETLSLTCTVSGGSISSSSYFWGWIRQPPGKGLEWIGSIYYSGITYYNPSLKSRVTISVDTSKNQFSLKLSSVTAADTAVYYCARHDGAVAGLFDYWGQGTLVTVSSATRIQNPDPAVYQLRDSKSSDKSVCLFTDFDSQTNVSQSKDSDVYITDKCVLDMRSMDFKSNSAVAWSNKSDFACANAFNNSIIPEDTFFPSPESSCDVKLVEKSFETDTNLNFQNLSVIGFRILLLKVAGFNLLMTLRLWSS

SEQ ID NO: 18994 - protein, 887 aa, Artificial Sequence
  Synthetic Polypeptide
MALPVTALLLPLALLLHAARPSYVLTQPPSVSVAPGQTARITCGGNNLGSKSVHWYQQPPGQAPVVVVYDDSDRPSGIPERFSGSNSGNTATLTISRVEAGDEAVYYCQVWDSSSDHVVFGGGTKLTVLLEDLKNVFPPEVAVFEPSEAEISHTQKATLVCLATGFYPDHVELSWWVNGKEVHSGVCTDPQPLKEQPALNDSRYCLSSRLRVSATFWQNPRNHFRCQVQFYGLSENDEWTQDRAKPVTQIVSAEAWGRADCGFTSESYQQGVLSATILYEILLGKATLYAVLVSALVLMAMVKRKDSRGRAKRSGSGATNFSLLKQAGDVEENPGPTSMDWIWRILFLVGAATGAHSQLQLQESGPGLVKPSETLSLTCTVSGGSISSGDYYWGWIRQPPGKGLEWIGSISYSGSTYYNPSLKSRVTISVDTSRNQFSLKLSSVTAADTAVYYCTREDSSNWRSRGQGTLVTVSSSGGGGSGGGGSEVQLVESGGGLVQAGGSLRLSCAASGRTFSMGWFRQAPGKEREFVAAITYSGGSPYYADSVKGRFTISRDNAKNTVYLQMNSLKPEDTAVYYCAANPTYGSDWNAENWGQGTQVTVSSGSGGGGSGGGGSGGGGSFEQLQLQESGPGLVKPSETLSLTCTVSGGSISSSSYFWGWIRQPPGKGLEWIGSIYYSGITYYNPSLKSRVTISVDTSKNQFSLKLSSVTAADTAVYYCARHDGAVAGLFDYWGQGTLVTVSSATRIQNPDPAVYQLRDSKSSDKSVCLFTDFDSQTNVSQSKDSDVYITDKCVLDMRSMDFKSNSAVAWSNKSDFACANAFNNSIIPEDTFFPSPESSCDVKLVEKSFETDTNLNFQNLSVIGFRILLLKVAGFNLLMTLRLWSS

SEQ ID NO: 18995 - protein, 896 aa, Artificial Sequence
  Synthetic Polypeptide
MALPVTALLLPLALLLHAARPEVQVLESGGGLVQPGGSLRLSCAASGFTFSNFAMSWVRQAPGKGLEWVSTISGSAGTTDYADSVKGRFTISRDNSKKTLYLQMNSLRVEDTAVYYCADGRGPFFDYRGQGTLVTVSSGTGGGGSGGGGSGGGGSEFSYVLTQPPSVSVAPGQTARITCGGNNLGSKSVHWYQQPPGQAPVVVVYDDSDRPSGIPERFSGSNSGNTATLTISRVEAGDEAVYYCQVWDSSSDHVVFGGGTKLTVLLEDLKNVFPPEVAVFEPSEAEISHTQKATLVCLATGFYPDHVELSWWVNGKEVHSGVCTDPQPLKEQPALNDSRYCLSSRLRVSATFWQNPRNHFRCQVQFYGLSENDEWTQDRAKPVTQIVSAEAWGRADCGFTSESYQQGVLSATILYEILLGKATLYAVLVSALVLMAMVKRKDSRGRAKRSGSGATNFSLLKQAGDVEENPGPTSMDWIWRILFLVGAATGAHSGPEVQLVESGGGLVQAGGSLRLSCAASGRTFSMGWFRQAPGKEREFVAAITYSGGSPYYASSVRGRFTISRDNAKNTVYLQMNSLKPEDTAVYYCAANPTYGSDWNAENWGQGTQVTVSSGSGGGGSGGGGSGGGGSFEQLQLQESGPGLVKPSETLSLTCTVSGGSISSSSYFWGWIRQPPGKGLEWIGSIYYSGITYYNPSLKSRVTISVDTSKNQFSLKLSSVTAADTAVYYCARHDGAVAGLFDYWGQGTLVTVSSATRIQNPDPAVYQLRDSKSSDKSVCLFTDFDSQTNVSQSKDSDVYITDKCVLDMRSMDFKSNSAVAWSNKSDFACANAFNNSIIPEDTFFPSPESSCDVKLVEKSFETDTNLNFQNLSVIGFRILLLKVAGFNLLMTLRLWSS

SEQ ID NO: 18996 - protein, 727 aa, Artificial Sequence
  Synthetic Polypeptide
MALPVTALLLPLALLLHAARPSYVLTQPPSVSVAPGQTARITCGGNNIGGKSVHWYQQPPGQAPVVVVYDDSDRPSGIPERFSGSNSGNTATLTISRVEAGDEAVYYCQVWDSSSDHVVFGGGTKLTVLGGGGSGGGGSGGGGSQLQLQESGPGLVKPSETLSLTCTVSGGSISSSSYFWGWIRQPPGKGLEWIGSIYYSGITYYNPSLKSRVTISVDTSKNQFSLKLSSVTAADTAVYYCARHDGAVAGLFDYWGQGTLVTVSSATREQKLISEEDLAKPTTTPAPRPPTPAPTIASQPLSLRPEACRPAAGGAVHTRGLDFACDIYIWAPLAGTCGVLLLSLVITLYCKRGRKKLLYIFKQPFMRPVQTTQEEDGCSCRFPEEEEGGCELRVKFSRSADAPAYQQGQNQLYNELNLGRREEYDVLDKRRGRDPEMGGKPRRKNPQEGLYNELQKDKMAEAYSEIGMKGERRRGKGHDGLYQGLSTATKDTYDALHMQALPPRSSGSGEGRGSLLTCGDVEENPGPHMTEYKPTVRLATRDDVPRAVRTLAAAFADYPATRHTVDPDRHIERVTELQELFLTRVGLDIGKVWVADDGAAVAVWTTPESVEAGAVFAEIGPRMAELSGSRLAAQQQMEGLLAPHRPKEPAWFLATVGVSPDHQGKGLGSAVVLPGVEAAERAGVPAFLETSAPRNLPFYERLGFTVTADVEVPEGPRTWCMTRKPGA

SEQ ID NO: 18997 - protein, 721 aa, Artificial Sequence
  Synthetic Polypeptide
MALPVTALLLPLALLLHAARPSYVLTQPPSVSVAPGQTARITCGGNNIGGKSVHWYQQPPGQAPVVVVYDDSDRPSGIPERFSGSNSGNTATLTISRVEAGDEAVYYCQVWDSSSDHVVFGGGTKLTVLGGGGSGGGGSGGGGSQLQLQESGPGLVKPSETLSLTCTVSGGSISSSSYFWGWIRQPPGKGLEWIGSIYYSGITYYNPSLKSRVTISVDTSKNQFSLKLSSVTAADTAVYYCARHDGAVAGLFDYWGQGTLVTVSSATREQKLISEEDLKIEVMYPPPYLDNEKSNGTIIHVKGKHLCPSPLFPGPSKPFWVLVVVGGVLACYSLLVTVAFIIFWVRSKRSRLLHSDYMNMTPRRPGPTRKHYQPYAPPRDFAAYRSRVKFSRSADAPAYQQGQNQLYNELNLGRREEYDVLDKRRGRDPEMGGKPRRKNPQEGLYNELQKDKMAEAYSEIGMKGERRRGKGHDGLYQGLSTATKDTYDALHMQALPPRSSGSGEGRGSLLTCGDVEENPGPHMTEYKPTVRLATRDDVPRAVRTLAAAFADYPATRHTVDPDRHIERVTELQELFLTRVGLDIGKVWVADDGAAVAVWTTPESVEAGAVFAEIGPRMAELSGSRLAAQQQMEGLLAPHRPKEPAWFLATVGVSPDHQGKGLGSAVVLPGVEAAERAGVPAFLETSAPRNLPFYERLGFTVTADVEVPEGPRTWCMTRKPGA

SEQ ID NO: 18998 - protein, 498 aa, Artificial Sequence
  Synthetic Polypeptide
MALPVTALLLPLALLLHAARPSYVLTQPPSVSVAPGQTARITCGGNNIGGKSVHWYQQPPGQAPVVVVYDDSDRPSGIPERFSGSNSGNTATLTISRVEAGDEAVYYCQVWDSSSDHVVFGGGTKLTVLGGGGSGGGGSGGGGSQLQLQESGPGLVKPSETLSLTCTVSGGSISSSSYFWGWIRQPPGKGLEWIGSIYYSGITYYNPSLKSRVTISVDTSKNQFSLKLSSVTAADTAVYYCARHDGAVAGLFDYWGQGTLVTVSSATREQKLISEEDLKIEVMYPPPYLDNEKSNGTIIHVKGKHLCPSPLFPGPSKPFWVLVVVGGVLACYSLLVTVAFIIFWVRSKRSRLLHSDYMNMTPRRPGPTRKHYQPYAPPRDFAAYRSRVKFSRSADAPAYQQGQNQLYNELNLGRREEYDVLDKRRGRDPEMGGKPRRKNPQEGLYNELQKDKMAEAYSEIGMKGERRRGKGHDGLYQGLSTATKDTYDALHMQALPPR

SEQ ID NO: 18999 - protein, 504 aa, Artificial Sequence
  Synthetic Polypeptide
MALPVTALLLPLALLLHAARPSYVLTQPPSVSVAPGQTARITCGGNNIGGKSVHWYQQPPGQAPVVVVYDDSDRPSGIPERFSGSNSGNTATLTISRVEAGDEAVYYCQVWDSSSDHVVFGGGTKLTVLGGGGSGGGGSGGGGSQLQLQESGPGLVKPSETLSLTCTVSGGSISSSSYFWGWIRQPPGKGLEWIGSIYYSGITYYNPSLKSRVTISVDTSKNQFSLKLSSVTAADTAVYYCARHDGAVAGLFDYWGQGTLVTVSSATREQKLISEEDLAKPTTTPAPRPPTPAPTIASQPLSLRPEACRPAAGGAVHTRGLDFACDIYIWAPLAGTCGVLLLSLVITLYCKRGRKKLLYIFKQPFMRPVQTTQEEDGCSCRFPEEEEGGCELRVKFSRSADAPAYQQGQNQLYNELNLGRREEYDVLDKRRGRDPEMGGKPRRKNPQEGLYNELQKDKMAEAYSEIGMKGERRRGKGHDGLYQGLSTATKDTYDALHMQALPPR

SEQ ID NO: 19000 - protein, 504 aa, Artificial Sequence
  Synthetic Polypeptide
MALPVTALLLPLALLLHAARPQLQLQESGPGLVKPSETLSLTCTVSGGSISSSSYFWGWIRQPPGKGLEWIGSIYYSGITYYNPSLKSRVTISVDTSKNQFSLKLSSVTAADTAVYYCARHDGAVAGLFDYWGQGTLVTVSSAGGGGSGGGGSGGGGSSYVLTQPPSVSVAPGQTARITCGGNNIGGKSVHWYQQPPGQAPVVVVYDDSDRPSGIPERFSGSNSGNTATLTISRVEAGDEAVYYCQVWDSSSDHVVFGGGTKLTVLTREQKLISEEDLAKPTTTPAPRPPTPAPTIASQPLSLRPEACRPAAGGAVHTRGLDFACDIYIWAPLAGTCGVLLLSLVITLYCKRGRKKLLYIFKQPFMRPVQTTQEEDGCSCRFPEEEEGGCELRVKFSRSADAPAYQQGQNQLYNELNLGRREEYDVLDKRRGRDPEMGGKPRRKNPQEGLYNELQKDKMAEAYSEIGMKGERRRGKGHDGLYQGLSTATKDTYDALHMQALPPR

SEQ ID NO: 19001 - protein, 917 aa, Artificial Sequence
  Synthetic Polypeptide
MALPVTALLLPLALLLHAARPSYVLTQPPSVSVAPGQTARITCGGNNIGGKSVHWYQQPPGQAPVVVVYDDSDRPSGIPERFSGSNSGNTATLTISRVEAGDEAVYYCQVWDSSSDHVVFGGGTKLTVLGGGGSGGGGSGGGGSQLQLQESGPGLVKPSETLSLTCTVSGGSISSSSYFWGWIRQPPGKGLEWIGSIYYSGITYYNPSLKSRVTISVDTSKNQFSLKLSSVTAADTAVYYCARHDGAVAGLFDYWGQGTLVTVSSATREQKLISEEDLAKPTTTPAPRPPTPAPTIASQPLSLRPEACRPAAGGAVHTRGLDFACDIYIWAPLAGTCGVLLLSLVITLYCGRARVKFSRSADAPAYQQGQNQLYNELNLGRREEYDVLDKRRGRDPEMGGKPRRKNPQEGLYNELQKDKMAEAYSEIGMKGERRRGKGHDGLYQGLSTATKDTYDALHMQALPPRSRGSGATNFSLLKQAGDVEENPGPGIHMATYEVLCEVARKLGTDDREVVLFLLNVFIPQPTLAQLIGALRALKEEGRLTFPLLAECLFRAGRRDLLRDLLHLDPRFLERHLAGTMSYFSPYQLTVLHVDGELCARDIRSLIFLSKDTIGSRSTPQTFLHWVYCMENLDLLGPTDVDALMSMLRSLSRVDLQRQVQTLMGLHLSGPSHSQHYRHTPLETDFYDYKDDDDKTSGSGEGRGSLLTCGDVEENPGPHMTEYKPTVRLATRDDVPRAVRTLAAAFADYPATRHTVDPDRHIERVTELQELFLTRVGLDIGKVWVADDGAAVAVWTTPESVEAGAVFAEIGPRMAELSGSRLAAQQQMEGLLAPHRPKEPAWFLATVGVSPDHQGKGLGSAVVLPGVEAAERAGVPAFLETSAPRNLPFYERLGFTVTADVEVPEGPRTWCMTRKPGA

SEQ ID NO: 19002 - protein, 857 aa, Artificial Sequence
  Synthetic Polypeptide
MALPVTALLLPLALLLHAARPSYVLTQPPSVSVAPGQTARITCGGNNIGGKSVHWYQQPPGQAPVVVVYDDSDRPSGIPERFSGSNSGNTATLTISRVEAGDEAVYYCQVWDSSSDHVVFGGGTKLTVLLEIQNPDPAVYQLRDSKSSDKSVCLFTDFDSQTNVSQSKDSDVYITDKCVLDMRSMDFKSNSAVAWSNKSDFACANAFNNSIIPEDTFFPSSDVPCDVKLVEKSFETDTNLNFQNLSVIGFRILLLKVAGFNLLMTLRLWSSRAKRSGSGVKQTLNFDLLKLAGDVESNPGPTSMDWIWRILFLVGAATGAHSFEQLQLQESGPGLVKPSETLSLTCTVSGGSISSSSYFWGWIRQPPGKGLEWIGSIYYSGITYYNPSLKSRVTISVDTSKNQFSLKLSSVTAADTAVYYCARHDGAVAGLFDYWGQGTLVTVSSATREDLKNVFPPEVAVFEPSKAEIAHTQKATLVCLATGFYPDHVELSWWVNGKEVHSGVCTDPQPLKEQPALNDSRYCLSSRLRVSATFWQNPRNHFRCQVQFYGLSENDEWTQDRAKPVTQIVSAEAWGRADCGITSASYHQGVLSATILYEILLGKATLYAVLVSALVLMAMVKRKDSRGRAKRSGSGATNFSLLKQAGDVEENPGPSRGHMTEYKPTVRLATRDDVPRAVRTLAAAFADYPATRHTVDPDRHIERVTELQELFLTRVGLDIGKVWVADDGAAVAVWTTPESVEAGAVFAEIGPRMAELSGSRLAAQQQMEGLLAPHRPKEPAWFLATVGVSPDHQGKGLGSAVVLPGVEAAERAGVPAFLETSAPRNLPFYERLGFTVTADVEVPEGPRTWCMTRKPGA

SEQ ID NO: 19003 - protein, 856 aa, Artificial Sequence
  Synthetic Polypeptide
MALPVTALLLPLALLLHAARPSYVLTQPPSVSVAPGQTARITCGGNNIGGKSVHWYQQPPGQAPVVVVYDDSDRPSGIPERFSGSNSGNTATLTISRVEAGDEAVYYCQVWDSSSDHVVFGGGTKLTVLLEDLKNVFPPEVAVFEPSKAEIAHTQKATLVCLATGFYPDHVELSWWVNGKEVHSGVCTDPQPLKEQPALNDSRYCLSSRLRVSATFWQNPRNHFRCQVQFYGLSENDEWTQDRAKPVTQIVSAEAWGRADCGITSASYHQGVLSATILYEILLGKATLYAVLVSALVLMAMVKRKDSRGRAKRSGSGATNFSLLKQAGDVEENPGPTSMDWIWRILFLVGAATGAHSFEQLQLQESGPGLVKPSETLSLTCTVSGGSISSSSYFWGWIRQPPGKGLEWIGSIYYSGITYYNPSLKSRVTISVDTSKNQFSLKLSSVTAADTAVYYCARHDGAVAGLFDYWGQGTLVTVSSATRIQNPDPAVYQLRDSKSSDKSVCLFTDFDSQTNVSQSKDSDVYITDKCVLDMRSMDFKSNSAVAWSNKSDFACANAFNNSIIPEDTFFPSSDVPCDVKLVEKSFETDTNLNFQNLSVIGFRILLLKVAGFNLLMTLRLWSSRAKRSGSGVKQTLNFDLLKLAGDVESNPGPSRGHMTEYKPTVRLATRDDVPRAVRTLAAAFADYPATRHTVDPDRHIERVTELQELFLTRVGLDIGKVWVADDGAAVAVWTTPESVEAGAVFAEIGPRMAELSGSRLAAQQQMEGLLAPHRPKEPAWFLATVGVSPDHQGKGLGSAVVLPGVEAAERAGVPAFLETSAPRNLPFYERLGFTVTADVEVPEGPRTWCMTRKPGA

SEQ ID NO: 19004 - protein, 623 aa, Artificial Sequence
  Synthetic Polypeptide
MALPVTALLLPLALLLHAARPSYVLTQPPSVSVAPGQTARITCGGNNIGGKSVHWYQQPPGQAPVVVVYDDSDRPSGIPERFSGSNSGNTATLTISRVEAGDEAVYYCQVWDSSSDHVVFGGGTKLTVLLEDLKNVFPPEVAVFEPSEAEISHTQKATLVCLATGFYPDHVELSWWVNGKEVHSGVCTDPQPLKEQPALNDSRYCLSSRLRVSATFWQNPRNHFRCQVQFYGLSENDEWTQDRAKPVTQIVSAEAWGRADCGFTSESYQQGVLSATILYEILLGKATLYAVLVSALVLMAMVKRKDSRGRAKRSGSGATNFSLLKQAGDVEENPGPTSMDWIWRILFLVGAATGAHSFEQLQLQESGPGLVKPSETLSLTCTVSGGSISSSSYFWGWIRQPPGKGLEWIGSIYYSGITYYNPSLKSRVTISVDTSKNQFSLKLSSVTAADTAVYYCARHDGAVAGLFDYWGQGTLVTVSSATRIQNPDPAVYQLRDSKSSDKSVCLFTDFDSQTNVSQSKDSDVYITDKCVLDMRSMDFKSNSAVAWSNKSDFACANAFNNSIIPEDTFFPSPESSCDVKLVEKSFETDTNLNFQNLSVIGFRILLLKVAGFNLLMTLRLWSS

SEQ ID NO: 19005 - protein, 848 aa, Artificial Sequence
  Synthetic Polypeptide
MALPVTALLLPLALLLHAARPSYVLTQPPSVSVAPGQTARITCGGNNIGGKSVHWYQQPPGQAPVVVVYDDSDRPSGIPERFSGSNSGNTATLTISRVEAGDEAVYYCQVWDSSSDHVVFGGGTKLTVLLEDLKNVFPPEVAVFEPSEAEISHTQKATLVCLATGFYPDHVELSWWVNGKEVHSGVCTDPQPLKEQPALNDSRYCLSSRLRVSATFWQNPRNHFRCQVQFYGLSENDEWTQDRAKPVTQIVSAEAWGRADCGFTSESYQQGVLSATILYEILLGKATLYAVLVSALVLMAMVKRKDSRGRAKRSGSGATNFSLLKQAGDVEENPGPTSMDWIWRILFLVGAATGAHSFEQLQLQESGPGLVKPSETLSLTCTVSGGSISSSSYFWGWIRQPPGKGLEWIGSIYYSGITYYNPSLKSRVTISVDTSKNQFSLKLSSVTAADTAVYYCARHDGAVAGLFDYWGQGTLVTVSSATRIQNPDPAVYQLRDSKSSDKSVCLFTDFDSQTNVSQSKDSDVYITDKCVLDMRSMDFKSNSAVAWSNKSDFACANAFNNSIIPEDTFFPSPESSCDVKLVEKSFETDTNLNFQNLSVIGFRILLLKVAGFNLLMTLRLWSSRAKRSGSGVKQTLNFDLLKLAGDVESNPGPSRGGIHTMATYEVLCEVARKLGTDDREVVLFLLNVFIPQPTLAQLIGALRALKEEGRLTFPLLAECLFRAGRRDLLRDLLHLDPRFLERHLAGTMSYFSPYQLTVLHVDGELCARDIRSLIFLSKDTIGSRSTPQTFLHWVYCMENLDLLGPTDVDALMSMLRSLSRVDLQRQVQTLMGLHLSGPSHSQHYRHTP

SEQ ID NO: 19006 - protein, 627 aa, Artificial Sequence
  Synthetic Polypeptide
MALPVTALLLPLALLLHAARPSYVLTQPPSVSVAPGQTARITCGGNNIGGKSVHWYQQPPGQAPVVVVYDDSDRPSGIPERFSGSNSGNTATLTISRVEAGDEAVYYCQVWDSSSDHVVFGGGTKLTVLLEIQNPDPAVYQLRDSKSSDKSVCLFTDFDSQTNVSQSKDSDVYITDKCVLDMRSMDFKSNSAVAWSNKSDFACANAFNNSIIPEDTFFPSPESSCDVKLVEKSFETDTNLNFQNLSVIGFRILLLKVAGFNLLMTLRLWSSRAKRSGSGVKQTLNFDLLKLAGDVESNPGPTSMDWIWRILFLVGAATGAHSFEQLQLQESGPGLVKPSETLSLTCTVSGGSISSSSYFWGWIRQPPGKGLEWIGSIYYSGITYYNPSLKSRVTISVDTSKNQFSLKLSSVTAADTAVYYCARHDGAVAGLFDYWGQGTLVTVSSATREDLKNVFPPEVAVFEPSEAEISHTQKATLVCLATGFYPDHVELSWWVNGKEVHSGVCTDPQPLKEQPALNDSRYCLSSRLRVSATFWQNPRNHFRCQVQFYGLSENDEWTQDRAKPVTQIVSAEAWGRADCGFTSESYQQGVLSATILYEILLGKATLYAVLVSALVLMAMVKRKDSRG

SEQ ID NO: 19007 - protein, 849 aa, Artificial Sequence
  Synthetic Polypeptide
MALPVTALLLPLALLLHAARPSYVLTQPPSVSVAPGQTARITCGGNNIGGKSVHWYQQPPGQAPVVVVYDDSDRPSGIPERFSGSNSGNTATLTISRVEAGDEAVYYCQVWDSSSDHVVFGGGTKLTVLLEIQNPDPAVYQLRDSKSSDKSVCLFTDFDSQTNVSQSKDSDVYITDKCVLDMRSMDFKSNSAVAWSNKSDFACANAFNNSIIPEDTFFPSPESSCDVKLVEKSFETDTNLNFQNLSVIGFRILLLKVAGFNLLMTLRLWSSRAKRSGSGVKQTLNFDLLKLAGDVESNPGPTSMDWIWRILFLVGAATGAHSFEQLQLQESGPGLVKPSETLSLTCTVSGGSISSSSYFWGWIRQPPGKGLEWIGSIYYSGITYYNPSLKSRVTISVDTSKNQFSLKLSSVTAADTAVYYCARHDGAVAGLFDYWGQGTLVTVSSATREDLKNVFPPEVAVFEPSEAEISHTQKATLVCLATGFYPDHVELSWWVNGKEVHSGVCTDPQPLKEQPALNDSRYCLSSRLRVSATFWQNPRNHFRCQVQFYGLSENDEWTQDRAKPVTQIVSAEAWGRADCGFTSESYQQGVLSATILYEILLGKATLYAVLVSALVLMAMVKRKDSRGRAKRSGSGATNFSLLKQAGDVEENPGPSRGGIHTMATYEVLCEVARKLGTDDREVVLFLLNVFIPQPTLAQLIGALRALKEEGRLTFPLLAECLFRAGRRDLLRDLLHLDPRFLERHLAGTMSYFSPYQLTVLHVDGELCARDIRSLIFLSKDTIGSRSTPQTFLHWVYCMENLDLLGPTDVDALMSMLRSLSRVDLQRQVQTLMGLHLSGPSHSQHYRHTP

SEQ ID NO: 19008 - protein, 901 aa, Artificial Sequence
  Synthetic Polypeptide
MALPVTALLLPLALLLHAARPLEGKPIPNPLLGLDSTGSGEDLKNVFPPEVAVFEPSKAEIAHTQKATLVCLATGFYPDHVELSWWVNGKEVHSGVCTDPQPLKEQPALNDSRYCLSSRLRVSATFWQNPRNHFRCQVQFYGLSENDEWTQDRAKPVTQIVSAEAWGRADCGITSASYHQGVLSATILYEILLGKATLYAVLVSALVLMAMVKRKDSRGRAKRSGSGATNFSLLKQAGDVEENPGPTSMALPVTALLLPLALLLHAARPSYVLTQPPSVSVAPGQTARITCGGNNIGGKSVHWYQQPPGQAPVVVVYDDSDRPSGIPERFSGSNSGNTATLTISRVEAGDEAVYYCQVWDSSSDHVVFGGGTKLTVLGGGGSGGGGSGGGGSQLQLQESGPGLVKPSETLSLTCTVSGGSISSSSYFWGWIRQPPGKGLEWIGSIYYSGITYYNPSLKSRVTISVDTSKNQFSLKLSSVTAADTAVYYCARHDGAVAGLFDYWGQGTLVTVSSATREQKLISEEDGSGIQNPDPAVYQLRDSKSSDKSVCLFTDFDSQTNVSQSKDSDVYITDKCVLDMRSMDFKSNSAVAWSNKSDFACANAFNNSIIPEDTFFPSSDVPCDVKLVEKSFETDTNLNFQNLSVIGFRILLLKVAGFNLLMTLRLWSSRAKRSGSGVKQTLNFDLLKLAGDVESNPGPSRGHMTEYKPTVRLATRDDVPRAVRTLAAAFADYPATRHTVDPDRHIERVTELQELFLTRVGLDIGKVWVADDGAAVAVWTTPESVEAGAVFAEIGPRMAELSGSRLAAQQQMEGLLAPHRPKEPAWFLATVGVSPDHQGKGLGSAVVLPGVEAAERAGVPAFLETSAPRNLPFYERLGFTVTADVEVPEGPRTWCMTRKPGA

SEQ ID NO: 19009 - protein, 902 aa, Artificial Sequence
  Synthetic Polypeptide
MALPVTALLLPLALLLHAARPLEQKLISEEDLGSGDRPDPAVYQLRDSKSSDKSVCLFTDFDSQTNVSQSKDSDVYITDKCVLDMRSMDFKSNSAVAWSNKSDFACANAFNNSIIPEDTFFPSPESSCDVKLVEKSFETDTNLNFQNLSVIGFRILLLKVAGFNLLMTLRLWSSSSRAKRSGSGVKQTLNFDLLKLAGDVESNPGPTSMALPVTALLLPLALLLHAARPSYVLTQPPSVSVAPGQTARITCGGNNIGGKSVHWYQQPPGQAPVVVVYDDSDRPSGIPERFSGSNSGNTATLTISRVEAGDEAVYYCQVWDSSSDHVVFGGGTKLTVLGGGGSGGGGSGGGGSQLQLQESGPGLVKPSETLSLTCTVSGGSISSSSYFWGWIRQPPGKGLEWIGSIYYSGITYYNPSLKSRVTISVDTSKNQFSLKLSSVTAADTAVYYCARHDGAVAGLFDYWGQGTLVTVSSATRGKPIPNPLLGLDSTGSGEDLKNVFPPEVAVFEPSEAEISHTQKATLVCLATGFYPDHVELSWWVNGKEVHSGVCTDPQPLKEQPALNDSRYCLSSRLRVSATFWQNPRNHFRCQVQFYGLSENDEWTQDRAKPVTQIVSAEAWGRADCGFTSESYQQGVLSATILYEILLGKATLYAVLVSALVLMAMVKRKDSRGRAKRSGSGATNFSLLKQAGDVEENPGPSRGHMTEYKPTVRLATRDDVPRAVRTLAAAFADYPATRHTVDPDRHIERVTELQELFLTRVGLDIGKVWVADDGAAVAVWTTPESVEAGAVFAEIGPRMAELSGSRLAAQQQMEGLLAPHRPKEPAWFLATVGVSPDHQGKGLGSAVVLPGVEAAERAGVPAFLETSAPRNLPFYERLGFTVTADVEVPEGPRTWCMTRKPGA

SEQ ID NO: 19010 - protein, 856 aa, Artificial Sequence
  Synthetic Polypeptide
MALPVTALLLPLALLLHAARPSYVLTQPPSVSVAPGQTARITCGGNNIGGKSVHWYQQPPGQAPVVVVYDDSDRPSGIPERFSGSNSGNTATLTISRVEAGDEAVYYCQVWDSSSDHVVFGGGTKLTVLLEDLKNVFPPEVAVFEPSEAEISHTQKATLVCLATGFYPDHVELSWWVNGKEVHSGVSTDPQPLKEQPALNDSRYCLSSRLRVSATFWQNPRNHFRCQVQFYGLSENDEWTQDRAKPVTQIVSAEAWGRADCGFTSESYQQGVLSATILYEILLGKATLYAVLVSALVLMAMVKRKDSRGRAKRSGSGATNFSLLKQAGDVEENPGPTSMDWIWRILFLVGAATGAHSFEQLQLQESGPGLVKPSETLSLTCTVSGGSISSSSYFWGWIRQPPGKGLEWIGSIYYSGITYYNPSLKSRVTISVDTSKNQFSLKLSSVTAADTAVYYCARHDGAVAGLFDYWGQGTLVTVSSATRIQNPDPAVYQLRDSKSSDKSVCLFTDFDSQTNVSQSKDSDVYITDKTVLDMRSMDFKSNSAVAWSNKSDFACANAFNNSIIPEDTFFPSPESSCDVKLVEKSFETDTNLNFQNLSVIGFRILLLKVAGFNLLMTLRLWSSRAKRSGSGVKQTLNFDLLKLAGDVESNPGPSRGHMTEYKPTVRLATRDDVPRAVRTLAAAFADYPATRHTVDPDRHIERVTELQELFLTRVGLDIGKVWVADDGAAVAVWTTPESVEAGAVFAEIGPRMAELSGSRLAAQQQMEGLLAPHRPKEPAWFLATVGVSPDHQGKGLGSAVVLPGVEAAERAGVPAFLETSAPRNLPFYERLGFTVTADVEVPEGPRTWCMTRKPGA

SEQ ID NO: 19011 - protein, 938 aa, Artificial Sequence
  Synthetic Polypeptide
MALPVTALLLPLALLLHAARPSYVLTQPPSVSVAPGQTARITCGGNNIGGKSVHWYQQPPGQAPVVVVYDDSDRPSGIPERFSGSNSGNTATLTISRVEAGDEAVYYCQVWDSSSDHVVFGGGTKLTVLLEDLKNVFPPEVAVFEPSEAEISHTQKATLVCLATGFYPDHVELSWWVNGKEVHSGVSTDPQPLKEQPALNDSRYCLSSRLRVSATFWQNPRNHFRCQVQFYGLSENDEWTQDRAKPVTQIVSAEAWGRADCGFTSESYQQGVLSATILYEILLGKATLYAVLVSALVLMAMVKRKDSRGRAKRSGSGATNFSLLKQAGDVEENPGPTSMDWIWRILFLVGAATGAHSFEQLQLQESGPGLVKPSETLSLTCTVSGGSISSSSYFWGWIRQPPGKGLEWIGSIYYSGITYYNPSLKSRVTISVDTSKNQFSLKLSSVTAADTAVYYCARHDGAVAGLFDYWGQGTLVTVSSATREQKLISEEDGSGTPFPSLAPPIMLLVDGKQQMVVVCLVLDVAPPGLDSPIWFSAGNGSALDAFTYGPSPATDGTWTNLAHLSLPSEELASWEPLVCHTGPGAEGHSRSTQPMHLSGEASTARTCPQEPLRGTPGGALWLGVLRLLLFKLLLFDLLLTCSCLCDPAGPLPSPATTTRLRALGSHRLHPATETGGREATSSPRPQPRDRRWGDTPPGRKPGSPVRAKRSGSGVKQTLNFDLLKLAGDVESNPGPSRGHMTEYKPTVRLATRDDVPRAVRTLAAAFADYPATRHTVDPDRHIERVTELQELFLTRVGLDIGKVWVADDGAAVAVWTTPESVEAGAVFAEIGPRMAELSGSRLAAQQQMEGLLAPHRPKEPAWFLATVGVSPDHQGKGLGSAVVLPGVEAAERAGVPAFLETSAPRNLPFYERLGFTVTADVEVPEGPRTWCMTRKPGA

SEQ ID NO: 19012 - protein, 956 aa, Artificial Sequence
  Synthetic Polypeptide
MALPVTALLLPLALLLHAARPLEDLKNVFPPEVAVFEPSEAEISHTQKATLVCLATGFYPDHVELSWWVNGKEVHSGVSTDPQPLKEQPALNDSRYCLSSRLRVSATFWQNPRNHFRCQVQFYGLSENDEWTQDRAKPVTQIVSAEAWGRADCGFTSESYQQGVLSATILYEILLGKATLYAVLVSALVLMAMVKRKDSRGRAKRSGSGATNFSLLKQAGDVEENPGPTSMALPVTALLLPLALLLHAARPSYVLTQPPSVSVAPGQTARITCGGNNIGGKSVHWYQQPPGQAPVVVVYDDSDRPSGIPERFSGSNSGNTATLTISRVEAGDEAVYYCQVWDSSSDHVVFGGGTKLTVLGGGGSGGGGSGGGGSQLQLQESGPGLVKPSETLSLTCTVSGGSISSSSYFWGWIRQPPGKGLEWIGSIYYSGITYYNPSLKSRVTISVDTSKNQFSLKLSSVTAADTAVYYCARHDGAVAGLFDYWGQGTLVTVSSATREQKLISEEDLGSGTPFPSLAPPIMLLVDGKQQMVVVCLVLDVAPPGLDSPIWFSAGNGSALDAFTYGPSPATDGTWTNLAHLSLPSEELASWEPLVCHTGPGAEGHSRSTQPMHLSGEASTARTCPQEPLRGTPGGALWLGVLRLLLFKLLLFDLLLTCSCLCDPAGPLPSPATTTRLRALGSHRLHPATETGGREATSSPRPQPRDRRWGDTPPGRKPGSPVRAKRSGSGVKQTLNFDLLKLAGDVESNPGPSRSRGHMTEYKPTVRLATRDDVPRAVRTLAAAFADYPATRHTVDPDRHIERVTELQELFLTRVGLDIGKVWVADDGAAVAVWTTPESVEAGAVFAEIGPRMAELSGSRLAAQQQMEGLLAPHRPKEPAWFLATVGVSPDHQGKGLGSAVVLPGVEAAERAGVPAFLETSAPRNLPFYERLGFTVTADVEVPEGPRTWCMTRKPGA

SEQ ID NO: 19013 - protein, 893 aa, Artificial Sequence
  Synthetic Polypeptide
MALPVTALLLPLALLLHAARPSYVLTQPPSVSVAPGQTARITCGGNNIGGKSVHWYQQPPGQAPVVVVYDDSDRPSGIPERFSGSNSGNTATLTISRVEAGDEAVYYCQVWDSSSDHVVFGGGTKLTVLLEGKPIPNPLLGLDSTGSGDKQLDADVSPKPTIFLPSIAETKLQKAGTYLCLLEKFFPDVIKIHWQEKKSNTILGSQEGNTMKTNDTYMKFSWLTVPEKSLDKEHRCIVRHENNKNGVDQEIIFPPIKTDVITMDPKDNCSKDANDTLLLQLTNTSAYYMYLLLLLKSVVYFAIITCCLLRRTAFCCNGEKSRAKRSGSGATNFSLLKQAGDVEENPGPTSMDWIWRILFLVGAATGAHSFEQLQLQESGPGLVKPSETLSLTCTVSGGSISSSSYFWGWIRQPPGKGLEWIGSIYYSGITYYNPSLKSRVTISVDTSKNQFSLKLSSVTAADTAVYYCARHDGAVAGLFDYWGQGTLVTVSSATREQKLISEEDGSGSQPHTKPSVFVMKNGTNVACLVKEFYPKDIRINLVSSKKITEFDPAIVISPSGKYNAVKLGKYEDSNSVTCSVQHDNKTVHSTDFEVKTDSTDHVKPKETENTKQPSKSCHKPKAIVHTEKVNMMSLTVLGLRMLFAKTVAVNFLLTAKLFFLRAKRSGSGVKQTLNFDLLKLAGDVESNPGPSRGHMTEYKPTVRLATRDDVPRAVRTLAAAFADYPATRHTVDPDRHIERVTELQELFLTRVGLDIGKVWVADDGAAVAVWTTPESVEAGAVFAEIGPRMAELSGSRLAAQQQMEGLLAPHRPKEPAWFLATVGVSPDHQGKGLGSAVVLPGVEAAERAGVPAFLETSAPRNLPFYERLGFTVTADVEVPEGPRTWCMTRKPGA

SEQ ID NO: 19014 - protein, 631 aa, Artificial Sequence
  Synthetic Polypeptide
MALPVTALLLPLALLLHAARPSYVLTQPPSVSVAPGQTARITCGGNNIGGKSVHWYQQPPGQAPVVVVYDDSDRPSGIPERFSGSNSGNTATLTISRVEAGDEAVYYCQVWDSSSDHVVFGGGTKLTVLLESQPHTKPSVFVMKNGTNVACLVKEFYPKDIRINLVSSKKITEFDPAIVISPSGKYNAVKLGKYEDSNSVTCSVQHDNKTVHSTDFEVKTDSTDHVKPKETENTKQPSKSCHKPKAIVHTEKVNMMSLTVLGLRMLFAKTVAVNFLLTAKLFFLRAKRSGSGATNFSLLKQAGDVEENPGPTSMDWIWRILFLVGAATGAHSFEQLQLQESGPGLVKPSETLSLTCTVSGGSISSSSYFWGWIRQPPGKGLEWIGSIYYSGITYYNPSLKSRVTISVDTSKNQFSLKLSSVTAADTAVYYCARHDGAVAGLFDYWGQGTLVTVSSATRDKQLDADVSPKPTIFLPSIAETKLQKAGTYLCLLEKFFPDVIKIHWQEKKSNTILGSQEGNTMKTNDTYMKFSWLTVPEKSLDKEHRCIVRHENNKNGVDQEIIFPPIKTDVITMDPKDNCSKDANDTLLLQLTNTSAYYMYLLLLLKSVVYFAIITCCLLRRTAFCCNGEKS

SEQ ID NO: 19015 - protein, 908 aa, Artificial Sequence
  Synthetic Polypeptide
MALPVTALLLPLALLLHAARPLEGKPIPNPLLGLDSTGSGDKQLDADVSPKPTIFLPSIAETKLQKAGTYLCLLEKFFPDVIKIHWQEKKSNTILGSQEGNTMKTNDTYMKFSWLTVPEKSLDKEHRCIVRHENNKNGVDQEIIFPPIKTDVITMDPKDNCSKDANDTLLLQLTNTSAYYMYLLLLLKSVVYFAIITCCLLRRTAFCCNGEKSRAKRSGSGATNFSLLKQAGDVEENPGPTSMALPVTALLLPLALLLHAARPSYVLTQPPSVSVAPGQTARITCGGNNIGGKSVHWYQQPPGQAPVVVVYDDSDRPSGIPERFSGSNSGNTATLTISRVEAGDEAVYYCQVWDSSSDHVVFGGGTKLTVLGGGGSGGGGSGGGGSQLQLQESGPGLVKPSETLSLTCTVSGGSISSSSYFWGWIRQPPGKGLEWIGSIYYSGITYYNPSLKSRVTISVDTSKNQFSLKLSSVTAADTAVYYCARHDGAVAGLFDYWGQGTLVTVSSATREQKLISEEDGSGSQPHTKPSVFVMKNGTNVACLVKEFYPKDIRINLVSSKKITEFDPAIVISPSGKYNAVKLGKYEDSNSVTCSVQHDNKTVHSTDFEVKTDSTDHVKPKETENTKQPSKSCHKPKAIVHTEKVNMMSLTVLGLRMLFAKTVAVNFLLTAKLFFLRAKRSGSGVKQTLNFDLLKLAGDVESNPGPSRGHMTEYKPTVRLATRDDVPRAVRTLAAAFADYPATRHTVDPDRHIERVTELQELFLTRVGLDIGKVWVADDGAAVAVWTTPESVEAGAVFAEIGPRMAELSGSRLAAQQQMEGLLAPHRPKEPAWFLATVGVSPDHQGKGLGSAVVLPGVEAAERAGVPAFLETSAPRNLPFYERLGFTVTADVEVPEGPRTWCMTRKPGA

SEQ ID NO: 19016 - protein, 1033 aa, Artificial Sequence
  Synthetic Polypeptide
MALPVTALLLPLALLLHAARPSYVLTQPPSVSVAPGQTARITCGGNNIGGKSVHWYQQPPGQAPVVVVYDDSDRPSGIPERFSGSNSGNTATLTISRVEAGDEAVYYCQVWDSSSDHVVFGGGTKLTVLGQPKANPTVTLFPPSSEELQANKATLVCLISDFYPGAVTVAWKADGSPVKAGVETTKPSKQSNNKYAASSYLSLTPEQWKSHRSYSCQVTHEGSTVEKTVAPTECSGSQSFGLLDPKLCYLLDGILFIYGVILTALFLRVKFSRSADAPAYQQGQNQLYNELNLGRREEYDVLDKRRGRDPEMGGKPQRRKNPQEGLYNELQKDKMAEAYSEIGMKGERRRGKGHDGLYQGLSTATKDTYDALHMQALPPRRAKRSGSGATNFSLLKQAGDVEENPGPTSMDWIWRILFLVGAATGAHSFEQLQLQESGPGLVKPSETLSLTCTVSGGSISSSSYFWGWIRQPPGKGLEWIGSIYYSGITYYNPSLKSRVTISVDTSKNQFSLKLSSVTAADTAVYYCARHDGAVAGLFDYWGQGTLVTVSSAASTKGPSVFPLAPSSKSTSGGTAALGCLVKDYFPEPVTVSWNSGALTSGVHTFPAVLQSSGLYSLSSVVTVPSSSLGTQTYICNVNHKPSNTKVDKRVEPKSCGTQSFGLLDPKLCYLLDGILFIYGVILTALFLRVKFSRSADAPAYQQGQNQLYNELNLGRREEYDVLDKRRGRDPEMGGKPQRRKNPQEGLYNELQKDKMAEAYSEIGMKGERRRGKGHDGLYQGLSTATKDTYDALHMQALPPRRAKRSGSGVKQTLNFDLLKLAGDVESNPGPSRGHMTEYKPTVRLATRDDVPRAVRTLAAAFADYPATRHTVDPDRHIERVTELQELFLTRVGLDIGKVWVADDGAAVAVWTTPESVEAGAVFAEIGPRMAELSGSRLAAQQQMEGLLAPHRPKEPAWFLATVGVSPDHQGKGLGSAVVLPGVEAAERAGVPAFLETSAPRNLPFYERLGFTVTADVEVPEGPRTWCMTRKPGA

SEQ ID NO: 19017 - protein, 819 aa, Artificial Sequence
  Synthetic Polypeptide
MALPVTALLLPLALLLHAARPSYVLTQPPSVSVAPGQTARITCGGNNIGGKSVHWYQQPPGQAPVVVVYDDSDRPSGIPERFSGSNSGNTATLTISRVEAGDEAVYYCQVWDSSSDHVVFGGGTKLTVLLEDLKNVFPPEVAVFEPSEAEISHTQKATLVCLATGFYPDHVELSWWVNGKEVHSGVSTDPQPLKEQPALNDSRYCLSSRLRVSATFWQNPRNHFRCQVQFYGLSENDEWTQDRAKPVTQIVSAEAWGRADCGSQSFGLLDPKLCYLLDGILFIYGVILTALFLRVKFSRSADAPAYQQGQNQLYNELNLGRREEYDVLDKRRGRDPEMGGKPQRRKNPQEGLYNELQKDKMAEAYSEIGMKGERRRGKGHDGLYQGLSTATKDTYDALHMQALPPRRAKRSGSGATNFSLLKQAGDVEENPGPTSMDWIWRILFLVGAATGAHSFEQLQLQESGPGLVKPSETLSLTCTVSGGSISSSSYFWGWIRQPPGKGLEWIGSIYYSGITYYNPSLKSRVTISVDTSKNQFSLKLSSVTAADTAVYYCARHDGAVAGLFDYWGQGTLVTVSSATRIQNPDPAVYQLRDSKSSDKSVCLFTDFDSQTNVSQSKDSDVYITDKTVLDMRSMDFKSNSAVAWSNKSDFACANAFNNSIIPEDTFFPSPESSCGTQSFGLLDPKLCYLLDGILFIYGVILTALFLRVKFSRSADAPAYQQGQNQLYNELNLGRREEYDVLDKRRGRDPEMGGKPQRRKNPQEGLYNELQKDKMAEAYSEIGMKGERRRGKGHDGLYQGLSTATKDTYDALHMQALPPR

SEQ ID NO: 19018 - protein, 819 aa, Artificial Sequence
  Synthetic Polypeptide
MALPVTALLLPLALLLHAARPSYVLTQPPSVSVAPGQTARITCGGNNIGGKSVHWYQQPPGQAPVVVVYDDSDRPSGIPERFSGSNSGNTATLTISRVEAGDEAVYYCQVWDSSSDHVVFGGGTKLTVLLEDLKNVFPPEVAVFEPSKAEIAHTQKATLVCLATGFYPDHVELSWWVNGKEVHSGVCTDPQPLKEQPALNDSRYCLSSRLRVSATFWQNPRNHFRCQVQFYGLSENDEWTQDRAKPVTQIVSAEAWGRADCGSQSFGLLDPKLCYLLDGILFIYGVILTALFLRVKFSRSADAPAYQQGQNQLYNELNLGRREEYDVLDKRRGRDPEMGGKPQRRKNPQEGLYNELQKDKMAEAYSEIGMKGERRRGKGHDGLYQGLSTATKDTYDALHMQALPPRRAKRSGSGATNFSLLKQAGDVEENPGPTSMDWIWRILFLVGAATGAHSFEQLQLQESGPGLVKPSETLSLTCTVSGGSISSSSYFWGWIRQPPGKGLEWIGSIYYSGITYYNPSLKSRVTISVDTSKNQFSLKLSSVTAADTAVYYCARHDGAVAGLFDYWGQGTLVTVSSATRIQNPDPAVYQLRDSKSSDKSVCLFTDFDSQTNVSQSKDSDVYITDKCVLDMRSMDFKSNSAVAWSNKSDFACANAFNNSIIPEDTFFPSSDVPCGTQSFGLLDPKLCYLLDGILFIYGVILTALFLRVKFSRSADAPAYQQGQNQLYNELNLGRREEYDVLDKRRGRDPEMGGKPQRRKNPQEGLYNELQKDKMAEAYSEIGMKGERRRGKGHDGLYQGLSTATKDTYDALHMQALPPR

SEQ ID NO: 19019 - protein, 890 aa, Artificial Sequence
  Synthetic Polypeptide
MALPVTALLLPLALLLHAARPSYVLTQPPSVSVAPGQTARITCGGNNIGGKSVHWYQQPPGQAPVVVVYDDSDRPSGIPERFSGSNSGNTATLTISRVEAGDEAVYYCQVWDSSSDHVVFGGGTKLTVLLEGKPIPNPLLGLDSTGSGEDLKNVFPPEVAVFEPSEAEISHTQKATLVCLATGFYPDHVELSWWVNGKEVHSGVSTDPQPLKEQPALNDSRYCLSSRLRVSATFWQNPRNHFRCQVQFYGLSENDEWTQDRAKPVTQIVSAEAWGRADCGSQSFGLLDPKLCYLLDGILFIYGVILTALFLRVKFSRSADAPAYQQGQNQLYNELNLGRREEYDVLDKRRGRDPEMGGKPQRRKNPQEGLYNELQKDKMAEAYSEIGMKGERRRGKGHDGLYQGLSTATKDTYDALHMQALPPRRAKRSGSGATNFSLLKQAGDVEENPGPTSMDWIWRILFLVGAATGAHSFEQLQLQESGPGLVKPSETLSLTCTVSGGSISSSSYFWGWIRQPPGKGLEWIGSIYYSGITYYNPSLKSRVTISVDTSKNQFSLKLSSVTAADTAVYYCARHDGAVAGLFDYWGQGTLVTVSSATREQKLISEEDGSGIQNPDPAVYQLRDSKSSDKSVCLFTDFDSQTNVSQSKDSDVYITDKTVLDMRSMDFKSNSAVAWSNKSDFACANAFNNSIIPEDTFFPSPESSCGTQSFGLLDPKLCYLLDGILFIYGVILTALFLRSKRSRLLHSDYMNMTPRRPGPTRKHYQPYAPPRDFAAYRSRVKFSRSADAPAYQQGQNQLYNELNLGRREEYDVLDKRRGRDPEMGGKPQRRKNPQEGLYNELQKDKMAEAYSEIGMKGERRRGKGHDGLYQGLSTATKDTYDALHMQALPPR

SEQ ID NO: 19020 - protein, 931 aa, Artificial Sequence
  Synthetic Polypeptide
MALPVTALLLPLALLLHAARPSYVLTQPPSVSVAPGQTARITCGGNNIGGKSVHWYQQPPGQAPVVVVYDDSDRPSGIPERFSGSNSGNTATLTISRVEAGDEAVYYCQVWDSSSDHVVFGGGTKLTVLLEGKPIPNPLLGLDSTGSGEDLKNVFPPEVAVFEPSEAEISHTQKATLVCLATGFYPDHVELSWWVNGKEVHSGVSTDPQPLKEQPALNDSRYCLSSRLRVSATFWQNPRNHFRCQVQFYGLSENDEWTQDRAKPVTQIVSAEAWGRADCGSQSFGLLDPKLCYLLDGILFIYGVILTALFLRSKRSRLLHSDYMNMTPRRPGPTRKHYQPYAPPRDFAAYRSRVKFSRSADAPAYQQGQNQLYNELNLGRREEYDVLDKRRGRDPEMGGKPQRRKNPQEGLYNELQKDKMAEAYSEIGMKGERRRGKGHDGLYQGLSTATKDTYDALHMQALPPRRAKRSGSGATNFSLLKQAGDVEENPGPTSMDWIWRILFLVGAATGAHSFEQLQLQESGPGLVKPSETLSLTCTVSGGSISSSSYFWGWIRQPPGKGLEWIGSIYYSGITYYNPSLKSRVTISVDTSKNQFSLKLSSVTAADTAVYYCARHDGAVAGLFDYWGQGTLVTVSSATREQKLISEEDGSGIQNPDPAVYQLRDSKSSDKSVCLFTDFDSQTNVSQSKDSDVYITDKTVLDMRSMDFKSNSAVAWSNKSDFACANAFNNSIIPEDTFFPSPESSCGTQSFGLLDPKLCYLLDGILFIYGVILTALFLRSKRSRLLHSDYMNMTPRRPGPTRKHYQPYAPPRDFAAYRSRVKFSRSADAPAYQQGQNQLYNELNLGRREEYDVLDKRRGRDPEMGGKPQRRKNPQEGLYNELQKDKMAEAYSEIGMKGERRRGKGHDGLYQGLSTATKDTYDALHMQALPPR

SEQ ID NO: 19021 - protein, 892 aa, Artificial Sequence
  Synthetic Polypeptide
MALPVTALLLPLALLLHAARPSYVLTQPPSVSVAPGQTARITCGGNNIGGKSVHWYQQPPGQAPVVVVYDDSDRPSGIPERFSGSNSGNTATLTISRVEAGDEAVYYCQVWDSSSDHVVFGGGTKLTVLLEGKPIPNPLLGLDSTGSGEDLKNVFPPEVAVFEPSEAEISHTQKATLVCLATGFYPDHVELSWWVNGKEVHSGVSTDPQPLKEQPALNDSRYCLSSRLRVSATFWQNPRNHFRCQVQFYGLSENDEWTQDRAKPVTQIVSAEAWGRADCGSQSFGLLDPKLCYLLDGILFIYGVILTALFLRVKFSRSADAPAYQQGQNQLYNELNLGRREEYDVLDKRRGRDPEMGGKPQRRKNPQEGLYNELQKDKMAEAYSEIGMKGERRRGKGHDGLYQGLSTATKDTYDALHMQALPPRRAKRSGSGATNFSLLKQAGDVEENPGPTSMDWIWRILFLVGAATGAHSFEQLQLQESGPGLVKPSETLSLTCTVSGGSISSSSYFWGWIRQPPGKGLEWIGSIYYSGITYYNPSLKSRVTISVDTSKNQFSLKLSSVTAADTAVYYCARHDGAVAGLFDYWGQGTLVTVSSATREQKLISEEDLGSGIQNPDPAVYQLRDSKSSDKSVCLFTDFDSQTNVSQSKDSDVYITDKTVLDMRSMDFKSNSAVAWSNKSDFACANAFNNSIIPEDTFFPSPESSCGTQSFGLLDPKLCYLLDGILFIYGVILTALFLKRGRKKLLYIFKQPFMRPVQTTQEEDGCSCRFPEEEEGGCELRVKFSRSADAPAYQQGQNQLYNELNLGRREEYDVLDKRRGRDPEMGGKPQRRKNPQEGLYNELQKDKMAEAYSEIGMKGERRRGKGHDGLYQGLSTATKDTYDALHMQALPPR

SEQ ID NO: 19022 - protein, 934 aa, Artificial Sequence
  Synthetic Polypeptide
MALPVTALLLPLALLLHAARPSYVLTQPPSVSVAPGQTARITCGGNNIGGKSVHWYQQPPGQAPVVVVYDDSDRPSGIPERFSGSNSGNTATLTISRVEAGDEAVYYCQVWDSSSDHVVFGGGTKLTVLLEGKPIPNPLLGLDSTGSGEDLKNVFPPEVAVFEPSEAEISHTQKATLVCLATGFYPDHVELSWWVNGKEVHSGVSTDPQPLKEQPALNDSRYCLSSRLRVSATFWQNPRNHFRCQVQFYGLSENDEWTQDRAKPVTQIVSAEAWGRADCGSQSFGLLDPKLCYLLDGILFIYGVILTALFLKRGRKKLLYIFKQPFMRPVQTTQEEDGCSCRFPEEEEGGCELRVKFSRSADAPAYQQGQNQLYNELNLGRREEYDVLDKRRGRDPEMGGKPQRRKNPQEGLYNELQKDKMAEAYSEIGMKGERRRGKGHDGLYQGLSTATKDTYDALHMQALPPRRAKRSGSGATNFSLLKQAGDVEENPGPTSMDWIWRILFLVGAATGAHSFEQLQLQESGPGLVKPSETLSLTCTVSGGSISSSSYFWGWIRQPPGKGLEWIGSIYYSGITYYNPSLKSRVTISVDTSKNQFSLKLSSVTAADTAVYYCARHDGAVAGLFDYWGQGTLVTVSSATREQKLISEEDLGSGIQNPDPAVYQLRDSKSSDKSVCLFTDFDSQTNVSQSKDSDVYITDKTVLDMRSMDFKSNSAVAWSNKSDFACANAFNNSIIPEDTFFPSPESSCGTQSFGLLDPKLCYLLDGILFIYGVILTALFLKRGRKKLLYIFKQPFMRPVQTTQEEDGCSCRFPEEEEGGCELRVKFSRSADAPAYQQGQNQLYNELNLGRREEYDVLDKRRGRDPEMGGKPQRRKNPQEGLYNELQKDKMAEAYSEIGMKGERRRGKGHDGLYQGLSTATKDTYDALHMQALPPR

SEQ ID NO: 19023 - protein, 824 aa, Artificial Sequence
  Synthetic Polypeptide
MALPVTALLLPLALLLHAARPSYVLTQPPSVSVAPGQTARITCGGNNIGGKSVHWYQQPPGQAPVVVVYDDSDRPSGIPERFSGSNSGNTATLTISRVEAGDEAVYYCQVWDSSSDHVVFGGGTKLTVLLEQSFGLLDPKLCYLLDGILFIYGVILTALFLRVKFSRSADAPAYQQGQNQLYNELNLGRREEYDVLDKRRGRDPEMGGKPQRRKNPQEGLYNELQKDKMAEAYSEIGMKGERRRGKGHDGLYQGLSTATKDTYDALHMQALPPRRAKRSGSGATNFSLLKQAGDVEENPGPTSMDWIWRILFLVGAATGAHSFEQLQLQESGPGLVKPSETLSLTCTVSGGSISSSSYFWGWIRQPPGKGLEWIGSIYYSGITYYNPSLKSRVTISVDTSKNQFSLKLSSVTAADTAVYYCARHDGAVAGLFDYWGQGTLVTVSSATRQSFGLLDPKLCYLLDGILFIYGVILTALFLRVKFSRSADAPAYQQGQNQLYNELNLGRREEYDVLDKRRGRDPEMGGKPQRRKNPQEGLYNELQKDKMAEAYSEIGMKGERRRGKGHDGLYQGLSTATKDTYDALHMQALPPRRAKRSGSGVKQTLNFDLLKLAGDVESNPGPSRGHMTEYKPTVRLATRDDVPRAVRTLAAAFADYPATRHTVDPDRHIERVTELQELFLTRVGLDIGKVWVADDGAAVAVWTTPESVEAGAVFAEIGPRMAELSGSRLAAQQQMEGLLAPHRPKEPAWFLATVGVSPDHQGKGLGSAVVLPGVEAAERAGVPAFLETSAPRNLPFYERLGFTVTADVEVPEGPRTWCMTRKPGA

SEQ ID NO: 19024 - protein, 649 aa, Artificial Sequence
  Synthetic Polypeptide
MALPVTALLLPLALLLHAARPSYVLTQPPSVSVAPGQTARITCGGNNIGGKSVHWYQQPPGQAPVVVVYDDSDRPSGIPERFSGSNSGNTATLTISRVEAGDEAVYYCQVWDSSSDHVVFGGGTKLTVLLEGQPKANPTVTLFPPSSEELQANKATLVCLISDFYPGAVTVAWKADGSPVKAGVETTKPSKQSNNKYAASSYLSLTPEQWKSHRSYSCQVTHEGSTVEKTVAPTECSPIKTDVITMDPKDNCSKDANDTLLLQLTNTSAYYMYLLLLLKSVVYFAIITCCLLRRTAFCCNGEKSRAKRSGSGATNFSLLKQAGDVEENPGPTSMDWIWRILFLVGAATGAHSFEQLQLQESGPGLVKPSETLSLTCTVSGGSISSSSYFWGWIRQPPGKGLEWIGSIYYSGITYYNPSLKSRVTISVDTSKNQFSLKLSSVTAADTAVYYCARHDGAVAGLFDYWGQGTLVTVSSATRASTKGPSVFPLAPSSKSTSGGTAALGCLVKDYFPEPVTVSWNSGALTSGVHTFPAVLQSSGLYSLSSVVTVPSSSLGTQTYICNVNHKPSNTKVDKRVEPKSCEVKTDSTDHVKPKETENTKQPSKSCHKPKAIVHTEKVNMMSLTVLGLRMLFAKTVAVNFLLTAKLFFL

SEQ ID NO: 19025 - protein, 627 aa, Artificial Sequence
  Synthetic Polypeptide
MALPVTALLLPLALLLHAARPSYVLTQPPSVSVAPGQTARITCGGNNIGGKSVHWYQQPPGQAPVVVVYDDSDRPSGIPERFSGSNSGNTATLTISRVEAGDEAVYYCQVWDSSSDHVVFGGGTKLTVLLEGQPKANPTVTLFPPSSEELQANKATLVCLISDFYPGAVTVAWKADGSPVKAGVETTKPSKQSNNKYAASSYLSLTPEQWKSHRSYSCQVTHEGSTVEKTVAPTECSGRADCGITSASYHQGVLSATILYEILLGKATLYAVLVSALVLMAMVKRKDSRGRAKRSGSGATNFSLLKQAGDVEENPGPTSMDWIWRILFLVGAATGAHSFEQLQLQESGPGLVKPSETLSLTCTVSGGSISSSSYFWGWIRQPPGKGLEWIGSIYYSGITYYNPSLKSRVTISVDTSKNQFSLKLSSVTAADTAVYYCARHDGAVAGLFDYWGQGTLVTVSSATRASTKGPSVFPLAPSSKSTSGGTAALGCLVKDYFPEPVTVSWNSGALTSGVHTFPAVLQSSGLYSLSSVVTVPSSSLGTQTYICNVNHKPSNTKVDKRVEPKSCIPEDTFFPSSDVPCDVKLVEKSFETDTNLNFQNLSVIGFRILLLKVAGFNLLMTLRLWSS

SEQ ID NO: 19026 - protein, 627 aa, Artificial Sequence
  Synthetic Polypeptide
MALPVTALLLPLALLLHAARPSYVLTQPPSVSVAPGQTARITCGGNNIGGKSVHWYQQPPGQAPVVVVYDDSDRPSGIPERFSGSNSGNTATLTISRVEAGDEAVYYCQVWDSSSDHVVFGGGTKLTVLLEGQPKANPTVTLFPPSSEELQANKATLVCLISDFYPGAVTVAWKADGSPVKAGVETTKPSKQSNNKYAASSYLSLTPEQWKSHRSYSCQVTHEGSTVEKTVAPTECSGRADCGFTSESYQQGVLSATILYEILLGKATLYAVLVSALVLMAMVKRKDSRGRAKRSGSGATNFSLLKQAGDVEENPGPTSMDWIWRILFLVGAATGAHSFEQLQLQESGPGLVKPSETLSLTCTVSGGSISSSSYFWGWIRQPPGKGLEWIGSIYYSGITYYNPSLKSRVTISVDTSKNQFSLKLSSVTAADTAVYYCARHDGAVAGLFDYWGQGTLVTVSSATRASTKGPSVFPLAPSSKSTSGGTAALGCLVKDYFPEPVTVSWNSGALTSGVHTFPAVLQSSGLYSLSSVVTVPSSSLGTQTYICNVNHKPSNTKVDKRVEPKSCIPEDTFFPSPESSCDVKLVEKSFETDTNLNFQNLSVIGFRILLLKVAGFNLLMTLRLWSS

SEQ ID NO: 19027 - protein, 453 aa, Artificial Sequence
  Synthetic Polypeptide
MALPVTALLLPLALLLHAARPSYVLTQPPSVSVAPGQTARITCGGNNIGGKSVHWYQQPPGQAPVVVVYDDSDRPSGIPERFSGSNSGNTATLTISRVEAGDEAVYYCQVWDSSSDHVVFGGGTKLTVLGGGGSGGGGSGGGGSQLQLQESGPGLVKPSETLSLTCTVSGGSISSSSYFWGWIRQPPGKGLEWIGSIYYSGITYYNPSLKSRVTISVDTSKNQFSLKLSSVTAADTAVYYCARHDGAVAGLFDYWGQGTLVTVSSATRDGNEEMGGITQTPYKVSISGTTVILTCPQYPGSEILWQHNDKNIGGDEDDKNIGSDEDHLSLKEFSELEQSGYYVCYPRGSKPEDANFYLYLRARVCENCMEMDVMSVATIVIVDICITGGLLLLVYYWSKNRKAKAKPVTRGAGAGGRQRGQNKERPPPVPNPDYEPIRKGQRDLYSGLNQRRI

SEQ ID NO: 19028 - protein, 418 aa, Artificial Sequence
  Synthetic Polypeptide
MALPVTALLLPLALLLHAARPSYVLTQPPSVSVAPGQTARITCGGNNIGGKSVHWYQQPPGQAPVVVVYDDSDRPSGIPERFSGSNSGNTATLTISRVEAGDEAVYYCQVWDSSSDHVVFGGGTKLTVLGGGGSGGGGSGGGGSQLQLQESGPGLVKPSETLSLTCTVSGGSISSSSYFWGWIRQPPGKGLEWIGSIYYSGITYYNPSLKSRVTISVDTSKNQFSLKLSSVTAADTAVYYCARHDGAVAGLFDYWGQGTLVTVSSATRFKIPIEELEDRVFVNCNTSITWVEGTVGTLLSDITRLDLGKRILDPRGIYRCNGTDIYKDKESTVQVHYRMCQSCVELDPATVAGIIVTDVIATLLLALGVFCFAGHETGRLSGAADTQALLRNDQVYQPLRDRDDAQYSHLGGNWARNK

SEQ ID NO: 19029 - protein, 428 aa, Artificial Sequence
  Synthetic Polypeptide
MALPVTALLLPLALLLHAARPSYVLTQPPSVSVAPGQTARITCGGNNIGGKSVHWYQQPPGQAPVVVVYDDSDRPSGIPERFSGSNSGNTATLTISRVEAGDEAVYYCQVWDSSSDHVVFGGGTKLTVLGGGGSGGGGSGGGGSQLQLQESGPGLVKPSETLSLTCTVSGGSISSSSYFWGWIRQPPGKGLEWIGSIYYSGITYYNPSLKSRVTISVDTSKNQFSLKLSSVTAADTAVYYCARHDGAVAGLFDYWGQGTLVTVSSATRQSIKGNHLVKVYDYQEDGSVLLTCDAEAKNITWFKDGKMIGFLTEDKKKWNLGSNAKDPRGMYQCKGSQNKSKPLQVYYRMCQNCIELNAATISGFLFAEIVSIFVLAVGVYFIAGQDGVRQSRASDKQTLLPNDQLYQPLKDREDDQYSHLQGNQLRRN

SEQ ID NO: 19030 - protein, 411 aa, Artificial Sequence
  Synthetic Polypeptide
MALPVTALLLPLALLLHAARPSYVLTQPPSVSVAPGQTARITCGGNNIGGKSVHWYQQPPGQAPVVVVYDDSDRPSGIPERFSGSNSGNTATLTISRVEAGDEAVYYCQVWDSSSDHVVFGGGTKLTVLGGGGSGGGGSGGGGSQLQLQESGPGLVKPSETLSLTCTVSGGSISSSSYFWGWIRQPPGKGLEWIGSIYYSGITYYNPSLKSRVTISVDTSKNQFSLKLSSVTAADTAVYYCARHDGAVAGLFDYWGQGTLVTVSSATRQSFGLLDPKLCYLLDGILFIYGVILTALFLRVKFSRSADAPAYQQGQNQLYNELNLGRREEYDVLDKRRGRDPEMGGKPQRRKNPQEGLYNELQKDKMAEAYSEIGMKGERRRGKGHDGLYQGLSTATKDTYDALHMQALPPR

SEQ ID NO: 19031 - protein, 453 aa, Artificial Sequence
  Synthetic Polypeptide
MALPVTALLLPLALLLHAARPQLQLQESGPGLVKPSETLSLTCTVSGGSISSSSYFWGWIRQPPGKGLEWIGSIYYSGITYYNPSLKSRVTISVDTSKNQFSLKLSSVTAADTAVYYCARHDGAVAGLFDYWGQGTLVTVSSAGGGGSGGGGSGGGGSSYVLTQPPSVSVAPGQTARITCGGNNIGGKSVHWYQQPPGQAPVVVVYDDSDRPSGIPERFSGSNSGNTATLTISRVEAGDEAVYYCQVWDSSSDHVVFGGGTKLTVLTRDGNEEMGGITQTPYKVSISGTTVILTCPQYPGSEILWQHNDKNIGGDEDDKNIGSDEDHLSLKEFSELEQSGYYVCYPRGSKPEDANFYLYLRARVCENCMEMDVMSVATIVIVDICITGGLLLLVYYWSKNRKAKAKPVTRGAGAGGRQRGQNKERPPPVPNPDYEPIRKGQRDLYSGLNQRRI

SEQ ID NO: 19032 - protein, 418 aa, Artificial Sequence
  Synthetic Polypeptide
MALPVTALLLPLALLLHAARPQLQLQESGPGLVKPSETLSLTCTVSGGSISSSSYFWGWIRQPPGKGLEWIGSIYYSGITYYNPSLKSRVTISVDTSKNQFSLKLSSVTAADTAVYYCARHDGAVAGLFDYWGQGTLVTVSSAGGGGSGGGGSGGGGSSYVLTQPPSVSVAPGQTARITCGGNNIGGKSVHWYQQPPGQAPVVVVYDDSDRPSGIPERFSGSNSGNTATLTISRVEAGDEAVYYCQVWDSSSDHVVFGGGTKLTVLTRFKIPIEELEDRVFVNCNTSITWVEGTVGTLLSDITRLDLGKRILDPRGIYRCNGTDIYKDKESTVQVHYRMCQSCVELDPATVAGIIVTDVIATLLLALGVFCFAGHETGRLSGAADTQALLRNDQVYQPLRDRDDAQYSHLGGNWARNK

SEQ ID NO: 19033 - protein, 428 aa, Artificial Sequence
  Synthetic Polypeptide
MALPVTALLLPLALLLHAARPQLQLQESGPGLVKPSETLSLTCTVSGGSISSSSYFWGWIRQPPGKGLEWIGSIYYSGITYYNPSLKSRVTISVDTSKNQFSLKLSSVTAADTAVYYCARHDGAVAGLFDYWGQGTLVTVSSAGGGGSGGGGSGGGGSSYVLTQPPSVSVAPGQTARITCGGNNIGGKSVHWYQQPPGQAPVVVVYDDSDRPSGIPERFSGSNSGNTATLTISRVEAGDEAVYYCQVWDSSSDHVVFGGGTKLTVLTRQSIKGNHLVKVYDYQEDGSVLLTCDAEAKNITWFKDGKMIGFLTEDKKKWNLGSNAKDPRGMYQCKGSQNKSKPLQVYYRMCQNCIELNAATISGFLFAEIVSIFVLAVGVYFIAGQDGVRQSRASDKQTLLPNDQLYQPLKDREDDQYSHLQGNQLRRN

SEQ ID NO: 19034 - protein, 411 aa, Artificial Sequence
  Synthetic Polypeptide
MALPVTALLLPLALLLHAARPQLQLQESGPGLVKPSETLSLTCTVSGGSISSSSYFWGWIRQPPGKGLEWIGSIYYSGITYYNPSLKSRVTISVDTSKNQFSLKLSSVTAADTAVYYCARHDGAVAGLFDYWGQGTLVTVSSAGGGGSGGGGSGGGGSSYVLTQPPSVSVAPGQTARITCGGNNIGGKSVHWYQQPPGQAPVVVVYDDSDRPSGIPERFSGSNSGNTATLTISRVEAGDEAVYYCQVWDSSSDHVVFGGGTKLTVLTRQSFGLLDPKLCYLLDGILFIYGVILTALFLRVKFSRSADAPAYQQGQNQLYNELNLGRREEYDVLDKRRGRDPEMGGKPQRRKNPQEGLYNELQKDKMAEAYSEIGMKGERRRGKGHDGLYQGLSTATKDTYDALHMQALPPR

SEQ ID NO: 19035 - protein, 644 aa, Artificial Sequence
  Synthetic Polypeptide
MALPVTALLLPLALLLHAARPSYVLTQPPSVSVAPGQTARITCGGNNIGGKSVHWYQQPPGQAPVVVVYDDSDRPSGIPERFSGSNSGNTATLTISRVEAGDEAVYYCQVWDSSSDHVVFGGGTKLTVLGGGGSGGGGSGGGGSQLQLQESGPGLVKPSETLSLTCTVSGGSISSSSYFWGWIRQPPGKGLEWIGSIYYSGITYYNPSLKSRVTISVDTSKNQFSLKLSSVTAADTAVYYCARHDGAVAGLFDYWGQGTLVTVSSATRGSGIQNPDPAVYQLRDSKSSDKSVCLFTDFDSQTNVSQSKDSDVYITDKTVLDMRSMDFKSNSAVAWSNKSDFACANAFNNSIIPEDTFFPSPESSCDVKLVEKSFETDTNLNFQNLSVIGFRILLLKVAGFNLLMTLRLWSSRAKRSGSGVKQTLNFDLLKLAGDVESNPGPSRGHMTEYKPTVRLATRDDVPRAVRTLAAAFADYPATRHTVDPDRHIERVTELQELFLTRVGLDIGKVWVADDGAAVAVWTTPESVEAGAVFAEIGPRMAELSGSRLAAQQQMEGLLAPHRPKEPAWFLATVGVSPDHQGKGLGSAVVLPGVEAAERAGVPAFLETSAPRNLPFYERLGFTVTADVEVPEGPRTWCMTRKPGA

SEQ ID NO: 19036 - protein, 676 aa, Artificial Sequence
  Synthetic Polypeptide
MALPVTALLLPLALLLHAARPSYVLTQPPSVSVAPGQTARITCGGNNIGGKSVHWYQQPPGQAPVVVVYDDSDRPSGIPERFSGSNSGNTATLTISRVEAGDEAVYYCQVWDSSSDHVVFGGGTKLTVLGGGGSGGGGSGGGGSQLQLQESGPGLVKPSETLSLTCTVSGGSISSSSYFWGWIRQPPGKGLEWIGSIYYSGITYYNPSLKSRVTISVDTSKNQFSLKLSSVTAADTAVYYCARHDGAVAGLFDYWGQGTLVTVSSALEDLKNVFPPEVAVFEPSEAEISHTQKATLVCLATGFYPDHVELSWWVNGKEVHSGVSTDPQPLKEQPALNDSRYCLSSRLRVSATFWQNPRNHFRCQVQFYGLSENDEWTQDRAKPVTQIVSAEAWGRADCGFTSESYQQGVLSATILYEILLGKATLYAVLVSALVLMAMVKRKDSRGRAKRSGSGATNFSLLKQAGDVEENPGPTRGHMTEYKPTVRLATRDDVPRAVRTLAAAFADYPATRHTVDPDRHIERVTELQELFLTRVGLDIGKVWVADDGAAVAVWTTPESVEAGAVFAEIGPRMAELSGSRLAAQQQMEGLLAPHRPKEPAWFLATVGVSPDHQGKGLGSAVVLPGVEAAERAGVPAFLETSAPRNLPFYERLGFTVTADVEVPEGPRTWCMTRKPGA
